United States Patent Application Publication US 2004/0031072 A1 - sequence listing, part 18

SEQ ID NO: 81008 - DNA, 957 bp, Glycine max
  Clone ID: PAT_MRT3847_44166C.1
caggaaactccaactcatttgtttttacacctttctggctccattggctttcgccaaagtccatatccatctatatatatttgcacaattgttcaactatccttatctctctctctctctctctcaccactaagtttattagtattattatcactagctacctgctatcaaagcatcacaaatggcttctacagacaagcctggcggcgaccctgaatacagaacatcttcaactccagctcctgctggtgttgattactttaaatttgatgtcatcctaaggtttctattgtttgcagcatcactggtagctgttgtggtgatcgtcactgctaatcaaacagaggttattcgtgttccacagcctgtgccatggccagccaagttcagatactcaccagcctttgtttattttgtagctgcattgtccgttactggcctctacagtatcattacaacacttgcatcactctttgccagtaacaagccagccctcaaaaccaagttgctcctctactttatcttatgggatgcgctgatattggggataatagcctcagcaacaggcacagctgggggtgtagcatatttgggtttgaagggaaacagacacgtggtgggttggaataaaatttgccatgtttacgacaagttctgtaggcatgttggtgcctccatagcagtggctttgtttggaagcgttgtgacagtcttgctcatttggctttcagcttacagcattcatagccgagtccccaagtagatggaaggaacatggatcatgcattctgcatatttatgcatacatcttcatttattgtttataaagttagtgtgctcagtaattgttaagagtgtgtagatgacttaatgtattgcttcagtttatttacaaaaaaattaatccaataaatcattctttttcaccatgctattcatcttctcttctcaaactaa

SEQ ID NO: 81009 - DNA, 470 bp, Glycine max
  Clone ID: PAT_MRT3847_44167C.1
ttcgggcataaaagttctaaaaaaaagaaagtaaaatctaaatcactacgatagttgctcagcagtgaaggaaaagaaagcatcccagttttgaccaagtcagtgttgacaagaaaatgatgggcatctccgtcactgtattcatcctgaactacctcccaccctaattgccgtagcatgctcaatcacaaagctgaactaatttattagcatgagaaatgcttcagaaattctctgctattctttatcctctttggtatgctttgaaggaagctgtatagctttgtgggaaaaaattaagaaaattatgagttgaaattgtcaaattgatccgaattgaatttgttcttagttttctatcttgctgaatttattggctaacaattttgtagtgagtagacaaatagtagttggatttgattgctcatgagccaaaatttgaatattttggtgaagcaaggagtattagg

SEQ ID NO: 81010 - DNA, 446 bp, Glycine max
  Clone ID: PAT_MRT3847_44168C.1
gaccgggctgggcatcaactacgccggttatgtgatccacagcgccatccatgctgcccgtcctgacctgcaagcggtgttgcacacccatacccgcgacggcattgcggtgtcggcacagaagagtgggttgttgccgatttcccaacactccatcggcttttccgggcgggtggcttaccacggctatgagggcgtggccctggacctggatgagcgtgagcgcctggtggcggacctgggggacaagagcgtgatgatcctgcgcaaccatggcttgttgacggcggggatcagtgtcgagcatgcgttccagcaactgcagggcctggagcgggcgtgcaatattcagatcgcggcgcaggcggcggggaatgccgaactgatttttccgccggccgaggtggtggccaaggttgagaagcaggccgaggtgttcaagagcg

SEQ ID NO: 81011 - DNA, 492 bp, Glycine max
  Clone ID: PAT_MRT3847_44169C.1
ttttttttttttttttttttttttttttttttttttttttttttttttttttttttttttttttttttttttttttcccccccccaaggaacaggacaatttaatattttattattaacccccaaaaccggcttttttttgttcaagacgggaaaaaccccttaaattttgggctttgcaccaaccggaaaacggggggagggaataaaaaaaaacatggaacacccctggccggttgggggccccacccaacaggggcccaccctttgtcccaatcaagggggaaaaggggggggggcccaatccctcctaaaaaaggcttaactgttcttttccttccaagggggaaaaacctgcgggttttgctcagggcttccaaaaaaggggggggtctgcaatcagggaaaaaaccccgtgggggcccatgggggaagggggcctttggcccaaaaaaaaacccttcccgggtttctggggggcccccccaaccct

SEQ ID NO: 81012 - DNA, 380 bp, Glycine max
  Clone ID: PAT_MRT3847_4416C.1
ggtacgcttttgtgtgcgtgccactaccaatggtgattttgttcaaggaaaagctctttccatggctagaggctatgcagcatgtgctgttgttgatttgagatcatggtactctccgactccattgttggaatctgctttgccaaaggacagatggtgaaccgtggcgtacttcgaaaggacgtctgacgtggacaggaacgataacattccatatgagacagacttgtcttggggagatttgtaggttggtgatcaatctcggtgtagattggaaaaagtttcctctacaaaagcacaatttgttagtggaaaaaccttcaaatatgatataatttggtgctgggtcacattctttagaagattttcctgcaaaggaa

SEQ ID NO: 81013 - DNA, 149 bp, Glycine max
  Clone ID: PAT_MRT3847_44170C.1
ggatctagcattatgttaaataataggggatctataatgaataatcatatgacatatttgcataattctaatgggcatttatttatgacaaagatgctaatagttctgctttgaattttcagatgcctttccattgagcttaatagctc

SEQ ID NO: 81014 - DNA, 242 bp, Glycine max
  Clone ID: PAT_MRT3847_44171C.1
gcaattcttgtaggatgatgatgtgaatgttactcgtttcttggtccttgccagcaacaacaaacatgtttttgttttatatttttttgtgaaatatccaatgtaagcatgacttgaaagttgacatgttgaggcaagccattattacatagaagaacactaaatatgattgatgtaatccaatactattgtaaagttgctgctatcttaatgcagaatcatgcataatacccattactact

SEQ ID NO: 81015 - DNA, 434 bp, Glycine max
  Clone ID: PAT_MRT3847_44172C.1
gaccgactcgtccgcaaacgctcatccaaaattgcatcattaaatttaacgctacccaacacaccacattgagtatcgcttcattcccatgcgttcctgtctctgcactccaaatgtcaaacccaatcgaaacatccactgccaacgaccgacaatttcacgccgttcacatgaccatctcctactctcatgtcctgaataccctgttgcccatcctccttccgagcactgttcaccttactcctccattaatgcttacccttccagcagctcccactccgttaaaccttacaattgcatcgataacatcggctatgcacagcttccgataatccatactgctaattgccacatcacccattactaacacttttattaccacttgattaccttccccccaaaaatttttttgcacatctatacaagtcttaata

SEQ ID NO: 81016 - DNA, 1269 bp, Glycine max
  Clone ID: PAT_MRT3847_44173C.1
attttgcaaatacatatatataaacatacaaatccatattgtgtgcattcatttacctaatgagggtggcagatagtgttgtactgttggaaattccattacctcagctggtagaatcaattatatttacctatacctgtcatcaaaatctttataaactcagctgatatttttttctgaactttccacctatattttctgctcttgcagtcctttcactccacttagaggcattcctcttgatatcttcatttttttcctccatccataatctcttatacactccagttctttgcctgttatcacctggttcactttgtaacccttctagaatccttcacaacccctccccttccccctcaatttctctggtttgtttaactatgctagttcccatgcctccaaatgatgcatatatgaaggaccttggtgaagtctgcagcgatctgaagtagtttttgcttgcctttttccagaagttggctccatgagatgtgtcacctgaggttggttggcacaggaaagcagatgaaaatatgaaaatgaaaccattggcctgactggtatgagtggccatagactttccaaggccttcaatagctaccaactaaaggtgttcattggattggattgacctgataatccggacaatccaaatcaaactaaaacaattaaaattgattcagattggctcggttaattgaaccaaactattttacaatcttgacttgctgtgggaaaaagaaaaaaatttgcaagctcactaattcattcatcttttttcacggaaaactgcactattcaccaaggatttggctcctctacagtgaggtgctctttagaaaataaagtgcaataataaccgttaattaaaaaaatcaactgttatttttgtactttatcctctaagtgcactcttctcactttagaggagtcaaatccattcagcaaatttaactctttgaacttgtcatattctatctgaatcaacagagatacaactctttggactattgaattgcttaactgcaaaatcagacagaaatataacactcggataaggctgcaactgtacgagacaggaaataaggtgtactagtgatcgttatcgaatttaaaagcaacaaactaaagtggctttgaagaacaaacaattcggatcaatattgctcatactgcattggaagatcaagcattcatggtcccctcgctgctgacatttccttgtcagcaatggcacaagttcctctgcctctgtttggaaccatc

SEQ ID NO: 81017 - DNA, 1402 bp, Glycine max
  Clone ID: PAT_MRT3847_44174C.1
gatttcgccacgaggaatatcaataattttattttattttattttgtagttgcattgaatacttaatttcagctcttcatcacccgcacacgtttcacaaaattattttcacgggaattggccatttgaatggcacagttattgtctccagtgtacacagagcctctcaaatcgaatttaagttccataagctcatggaggatactaccaaagactgcaactccttcgaactttgtaacacacaatggcaaacgaagagggtgtggcagggtaagagttgctgctgaggaaaaatcattttctacgagtgacactgttgcagatgactactatgcagttttgggtctgcttccagatgccactccagcgcagatcaagaaggcctactacaattgcatgaaagcttgccacccagacttgagtgacaatgatcctgaggcaaccaatttctgcacgttcatcaatgaagtctatggggtgctaagtgatcccattcagcgcatgatttatgatgacattcatgggtattctttgacttcaatcaatccttttctggacgattctagtccaaaagatcatgtttttgttgatgaatttagctgcataggttgcaaaaattgtgccaatgtagcctgtgatgtttttggaatagaagaagaatttggaagagccagagtgtacagccaatgcgggaagcctgaattagttcaacaggctattgatagttgccctgtggactgcattcattggacatcagctgcacagctatcattgcttgaagatgaaatgcgccgcgtagaaagagtcaatgttgccctaatgctttctggaatgggatcagcaggaactgatgttttcagaatggcaagttcccgatgggaaaagaggcaggcaaaagtcttggaacaagcaaaattgagaatgatgaaggagaagggttctgataaaacagatatgttctggaacaatctatggggcaaaccaaaagacttaagttcagaggaggaaatcaaagaaagagcaaaaagggctgctgctgccgctagaagatggagggaatactcaagaagaggtgttgataagcctcccacatttaaacttccagagacagcctccaccaaggactagtgaccagtattttccccacagtccttcctacaccttctatagctatagcatcatgtcccatgtaattaattcatccatagcctctcataagtttatttctcatttaacaatccaccattgtatattctgcaacactaattactgtaaaaataatacagatgatttgtagtaaatacagggataaataaaagaaggctaaattcaatgtgatgaaaaaaaaaaaaaaaaaaaaaaaaaaaaaaaaaaaaaaaaaaaaaaaaaaaaaaaaaaaaaa

SEQ ID NO: 81018 - DNA, 260 bp, Glycine max
  Clone ID: PAT_MRT3847_44175C.1
tttcatagaaaaagcttaacgtttccaaggataaatcgtgtgacaaataatatttgtacattgaatttccaaatgactgcctagaaacatagaggggaaagtattagacttatactaaacaacgtttctccacagcacgagatagtgcatactccaggaggcctcatgacaagctgctcttgcaaccatcagatgccacccttttacaacaaaattagtagcagccttggccaggacttcgttatggctatacactggac

SEQ ID NO: 81019 - DNA, 543 bp, Glycine max
  Clone ID: PAT_MRT3847_44176C.1
tgaatcttcaggtgaatttgggacaacacggacattatggtctgagttatctagaggacaaggagaagagataggaagaacctcctggagagacgaagagtggtccacggaggatgagaagaagggtgtgtcttcaaaaaaggtgacatctgcagacatatagttccgtctcatggtgggagagtagcatttgtaacctttttgaagacgagaataacccaaaaagacgcatttgactgaccttgcagaaagtttgtctaaaccaggagacaaatcatggacaaagcaagtacaaccaaacactttaggagagacatggaatagtggatcatgaggaaagacaattgagtgagggatttggttttcaagagaagaagagggcattctattaattaggaaacaagcagtaagcactgcatctccccaatgatgcgtaggaacattagaatttagcattagggaacgtgcagtttcaagaagatgatgattcttcctttctgctataccattttgttgtggtgtgtgaggacatgtggactgatg

SEQ ID NO: 81020 - DNA, 376 bp, Glycine max
  Clone ID: PAT_MRT3847_44177C.1
ctgttcgccttttcgtgactttctcaaactccatacaacacactgcttctgcttttattttcctttctttctcctttcctttcctttcctttctctccattttccccgtaccaccattaaaaccactcccaaacacactcacacagacactcaaacgaaaccctcgtcgcaatggcggaggaggaaaaacacgagcagctccaagaagagcaagaccctcacaagctcttccgctcctacataggcctgagcttctccatgttcctcgcaatgctggccaacaactccgtcccggcgctgcagggcaaggtacgctcactctccctgcgcgcggcggatgcggccgaggagctccggcagatgaagtcgcggcggc

SEQ ID NO: 81021 - DNA, 445 bp, Glycine max
  unsure (1)..(445): unsure at all n locations
  Clone ID: PAT_MRT3847_44178C.1
cccctcaaaccttttcaaaccaaaaaaaaaataatacaaagcctctctctgcaagaacaacacaaacgcaataaacgccccttcatttttcattatcattcccttaaaccgcaacctcaaacaacaacaacaaaagaacaacattttggcattccgttacctcatccgacgtcgttttggcattccgttagcggcgccagtatgtcgtccggcggccccaccacgacctcctccaacaccagcccaagggtcgccgcgggccccaccaccactcgccgtcgcgtcgccgacaacaacaacaacatcgtagacgccgaaaaacagcagcaagttacctcaagcttctccgatttctccgaggtcgaagccgacgagaatgtcccccacccccacccccttcacgcccacgcacaccancaccatgtgcatnccgtcacgcgatacc

SEQ ID NO: 81022 - DNA, 712 bp, Glycine max
  Clone ID: PAT_MRT3847_44179C.1
atttttttcggcgtggcgtcgtctggttttgctctgtcatagttacaatctgggtgctagttgatagttgcattttgtaggttggaaatgaaagtgagggttgtttgcaggaaaatttacgactacatacgctatgatctcaaagaaatctctttcccctcttctttgccagaccctcctaacatcaaaaagcgtcgcatattgacctgggaccaacgtatctgggttttgaagagagctgcccggctttatgctgcaagctgggttcgtgacattggtcctgaccttcggcctgatgattataagaaggatgatgacatgactgatgaaacaaatggtgaaaagaaaacaactaaaggaaaagaatcctcaacactggaggaccttgctgtagctgcaagagggggaatggagactctcagaccggctttgcagcgtgtgtacatgaccagagcatctgcatacagagatgctcttaaaagtttcatagaagggtatcaagagggtgttcagcaagtaatggagaacaaggaagattccaaacctcaagaagatgctgatctacccaaaaaaatcaacttgaacttgcttgtaggaggcagggtgttattttttctcttgcagacctttagtcatttagactcaggcatgaagatttgagaaattagagacagtcctcttgattaaaaggtcttaatgtacattgcactga

SEQ ID NO: 81023 - DNA, 373 bp, Glycine max
  Clone ID: PAT_MRT3847_4417C.1
tacggctgtgagatgacaacagacgggtacgggtgccaaaacacgacagaagggggcacttcaatcgcagtcaacttagttcattctctttgcgcagctccctacctctactttgacgatgcagatcttcgtcaagaccctgaccggagagaccatcacccttgacgcggaaagctctgacaccatctgacaacgtctaggcctagatccaggacaaggaacgaattacctcggatcatcaactgctcatcttcaccggaaagcagcttgaggacggtcgtaccctcatctactactacatccagaatgagtcaacccttcaccttgtccttcgtctccgtggcggcatgcacatcttccacaagactctcac

SEQ ID NO: 81024 - DNA, 146 bp, Glycine max
  Clone ID: PAT_MRT3847_44180C.1
ggaacccttgggctggatttatgtgcgttgcgtgcagaagatgcatagacaggggaccgtcctctaagaatctcttccgtctgaaagtgaactcataggagtcatcggaagttccgcaaagcacgggcttacgagcccgcaacacg

SEQ ID NO: 81025 - DNA, 460 bp, Glycine max
  Clone ID: PAT_MRT3847_44181C.1
agatatggccattggaaattcctttgcaccccattggcttccgcttgggaatagagaattcccttattccgttgatggacctgaaatattggatgcttataaacactgtggttcattaattgtgtctccttgttaccccaacatacgcaggatttccacaatactctgctctacacgctttgtaagagactctgtggaaaggggttgtggacacttaaaagaagctccgtgggcctctaatgcgcacacctcagaatatcttactcactcgtgctatattatcgtgtgcacatcttggtctctatacgctggtgtatattggacactatattcttgtgggctctttattgtgcaccgtacatctatacgcagagtgtatatcacatctgaaagaaccccagagtatgatgagatggagaatactcctaaggacgcttatgtgagaactatcacacagcgt

SEQ ID NO: 81026 - DNA, 684 bp, Glycine max
  unsure (1)..(684): unsure at all n locations
  Clone ID: PAT_MRT3847_44182C.1
cacatcataaattctttgttatttctatacagcaagacatcaagttacaattaaattaatctacacagtcaatgcaaaataacaaataaatggttttggtttcaatcttgaattctgattcttttgaaataaaaagaagcaactttttttttacagagtctagaccatcaaatgcacattacaagcaatcctataataccatgagaggtgcttgttggttaatgtatcactctccctctgaacctttacctaacaaagtcatcaaaaaatctctgtagttccctgaggtatccccaataacatcatcatcaagactggtcttgtacacattagcatattcaaatctgactttcaacaggtcgatttcggctcgagttacaatagctctgttgagggaatcttcatcggttccaaacccaacaatagaatctcttacaacctttgcaaaatgtttctcaggacagtctatacaccatatcaccatatgtaagagagattccaaatcaccattaccacattttatgtcctgtcaagaaaatcatccaaacttcttatggatacataaaataatcatgtgtgtngtggatatctaatccactataaatgtaaatttttaaactattaacgaacaagatattgtcgcatcatttgtagtaactaaagctttttactttttaggttaaa

SEQ ID NO: 81027 - DNA, 241 bp, Glycine max
  Clone ID: PAT_MRT3847_44183C.1
tacggcgaatgtgcccgacttatctgaccgcgatatgcgagtttatccaaactagaatatgattttcatcatcaactttattgctaccaacgatttgatcgcatggtcatgctatggctcatgctaccaaactatcccatttcccattacaaccgcctatggcgaccgttcatctgccgttaaatgctcatgatccatgcctacttcggaaacacacatcccgttagccattacacccctt

SEQ ID NO: 81028 - DNA, 265 bp, Glycine max
  unsure (1)..(265): unsure at all n locations
  Clone ID: PAT_MRT3847_44184C.1
agcaaaaggccatataattttnttttatttgnnataatgtccgggatcatccacaagattgaggagaccctccatgtgggngggcacaanaangnggagcacannggagaacaccatggtgagcacanaggtgaacacaaaggagancaccatggtgancacaaaggtgancacaaaggngaacnncaccatggggagcacaaggngggacttgtggataagattcaggacaagatccatggtgatggcctgcacaaggtgagaa

SEQ ID NO: 81029 - DNA, 401 bp, Glycine max
  Clone ID: PAT_MRT3847_44185C.1
gactaatacattgaagacacgcagacgggatttggcggatgttttgataaataggggagtaaatttggatcctttaagcaagtggtcaaaggttggacttgttgtgtatgattctcaagtgcctattggtgccactccggagtatatggctggtttctacatgctgcaaagtgcaagctcttttctgcctgttatggctttggctcctcaagagaaggaacgtgtcattgatatggcagctgcacctggtggtaaaacaacttacattgctgctctaatgaagaatactggaataatatttgcaaatgaaatgaaggtaccaaggctcaagtcattgactggaaatttgcatcgcatgggtgtatctaatactgtagtgtgtaactatgatggaaaggagc

SEQ ID NO: 81030 - DNA, 119 bp, Glycine max
  unsure (1)..(119): unsure at all n locations
  Clone ID: PAT_MRT3847_44186C.1
tggacattgatctatctccncagntgcccaagaaagtttacggtgccaatngtggntcctactacgcatggtcnccctccgacttccnatgctccancanngcaacattngtgccgcta

SEQ ID NO: 81031 - DNA, 1908 bp, Glycine max
  Clone ID: PAT_MRT3847_44187C.1
gactaaaaggactaatacattgaaggttgcatgggcggatctgtcattttgggttaataagttagtatgtctttattcatgttccgcaaaggttggactttttgtgtatgcatctcaagtgccacgcagacgcacttcggaggatgttttgataaataggggagtaaatttggatcctttaagcaagtggtcaaaggtaaaggattcatgtcttaatttttcttttgtccttttatttctttgttgttatatagactttttgttgttgtgtagttgttatcatgaatactagcaacaatctaataagaaacctggatgattttttttttattcttaggttggacttgttgtgtatgattctcaagtgcctattggtgccactccggagtatatggctggtttctacatggtaggcgggctttttactattgcatttcatttaatattgtatgatgcacttacaactagttctttaactgtttgtagctgcaaagtgcaagctcttttctgcctgttatggctttggctcctcaagagaaggaacgtgtcattgatatggcgtaagtatacccttctgtcgtcttctcgcagccgtaatatatgaagaatactggaataatttttgcaaatgaaatgaaggtaccacgacttaagtcactgactgcaaatttgcatcgcatgggtgtatctaacactgtagtgtgtaactatgatggaaaggagcttccaaaggttttaggtgtaaatgctgttgatagagtattattggatgccccttgcagtggaactggggttatttccaaagatgagtctgttaaaacctctaaaagtctggaagatatacagaaatgtgcgcatctacagaaggagctcattcttgcagcaattgacatggtggatgctaattcaaaatctgggggatatattgtttattctacatgctcaattatggttgccgagaatgaagcagttattgactatgcactcaaaaagcgggatgttaaattggttccttgtggacttgattttgggcgtccaggatttacaaggtttagggaacaacgttttcacccttctttagaaaagacaaggcgtttctatcctcacgtacagaatatggatggtttttttgtggcaaagttgaaaaaaatgagcagctcaaaacctggggcaaaatcatcagagacagccgagaaggaagaagacactaccacgttcgtggaggaaaaggagaaatcaagttatggcataaaagaaaatggcaatgtatcttctgaatccgaatccaaaacgggaagaaaagaaaattcccctcgaaaccaagtaatggtctaaaagaaaatggcaaagaatcttctgaatctgaacccaaaaagaggaataaaaggcaatttccatctaaggaagagatttcaaaagccagggaggataagagaaatgctttaagagaaaaaaggagaaaaggtggcaaacaacagaagaacaaaaaatgatcaaagccagtggcaatacatgaggcagttatagcaccgactcgactcgactcgactcgaagatggaagtactggggtggttgcttgtcataggagtgcaccccggaatcagtggcatgccctaatctagggcacatttttgttttgtttttaaggttattatttagccgaggtatattttataacttccatctgcaaaggtgtaaatcagaaagaaaaaatatttctttttcgtggcatcaattatttggggtttattttcttatcattatcttcaatcttcatgtctattgtcttggatgttaattatccttctttccattacacgtgcttcaaatattgatgattcaccatgtttcagatgttactgttatgttttcatgatcaagtctatctattattaaacacttaatag

SEQ ID NO: 81032 - DNA, 257 bp, Glycine max
  Clone ID: PAT_MRT3847_44188C.1
ccgaggtttccacactgcttcccttaggttttccaatttcaaagttatttggcagaagggttaaggaaaaggttaaaatcaccttggggggggtgggccttttgacccttaagaaggcacccccctttaccaacctgaaaaaccctgttgtggaaaaaaaacctccagggcatgccttatgagggcttccacgtccggcctcggaggggaaccaaaaaattatgttaacaaaataatctggaaccctaatgtatcag

SEQ ID NO: 81033 - DNA, 1277 bp, Glycine max
  Clone ID: PAT_MRT3847_44189C.1
gcagcgagatgaatatgttaggaggctattgctaagagtaccaaacaatttttgttcattcagagctttactcactcctttgcacgtctcaatctgagtcttcacttcatcgtttttgggattctctctctcaataatggcagcacgctttcaatctgcagctgtactatgctggtgttccctatagggaaagatgaaattgaagtctaagaaaggatggaaatctattgtaccacttcatttgaaaggaaaatccgcaagccgtttttctttatttcgcaaagtcaattctgctggctatggacctggcaaaacaccagtttatctgaatgtgtatgacttgacacccatgaatggttatgtgtattgggctggtcttggtatctatcactctggtgtagaagttcatggtgtagaatacgcgtttggagctcatgactacccaacaagtggtgtttttgaggttgaacctcgccaatgccctggcttcaagttcaggaagtcaatattcataggaatcacatctttggattctactcaggttagggagttcatggaacgccagtcagcaagatacaacggtgacacatatcacttaattgtcaagaactgcaaccacttctgcaaagacatctgttacaagctgacggggaaatcaattccaacatgggtaaatcggctggccaggctaggttcaatttgcaattgcattcttcctgaagcactaagaatttctgctgtggggcatgatcctaattatcagcctcatgatagtgaaaagagaaggcttcgaagtggcttcaattgcttgtcctcaatctcaatgcgtcaaaaacacctttccacatcttcactgtttctacagtcacccataagaggctgcttgtcgtcgtcatggccctcctcggaattgagaaaatccattaaccgttccttgaaagaaagataaccgagctttgagaaggtaggaaatgaatgattgtaagaatcttgtttatgtaagtaggatttggtttcatcacataacctcattttcttttatttttctttccttgtcttttgcagttaaacctgccctgtttttttatttttttattgtggtgactaagaatgatcctttccaagctgtagaagaaactttataaatgagcatcaccaccatctgctgtgctgtattattattattattttaatttttgtacatacattagcatgtaaaatgatgcaccaacaacttcaatctaattttatgcagagacaattgactgcagatggtc

SEQ ID NO: 81034 - DNA, 260 bp, Glycine max
  Clone ID: PAT_MRT3847_4418C.1
ggcacaagtgaatttggtgatccataaaactagaaacaatgtgatgaaaattaaagtccttggtttcatcgttgcaacaattttgggagcatgggaatgccatgcgtacgaaatgttccctctcccaatgaacactggctatggtgcccgtaatccggaggtgaaatgcgcaaattggaagcttgctgtggaaacacacaacatctttgggtttgagaccattccccaaaagtgcgtttaagcaacacaggaatacatcc

SEQ ID NO: 81035 - DNA, 325 bp, Glycine max
  Clone ID: PAT_MRT3847_44190C.1
cggtcgaccacgcgtccaactcagtcacagccctcatcttcatatcagacatctcaacctcaaggttcatagaaggagaatgatccaaatactacaactacttttgtgggtaatttggatcctaaggtcgctgatgatcatctgacgcaagttttcatccagtatggagaattattgcatgtgaagattccagcatgcaaacgatgtgcgtatggccaattcgcatacaggagctgtgcgtaacaggcatttcaggtgtataatgggacactgttgagtgagtaaaatgttcgtctttcatgtggccgcattcattcaaacaaac

SEQ ID NO: 81036 - DNA, 279 bp, Glycine max
  Clone ID: PAT_MRT3847_44191C.1
tctcaatcttcgtgagacccaacccaatttcacccctgctagctcttgctttttttttgtcttagaaaataataataacaatatataatcgcggtttatgagatgcagtcagagaataccaatttatttcacacataaaccaccttttccttgtcaaatgatctgacgtacaacttcacttcgtgaaggactcccacttattaatcgacagtgtcacaagtcaaggctctttataaatctcttttttttaacgattaacatatcctctcttttttcttc

SEQ ID NO: 81037 - DNA, 619 bp, Glycine max
  Clone ID: PAT_MRT3847_44192C.1
attcggctcgagggctcgagctttgcacgtctcaatctgagtcttcacttcatcgtttttgggattctctctctcaataatggcagcacgctttcaatctgcagctatctgaagctgtgaggccagactctctcatttcatttccatcccgtgtttaaattggaagctggaacctagtttatgccctgcttgatttggttgctcttaacccttttcagaaatcaaaagcacttgcaagttccattctttcagttttatcatcaggtactatgctggtgttccctatagggaaagatgaaattgaagtctaagaaaggatggaaatctattgtaccacttcatttgaaaggaaaatccgcaagccgtttttctttatttcgcaaagtcaattctgctggctatggacctggcaaaacaccagtttatctgaatgtgtatgacttgacacccatgaatggttatgtgtattgagctggtcttggtatctatcactctggtagagaagttcatggtgtaaaatacgcgtttggagctcatgactacccaacaagtggtgttttgagggtgaacctgacaatgccctggctccagttcaggaatcaatattcatagaatcaca

SEQ ID NO: 81038 - DNA, 309 bp, Glycine max
  unsure (1)..(309): unsure at all n locations
  Clone ID: PAT_MRT3847_44193C.1
nntaanaanagtngangcggagtantnagnnnttcggcngnngccttactnnataatnacnagtatnnnnantnnnngnntnanggcttcnanntnnnactaatnattagtancnctcttnttgtngctacttactctctcactaacttataccgnctcnagtgcaacccgacaagaataanaaacngtgtcagntctagcngtncaaaatgatggntcnagnnggnnnnattgngagcnngtgcnanaanagnaccccnntnatgcaagtnggngtnctngngnaggtnnatgnaaangntttgnggg

SEQ ID NO: 81039 - DNA, 345 bp, Glycine max
  unsure (1)..(345): unsure at all n locations
  Clone ID: PAT_MRT3847_44194C.1
ggggggggggggggnnnnnnnnnngnnngnggggggggggaacaggaaaaaaaaaaancaagcagaggggggggcgganggagccaagcatnaaaaaatnaaagaacccaaaggcggggggccatcaaaaagaggggggctcatgaaacatgaagtaggggaggcgggaaacaaaaatgtatagaatttcggggatcatgaggtggctaaaaaatggggttacctttatgggtaaaagggacctacaaaaagaaagaggaccctaaggccatttttggtacttcacatagaggcaactaactatagctaagttaaaaaatatcgggggtggattgggtatatatt

SEQ ID NO: 81040 - DNA, 266 bp, Glycine max
  Clone ID: PAT_MRT3847_44195C.1
tgtggtttgtgctggcttttccatttctttttgttttgaaaaaagagattttttttttgtttcaataaaaaaggtacgggccctccccgttgcttccaaaaaccaaaagcaaattgaaacttgttccttccgggaccaaattaccagactggccggggttaaatgcaattggtttaacatcaccctaaataaggcctcccggggggtttgctccccccccggggtcaacggattttccatgattttggggggtttccaaagccccc

SEQ ID NO: 81041 - DNA, 146 bp, Glycine max
  Clone ID: PAT_MRT3847_44196C.1
ggaagaattaaaaaatatttaacagccctctataaaccggatgagattgatgacaactatcgcatactaacacccaaatggggcatgagaaaaaacatggctcaacagacaatcccgtcttaaaatcataaacactgaccgctatt

SEQ ID NO: 81042 - DNA, 334 bp, Glycine max
  Clone ID: PAT_MRT3847_44197C.1
caacaaagtaccaaaggaatgatataactcatttttttgaattcttaagaagcctttctttagtataatatcttattcattaatgtcaagatcaaaggaattggttaaaacatgtgaaactacttagtagaagggccataaattttaatttctaactttgctgtgcaatcattttattcgtttttggtacaatcaaaccttgattttatttttcatgttggcaatgcttttcttttgtgtgtgggactggtgcttaagaatgacagaagaagccacaaatgagaatccatggccaccagacacgcgttccacaagtataatagcacgagctgcc

SEQ ID NO: 81043 - DNA, 340 bp, Glycine max
  unsure (1)..(340): unsure at all n locations
  Clone ID: PAT_MRT3847_44198C.1
taattcttgagtattaatgttgattgcttgtgtcaatatgtccaagggattgggtatcagcaagtagtttagaatttgcaaccatgcggaagctagggtagaatacattagtgaattggggatgagcaagagagatgagtagagaattggggatgagcaagttcaaacctagacattcattaatcaagatcgacgtcacaatccaagtctagtatttctatctttacttaattattttattgtcatttaatttttattgcaatttattttatgttatttatttcatggccnannanaaaaaaaaaaaaaaaaaacaaaagcggccgctctagaggatcca

SEQ ID NO: 81044 - DNA, 742 bp, Glycine max
  Clone ID: PAT_MRT3847_44199C.1
actgtccgtccagtcttaattttctgcattcctcgagacactgactcactgagtcgagttttttttcccggaaaattaggaacctgagaaaatctccgattctccgagaaaatccgtgcaatggcgcttaatttctcatatcaccgtcatcgcacatgaacgtcctcttcgatttcgcttcactctctgttaattggagtccagtttgcagggaattcttccttcctttttcagcatcaacaaattttcttatagcatagattagaacatgacagctacgaaaaaaatcatgtaatcaattcaaggagatatctgatcagctgatcttcatttctccaaggtcttgtgttttctgaaaagtcttggtttgactctgagacctggtttctggaaagaaacttaggatatacatattttaggcttctaattcttgtttgctacttaggtcatgaggaatcaggaagaaaaaaaagaatttgatctttttgtgatttcctattgaatctctgatggaaatcggttgaattttgctattggttttgaggttcataacttgtttatttttgagccagcaaggttttgaacctgtaaattgataatggcttgtgtggcacttcatccggtgtgtgaagaatctcttaaccgtggtgaatttaccagctgtttcagccctcatttgagggagtcaattttgatttacctaactgttggtgggatctgcgattcctatgcatattatgaa

SEQ ID NO: 81045 - DNA, 468 bp, Glycine max
  unsure (1)..(468): unsure at all n locations
  Clone ID: PAT_MRT3847_4419C.1
ggggttccctttctttttttctctttttcttttttttttttttttttttttttttccttttttttttccccttggatccttttttcttttcttccggggccccgggcaccccttttagttttaaaaacaaaaaaggtcagtgctgcctcgtganaaggggcccccccacacaaaaccggtgggccccccacaccccccaggggggggggggcccccccccctaaagataaacaacctctatcccgccaaaaaaaaaccccccccacaatttcaaaaagccccccaagctttcacatttaaacaccaaaaagacgcggatcttaaagaaaaggataggaatccggaacccgggccccttctaaaccccccccccccagggctgttttagtgcccgccccaaaaacaacccccgtggatgaaactcaaaaacaaaccccgcttccaaaaaaaaaaaaacccccctaaaaa

SEQ ID NO: 81046 - DNA, 288 bp, Glycine max
  Clone ID: PAT_MRT3847_441C.1
tgacgtcgcatgcgcgcatacgtaacctcaggcttccgctatacgcctaatcacgagtctccagcatcaccatggagggggttatcaagggcttcatcaacgccggtctggacgctgatgataccaatcgggaagaacaacaacaccgttatagaccatctgagtataaactcttgcgctgaactgaatatcctcacgatcaacaatatcaccctatagctcatcaccaacacatggaacactcatcgcctcactacgaagagcctcaatctcaaacttcctacatac

SEQ ID NO: 81047 - DNA, 487 bp, Glycine max
  Clone ID: PAT_MRT3847_44200C.1
ggtaccaaagctgaatagccattcgtattgtcgcatagaatgaaaaccctagctcaccgtttcaaggtatccttctctcctattctccttctgattaagataactagtctcgagtttttttttttttttcaccgatcgtcgtatctgtgagtgtgaagcctttgattttgatttggggattttcgtgtctgctaattttttgttgaatctactcgtcgtacatcattgattttaccctcttgataatcatacatgctgagatatttttgaaactttttcttgtataattggctagattgtttctatttaattatgttgattgaaagcaatctcgagatctgttgtaaatatgattaatttgtcaaaccgttgggcacgtattgttgtgtattgtataatttgtaaaatcttttgttatataaattagtcagaggctgtttttctcgtcttattttgatatcgatgtgatttatttaatcattggaat

SEQ ID NO: 81048 - DNA, 350 bp, Glycine max
  Clone ID: PAT_MRT3847_44201C.1
cgcctgaaatctattgttgttgcatggcaaacacaaaggtccgggttgacccgttgtatatccgatccaaattaaaaagatgaattttttcaggttagccggtgacatgacccatttggcctgcgttctcgtctttctccttaagatttacactattaaatcctgcgtctgtttcttattgtaaacttaagaactctatgcactcgtttttgcttgtcgttacttagatatctttacttattacgttttcttatattatatctttttttagttgattattttgggaagctaattttctattttgtggttcttgatgttccacaagtgttttttgtagattctttttacat

SEQ ID NO: 81049 - DNA, 395 bp, Glycine max
  Clone ID: PAT_MRT3847_44202C.1
ggcatcgagacaggtacagcatcttcttacatacatgccggaaacatggctgaccacaccatgaattcagacgctattccccgcgagctcatcctttgtgttgaggttgacgaaaaagttctgtcaagatactcacacaacgatgttactcctgtttgcacaactccagtgcgttccgcagcttatcttgtccctgattattgcccatgttatcatgctactatgcataatgatgtcatatggtacaataccagtgcatattgagcttgtgtgatacatgcctgccatagacatgatctggacctatggtgtcattacctggataaaacgagccgggatgatgatcaccattagtgcaaccattgcacaggatgatgcttctattggttttgctt

SEQ ID NO: 81050 - DNA, 416 bp, Glycine max
  unsure (1)..(416): unsure at all n locations
  Clone ID: PAT_MRT3847_44203C.1
aaaaagaacattttttctcagcgcgaacataccctattaaattacttcacaaaccnttcagacacctttttttaaacggtaattcatgaccgttacctccacatataaaaacttttccaattattagttttactaaatcttcacgcaatcattaacatattcttttcctgaataaaaattttattctcttactatttcaaactacatactatcctcaatcataaaatttaaataattggttccccttatgggggagtgtacccacaaaaaaagctttacctacaatatcaaatttccaaacaataataacatactttccataatattttaattaattttctaatttatgttagaaaatttttttattaattaaaaactcttttttaaactctttaatatttatgttttttcaatat

SEQ ID NO: 81051 - DNA, 389 bp, Glycine max
  Clone ID: PAT_MRT3847_44204C.1
caaagaagattgaatgaccgctcaatagaagaacattttacgtgtgcagcttctcagatgacctatagcttaaaaaatgaacaaaaaataaaagtggaagacctttttttgtttcccgcaaaagaagcagcaggtaatcataggggccgttttccctatggaacaaacacttgttttgtttaacattagaaaaagggtttaaaggggtgtgatgtcaccgaacgaaaagggagtccttcaatatatagaaaaatgtctttatacttgagccccaattgccaagacgagattcacctcctgattaagcacaatgcgctcactcttttccaagggcgtaaacatattgaacatgacaacattaaacccaagattggcggtctgcttggggg

SEQ ID NO: 81052 - DNA, 328 bp, Glycine max
  Clone ID: PAT_MRT3847_44205C.1
gacctacttgcattatctcttaggcagaggtacacctgtcagaactgcaaatggcgctcccactcaaaatgcaagtgctccttcaccacctgatgataatgaaaaaccaccccccacattattacaaacactctgcacctgaatcagcacatgaccagcacctgaaccagcaccatgaccaccaccaattgataatcaaattccagctggaattcctgcaatactcacaaaccattaccatctcgctgatgggcaaaactgtgtgaactttctcactgatcggtcatctaccaaagctcatgctgccccggatggtggatctatcctt

SEQ ID NO: 81053 - DNA, 726 bp, Glycine max
  unsure (1)..(726): unsure at all n locations
  Clone ID: PAT_MRT3847_44206C.1
aggggaagcaggcaaacaaagtcatagaggggtggttgagaattttctttttcaaagaaaaacanacgaacaactcaacgcgttctagtttttctgatagacaccttctagaaaaaaataactcaaccccaacattctcgtacgcttgatccttcctgggctgtcaacaattttccctcttttcattttctgtttctgaaaaatcataccttgaaattgaaagtcccttgttttttttttattccttggtgttttttttgttgctgtgagagaaatgtgccctttaaggtttatcttggtgttcttctccgccgtgctggcgggttattttgcgtggaaaacggtgcgttctgacccgaagatcgaggtgttttccgaggattctgccaatgaagataaatccttcaagaaggaagattttgatttcaagaagatgattcagaatggattttggggtttcgttgacatggctagtgggagctatctgtggaggaatttgaggccaaccaacaaagatgccgaattgaagagttcttagtgacctaaccctcttctttaatcatgagtctttgtttagtgatttgtcttgtggaaatgtatgtgtaaattattgtattcccacttctctttatccttgtttgtgggttcaagaatgtttggtggataaatttggccaaagaaacgttgtggaattctcatcattctgcaggttgtcgtatgttttgg

SEQ ID NO: 81054 - DNA, 581 bp, Glycine max
  Clone ID: PAT_MRT3847_44207C.1
gggcacgcaattcccggttccgacgccacgcgccacgcctatcctttcttgaaattatcaatgatagtttggcaagttccgactgcaacatagttggcgcaatgcttttggttgatacttatcataccaattctgaaaacgtaccccgcacatctctgttagctctttcaaaggcggaaggcccattcggatggatacatttcctaataccattgtgcagattgaaccagactttttttcatgtttatatgctttagttaccactacctactggaatcttcctcttattgcaaatatacagtaatggttataggtaatgcagtattgtcttgttcttggcttgacatcaagttacactccaactccattgtttggattctggttcgtaaaaagacagacggttaattgtggagtcctttggaaggatgtcttacgttgctcataactgtaatcacccccaagagaaaagattagttggaggggaactttcctttgatattaaaattcgcactaaattggagaaagttttctcttcaaaagcccaattttgtatgtgcataaacctcccaaaatcatcataa

SEQ ID NO: 81055 - DNA, 171 bp, Glycine max
  Clone ID: PAT_MRT3847_44208C.1
ctcgagccgctactcacgactatacccagctagcatcgtcaagatgcccggcgactccgttgttaacactagcatccccaccaagagaccagatcctggtcccggaagaccttctcaagaagcgcaagtacgctgagaaggaggctgccgacaagggctgccagcgtgaga

SEQ ID NO: 81056 - DNA, 271 bp, Glycine max
  unsure (1)..(271): unsure at all n locations
  Clone ID: PAT_MRT3847_44209C.1
tgaaagatcatatcgataagaaaggatagactacaacagaagtggcgggagaaggtatcccataagtgacaaagcaggaccgatgtacataacaatcggagagggaggaaagctagaaggttttgccaaaagaaagatggatccacagccagaaaattctgcattcagagaagcgagctacgggaatgtttttttggaganaaaaaacaggaagcatgctatctaataatggtagcgcaacgatgaaggaaagaaagtcccagctgacact

SEQ ID NO: 81057 - DNA, 746 bp, Glycine max
  unsure (1)..(746): unsure at all n locations
  Clone ID: PAT_MRT3847_4420C.1
ccgggatagaacgttctgaatgacgctccgtcttcaatctttatctttttccacccaccaccaagggtgccgctgctttggcattgttggcactgttggagaaagagatgaaagtgtctccttttacctatcttaaaataccttcttttgcctatctatctttgaaatttgaccatttatgtctctcatagtttcattgaaccgtattcgtttttccctttctgggtctctgtgtctcttttggtctttaattttctttttattctagacaagaaactgaagaaaggtacaagagaagcaagtttcagatctagctggtgatgcaatagagacgcataatactgatattgtgccaaagtgatgtcatgtaagattgctacaaagatgagtaacctttgatgcttggtgccaaatgctgctagacgaaccaaatacgtgtctggttgtcaaaaaggaagctaggagtctgtcaatatcatgcacaatagattaaagattgtgatatgtgctcaaggaggtgatacaataaaggctctcggagaaaataaaaacgatggaatttgcttcagtgactggttgttggagtcatatcaacatctaccatgtgcacaaatagatgtatatgtgcttttangctatttgtatgtcgatcttataattaatggtttgtctatgtgctcttattggcaatcttggacattattccagttttttgaacttaggaaaataaaatgatagagtttatt

SEQ ID NO: 81058 - DNA, 447 bp, Glycine max
  Clone ID: PAT_MRT3847_44210C.1
aactcaactgcgctcagcaaaaactaccctccttaccattgcatcctctctcgtttctttcattcccactacaaccaccaacgcgtggttccttcaccaatctatcgtggtcaacatatatctatcttcttctcaaaacaaacttttctctccaaaacaaacatcctctccaaaatcttccctcctttccatttcaacctttttctcacttctcatttccactacatccacctactcattatttcttcccactctcagcttccaccattcttctcccaccatcttttacacctacacttttcatctttcatctttctccaacaccatcattcatgccttcatcttcatctcaccaccttcttccttcttataattctccatcacccctatgtccatctacttttccccttatccctatttctcccctttactattatctctcaatct

SEQ ID NO: 81059 - DNA, 177 bp, Glycine max
  Clone ID: PAT_MRT3847_44211C.1
cacaacataagaaggctagcatggtggcagtgaatattgatactgcatttatcgactcatgtataattttcccctgtattacagtgagtagtcggaaggtggtattatctcactattaggctataacgaaacttcgaaatttgtttgatgttgagtccctatatatgaactgctgca

SEQ ID NO: 81060 - DNA, 412 bp, Glycine max
  Clone ID: PAT_MRT3847_44212C.1
gttggagattactatcccttttggagagagaatacaacaaatgccattatacaaaaagttcttaaaggacatcctcataaaaaaaggaaagtacatcaacagtgaaaccattgtggtgggagaatattgtagggcattaatccaaaagctacctcccaagttcaaagatctaggagaataggaaatcaaaagattgaacctacaaggatgacgctccagctggcagaccactcaatcacaagatcgttcggggtagttgaagacatcctagtcaaagtccatcaactcatttttctggtggactttgtaatcatggacattgaagaagatgctgagatccgcttgattctgggttggccattcatggtgactgcaaagtgtgttgtggacatggggaaaggtaacttggaga

SEQ ID NO: 81061 - DNA, 847 bp, Glycine max
  Clone ID: PAT_MRT3847_44213C.1
aaaaaataaaaaccctctaatagcgcactaatctgcattataattttttcatttgttgaatgcatttgaattgatctgaacatttggaattggtgttcgtgtggtgttttgattaattgatggaactatcaaatttgcaaacagaggaaacaagtaatgtgttcagttgcgtacgaaaatatatttgtagcaccaaatagtttggctttggcaactttctttgtgatgcgaattgcactttagctttgccttttgcattgccaataacgtgctctggcagcttattctcgttattaactttagctagtggagtccccaaaatgaacagtttattccacccgtgatcctttcttttctcttctccacaaaccacactttcaatgatacaatcatatttatatttgctttgggtggcttttaagtagagtcttcttccatgtcttgtaaagttaattaaagaatagaagaaatcaaatgttatgtattaaaaagataatgtaattttctaattttttttctttaaaaatatttggacaccaaagtgagagtttcctataacaaaactatagcaccttgaatgaaccctagataatgatttcccgtagagaaacaatggtttggtgtaaggagtttcgttggtgatggcgacattctctgaagaaggactcaatgtgtcccactgctgtcactcgatcgtcctaacaaataagtctaatgaataattagcaatttcaatttcgtgattattattttacagtgtaagtgtgtaactacacatttttttggtatcatataattaagaatgtgttgttgagagataacggtgtgattaatcttctcgtgcgct

SEQ ID NO: 81062 - DNA, 259 bp, Glycine max
  Clone ID: PAT_MRT3847_44214C.1
gcgcaacgaggagaaggcgcacgtgaggccaacaaaaagatcgagaagcagctgcagaaggacaagcaggtctaccgggccacgcaccgcctgctgctgctgggtgctggagaatctggtaaaagcaccattgtgaagcagatgaggatcctgcatgttaatgggtttaatggagatgagaaggcaaccaaagtgcaggacatcaaaaacaacctgaaagaggcgattgaaaccattgtggccgccatgagcaacctgg

SEQ ID NO: 81063 - DNA, 593 bp, Glycine max
  Clone ID: PAT_MRT3847_44215C.1
ccacgcgtccggggagggggaggatgaggagcggtgaggagacgatcgacagggacatgatagaggggacctctggcgtgagacagaggatgatccagtagcggagaggagatgacggaggcggaggacgcccgaacgcacgccttcttgaggaggacggaactccccgaccagtgaacagtgtatattgatccctatcttgaaatacactggtaccctcgagggtagcgagagggtgcatctctacgacttggaacgcggctagggcatctgcagctaccaccagggcctcctgctgatcatttgccatcctttcgtcctccacctcctttaggagctacatggcaggacccttcggcaccaccagcagacagagcacaaaaccagaccatggcgtgtccacgccatatacactctagggtgccaccacggacaccctgaggactaaacctgaggatctggttgggcgaagctgaacaaggatggttcaaccgacccatacaaaggttactccgccgtgtgcagtggtgccttcaggaacacatcactaaagtgggtacgcggctgtgataataaaatgaaccctacttatg

SEQ ID NO: 81064 - DNA, 365 bp, Glycine max
  Clone ID: PAT_MRT3847_44216C.1
cgggccgacgcacgcgtccgctagaaagtgatcctacaacacgtacattcttatgcttaaaaaaccaactacggtatcgtctacattgaaccacattgacttggcatacaacacttactctaggtatgctcattcattaccatcatgcaactgtataaacagaagatatatcacgctctacgacttttgatgttttgaacctggtgcatggtaaatcgctagcatcttctaattgaaatacagagttaaatccttttaatggacactcatttattaaagatgctaaagattattaaacaatcattcatccctttaaagaaagctagtacaacattaccaaacataatgcatataatccttttaat

SEQ ID NO: 81065 - DNA, 126 bp, Glycine max
  Clone ID: PAT_MRT3847_44217C.1
gtccgtagatgtgtagccggctagccaggtgaggtgggaaaagtcgaacggcaaggatgaggaagcgtcagagtgaggctctaagagaagctatctcaggaatcagggctgatgccaaggaaaaga

SEQ ID NO: 81066 - DNA, 253 bp, Glycine max
  unsure (1)..(253): unsure at all n locations
  Clone ID: PAT_MRT3847_44218C.1
gccgctcgagcgcggncgggattcatcgtattgatctcagattctacagagattttgctgctctttgagacgtgtttgcttgattttggagatgcgctgctctcagatctctcaccttacctctcagacctactgagaaggtgatcgcagagtactatggatcggtggatcaggaatgcacctgaggagcacagcaaggactctcccaggaccagctagcgacccttccacgcttcccacgtggccctatcat

SEQ ID NO: 81067 - DNA, 331 bp, Glycine max
  Clone ID: PAT_MRT3847_44219C.1
caaggttaacaagcctcccatttttttgtcaaggttaattaatgttacaaaggggaaggaggataaaattgctgggatagtggggactgtaactgacgatatcagagtatatgatgggtcagcattgtaaattaccgccctctagtttactgtgagagcacgtgcaagattagaaaaggctggtggtgaatgcttgacatttgatgatcatgccctaagggctgcttttagacacaataccgcccttattagagggctcataaatgctcgggaagattgtgcacactgtggccctgctgctggtgtgtcacaaagccatgccggccccttt

SEQ ID NO: 81068 - DNA, 334 bp, Glycine max
  Clone ID: PAT_MRT3847_4421C.1
gacccacgagaccattgctattgagctaaatatccattgttcactgccattactccacttttaattatggagccaaatgcattgcccaatagggcatttgcgacgctactaacatgatgcgcaggatacataatactactgaagctactacatctagctgccctcagcatgagcctcggcctcctccagagggggcatttcagcataagcctcacctgcatcctagtcacaggtcagaccaagcttcaacattctgcggatccagtcagcaaaagagaagggcccgacaaggctgaaacctgaagagagaagagcaggctcaaacagcaacaga

SEQ ID NO: 81069 - DNA, 315 bp, Glycine max
  unsure (1)..(315): unsure at all n locations
  Clone ID: PAT_MRT3847_44220C.1
ctcgttttcggctcgggnnncggggggggcggggcnnngnnggngnncccgccncnggtttttctngctggcttctccctgccttnctgtcccgnctctttctctctcgcntttggttttttggctgntgctcccctcncttttgcggcttttttttttngctggnngccntttttgggggggggggnntggctgcctcgcctttctcccccgaggcctttcttgcggctgggtcgtctctggtgcgtcctgcngccnctctgttggctgttgggtgcccctgtctgtttgccctggcgcctgtttgtcctttgt

SEQ ID NO: 81070 - DNA, 294 bp, Glycine max
  unsure (1)..(294): unsure at all n locations
  Clone ID: PAT_MRT3847_44221C.1
cgcatgcacgcgtacgtaagctcggaattcggctcgaggttctagatcgcnggcggccgccctttttttttttttttnaaananggacanaancnannnatttntcntnaanaaanaancngatttnatcttnanggaaantntcagngcaacaantcancncgaaantnaaantcngnaaantnnaaanaaagaaancnctnangncattngcgcttatgnatacnagctatancnggngggnannggnccggtttgggtcnnccngggcnggtnaataccccgngggcncnc

SEQ ID NO: 81071 - DNA, 600 bp, Glycine max
  Clone ID: PAT_MRT3847_44222C.1
cttctctccctcaaaccaaaatgctattatccacacttcaaacccctcgctccctctctcgcctcacgcgccaccctcactccttcacctcacgcgcctccctcacccaccaaacccaaactctcaccccctcctccccctcccctccgccgcagtccgaaatcctctccatccgccacgccctcctctcccgccgcgcctccgccgccgaccttgtcctctcccaactcgcgcgcctccgcctcgccgagccccgcctccgctccttcctccacctccccgacgatgacgccctccttgcccacgcgcgccgcctcgacgcccgcatcgccgccggggaggaccccggccccctcgccggcgtgctggtcggcgtcaaggacaacatttgcaccgccgacatgccgtcgaccgccgggtcccgcatccttgaagggtaccgggcgccgttcgacgccaccgcggtgaagagagtgagggagttaggagggatcgttgttgggaaaaccaatatggatgagtttggaatgggaagcaccactgaagcttctgcatttcagggtgactgccaacccatgggatgagaccagggggccagga

SEQ ID NO: 81072 - DNA, 698 bp, Glycine max
  Clone ID: PAT_MRT3847_44223C.1
ccacgcgtccgatttaaccccgacgccgttttgatcggatccaattttcatttcaatgggtcacgtgaacctcccagcctcgaagcgcgtgcggcagtggcgcgtgctggacctggtctcggcagcgttcttcggcctggtattcctcttcttcctgctcgtcttcacgccggcgggagactccctcgccgcctccggccgccagacgctactcctctccgcctcctccgcggatccgcgcctgcgcctgcgcgtgtcggcggccatcgaggaggcggggcagcggcagcctcgcgtgatcgaggcctgccccgccgacaccgccgccgaccacatgccgtgcgaggatccgcggctcaacagccagctcagcagggagatgaattactaccgcgagaggcactgcccaccgctcgagaccacgccgctctgcctcgttccgccgctgaagggatacaaggtgccggtgaagtggccggagagcctgcacaagatatggcacagcaacatgccatacaacaagattgctgacaggaaaggtcaccaaggatggatgaagcttgaaggtcctcactttatattccctggaggtggcacaatgtttccagatggagcagagcagtatattgaaaaacttggtcaatacattccaataaatggggggtgttctgaggactgctctagatatgggatgtggg

SEQ ID NO: 81073 - DNA, 673 bp, Glycine max
  unsure (1)..(673): unsure at all n locations
  Clone ID: PAT_MRT3847_44224C.1
ccaaccatcggagtcgactgaagccaccatacgcctgctacctcgtcggggttcgttgcttaagaagagagcatgtgcgttgcagactacaactctggtgacatgcacacctaccctaccctgcttttgtcctggggtgcgaagacaacggttgctgattgcatatctctctaacgagaaggtgtctggacattagtataatgtatatcaccaacctatatatgacaacaagacaagagtatggagcatccgggttgccaatataatgtgtcataaaattacttggataccatatatatacttcaagatggagggagtatatataaatacatgagaacacacaaataatgtatcgatctatatatgatacctcagatattcccattggctgttgatttgtggcctgagtttgtagatggattttctatgtcacgcactgtggacattcctatctagaatgccagcgtgggtgagcaacgcccaccagtgtgttatgaactcccctccatttgccagtgcctcgatgtgctccttcacattctccgatggcgcgatgtagagcaacatctctgaccagaaatccgcgagcaccttccaacacctgtcacactccatctnctcgagctgcctcgccagcttcacccccctccggaggatggataattctgtttct

SEQ ID NO: 81074 - DNA, 2435 bp, Glycine max
  Clone ID: PAT_MRT3847_44225C.1
gttagtaaatggacttcattttccatttattttgcatttaaaggcaaatcagttacacaaaccgtgccaaacactcttagtctcttatattgttccaaatgcttgatacacatccgtgggagtgcttcaaagggaagaagcctcacaagcttattgtgtattcattagcagctaaaaattcctcatcttattacattagatcactctacaaggtaggagggatccatatgtagccgtgtgtttgaacatagccagctttttcaagtaactgatctgcttctgcaggacctctgcttcctggtttgcaggggagtggcttgaattccccttcatcaattctgtgcagaagtggggtgaagatctgccaggatgccttcaactcatctctgcgaacaaaatgttgctgatcacctctaattgtgtcaagaattaggcgttcataagcctcaggaatggttactccttgataccgttgtccatatgacaagtcaagctcactttgaaccgtagacatctccagtccaggttgcttgaccgtaagcttcatgtaaatagcttctgaaggctgtaggcggataacacactcatttctcccctgctttttacacttgaaaatatcaccagggacatccttgaattgaacccttatctctgcctttctagaatttagtgccttccctgcttttagtatgaaaggaacaccttcccatctttcattgtgtattcgcagagcaacagttgcaaatgttggggtgttagactcatcaggtacggttgggtcatctttatagccttcatattgtccaagaacaacctcatcatcattaatagggagcactgattcaagaaccttcactttctcatcccgaatgtgctcaggcctgagagaaactggtttttccatagcaaccaagcaaagaacctgcagcagatggttttgaataatatctcgaataattccatactggtcaaaatatccaccacggccatcagttccaaaatcctctctgaaaactatctgtacgttgtcaatgttgtcgcggttccaaagtggcaagaaaaaccgatttgcaaagcgaagtaccaacaagttctgcactagttcctttcccaagtagtgatcaatacgataaatctgtggttcctcaaacaactttccaatctcagtactgagttcctctgcagattctagatccttaccaaaaggtttctcaacaacaacacgtgtccatccaccaagatcagctaagaaaaggaagcagatgcagccatatcagtacaatcagtattagatttctggataataaaaaggaaccacaaaatgtaaaagaaaaagtaaagacaactgttcttctcacaaaagaaatgagatggtggagagacttaaagccagagatctgttttgcaaatgctagctgaacacaaagttcaagtttatttcataattatttaactttttattttaaacaccatagatataacacagacacctgtaaatatcttgtgaagccaaaatcccaacaactggaagcagcagctatatgtctagcaccagtattatcaggaaaaagatcttgcaaaaagtaaacaagtaaccaacatttaaataaaagttaaaaagaagagcttaaagtggactctgtcatgatgtgtagactaatgtctgacaaagcatcattctcaacaattgttgagctatggttcactgtgtcgctgttcatatctcccaccctccctcaacaaaaagctatttgtccttttgaaacatttgcaatcaaaaccatatattatagcatcttacgtttattcatgcaacaagtcttgatcatcttgcaaactgatggatatactgaaggtggaagagcaagatagaaaagcctccgggataaaccctcaacactgtttttcaaatattcatgctctgaaatctctttatccaacaggcggaagccatcctcagaatcataagagccgcttacatatttgatcagctgtaaaaacttctctacatcctccaactgttggggggaagcacctctctttggaacaagatagccgcgcaaccggtttctcaattcatcatcagagatttttgtccttgcatagccaaaaatatgaacttcatctggtggtaagaatccctgcaggtataggtggaaaagtgcaggaaatgtcttcttcttagcaagatcaccagaagcaccaagcaccacaatagagagtgacccagtttcaggcacatttcctgcctctcttgctaagggggattcagagccgaagctagatcttcgctcgatatgccattcactagtttccatcttctagcagcactgaattactagaaccactcaactaccaagtgatgcagagttagctgaaactgtacctggtaatgttgttttgcttcccccttctgtcgtcttctcgcagccgta

SEQ ID NO: 81075 - DNA, 452 bp, Glycine max
  Clone ID: PAT_MRT3847_44226C.1
gagggcacagggcgcagttttgtgtgtttcgagaagaactactatacagtgggactgaaaaagaaagtccttggtgatttccttgttacttttttggcagcatagcaatgccttgcgtacgatatggtccctgtccgtaatgaacactgtttatggtgcccgtactccggcagcgaaaagtgtaagtggaaggctttgatgtgccaagcacacaacatctttggatttgtagcaccatccctgtacagtgcgataaaacatcgaaggaatacatacatggtgaacaatatagatcacactccaaaacgagcaaccaacaatctcacttttcatgccaaagacccttaattctataccaaaggacacatttgagttcagtatagcatggcaccgtactctgtaatattccatactacaaaatacatggttatggggatggataaatcaatctt

SEQ ID NO: 81076 - DNA, 954 bp, Glycine max
  Clone ID: PAT_MRT3847_44227C.1
gccggtaaatagacttcattttccatttattttgcatttaaaggcaaatcagttacacaaaccgtgtcaaacactctcatagttcaaatgcttgattacacattcatgaggagtggttccaagggaagcctctcaagcttattgtgtattcattagcaactaaagattcctcatgttattacattagattactctacaaggtaggagggatccatatgtagccgtgtgtttgaacatagcctgctttttcaagtaactgatctgcttctgcaggacctctgcttcctggtttgtaggggagtggcttgaattccccttcatcaattctgtgcaaaagtggggtgaagatctgccaggatgccttcaactcatctctgcgaacaaaatgctgctgatcacctttaattgtgtcaagaattaggcgttcataagcctcaggaatggttactccttgataccgttgtccatatgacaagtctagctcactttgaactgttgacatctccagtccaggttgcttgaccgtaagcttcatgtacatagcttctaaaggttgtaggcggataacaaactcatttctcccctgctttttacacttgaaaatatcaccagggacatccttgaattgaaccctgatctctgcctttctagaatttagtgccttccctgcttttagtatgaacggaacaccttcccatctttcattgtgtattcgcagaataacagttgcaaatgttggggtgtttgacttgtcaggtactgttgggtcatctttatagccttcgtattgtccaagaacaacctcatcatctctaatagggagcactgattcaagaaccttcactttctcatcccgaatgtgctcaggcctgagagaaactggtttttccatagcaaccaagcaaagaacctgcagcaaatggttttgaataattctcgcaatattgatttatg

SEQ ID NO: 81077 - DNA, 1947 bp, Glycine max
  Clone ID: PAT_MRT3847_44228C.1
tacggctgcgagaagacgacagaaggggagtgcgtgaagaaaacaccaactgttttgagttttccaaccttaaaaagactctcttttctctctctgaactctgaagcaaaacaacattagcatcaaaaccagagtggttctagtaattcagtgctgctagaagatggaaactagtgaatggcatatcgagcgaagatctagcttcggctctgaatcccccttagcaagagaggcaggaaatgtgcctgaaactgggtcactctctattgtggtgcttggtgcttctggtgatcttgctaagaagaagacatttcctgcacttttccacctatacctgcagggattcttaccaccagatgaagttcatatttttggctatgcaaggacaaaaatctctgatgatgaattgagaaaccggttgcgcggctatcttgttccaaagaaaggtgcttccccccaacagttggaggatgtagagaagtttttacagctgatcaaatatgtaagcggctcttatgattctgaggatggcttccgcctgttggataaagagatttcagagcatgaatatttgaaaaacagtgttgagggtttatctcggaggcttttctatcttgctcttccaccttcagtatatccatcagtttgcaagatgatcaagacttgttgcatgaataaatctgatcttggtggatggacacgtgttgttgttgagaaaccttttggtaaggatctagaatctgcagaggaactcagtactgagattggaaagttgtttgaggaaccacagatttatcgtattgatcactacttgggaaaggaactagtgcagaacttgttggtacttcgctttgcaaatcggtttttcttgccactttggaaccgcgacaacattgacaacgtacagatagttttcagagaggattttggaactgatggccgtggtggatattttgaccagtatggaattattcgagatattattcaaaaccatctgctgcaggttctttgcttggttgctatggaaaaaccagtttctctcaggcctgagcacattcgggatgagaaagtgaaggttcttgaatcagtgctccctattaatgatgatgaggttgttcttggacaatatgaaggctataaagatgacccaaccgtacctgatgagtctaacaccccaacatttgcaactgttgttctgcgaatacacaatgaaagatgggaaggtgttcctttcatactaaaagcagggaaggcactaaattctagaaaggcagagataagggttcaattcaaggatgtccctggtgatattttcaagtgtaaaaagcaggggagaaatgagtgtgttatccgcctacagccttcagaagctatttacatgaagcttacggtcaagcaacctggactggagatgtctacggttcaaagtgagcttgacttgtcatatggacaacggtatcaaggagtaaccattcctgaggcttatgaacgcctaattcttgacacaattagaggtgatcagcaacattttgttcgcagagatgagttgaaggcatcctggcagatcttcaccccacttctgcacagaattgatgaaggggaattcaagccactcccctacaaaccaggaagcagaggtcctgcagaagcagatcagttacttgaaaaagctggctatgttcaaacacacggctacatatggatccctcctaccttgtagagtgatctaatgtaataagatgaggaatttttagctgctaatgaatacacaataagcttgtgaggcttcttccctttgaagcactcccacggatgtgtatcaagcatttggaacaatataagagactaagagtgtttggcacggtttgtgtaactgatttgcctttaaatgcaaaataaatggaaaatgaagtccatttactagtaaaaaaaaaaaaaaaaaactcg

SEQ ID NO: 81078 - DNA, 296 bp, Glycine max
  Clone ID: PAT_MRT3847_44229C.1
ccaactcatggggatattttcatcatggacttgaaggggtgggcttgtccacataagtcgaatgggacactcataggaaatatggaaggagacttgcatcaaacaaaatcttaagagtgtcacttaacaaaaagctagctcacgttttgcttctaaagaaggcttccgcagaaagccaaataaattctttccttaggaggttcaccaatgcagtcaaagactgcttctgcatttaagaaattttcatttgctgtatagccgctttttgttactatacacgtaattccagctgtttt

SEQ ID NO: 81079 - DNA, 214 bp, Glycine max
  unsure (1)..(214): unsure at all n locations
  Clone ID: PAT_MRT3847_4422C.1
gaagtatatcatacataccatccattccccacaagctagtggttgtggggaatggaaggcattttttgtgttgaataaaatgcaggtagaaagtttatgagccttccacattttttcattttctctctctcttggggttggcttggtacacttaaaaatgcntaaatgaaaaataaagggaagtatgacaaattggccaccaaccccatttttt

SEQ ID NO: 81080 - DNA, 371 bp, Glycine max
  Clone ID: PAT_MRT3847_44230C.1
tttgacgcattgtctgacgctacggttttcatttccgaaaacaactaaactcattagtaaacatgaccccaaaaacctcacactcaccaccaaacgcttctttcgtaacaaggaacaatctctagactcacgctaccacccacctttattcggagccggatattccttcgacaactacaccacaaagcacaagccttccgctggttaccaaactccaaccagagccctcccgggcgattccggcgactgtgccgacggccccatgcgtgacaaagcgcgggacctactccagggcttacgtctgatagaccgtgacaacgacagcatatttacgcgccaggacctccaggaccttctgacttgcctaggtg

SEQ ID NO: 81081 - DNA, 268 bp, Glycine max
  Clone ID: PAT_MRT3847_44231C.1
gaaacttgatggttcaaaggataggctacatatatgtacaggagatctgatgaatgaaggtacctctgactctgctcttgcgggatgcgatggtgtctctcatactgcttcacccgaacatttaatagctactgatccacagaataccttacctgctccaatcatcaatagaaccgttaactttgctacaacatgtgcaatatcaccgtctatgaaacaagctgttctaactccttctgttgctgccgttatatataatggaaagcca

SEQ ID NO: 81082 - DNA, 262 bp, Glycine max
  unsure (1)..(262): unsure at all n locations
  Clone ID: PAT_MRT3847_44232C.1
tggaaaaaagggccgacgacgcgaacgaacacgcaccaacaagcccaagaagcattagcccaaagggccaccgggacaacagcgcccaccacaaccgacaaggggacccgccnaccagaggcccaccacggggacgaaagggggcaagcccagnacaaggagcgcaagaagaaaaccgcccccccgaacaaacaaaacaccgggacggacaccgaacgacgacaggccccagagacaaacaggcgccaaggggcccaaacac

SEQ ID NO: 81083 - DNA, 260 bp, Glycine max
  Clone ID: PAT_MRT3847_44233C.1
gttgttttatcagtttatgttgagagcaggatgaggacttagatggagacgtgaatgtgcataatttaaggatgagaccaaaactaaacagcacatgctttaatgaacgacaaggatgggtaggataacaggacttttattttttccttcttattagtatttttttccttcaaggcatatgtaaatattttttaaacttttgtaggttcaaattgatttctgatgattaaatgtaaatttacttaatttttaaaaaaaaa

SEQ ID NO: 81084 - DNA, 389 bp, Glycine max
  Clone ID: PAT_MRT3847_44234C.1
ctcacaacctttacaaatacctatattactcagaccacggttatttcaacttgaggcgccgttccatgtacgtttcatcactcctcatactaaaacgctctaatgctcaaatcatctcactcactatatcgatagaccgacttgttacacatgaagagtcattttttaagaaaagataaaatgatcatatccaacttcaacgctcttaaccctctcaacaaccctttgcttcaatatccctacaccaacgccgtcaccactatactcaccaatgttgacagaatttttcacaagtggttgatccattattttaagatagttacattttatggtatcaataagaaggctcctattaatttcaatgtcaacacttttaccaattttttttt

SEQ ID NO: 81085 - DNA, 396 bp, Glycine max
  Clone ID: PAT_MRT3847_44235C.1
gctttgcttccggggacgcgtgggaaaaagtctcctctactaaagcacagtttgttagtggaaaaaccttcgtatatgatataattggtgccggagcacatgctccaggagatttggctggaaaagaagatcacagaatacccagaaagattgatgccatgaggagacaaagaatgtaccctgaatacaatgcgtgttcatgctcagatggaaacaaatttgcgtaaatggtctctcgatgatgtagaaactactaaaggttccatgttggatctgaaaatctttcaatctaaaatgggactccccaaaagcactaggtggaggaaccattctgcgtattgatctatttggaaatgttgtgacagagggccattctatagcaagtgttgatttgcg

SEQ ID NO: 81086 - DNA, 475 bp, Glycine max
  Clone ID: PAT_MRT3847_44236C.1
attgagcattgttgctttgctgctgaatactgagcagtattattttaggcttgaagatgatttatggtttctctattattgtgaattaaacataccatgctggaatctgtttcatattttctcttcatataagaggtgctcgaatttctccattttagttatttgtacttaattatcaatttattgtgtagccatgcactattctcttatttcatcattagaatacttgaacttccaagtgtgccatcttatttgtgatatactgtataggtctggacccatttttattttgtcattgggtattcagtattgtttgttactttggtcatcaatcattgtgatttgataagttttaagtgaatcctatctgtatagtttttggaatcttattagttggttatatgttagtcttatgtcatctgttttcatttattatgcagcacctctggctgtccatttggtgaaggatgccact

SEQ ID NO: 81087 - DNA, 425 bp, Glycine max
  Clone ID: PAT_MRT3847_44237C.1
ttattttttttatttttttttttttttttattttttattcctacttctgtttctggtgcttgggagagtgctataacaaacacactgtttcctggggaacgaaaaggcttggttttgaaagcccaattcaaattgctttggattgagcgggcacatacacatgaaaaacaatggtgatgttgttgaaagtgaatggggccatggagctaatcttgatgttctggaatcaaaaattgctttaaatacttcacacggcttttaggctacttggaaccgatcacaatgaggacttgtaactggggtccacacatatgacattggtctttgtgagacaccaaaatagagagctaccatcatccagccctccttattgctgacggagtgtcccccatgcgcgcttttgattttcggatggatgaatggtg

SEQ ID NO: 81088 - DNA, 408 bp, Glycine max
  Clone ID: PAT_MRT3847_44238C.1
ggggccccaaaaaacattttgttcaggcgtccccttaaggaaaaaaccctcccgggggggggggaccatttttttttttataaaataaaaaccccccccttccttttccccttataaaaaacataattttcccccaaaaaaccggggggagaaaggccccccccccaaggttttcatagggcccccccttttaaatttccctttttaaaccccaaatcccccctggggtttctttggggccccgttgggggcaggggccttatcctgggcccgggcagttttggccctgggggccattcccggaacagggggaccatcgggattgggccccccccccattggccaaataaaaggcctccccttaaagggggggggggcggggcccccctgttccttaaggatataaaa

SEQ ID NO: 81089 - DNA, 418 bp, Glycine max
  Clone ID: PAT_MRT3847_44239C.1
tattttttatattttttttagcccagcacaaaaccataatgctatcttggacaagactgtttgtgtgtagagaatacaaaatgctgcaatgcttacagcataaaacagctaagagacattcagggctgttgaaaaataccagagatgactcttatgtgaaatatagggaagttcacttcgctttttaaacttcataacaacactgatggactgcctgtatagtatcactcactgtatttaagctgccaagcggagaagaaagaggatgagctctgtcatatgcgtatgcactcctttttgctacggctcttagatgttatatcatctacctatactgatctaacctactgaaaagcaagatccacattggacgaagaagatttgacatcgaactattgaaggaaaaacgtagagaccc

SEQ ID NO: 81090 - DNA, 156 bp, Glycine max
  Clone ID: PAT_MRT3847_4423C.1
gcaaaatcctccctaggacagatatgcaatcaaccatatattggataaaatctgcaattaggatcccttggctcttgcttgtgttaaaattacacaaatatctttgtcttggagcactataatttgacagatttagatttactttttgctgactat

SEQ ID NO: 81091 - DNA, 601 bp, Glycine max
  Clone ID: PAT_MRT3847_44240C.1
ggaaaaaaatatatataaatccatgctttttcttaaaaaaaaaaaaaaaaaactcgaggtttttttttttttttttctttttttttttttttttttttttttttttttttggatggtaacaaattttaaattcatccatgaccatgaatatttatacagactggagctgctgaaagtgatgttattctccaaattaatttgagcaccttccattcattaataagtaataactaacatataaaaagcacataatgcaaagatatatgagaacaacatctacagaaaactcaagtcatcaactgataactttacttccacaaaagtgcacaaagactaatgcaaacactgctgacttgcaaatggtggataggggaatcccgtattttcctctagcaaacagtcctttaaaatatggccagtagcacactaccaaatacgtactacagatgaattccccaagtccactcccattaccactatgatttggttgcaacccccaaaacttgatcaacattgctgtcaaatgcaccaacaaaatggtcgtgcctaccacaaaaactggagactcgtcgaacgtgaaccttccagcatctgcattgtt

SEQ ID NO: 81092 - DNA, 230 bp, Glycine max
  Clone ID: PAT_MRT3847_44241C.1
ccttgtaaaaaggctaagaccgggacgcatactgataggggatgtgcatgaaccgtagacaccaacggaatccggacatacaaacattacacaaacaagctaccagataaagctggtgttttattcataaaccaccataatttgtcaatgaagaatcatctgggatgggcacagggcaagagagcgtttcttgtgcaggacacacgctgaataacggcgcattcattgaa

SEQ ID NO: 81093 - DNA, 226 bp, Glycine max
  Clone ID: PAT_MRT3847_44242C.1
gtgagggggaagcccttcttcactctctctctttcttccctttgcttgctactcttgtcgagtgtatgctgtgctattacctccagcaagttcaacgagtggcaactcaacaacctcaacgcgttggaacccgagcaccgcgttgaatcctaaggtggtcttattgaaacatggaactctcgagaccctgagctagaatgcggcggtgtcacggtatccaaacgca

SEQ ID NO: 81094 - DNA, 695 bp, Glycine max
  unsure (1)..(695): unsure at all n locations
  Clone ID: PAT_MRT3847_44243C.1
ttgccttcgcgtccgggnaccaaaccagccatgccaaattccgtcggggcatagaatcatcactatatctattgagagagaaaacgcgacccatcatgtgcgatggctgagcacacagcagaaaagaacagacgcaggttcccaattccacccgtccggaagaagtgaagaacaatctaggttttcctttctccgattcactcccagagcgaagaagccgccatgggaggcgaggagaagcggcaccagatgatgcagaacctcttcggagaccaatccgaggaggaggaagagctcgacgttgattctgagcacgaatcaaacccgcaactcaattacccctccgtacaccccaattccacgaaccctaaccttttccttacgccacgtttggatcccgaaccatttcctaacagttttcgtgtttttttttttcttttcaatttttcaggacgagggggagggggtgggggagcaggagggcgaggtggagggccagggcgaggtggagatcgagagcgacggagacggtgagcccgaccgtgagagcgagggcgagagggagcagagctcgcaggaggtggaggttgtggagagggaagaggagagcgagggaagagactcggatagtgatgccaaggacggcgggtatagccagcatggcgtcacgagcaagcggagggacgacgtcgtgg

SEQ ID NO: 81095 - DNA, 545 bp, Glycine max
  Clone ID: PAT_MRT3847_44244C.1
ccacgcgtccgcccacgcgtccggatctccgcagcgtctgaggcaaggggcgtaggaggagggcgaagatgctggacatccagaagcgacgcgtccagctgctgctgttcatcgtgggcgtcctcgcgctcagcatgaccgctgagaagttcagggaacttgtcgggaaggaggaagcatcaaagagtggacagtttacgttcatgaactgttttgatatgggctcaggcagccttgcgtgcgcagtgaaggagggcatcaagttgtatgtctacaacctccaaactgcacatacggaaagggtgaggcaccgggccattgagaaagcattggctgatgctgtgacagaaggcctgtctgccgctgaggcagcaaagcaagctcagaaggttggtgcgaaagccgcaaaagtggcagctcgtcaagccaagaggatattggggccgataatttcttctggttgggacttctttgaagccatgtacttcggtggaagcatgactgaaggttttctccgaggtaccggcaccctatttggaacctat

SEQ ID NO: 81096 - DNA, 702 bp, Glycine max
  Clone ID: PAT_MRT3847_44245C.1
ttgagttgcgcttagcacccggcttttgatcacgtgatgatggcagcttatgcattgggttaacgtttccagcaccattcaccttctgcatagaagaaggcctagaagcaatctcaccagcacttgacacagaagcagcagcagtctcgagattcttgagtggtctttgtgcatcagagagacgtggccaagactcagtccccatcatcacagacacatcacctcctcccttcccatcaacagtagtaggtgtcttccatggagacttgggagcaccaatctccttctgatcctcatcaatctcattatcagcagtcaacataactgctttttttttttctctctctctctctctctcacacaaatccacccaactcccaagatttcccctctctaaaccccacttgccaataaacacaacactctaaactatcaaccaaatgggtactcagagattcaccaaaaacttaaagataccacaaaaagattgaaactttttacttgccagttgaatcaatgatattgagcacaagaaccctgagctgaacaggcgataatttcatgtgggtgtgctaaaaagggttccttttttatgaagttttaatgaaaggaggagttgggtcagtcagcgtgacagcaaaagaatagtaaaaaagattagggtttggacagtgagtgaggtgatggaatacggacgcgtgg

SEQ ID NO: 81097 - DNA, 250 bp, Glycine max
  Clone ID: PAT_MRT3847_44246C.1
attcaactctatcttcacctttttccctcaacttgtctattttctaaggttagattatctgatctctttccctccacactcatcctctacctctcaacactctccactctccaccatcaaccacacctttctccattaataatcaataatatactcaatattatataacaactcttaactcacaatctcatccaaataaattcttaaaactatttttcctttcctttacaatttacatcttacttcttat

SEQ ID NO: 81098 - DNA, 268 bp, Glycine max
  Clone ID: PAT_MRT3847_44247C.1
gaaacgtgagagtgatataaaaaaacaagaaagaaaaaaaaagcggacgcgctacacgataggatctaagctaaccttgcattgcatgtcatatcacatctatactgtcatgtaaattcaattcaatggacgtcgcgtcagattataatgactggaatgggactgccctgacgtaacttaatctacttgcattacatcacattttcgttacgtgacctggtatcaaagaggccaggaccgatcggacttcccatcacatgagtagccc

SEQ ID NO: 81099 - DNA, 336 bp, Glycine max
  Clone ID: PAT_MRT3847_44248C.1
cttaggacttgtccttatccgagctcgccgcactctacatgttctcataagagagccatcttcaagccaatgtggactgagcaacacctacatttgaagctgaggtgtggatgctcatggtaactgtctctgaggtacttgatggctgcagaggcatgtctcatgagggtgaagtctcaggctatacgaggttgtggtcacagacttgctgtgacatgcaaagggggtgcttattcatttggttccaacaggtctggtcaactaggacatggcaccactgactagggatggcgaccgtcaccaataatgtcggaacatgcgatcatattgcaactt

SEQ ID NO: 81100 - DNA, 443 bp, Glycine max
  unsure (1)..(443): unsure at all n locations
  Clone ID: PAT_MRT3847_44249C.1
acggagacacagnnccaggaccggccacacgacacggaggaacccncgaacggccaacacccggacggacgcaggaagaaaaccgacgcaagcgcggnngcaancgcggagaaccgccnncggcgggaggggcgagacgggccaaagggggcaancacggacgccggcanagcngcncnggcgagggccaaacagcggacnnggcaagcgcccgncgngncaaacgggnncnggngnaacaaacaagagngcgccggcccnaaaaaaggggggccagaccgnggnggggcngaaccnncaaaacggcaanncgaagggcggcaacacagnnngagcccnagnggagaaccggcggagacgcgaacacccggccgaanancggaaccacccaancgcaanancagggaaggagaagaacccaagngacaaaaccgaagccggaa

SEQ ID NO: 81101 - DNA, 265 bp, Glycine max
  unsure (1)..(265): unsure at all n locations
  Clone ID: PAT_MRT3847_4424C.1
ctgtnattccagtttggagaattagcagagatataatgagttacnggattgaagttgggagagtaaaaagtatttttactctaaaaacaacaaaccttttcttcttaataatggtctaatcctaaaaaaaaaattaatnttattgaaacttgcagttttatattgtaatttgtaganatactttcatanttttagtcaaacaaaggcatagtctgtctagaaggcatagtctgtctaggagccattgactctggttgtgaatttt

SEQ ID NO: 81102 - DNA, 671 bp, Glycine max
  unsure (1)..(671): unsure at all n locations
  Clone ID: PAT_MRT3847_44250C.1
ccacgcgtccggccttcccttcggtatgcgatatcagtatgtaaagttcatttctctgcccagtcaaaagcttttgaaacttctggtttgagggacttcaccgctaacgagcatcgataagctgtcgcaagcaatcaaagcgattcccttccttattctaatagaaaaggtaatccgggccctccccctgtctacagctatgctatctctatcactgctaaggtcaggttttttttgctggatcagatatggagatttcagccctttccttccttgtttgcattccaggttggttctaaagaaagggttggaaaatggaatcaaacaaaaggtcagataggcctcccgtcccattctatttcctaagacaagatccgtcgtggttcggagtctcgtactagcctcgccctatctaaaactaaaaggcggatggaagatggccttcttaatgagctctctcgctttactttatcggtatagcatttcttgctagatcggattgagagtgacttcttccgctgtctatgttttcaaacatttncatcggtgtcgacattttcttcatctcagccagtgtaggcttgctccgcacacaaaggctacatctgggcctttcattgatttgacttttcaattcattttggaagcccttccttcgctccgggcacgct

SEQ ID NO: 81103 - DNA, 369 bp, Glycine max
  Clone ID: PAT_MRT3847_44251C.1
ccccagcccacccaaattcttaatttaaggaatttctaccccatcgatatttaatttggaggggaattttgaggtaccaaaaatggtctcacctttaaaataaaaataccaggtcgaatttttaagtaccttaggacaaaccttaaaaaaaaaacctgggtaaaaggagagtagatacctggggacattttggcatttaacacttaacctcctttaaggcttttgcaaagtttaaaaatgtgggatcagcacccccttccttgttgtttgcaaaaaccaagcaagcttttttttttttgctttccccaaaaaaaaactggaaatccttatttttaaagagcaggtttttagtggccccctaaaggggct

SEQ ID NO: 81104 - DNA, 1422 bp, Glycine max
  Clone ID: PAT_MRT3847_44252C.1
aaatggctagttttaaaaaacgttagcccagtttgtccagaagtagcagtcaatgtgttcagcactgtctctgatgtaactgtaactcccagcacgaggcctatcaccacaacaataacaaaataacggctgcgagaagacgacagaaggggaagcagagccgaagcggaacgcttgctagcgatcggcgagaagctgcttcagagccgcgatctgagcagctcgcgcgacttcgccatcctcgcccaggaagccgagccgctcctcgaaggctccgaccagatcctggccatcgtcgaagtcctcctcgccgccgagaagccaatcaccaacgaccacctcgattggtacgctattctccaggtcgatcgcacgtgccaggacctcgatctcatcaaaaaacagtaccgtagactcggtcttcttcttcaccccgacaagaaccctttctccctcgccgaccacgccttcaagctcgtctccgatgcctgggccgtgctttccgacccggtccagaaagcgatttatgacagggacgtggccggttcggtcgaaccggagagcttctggaccgcgtgtccgtactgttattttctctacgagtaccctgcggtttgcgaggggtgctgcctgaggtgccagaattgccagaggtccttccatgggctttcgattccctcgctgccgccgctcgtgccgggccaggaggcctattattgtaactggggctgcttgcccatgggctttgtgtttgggaatttgggctccgatgggcctgggcctgggcctgggcctatggtcgagaatggacctactgcggtggcggtttcgaatggggttaacgttgcttcgcggaagcgtggaaggccgcgaaagggggtttgagttttgttcactttttgtttttggttttgcttggagcgaattgcaactgaagcaaaacatggaggtggtgttttgttttgtttattttatttttttttaccttaattatttctttgtttgttgtacatgcatgctcttttcgttgttgttgatgttataaatgtagctctcttgtgtctggtacaatgacgatggcacaaagtagtagatcaatgtttatgtcattcaatatcatcaaaaaaaaaaaaaaaaaaatatttatttcagaataaggttatagacttatagtactgggctagttttctagctttatatggatttgggaaacgttcatctgttgtttacattaaatatacgatcattactcaagtttaaaggattttgtttgaggcacatttgctgtatccttttgtcatcatcattcatttgatgctgccacgatgttctcactaaattgctgtggggggatttttagttttggagttcattttgtatacgtaagctaattgctaaactttttaagtggatcagtttcgt

SEQ ID NO: 81105 - DNA, 337 bp, Glycine max
  Clone ID: PAT_MRT3847_44253C.1
agaagaccacacaaagggacatacatagagtcttcaatctttacccagataaatacataaaaatggttactcttccaattggcattaggaaaaattgtctaacatactttcagtatgaataagtaagggacacaccaagcgaaacatgaaacattcttctgataatcttcactttggttgcagcaatgacatttcaagctgcagtgaatcctcctgttggattttgacaagacgataacgatggacacgtctcatgaagagcaatctatgcttcagatacacattcttactatgtcttcctcatattcaatactttggcattttctaatcccatatt

SEQ ID NO: 81106 - DNA, 351 bp, Glycine max
  Clone ID: PAT_MRT3847_44254C.1
tttgatttttcggctgagggctgccactctgcgatcgggtatatgacttcgtgggttgtcttttgtataacggcccttgctttcactctctacttctcacagagccgcattgccgtgcaaagtgctcttatttgacacacacttgggccttggtgcaagtgaatgcttcgttcattatgtgtggggacaacaggctgactgagaaaacaacttgtactggcagagatgtggacgtgtcagccgtttattatacaatagcaactgattttagaaaattcctaccagattacattaggtgggatcagcataccttgtggatatacattgctcgcatctttgttaacctagctg

SEQ ID NO: 81107 - DNA, 204 bp, Glycine max
  Clone ID: PAT_MRT3847_44255C.1
atccctcctctctgctttcatgttttataaaatcatcttctacttttagaacatattcgaccgtgtcttggtgatgttcttctatttgccccttgtgaatcacccggaagaaacccaacttataatttttttaagctaaagccatcagtattcttctagacacttttaaaaaaatctctgatattgagactattgggatcaaaa

SEQ ID NO: 81108 - DNA, 240 bp, Glycine max
  Clone ID: PAT_MRT3847_44256C.1
cccccttcgagactccgagaccaccatgagggccgcggtcctggttgcgttgcaggcggcggtggcgtgcgccgaggacgagaagaagacagagaagaagcaggagaagcgcggcctggtggactcgctcggctacggctacggcggtctggaccacggcctgaccagccacagctacagcagcctggacctcggccacagctacggccatggctacggccacgactacggccacagcta

SEQ ID NO: 81109 - DNA, 1324 bp, Glycine max
  Clone ID: PAT_MRT3847_44257C.1
atactatttgataccttttgactagctggctaaaattctgaaagatgtgaatagtgttgtaaattttgaaggaaattagagcgattcggtaaattttcgtcttctgagtatagaacagaggcgtcccacgccgtcttacgtcgctttcaccgttttcgagcatttgatcggtgatgtcgccataaattccactaacatcgtattcgtgtggaaattccagctccaatctgatccaatcgctaacacttgtaatcatttgcgtggaaaatgaatgtttcgatgctgtatagctcccttatggagcatttttggagatgtaagtgtatctgtgactgatatcttgatgctacttttgatggataaaagcaatgaccgcagctgctcaaacatattttcaattgcttcctttttaagtgtttctttttgttgcttcttgattttcgatcgtctttgttatgtcttatattgttggagtcagtccttgattataaggtcttcaaaaccttttagtacccttattattttaggatcaggtggtcatactgctgagatgcttaatctactggcagtgttacagaaaggtaggtttaatccaagattctacattgctgctgctactgataatatgagtcttcaaaaagctcagttgttggagaattccctggctgctgagatgctgatcagaaatagattttactgcagaatgcaacaagggtcactgatactgcacagttcatgaagatatatcggagtagagaagttggtcaatcatatataacctccgtttggactacttttgttgcaatggtgcatgcgctatggctaatgattaaaattagacctgaagtgatactttgcaatggacctggaacttgcattcccctctgtgctattgcatttatatttaaggtactgggaatcagatggtcattaattttctacgttgagagtatcgcaagagtgagaaggctctccttgagaggcctgctcctgtacaagttgcggatggctgataaactttttgttcagtggccacagctgcaacgacagtatccccgagctacctatgctggtcgactcatgtaaccaattggttcctttaatatcattaagcaaaagctgcattccatggttcatggttgtattgattattatatttaagttctccctgcatttattaaagtgtttttataggttatgctataaccatccatacctccatcaaaagcatgaaggaagacaaataaaacaaaatagtcaaagaaaatatcattccagacaaatttgtggggtgtgaaaccgttttttgataactactaaaaaa

SEQ ID NO: 81110 - DNA, 638 bp, Glycine max
  unsure (1)..(638): unsure at all n locations
  Clone ID: PAT_MRT3847_44258C.1
atactatttgataccttttgactagctggctaacattctgaaagatgtgaatagtgttgtaaattttgaaggaaattagagcgattcggtaaattttcgtcttctgagtatagaagagaggcgttcccacgccgtcttacgtcgctttcgccgattccgagcctttgatcgaattcagcagtgaagatgtaagtgtagctgtgactgatatcttgaagctacctctgatggataaaagcaatggctgcagcttttcttatgcccttgagcaaaagggcttcaaaacctgttagtacccttattattttaggatcaggtggtcatactgctgagatgcttaatctattggtagtgctacagaaagataggtttaatccaagattctacattgctgctgctactgataatatgagtcttcaaaaagctcagttgttggagaattccctggctgctgagattctgatcagaaatagattttactgcagaatgaacaagggtcactgatactgcacagttcatgaagatatatcggagagggggaaggtgggtcaatcatatataacctncgtttggactactttagttgcaatgggacatgcgctatggctaatgattaaaattagacctgaagtgatact

SEQ ID NO: 81111 - DNA, 483 bp, Glycine max
  unsure (1)..(483): unsure at all n locations
  Clone ID: PAT_MRT3847_44259C.1
cggttctcggaattcccgggtgcgactccacgtcgtctccgtacggcttttgcgagaagtacgtacagtaaggtgtggcaccaagnttgagtttgttggggatcgagataacgtgagaaacccagtgtgatngtaaaatgaagggtccttgggttttcttcgttggctaccaannntttggtagcatnnggcaatgccanntgcgtacgaatatgttcccttcttcctgaatgaaccactggcttanntggtgcccgtacttccggnnaggtgaaattgcgcaagttggagtgctttgctgttnggaagcacacatacatctttaggctttttgagaccnnnattcctgaagaaagtgcgtnntgaagcaaccaaagggaataccatttccatggcnngaacaatatnnagatcagacttccataaacatgtnntaaccaacctaagcttaaacttttatgctcagaagaacctttcgaagtc

SEQ ID NO: 81112 - DNA, 333 bp, Glycine max
  Clone ID: PAT_MRT3847_4425C.1
agattgagctcgctcttgcgtttcctcactctatcatgaacactggtgtgaatacggggcactgaaagagtaacacaacgttactacctgctccgagtcaaaatcttgggtcagatgtagccgaaggaatcccaggcgtttcaagaagggtacagcaccaatacagcggtttacttctggacgactctaagggactccctgtacgctgttactgtacgcactcctatgcagcacaccgatcacgtacgtacgcattccgatgacccatctaatacgattgatctggcactactgctcagtatatcgttccagactcatacgcgagcgagtcat

SEQ ID NO: 81113 - DNA, 523 bp, Glycine max
  Clone ID: PAT_MRT3847_44260C.1
atatttctgacagactcataactcatccttttgttatgcacatcaactacattagctgagagacttagacccgatatttagaagaatgacgatgtgaatgcgtgccactggctgccattgctcgcattgactcgttgctgctcctggctactgcattttatcttcgagctgatgtgctagaatactgccatctagaatctagattgaggtgcttgtgctcatgatgcctcttgctgaggtggattgaacgattggtgtgtgagacaaggaaggctgccactagagagatctatactaggcctcgctacccatgacttacctggatagaggatcaatcatttctactcttggatcatagaatatttgtcatatctctagcatcgaatacttaacattacttcgtctgtgatcaatatactgatcttgcctatgattgtgattcatctgatgtacttacgatacttcaacgcgattagtatttacgaatgaatgattaaagaatgcccctacgatctcaagcatg

SEQ ID NO: 81114 - DNA, 527 bp, Glycine max
  Clone ID: PAT_MRT3847_44261C.1
caacttcctcggtgtctcatggttcaggtagtgttgtggaagcagaggtttcggtttcgtacagaggggttcgaaggaggccctgggggaagtttgcggcggagataagggactctacgaggaacggagtgagggtttggttgggaaccttcgacactgccgaggctgctgcgttggcttacgaccaggccgcgctggtcatgagagggtccatggcagtgttgaacttcccagctgagattgttcgccaatcgcttcggaacatggagcagtacggtagtttccaagaaggctcttctccagttctggagttgaagaagaggcactccatgaagagaaaatcagagaccaagaagcaccaactccacgatgtgatggtgttggaggacttaggggcagagtatttggaacaccttcttactctctcccaggatatggatatggatgcttgttagttaagttacatttacctccttcgtcaaaccttgcctttcccatccccaccactttcttttctctctctatca

SEQ ID NO: 81115 - DNA, 1060 bp, Glycine max
  Clone ID: PAT_MRT3847_44262C.1
gtttgatcagaaaaagagatcatcaaaaaaactctagaaccctctctcttttattgtgctccccgaaatcaaatcaagatcctctaaattgccctaactaaattgcacaataatctcacaactttgaaaaggagatatagcatcgtttgtctctgctctttgattgcagcgtccggcatgtgattgatgtgtgaattttgaggtgctgtgttccgtttgatgaaaatgagtgttatccgagttgctccatgtcttcctggggtttatgctcccccaatcacgtcgtctcagttgcgtcgccgcgattttaactcaacgccaccttcattgccgacggcgtttgaccctatctctgtcacttccctgagcctaaaagccgaaccctcgcctcgcttacattgcttgcatggcctcaaatctcgccaacctctgcacgtttgtttcgccggtggacaagaaatgatggaaaataacggggatttccagagcaaatctcttcagaaagctatgggacaattgaagggatattcgatagaggatatattgcgacagcaaatagaaaagggcggaagtgggggaaagcctccaggaggacgaggtagtggtggtggtggcagcgacaacagctctggtggatcagatgggatgtcaaatgaaactcttcaagttgttttagcatcagtttgctttatattaatgtatatttttgtcatcaatggcttagaacttctaaagctagctaaggactgcatcaagtttgtgtctggtagaggccagagtgttcgattgaagcaagccgtgtacaaatgggtacgaatttacaagaatatcatcgagaagatggaagctgccaggaatgggttggagaaagcctccacttgcttgttggaccatgatttcttccgaggtgtctttaggcataacatgaaatcaaatccagaagaataatttttccgtgtacctattcatataaattttggtttccttctttaggacaaaaagtacattcaatatatatattttttgggtataaaaaaaaaaaaaaaaaaaaactcgagac

SEQ ID NO: 81116 - DNA, 149 bp, Glycine max
  Clone ID: PAT_MRT3847_44263C.1
ccaaagaaaataaaatcctcagtgttggtgatcatccaaacacggtctgtctgtctctcgaaaattctcattttccatataaaatctgaatcatctcttgtcaaccttatttttacaattactttcttattaactttaaatttaaccac

SEQ ID NO: 81117 - DNA, 443 bp, Glycine max
  Clone ID: PAT_MRT3847_44264C.1
acggctgcgagaagacgacagaagggtggtccttcttattttaatgcatgtgactgcaacaacaaagtaaattccacgatggagaggtaaagattgaatataattataccgtagcagttatctggactaggtaattgacacgtacgaattaacacggcaaaggaatttatatttttttacttctacatcattcacccacatgtaaaacgaaatttcagtgccattccttacctaatacgcacacatgtaaaacgaatcaaattaaaccatataccattgttaatgacactttggcgtctagtaatcttattaggagttttaggaccatttgcattcaataacgcggcacaagtatatgcgagagaaaattaacagggtcgacgttcatgtttattaattgcatatttgcatacaataaaatatgtaaaaaatgtataagtaat

SEQ ID NO: 81118 - DNA, 595 bp, Glycine max
  Clone ID: PAT_MRT3847_44265C.1
ggggggggggggggttttttttttttttttttttttttttttttttttttttttagcaaacaaggacaaaacaataacacccatttaaaaaaaaatgggttcaaaaaccaaattttaaagggacataaaggaaaaaacttcacctttcccaagccaacagggggggggggaaaaattttttctttttaaaaagggaacaacggaatgggagttgatactaacgaaaccaacacagcaaacccccacagactaaaaaaaaaaacccacccaaggcaaacagaaactatccattaacgggaacatcaaggaaaaaaagcaaaaaaacagggcccaacaatgatgggaaaggagggaactgggcccatggcaaacagggccgagccctcttggtacgggaaaaagggcacctgaatgggtggaaaggccccgccctaacaggggggatcttcacacatttaccagggaaccacttctggcagagggcacagcaaatccaaaattcatcagggccaaagggcccaccacaggccccacacaagggccccccagggtcataaaaaactggaacggccaggtcttaatccccaactttggg

SEQ ID NO: 81119 - DNA, 1482 bp, Glycine max
  Clone ID: PAT_MRT3847_44266C.1
cgtttttgtaagcaggtgaaaggtcgagagtttcaggagggaggcattttttgtaccgagatgcgcattaatgaaaaatgaataatgaataagaacacgaggcagggcagaggagaaggccttgtgattcatcatgacgaatgaacccaacaacaagtacgatgtttttctgtgtttagttggcccagatacccgctacaccttcgctggtaatctctataatgctttgcgccgcaacagaatcaatacctttttcacagaagataatcatcatgatgagctactactcatgaatggcgaccaaatttcaccctttgctctaagagcaattaaagaatcaaacttgttaattgttgttctctctccaaactacgcatcatccccaaggaatcttgatgaatttgtggccatcgttcggtgtataaagaggaagaagcaactgctgcttcccgtcttttacaaagtggaacgaggggaaataatggatgcaatatttagtggacctgatcaacaagcgctctgtgtattcgaagaaagatttggagattacaaagagagggtgaatgaatggaaggacgccttgctagaagtctacggttggactgctatggaataccaaaatgggtccggatacgaatatgaattcatccgagagattgttgatatagccaagaggcgccagcgccgccgatatgatgtttttctgagttttaggggaagagatacccgccactctttcacaggttttctctataaagccttttgccgggagggattctacgtcttcatggatgatgagggattggagggtgggaatcaaatttcacctacgattatgggagcaattgaaagatcaaggctttcaattgtagtgttctctgaaaactatgggtattccacgtggtgtcttgatgaactttccaagatcattgagtgcgtgaaaaccaggaatcaaatggtttggccaatattttacaatgtggaaaagtccgatgtatgcaatcaaacaaaaagttatggtgatgccatgactgcccaggagaaaagatttggaaaggactctgggaaggtgcataaatggaggtctgctttgtctgaaatcgccaacttggaaggagagcatctcagggaaaatcagtaccaatatgaatttatcgaaaggattgtggaaaaggccattaatataccaagtccttgctccaatgacagctacgaggaagagtcaagagtgtcaaaatgcacgcattgggagattgggagctgtgtagtcagctgatagtgacatcagcaagcagccttgaatttatgtgtgcttaacgatgttgttactatatccagttcaattctcaaggtttattatgttccttttacatcttgtgtaattcttgaggtctcgtgtttttctttttttttggtgtgtaccaaggtccaaggattatgtctgagattaacatctcccttttaatactactactctccctc

SEQ ID NO: 81120 - DNA, 346 bp, Glycine max
  unsure (1)..(346): unsure at all n locations
  Clone ID: PAT_MRT3847_44267C.1
gatgatggaatattttaatatagaccgctaatccaaatggtnnngtnnaatcctataactaaaagcacaaaaatgatatcttaaattacagcataaattacatatatcaattttgccggttttaacaaactcagacatttactggcaagaagcagtccacaactcaagtttttgtcaaatcttatcaaaatgggagaccaaacagcaaactcttaacagcaggaaaggtagtagaggcacaaagctagaaacctactgtcacaaaggacaatttgtgcataaatgacggtttttgaaagaaaaaaaataccgtatctattgtaggcaagaagatgattcatggata

SEQ ID NO: 81121 - DNA, 357 bp, Glycine max
  Clone ID: PAT_MRT3847_44268C.1
acctcaagggaaggttaagccaacgtaataatttggcggtccgccttgactgagcaacacttcgtcatggtcctcaaattgaccgaaagggactctcactcacaacagaaaccgtcatcatcatgatcgtcatcaagggcaccgaagcagactcatcgctgacaccacgatcgcttaccatgcaacgctgtgcaacctacaggaggagtcaggtcagatgctcgttgtgaactcggataatgtgggatcaaagcaactcgacaacatctccaattggtcaccgtcgcgacgcagtcgtcctcatggggaacaagaccttgatgaagcgctcaatcaggatgcacgctgacacaaggc

SEQ ID NO: 81122 - DNA, 339 bp, Glycine max
  Clone ID: PAT_MRT3847_44269C.1
gaacctattacatattcaatgggactttgatctcgaagggggccaaatgtcatgaacttttttacaaaggaggtctaccgaaccaaacaaaagaaacacccacctaataaatcgagcataacggcatagataaccctcctttggacatacaaaattaaatgcttccataaacataggtacccaaaaaatgcttcatttaccacaaactttttttttgacattggaaataaaaacaaaaacatattatccccccttagggggttggggggggggcaaaaaacaaacaaaaaaggggtgcaaacaaaaaaaacctggaaaacccctatttttttttcctgc

SEQ ID NO: 81123 - DNA, 558 bp, Glycine max
  Clone ID: PAT_MRT3847_4426C.1
ccctttccaccaaaccaaaccaccctccacatcatcgctacaccaccacgtacctgcctacgcgagcatcccagggagggttgtgctctgcagggcccgctgctggtccgccatgacagatcgccccccatgattgacccttcgatccgtctgcgacgggccatccacgccgccgacgcgccgctcgtcaagcgcatcctcaagtcgcacccgtcgctcctccacaacccggacgccgcgcctgccggccagtccaactccaacctgcacctcgccgcgtcgctcggccaccgcgatatctgcgaggccctccttgccgccggccacgaagacccctgcccggccctcaacgaggctcatcagacggcactcatgctcgccgccgccgccggccacgtcgacgtcgtccacctgctctgcgaccacgacgcctcgtgcatcctgcgacgcgacgcccgcggccgcgatgccgtcatggaggccagccgcggcggccacgacaccatcctccagctgctgctgacctacgtccccggcgaaccccacgtcgccggtcag

SEQ ID NO: 81124 - DNA, 130 bp, Glycine max
  unsure (1)..(130): unsure at all n locations
  Clone ID: PAT_MRT3847_44270C.1
ttcgggnnaaggatgtcaantgcatcggcaattatctttgggncagtattttggngnatggggaanttcnacagacttccaacnanaagntcagcgtgngatcacttcangtgtagcagtnataancaac

SEQ ID NO: 81125 - DNA, 350 bp, Glycine max
  Clone ID: PAT_MRT3847_44271C.1
ggaaaaaatataaaaatcaaggctgattaaaaccccaggtttcagatcatccaacggggaatacaagtatttttacaaaaaatatacatttctctagatgtggggctgatgtgaagtcagcctaagagtggtaatgttggtcaccgcaggacttaaaaatatggatgcacatgtgaaaacagggcatgaccacttgttcgctgaaatttaacctgtgacagaaaataggggaccaacatccaaaagaatggttaaagggtcatggtcttttgggggttgttcttgtccatgtgaaaccctcctgttttgtccaaactttttggacttggaaaaagattggcttgaatttg

SEQ ID NO: 81126 - DNA, 152 bp, Glycine max
  Clone ID: PAT_MRT3847_44272C.1
tacggctgcgagaagacgacagaagggacatggctacacctgaataacatttcaccatcattgcgacttgaggtattccctgggcaggattcttagcctttgccgcaccaaccggggggatcaataaggttgctggcttgttgaaaggggtt

SEQ ID NO: 81127 - DNA, 196 bp, Glycine max
  Clone ID: PAT_MRT3847_44273C.1
tttttggataaatacattagccgttctgagggtgtggaaatatccaaattctatatgaaaaaaaaaaaaaaaacacatcggtattatgactaaacgtttcgtgtgttggctttacaacaaaagcaaagggtgtcaaatccatattattcaactgaagatattcgtagaacataagtatgatgggagccaggaaaca

SEQ ID NO: 81128 - DNA, 254 bp, Glycine max
  Clone ID: PAT_MRT3847_44274C.1
catcaggactaatttttccacccttgaagatcttccctgctgggaattctacgagcaaagataggcaaacacacacgtcacaaagaacgtcacacacataggacgcatcaactaccatcgcatatgtctggtgcggagttcaagaaaacggacagtattgcctcgttagagcaactccctctgactgactgaaccctgacaacgctagaatgcaaatattgatggacactaacaaatgctttaatatcaaacct

SEQ ID NO: 81129 - DNA, 414 bp, Glycine max
  unsure (1)..(414): unsure at all n locations
  Clone ID: PAT_MRT3847_44275C.1
attaaatgtcaaagttctttcaaaaactaaattaatgtctattttatctttgagttcnaatcacacaaggctggattcaatccacaagggggctacccttaaccaactttcaactaataccttcctcaagtcttctccttcgaccgccctagtgaagaagccacacatgttcatgccatgaaccgttgcccttatggatatcaagaagtaccataacagcactgaacttctgatccaaaagcttccttttcaacgtttttttcatgaaatcgctcaagacttcataactcatctttctttccataacatcacccttttctttctccaataatcccttgaagcttactttttttttcttttttaaaaacactaaccttttttcttttcacactataattgtttaccattttttcc

SEQ ID NO: 81130 - DNA, 189 bp, Glycine max
  Clone ID: PAT_MRT3847_44276C.1
acgagaccaaattaaaaaaaaaaaaaaaacagccagcaaccaaaattgcggccacaacatcaagactcttttactcactgtggctgcatcactaccacaattgtgtctgcatctggggcgtgattgttgagtgttaggtgaagtcaccaattggggcctgattgcaattctggaaatctaatctaacta

SEQ ID NO: 81131 - DNA, 449 bp, Glycine max
  Clone ID: PAT_MRT3847_44277C.1
atatagtgcaataacagaattttttttggctccattggcacttagcatgggtttacatatccagctagttttcgttaaaacacaagtactcctacatttacgactagttagcttatgtttgtgtagctgttatcaatgtaatttccatctttccaatgcacaaaacgaaaaagacgcagttttgttactttcggaatgagagaaaatctgttgcaacgtacgtgtactcaaacatgcccttttagttagccttgggcggcatcgttttcaatatggacactaacacttgagccatccattattaatccatcttcatgcgccacccttctgctagatcccttttcggttcgttttctctttgacatgatgtttttttcttcctcttcttctctttcattgacaaaggttaagaatgatctaagacgagtatagtatgatgagcatccctc

SEQ ID NO: 81132 - DNA, 305 bp, Glycine max
  Clone ID: PAT_MRT3847_44278C.1
tacggctgcgagaagacgacagaaggggcaaatagaaataagaaagagtataagtatgcaaattgatctgtcttgattctttttttatacttaatgaaattacttaatgaattaatgaaatgggggggtaaaacaaaaatcttattattcctacctggtagtaacatttatttacttaaaactttccaggatggttccggattgggttgtttatgcttaaaattttccctatttactaaaatcaatataaaaaaaactttttaaaaggtcctatattaaaagggattttttggttttttcttcca

SEQ ID NO: 81133 - DNA, 442 bp, Glycine max
  Clone ID: PAT_MRT3847_44279C.1
ctatcataccaaccttaagaatgatctattgctcaaataaacctgacactttaaaacctatacatgacagatcaaatatattttgaaggatccctaaaaacaatgtgaatatctaccttctaagcaaggacctaatattatgcctaatcttgtggtacaaactccaagagtagagtgtgattaattactttagattctgggccaaataattgaattggacctgcactgatgtaacaattatttttggcccattcatcacgcaaggaggctaactttttgaagggtgctccttaaatcttcaccattgctttgttgatcacgggttttgattgaccatgcctacttttcagattcaaaattgtggaggggggcttttttccctgcaacccattattttttttgggggcgcgttttatttcccaaggaggctggtttttttttt

SEQ ID NO: 81134 - DNA, 315 bp, Glycine max
  Clone ID: PAT_MRT3847_4427C.1
ggcactcacactactatcatgcgtgagctctcgggggggagaagtgcacaagatctggtcgcattcctgtcacacaagttgatggtaggaagcaattttgattcgtaagcatattgaatacctgttcaacgcatgatttaacacagtaaagtaaaggaatggggttgatttttcagatgttatggaccactgaaagggtaatacctgatccgcacagactattcgatcagctttcattcatagccaatcaatctgagttatctatgattgctactgctactgattgaaattctgatggccactttttgctattca

SEQ ID NO: 81135 - DNA, 642 bp, Glycine max
  Clone ID: PAT_MRT3847_44280C.1
cttggtttttttgtgtttttttttttttttttttttggggtttttttttttttttttttttttttttttttttgggggcaaaaacccgactttcaaagttctttggttcgcacttgttacataaattgggtgaaccacccccatagcatgaaacaaggggtcgtcgtttcctatcaatgaggataacaagcctgaaatgggattttccctaaaacattgtaaatagaagggttcataattttaaccccactttggaaaaaacaagattttgccccccaagtttataactttgcctcaactacatccttaaaaggaaggagcaaaaatccaatattgggacaaaaaattgtttccatcatttggggaaacaggttaaaaatccaaatcatccatatttggcaccccactaggagggttattcttggcatgggaattatccaccacagctgcctcggttgttgtcagttgcaatgacacactggcagcatttaccaaagcagttctaacaactttgagaggatctattattccagcctttaccatttcagcatagacaccttttgccgcctcaaaacctaaattatgatcatcttggtccaacaaatttgctgtgggccaaaagcccatcaaaaccagcctttg

SEQ ID NO: 81136 - DNA, 259 bp, Glycine max
  Clone ID: PAT_MRT3847_44281C.1
gcgattatgtgtcaaaatatcctaactaatttaattaggcttagattcgcgaatggaaacctggatatttactcattcggaagaatgaggttagaagagggaaaatcgacgcacgtatgacgtaagttattttaaagtggtaactcgtcaacttctgtatgcaacacctatcccaattcaagtaattgagagcctggcggaacactataagtacagaagagctttctttaacaggagtaacggctctgcacttaagcta

SEQ ID NO: 81137 - DNA, 1430 bp, Glycine max
  Clone ID: PAT_MRT3847_44282C.1
ctcactcttgaacctaaaaatcatagaggtaaggaaaagcaagccatttactttttcttttttctcttcttcccaaaacaaaaacagtcacttttacacaatgccaccaaaatggtgtaaaattattctggggtccaacaagaccaagtgatgcaaattctgagacccactgaggtacaaagacaatcatcatcaaaagcatggaaacacaccccatgagccatcatcatcatccattagtttcttcccttttttgcttttctttctttctttttttctgattctaattctaattccttctactttacaaattaaagaggttgcaactgtgtgctgcactgtggctagaactacatgttctgtggttcccttcatgctttgcactgtggctggctcctgttctgtcaattttcactctctgggggttcagtttgagttagctcaagataaagacatggattctcagaggtttctcatttgacaaaaattgtcttgtatttctttgagggaagaagaagtagatcaagttaaaagattgcagatatgcttatgtggcttgttttgatgtttacttagttatgagggaaaaacactattttcaagggaagagctgaacttgcggaaagagtggaacaaaatttgccgagagattttctttcctttgacttgacttgcaagtacaatacaaccaatttggttgtttgctacataggaaaacgaggggcttgtttggttttttcttccactgcatcattttcagtttttcactacttgtgatgctctcattctcataccttgttctacctcattagttttgtgtgtgtgaaacccttggtagatacatggcagaaattaggctcacaagggttgagcaaggccaaaccaagattaagaatgttccaatagctgtcaccccagaagggttttggtgctgcccttcccctgtggtgtttcagaaaagcctcaaaactcagaatactctcaataaacacaaaccctcttcaccacccccaccaaaaaccagtgttcagaaaaagcctgtgcctgtgtctgtgtctgtgccagtgtgtgagagaagaactactacacctgccccttcaggattggtgctttctgatgaaaaacaatgtgcaactgctccagaaaggcctccaccacctaccgccacatctgtggctgctgcagagagggcacccaggcaaaaaattgaatctttgccaaagaaggttgctattgagtttggtgaacctggaacttgtgatatgaaagtggttttgttgggaaagcagggattttgtgtcaagttgagtgtgcacagggatgttttgacccagaagagtggtttctttttcgaaaaactcttcgaacaatcgggtttgtcgtgtctccaaatcggtgactgcgaagatgtggagatatatgttgaaact

SEQ ID NO: 81138 - DNA, 226 bp, Glycine max
  Clone ID: PAT_MRT3847_44283C.1
ggctcattcctacttatccttgcttgtcttgttccttgcagctctgctcctcacccctctggggcttgctgttgagtctgattcttactatatcccacccgttttctagattccaccattgttcatgctcctgcccgtgccaccctttttcatgcccaggcctcccgtttacacgcccaagccacccgtttacagcaaacccccttatggtgagtgcccgcctgtt

SEQ ID NO: 81139 - DNA, 633 bp, Glycine max
  Clone ID: PAT_MRT3847_44284C.1
aacagtcaaatgaaaaacactctttattgtgtcaagacagtgccatcagaattctacaaaaacaatgtgacaacaatcctggccactctttcttggatggcttgatttcataaacatatactctaactaaatttccaaattccaggaatggaaaaggaaattaagaatcaacgttcacttcagactcaccatgaaaatactataaatgaaggtgttgttgaccttaagcagcggctgtcctctttgcatataccatccataaacctcaatggggatgccaatctcctctccaagtgctcgcatcaaagctagacccttctggtagttgggaccccctctcctcacaaagatgtgcatccttgctgctttcaatttcgactccttctccttcaatgcccgaattataccactaaatgtggcagcaacatcagtaaagttggctatgcctcctcctatcacaagagctctcttctggccatcagggtttgcagttgcacaatcaattacaactctggcatactgcaagacctcctcttttttgggtgcaccgctgtattcagcatagtttccaagctcagatgcaaagccaagatctcctaccgtatcaacatagataacactagcacctcccca

SEQ ID NO: 81140 - DNA, 2693 bp, Glycine max
  unsure (1)..(2693): unsure at all n locations
  Clone ID: PAT_MRT3847_44285C.1
ccacgcgtccggagaacgtctaattgagagagtgaggagagtgaatttttactgtctatgttgtggattaaattagatttccaaagtagtttcttgtgttggcttggttgtgaatcttgtaccttaaaagtttctgtgtgttgactcacattggaatcacgcattgagttttgttatctttttcttgatataggaccctatgtttatttgaagccaatgtgatgtctcaaacaccatttgaatttttgtcctagatcatgatagctagtaaaatctggtgcatgcctcaagggattgaacttccaactagtcttgctttgtctatctgtcatctcattgcattgcattagtcagataacaatcttcaaatcttacatctgactggcttattgtaaataatgttattgtatttagtttgtttcctgggatgaataaatttaaacagaacatgatatgattgatatcatcttatgatgtgccttgtgcaaattatgtgtataagtttatacctgaatagatctaatctgaacctctgtcaaaaaaatttgtttatccagttgatatggtgtgtcttcaataaaacaatttaatccctgctttaagctgtgcaagactctatgatgtataattgatatgtggaaaatttcaaatttgtatcttactagtcagccagtgcaacatgctcatgtaactcgattataattntgntgtgtgttttatttcggtcatctgactgttcacacccaccattggaattccaccaatctccaaccttcttctccactgttccgtttctctctccaacggagagtccttttgttttttttgtcgagttttttgctcgtttattaagcaatggcacgcaagaagaacaaaaagtatgactccaagaggttgttgaaggagcactttaagagaatatctgtccgtccacccgttcgttagatctaacaaccacttatcccctttctccttctaacgagtgaggaaaaatggcgcgtaagaagatcagagagtatgactcaaagaggttgttgaaggagcactttaagagactctctggcaaggagttgccgatcaagtctgcacaaattaccgcatcaactgatttcactgagctacaagagaaggaaccctggctttcatcttctaaattggttgttaaacctgacatgttatttggaaagcgtggcaaaagtggtttggttgccttgaatttggattttgcacaagttgtttcatttgtgaaggagcgtcttggaaaagaggttgagatgagtggatgcaaaggacccataacaactttcattgttgaacctttcatcccacacaatgaagagttttaccttaacattgtctccgagagacttgggaacagtataagcttttcagaatgtggaggaattgaaattgaagacaactgggataaggttaagactgcatttgttccaactggaatgtctcttacgtcagaaatcgttgccccacttgttgcaacccttcccttggagatcaagggagaaattgaggaatttctcaaagtggttttcactctgtttcaagacctggattttactttcttagagatgaatcctttcacattggttgatggaaagccttatcctttggatatgagaggcgagctagatgacactgctgctttcaagaacttcaagaagtggggagacattgaatttccactgccatttggaagggttatgagtgccaccgagtctttcattcatggattagatgaaaagacaagtgcatccttaaaattcacagtgttgaacccaaagggccgaatttggacaatggtagctgggggaggtgctagtgtcatctatgctgatacggtaggagatcttggctttgcatctgagcttggaaactatgctgaatacagcggtgcacccaaagaagaggaggtcttgcagtatgccagagttgtaattgattgtgcaactgcaaaccctgatggccagaagagagctcttgtgataggaggaggcatagccaactttactgatgttgctgccacatttagtggtataattcgggcattgaaggagaaggagtcgaaattgaaagcagcaaggatgcacatctttgtgaggagagggggtcccaactaccagaagggtctagctttgatgcgagcacttggagaggagattggcatccccattgaggtttatggacctgaagccacaatgactggtatatgcaaacaggcaatccaatacatcactgctgctgcttaattatccattcttaggccaatcccttcttttacaagtattttcatggctagtttgaagtgattgttgattcttggttccctttccaactctcagaattggtaactttggtgagttagagcataggctgttataagaagtcatttagtcatcaaataaagtggtcaagagtgttttgtatcgtgtagaattctgatagtacagtcttggcacaataaactggaatgtgtaattgttttatgctatgtcaagctggaattttatggctctcggctttactttcagcaagtaaattgattttctttccactttatgggaacttaaatttctgtttaaaagggtctttcaataaacttgtttatgtactccctccgtttcataatatttgttgtgtaaaaagaaaaaaataaatctaattgttattttaccttt

SEQ ID NO: 81141 - DNA, 895 bp, Glycine max
  Clone ID: PAT_MRT3847_44286C.1
gtcaatgtttaaacacgactcaaacgatggagtattggttggtggtcgagtgttgcgccctaggtcaaagagtggggattgtaaaagactgtattatggagagaatgatgatgttgtttctggggataatggagagcatagtgggtgtgagagggtgaaagttaagaaggaacatgaagaagctgatgattttttggccgacagctgtgaaaaggaaataattaagccaaagaaggaaggggatggcaggaggaaattgaaacggaagcgtgggaggcctcccaagatagatttgaaaggggaagatgaaccaggtgatcagttgccacgtaagcgtggaagaccccccctggctggccgacaaaaccatctcgtgactgtggtgacacataatagaaaaggaaaggcgacccttcgaaaaggtaaaaaaggtttaactaagagcgatggtgctaaggtgaatgcaattggcgatacaaattcaaggaattctactgggggtgagttagaaaagaaggaggattctcttgtcaagaggaatgcagtaaagcaattagtgagggatcaaataaaggaacagctctcagctgcagggtggacagttgactttaggcccaggaatggcagagagtaccatgatgcagtgtatgttagtctggacggacatacacactggtcaatcaccttggcctacaaaaggctaaaagagtattatgaagctggtaatggtgaaggtaaggcatataagccaggcttcaaatttacaccaatagcagaagaggatttcaaaatgctaactaaggtaatgaacaagcaaagaaaaaaagggggaaagggtggaaagaaagttgatggagtcaatggtaaaaagaacaaagaaaagtcaggttatggt

SEQ ID NO: 81142 - DNA, 504 bp, Glycine max
  unsure (1)..(504): unsure at all n locations
  Clone ID: PAT_MRT3847_44287C.1
cgatgtcaccaccacttacatcgagttgccttgcggtcgcgacttcaacatcacttgcggtcaaagctgctgggtgtttgaatgggacgacatggacatcttccaacgcacttcgaccttgttcaacgactacttccacgccagattgaccggtgtgctgtacaacatttgcgagaacaagcgctacgaactcgacgtctcggaacagtgcagccaagccttggtccaagttcaatctcatcaaatcgagtctgtttcgatcggtgctttggatatgcgcggtaacttgcgatgcggcaaccaaaactacggagttcaagtgacgacttactcgacccaactctactctgactgcagaaccatcttctatgagcaagaaaagaatacttcaccgacacactcgcaatgcatctccgcctcccgcgccganaaacccaaaaattgtctatcncaaccgtcggttcaactcatttgtggaangggttcaatgatcggttccccacc

SEQ ID NO: 81143 - DNA, 247 bp, Glycine max
  Clone ID: PAT_MRT3847_44288C.1
ttgatcttaaacaaggtgtaagggcccaacgggagggtctaattaatccccgggggaatcaaatcgcacttattcttgtcaccaaaattagggcacgggaaaaataatgtatttcacattccccaagagtattatgacaaagctaatgaatttaacgctagaaaagttacaacaaaaatgactagtaaaaaaaatcagatctaagatactgtattgaatgaagcaccaatagcaattgctattgaca

SEQ ID NO: 81144 - DNA, 573 bp, Glycine max
  Clone ID: PAT_MRT3847_44289C.1
ggctcgagcttttatgtgcctggattatgctgtgtggcctcttccaagttggcaataaccataattattgctctggagacaactttatttgcctttacatgaactctaccaattttcatcttaaatagggttattgctatttgtatgcacatttttgcttcattaacatatctttgctttgttcttgttggatttttaggtttcttaaccttcccaaggtttctgaattttgatatgtattaatttttgctgtagtttatttttctgcaaatagaaggcaatgttagccgcaaaagcctctcttcgaaatctctgaccccaaataaagctattttagctatataaaatattgtattcaacattctttgttaacttgaattccacctgttattttgtataattgaaggacccttacagaagaaagggcaaagctgatatatgattgtgtaagtatgtgatatctacacaaattttcttgtatttattttctccagctcatgtatgaatgtgatggtatctggtctccttcataatatttttgtgcattggagcagaaacttgatacagtttatg

SEQ ID NO: 81145 - DNA, 341 bp, Glycine max
  unsure (1)..(341): unsure at all n locations
  Clone ID: PAT_MRT3847_4428C.1
gggncnggaattccggggcggcaccacacccgtccggaattttttcacacagggccttaagttgttttaaggattttctttttgaaaacttggggttggattaatatacccaggttttaataaacccaaaaatggcagtgtaataattgagttggggggcctttatgagaatattaagttccaaagttttgtttgttgagaaggttattgaccagacttttgttccaagggttaaacttgcttatgctttcccaggacaggggtttggggtgtatataattcctgaggcacaaaaggatgaggggtttttggatggactggttggttttttgacaaatttt

SEQ ID NO: 81146 - DNA, 715 bp, Glycine max
  Clone ID: PAT_MRT3847_44290C.1
atcccgggcactcctatatagtcgagctgcagaacatactccatcaccctaacgtattcgttcatgggaggacgctgagtaccatcctcatgcacacaacatatcgcatccttatccagtaggaggctgacaaacactcgcactgctctcttgacttgtttcaggggaatataaagcaagctacttgcatggaggatgattattctttggatctagtgacgagttgtagaactaagagaatattaatgacgcgaaccgacgcatcttcaaggtatagaggctattatacaatttgagagcatactgatttgtcacacgtcattccattaaggtgacagaagactattgatcaccactcacgactggagacattatatgaccatacattgacttttgtaaatgttatacaatatatctaaaacactatagatgtacttagagacttaacatctgttctaaaccagcagctaataatacatcttatcacttttcttggtactatttaatatgctacaaaaattatcagtttgtaagatttctggctactgttcgttaaaaaacagcgtcatatctgaacactccttcttgatacacaactcaataattctaaattagatccatggtaacttcaactgtgttgttgatagtaccttcttaaatattggctcttatctcgtaatgctcgagctcaatgtgcttttgcctagatgctttg

SEQ ID NO: 81147 - DNA, 354 bp, Glycine max
  Clone ID: PAT_MRT3847_44291C.1
cgcaagcacatgcggctaatttgtctgcttggtgcttatcaaacttccagggtaccggagcgtatttgaacaattcttaagatggattgaactggccatgaacactggctacgtatcgaggctcccaatcgagatattttttctctttgagaacaacgacatcgtgagaggagcatgtgtcttttcactgttggtcatgcgtattagagatactattccaatggctcacactatatggtatttctgatattaatgaagatacttgttctgtgctctgaaaatgactttgagcggggcgcacgaatgctgacgatcacatcatatctgctgatgactgtgaaaagaggaccggtg

SEQ ID NO: 81148 - DNA, 358 bp, Glycine max
  Clone ID: PAT_MRT3847_44292C.1
gtatttatgtcgtaatgtatgctgctatgccattgccaactattgaattggggaaaaaaaaaacagtaacctctaactaatgcatcctaacatgttgcttcacatagaagtcacttaaatttcttaaggtagtcattttgggtttgaagtgaagtgatttaaattttttaagcatataattttgaattcgatattaaattttgtgtatagaaacatattaaaaggtttccattttaacccattgaaaaatatttttatagtttaattttgatatattattaatgtaaaaaatttcatctaattaaaaattatttgaaatataatttttaaaataattatcacaaagattaataatttt

SEQ ID NO: 81149 - DNA, 365 bp, Glycine max
  Clone ID: PAT_MRT3847_44293C.1
agctcggaattcggctcgggcccgaaggtatcatcacttatacaattcccgtggcttaacaaaatttttttttttaattaacatgccttaaccacggggcataccttcttagcgaggcgggggggcgtgttcataatgattgctcaagtggaattgaaccttattcaactttgggcatttattgaaccatttgtatcattggtatgctccttccaccttatgacactgtggtaaccagccgcacaattgaaaaatccattccttatgaaagcttttcgttaaataccccttattaaaggccttcttaagaaattttcgtacctaccaaatacattttattggggattgcaaaatcacacttgaaa

SEQ ID NO: 81150 - DNA, 399 bp, Glycine max
  Clone ID: PAT_MRT3847_44294C.1
accacgcgttcgtataaattatggttcatatctcatttactctgatttcatctcatattgggccttccttcgtatagcagaaaactaacatggggaaacagattgtgccggtgaaatcaccgatctacgcgctctccccttttcagcaaaagataatgccgggtctctggaaggacttgcccacaaagattcaccacaccgtctccgagaattggatcagcgccactcttttgcgtggtcccctcggcggaacctacacgtatgttcagaactacctggcaaacgagaagctgtctcacaggtgctgaacttatgcgggagctgagtggataaccctctactttgcagccttgatcttgctaagcacccaataatgagacactgttgaaacttgctcta

SEQ ID NO: 81151 - DNA, 553 bp, Glycine max
  Clone ID: PAT_MRT3847_44295C.1
ccacgcgtccgcccacgcgtccgcatgtacgacttgccgccggagttccacttcggcatcctcggctggtcgccgccgacagatggagccgccgacgccgccatgtggccggatgtcggcagcggcgccgccgccccgcggtaccccggtgggctcaaccagcagcacagcgtcgagtactggctcacgctcgatctcctctcctcctcgtcgccgccgtgcggtgccgccgtcagggtcgccgactcccgcgacgccgacgtggtgttcgtgccgttcttcgcgtccctcagctacaatcgccactccagggttgtgcctccggagaaggtgagcagggacaaggaattgcaggagaagctggtcaggtacctgatggcgcagccggagtggaagagggtcgggtggcgccgaccatgtcattgtcgcacaccacccgaatagtttgctccatgcccggtcagtgctgttccccgtggtgttcgtgctgtctgacttcgggagataccatcctagagtagccagcttggagaaggatgtcattgccccttac

SEQ ID NO: 81152 - DNA, 509 bp, Glycine max
  Clone ID: PAT_MRT3847_44296C.1
ttcatttttgaggatggggaaactgactctccgccagggcacttcccaaagtgtgaaaagaatgcctctttctatagggggaggagctggtgcacagaatgctatgctcatgaatatgccaaatgctgctctgtcaatgaggacatacctcgttggagatctcgtcttggaagtttctaagatgacctctccctacattaaatgtacagactctctcttcatagcatttggacatatggctgatgacaccactaagattgaggctgttccccacatgctggtgcagagtggagagattcaggcaatagcttgattgcaattgtcacaggaggaatttctaacagctcgaacaacttaggtgcgtcctgcaacaactctgttggctgacgggtgtccatattggcatgctatggagcatgacagttcaaggtctacaatacccggtgactttggcattggtgtcaatttggcaaccttaaacaatatttgtgcatatggcctcaaccctg

SEQ ID NO: 81153 - DNA, 713 bp, Glycine max
  Clone ID: PAT_MRT3847_44297C.1
ggtttcttgtttatggaaatgtgtcaggcatggttctaaattgtggttgtgattgtggtttcatcgcgatccttgacattgtgggaaaatgcagctgataccaccacaattgcagtcatgatacggttgtgttgtaagttgaaaagtgaaaacccaactgcaaattagaaccatggtgtcaggtgtaatccctgtaactaagtgagaagtgagaaggaaggagaggagccacatatgatgcatttctgtaaatgaagggtcaagagatggttttcttagggattggaaatgaaatttctgtatttggggagcttaaaacatgagtttaataggtatgcactctcaattaaaaaaaaatattgtcaacgaattggaaatcattcctgacgcaacacatgtgggtagttattataaaagtgaataaccttatcattcatggctgtttgtgatcagttaacatgttatgtaaatgacttttataatgttcatacatgtattatttattcccaaaaacatatttatccttcttaattattttttagttgtctattgtttttgttcacctggtttatggatttacggtgacatggtttatctgcctgcaggttgtgaaatataatgatcgaaataagctctgatggtttccataacagaagagtctacacccttctgtcgtctttcgcagccgtcggacgcgtgggcggacgcgtggg

SEQ ID NO: 81154 - DNA, 331 bp, Glycine max
  unsure (1)..(331): unsure at all n locations
  Clone ID: PAT_MRT3847_44298C.1
ccgcccttttttttttttttttttttaattaatncaaaaatcagatacactatatttcttaagacattcaaagctaacatgttatatatctacaaaaactcangttgcaaataacaaccccnacaaattcaaacccctccaccctaaaaaaatatatatattatataaaaatgcacgattgacaaaatggaatcaaaactctcatttcttcaaaagatggcattaaaaacttatacacacccttattaactccatttatcattccaatccttaaatccctctctttttaaaataccaataatatacttcacacccttcttcaaattttttt

SEQ ID NO: 81155 - DNA, 494 bp, Glycine max
  Clone ID: PAT_MRT3847_44299C.1
tggaaacatgactaaccttgtagtccactggaccagccgtaccagaaattttagggacacagtcaaagcagcttctgaatttgcttcaagaaatcatttgccccatcgcattcaggatcaaatgttgtcacatatatgtttaaggttcaaaacagaaggactgaagcagcaagaaacattgaatgatcttccaaaggcaattcgttcaagcattgcacaccatctgttttttcctgtcgtgcaaaaggtctaccttttccaaggagtctcacatgatttccttttccaactggtttcagatatggaagctgagtatttcccacctaaggaagatgtgatgctgcaaaacgagtcatctacagaactttatgtgctggtttcaagggcagaggatctggttcgctacatggatgggcatgatcatgttcacgggaaggcagttgcagtagatgcatttggagagattggagttttatatcatatactacagcctt

SEQ ID NO: 81156 - DNA, 424 bp, Glycine max
  Clone ID: PAT_MRT3847_4429C.1
ggggaaacaaaaaagggggcccaaattttatttccaaacattcatgaattatgactgctttaaaacaaaataaaattttaccgaatataccatgttaaaaataattttttgccccttataacaaacttaaaaaaaaaaaaaacccagttgttttgctacaaaaaaactgatccatattttacttttaaaaaagacaacttaattgaagggccgggcaaaatctttgccttaaaaaacactttttttttcccaccccgttggttggacagagtcaattcccaagggaggaaccgggatttgttgtggtggtggaacaactttaccccaattttcttttgaaacaacagcaggtgcttttggaggggccccccagttgacaccaagtgctttttgaaaaggttggggaactgcatcactccatgat

SEQ ID NO: 81157 - DNA, 391 bp, Glycine max
  Clone ID: PAT_MRT3847_442C.1
gttttagcaagtaacaaaaacacatatcatggctgatagtaatgcatatctggcacatgtactagccaacaaaaatacagaggtggaagactattgcttccaaactatacctgatatctctccggactcctaagtgatctttctcaaataacgaggaaccaaatcaggaagcttattgcgtccaacgaaacacggtgaaaaacaaagagctgaacatttacacctggcctcacacagaaaagcaccctcaactatcccgttgccacagggacacacttactttcctccttacactgatggctgaatgcttactgcaggaacaacccccgctacctttagatgattaccagctcacttatcacaggccgtcacgactggaatttttccatct

SEQ ID NO: 81158 - DNA, 398 bp, Glycine max
  Clone ID: PAT_MRT3847_44300C.1
aaattttttttttttttctattttttttttttttattttttttttggggttatttattttgtttattcgtgtattttgatttttttcctgaaagggacaaccggatccccaaagggaatcaaacaaaaccggaccaaaggcaaggaaaacaggggccaaaaagggaaaaggttgcgaaaagagaggaagagaaaacggacgaacgggtaaaaccatataataacgcaagggaaaagcaggggggcaataaatcaaaaaaagggggggtaaaacaaagaggccgagggagggaaataaacggtataaaactgaaaaaaaaaaaagtgcaaaaaaccaagaaacaaaccggaaaaaaaaaacaagcgaaaggggtaaattaacaaaaaagggaataagct

SEQ ID NO: 81159 - DNA, 498 bp, Glycine max
  Clone ID: PAT_MRT3847_44301C.1
gctaatgtgtcggaggcgaaattccaggctcgggggggtccatagccgctcgtagctcgatttgaggcctcggaacccccggctggtggttctccgaagcccatcactcagttctcagtccttgagatcgccgacacgagcaagcatgcgcaggccagggatgcttttgagaaccttgccaaggctgcaggaatcgaggcggcaggtggtgtcagcgccggtgatggacagaaggctggtctaggtgtgactggatggaacactctcgaggaggctaaagcggctcgtgatgatcccaagtttgcggcagctattgcggcgcttgagagcctcggaaagactcataacatctttgttcagatccagagattgcagaggtcaccaggtgtcgcggcagcttttatgcaatttgaagggataacttggcggctaactatgagtagagagatagctgaacatagctaaataaaagaataacttgccaagtatactaaatgc

SEQ ID NO: 81160 - DNA, 278 bp, Glycine max
  Clone ID: PAT_MRT3847_44302C.1
ctctgttgtatcaaagtaatttgtattgttggaaagagctatcgattctgttgtatcacagtaatttaatttccagtaaaaaaaataaaaaaaacaataaaaaaaaccaaaaaaaaaaaaaaaaaaaaaggggggcccccccaaatgggcccccccccccccgggaatttttccgcggcggcatccgggaggggccactctttccccctaagggggccttttaaagccgtggggaaaacggggaaaaatgtcttccccgggaaaaatttttccccccc

SEQ ID NO: 81161 - DNA, 311 bp, Glycine max
  Clone ID: PAT_MRT3847_44303C.1
ataaaaaaaaaacagggggtcctttgtttttttgggttccttaaactactacaaagggaaggggctttttatacggggttttaagggtgtgcctttttttaccttgggcaaccaagaagaaccggggcgggcctttttttggggtttgtccagggaacaaaggggtcaatttcggcttgtaaaaactttttttggtttttttaaaccatggccttttttttaaacctttttttttttttccccccaaaaggacggggaactagggaaattttaattttgggaattaatgggggaatccagggacctttttt

SEQ ID NO: 81162 - DNA, 354 bp, Glycine max
  Clone ID: PAT_MRT3847_44304C.1
tgaacctgtgcttgtgctgacactatttttgagtccctctttcgctattttcgagcccgctccgttctgagctgtgttacggcaacaaaagtttgaagttttaattggcttaattgttagtattagcaaatgaggataaggatttatgcttggtaacttcactgggcaaaagatatacttattcacctttatttgtcttttaaacaattatcaaatactaatagctaatgaactcggaaataatccaaaagtccatattaccgatgggcaagaaccaaacgcacaaatgcggcatctagattgcgccgattcatttgttgtgacaacatattcacctaacatgataagtgaagc

SEQ ID NO: 81163 - DNA, 391 bp, Glycine max
  Clone ID: PAT_MRT3847_44305C.1
tcggtgtattgacaattgtacgttggcttattacttgtgagggacgttgcgctgacaatcgcacaacctacagtggaaattgccagcgcagacacgtgtaagacgggttatagatctccaccttccaatctatcatatgcctttttctaattaaagatcaggaacagcgagagacagtctacgtctgccacgttgattgacggcacggacgatctatgtaccgtgctggggcacggatagcttcagcatggttctaccatctcgctgaacctgtagacggggaaatatgtggcttataagggcgtaggaaaagaaaatgtgaacaatgaccaaatgatggatcttgtggagtgggagttctcggtcatgaagatggtctagcactctaaca

SEQ ID NO: 81164 - DNA, 220 bp, Glycine max
  Clone ID: PAT_MRT3847_44306C.1
cgggacgaccaacgcctacatccacgcgtccagaagaaaactgtcttaccactccttctcataaacatcccacatatcactcgcgtttttatttcaaatgcggaactacacatatctacttaaataaattccaaccattttttttgctatcacaaccccatttatcttccacgcaactatattgcaaaagctattcttatttccctttctttgttattca

SEQ ID NO: 81165 - DNA, 704 bp, Glycine max
  Clone ID: PAT_MRT3847_44307C.1
ggcaattgagatggaaaaataataaaaagaaagagaaaaacacaggagaagagaagagagtagaagatacgaagatttgagacatttatataatcgaaattggaagcgaggaaggaaaacccaaatcgaaaatggcagtgatggagaggttgaagatgttcgtcgttcaagagccagttgttgccgcttcctgtctcatcgctggcttcggtctttttcttccagcttttgtgaggcccatgttggattcatatcaggcaaccaagcaacctccccagcctgctttaagtgacgtggttgcaggaatgactggtaaaaagtaaaggtgatttacttgacagatgcaagggcaaatttgctaagtttcttgtttgaacttattttaagtctcaaatgtgagagaaataagagtactgaatattggatttaacttccctgtctgacgatctctatctgttccggaatcattcagtggtttcatttcatattaatttcggctgagttgggttgaaatatcagtttttctgccgcttgatttattcggcctgtactagcagatacgatttctgaaattgtttcgatggatcaatgtgaagtatttttgaatacggaatgtgaagtattttgagaaacataaaaattagtcggcatttaaaaaaaaaaaaaaaaaaaaaaaaaaaaaaaaaaaaaaaaaaaaaaaaaaa

SEQ ID NO: 81166 - DNA, 397 bp, Glycine max
  Clone ID: PAT_MRT3847_44308C.1
gttaacaaataaaataaaacaagccatccattcagaggggaacaaatacaatcaaggaactaatcatgtcataatatacatgcatagaatggaataaaacagaaagattcacactgaattttgcaaaggaagaatactccggatacattagtgacaactaataccagcaagcacatacaaaaacatgagcctaagtctttgtgttgaaagggatgggtgggatgactatctggtgatactcagcacctagggctgctccaatgaaaggtccaacccagaaaaaccattggtcatcccatgcatggcctatgttgtagatgatggcagctattagactcctagctggggtaatgccagtttctgtgatgggaatggtattcaagtggaccaagaacac

SEQ ID NO: 81167 - DNA, 2311 bp, Glycine max
  Clone ID: PAT_MRT3847_44309C.1
gatcaacaaggtttactactcttgcttggtgaaggctatgcctaaatcgaatattccttcagagcctgagcggaatctggaccagatcatatataaaataaagcttcctggaccagcgattttgggtgagggtaagcccgaaaatcagaatcatgccataattttcccacgcgtccggggattgcaaacaatagatatgaaccaggataactacatggaagaagctttgaaaatgagaaatttgttgcaagaatttcttaagaagcatgatggtgttcggttccctagtattcttggacttagggagcatatatttactggaagtgtttcttcccttgcatggttcatgtcaaatcaggagacaagtttcgtgacaattggtcagagattgttggctaatcctttgaaggttcgtttccattatggtcatcctgatgtctttgataggctttttcacctgacgagagggggtgtgagtaaagcctccaaggttatcaatctaagtgaagatatttttgctggcttcaactctacactccgtgaaggaaatgttactcaccatgagtacatacaagtagggaagggaagagatgtgggtctcaatcagatttctatgtttgaagcaaaaatagctaatgggaatggagagcaaacactaagtcgagacgtataccgacttggacaccgttttgacttcttcagaatgttgtcctgttatttcaccacagttggattttatttcagcactcttataactgttctcactgtatatgtattcctctatggtcgcctctatcttgttctcagtgggctcgaagaaggtctgagcactcaaaaagccattcgagacaataagcctcttcaagtggctcttgcttctcagtcatttgttcaaattggggttttgatggccttgcccatgttgatggaaatcggtttgggagaggggtttccgaactgcacttagtgagttcatattaatgcaactgcagcttgccccagtattcttcacattttcacttgggacaaaaactcattattttggaagaacattacttcatggaggtgcgaaatatagacccactggtcgaggatttgtggttttccatgctaaatttgctgacaactatagactttactctcgtagccactttgtcaagggtattgagctcatgatattacttgttgtatatgaaatttttggtcattcttacagaagtactgttgcatatatcttgattaccgcatcaatgtggtttatggtgggtacctggctgtttgctcccttcttgttcaatccttctgggtttgaatggcaaaaaattgttgatgattggaccgattggaataaatggattagtaatcgagggggtataggtgtactgcctgaaaaaagttgggaatcttggtgggaagaggaacaagagcatctccaatattctggaatgcggggaattatagtggagatactgttatcattgagattttttatctaccagtatggtctggtatatcacttaaatattacgaagaaaggcacaaaaagttttctggtctatggcatttcatggttggtgatattcgtaatattgtttgtgatgaagacggtatctgttgggaggcgtaaattcagtgcaaattttcaacttgtcttccgactaatcaagggaatgatattcctcacttttgtctcgattcttgtcattttgattgctcttccgcatatgacagtgcaggacattgttgtttgcattcttgctttcatgccaactggttggggaatgctgcagattgctcaagcattaaaacctgtagtacgccgggctgggttttggggatcagtgaaaactcttgctcgaggttatgagattgtcatgggtttgctattgttcactcctgttgcttttctggcttggtttccatttgtttcagaatttcaaacccgtatgctgttcaaccaagcattcagcagaggtttgcaaatttctcgtattcttggtggccaaaggaaggaacgctcttctcgcaacaaagaataggttgttaactctgaagggttaattattaggagtccaaaattcttggttgccgtaagagctgtattaattgtaagtagttgtaactatgaatctgacagattctactctttgctttcattgtaacatttgagtaatcattatcattatcaaacatgaaagttattaagtcttcacatgtaagccctaagctatgcatcttcagagtgatatagaatagattaaaatgaaaaaaaaaaacaaatataataggatcgatcgaacttgtgtgccca

SEQ ID NO: 81168 - DNA, 438 bp, Glycine max
  Clone ID: PAT_MRT3847_4430C.1
atcatgacttgtccttttcattcctttcaaatatgattttgaattcttttcatacataattgcagttaaaatgtcacctacaaaatgttctccttctttactttttcaatttcacgaatttcatccctccatttttttcccaccaatttgatccaccactattttatagtacaattttggtccatatgttaccttaacattctgtgtttaacagaaatgatgacatgacagtgcactaaagtgccacatcaatatttctactaaatattggatgtcaagttaacagacggactaaagttgcacacttaaaataatagagggattaaatctgtaaaagcaaaatggaagaaatccgcaaaattgagaaaattgaaggactaaaagtgaaattaagtcaatttaaaatatttccaatagccacttggggtgcagggatgg

SEQ ID NO: 81169 - DNA, 241 bp, Glycine max
  Clone ID: PAT_MRT3847_44310C.1
ggagatcacgaggtagaggcttgcataagtgataaccttgtattgcccttatatctagtagaaacagcctaacacagcacatatcctaggaacgacgaccgaaatggccgtttctagctttcacattcagttttacctttgtatgccggtccgatcccgatatttggccccccccgtcgtacttcgacaacctacgtcgtcgtaactttcgctcctccgcaggatccgtcgcggcgtttta

SEQ ID NO: 81170 - DNA, 369 bp, Glycine max
  Clone ID: PAT_MRT3847_44311C.1
gataaatcaagccatgcatcatatgctgaataaatcatgcaagactcatggctccatgggggccatctatgaaatccaggattccaaataatccacttgcaccaaaacttccgcctatgttaatacagaatccgcttgctggtggcactttatgtcataagagcatgatattatcctaaatacatatggcaagagcacgtctggtgtcttactctcactaaccaaactgcagatgactgatgcacatgatggtggttacacactacactagatctatggccaaccctcccccactaaaggaaataaatgcgatatgtatgaatcgagcagtcaaatgtgagaacactctggacgctgcaaccgtgcctt

SEQ ID NO: 81171 - DNA, 252 bp, Glycine max
  unsure (1)..(252): unsure at all n locations
  Clone ID: PAT_MRT3847_44312C.1
gagcgccgaaaaaggcaggcaaaaggggggggcagagancacaacggggcgcaccagcacaagacnagaggaccacaccaagcgagcaacagcaggccaagggaaggagcgaagagacncggagccgcaagacaacgagaaacgaacgcgacagcngccacaggagacgaaccaccgaggggacagaagagcaggagaggagccacaggaanaacaagcggaacaagcgccaaaccggcagcaggagaaacc

SEQ ID NO: 81172 - DNA, 496 bp, Glycine max
  Clone ID: PAT_MRT3847_44313C.1
tcaaattggatctgtattaggaatagcacgtttcaaaattaaaacaatatttagtatgaacaattctcttttaaaaattattaaataacactgtcatcttctaatcagggggacctgggtctgtttcttctctctgaagagagcaatgacaagataaaaatgaatacacccgaaatgggcagtgcaagtgagaatagtgttaagagggagagaacaagtgaagggatttgctgctcatgcagtaagaagtccttgtgcaaaactaataaatgcaagtgtcgatccagtggagggagctgcggagcatcatgtggctgcacacgtttaaagtgcacaaatagggaaccaaaccaattagaaggaagtgaaccgctaaaatcaggtaatacagaatgtactcaagaggcttccgctgaagacaaagatggaagtgtgattgcttctgaatgtgctaaactactccagagtgcacttgttcagaaacctgctagttgca

SEQ ID NO: 81173 - DNA, 883 bp, Glycine max
  Clone ID: PAT_MRT3847_44314C.1
gattctaatcacaacaactaaccaacgtagttatggcttcctctctacacaactatgttcttgctatcttacttttggccataacccaattcaaaaccacatctgcgggctcccatcaccacctccagcacctcaaatcccttcacttctctctgtttcaacacgagaccataaacaaaaccggatacatcatagtggatggtataaaaggaggagcaggggtgactcaaaccacaaccccttttggcaccttatttgcctttcaggaccctttgactgttgcagccaacaggtcctccaaactagttgggattgcagaagggactacagtcacatctagtctcgacgggcttcggagcatttcgatcgccaagctaaccctgcgtttgaagcaccacaagggctccctttccattgttggtgtcacaaacaatgtcaaaccctctgatcttccagtggtaggaggcactgaagatttcatgtttgtgcaaggctatattagtacttctccagttgatctcaagggtcttactgttgtctacaagattgagtttcatctttactggcccccatatgcaactcaagcctcatgaactatgttgcatgggtagaatttatgtatgttgtgaattttaaggtatccctgtatctatggtcatgaaggtcctgaacaagaacagcctaataattttgtttggaaaattaccacctgtagcgttattgtcttcgtttaaatttgttcttggtagtcagtaatttctattgtatttccaagatgttgattcaagtggttaatcttccattttcttgtctgtttgtgctattattattattattttagtactgaaatgaaataataatttagtatcaacaaaatcaaaac

SEQ ID NO: 81174 - DNA, 370 bp, Glycine max
  Clone ID: PAT_MRT3847_44315C.1
aaaatgtattttgagacgagaggccccaaagagagcgaggggggaaaataaacaacacaaaaagccaacctccgcgcggagactccaagcagaagaccacccccagggccagagggcaacacgcgccgaaaacaggcacgacacggagaaaggggcccgacaccaacggcaagggaacaacacgagaacaggaggcccaaacaacaacaacacacggaccgcagagccaaccacgaaaacaccacaaccaacccgcggaaatagcagaccgcaccccaacgtcccccgccccagagaggaaaacatcaagcaaacagggggaaagttccaattaccaagaaacctggctcaagggatgaaaaaatagttg

SEQ ID NO: 81175 - DNA, 668 bp, Glycine max
  Clone ID: PAT_MRT3847_44316C.1
tttatttttttttttttttttttttttttttttttttttattttttttttttttttatttttttttttttttagcggaaaacaattgacagtttactttgcccataacaatacaacagcttaaggaaatgatttttcttgctatcaaaattcactttacagggaaaacaaggggccccggaaaagctttccccaccaacctaaaccttccaaaccctttaaacccaaactaaaaacaaagaatgggcatttttcatcactcaacaatttttttaatagagttcaagggccccacaaaagatagggaaggaaaagcttggagctttggaaagggtttaatgggaacccaaaatagccggggtaaaaaagaaaaggcccgcatatgtttctaccccatctaacattaatgggcaatatcggttacagggggcctacccttcatatggcctaaatccaagcaatctgaaaatcatattggcaaattttccagcttcttaccctcaaagggagccaattgccatgttgtttgccctcaaaaatccaaccctattttggcatttctcaaaaaacttccccagataggactcaattatctaattttagctggcaaaaagactcctggcctcagtagttgctcggccaattgatttgtgaatgctgaggctgctg

SEQ ID NO: 81176 - DNA, 327 bp, Glycine max
  Clone ID: PAT_MRT3847_44317C.1
gttatagaacgtgagcggccggactgtcttcaatgggctcggatgggtacttcattaggatctaacatccatgaaaatggccaaactgaattttattcaaagatgtctggttcacagactgatatgtcattaactccggaatcaagtgtttcttcagacacgaagtatgtccagcaggctgatgacactaaaaatgttcaagctaggccctctggcagatatgattctagatcatcaaatactctctttccaatgtctatctacaataatacaaccacatttatgcaatcaccaactgattcaatgatggtttcccaaaattacttg

SEQ ID NO: 81177 - DNA, 407 bp, Glycine max
  Clone ID: PAT_MRT3847_44318C.1
tttaacttttttttttttcttttttgttttttttcgacaaaaccccatcgtaaaacatcaaaaacccacttttaattatcaaactggtttacctattgccccatggtggccggggaaccccatcccggggcgaaaaaaaaagggggttaatattaaaaaaacccccgcctttcggtaccataatgctgtttaacaaaagggttaatttttttaaaaaaaccaactttttactgcatgcccgggcccttggaaggaagggcaacagggcaaaaataaccaattttaagggccccctccatttgcccttttgctccagtataggagaatttttggaccaaaaggccttgaaaccttgttgtttcccactaatcctctgacccacctaaccaaaaaggctttttttttat

SEQ ID NO: 81178 - DNA, 237 bp, Glycine max
  Clone ID: PAT_MRT3847_44319C.1
atttaccagtcatgacaaactgaaaaatggaattggaaagtgactaagagcttccatttgtaacatcttacaacttattgagtgcagggaggtacaaatacagtctagtctgtgcttcagtccattgtgcaatgagtaagcattgataatattgggagtctatcacctgctagataagttgtaagatgttacaaatggaagctcttagtcactttccaattgcatttaccagtcatg

SEQ ID NO: 81179 - DNA, 1597 bp, Glycine max
  Clone ID: PAT_MRT3847_4431C.1
ccctttcttccgatgcagtaaacttatcaatgttgctgtgcctgggactatagatgaacggaccatcaattgcaaacggaatcctagtttttgggaggtaaacgagaaccatactctatgcctcaattcagccaaggctattggctgcacagtggttaacattggcgcacaggacttagttgaaggaagacctcatcttgttctagggttgatttcccaaatcataaagattcagctgctggctgatctcaaccttaagaagacacctcagcttgtggaattggttgatgacaacgaggagatcgaagagcttcttaatttgtctcctgaaaaggttctactaaaatggatgaattttcatctccagagagcaggttacgagaaaactgtcagaaatttttcttctgatgttaaggatggagaggccgatgcttatccgattcatgtcgctgctcctgttgaaaaatttgagatctcattcccaaggaaaggagatcactgatgctgatatcctgaaatgggtgaacagaaaagtgaagagcactggcagaacttctcacatagagagcttcaaggataagagcctgtcatgtggactctttttccttgagcttctgagtgctgttgagcctaggattgtcaattggaaccttgtcaccaagggtgaaagcaatgatgagaagaggttgaatgccacttatataatcagtgttgcacggaagctcggttgttccatatttttgttacctgaggatattatggaggttaatcagaagatgattctcactcttgcagccagtataatgtattggagcctgcaacaacagactgaggacatggattcattcccttcacctgccggcactgctactaccaccacgcctgaagcatccccggcaccttcggtatgtggtgaagatgaaagttcctctattggcggcgaattctccaacttgagtgttgatgatgccacctctgacaccacagcaacttcttcgcaacccgagtctgacagtgtttctgcgggagatgagctgttatgagtcatctagttggcatgagatgagtgttaaatgtttttgttagagaatataacgagtaatgaccttgcaaagcttaagaaacgccttcaaaaaagttagggatgtaaacatacctttagaatagtatatgtgaatagtctgtacaaaaatatcttgttctttggagagaaatgcttattcagagggatcagaatgaataaagcttagaggggaagaaagaaatgaatgtgatcaattcccactccttctttaaaaaaaaaaaggttctactaaaatggatgaattttcgtgtccagagagcggggtacgaggaaactgtcagaaatttttcttctgatgttaaggatggagaggcctatgcttatctgcttaatgtccttgctcctgaacattgcagtccggccaccttggataccaaggacgccaatgaaagggcaaatctggttcttgatcatgcagagagaatgggctgcaaaagatacttgaccccaatggattgttgcaaaggtacttcaaacttgaatcttgcatttgttgcacaattgtttcatcat

SEQ ID NO: 81180 - DNA, 294 bp, Glycine max
  Clone ID: PAT_MRT3847_44320C.1
agatgcatcaggacgtcgtgttccagtgcccgccaggagtcaagctgctgggttcgactgatgtgtgccctattcagggcatgttcgtacctcggaagctcctgacgctgcagggacacccggaggtcaacgctgagatcatgactgaggtggtcgactctcggtacaatcggggtgtcttcactgaggaacaatgggtgaaggctcgggaagaggtccaaaggcctcacgacggattcattgtagggcgtgcgttttatcgattcctcctgaagtagactgagtgtacattgt

SEQ ID NO: 81181 - DNA, 1556 bp, Glycine max
  Clone ID: PAT_MRT3847_44321C.1
gattcggcccctgctgcttcaggtgaggatatcacttggttagaggagcattgccaaggacagatctccaacaggaaatgcttgctagatcggttattgaaatcggcttcagtgacaaaagaacttcaagaaaaggattttgaacaaaatgctcttgacaaacttgtgatgatggcttatgagaaatacatggctagccggggtcctagctcatcaggtgggaaaaatgcaagcaacaaaatcgccaagcaagctgcattgggatttgttaaacgaacattggaacgatgccaacaatttgaagatacaggcaagagctgcttcaatgagcctttgtataaggatatgttccttgctgcttcttcccagctaagtattgttcggcaattagatggcatagaggctgaatccacaaaaccttgtgcttccttttctctggaagcaagaactgcttccatgggttcacagcagaaccattcacatttaagtcagaatatgaaaaatcatgatctcgattcatcagatattcttcctgctataaatggttcatctgaacaaactagtgggaaggaagatctgtggtcaaacaaggtgaagaaaagggaattgtccctagatgacgttggcggtagcattggtagttcaagtgctccatcaggtattggaagttctctatcaaatagtacaaaaggaaagaggagcgagagagacagagatggaaaaggacagagcagagaggtgctatccagaaatggaactaccaaagttggtaggccagcaatatctagtgctaagggacaaaggaaactcaaaacaaagcctaagcagaaagcaactaagcattctgtttctgtaaatggcctccttggcaagctatcagagcaacctaaaacagctttgccttccgtttcaaagtctaacgaaatgtctactaacagaactcccaaggagaaagatgagtttggcatgggtgaatttgatgaccatgaacctattgatttgtccaacttgcaactacctggaatggatgtgcttggtgttcctggtgatcttgatgaccaaggtgctgatcttggttcatggttgaatattgaggatgatggattgcaagatcatgatgactttatgggccttgaaattcccatggatgacctttcagacttgaatatgatggtttgaaactgctttctttgtatagtactgttcattataccaatgacaaaggaaacaaagtacctttaagaaatgactagttacgtaggatggttttatggctaatcctgctctcaattaggttaatatatattctttggtagacttccttctccaaactgtttctaatgacagatccaactgttttggattttgctagtattgacgttcacgacttccactgtaaagtctttttgttctaggtacaagttagtattcctagtgattgtatgttagcaaaccctgtatcctggttgtagctcttataaatcagagaaaagccttttgtacatacatttaatttttctaataaaatcagctttcatttactgaaaaaaaaaaaa

SEQ ID NO: 81182 - DNA, 322 bp, Glycine max
  Clone ID: PAT_MRT3847_44322C.1
actctatccaaaagaaatgctataactgacttagacacactaatcaactcaacgatcgggggagaaccaaggagctggtgcactctatttgtctacttgtctttaaaactcgatcttctaacaacgatttactatttattatcgaatgatcccttcatcttgctttgatatcgaccatttgtttctgaattcaaacattctgcggttaaagttggaaattctgtctatatgcaaatctatcctactacttatggtcctgatgtttatgctcttgcataaataggtacaggacgcacctcccaactaattgccacggtactta

SEQ ID NO: 81183 - DNA, 298 bp, Glycine max
  unsure (1)..(298): unsure at all n locations
  Clone ID: PAT_MRT3847_44323C.1
gttataaaatcattaataaaaattaaagattcaccccactgttgttcacccaactcagaccataaaacctcgcgatatttttaaagtttcatcgcccattcaatacttatcnattatttaattttaacacctaaactctaatcttaattattttttcacaaagaaccctccttttacacttttctttaaaaactttatcatttcccacataaaaaattcaaatatttttatccattctttttttacttgcacactcacaactactatctataaataaattctcctcttttttaaaaac

SEQ ID NO: 81184 - DNA, 335 bp, Glycine max
  Clone ID: PAT_MRT3847_44324C.1
gtcttccaaaccccctcctaagaagcctgtctccattttccatttcttcgacaaggatcaaaacaagcatgggcggctgaaaatttggggacggggggcggtcatggtaattcagtgacaggggtatgcttctcccgcgactgactaaatttgtctactgattgggctgatggagttgagagagtattcaagtggagatgatgctttgagcaaaagtttcaagtttctaaggattaattcgcctgccggctttcatataacagcatttccattattcggtgatgcatacttccaatcttgaagggggtcatactctaaccggttgtttaatttac

SEQ ID NO: 81185 - DNA, 531 bp, Glycine max
  Clone ID: PAT_MRT3847_44325C.1
tatagttcattaggctcgagggttgataaaccctttataatataccaacaatgagcatggttatggaattactgttcctgtctacagctttgttttctagtttcggtgcatctttggaaacaagtcttttaggggaaataatcgttattttcctcccaaaaatgtttttcaagaagctccaaagaaaaagcagatttgaccacaaaataagctgatccaaacacgccccaaaatggagcctaagtggcttgattattgatatagccaacttttctagtgggataaggttttttgttattgttgaaaacttgaaactgggacaggtaaggtatgcatatttttggcggtataaaaattgttgtgtaggtgtagttctcgatgttgatgcacaaaatttgatgaccagaaatgataatgaaactgcattactggttgagtatcccacacctccctctttctctcagcaattgtgttgagaaacttcaatggtcataggatagccgaaccttttagcttgatcgtattatggtt

SEQ ID NO: 81186 - DNA, 162 bp, Glycine max
  Clone ID: PAT_MRT3847_44326C.1
catctgctgtgttggtgactctatggacagtgcgatactggaatattggtgcctcttagtgggatttttacctgaggataatgaaagcattgttccggcttagtatatgtcataaggggctctccttatgcacatgttcccttgaaagacacatgatctgga

SEQ ID NO: 81187 - DNA, 411 bp, Glycine max
  Clone ID: PAT_MRT3847_44327C.1
cggctcgagctcgagccggctcgagcggctcgagctactcgaacatttcgaacaataatcaaatgaacactctagcccgcaactccaacgtgccctagctgaaaccccctgtagttaacactctacctcgcgtcgtcaagcactctctccttgaaacctctccgtgaagcagtggagctcaaacccctctctccttgaaacctcgccgtgaagcagtggagctcgcgtcgtgaagactgtctccctcatactgacctcgcgtcgtttgcccgtggaaagcgcgtcttaggtcgtcgtacagcataatcttgttacaaggaccacctgggactggaaagacgtctttatgtaaagcattagctcagaaattatcaattcgattcaattcgagatacccacaagcccagcttg

SEQ ID NO: 81188 - DNA, 1431 bp, Glycine max
  Clone ID: PAT_MRT3847_44328C.1
ggtcgtaagacagctccttcatcttctgcctttcctactaacagcacgaggtttcccggtcatctttgtcatattccaaaattaagcttgcattattcaccagaatggctaattcatctgaaaacaacttcccccctcagaagcaagacactcagcctggcaaagagtacctcatgaatccaccaccccaatacaacagctcccaatacaagccatcaaataaacttcagggaaagatagctgtagtaaccgggggtgattctggaattggacgagccgtgtgcaacttgttttcattagaaggtgctactgtgatcttcacctacgtgaaggggcaagaggacagggacgcgagtgacacgctggagattataaaaaaagctaagactgaagatgctaaagatccattggctatacctgttgacgtgggttatgaagagaattgcaagaaagtggtggacgaggttatcaacgcttatggccgcattgacattctggtcaacaatgcagctgagcagtacgagagtgattccctggaagatattgatgatgcaagactcgagagggtcttcagaactaatatattttcccatttcttcatgaccaaacatgctctgaagcacatgaaggaaggaagtagcattatcaacacaacatcagtgaatgcatatcagggagacggaacactagtggattatacttccacgaagggtgcgattgtggggtttacacgagccctagcgcttcagcttgtgagcaagggaataagagtgaacggggttgcacctggacccatctggactccgttaatagtagcaacaatgaacgaggaaacaattgttcgatttggttcggatgtgccaatgaagagagctggccaacctattgaagttgctccctcttatgtctttcttgctagcaacatatgctcctcttacattactggccaagtcctccaccccaatggtggaatcattgtgaatgcttgatgaattgacggatatataagtgatacctcattaatcgagactggtatatgtaatgtcattgactcattgtggttcttgtctaagtcaacactatgttacgaatggcagtgaatgagcacggtactatcgatatgtatgaatgaataatatatgtctgtatgaagattcgttgaaagcaagcataaatattgctttcaaacgtataaacttaagaaaatgtactacttgaaatatatttgaagcaagatctattatatattttgttacggacagataacggtcattgcagacctcaatcgcagtctgatgctgttgccatagccgccgtcactgtcatgttatctattatatatttgttgcggacagatactggagatactgtcgtttgcaaaaattctgtaactatttttatatgacaaatttagtatggttaaaaatattt

SEQ ID NO: 81189 - DNA, 890 bp, Glycine max
  unsure (1)..(890): unsure at all n locations
  Clone ID: PAT_MRT3847_44329C.1
cccacgcgtccgtacggctgcgagaagacgacagaagggtacggctgcgagaagacgacagaagggtacggctgcgagaagacgacagaaggggagagaaagagagagaaagatgtcgaagcgtggtcgtggtggttcggcggggaacaagttccgcatgtcgctgggtcttccagtggcggcgacggtgaactgcgccgacaacacgggggcgaagaacctctacatcatttcggtgaaagggatcaaaggccgtttgaaccgtcttccctcggcctgcgttggcgacatggtgatggccaccgtgaagaagggaaaacccgatctgaggaagaaggtcttgccagctgtcatcgttcgccagcgcaagccatggcgccgaaaggacggcgtctacatgtacttcgaagataatgctggtgttattgtcaatcccaagggagaaatgaaaggttctgctatcactggtcccattggaaaagagtgtgctgatttgtggcctaggattgcaagtgcagctaacgccatcgtttgagtggaatttcttgttatgtttaagcttgtaggatttaagtgtgtctcagattttgtttaagcttgaaattggaatacaagtgatacagatttttaatcattcgtaacttataatcagcttgctttttgaanaanaaaaaaaaaaaaaaaaaaaaaaaaaaaaaaaatttaaaataagggaacagaatttgatgattctgtgtttcataacatttacattgtatcaggagttctcaagaaaacgctgtctgtttggagtttccccttttgttcttctgcctatttggacatttcatgtattcgccgtgatcaatcaagaacttatcttttgctttggaaaaaaaaaaaaaaaaaaa

SEQ ID NO: 81190 - DNA, 1031 bp, Glycine max
  Clone ID: PAT_MRT3847_4432C.1
aacccgttcactcttcaccaccacaaccccaatcctcttcctcttcgttcagtggtacttttgacatgtcaaaccctatcacttttctggtgagagtcttcgagttcgtctccgaacacagtgactttttggagacaaagagcgccgaaaaggaggtagcatcgttggtgtgcgcagttgagaagaagagggagtttctcaaggtggagagagaaaaggttgagaagaagaagagagaggacctcaaggcctcgaaggagaggggaaaatccgacaagaggttgaaggaagagaagaaatccaaagccgaagacaccaacaaagacaaaagcacctccagagttccaaacaaaggtaatggcttggatttggagaaatactcttggactcaatcacttcaagagtccggtcaccttggataccaaggatggcaatgaaagggcaaatctggttcttgatcacgcagagagaatgggctgcaaaagatacttgaccccaagggatgttgcagagggtactttaaattttgaatcttgcatttgttgcacaattgtttcatcataggagtggtctatctacagacactaaaaagatgtcctatgctgagatgatgacggatgatgtgcaaacatctagagaagagagatgcttccgaatgtggatcaatagtcttggaatttctacacatgtaaataatctgtttgaggatgtcagaaatggatggatacttttagaagtgttagacaagatatttcctggatcagttaactggaaacatgcaacaagacctccaattagaatgccattcagaaaagtagagaactgcaatcaggtcataaaaattggtaaacaactgagattctcactagtcaatgtagctggtaatgacattgtgcaaggaaataagaagctcattcttgctttattgtggcagctcatgcgattcacaatgcttcaactgttgaaaaaatttgagaacttcattcccaaggaaaggagatcagtgatgctgatatcctgaaatgggtgaa

SEQ ID NO: 81191 - DNA, 809 bp, Glycine max
  Clone ID: PAT_MRT3847_44330C.1
gggaattaactctcactaaagggaggccggcgggatcaacagatacgcaagcacagatgggcaatgcgaatgaactttctcggaaaagaaacgagaaaaatgaatttgtagggagtgagagagagagaaggcaagatgtcgaagagaggacgcggtggttcggcggggaacaagttccggatgtcgctgggtctgccggtggcggcgacggtgaactgcgccgacaatacgggggcgaagaacctctacatcatatcggtgaaagggatcaaagggcgtttgaaccgtctcccctcggcttgcgttggcgacatggtgatggccaccgtgaagaaggggaaacccgatctgaggaagaaggttttgccagctgtcattgttcgccagcgcaagccatggcgccgaaaggacggcgtctacatgtatttcgaagataatgctggtgttattgtcaatcccaaaggagaaatgaaaggttctgctatcactggtcccattggaaaagagtgtgctgatctgtggccaaggattgcaagtgcagccaatgctatcgtttgagtgggaattcttgttaaatgagttttatgtttaagcttgtaggactgaaatttgtctcaggtttttttcaagcttgaaattgaattacaagtgatacagttttttttatccttcgtaacttgttatcagccagaagctttttgaagagacgagattaattcttatttaagaattttgttcttgttttttgttcccctctaatgttttcatgatcctttatgttaatttgtatgacttcttgtttgtctgcg

SEQ ID NO: 81192 - DNA, 283 bp, Glycine max
  Clone ID: PAT_MRT3847_44331C.1
caagtgttaaacgccctgctttgatcttgctcaagaaagaggaggagaaattgaaccattttgatggcccagttggtaaaacctgaattacctgtttttgtaccctccaccaggcttctttgggttccacctttaactagagaaggggcccggtaatctttgaaagtcaaatcaagaaacaattgttgctgtttgtgactctaaatgatacagagaaatttgtttccgtttttaaagaaaccgccaaaatttttaaggggaaactgatctttgttcatgtgga

SEQ ID NO: 81193 - DNA, 490 bp, Glycine max
  Clone ID: PAT_MRT3847_44332C.1
ttaaaattttttttttttttttttttccttttttttttttcccttgggttggggaaaaaaaaccggctggattatcccccccccaccaaaacaaatgggggaataattttccacaccccccccggggaaaggaaaaacagccggggccacaatcaaaaagggggggaaggggtaaccccggggaccgggacccaaatgggggggggagcccccggaaaagggaagccgaactttttttccagggccacccgggcaggggcaccaacaagctttcattgggaacaagggaaaattaaggcccgggtgaaaggccccacctgcccccctagaaaaaaaccaggggccgtgctttttgcaccccggaggggaaaaaaaggataagggtggcccccaacaccaattgggggggcccaactaggaaacaccccctgggcgcaaaaaaaaaaggggccacccgaggggggggggccccccccccaaagcccaaaga

SEQ ID NO: 81194 - DNA, 132 bp, Glycine max
  Clone ID: PAT_MRT3847_44333C.1
ctcctccatacactagaacaaaatatcgaagccaaattattgggatctccgcatgttctcactagagagacatctggtctgttttggcctgctaaaagctcaggagagaactacataaactttagacatcac

SEQ ID NO: 81195 - DNA, 299 bp, Glycine max
  Clone ID: PAT_MRT3847_44334C.1
cgtcttgtctatttaatctacattacatggtagatgcaacatttcgtcgaagggttttcatctatactagtctatagaatttcttctatgttaaacgacccttaatattatctttgcgtaatcaatactattaatttctcattctttaagacactaattatcaaactatatcgagaatactacttgtgtataacaatttctgtgacccagaatgagctattagctacacctatacctcacaaggatatcactgtcattgatgattttcacttaattatcgtctccaactactgttactt

SEQ ID NO: 81196 - DNA, 426 bp, Glycine max
  Clone ID: PAT_MRT3847_44335C.1
actgagcatcgtctagctatctcgatcgaactgtccaaggtcctgtcactgtaacgtgtgtcaacttgtgggtgtgtgtggtgacaactgagtgcgcgggccgcggatgaacgtgttaataactaaacgatagccggcagggccaaagttaccgttttattttaggtcatttcgggcttcacctcacacaagtccagctttttcactaaaccacgagcgctagaggtcaaggtactacacgaagcccaacaacacgtgcattatacggtaacccatgcaacaacctacggtagtgatcacaacagttgtaccgattgtaacaaccacggtgctgctaatccaattcgccgcgtaccataaccactgccataacagtagttaatgttaacgtcattactcgaacaatcgtggttatggttgtcggta

SEQ ID NO: 81197 - DNA, 248 bp, Glycine max
  Clone ID: PAT_MRT3847_44336C.1
acaaaaaacaatttacggcccggacaatatccacaaatcacattttcctccacagaaaccacacatacaataccatttccgcattattttcttacacataatccttcctgcaccaaacatacctccttttccaccaccctctccttcctcatctccgataaactatattccacccttcccatggccccctaagtccaccccttcattttttctgttcctttatactcataaccctcccattcatctac

SEQ ID NO: 81198 - DNA, 497 bp, Glycine max
  unsure (1)..(497): unsure at all n locations
  Clone ID: PAT_MRT3847_44337C.1
acggctgcggaagacgacagaagggagggtcatgacttttagtaatgaaggattttcacaaacaaagtttagtcactcagacttgtctatttttccatcttgattaaggtcggcatccaagaaagtctacacataaaaacaaaatatcaagcttaagcttttttatttgtgatataattataagagcttataatgtatgattttaacaaacataaatcaccttgttaataattgtttctatcatttcatatgacaacttaatttcagcttcacaaagaagtgcatttagcatttgctcgacctgtaaaaaatatcaccaaatacatatacaaaccaatgaacttatgattaaggataataatgcacaaatttgaggatgaatgtcacaacatacatntttataacaacacttaaatatatagattgcgattgtcattataaaaaaatgtatatctacataaatgggttttttaataggttgcatctgaacaaaacac

SEQ ID NO: 81199 - DNA, 2198 bp, Glycine max
  Clone ID: PAT_MRT3847_44338C.1
ctagcaaacagatttatagcttctgcttgaattccgcacgacgtttcaggatccccgtgtcggaggccccgccggagataaggacccttttcgacggttactccgatgagaatggcgtcatgacagccactcacctccgaagttttctggctgaggtgcagagggaggacaatgccactgaggaggaagcacaagccatcatcgatggtcacaagcatctcagtatcttccaccgaagtggtctcaatctcgagagtttcttcaactatctttttagtcaccataataacccacctctcttaccttctcttggggtgcaccaagatatgtcttcaccgttgtctcattacttcatttataccggtcataattcctatctaactgggaaccagcttagcagtgactgcagtgacgtccccatcatcaatgcactggagaagggtgtaagggtgattgaattagatatatggcctaatgaatcaaaggataatgtagatgttcttcatggaaggactttgacttctcctgtggcactcatcaaatgtctgaggtctattaagcagcatgcctttgttgcctcagaatatccagttgtaataaccttagaagaccatctaactcccgaccttcaggccaaagtggctgagatgattactcaaacatttggagacatactatttgctcctacctcagaaagcttgaaggaatttccttctcctgaatcacttaaagggaggattattatatcaaccaaaccacctaaggagtaccttgaggcaaaagaagtacaggaaaaggaggaggaatcacaacaggaaaagcctgcagatgatgaagaagcatgggggaaggaagtccctagtttgagaggtggcactatctctgattacaagaacattgaggatgatgatgttcttgatgatgaggaagatattgatgaagcagaaaagtcacgtcaggatgcagcggacgaatacagacgtttaattgccattcatgctgggaagcctaaaggcggattaacggaatgtctcaaagtggatcctgataaagtgagacgtctaagtttaagtgagctacagcttgaaaaggctgctgaaactcatggaaaagaaattgtcaggttcactcagcggaatatactgagagtgtatccaaaaggtactcgcattacttcgacaaattataacccattgattgggtgggtgcatggagctcagatggttgcatttaacatgcaggggtatggtagatctctttggttgatgcagggaatgttcaaagccaatggcggatgcggttatgttaaaaaaccagatcttctattaaaggttggtccaaataatgaggtctttgatcctagatctcatttgcctgtgaagacaaccctgaaggtgactatatatatgggggaaggatggtttcttgatttcaaacatacacactttgataaattctcacctccggacttctacgcaagagtggggattgctggagtccctaatgatactgttatgaagaaaaccgagaaagtagaggataattggtcaccttcatggaatcaagtattcaagttcccacttgctgttccggaacttgctctgctccgcgtagaagttcacgagtatgacatgtctgagaaggatgattttggtggccaaacgtgcttacctgtgtgggaactaagaagtggaatccgagcagttccactgtattcccgcaaaggagataagtatgccaatgtgaagcttctcatgcactttgaattcatttgattttgtgcatccttatgctccatgtttttgtacagtcattgctataagttgtagcaagagtgtgtatgtatgtagctgtgtaatattgtaaatgttgcttatttggagtgatgctttttatttgtgttgtcttttactaaaaatataaatgtgagtgagagtgagactaatgtatttgggggatattgatgctgtctgtcacaaggagtgattttccacggattttgaataatgctgtgaagaaataagatgtgtatactatacacctggttttgttttcttgaggagacatgaaggagctgttatttatgttgtaacttgtaaggattgtccattttatgtatcataaacgagagttctatggtttgaaaggctggctagtacttcaatacattactgtttcgtaaaaaaaaaaaaaaaaaa

SEQ ID NO: 81200 - DNA, 259 bp, Glycine max
  Clone ID: PAT_MRT3847_44339C.1
ctttgatcttgcttttggtgggccttattgctgcaactgcaaccaaaaccctaaatacagggaggaaaccaactgcataccaacagggataaggcctcatgctgataacaaggaagatcagccaacatgcaatcatacttccgtttactttgcaagactacctgttacacagtagaaagagcacaactacagacaacatatcaaagcggagaaagggtgaagagagaacagtgcccctaatacaggaaataaatcaaaa

SEQ ID NO: 81201 - DNA, 2100 bp, Glycine max
  unsure (1)..(2100): unsure at all n locations
  Clone ID: PAT_MRT3847_4433C.1
cttctgtgtaaacttatcaatgttgctgtgcctgggactatagatgagcgagccatcaattgcaaacggaatcctagtctttgggaggtaaatgagaaccatactctatgcctcaattccgccaaggctattggctgcacagtggttaacattggcgcacaggacttagttgaaggaagacctcatcttgttctagggttgatttcccaaatcataaagattcagctgctggctgatctcaaccttaagaagacacctcagcttgtggaattggttgatgacagcgaggagatcgaagagcttcttaatttgtctcctgaaaaggttctactaaaatggatgaattttcatctccagagagcaggttacgagaaaactgtcagaaatttttcttctgatgttaaggatggagaggcctatgcttatctgcttaatgtccttgctcctgaacattgcagtccggccaccttggataccaaggatgccagtgaaagggcaaatctggttcttgatcacgcagagagaatgggctgcaaaagatacttgaccccaatggatgttgcagagggtacttcaaatttgaatcttgcttttgttgcacaattgtttcatcataggagtggtctatctacagacactaaaaagaatgtcctatgctgagatgatgactgatgatgtgcanacatctanagaagagagatgcttccgactgtgggtcaatagtcttggaatttctacacatgtaaataatctgtttgaggatgtcagaaatggatggatacttttagaagtgttagacaagatatttcctggatcagttaactggaaacatgcaacaagacctccaattagaatgccattcagaaaagtagataactgcaatcaggtcataaaaattggtaaacaactgagattctcactagtcaatgtagctggtaatgacattgtgcaaggaaataagaagctcattcttggtaatctcttcatctcactatagcttccacacaaatgttatggatataatttgctttttttctttctaaattttttttactgctttcccacctatttgttttagctttcaattttatctaaaaatatttttttcagctttattgtggcagctcatgcgattcacaatgcttcaactgttgaaaaatttgagatctcattcccaaggaaaggagatcagtgatgctgatatcctgaaatgggtgaacagaaaagtgaagatcattggtagaacttctcacatagagagcttcaaggagaagagcttgtcaagtggactctttttccttgagcttctgagtgctgttgagcctagggttgtcaattggaaccttgtcaccaaggtgaaagtgatgatgagaagaggttgaatgccacttatataatcagcgttgcacggaagctcggttgttctatatttttgttacctgaggatattatgggaggttaatcagaagatgattctcactcttgcagccagtataatgtattggagcctgcaacaacagactgaagacacggattcatttccttcacctgtcaacactgctactaccaccacgcccgaagcatccccggcaccttcggtgtgtggtgaagatgaaagttcctccattggcggtgaattctccaacttgagtgttgacgatgccacctctgacaccacagccacttcttcacaacccgagtctgacagtgtttctgctggagatgagctgttatgagtcatctagttggcataagatgagtgctaaatgttttttgttaaagggagaatataatgagtaatgacattgcaaagcttatgaaacacctccaccatggtctcaaccttcaaaaaagttagggaagtaaagatacctatagaatagtagatgtgaatagtctgtacaaaaatatcatgttctttggagagaaatgcttattcagagggatcacccccccccaagcttggaggggaagaaagaaaaaaatgtgatcaattcacacgactcccttatattgcctttaagtgggttccactactgtatttgtattttgtcattcgttacgttatgatgaccaccaatgatgaccatttaccgtgtc

SEQ ID NO: 81202 - DNA, 1355 bp, Glycine max
  Clone ID: PAT_MRT3847_44340C.1
cggctaaccaaacccaatgttaagaattgcaaagaaatagtatcataaacaataattacaaactccctagggcattatttacatgccccgccagaaatcactttatttaaatttgatcttcccatatcttacagttaataaatgctcacctacatcggttcactccctgaataaaaagaacaaaataaaacatataggaaggaagttgaagagctcctttgttattttatagatactttgcctttcataaaaaaaataaaaatggaatgaagttgaagagtaggcagcgaggaaaattgacagtttcacaccatctggacccaaataccctggcttggaatttcttgatgaaccagaaacagcagatagaaacccggtggcgcaagaacagcggaaaccggcgcggtaacttcaacctcgtacgtcgattccccaaccttactcaaatcgtgtggctccagcaccagcatcctctgattcatggagaacgagtgcgtgttaaatggcggcgacagcatcgtaaccgacaccgaatccccaaccaaagtcgcgctcatcacctcaaaccgaagcctcaacgtctgaccgtacttgagttttgtttgggacgcaggaaacactattgtgggacgcacgctagagaatccaggctcaagataccaaggagaaaacgcttccaaccgtaactccgttgggaacaaaacattcgtaaatttgtaataaatgtgagggttgctcccagcaaccagaacgcgaccgtcacgaagcaaaacggcactggagtggtacattctcggaatatcagacgatgtttgaacctcaaatctcgacccgacccgattatttgattgttaatggagcagccgtagggactgcgagctgggaattgggccgtaacccgctactgagtctgtttctttataaaccaaatctcgacccgacccgattatttctcgagccagagaggtgggttattatggtgactaaaaagatagttgaagaaactctcgagattgagacctcttcggtgaaagatactgagatgcttgtggccatcgatgatggtctgtgcctgacgcgtgggcgcacgcgtgtccgaacgcgtgggcggacgcgtgggtcggaggtgagtggctgtcatgacgccattctgatcggagtaacggtcgaaaagggtccttatctccggcggggcctccgacacggggagcctgaaacgccggcggaagcagaagcaaaagctataagtctgtttgctaggcatgtctccccacaccttgaacaagaagaaaattccttcaagctttatgaggtaggagcaaataatatgtctccacatgctatttcaagatttt

SEQ ID NO: 81203 - DNA, 957 bp, Glycine max
  unsure (1)..(957): unsure at all n locations
  Clone ID: PAT_MRT3847_44341C.1
gccaaagtggctgagatgattactcgaacatttggagacatattatttgctcctacctcaaaaagcttgaaggaattttcttcttcttcaaggtgttgggagacatgcctagcaaacagacttatagcttttgcttctgcttccgccggcgtttcaggctccccgtgtcggaggccccgccggagataaggacccttttcgaccgttactccgatcagaatggcgtcatgacagccactcacctccgaagtttcctggctgaggtgcagagggaagacaatgccactgaggaggaagcacaaaccatcatcgatggccacaagcatctcagtatctttcaccgaagaggtctcaatctcgagagtttcttcaactatctttttagtcaccataataacccacctctctcgccctctattggggtgcaccaagatatgtcttcacctttgtctcattacttcatttatactggtcataattcctatctaactgggaaccagcttagcagtgactgcagtgacatccccatcatcaatgcactggagaagggtgtaagggtgattgaattagatatatggcctaatgaatcaaaggataatgtagatgttcttcatggaaggactttgacttctcctgtggcactcatcaaatgtctgaggtctattaagcagcatgcctttgttgcctcagaatatccagttgtaataaccttagaagaccatctaactcccgaccttcaggccaaagtggctgagatgattactcaaacatttggagacatactatttgctcctacctcagaaagcttgaaggaatttccttctcctgaatcacttaaagggaggattattatatcaaccaaaccacctaaggagtaccttgaggcaaaagaagtacaggaaaaggagggagaatcacnnacagaaaagcctgcagatgatgaagaagcatggggga

SEQ ID NO: 81204 - DNA, 2133 bp, Glycine max
  unsure (1)..(2133): unsure at all n locations
  Clone ID: PAT_MRT3847_44342C.1
aacagaatggtcattctttacaaaaagaaagattgaacagtttctctaaaatgccatcataaaacaaatcatgtccaaataatgcttacaatttaatatatatactgaaattaaatatgctctataataatttagataaaagacaggaattagaacttgtatatggactttctgtctgagctggacaggtaataatgcaaatcaaacttgagaccataacaactaaggaaaacctttttgtaaatatgcgaaactgactgcagtgagccaaccatgcagctgcaggaactccttcccaaactattgttttaagtcggaatttgagttggcattaccattctgatgctgctgctgttgctgctgttgaagatgaatgttttgttgggatgcagtaggaggctgctgctgttgctggaacatcagaggattgacagaatgttgaggaatcaaacagccagaaccatgcgaatcgccacttagttcagctgtggcattaaaaaattgctagcactactctttttatttatgtggaaggttttgcagacctaggatgggggaagcaaaaggacatgataaaaatccaactcccatcagtttatcacagcatataaaccatggtcagggccatgtgatgtgagcaacagttaattggcaatgtatgcccatgttaattgaaaagtgacataattcagttcagaaattcaagcattttaggaactaaatggctctccaaggtcacaaatttacttgaacttcaatgacaatgtgaactccaatcacatcattgcacactgtcagagctgctaagcataaacacagtaccacagtggccataaacaacacattctgaggtgattagacttataagtcagtttttccagcttatgcaaataatctgtttcactgaggttcctcagtactagttgaggcttcagaacgccttctctttgcttcattgtcacccagctgcagtgaaacacacaaatcttcatcacagttattcctcaatgaagacaagttctctgttgcagttctgtcctgtatgctgtttttatgcaatggagaccgcccaatgaagctcggaatgaactggtgttcgatactgggaccaaccttgattccatcttctaatttaaattcagtctccattattgatggtttcatgtcttggctactaggtacaactcctaagggaatggactgaatttgaagaccaagtggctcatacttgtcttcagctttatcttttggaagtacaccatcaggaggtgaggaatcaccgactgtagagccaattactgtggctgacacagctctttgttcttgcactgccacttgaagtccttcatcagtcgttatcagatcaagttcaagtagattgagaagacgccctagatccaccccactagtccaattctcaggaggttgcccaacttttaacttaaggcggcctctgttagcagttcctccccatattatcccaattggtcgcggtttctcaccaatgtcaccttttaacatgatgagacttccactgtctccttcctgttgaaatttatttcttgctgtgaaatgccctgattgtcatgagttcaaatgtggttgcctaccggttgcaggtttaatcacatttgctaccaaaaacttaacaaactagcgattaacattcnctgataaatagtatatatatatatatatatatatatatatatatatatatatatatatatatatatataatctatgcaacattgcaactacaagttcaaccaatgctataggtgaataattaactagtgatgcctggcagatttcagccacaaatcaataaaacaaaatggagagaaaatctgatagatagactatgaattaaaggacagaaataccatctcgaagctttgcttgttgttccatggattgaaggcgaaacttcaactcactattctggttagtgagtccagccgaatctctctgtaacagagtaagctgtgcagatagtgtggtggcttctgtctgtagagtctgaaccttgtgttctagctccgaaatgtaccgcatcttccgctctttggatcgcgcagccgattgccggttggccaaaatcctgaaacccacgcgtccgcggacgcgtgg

SEQ ID NO: 81205 - DNA, 2539 bp, Glycine max
  Clone ID: PAT_MRT3847_44343C.1
gtcgtgggtgtagagagagaaagcagaaagagagttctttttttcttctggttcttggtttggtttgttgctcttgttctagagagagagagagggataagtgcctgctccttcggcatttccgtcagacaaagttaacacttccaagaccgattaatcaattcgccccttcaccattccctattacatgaactctcccaagattttaatttgaagctgaaagaagaatgggagaaaatgaagaagcgatgcagaggcttcactttctgaagcagccgttaaacatggagcaacttagcatcccgcaattcaacccctcgcaaatgcgcgcgaggcagcatcatcatcagaatcagttcgacggtgggaacagtaacaagcgggctggtataccaccctcccacccgcacccgatccctcccatttccccctactctcagatcccggtgtcgcgtcagcacaacaacatttcccctacacccacccacacccgatcactctcgcagccctcgtttttctcgctcgactccctccctcccctcagcccttcccccttccgtgactcctcctcgacttccgtgtcggaagctgctgacgtgtccatggaagatcgcgacgtgagttctcattccctgttgccaccctcacctttctccagaacactcaacaacagtaatttaccattaccccctcggaaagcgcatagacgctctaacagtgatattccgtttgggttttccaccgttttgcaatcttctccgccgcttatccctcttcggaaccccgtttcagcgaaacctgctcagttggtgaaacgggaaacaccgtgggacagggttgttgagcataatactaatactaataataataataatgtagagggatccggggagaagaaatctcctgaaggggaagtggtggatgatcttttctctgcttacatgaatttggatagctttgatgctttgaactcttctggaaccgatgataaaaatggaggcgaaaatcgcgatgatttggatagtagagccagtggaactaagaccaatggtggagacagtagtgataattcggctcgagtatgagagtgggcatggagggagtgagaagagggaagggatgaaaaggagtgctgggggtgagattgcacccactactaggcactataggagtgtctccatggatagtttcattgggaagttgaatttcgatgaggagtcgcccaagctgcctccttcccccgggcagagaagtgctctgatgtcgcctgctggtggaattgatgggaattcggcggccttcagcttggagtttggaaatggggagttcagtgggcctgaactgaagaaaattatggccaatgaaaagcttgctgagattgccttgatcgatccaaagcgtgccaaaaggattttggccaaccggcaatcggctgcgcgatccaaagagcgaaagatgcggtacatttcggagctagaacacaaggttcagactctacagacagaagccaccacactatctgcacagcttactctgttacagagagattcggctggactcactaaccagaatagtgagttgaagtttcgccttcaatctatggaacaacaagcaaagcttcgagatgctctaaatgaggctcttactgctgaggttcaaagattaaagattgccacagctgactaagttgctacagctgaactaagtagcgattcgcatggttctagctgtttgattcctcaacattctgtcaaccctctgatgttccagcagcagcctccttttgcatcccaacaaaacattcatcttcaacagcagcagcaccgccagaatggtaatgccaactcaaattctgacttaaaacaatagtttgggaaggagttcctgcagctgcatggttgtttctttatatattcgctgctgattcattgcactctcggtttcgcatatttacaaaaggttttccttagttgttatggtctcaagtttgattcgcattacctgtccagctcggacagaaagtccatatacaagttctaattcctgtcttatatctagattatcatagagcatatttaatttcagtatatatattaaattgtaagcattatttggacattttatgatgacattttagagaacctgttcaactttccttttgtaaagaatgactattctgttgtggatctgttccaattttccgatcggagtatgtggaagatgtagcgatcctgagagaagcagagcctggagtcggactccgccgaaagcttctcgaggatacggcgggagacggcgccggtgttgccggtgacggcgctgaactccgccaggacgaccgtgcctctggccaccaaagcgtagaagatcgccatcggcagaagattagggagaacgttctctgcctctagctagatcttcgacttcgcagcattggaaaaccacaacgagattgttgttatcaaatcggacgcgtgggcggacgcgtggccgcacgcgtgggcgaacgcgtggacggacgcgtgggcggtagaaaggg

SEQ ID NO: 81206 - DNA, 487 bp, Glycine max
  Clone ID: PAT_MRT3847_44344C.1
aattcgagcggccgctttttttttttttttttttttttttttttggaccaaatacaataaaattaaaaaaaaaatctaatctccttgatttcctaactaccaaacacaatgtaaacaatgctaacaaaatgcgtggaatatttgatttcagaatatagaggtcaatatttttttttgagttagaaataacttacgggtttacttctagaattagagttgggggaaaataaaatgctgttaaaactattacttgacaccaaaacaactcaggtaacagatacacgagagtcgacggagtagacaaattttttgggtttactttaaattttaaaataaatgttttaaacaagagttatattgaaatcacacataatttggacaaatccaagattaaaaaattactgaagaactaagaatatcaaacttaagcccaaaggcagcttcaaaaggtttataaatgatactttttacagtatataaaaatttt

SEQ ID NO: 81207 - DNA, 237 bp, Glycine max
  Clone ID: PAT_MRT3847_44345C.1
cggaactcggctcgagtgggaacacgtcctttagaaaagttaagagtcgctttctcactacacaaaactaacacaaatcacatggaaagggtcaaagggcatatacatatgaaaggaccacaatgcacctccctaagaataactttagaaaggtaacaatgacccaaaatattagaccccaatttgcatcttaactaactaacaacataaaacatttatatattatgtgaatcatga

SEQ ID NO: 81208 - DNA, 1237 bp, Glycine max
  Clone ID: PAT_MRT3847_44346C.1
ctccttccatactcgcgagcaacgatccatcacccaaatcagatgtcatggcacgcaccgcacacaaataatgttcaagtgatcctaggccatccgcgtgaatgcggatctaataatcgcaggcctcatcaaacagggttgaataaaatgtctgactagttatgcacataatgagaacaatgaagcacctcagcaacataggctcatctctcaattttcctttaacccgtagggggtcagcgccagaacggaaccagaatcacatacatatttccacagctattgacattgtctggaaggagggtcgacaagggacataaggcacaccaagtgttagctcatcaatcttctgagtcttttctcagctagactagcatccttgttctgtggctctagaacaagagcatgcttgaaatcttcaagggcctcttcataacatagtagtgattctctagcagttccacgtctcagatatgccttcacattcttcttatcaagcaatattgccttaccgcagtcttctgcagcttgctgaaagcatcctaactttaagtgagcagctgctcggttgcagtaataagttgtattcgttccattcaatttgatagcctcggagtagtaactgagtgccttactccactgcctttctttgaatgctgcatttcccttctcttttaaaagttcagaagtttccctgttgccattgatattaggtaatggcaaagaataggaaccaacactaacttgctcttgaagagttgaataaatatccaagatcgtgtctagaagaaatttatcagctccatgaaatgagatgaatgagacagaaagagaacaatcatcatgatatcctaatggaattgtaacctgacaacatccagatacactagcaatgctcgataatgcaaatgttctgtcatggaactcagaggaaaaacctttctttgtattaagctttagttgactgcctgctacagtaggaataacaagtattccatcatcctttaatagactttgaaaagcacctcgcatctcagtcctgactttatacaaagcttttatattatcatatgtagtattaatggctgcaataacatgatcagacacaccacaacctaacttatatttgagtgatttaacccattcttcatgattggttttaaattcatacccttgtaatgaaagcataactgaagaaagagttttcaatatagatgtttcattttgttggtgggtt

SEQ ID NO: 81209 - DNA, 163 bp, Glycine max
  Clone ID: PAT_MRT3847_44347C.1
gatgacagagcggtttcctttgctggagttgctcgaaactgttcccctgtcatcaaatggggtatcattaaccgtgagagaggattagaatggccctttctacttgagaagctctgacaggttccagactctctttgagaaccataacggacccatacggctc

SEQ ID NO: 81210 - DNA, 790 bp, Glycine max
  Clone ID: PAT_MRT3847_44348C.1
ggctcgagcgcctcttccatctgcatcaaaggattttgcctactttgttgttctatttcccttcggttcgattaggttctctctttttctgaatcttcgctttcttcttcgttgttttttctttgttatatcgatcatatgatgagaaaaaaactgcaacaatatgattggattcgttccatgattcctagtatttaagtctctgatgattagttctgctctccctcttcttttgatgtttgaaattaatttacaatttctttccgttttcatttttttaatttgttttcgattttttgggttagagagtttgattagaaaaaatagcgaagagagatgatgattattacattggtccgtgtttctgaatcaccgtgaccgacaacccttaccaatttctgatctccaatcgcagataattttttttaatatttaatttttaaatttcttaattttagcttaatttttgcgtggctttggctcagtgattttctgccattgttgcagtatacgctattccgactcaatatgtgagtagagatatcatcatagatgagagcctctgccacgaaggttgtactcagttagatattttccattggaaattaggctcgaatttgtttgattgtgttaggtttagatttttgtgctgtgggtctgcggtgacgaattagaatcaaattcacatgtcagacttcagagattttaaatcaatgagaatatcaattctgttactgagcagaatttacaacttatttattattgggcttgtgatttttaaatgtagtag

SEQ ID NO: 81211 - DNA, 435 bp, Glycine max
  Clone ID: PAT_MRT3847_44349C.1
agaaatataacataaattacactataaagatatctatgcaaaaccatcacaactcagacgtctaactacatacaagaaacttacaaaaactctcaatccaaactcactatagatttctataagcttctattgtttgatgaagccaagtgctaaattcaggattgatgctgtgtgaatttctgctttagaagttctccttgtgaaactgaaaacgggtagatgagtttaggctgaactcgagacaaaggtccttcaatgtttttgtaagaggagggcttccacagtagaatacacctatccgagagctttgatgtgcgtttgctaattgagggaagactttttcccagtttggtcttgcaaaatgatgtcgtatccggctttctgaaactacattaactccatatttagcatggggcagcttctgaatcatggcaa

SEQ ID NO: 81212 - DNA, 146 bp, Glycine max
  Clone ID: PAT_MRT3847_4434C.1
gttgtttggcatttcaagcaccatattgcggaagcgggacgctgactcattgttttctgcgtgcgaaaaacgcatttatctagatcctgagcatgcaaacgagaacttaagatcgaactgtcctgaagagggtgtcgttagagctt

SEQ ID NO: 81213 - DNA, 302 bp, Glycine max
  Clone ID: PAT_MRT3847_44350C.1
tggatacttgactgactggaaatttgatgatgagattagcttcatgactgaggttgcaaccaaaggatcagatacaagtttttacaattcttcagcaagttttagcatagtaggtggagcagattattcaccaattgatgcttccaaacctatccttcatgagactctaagtgagagttcgtaagaatttgtgttatagtgcttttgattgagtgtacaaacaatgataatggcaatgtgctaggaaaattgtgttcctttcttttagttttacatgtgttttaacccttggtggttgaccc

SEQ ID NO: 81214 - DNA, 551 bp, Glycine max
  unsure (1)..(551): unsure at all n locations
  Clone ID: PAT_MRT3847_44351C.1
gacccacgcgnccgcacacccggcggcgcncaacaacacggggggaggcgccaagaagcacacaccgaggaagaaaagacacaaggaaaggacgcagagccaaccgaanacgaggaancagnaggacaggcaacgcccgacccagaaaacaccaacaacgagccgaaaagagancngaaagacncanacacaaacgcaggggggcaaaccgcacgcncnggcaaccgaaaggcgggggnnagccacgncccccacagacgaaggaaaggaaaccggaagaaacagggcaggcnngcgagagaacccgagaaaaaggngaggggaaaagaagcaagcnnganggccaccaggaggacagaaaggccaccaaagaaaggcncagccgngcagcgcccccgcaccagaacacncacngcggcacacgaggcaangcgggaagacaccggagcgccggccgagaagngcggaaagcgggnnaggnagaaaacngaaggncccaagancangaaggncnnnngggaccccaaggagcgaaacaanaccgagcacaa

SEQ ID NO: 81215 - DNA, 445 bp, Glycine max
  Clone ID: PAT_MRT3847_44352C.1
aataaataaaatatttattaattcattattcagtactcttagtcttagaacacgaatttacaaaatcttgtagttaattaaacttattttctataaaatttagtatgagaaaatagtgaaccattatggaacttccttcaatcagtgaggtcaatttattttaggccaacctagagattaaagaaaatcatcataaagcaatgacttgacttgctcctctagccctggaagggactgtttgtcgtcataactatacatcaatggtaccatccttgcaagattgagtgaggccttagtgaatgtcgaatggaaatggttaccaaacaagcactcttggttgaggctcttccatgcatcggagatcttactcatcaccctttttcttgctgttctcgtcgtgtagtgtgggtgatccatcatgagacaattcacgtacgatccatca

SEQ ID NO: 81216 - DNA, 237 bp, Glycine max
  Clone ID: PAT_MRT3847_44353C.1
cttactcgaatcgaatcaacacggacaacacgcgacttatcgtcgcttccgtttgaaggagattcgacacactcgaggaatcaccggaaacgatagcattgtttatctcactcaaccgagaatcctgcagcaaagaaagtatagataggacaccaggtgcattctcgggtatcactctcaatcgctcaatagccagctcgaactaagcactggtcagtatgcagacgatcaaatgtg

SEQ ID NO: 81217 - DNA, 479 bp, Glycine max
  Clone ID: PAT_MRT3847_44354C.1
ctcttgggtttttctgggcgtttcctgccggggcccccgggcgccccagattgccccataggggggcgcgggggaaccaggggcaaacatgggcacagggggggggggggggaaattcccatcccctcacaattccccaccccataccagccagaggaaaaactggggaacccaaggggggcgaaaaagcaaactaactaagattaattgactggccctcactgaccccttaaaactggggaaaccggtccgtccagcagttttaaaaaacccgccaacacgcggggagaggatggttgcccatggcgcgccacggggggacctcttttaaccacagaaacggagaacagtttaccgcccggcaccggcagaggctgagagaggggtccccgccggggcgccctcgtttgggacaccccgggaaaatgctggttaagggggggcaacagcgggagctagcttgggggtcggggggtacc

SEQ ID NO: 81218 - DNA, 563 bp, Glycine max
  Clone ID: PAT_MRT3847_44355C.1
ttttgtgatcaatctttggtctctctcatacttgaggaagttttgccatttacacactattatttttcttacaatttgtatctcattcaacccgaaatataaactaagcaacaaaatgtaccaaaaagtaaaaaaaaaaaaaaaaagattacagaaatccaaacgcatcatagactataatttcttcataaatgcttatcagtttccacgagcaacatccagtacattatcaacctttggtatcatatgcccccaactaggaatgaaaagcaagagcaagcatttgtgttgtttgcaagtctgcataaaggccaagagggattactgggctgaactggtcccagcaacgagccagcgatgaagacactggtctattaacgtcaaaggagtgaatgttaccaaatagtagtattttcacacgtagaaacataacatgatagtccaaaaacaataagaaggttaagctagagataaaccaaagaaggaacaagagatagtagtattggcaaccgatcaaggttgccatcttaagataagagcggacacgtgggcggacgcgtggg

SEQ ID NO: 81219 - DNA, 742 bp, Glycine max
  Clone ID: PAT_MRT3847_44356C.1
tacggctgcgaggacgacagaagggggatctaaccctcacacataagacattaacaatgttaattttaaggttggcaatttttgtggcctcccttgtagtagtcgtccaatcccatgttccaaacatatgggaagccaagcccttccaccacatgttgtctttggttcagccagaccctgttgtcctcaactaccacaggggtccactccttaagggaaacgtcaccgttcatatcaactggtacggcaacttcacacccattcaccgttccatcatcgttgatttcatccaatcccttggttccattccccactctcgtcaccacccatcacccttttcgtggtggcgaatcaccgcgaggtacagaggaggcccccgcaccctcaccgtagggaatcaaaccctcgacaacacctactccctcggtaaatcacttaaaacaagccacctcctcgcactcgcttccaaaaattcagcaccaacaactcgcagtaacgctaacgccatccacgtgctgctaacctctgctgacgtggcggtggatggtttctgcatgagccgatgtgggacccacgggtcgggtcgggttgcaaagagaaggatcgcgttcgcgtgggtggataacccggttacgcagtgtcctgaggagtgcgcgtggacggtccaccagccggggtacggaccggagacgccgccgctggttccgccgaacggcgacgttggcgtggacgggatgctgat

SEQ ID NO: 81220 - DNA, 364 bp, Glycine max
  Clone ID: PAT_MRT3847_44357C.1
ggttggggttttttttttgtttgtttttttggggactaatttatataccgaactagtccccatgcataaaaacatttattttatccaaaattaccctggaaatcaaatttccaacttaaaagggaaaaccctatccctacccttcccaattttaaaaaccccggtattacttaaaccaaacttgaacccccgaagcacgccccgccgaaggaagcccttaattaacgcccccacagacatattaaaccgggggcacgagaaggacaagctcgccctaacgttaataacctggcaccgggcggggattggggaacccaacccgttcaaaacgtttcgggagggggagtaatccaatttttccccc

SEQ ID NO: 81221 - DNA, 741 bp, Glycine max
  unsure (1)..(741): unsure at all n locations
  Clone ID: PAT_MRT3847_44358C.1
attccgttggcaaaatctcaggaaaaaaaagaagggggtgaaaggaaaattcctgaagaagctcaaatccatcaaaccaatcctgaagcaagatttaattctccagatcaaggcctcagatgggtacgtccattttctcccaaagattccgagtttcaatctgcattccccgtttgtttcccgagaaaacaagcccgagaaagttgttcagagctgcgagaaaatgcaggacgaacccgaggtgatcgacgttgcagagctgatgaaagaccttgaggaagaagatgattacaatgacaacaaagagaacataggtccatgttcacagaaaccccaacaacaccacaagggtgttttgcagaacgggaacagagcaaaaacagattcaaaacagagaggggttttggaggaaaaaaagtcttcaccagaaaatgctgacaataacaacaacagaaacagcaacagaaaaatccctttgttagacactgatgttccatcgttccggcggccggacttgaactccggcagcctattcgatccgaatctactggccgcgttcgagcaagccgtgaaggaacattctagaataacagaagaacagaggagaagcagagtcgaagaagagtcttcacagaaagtggaagatgatgaccctgaccctntgatgttctttgaagagaagtgtccacccggnggcgacgnaatggttattttctacaccacgacacttaggggaatcct

SEQ ID NO: 81222 - DNA, 1295 bp, Glycine max
  Clone ID: PAT_MRT3847_44359C.1
ccagtcccacaaattcaattacgtacaaactctatcacaatggatagaacacactaagtataaaacattaacaactctatcactgtaggtagaacacagaagttttaactgatattcttcatcagctagcagcagtaagggcacacaatcaagcctttttttttacactgaaggcactgattgctctctccattttcctccacgaccttgtggcttccattacacttgaagcacaacacaaaccttatccctccacatgcatcacaaggaccattagaataatccattggaacccctactaagattttcctcagctttccctgttcatgcaaactcaaaacttcttctgctccaccaatgtacctccccttaacaaaaagccttggaggcagtgatttcccctccaaactgctccacaactcatccttgaattccttgtgcattgaaatgtccctctcaaaatacaaaaccttgaaactctgcaggaggaagcgaattttgttgcagtcctcgaatgtcttccggattcccctaagcgtcgtggtgtagaaaataactgtgccatcgcccccgggtggacacttctcttcaaagaacatcaaaggatcagggtcagggtcagggtcagggtcagggtcatcatcttccactttctgtgaagactcttcttcgactctggctctcctctgttcttctgtcattctagcatgttccttcacggcatgctcgaacgccgccagtagattcggatcgaataggctgccggagttcaagtccggccgccggaacgatggaatatcagtctctaacgaaggggtttttctgttgctgttacttgcagcttttgcaggtgaagaccatttttcctccaaaacccctctctgttttggctctgtttttgctctgttcccattctgcaaaacacccttgtggtgttgttggggtttctgagaacatggacctatgttctctttgttgtcattgtaatcatccaaatccatttcatcatcttcttcttcttcaaggtctttcatcagctctgccacgtcgatcacctcgggttcgtcctgcattttctcgcagctctgaacaactttctcgggcttgttttctcgggaaacaaacggggaatgcagattgaaactcggaatctttgggagaaaatggacgtacccatctgaggccttgatctggagaattaaatcttgcttcaggattggtttgatggatttgagcttcttcaggaattttcctttcacccccttcattttttttcctgagattttccaacggaa

SEQ ID NO: 81223 - DNA, 254 bp, Glycine max
  Clone ID: PAT_MRT3847_4435C.1
ccctcacataggctgtagccttcacgcgcactcaggctcgctaatccctctttcatgaacctcgaagggaggtcatgcgcgtccctgggtcgaggccagatgagccacccgcatgcagtgcacatgtccttttttcccatggccataccgttcaggaacattctcccacgaggtgtccgtctgccaccgttcctcactgagctgctcactccatatgaggatatcctgtcctccagcttgaggaaggacaagcc

SEQ ID NO: 81224 - DNA, 593 bp, Glycine max
  Clone ID: PAT_MRT3847_44360C.1
tttttactttaggacaaaaatcaattacaaatttatgacaaccagaaatcattagatatacaaaaacaaaaagaactggatcaactcctaacacaatcccaacacctgcacacaacaacccaaaaaccagaagaaacacaacaacaaaaaaagctatcacactgaagcatacagatttggaacaaaagaaaaccacttgaaaccacagctacatttgagaggcaaagaggggcaccttggaagccaatgccaagtcctcctagaaagcaagtaatacaaaatctctggccaagtgtagcagcaaatgcagatcatcccttcatgccaaaagcaataaacatgttcatagttatggtaacacactgacacaaacttcctacacataagatcaggcaaactttgaacttccacccaataattcccatctccacccaattcccacaacttgatgctccttgatattccattgctcccaaccccaccaaccaagtacaattttccccctccatcactcaccaatcgaacaaaagtgaggtgatgactcggaaactcccaaacgggtctcttccaccttccactctttaaatcaaaca

SEQ ID NO: 81225 - DNA, 365 bp, Glycine max
  unsure (1)..(365): unsure at all n locations
  Clone ID: PAT_MRT3847_44361C.1
accnnnnnnnnnnnnnccttacggaagccgattgaccgaagcagtcgaaatgctttggatgcacatgaatgagggagcaaagccataggaaataaggcaactctcttgacagaggggcatagcgggtactctaaccataaggagaaggaaggtagagctcgctttaaataagttagaaataggctttcactcctctccaaccagtcgagatcaatcgatcttcctctcctctttcaaccggaaaaggctctgaaagatgacttcaatggggactagaaggaaagaaggggaaagagtagctcatctcgactcatccaacgggcaagcaagttccacggctagagaggtgagaaggtagctcattt

SEQ ID NO: 81226 - DNA, 421 bp, Glycine max
  unsure (1)..(421): unsure at all n locations
  Clone ID: PAT_MRT3847_44362C.1
tcgcccacgcgtncgatttttatttatattattggttaacaaatgattgacccttgccttttacttgttacattcgcactaatttaacttggggaggacgaaaataagtttctaattgatgctggattttgcaggccttaatcttctgtttctgcagaccttacctgttctcactgaatgctgaagtagcctaatcatgaatgcaaagggacataaatttgtgagggttgaggactggaaatcaaagtcatcttttaatcccgagcaagaaaattctattaacaatgggaatcacaaaaaaagacctaatgtgggtgcgggtttgaagagtataagaagaaggctggagagtgtgtcaaagaagatgaagaacttgacaagagcttcagctgtccatcctgtaagtgatggaaagaaaaag

SEQ ID NO: 81227 - DNA, 369 bp, Glycine max
  unsure (1)..(369): unsure at all n locations
  Clone ID: PAT_MRT3847_44363C.1
ctgggtgttgggggggttttttattttttttattttttttttttttttgataaatgtaggggtttttnttattatttattatataataatattttggtttaacaaacccctgcatgcatgcccagcaggggcaataccacatctcatgcaggactacggggagggagggatcaatcctgaacagtgccttaaaactttataaaatacaaaaagaaaaaaaaagtcgagggaaagggagctgatatatatgtactgggtgcttaactgcttgatgcttgcatatcaatcttgtttatttgcacacattcttcagatccatgggatgatttatatatagaggaaantactatacttactaatggtaagggg

SEQ ID NO: 81228 - DNA, 507 bp, Glycine max
  unsure (1)..(507): unsure at all n locations
  Clone ID: PAT_MRT3847_44364C.1
cggctcgagcctgcttatagactctctccctcaaaacgcttgtacaccaggcttcctaagcgctgcatatacacacggcgtatcctcctcgagcaccaccctagcccttgttcgcccttcgccaaagtcgtcaaattaggcaaaatggccaatctcggtgtgccggtcaagctgttgcacgagtcgttgggacacatcatcacggtggagctcaagactggcgagatgtaccgaggaaagttgatggaggccgaggactcgctgaacattgcgctgcgcgagatcaccgttactgcacgggatggacgggtgtcgcagctggaacaggtgtacatcaggggcagtatgatccgtttcatcatcgtccctgacctcctgtcaaaggcccccatgttcaagcgggtcggaccgaatgcgatgcgcggtcgcggtattggtgcagcacgtggtcgtgcgactatccagcgggcgaacgcaagagnggcaccacccgaacgaaccaggcgt

SEQ ID NO: 81229 - DNA, 1524 bp, Glycine max
  Clone ID: PAT_MRT3847_44365C.1
tgaatttctgacagagaactcctatcttcatatatatgggggttgtggtgtgaatggagggacattgttgcccgtgcagaggatgagagtacaggatatgtattgccaaataaatctgttcttgaaatcgctaagcagatgcctcttactacaagcaagctacggcgattggtgaagtcaaaacacccttatgttgaacacaatcttgatactgttgtcagcatcattaggcattctattcagaattcggctgcatttgaggaagctgctcaacagttgaaagaggcacaagctggcactgcatcggatgtagtaccctttacagatggaactgaagatccccaatcccatacacaagattctaaggaatcttctaatcatcaagatacaaatgtaccaataaatcttaagtccaatagtcttagatccgagccaccaaaggatagtctcacaattgcagatcagaatagggatgctaatgttggtgcactttctactacaaagggaaatggagcaactgttcaggtgctaaaaaagcctactggtgcttttggggcactccttgggaattctgcttcaaagaggaagcttggtcctgataagggcaaggaagacagcaagctagagcagattagatcttctgtcagtcttcctttccattcatttttgggtagcagtgaaaagtcagaacctacagtagaaactcatactgtagcatctgaaatgttagagtcacagagacctgtttctgatgtagtttctgtctctcctctagatgagattataatgctagaatcaggcacgggtgcagagaatatggagcagaataacctagaaagctccagtgagcacagggagaaagattctgttgtgtccatttcgggaaaagaggatgaagatgagtcagtatcactgtcggaattgtcatcaaattttaaaaaatgctttcattcaaatgatcaaaattataaaaccagacggcccaagaaaactgaacagcccagtggcttagtgccgatgaagccatttgattatgaagctgcaaggaaacatgttaagtttggagaacatacaaagcatgcatcttccaagggttctgatagtcatatggaggtagaggactcaggcagcaagaagcagcggtcaacaataggacagggacaattgccacaaggtagaagacgtcaggcatttcctgcttctgggaatcgtagttcaacattccgctgagacaatgaaaatggattctatgtacaaattggcaaagccagattttcaatttagcagtgttaaatccaacatgatcaagatatataattttatgatttagcgttggctgtgtcataagttctcacatctttttattataatttttgttcattacttgagcagcaatagttttttccgcccgatcagctatggaaggtgaaaatatttgagggatcagaaaaatatgttagacattgaattgtaatgtattggtttgaaaattccaattacaaggttaaatatgctttgcatttt

SEQ ID NO: 81230 - DNA, 422 bp, Glycine max
  Clone ID: PAT_MRT3847_44366C.1
cggtttcgggtttttcgcgtggggtcaatctcgtagatgtgttgcgagaattgtatttagccaggacaaaagacgctcggcaattgtgaaggctagcctctgtctcacattgaatggctgtgacacgcttgtgtgcctaccacaggacatattgaagagttccattcgcagcataggatgatgaatgctcctgatacaaatgataataaagatctactgatgagcattgatacgttgggtccacaacgggcgggggatggttatgcaaacacgactgtttttgaagatgagctcgtgtttggtcacacacaatagttcttagatggaaagatttcagtggatacctgggtaccaataggcgtgaattgtgtttatccctggagtcacatacctctaaaagctgtctttgtattgttacatgc

SEQ ID NO: 81231 - DNA, 391 bp, Glycine max
  Clone ID: PAT_MRT3847_44367C.1
gattcggctcgagaacctacagtagaaactcatactgtagcatctgaaatgttagagtcacagagacctgtttctgatgtagtgtctgtctctcctctagatgagattataatgctagaatcaggcacgggtgcagagaatatggagcagaataacctagaaagctccagtgagcacagggagaaagattctgttgtgtccatttcgggaaaagaggatgaagatgagtcagtatcactgttggaattgtcatcaaattttaaaaaatgctttcattcaaatgatcaaaattataaaaccagatggcccaagaaaactgaacagcccagtggcttagtgccgatgaaaccatttgattatgaagctgcaaggaaacatgttaagtttggag

SEQ ID NO: 81232 - DNA, 370 bp, Glycine max
  Clone ID: PAT_MRT3847_44368C.1
atggtgtgtgtcaggtctcggctttctgctagggttggtattcattctctttaattaggggcaagggtgctaagacattactggtttaattctgacatttttattatggcatgattgtcaagtgtcatggcactcgcttgtcgtcactaagaaaaagacttctgcactgagaccgaacagatcgacattaactgtcgttcataggatctgcatgcatcattcatttccctgggcattccattagcttgagcaaggaccctaatatgatgctactgtgaaatccgctcctttcagcctatgctaatttatgatgatgatcatgccactttgacactttacgggctaggtcaccactacatcaaattgacat

SEQ ID NO: 81233 - DNA, 2251 bp, Glycine max
  Clone ID: PAT_MRT3847_44369C.1
tcctttgcacccgtatctgattcaagcattataatctcatctactggagagccagaacctacaccagacacaggtttctgcggttctgacatttcagatgctacactaggaatttcttctgtaggttctgacttttcgctgctacccaaaaatgaatggaaaggaagacttacagaagatgtaatctgctctagcttgatctcttccgtagttcaacctggaccggagttgttcttctggccgcttccttccccgccttcttcggggacccgtgctaaggggaaccttcaggggccctgcctggtggagcgtctggcatggcgcggccccagacatgcccttaccaggaccaagcttcctctttgaaacaggactccccaggagtgccccaaaagcaccagtaggctttttaagacctgaacaaccgcttccattcccctttgctgtagaaagtgcacctccctgtgcacatttaattcggctcgattgtatcttctgtcagtcttcctttccattcatttttgggtagcagtgatgggtcagaacctacagaagaaattgctagtgtagcatctgaagtgtcggaaccgcagaaacctgtttctgatgtagtttctgcctctccagtagatgagattataatgctagaatcagatacgggtgcaaaggatatggagcagaataacctagaaaactccaatgaacacagggagaaagattctgttgtgtccacttcgggaaaagaggatgaagatgagccagtatcactgtcagaattgtcatcgaatttaaaaaaatgctttcattcaaatgatcaaaataataaaatcagacagcccaagaaaactgaacagcccagtggcttagtgcagctgaagccatttgattatgaagctgcaaggaaacatgttaagtttggagaacataaaaagcatgcatcttccaagggttccgatggtcatatggaggtagtagaggactccggtagcaagaagcagcgttcgacaacaggacagggacaagctagtgatttgagtaaacaattgccacaaggtagaagacgtcaggcgtttcctgcttctgggaatcgtagttcaacattccgctgagacaatgaaaatagattttatgtacaaattgacaaagccatattttcaatttagcagtgttaaatccaacatgatcaagatatataattttgtgatttagcataggttgtgtcataaaagctcacatattttgattataatttttgttcattacttgagcagcaacagtttttttgcgccgatcagctattgaaggtgaaaatatttgagggatcagaaaaatatgttagacattgaattgtattgtattggtttgaaaattccaattacaaggttaaatatgctttgcatttagaaacatttgcatccctacccccctccgcaattgtgagactatcctttggtggctcaaaaataagactattggacttaatttttattggtacacttgtagcttgatgctgagaagattccttagaatcccgtgtatgagatgggggatcttcagttccatctgtaacaggtcccacatcccacgcagtgacagcttgtgcttctttcaaccggacgcgtttcccgggtcgacccgggcttccgtgaccttgaaacttccttctattggaccctatctaaggagaaatcttcaaggaccctgccaagaggaaggtcatgcatggtgcggatcgagatattgcatggcttcaacgagactttggaatttacatttgtaatttgtttgacactcaccaggcttcaaagttgttaaacttgggagagaaatagtttggagcatattctacaaattttttgtgaagttactgcaaacaaagaataccagaatgcagactggagactacgtccacttcctgatgagatgataagatatgccagagaagatacacactatctgttgtatatatacgacttaatgaggattaagttatttgccttgtctaaggagtctgaaagttctgagtcttcagacactcctctggtggaggtctacaaacgcagttatgatgtctgcattcagctatatgagaaagaacttttgacagagaactcctatcttcatatatatgggttgcaaggggccggtttcaatgctcagcagcttgccattgtttctgggctgtgtgaatggagggacattgttgcccgtgcagaggatgaaagtacaggatatgtattgccaaataaat

SEQ ID NO: 81234 - DNA, 362 bp, Glycine max
  Clone ID: PAT_MRT3847_4436C.1
ttcaatacatctattaatttctttacttttcataatttttttctccaaaactatgtacttattggggtcttcttcgactaccttttgggagggatccttatcttctattacaccttttcaagtccaaccttctctctcgctttaacaagaacgatttcaacttggagtccaagtccaccattttcgtttagttcgccacccgcacctttaacgtctatttcaaagtcatcaatgcccatatctttgacaccgcatgccaagaaaggtatcgtgccatcaccagtgcatactattctggttcaatctgttcacttttcgtgtatgatgtcactccccattcaacattttaaaatgttgacaga

SEQ ID NO: 81235 - DNA, 496 bp, Glycine max
  Clone ID: PAT_MRT3847_44370C.1
cgaaaaatggggacgccgtttttgtgttggaagaagtacccaccaaattaatcctcattcgttcctttacactacgagaacggctggcaaagaatgaataaccctgcgactcagacctgttcccactttttttttccgtttttttttccctttacactttctttctatggtgggcgtccggctacctaatccttaataagcacggttcaccaagcgtgggggctgctttctgaatgacaagcaccatctttcccaccggtggaggatgaacagcacaattgccgccagttccaccgggatatagcgctgaattaccttaaaaagtcgaaattttgttacttgtgtggccgcgctcctgactagccgagagagttacgcaagatgattgagttgcttgaatatcaagatagggcaggtgatggctgatcaagctgattaacctatggcttgagactctgtaggggtggcccttggagttttgtttgcttgcctcata

SEQ ID NO: 81236 - DNA, 2101 bp, Glycine max
  Clone ID: PAT_MRT3847_44371C.1
ggccgggggcattacaaatttgttctggtaacacttttctctcacacagaacatgtttgtcctagaaaatggtgtgaagaacaagggggaagacccaaggcttcaagcaatctctcaagccatcagagtggtgcctcactttcccaaacaaggaataatgtttcaagacataacaacattgttgttggatcacaacgcgtttaaagacgcggttgacatttttgttgatcgttacagagacatggatatttctgttgttgccggagttgaagccaggggattcatttttggttcctcaattgcgttaggcattggtgcaaagtttgctcctttatgcaaacctcgcaaagctaccaggtgaagtaatttcagaaatatatgttctaaaatatggaactgattgcttggagatgcatgttggtgctgtccaacaaaatgaacgggtcataattatcgatgatttggcggctacaggtggaactatgtcagcagcaattagacttctaggtgatctgcacatgcaggctttattgttgagataactgttctgttaaaaaaaaaattattctcttcaattccaacaaaccttgtagtatatagatataatgaaagtttcgaagtatgaattgctacaatgtataaactttattccaaacccaaaaccataaagtttgcattaaatttcgaagaaatcatgatatccatctcaagacatattaatgaacatatcatgtaagagccttaaatgatacaaactaacagaaatcttaaatataaaatgttcttagagtgaataaattggcacacaaaactaattaactaattaagattactactactaatctatcttgctcatcatggtctaggcttcattcttccttcattggccatcttgaagagctgggcttgtgcttctgcggccttgttggagttgagtgaggccacaaacctgtccctgacttggttggtagtgtaagggaacttgttgttcaccatggagttgaggaaggaagctgtgccttctctgtagagtgctcctagcccatcagttcttgtgttggaaagtgcttgtggcaagctcaggccaggactgaaccctggaacagtagtacctgtaacaccaaatgcacttcctagggttccccaccagccaaggattccccagatgattgcaggatgattcctccagtagttgcatgtgccagtgaagggagatggggaaggaatgagtggtggtgaggggatactaggggttccagggtcaactggagtagatggtgggctcacagtgacaggtgttggggggctacctccatagtatccacctgagggagggtttgatggtgttgatggagttgagggtgttgttggatcatgatgttgtgggggtgatgatccacagtttccacctgagggtgttgatggagtacttggactactgtgatgatgtgagggtggagagctcccatggccatgagatggaggactactattgtgtgagcctggagctgtggggggacttccagcatgtggatctggggtgtagtagttcttctgatctgcaacagtggtggatattacaggaatgacaaggctctgagagagcaatccaacaagcattgcaaacatggtgaaagaagcatggcttcttttcctctccattgcttctagcagctcagaacacaaaagagagagagagaatagataaaataagggttactagaggattttgaagtgtccccttctgtcgtcttctcgcagcctccatgatgagagggtgatccatgttgagagtgatgtggtgagcttccgtgcccaccactcccagagccatgatctggagagcagtatgaacatagagaatttgataaatctgttcctgcatgtgggtctggagagttgaagttctggtccacaatgatggcagtggtagatattacagggatgacaaggttctgagcaagcactccaagtagcaatgtgaacatagtgaaagaagtaggactgtgtcttttcctctccattgtttctgactgcttagaacactaagagaaagagagagaatagataaaataagggttaccagaggattttgaagtgt

SEQ ID NO: 81237 - DNA, 832 bp, Glycine max
  Clone ID: PAT_MRT3847_44372C.1
cacttctataaggtgaaggagacggagagtaagatggggttatcggcgtcaaagagagtggagaagagtctgtcgaactcgggcgattttgactcagcatgcgactcagccttctcccactgcctcgctctcacacagcacgccttcgaaggagtgttcccttaccaactcaaaaccgcctccgattacatccacgccaacaccacacaccctctcattcgaaattggctccccacacctcccgatcggacccaaatcgacgcagccctccgccgcctccctcccaattccgatgacacacttccacttcccctcttcaaaaactgggcccaccacctctacaccgacgccgtcgtgtccgccgccgccaaatcgcttaaggtgcgcgttcccgtcggcatcgccgggatcgtcggagtcagcgccctcactcggcctcctctccgaatggttggcaccttcattggagcctactccctcgctgttgcgctctccattttagatggcttatccacataaattgtatttctaattttccgcttttttatgcttcggcaatgatactgttatttgattacatagagtaattacaatcctttgtaagtaagtatattaatttttgtaattattatcttaaaaattatatttattatatattttttattaatcactaatcgacaaaaaattatactgccagtatttaattttttttttataaaatttttattatgtaatttgatatttgttagtgcaatactggtattcactaatctggtgtaggtcttttctagaagcattcaattcaagtgtgttctgccttctcctttacgtc

SEQ ID NO: 81238 - DNA, 643 bp, Glycine max
  Clone ID: PAT_MRT3847_44373C.1
aagattcaactactcggctcaaggctgccgtcgccggtcgtcgccgacactgttgcttcactctgttcctcttcgtgcgaagtactaggatcagatggctttgcgaggggtttggcaacttaacaagctgattgtcagttattgcaactggggcggaagtagcagaggtataagggcatttatggagtctcatttgccagcatttaaggagaagaatcctcaattagaggtggttactgaactcatccgtggtcagcatccacatctgaagggttattacaagaacaagaatcagcgagtgatatctgtgaagaatatggatccagaagacatacttttgcatgcaaccaggctaagaaatgcattgggaaggaaggtagtgaaattgaggacaagacatgtaaccaaacgccctagtgtgcaaggtacttggacaactgctgtggagtattaagatagaaaaccaggtgtatgagaaagttccttttcatatggtgaattaatcaatttgtgaactagtgggtgtaagttctcatgtatcttgcacaatttccagtttttcaataattcactttttttttggtggtttgcgtttgggtcgtttgcactgtttgcttcccaatgatgaagctaatgagaaaat

SEQ ID NO: 81239 - DNA, 145 bp, Glycine max
  unsure (1)..(145): unsure at all n locations
  Clone ID: PAT_MRT3847_44374C.1
gagnacggngggagaagggaaggngagcagtaatngtcatggatgtngcaaatcagggccaggctatgcntaccccacancaagccagcagcncgncccagagaggcncncaagnangnaaccnctgcctacacagngaccggag

SEQ ID NO: 81240 - DNA, 457 bp, Glycine max
  unsure (1)..(457): unsure at all n locations
  Clone ID: PAT_MRT3847_44375C.1
taaaataaattggatctatgggcttttaatcgaaccagttcacacaactaaaagtgaagtctttttggacaatactcggttcgcgcctcatagaattcctagttaaaaccaagatgaatacacctaagctcatttgacctcaggcacaaacagcttcccttgcctgatgggcacgcctgctctcgatagaatgtcggtctaactttctcaaaccttccatccttgatcgactctctcattacatgaaagaacgtgaactagtggcgcggattaagcgattcctaacagaatgcgtgccagcttcccatgaacataaaccaggngattgatgcatgctgcattatgagtctggcatggatagcaaaggcatggccctaanaatataaacacatctctactgaaaacctgagatctcaaataaatttcaggcaagtcactggcaacctggctttcttga

SEQ ID NO: 81241 - DNA, 1238 bp, Glycine max
  Clone ID: PAT_MRT3847_44376C.1
tatatctcttgtgtctataataacctaatcctttctacgcgatcatatatccccttccttccttttcccaccctctcatcatgacccattcctacagctccaatgactttaatgcttggtttgacctcaattctccatgccttttttccacttcttcatcaccttgctccaataacccaccattttactttcctactagtaatactaattaccttaataactgcacaaatagacatatcttttagcagcatactcaatcttcttccaaccctctcctcctcaaagaaaagcacttcccctccttaatctaagacatgcaggagatgaagatcttgaatcttcattcagtgccatgaaagtcaacaaagagaaagagaaagaactaagctcgtcatctaataataactctttggatgatgaaactgctgtgactgtggctttacacttagggcttccaagcacgactattgcatcttctgaatcagctgatttagcttcaagcctatactcagacaaagaagaagaagaagaaaaagtagcactgatgcttcggggcattcttctgtcaaatagaattaacagaggacaatattggatccctacttcttctcagattctgattggtccaacacagttcccatgccccctttgtttcaagacgttcaacagatacaacaacatgcagatgcatatgtgggggcatggatctcaatataggaaggggccagagtctctaaggggaacacaacccacggcaatgcttagactcccttgctattgctgtgcaccgggatgcaagaacaacatcgaccatccaagagcaaagccactcaaagactttaggaccctccaaacccattacaagagaaagcatggaatcaagcctttcatgtgtagaaaatgttgcaaagcatttgctgtgaggggtgattggaggactcacgagaagaactgtgggaagctatggtattgctcttgtgggtccgattttaagcacaaaagatctctcaaagatcatatcaaggcatttgggaatggacataaagcttatggaatcgactcgtgtcttgatcaagatgatgaagcgggctctgaaattgagcaggaaaataatgaatctttttaatttccagtcgtagttgatgtgtttaatttcaactatgaagacaagacaattgaggattctcttgttttgaactaattaaattgttgactatgactaccatctctaattaacg

SEQ ID NO: 81242 - DNA, 441 bp, Glycine max
  unsure (1)..(441): unsure at all n locations
  Clone ID: PAT_MRT3847_44377C.1
aactatcatacccacatggatggnggggaacatctgggttcttggtggcctctttcaatctaaaattatctttatttttttattcacatcatcattataacatatagtgtatattatgggtctgtatctgactttaactttctttgtgtgtattggatgaagcaatgaaagtgagagaggccaattatgcgaacgctttgtgatgcttgtgagagcgccgggggtatagttttctgcgccgctgatgaggctgcactttgtcgtgcctgtgatgagaagggtcacatgtgcaacaagctagctagtaggcatgtgagggttggtgcttgtaggccaagtgatgtaccacggtgtgacatatgtgagaatgcacctgctttcttctattgggagacagatggaagctccttttggttgcagtgtgatatgattggtcatggt

SEQ ID NO: 81243 - DNA, 713 bp, Glycine max
  Clone ID: PAT_MRT3847_44378C.1
tgtgagtaggatcacttaaccatgcctcataattggaaaaacgagcaccatgaaaatacatgccactcagccaaagaaagatgatagagaggacagaaaaatgggcactaaaaacttttcgggaaatctcctctaaatcattagtatggctatcaaaatcatgagcgtcagcatgtaggttccagatccaagtagtagtatcaggtcccttagctattgttcttgagaaatgacctggttttgcccattcctcgaaagaagtttttatgggatctctatctaccaaaattttcacttctggttccggtgaacgaataatcattgagtcctcctctttccagacaacacatacaaagagacctgccaacataaaacagaatttttgaacttattagagatgtttctattgagttttgttctcttctatctcacagctatctattttatattttctttaatttaatctattttctttagttattcactagaacaattatgatctcgactcgagcccggggcaagtgttcgaatctattatgacataacagtggggcgctcaacggacctttttaatcttctaagaccttttttgcgaacttttgatgggagttaaataattttttgtgcagcctaatctaatggattcatattttattcagaaattcctagatgggactaatttttaccttttttatatagaaaaaagattatta

SEQ ID NO: 81244 - DNA, 411 bp, Glycine max
  Clone ID: PAT_MRT3847_44379C.1
aattctctctacagggacatggttatgtttctcacagagcagattgccaatgcgagtgatgctatatacaatattaggttcctctacgctccggatatcgtggagtggggagaaagagaaaccaccaagctagcttatcatattaagttgaacagagacaaaaaaattatctcaacacaagaccgccgctttagcgtgacaaaggaggattccataaataataaagggacgacatcgaaatcccgaacttgtgcatttgttgagaagatgcaaacaaacgcacaccttaatctgatgcgggacgggtggaagatgcgttgtactcatggctatctggcatgaccactatggccatggattatgtagaataacggcgataaacggcgtgtatgggaatcaagagctgaggga

SEQ ID NO: 81245 - DNA, 178 bp, Glycine max
  Clone ID: PAT_MRT3847_4437C.1
ctgagacgctgcagataatgagagaatatagctagcctcagccttgctcatgaatcggcctaggtggacagtctgatatagcccaaaatctaggactcgatcttactgataatggctcaactaaagcaggttataacccaaccgcttgccaggttgatgagactttataacgagctaa

SEQ ID NO: 81246 - DNA, 368 bp, Glycine max
  Clone ID: PAT_MRT3847_44380C.1
gccgccctttgtttttctttttgcccatgcaacaaactgccgttttatctcagtaaaacgtgaatgacgctcttataaaaaagctatttcatccttaaacactaaggctgaacaatattacatgacataacggggactttacctcattacagaacaaaacaaataatattggcaaatcctatataaaaaccgaaggggaccagcaaccaccctaaaactaaaacacttccttcccgacacataggggagaaaaaaaaaatacacaaatagcctggacattcaatagaagaaattgctcggagaatctccccaccgtgaaaatatcctaacttccccattccttaacctgtcacgtcaccagccgaagc

SEQ ID NO: 81247 - DNA, 664 bp, Glycine max
  Clone ID: PAT_MRT3847_44381C.1
cacgcgtccgcctaatagtagtaacgaataagaacaagaaacacacgttactaacgcacaaagaagaagaagaagaaacctctctgtttcccactttctttcctctcaaaagctacacgagattcatctatggcggaaggttctggaaggaggctgatggtggaggtttgcaacgcgaaaaacctgatgccgaaggacggtcaaggaaccgcgagtgcttacgcgatcgttgactttgacggccagcgacggcgaacgaagacaaaatcgagagatctcaatcctcaatgggacgagacgctcgagttcatcgtccacgacaaagactccatgccttccgaaacgctggaggtgaatctctacaacgacaagaggacagggaaacgaagcacttttctcggcaaagtcaagatttccggaagcacgtttgtgaaatccggttccgaagcgattgtctactatccgttagagaagaggagcgtgttctctcagatcaaaggagagctcggtctcaaggtttggtacgtcgaggaggatccaccggaaacagaaaacgccggtgaggagaaagcagagtcagcacccagcggcacggaggagaagctgccaaagactagagagaagaaaacggaaaccccccacatgagataacctaaagaagatc

SEQ ID NO: 81248 - DNA, 307 bp, Glycine max
  unsure (1)..(307): unsure at all n locations
  Clone ID: PAT_MRT3847_44382C.1
tacggctgcgagaagacgacagaagggagatttctaaaggcctaaaatcaacatgtaactttattacctctttcaaaaataaagagatcattaatggtccaatgccttaatgtcttctctcttttcaaaagaatcgaaagattgtttaatggtccaacgccttaaatgacctttcattcaataaaaacatattttgcaaaaagaataaaaacaacttaaccaaacactttgttcacaaagaactacgtaggtttgatttccttatcgcaataangaatacgtaggagcaagggaaacaccctcgtcg

SEQ ID NO: 81249 - DNA, 794 bp, Glycine max
  Clone ID: PAT_MRT3847_44383C.1
ctgcgagaagacgacagaaggggggtcactactttgcagcacactcttgagttttgagtctccctccctggcagtttcatggcttcttcagtgaccagagcaacctcaggcttcagcttctcagagatctggctcttggtggcagccacagcactcatctgtggctttctggggtacatagtttatgatgcaatcatggccactgcttctgagttgctgcaacgtttgctggtaatttctccactgttcttgatcatcattgttcactggctctccactgcaagccaaataagcttccccatgccaggatctgagcccagtgccatccacagagctggtggttccccttggggtgttgcatttgttcttcttctgcttttccttctcatttcttaccaaccttccctgcatgaccttatttcttagctagcatgtgctatatagtttatcaggctatgaaaatttagtgcatgtcacttatgtggggtgcctgttcttttttttttttaacataaatgttaattattacgttgttagtttttattactagttgttagtttttattactagaaaaatctaaggtagtatctttccttcttttctcaccctactaatcttatatctccgggtgtggtacttgtaattttagagttactgtagctcataatgaaccttttaatttctatgtgaatttgggtgtaaaaactattgcagtgtctctctctgcctctaaaagagtcttgcttttcctctgtccaaaaaaaaaaaaaaaaataataaaataaaagcgtccg

SEQ ID NO: 81250 - DNA, 401 bp, Glycine max
  Clone ID: PAT_MRT3847_44384C.1
ctcttttttcagtttctgctaaaagagtacatcagcttcaggactcgttgaacaggatgatatcttccatgtcaagtcaagttgccgagctgaaggcgatcttgagtacttcatcaagattgagttcaacttttcgacctattgctagggttgacattgcttccagtaactctgatacttcatctacagactctgatttcacatttccggctcctgtttcaaatactgaacttttatcttccccagagtcaaattctttccaactagtagttcaggatgtcactgcaggggatggatcgggatctgaaagtggaaaggagggttcatttgatgatttcttctagtaaaatttgtacttcttagcgggcttaaatttacgtgtcctctgtctctggggaaac

SEQ ID NO: 81251 - DNA, 332 bp, Glycine max
  Clone ID: PAT_MRT3847_44385C.1
cctttccctgaaaccaatgttgagaagaattgcagcaattttcttgataggctttttggccttggcatatcaagccattcaccctccacccccaagaacatgtggtagttcccctgaaggtcctcttatcacagggccaaggattaagctcagagatggaaggcacatagcatacaaggaacatggtgttcctagagaagaagccaagaagaagattgtgttcttacatgggttcggttctagtagacatgatgctgtgattgcaacacaccttccccaagtacatatatatttattactagtcagatttatatatgatcttttttataacc

SEQ ID NO: 81252 - DNA, 1492 bp, Glycine max
  Clone ID: PAT_MRT3847_44386C.1
gtaagctcggaattcggctcgagggaggagatagagaaagggaaatggaagcggaaaccttcatttgagttgccattgccaccaccgtttcccatggcgtctgtttggacactgcacttccgctctctttctcttcgcccatgcctctacattagtagcaattgcagtagcgctgccactagaaatcgcattagcatcagaaatcgaatctccaattggcgctcttgcgcccaacaactcaaacacgattccatcaattccattaccaaatttcaccatcaacttgttcattccgttaccattcctccattcctgttcgaggcctctcaagtatgaagaccccttcaataatccctttgtcaaggttggcaaaagcgactcaactgttgagatgtgcggaaaggtttaccgtttagcccccattactctaactcaagagcaacaagctactcaccagaagaggagattgcgtgcctaccagtggaagcgacccaccatcttccttagagaaggggactcggttcctccggatgttgatcccgacactgtcaggtggattccggctaatcatccatttgctaccactgctactgatttggatgaggacttggcacaaaacaatgtgtatcaaaagcatggagttccttttcggattcaagctgaacatgaggccctgcagaaaaagctcgaagccctacaaaatgaccagaaacttgataaactagtgatagatcctatcaatgctaaagaatttgaaaggccgttcaactctcacgccagattaaatgatcaagcagataagagctctgtaaacaatcaggagcagaaactcaataaacaagtgatagatcctatcaatgctaaagaatttgagagaccattcaactcccacaccagattaaatgatcaagccgaaaagagctctgcacacaatcaggcgagtgattctgactccccaagaatagatagtggcccaaatcactttgaaagtacatcatccgaagatccaactctttaggttctttgcacacagcttttacctgtattggtcctgttaaaagtgctatgaggcgggctataaatctcctgtaacactaaaaatatagatttgaatttgctaaaaaaatttgtactattcgtcttggagtcttagaactttcgaattgtataggtgaggactgtaaatataatcttattggtgcttatcgtcaagttatgttgttactaggatttcaaaaaacatggttttttttttttttgggggggggggggggttggaattttacacttcctcctgtccccgaacccaatttatccgtaatgcaatttgattgtacataaaactcaattaaagttctggttctgcaacctgataattggctaacagtttagccaggaaaacgacgaaggacgaaaacaccttttacaatgttgtgtacgttgaacttcataaaaaaaatgttgtgtatgttgaagttgaagagttactaaa

SEQ ID NO: 81253 - DNA, 526 bp, Glycine max
  Clone ID: PAT_MRT3847_44387C.1
ggctcgagagtggctgatgcacagtcgaattgaccaactgagctggacagatacttgctgaggatttcactgggagtgctatactgaagaatgtaggcattcatggacaccacacgaatgtcaaggtcatgtgtgctgatgtcacttgtccaaacttgcatatatctgaaggatcagctgatctgatactctcaaagtggatactcatgtatctttcagatatagaggatgatactctatctgctatgttgatctgacggcccaaagttggtggatatgtactgttcagactatcatgtgtccaccaatctggacattccaagagaaatttccacccaactgactatagggaacctatattccacactgaggtatttaaagagtgccgtatgagtgatgacaccatgaatagccttgtactatggcttgcaggctgacaatgtattggcgcttatgtacgccatgagaagagtcacacccagatttgctgggtatggacaaaccttagatcacaggctgatagggg

SEQ ID NO: 81254 - DNA, 307 bp, Glycine max
  Clone ID: PAT_MRT3847_44388C.1
tgccaccaccgtttcccatggcgtctgtttggacactgcacttccgctctctttctcttcgcccatgcctctacattagtagcaattgcagtagcgctgccactagaaatcgcattagcatcagaaatcgaatctccaattggcgctcttgcgcccaacaagtcaaacacgattccatcaattccattaccaaatttcaccatcaacttgttcattccgttaccattcctccattcctgttgaatcaaaatggtggaagcaattttccgatttgggtatgtgtttcggttgtggttttggttgtggc

SEQ ID NO: 81255 - DNA, 363 bp, Glycine max
  Clone ID: PAT_MRT3847_44389C.1
caaagcattacaaatgacagttactttggttattatggatgggataaaagctgtctttgacccatgtaactgtgttaacttttagagaaatgagcttgtataaaattgattgtagaggctaagctttagcctcaggggtgcaacaactgattatcatttagttgtgacattattaaaaaaaaaaaaaaaaaaaaaaaaaaaaaaaaaaaaataaaataaaataaaaaaaaaaaaataaaaaataataaaattaataaatttattaaataataaaaaaataataagggggggccgttttaagggatccaattttacttacccgggcttgcgaagtaaaaatttttttttaggggccccctaaat

SEQ ID NO: 81256 - DNA, 362 bp, Glycine max
  Clone ID: PAT_MRT3847_4438C.1
acgagataaaactattaatttactttagaatcttagattgtcaattttttttaagaaaatctaagttgtccttgaatttaattgatggatatctaaattcaatccatctatatttattattattattattttctatttttatgggattagaacttgcctctcacttttcaccactaagaatcctaaaatttattatttgaagattgcattgctttttgatcatcatgttcaagtttactatgattacgttctaatttggtaattgtaaaagttatgtctaggagtattgatttaattgatcattgatattgaagtttattaacatacaaagctgatgtcaaggtggtttggatttggcattc

SEQ ID NO: 81257 - DNA, 803 bp, Glycine max
  Clone ID: PAT_MRT3847_44390C.1
cccgcgtccgggaagcggaaacctctaattgagttgcattccaccaccatttcccatggcctctgtttggacactgcactttcgctcgctttctcttcgtccatgcctctacattagtcgcagtaacagtagcactgccactagaaattgcattagcatcagaaatggaatctccaattggcgctctggcacccaacaactcaaacacgattccatcaattccattaccaaatttcaccatcaactcgttaattccgttattattattattagttgaatcaaaatggtggaagcaattttccgatttgggtatgtgttgcggttgtggttttggttgtagcggtgagaatgagggtagtagtgtccagaaaaaaggagcgtcctggttccgtggctgatctagttagacgtggccaactcagatctgatagaagaggcatttcgaggcctctcaagtatgaagaccccttcaataatccctttgtcaaggttggcaaaagcgactcaactgttgagatgtgcggaaaggtttaccgtttagcccccattactctaactcaagagcaacaagctactcaccagaagaggagattgcgtgcctaccagtggaagcgacccaccatcttccttagagaaggggactcggttcctccggatgttgatcccgacactgtcaggtggattccggctaatcatccatttgctaccactgctactgatttggatgaggacttggcacaaaacaatgtgtatcaaaagcatggagttccttttcggattcaagctgaacatgaggccctggc

SEQ ID NO: 81258 - DNA, 331 bp, Glycine max
  Clone ID: PAT_MRT3847_44391C.1
aaattgtagtggaacagtgaatcttaaaattcgaaagaaagctttatttcggtaaaacctgaaaacagtggctacgggaaaagaacaccaacagtaccaaagaaaatccagaggcattccctcctaaatagatagcaagcaaatccaacggaaaatggaaaccttactggacgaaaaccaaaccatgctagcatttttgacaaaagattctttgcccctgtgatcggtgctgctgcattctactcttcgggaacggggggacatgatgccttgtgggtagctgaaattgctccacatgcatttgcatacttgggtactaatgttaaccttg

SEQ ID NO: 81259 - DNA, 477 bp, Glycine max
  Clone ID: PAT_MRT3847_44392C.1
gcatggtctagctatctcgatcgaactgtccaaggtcctgtcacattctatcaagagtggcggcgggccactcagttcacaaaaatgtgcgaaatagcggccgggattacgattgttggataccgcagcactggtgtgtgcatgttggttcggataaccaaaggcacaagccaagctgcacccaacggcaccccaacagcccggcggaaaccacgtacggcagcgacataggccgctaaatttggtgctgcaccgccaccacaacagcacccacggcagcagctagtgcggaacgtcggcataggcgatatataggtcgatggtacgagtaatttctaggtcagaacaacatacggccagattggtaccaacaccgggagtaacaagggcatgtttacatgcagctacactagtacgacgcgggaacaagtatagtcacccactagtgaaagattgctgtgtgaacaggaaacaggg

SEQ ID NO: 81260 - DNA, 372 bp, Glycine max
  unsure (1)..(372): unsure at all n locations
  Clone ID: PAT_MRT3847_44393C.1
aaaantnaaaaaaatgaggggattttaaaattgaaaaattttaaatttttaaattaagtttgggaaaagtgggaaagtttaaatgtttaagttaaaaaaaaaaaaagggatttagggtttttaataatttaatactaatattagtatgtaacataaaaacataaaaagacgcaaaggcgaaactcccaccttcatacttgaattgatgtggtataagggcacacattccccctttgcggatttttcgtccacatattcacaaatttaattcctggcctgaaaggctacaagccctcttaccctggctcccttactaaataactaattaacttttttacttcttccacaccccaacaatttgactttttaacc

SEQ ID NO: 81261 - DNA, 291 bp, Glycine max
  Clone ID: PAT_MRT3847_44394C.1
gtgcagaatggatgacaagacgttgccggctctctttgagtgagacacgatgatccacttcgcaaacaccgttaccggtgacaacaacaacgttgaggagaaggggtgcgacgctatgcataaatgcgaggacatgatccatgatatgggatggatctctcccaaccagaccaaactaaatttcagcagcaagaatctgaagaacattgtggcgtcattgtatactgcatagataacgggtacaatctcacactatgactggatatacattgtggagtcttgacacgcaag

SEQ ID NO: 81262 - DNA, 2077 bp, Glycine max
  Clone ID: PAT_MRT3847_44395C.1
cttccatatgtcatatgactgcgtgcacgctggttctcatctgtaaagatagaccgaggtttgcttggctgtttctcaccattaaagctatagacgtccaggaagttgaatttttcttaaatagtataacttttgcttaaatctgttttgtagctctagtgatgggctgcatatctggaggggaaatagatgcattgctgattgcagtaaactagttgccactcaattttatgttgctatgtgaactacagtttgttcccctttctatctgtctctgtgtaaggtggtttactcattcaaaaattgttgggtatcattgaaatatacgttgggatgctatttgaccgattcattgatggtgatctttttcctagccggtattgtctttgtcattttcttgagaactgtaagaagggacttgactcggtatgaggagttggacaaagaggcacaagctcagatgaatgaggagctttctggatggaagcttgttgtgggtgatgtatttagagagcctgatggttcgaagcttctctgtgtgatggttggggatggggttcagattcttggaatggctgctgtgactattgtttttgcagccctgggtttcatgtcaccagcttccagaggtatgctgcttacagggatgatcattttatatcttatcctgggaattgctgcaggctatgtcagtgttcgtctatggaggaccattaagggaacatcagaagggtggagatcaatttcctggttagctgcatgtttttttcctggaattgcttttattattcttacagtactgaattttattctctggggcagcaaaagtactggtgctatacccatttccctgtattttgagctgttctttctctggttttgcatttctgttcctcttaccctcattggaggatttatggggacaaaagctcagccaattgaatatcctgtgcgaactaaccagattccaagggaaattcctgcacgtaaatacccatcatggcttcttgttcttggtgctggaactcttccatttggaaccctcttcattgagcttttctttatcctttccagtatttggcttgggaggttctattatgtgtttggtttcctgttggttgttcttctattgctaattattgtttgtgctgaagtgtctgtggtcctcacttatatgcatctctgtgtggaagactggcggtggtggtggaaggcattctttgcatcaggttctgtggctctttacgtcttcttgtactccattaattacttggtgttcgacctgcagagtttgagtggacctgtctcagctaccctttaccttggttattcactactcatggccattgcaatcatgttgtcaaccggcaccattggcttccttatgtcattctactttgtgcactacttgttctcatcagtaaagatagattgaggttcttgttgtcattgcatattaactatgaaaaaggttgattgatataacttgatcacattgcatagtagggcaacggatgtttaattcattgtctgattttatattgcgatgggatctgcagtttgttctccttctgcctgtttcccaaagtagtgtactcattcaagtattcaactagtgtttgagatcatgtttcaagtattttgttcaagtttctttagaaggttgtaattcaaactctcatctcatttcaatactttagaaaaatgatgttagatagatacatgctttcagaactcgttgtgatattcactgtgcttctgggtatttaatatttttagcttcttttgggttcaaggatgggaaagtgacttagtataggatagggaaagtgacttggtattgtactattaaaatattttattcaaacataattaattgtctgcttgctatgcgaactacagtttgttcccctttctacctgtctctcccgtaagtttactcattcaactagtgtttggtatcattttgtttcatgtgatttagtttggtcaagttgcttgaggaagttgtaattgcacagactgtcttattccttattcattcaaatatcaagaaaaattaaagggatacttctag

SEQ ID NO: 81263 - DNA, 765 bp, Glycine max
  Clone ID: PAT_MRT3847_44396C.1
ttcattgagcttttctttatcctttcccagtatctggcttgggaggttctattatgtatttggtttcctgttggttgttcttctattgctggttattgtttgtgctgaagtgtcagtggtcctcacatatatgcatctttgtgtggaagattggcagtggtggtggaagtcattctttgcttcaggctctgttgctctttatgtcttcctgtactccattaactacttggttttcgacctgcagagtttgagtggacctgtctcagctatactttatctcggctattccctgctcatggcaattgcaatcatgttgtcaactggaaccgttggcttccttatgtcattttactttgtgcactacttgttctcatcagtaaagatagattgaagtttgctttgctatctctcaccagctaaagcaaaaggcatgctggaagaagaatttttcttaaatagtgtaacttttgcttaattctttttgtagcttgatttgcagcatgttgagtggtgaaatagatgccttgctgattgcagtaaatagttgccactcaattttatgttgctatgcgaactacagtttgttcccctttctacctgtctctcccgtaagtttactcattcaactagtgtttggtatcattctgtttcatgtgatttagtttggtcaagttgcttgaggaagttgtaattgcacaaactgtcttattccttattcattcaaatatcaagaaaaattaaatggatacttctaggtttcgtcaa

SEQ ID NO: 81264 - DNA, 874 bp, Glycine max
  Clone ID: PAT_MRT3847_44397C.1
cttatcctttccgtatttggcttgggaggttctattatgtgtttggtttcctgttggtagttcttctattgctaattgttgtttgtgctgaagtgtctgtggtcctcacttatatgcatctctgtgtggaagactggcggtggtggtggaaggcattcttcgcatcaggttctgtggctctttacgtcttcttatactccattaactacttggtgttcgacctgcggagtttgagtggacctgtctcagctaccctttaccttggttattcactactcatggccattgcaatcatgttgtctaccggcaccatcggcttccttatgtcattctactttgtgcattacttgttctcatcagtaaagatagattgaggttcttgctgtcattgcatattaactatgcaaaagattaattgatataacttccgctgagtccttgtagcttgatcacattgcggagtagggcaacggatgtttcattcattgtctgattttatattgcgatgggatctgcagtttgttctccttcttcttgtttcccaaagtagtgtactcattcaagtattctgctagtgtttgagatcattatgtttcaagtgttttagttaagagtttctttagaaggtttgtaattcaaaactgtcttatctcatttcaatactgtagaaaaatgatgttagatagatatatgctttcagaactcgttctgatgttcattgtgcttctgggtatttaatatttttagcttctttgggttaaaggatgggaaaatgacttagtataggttagggaaagtgacttagtattttatttaaactaactgtccgctcaattttggcttttataaaaaaaaaaaaaaaaaaaaaagggca

SEQ ID NO: 81265 - DNA, 310 bp, Glycine max
  Clone ID: PAT_MRT3847_44398C.1
cttatgttttagatctttagctgtttttttttgatttatatatttgtttatattgtatttttctgtttatattatggttgtttaaactgtttaccatttgatagaaaggctatgggaagcaagagcctgaaaagaaagatagaataaatctaaccggcaaacaaagaactgacaaaaaaagaaaaaaagaaagaaagcagaaaacaaacaaggcaaagcacaaaaaacaaaaaaaagaaaaatgaaagaaagactaaaaaaaagacccgaatatcagataaaaaaacggcccaaaactggcggaaactaa

SEQ ID NO: 81266 - DNA, 655 bp, Glycine max
  unsure (1)..(655): unsure at all n locations
  Clone ID: PAT_MRT3847_44399C.1
ccacgcgtccgtgcttttttgctacattgccgaggagcttcggccattatatgtttcaactggttctgctgtaccatctcctcgctcaagcacatctgctatggattttgctgcagccatgaacatgttgcctggctctccttcctcaatgtctgtcatgtctccttcacggttcactccgcctatgtcgccctctgccaatggcatgtcacacccttctgttgcctggccccaaccaaatgtcccagccttgcatctaccagggagtaatatttattccagtcgtttgagatcttcattcaatgctagagatattcctgtggacgactttgacttgttgcctgactatgatgttcagcaacagctccttaatgagttctcttgcctctctaaacagcctatgaattctaatgctatgaaccgctctggtcgcattaaaaccctgaccccttcaaatcttgatgatctattttcttctgagagttcatctcctcggtttgctgatcctgcattggcttcagctgtnttttctccaacacataaatcagctttccttaatcaatttcagcagcagcaaagcttgctgtcacctgtgaacacaaacttttcttctaaaaatgttgagattccctattgcatggtgcctcttttgggg

SEQ ID NO: 81267 - DNA, 452 bp, Glycine max
  Clone ID: PAT_MRT3847_4439C.1
aaaaaaaaaaataaaattttataagtttttttgttttactacccaccaaaatttggggtaaacaaacagggctttttttaccctttttgattttctttgaccctcgaaaaaaaatcaaaacttttttaccctctttgttgataaaggggaaacccccaaaaaaaaccttaaaaccaaggagaaggaaattggaccaaaggggggggaaatccactaagggccaagtggggataaaaggtaaatttggggctaatttttaccacatccaaatccgggtaaggctctacttttcctaaaatttttcttatcttattttaaaaatgggaaaaaaaaaattattccttttgccgctgcaatgcattgaaggagttcatcaccttttcctattttattcaaaggcaaaacctgggcttcattttcacaaactaaagaaagtaaccccacctcaaaat

SEQ ID NO: 81268 - DNA, 432 bp, Glycine max
  Clone ID: PAT_MRT3847_443C.1
attacaagcccctacaaacaacaaaaaaaaaaccagagagagagagagagagagagagcaagaaaaaacaggttttctttgagatcaatggcgtcaaggaagagctttctttcaaacccgaaccgttacatctttccgacaacctcagacacccatttgagccaaacccaagagggcatgttcgagttggacgaggctgagttatggaacaaccacaaccactcttccacaacaacggatcagggcaaaaaggggttaccttcttcaggttcgcgttccgttctgaagagagcttcaaggaatcataacaacaacaatggagggagagacagaatcactaccccggcgtcattgcctgtgaacatacccgattggtccaagatcttgaaggaggactacaaggagcaccccaagtactgggagagtgaaggt

SEQ ID NO: 81269 - DNA, 629 bp, Glycine max
  Clone ID: PAT_MRT3847_44400C.1
aaattgagaagctgcttcttagtttctccaaacccaaactttcaccacaggtacgttttactttaaactattcaatattcatctaatcctctagcttcatccattcattaaatttatcttcgttcagaccatgatctgtgccttaaaccatggaaaattcagttagctgaatctgaatttatgcatgattaacgggaatctaatgttgattgattttgtttgaaattttgttttttttattcttgtggttatggtttgttggattggctttcatttaatgagatgtaaaaactgaaaagtgttcacaaggaagaggcaattcaactacgtgtaaggaggaattaatttggatttggaatctggatgcttctgtttaaaagaaaaaaaaatgttggattttttactgctatgacagagatttgcatgtttaagcaaattaggatgtgtagcattgatgtgtcccctgtttggtatcttttgtgcttggataggaatatgttattactgtttgttcgctaattaattggttgaatctattgttggaaattgttgtttatcatctcagatcttgtacaaaattttagtgatacagcttcatttttttttaaatgcagtttgttttgggtgat

SEQ ID NO: 81270 - DNA, 436 bp, Glycine max
  Clone ID: PAT_MRT3847_44401C.1
ggggggaaaaaacttttccatttgcctttattagagaacaaaattgaaagaaaaaatggaataagttttttttataaactaaaattagcttattaaacttgggtaaaaaacttattttaatttatgcctaaacaaattttattgggcagcaaaaactaatttcttttataattatttatacagaaacttttcctttgggaacttgtaatagaggtgaaacaaacaggtcccacttaaaagggctagaatttcactccggaactcctgaaattgcaaaagatgatgacttttaatagcggtcaagcaaggataggaccttggcagcttttttcctaagggggccatccccatatatattcatgcccgggagaccaataaaacgcgagctagcggtgggtccataagattttaccattttctttggacaaacaccttt

SEQ ID NO: 81271 - DNA, 1061 bp, Glycine max
  Clone ID: PAT_MRT3847_44402C.1
ccacgcgtccggtcgctgccaagttcatttaggtttcgcgacacaaaatgataaagaggaggttcttcaagctcgatcacggtgatcgagaggcctccgatccgtcttcttcttcttcggactccgagcttgaagccgtagctgaaacctctgaagaagaatcagaggaagatgcaatagcagaagtgaaaccgaatgatgatgaagctggctcaaattcttctgggtatgcaagtgaggatagttctgcgaatgatgttgatgtcaactcagcaggtctgctatttagtgaagatgatgctggagctataaacgaaagacaaatgcttattaacagagagttgctgagtaaaggtgataccgaaaagtctaatgtcttggctgaaaagaaatccttaccgacagatttgccatcccatgtcttaaaatgcaaatcagtatttaagtgcaggctgtgtccccggattatctgtttatctgaggaaactttgcgggatcatctgcaatcaaagagacatgctcgatctgaaaaactacttagcgaaggtagactgaaggctatcctcaacagtgatggtgaaattgagaatcaagagatctcagagatccaaactaaagatactgaggataatgcggagaagaatcacaaaagaaaaaatcagcataaaaagagattgagaaagaagaaaagagacaaagcaaacgcaaggaaaatgctgtcaacaaaaggagcagccaagagagggcgaaacaaatgacacctctaatatgtagtattctgcattttgtagagcaaattttcccgccactaccacccgcctttgtgtgcaaagtctgatattatgctctactgatagtgcttcttgagccccctttctcttctgttcaatatttttcttcgtttatttatttatttattcaacatgcttcctacaatgtttgagattttcttttttatttttcctttttacatagcatactaatgtaaccgaaatcaaattttccctgtaaagactttcctgggaaagattatttaaattacgaggttaaatttggctgtt

SEQ ID NO: 81272 - DNA, 592 bp, Glycine max
  Clone ID: PAT_MRT3847_44403C.1
gcacgagctggtccgcacttgtgtacatgaaataagcaattagacacagagagggtcacagttgaatgaagtgatggtatttccagatcaaactcctactttaaaaatgaagttagacacaaagcgcagaaagctcaacacccaaagagagatgtttaatttcaattatatcgtattgttggccttcaactgctttggtgagatgaagtgttttctttccatcagcttcttcttttgttgcttgctgctgcttttggattcttcaagttttcagcatcttctccgacaaagaccatcgtctccgacaaccaccatctcgtgtccgttgcgtcttgttccgtttgaagccgccgccgacaaaggcccttggttgtcttcatcgtggtctacattgtactatttaaggaagataaggtggttccataagtggggtttatgtggggctcgttgatgaagctgacttgcgggcagtgagtgaacgaccttcgggaacagcctgctgccatccttcatcagtggtgtgtcatcctgtgccacattatcagtttcgttgagcagcgtttggtctaagttagtacactgaacttgatga

SEQ ID NO: 81273 - DNA, 366 bp, Glycine max
  Clone ID: PAT_MRT3847_44404C.1
ttgatgatgggatgccatcagatgatgatgttcccagagaagctggtatctgatggcataacgtcgtcagcaaacaaccaagtgcagcaagggaagcttccgctcggcaagccaggaaaaatatgacaggaatccatctttggatgatgaacttgccaaaagccaaatccccaacaatatggagtcagctcgctcatactcaagggtgtgcccatctcatgtgctacatttacaaccaagagaggcctttgatgtcacaaatgtacctaacattgtcccaccatatgaacagtcagaatacgctgggaactggcgcacgcatttaactatgcacgatattgctggtcatgacgcgcggggccttca

SEQ ID NO: 81274 - DNA, 503 bp, Glycine max
  Clone ID: PAT_MRT3847_44405C.1
cacaagtctcggcacaccttcaggcgaccgatcaccccttacagatcaacacgacgttcttgctactcagtgcagagcgatccggctcccagttcctagtcctcaacagcagatctttcacttcttcatctttcaatctagcagctcgacgctcaaagaccatgcctcctaaaaaagccgccgctcccgagaagaaggctctcctcggaaggccttcgaacaacttgtacgtcggtatcgttggaatgcccaacgttggtaaatcctccttattcaatactctcactcgatgtgatctcggaaaggttgccaacttcccttacgctactatcgaacctgaggagactcgtgtacccgttcccgactctcgcttcgactggttttgcgacctctccagcccgcttcgaaagtaccagcagtcctcacttgcgtagatattgccgtttgacaaaggtgcttcgaccgagctggatggagaaacacttttggcaaacgttcgagct

SEQ ID NO: 81275 - DNA, 424 bp, Glycine max
  unsure (1)..(424): unsure at all n locations
  Clone ID: PAT_MRT3847_44406C.1
ggctcgaggagcaactcagaaccagcaccttccaacgcttaaaatcacacactttgcaccttctcgaccttttgcagaaccctcacattcagtatcagaagcattgttctctcaccgtaatcccccaactccttcgtttccttcagagttcttcgccctctacgttacaacccttcttcgactacactctgtttccgttacttctgctcctcgatgcagcgatccagtgcaggtctactcagaaagttgattctcaggaaaattataacatgcctggtgttctgaaaacacctgttaatgtgagtgatggcgttgctgaaagtgtggttaattggttggaggagcttcttangaagtgtcgtttgaattctgtggatcagatgggttgtgctgcttaaaaagttaacatatggggccatgtatc

SEQ ID NO: 81276 - DNA, 365 bp, Glycine max
  Clone ID: PAT_MRT3847_44407C.1
ccgtcagggtcgcgcgaccagaacaccaggacgaacggcttgttgcgcgccttgaacatcggcagcaccaccttggcggcgacgtcggcgaaataggcctgctgcgcgacattggcgacggtggtgccgggcgtcttggcatcgccggccttgctgttgtcgccgcgcgggggcgtcgcaaggggcaggccggccttggtcagcgccgccttcacctcgtacgacagcgccacgccgttcttgccgccggttgagtcgtaatagtcgtgtaaatgattaataatctgatagattactaaatataaaaatactatataagataaacaagaataaatatttgtatgagaaaatttaatagtattgta

SEQ ID NO: 81277 - DNA, 1371 bp, Glycine max
  Clone ID: PAT_MRT3847_44408C.1
tggtgttggtatcaatactgagtgggggcttctaatggctagcatctcagaagatacgggtgaagaaacaccattgcaggttcgcttaaatggtgtagctactttcatcggtattgtaggacttactgttgctgttattgtcctaattgtgctactggctagatatttctctgggcatactaaaaacccagatgggtcggttcaatttatagcaggcaagactaaagttggtgatgctattgatggtgcaataaagataataactgttgcggtcaccattgtagttgttgcagtaccagaggggctcccattagcagttactttaacgctggcctactcgatgagaaaaatgatggcagataaagccttggtaaggaggctttctgcctgcgagaccatgggctctgccacaaccatatgcagtgataagactggtacattgactatgaatcagatgactgtggttgaggcttacgcggggggtaagaaaattgatcctcctcacaagttggagtcctatcctatgcttcgctctctgctcattgaaggtgttgcacagaacactaatggcagtgtttatgcacctgagggtgccaatgatgtcgaggtttctggatcaccaacagaaaaggcaattttacaatggggaatacagattgggatgaattttatggcagctcgatctgaatcatcaattattcatgtttttccattcaattcagagaaaaaaagaggcggagttgcaattcaaacggctgactctaacatccatatacactggaaaggtgctgctgagatagtcctagcctgctgtacaggctatgttgatgtgaatgaccagctggttgggatggatgaggagaagatgacatttttcaaaaaagctattgaagacatggctgctgatagtctacgttgtgttgccattgcatatagatcatatgaaaaggagaaagttccaactaatgaagaactactctcacaatggtctttaccagaggatgatcttattttgctagctattgttggtcttaaggatccctgtcgacctggtgtcaaacatgctgtggaactctgccaaaaagctggggttaaggtgaaaatggtcactggtgataatgtgaagactgcaaaagcaattgctgtggaatgtggaatactaaattcatatgctgatgctacagagccaaacatcattgaaggaaaaacatttcgtggcttgtcagatgctcagagagatgaaattgctgataggatatcggtcatgggacggtcatctcccaatgacaaactattgttagtacaagcattgaagaggaaaggtcatgttgtggctgtaactggggatggaacaaatgatgctcctgcact

SEQ ID NO: 81278 - DNA, 3396 bp, Glycine max
  Clone ID: PAT_MRT3847_44409C.1
gcgtctgggcatactaaaaacccagatgggtcagttcaattcacagcaggcaagactaaagttggtgatgctattgatggtgcaattaagataataactgttgcggtcaccatcgtagtggttgcagtaccagaggggctcccattagctgttactttaactctggcctactcgatgagaaagatgatggcagataaagccttggtaaggaggctttctgcctgtgagaccatgggctctgccacaaccatatgacagaagttgacaaagagagctctgatatcattattttggatgacaattttgcttcagttgtgaaggttagtcctcatttcttatttggaagattttgaactgttcttataaatgatgcatgtttaacatctaccttttgaaggactatttctggcattacttgaaatgcagaattgtaatttttttaatactttttgttttgtgagaggtatagaattaaggtgtatcccatagcctgatattattttatgtaagctgattatgaattgatgtttgaagcataagtggtactgcctttcaatttctttcgccaattcaccggcgcccgtcgacccacgcgtccggagggattggacccgcgacctttcccccttcctaaccttcttactgttcctttccaattggtccacttctccaggaccatcactggttattgtaatcactggtatataactgcttttgatagcatctccagtgaagataaagatgtaaaaatggtcactggtgacaacgttcctgcgctcgctagggtacgtgagggataagatggttgtttctctatttctcgaaaatatttttgagccactagggtacgtgttcgataatactgtggtttctgttcttccagactaaggtaaacgaaagtgcgcaatgcatgcaagcagcaaaatgggtgaaaaatataaaccttggatcatctttcttcatctactagtaatcacgtgttcctgcaatagaagctgcagagccaggggattgattgaaacagaagacaaattcttcaaagcaacctcaaatgatcatcatgaaacagaacatgcacatgctcactctcacgtggatcacatagatccttctgtgatggtgtttttcaccatcgaagatttgaaggttgggaaaacaatgcctattcattttcccaagagggaccctgcaacatcccctaagttgtggccaagagaagaagcagattcacttcctttctcactgaacaaactcccaaaccttctcaaaatcttctctgtatctcaaaactctcccaaagccaaggccatggaagatacccttagggaatgtgagaccaaacccatcaaaggagaggtaaaattctgtgccacctctttagaatccatgcttgacttcactcaaagcattcttggcttcacatctgatctaaaagttttgtccacctctcactgaacccaatctgaagtaactttccaaaactacaccatgttagctctgatcaatcattacccagcttcatgctcggaagcctgctgaatccaacctattcattggagtctaattaactgcctctgtctgggaagcgtgggattgatttatgtgctcccacttgctggtgttaatgggtatggggtggaacctatggtgttggtcacatggaagcattacctcatctctatcgttatgtgtcatttcaattgctctcttgctgtgcttgggaaattgataccggtgccaacaactcccatcaacaacgttttttcaaaaccacgaatttctagcaagatggtacctgaggaagctcaatagtaaattggcgttgtgctgtttcaaacaatctcattctgctgtttcttttgttccctgactgtcagcatatactggaatggatactctgcatacgaacacgtttatctttctcctgttctaactttaccttaacttgtatatttatagaaggatgaactctgtgacttgttccgaaaatatcttcgttcgtggcttgtcagatgctcagagagatgaaattgctgaaaggatatcgggtcatgggatcggtcatctcccaatgacaaactattgttagtacaagcattgaggaggaagggtcatgttgtggctgtaactggggatggaacaaatgatgctcctgcacttcatgaggccgatataggtcttgcaatgggtatccaaggtacagaagttgccaaagagagctctgatatcattattttggatgacaattttgcttcagttgtgaaggttgtcagatgggggcggtctgtatatgcaaatattcagaaatttatccagtttcagcttacagtaaatgtggccgctctagtgattaatgttgttgctgcagtttcgtctggtgatgttccattaaatgcagtgcagcttctttgggtgaatcttatcatggatactctgggagcgctggccctggcaactgaaccaccaactgatcacctcatggatcgaactccagtgggtcgaagagaacctctcataacaaatattatgtggaggaatttgctgatacaggcaatgtaccaagtgtctgtcttgcttgtactcaatttccgaggcataagcatactgggtctgagccatgacagaaaagaccatgcaatcaaagtgaagaatactttgatattcaatgcatttgttctctgtcaaatctttaatgaatttaatgctcgaaagccagatgaattcaacatattcaaaggagtcacaagaaactacctctttatgggtatcattggattaactgttgtgcttcagattgtcatcattttatttcttggcaaatttacaacaacagtgaggcttaattggaagcagtggctcatctctgtcgttattggattgattggttggcctcttgctgtgattgggaaattgataccagtgccaacaactcccatcaacaatgttttttcaaaatttcgaatttctagaaaggatcatgaggaatctcaatagatttggcgttgtgctgtttcaaacaattctgctgtttcttttgttctctgactgtcagcatatactggaaaggatactgcatacgaaaagcgtttatatttctactgatctagcatttacttgttaatttgtagagaaatttggaattggtttttatacctaggttctaataagaatgcaccggatctcagttagtcttggtttttgtccatacaagtttgaaaaatgttgattaatattccgcagatttgaaagttgtaaagatgtggatttcaatttggttatttgttctttgattatgtttggatttcagttacctctctttattcagtaatagtattgctattcattcccttcgaagtttaatatgaagtccaatgagaatctgtctttgaaatttca

SEQ ID NO: 81279 - DNA, 142 bp, Glycine max
  Clone ID: PAT_MRT3847_4440C.1
ggtttaagaccaatgagacttaaaataccacatcctataattttctcagcaggcactatatgacggaccacagcttacagccgacagactttctagactatttgacagcaccagacttaatagatgggccaactttacaata

SEQ ID NO: 81280 - DNA, 2030 bp, Glycine max
  Clone ID: PAT_MRT3847_44410C.1
ataattaaagtaacgcaaattcactcaatttaattattaaaataacacaataaaaaaaattaaataatttttttctagataccccggctcgagaaaaaatcacacaatttctgtgaagctaaagcttgtggtttctttctcattctctcaaccaaaggtgaaagaaagaagagagtgagagaagagaaggtcctgaggtaaagatacaagctttgctcttctgctcactggatcgggttccaggaattcaagggtaggttcaaaaggggttgtgttgatctgcaccaagatgcttaatttgcgttgaaaaatccattcatttgcgagacttagcttcggagatgaaccagttagttgaaagctcaatgaatactcaaagggtctctagagttcaagctccactggttgactctgtttcttgctactgtaaagtagattcaggcctgaaaacagttgttggggcaaggaaatttgttccaggatcgaagttatgtatccaacctgacataaacccaaatgcacataggagcaaaaactcacgtagagagaggaccagagttcagcctcctctcttgcctggtcttccggatgatcttgctattgcatgtttgattcgtgtacctcgggttgagcatggtaaactgcgtttggtttgcaagagatggtatcacctcctatctggaaatttcttctattcactcaggagaagtcttggaatggcagaagaatgggtttatgtcatcaaaagagaccgtgatggaagaatttcattgcatgcttttgatcccatctaccaactgtggcaatcccttcctcctgttcctggggaatattctgaagcattgggatttggctgtgcggttctcagtggttgccacctgtacttatttggtggaagagatccactgaagggatctatgagacgtgttattttctacaatgcccgtactaataagtggcatagagcaccagatatgctgcggaaacgtcatctgtttggttcttgtgtaataaataactgtctctatgttgctggtggggagtgtgaaggaattcaaagaactcttcgatctgctgaagtttatgaccccaaccggaacaggtggagttttatctcagagatgaccacagcaatggtgccctttattggtgttgttcataacggaacatggtttttgaaaggacttggatctaatcgaaatgtcatatgtgaatcctattcccaggaaactgatacctggaccccagtgagtaatggaatggtcaatggttggcgtaatcctagtatctcgctgaacggacaactctatgcacttgattgccaggatgggtgcaagctcaaagtatatgacagagcatcagattcatggaagaagttcattgatagcaaactccatttaggtagatcccgtgctcttgacgctgctgctcttgttccccttaatggaaagctttgcattatacgcaacaatatgagcatcagtctagttgatgtttcgagtccaaacagacgcgtggagagcaatcctcaactttgggaaaatattgctgggaaaggtcatgtcaggtctttagttagaaatttatggtcaactatagcgggacgtggtagtttgaagagtcatattgttcactgtcaggttcttcaagcctgagatccaaactcctctgatgataatcttggttatacagttagggaaattgttggtattttgggaaaatcaaattgaaacaggtttatccactttcctgtgtgggaaagagattgtgcttcattgtaaagatgaggttaattgtatgattttggctatagaatgaggtcattcctttacaattatgaatagggggcagatattgtaaatgttgtttcactctaaggctgtgccttttcctttctttacagtatattaggtttgtaagacatgcatttccgctgtatatgatttattagaaaacatcaaaaaaacttttgtattaatgaaaaagtagaaaaaaaaagtaagactagttcagagcctatcagatcccat

SEQ ID NO: 81281 - DNA, 1636 bp, Glycine max
  Clone ID: PAT_MRT3847_44411C.1
gagaaaaaaaatcacacaattttagtgaagctaaagcttgtggtttctttctcgttctcaaccaaaggtgaaagaagagattcctgaggtaaagatacaagcttttctcttctgttcactggatcgggttccaggaattgaagggtaggttcagtaggggttgtgttgatctgcaccaagatgcttaatttgcgttgaaaaattcattcatttgcgagactcggcatcggaaatgaaccagttagttgaaagttcaacgactactcaaaaggtatctagagttcaagctccactggttgactctgtttcttgctactgtaaagtagattcaggtctgaaaacagttgttggggcaatggagaatttcacaggatcgaagttatgtatccaacctgacataaacccaaatgcacataggagcaaaaactcacgtagagagaggaccagagttcagcctcctctcttgcctggtcttccggatgatcttgctattgcatgtttgattcgtgtacctcgggttgagcatggtaaactgcgtttggtttgcaagagatggtatcacctcctatctggaaatttcttctattcactcaggagaagtcttggaatggcagaagaatgggtttatgtcatcaaaagagaccgtgatggaagaatttcattgcatgcttttgatcccatctaccaactgtggcaatcccttcctcctgttcctggggaatattctgaagcattgggatttggctgtgcggttctcagtggttgccacctgtacttatttggtggaagagatccactgaagggatctatgagacgtgttattttctacaatgcccgtactaataagtggcatagagcaccagatatgctgcggaaacgtcatctgtttggttcttgtgtaataaataactgtctctatgttgctggtggggagtgtgaaggaattcaaagaactcttcgatctgctgaagtttatgaccccaaccggaacaggtggagttttatctcagagatgaccacagcaatggtgccctttattggtgttgttcataacggaacatggtttttgaaaggacttggatctaatcgaaatgtcatatgtgaatcctattcccaggaaactgatacctggaccccagtgagtaatggaatggtcaatggttggcgtaatcctagtatctcgctgaacggacaactctatgcacttgattgccaggatgggtgcaagctcaaagtatatgacagagcatcagattcatggaagaagttcattgatagcaaactccatttaggtagatcccgtgctcttgacgctgctgctcttgttccccttaatggaaagctttgcattatacgcaacaatatgagcatcagtctagttgatgtttcgagtccaaacagacgcgtggagagcaatcctcaactttgggaaaatattgctgggaaaggtcatgtcaggttcttcaagcctgagatccaaactcctctgatgataatcttggttatacagttagggaaattgttggtattttgggaaaatcaaattgaaacaggtttatccactttcctgtgtgggaaagagattgtgcttcattgtaaagaagaggttaattgtatgattttggctatagaatga

SEQ ID NO: 81282 - DNA, 249 bp, Glycine max
  unsure (1)..(249): unsure at all n locations
  Clone ID: PAT_MRT3847_44412C.1
ctccnttttttttttaaaaataaagaaaaaagttccaatgggggtatttttataagggcatgccccccaaaatcataaaagtaaacccccgcaaccaaaatttaaatgcccttaataatctatatggaggggaaccagcggtccaaagggccaaaaggaaaaattctaccattatgctgaccaagagaggaagatgcctcgcccaacacccgaggcccggggaacctttggggggggccctactaacct

SEQ ID NO: 81283 - DNA, 237 bp, Glycine max
  Clone ID: PAT_MRT3847_44413C.1
gggaggacacgaatattctgtatctagagacagaagcagaggggcatagaacaccgctatcaagacccaccaaagcttcaaacgggtgccatggtaagcaaaatcataaatccgagatggagatgcatagattctagcgagacatagcgtacggggaacatgttcattgggatctagagcaccgcccatgggactggatatgagaggacatattgtggtacaccaggttagcctatc

SEQ ID NO: 81284 - DNA, 385 bp, Glycine max
  Clone ID: PAT_MRT3847_44414C.1
tggaggtgtcgatgattaaaaagcaattttgatttgagaacagagtacagtttactgtttattgaccttccagcttacgttcaaagatatacccttggcatacggggtaagggggcctaaccacattgcataattcgcatgagccaattatacattctggcctatcatgagaagaaccggatgctctccagagatcgtgtaagatcactactcttgtagaattgagctcacatacaatgttaaactctggaattaaggcatatactaaaactattaaggcgtgcagggtcaagtgattctattgacctaaacagagaagatagatcttctctcggggggtatcgggcgcctgcaagatgggcactctgtcgttgtatacatccat

SEQ ID NO: 81285 - DNA, 531 bp, Glycine max
  Clone ID: PAT_MRT3847_44415C.1
tcgcgatctagcgcggggccgcccttttttttttttttttttttttttttttttttttttttttttttttttttttttttttttttttttttttttaaaaaaaaagcacccagtttttttttattatttccaaaagggggaacgaaccttaaatttaaaattccttgttatttactcaaaccccacctactaaacaaatttagtcaaactccaaacccggggttttaaacttttctaaaaaaaaaccctttaaaacatccttttaacctgggtttttccaactttgaagggaaactgcaaaagctgccttttccgggtcctttcttttaaagggaaagaagggttttacccgggggggcctttttgggaggggaaagagcccaaacgggggtgaaactttttaaatgggttttttaggcgggaaatttttttccgttaaacgggaatttaaattccaaccttttttataaccctgtttttgggctttggaccgaacggggtttctggatttttgaacacccctttggggtt

SEQ ID NO: 81286 - DNA, 324 bp, Glycine max
  unsure (1)..(324): unsure at all n locations
  Clone ID: PAT_MRT3847_44416C.1
gngatggcgattgacagaggctatatttctcctcagtttgtcacaaaccctgaaaagttaattgctgaattggagaatgcacgcgtgttgattacagatcagaaaatttcagctataaaggatataatccctatattggaaaaaaccacacaattgagagctcctttgcttatcattgcagaggatgttactggtgaggctttggctactcttgtcgtaaacaagttgcggngtattctaaatgttgctgccattaaagctccaagctttggggaaaggaggaaggccatgctacaagacattgccattttgacaggtgctgag

SEQ ID NO: 81287 - DNA, 341 bp, Glycine max
  Clone ID: PAT_MRT3847_44417C.1
ctgcagcagtgtcagcgtctcttcgacaaactgctcacacttcgagggaaactgatctgtcgccagcctaaccattagaatccagaccaccgactggctaccttggtgtcagtcgtacacgaagtggtgctgagcatggagccattggtgataattttagtgggtcgaatgttaattctggtggagtgcgtgatcaagtaaaaaatttgcaaatgcttgaggcagcccacttcacaattcgactacccaaagactctgaatgtcacaggacttacactcctaagcacccatcaattacacctcccagctatcctcaagtacaggcagccactgttaaaaat

SEQ ID NO: 81288 - DNA, 488 bp, Glycine max
  Clone ID: PAT_MRT3847_44418C.1
aatgcctatgccttaagaattgtcttcttcctcaagcagaggaaaacaaagtggttatacttcatacaaaatcctttgaaccaatggttaatctgagacaacttcagattaataatcggagattagaaggcaagtttcttccagctgaactgaagtggctacaatggcaagggtgccctttaaaacacatgcctttgaaatcttggccacgagagttggctgttcttgatctcaaaaacagcaagaaaatagaaaccttgtggggatggaatgattacaaggtgccgcgaaacttaatggtcttgaatctctcctactgcatcgaactcactgctatccctgatttatctgggtgtcgacgtctagaaaagattgatctataggactgcattaatctaactaatattcatgactcaattggcagtttgagtaccttgcgtagtttaaaactgacgcgctgttcaagccttatcaaccttcccattgat

SEQ ID NO: 81289 - DNA, 590 bp, Glycine max
  Clone ID: PAT_MRT3847_44419C.1
ctctcgatgagccggatgctagactcttattgcactctagagggctcggtgatgggcttcgctgccctgacactagggtttccagttccgattcattgcaggaataattagaagatgtatagggcacgggcaaccagacagaagagagcatatatacggagggtactacttaaatcctcagcctattcaataacgcttaacaagatgatctaaaaaaggcttacaagaaagccgacatctagaatcaccctgacaagggcggtgatcccagagaagtttaaacagctggcacaagcatatgaggctctgactgaccctgataagcctgagatatatcatcagtatggagaatatgcccttaaggaaggaatgggtggtggcggaggccatgatccgttagaatctttccatctttctacggaggtgggagaccctttggatcaagtggaaccagtctaggtacgatgcagatgctcgtagaagatgccgatcacactatcaggtctctctggaggacctgtatcaagcgtcttgtatgagctctccctctccagaatgtcatatgctccaagtgcactggtaagggttct

SEQ ID NO: 81290 - DNA, 222 bp, Glycine max
  Clone ID: PAT_MRT3847_4441C.1
ctcaaattgacggtgttgattccaataatgcatgcgacataggaatcgctgctcagtttaattgtgtcatgtgggtctccaacgattcatgggagtggatgtgatgaacgcttcgtccgcagatggagtacactgtatccctaagggccagatctacctattggtcgacctgccgcaatcgcaatgcgaattcatcctgatgaccccacttccattgacagc

SEQ ID NO: 81291 - DNA, 338 bp, Glycine max
  Clone ID: PAT_MRT3847_44420C.1
aatcagcatcattagtatcctttattaggtcccttgctccatcaaaccaaacaacgcaataccatgagagagccgtacattatccatgatgactaacagagtattttgctttgggctctacatctggctacaacagttgctggttaaaaggctattaattaacatgactatgatacgttgctctagactaggggctgcactaccctggcagggggaggagcagggacgtcttggcgccctctattgcggcactaaccaattgaattctatttcccattttgaccctacaaccataccccaaatagattcaaactttctccattgacacctttggtgga

SEQ ID NO: 81292 - DNA, 1409 bp, Glycine max
  Clone ID: PAT_MRT3847_44421C.1
gcacgcctgcaagcaccagaccggaattcccgggtcgacccacacgtccgcccacgcgtatctcttcttcctccaccgcgattagggttttcggattttcactttactctcacttcttccaccctcgtcacctgcaattgattttttttcttccaatcgataattgaagaacacaacattccaattcctctctcgattcgtttcgctagctcgataatcaaaagtgcctggtgattcgaggttgtgtttacataggagttgtttgtgaaaatgagaaggcaggggcactatggggatccatctgccaacacttggtgttggtggtggcccgatgcatcatatggctggtcaaaggggggaggccaagtcgggtaattttgaaggacggctagaggcctttactccagaaagagagaatccgtatggaaattccaagccggagggtcagtggagatgggagatggatgaatcgaagatgtccaattcaatggcatctcgaatgtttaatgaagggtcaaggggttgatgcttcaaagccctattttcaagggcagagccggaacaatagtgattccagatctcaggctcatgaagaagatatggatgttagatatgaaggagaacatttatcacaatctttttgaaggtcttgagcagaattttcatgatgacatcattaaactcaccaaagaacagaatgatgctgaagatgcagaatatgccagacacagagagaaaataaatgcaatcaatgctcagtatgaagaaaaactagcagcactccgagctcagcatagcagccgcagagctgaatttcttcaaagggaatcacatgctaggcaacagcagtaccagcaaatcataagggatccttaccccggtggtggcatggcaccccgagaccctcatgcaccccgagaccctcatgcaccccgagatcctcatggttacaacaatgtgaatgattcaggtgcaggtggagaagtgcaacgaggctattctgccgatcactttgatccttaccgagagagagctcgatttcttgggggtggtagagatcaaggatttgaacctagaggcccatatcctggtggccgtgtctatgacactggttcacgctactacaattgagttttgacccaaaggtttatctccattttgggtttttactgcaggtgaaattgcttaaattgacataatttatgctttgtcatcttttccatctttttattaccctgttcatggaaattattgtttcttagcggttgttatttatatagatcaacattggaggtgcacacctttacattggtgttgtgcattaaaacgtaggatatttcttgtttgtgtttatgaaaacctataacattgaaccctgtaatataatcttccatttaattcccccgccc

SEQ ID NO: 81293 - DNA, 489 bp, Glycine max
  Clone ID: PAT_MRT3847_44422C.1
tgggaggtcacctgttcaacctttggaacaaggtggtgatttagtgacttgtgtgagaagagcaattcaggcatcagtaccaacatctgaattgtttgacaagagattgaatcttagtgcaccaaaaacagttgaagaaatgtctcttattctcaaaattgccctgttctgcaccagcacatctccacttaataggcctacaatgagagaggtcattgcaatgttaattgatgctagggaatatgtcagcaactcaccaacctctcctacatcagaatctccattggatgaggatgatggcatttcttccaaaggttagaaaacttaaatgttcataatcatactttcttttggtggaatgatactatttcatattatcagttccctggtacgtgtttataaataaaaggatcaattcacctaatgcattttggtacatactgggggcaggctattgaagtttatattcaatagcattattttgaaaaa

SEQ ID NO: 81294 - DNA, 270 bp, Glycine max
  Clone ID: PAT_MRT3847_44423C.1
gcctcgcctacgctcgcgcgaccgtgggcttgggatagtgctcagattgactctttgttatgaaaaactttcctcggatgggctatgcaaagccatgggctcctgaggacactgcgagctgatctatacagctatatctagttgcgggcatgaaccaggctaggcaggatgcttatgtagcctatcgaggatgtgtgctacaaggacagtgtaggcactgccgagatgctgctactctattgacatggctagctctctctcggatggaat

SEQ ID NO: 81295 - DNA, 238 bp, Glycine max
  Clone ID: PAT_MRT3847_44424C.1
gagaaaagttagggttcacaacttttccggatccttttgcttgcgtatctgaatcacataatcaatcatccattcattattcatcatgacatcagcgataaaaatcacgctgaagagttcgtacaacgatgcaagagttggaacttaggccgtagtgctggtgtcgcaaacactaaagcacataatcgatgacaactgcgccgacagcggcatgccactgctgttcgagacgagcaaa

SEQ ID NO: 81296 - DNA, 1337 bp, Glycine max
  unsure (1)..(1337): unsure at all n locations
  Clone ID: PAT_MRT3847_44425C.1
gctccatcgtgattagggttttcggattttcattttatcctcagttcttccaccctcgtcacctgcaattgattctttcttccaatcgataattgaagaacacaacatttcaattcctctctcgatttgttttgcaagttcgataatcgaaagtgcctggtgattcgatgttgtgtttacataggagttgtttgtgaaaatgagaaggcaggggcactatggggatccatctgccaacacttgtgttggtggtagccagatgcatcatatggctggtcaaaggggggaggccaagtcgggtaattttgaaggacggctagaggcctttactccacagagagagaatccgtatgcaaattccaagcaaganggtcagggtcagtggagatgggaaattgatgaagcaaagatgtccaattcaatggcatctcgaatgtttaatgaaggtcagggggttgatgcttcaaagtcctattttcaagggccgagccggaacaacagtgattccagatctcaggctcatggagaagatatggatgttgggtatgaaggaaatcatttatcacaatcttttgaaggtcttgagcagaattttcatgatgacattattaaactcaccaaagaacagaatgacgctgaagatgcagaatatgctcggcacagagagaaaataaatgcaatcaatgctcagtatgaggaaaaactggcagcactccgagctcagcatagcagccgcagagctgaatttcttcaaagggaatcacatgctaggcaacagcagtaccagcaaatcataagggatccttaccccagtggtggcatggcacccggagaccctcatggttacaacaatgtgaatgcttcaggtacaggtgaagtgcaacgaggctattctgccgatcaccttgatccttaccgagagagagctcgatttcttgggggtggtagagatcaaggatttgaacctagaggtccatatcctggtggccgtgtctatgacactggttcacgctattacaattgagttttgacccaaaggtttatctctcattttgggtttttactgcaggtgaaattgcttatattgacataatttatgctttgtcatcttttccatctttttattacactgttcatggaaattattgtttcttagcggttgttatttatatagatcaacattggaggtgcacacctttacattggtgttgtgcattaaaacgtaggaccactaggatatttcttgtttgtgtttatgaaaacctataacattgaacactgtaatataatcttccatttaattcaactgcataaggagaggatgatattgctcggat

SEQ ID NO: 81297 - DNA, 395 bp, Glycine max
  unsure (1)..(395): unsure at all n locations
  Clone ID: PAT_MRT3847_44426C.1
agatttcaacttaaaattaatggtactaagtgaagttgcccaacagatatataagctacatcccaagaactgaggcagttaaaacaaattggcattaagtgaagttgtccaacagatatataagcttcatcccaagaattgaggcagacgatgtgggactttctaacaagttttccttgtgtaagtctctctaatcgggggtctaacaggttgcttgtcacttcaaacttcagcagaaaatgacagacaggcataatgataatttagttaggttcttgactgcactactgcagtagaggaaaattttctttatatacaanctgtgatgttgtttggaactgaatgttggacagttaaaagccaacaagataataaacttaatgtagcagacataa

SEQ ID NO: 81298 - DNA, 118 bp, Glycine max
  Clone ID: PAT_MRT3847_44427C.1
tatttttgtgccatgaaaatagcataaatttgtgtgtaaattatgtccatataaagtgttatacacttggaaattgacataatttacacacaaatttatgctatttttgtgccatgaa

SEQ ID NO: 81299 - DNA, 568 bp, Glycine max
  Clone ID: PAT_MRT3847_44428C.1
acacgtgtgcagtgccgccgtgcttgggggggggggggggcaaaaaaaaagagtatgcaacgcatacagaaggttctaaagtactaaccaacgctagcatatagaccggtaagttacagtgaagaacggagaggggaataacacagaacaccgggatttagaaataaaggcacgactggaccagacattgcccattggcgagacataagatgaaggcgagtgaatgggcaatgatgcctacttacagcaaaagcaccaatactactactacatacaaggcatgaacacgagtatggcacagcaacttgtgtaggggcaggggcacgcactggaccagacattgcccattggcgactcataagatgaaggcgagtgaatgggtaatgatgcctacttacagcaaaagcacgtaggggcaggggcacgcagtgggctatagcggttgctagggagttggtaacgtagcgccacgttcatctggattaattggagtaaatatagcacaattaaaggctaaaagggggggttaggctggcataaatggcgctatgttggttgggagcggtgt

SEQ ID NO: 81300 - DNA, 429 bp, Glycine max
  Clone ID: PAT_MRT3847_44429C.1
ggctcgagaacaacctgataactaataaggtgttacaagcggctccctcaatgaactatgccgcagcagtagcgacggttaacctggccatgaccgggatgggagctccataaactgggctcaagcacatgggtggcttccgcaccagaatgaccaccatggaccttgcctgaattgctagcatccgagggagattgcaaagcatgcaggtgtggccaccagttgccaagaacatacttggagactctctactacctgccagacctagatgatgcagcaattggctaaggaaggtactctctctcaatacgaaggtaggggttccttgattggaattcgagctcggagcacagaatcattgttccgagagcacaacacgtcacgaggatactaccatggactctactgaaccatgaggaagctggctat

SEQ ID NO: 81301 - DNA, 540 bp, Glycine max
  Clone ID: PAT_MRT3847_4442C.1
acacttaattttattaattttaaatatatgattaataaaactaaaagaaattaaaaaaaaaaaaaaaaaaaagaaaaaaagaggggggggggggacagtaatatcatagctagaaggatatgaattgaaaaaaaaggagaacgggtaaaagtaaactgggaaggaaaaaaataaaaaaaaaagtgaatggaaaaaacaaaatagaaagtaaaatgaaaaaaaagaaggtaaaagaaccgtgaagcgaaaagacgggaaggaaaaagaggggaagaaaaaaaagatgaacagggaaaaaaagaacggacaaagggaaaagcacagaaagaacaagcaaaaagtcaagcttgaagacttgagggaagagaaaaggctagaacgaaaagggggacagggataaaaaggggggggagttaccaaaagacgaaataatagaggactgtttgaggacaaaaagaacaggggctccaataagggaagggggattaaagaggcaaaccaaaaagggggttttaaggaaaggtcttacagaaaaaggaa

SEQ ID NO: 81302 - DNA, 293 bp, Glycine max
  Clone ID: PAT_MRT3847_44430C.1
accaaacgtccgggttggattggttacatgcgcgtaatttcctcaaccacggatatgttgtatttgattacttagtacgcaacgcagtctctcgattcgcgaactggttactcacagcattggttcgggaactgattccagcttcaagctgtctggtgctcgcactgtatgatcccctaaagtcaggctaatccaacccgtcatgtacatcgtcgacgtcgacatcgagtggtggttccatggtcagcactcacagtagtttctgatccacatgctcaacggagactccactg

SEQ ID NO: 81303 - DNA, 293 bp, Glycine max
  Clone ID: PAT_MRT3847_44431C.1
ctgagaagaaaagagggcattctataggctataaatataaatggaaagtcacgacgctgttagttagaggaacattagcgttctatagattgagctaggggttaataacaataatcattggtgagcagcgaagagcataccagacaccaaatttgttattatagaaaggccactgctagcatcatttgccctggcacctgtagggagaggaggggaggcaggtgtagcaccagcatcatcatgctcagctacagtggcatttttaaagcttttagtcacagcgggaagggggt

SEQ ID NO: 81304 - DNA, 559 bp, Glycine max
  Clone ID: PAT_MRT3847_44432C.1
aaaaaaagaaatatccctctaaaaagaaatctcaatgggagacaataaaagaaataaaaaaattaaatagtaacaaagcaattagcatatcctttttttttgaatatgctttttaatggtccggaggaaaaataaaaaatcccagcctaaacctgaatttacaactactactctgaattttaataaaactattagcactaagggtttccaccacaatcctgcccctaaccctgaacttgattttgaacagcttaaacttcccaagcttggtcctcacagggtggttccccctcaaattaagaggcacattcccagtcttttgcagctgattttgaagggttttttgcaagccgggagcatcctgcgttttccccggaagagggatactaaaaatcgtggggttgcggggaccttgataaaattttggcaaacacccttcacataattttgggtccatgtcccaagcccttatggggctgccacccctataggctattccaatctttttgttggggtttttggccgggattggcaagttgaatgtcactgataaactggt

SEQ ID NO: 81305 - DNA, 379 bp, Glycine max
  Clone ID: PAT_MRT3847_44433C.1
cacgctccgaagagaagtggttatggcttaaactcggtgtttggcaattatcgagggagagtaaatagaagtagacgacgatcacatctaccagaacattgaagctcccaagttcgtcgacctacaccgcacctgattgtcgacgtcccgaccatgaccgacactgcatctgcttccgcgttggatgtgaccaaaagcatgagcaagagctggactctgaggcaaactacaagaattctggccttcaggttatggcagctagaagtccaaatgtacgcctcagaaaagccttgaatacaaaagaagcaagtgcaaacttgaagtgcccccttacagctactgccaagtcaagggtgtcaaggatggacttaatttcctt

SEQ ID NO: 81306 - DNA, 355 bp, Glycine max
  Clone ID: PAT_MRT3847_44434C.1
ggctcgagtgaaagagcagacttgaaattacccactgtccgtagccactgatctgcacactcacgtgtcaaggggcatcttcagcaccgctccaccacagatgaacatgaggtggatgctgcacgtccagggagggcaatgcggcaaccagagcagttcgaagccccggcgagtgtcgtgcgacgagcacggcatagatccgactgctcaccacgtagaatactcagatccacaactgcagggcgtaaacgtgcactacaacgagccttcctacagactgatagtcccacacgcagtgctgatagaccctaagcccggaaccatggacaggctgcggtccgggccgtacacgaca

SEQ ID NO: 81307 - DNA, 439 bp, Glycine max
  Clone ID: PAT_MRT3847_44435C.1
ctttgctattggtacccctttcacatgccttgttggaggtacttcccacgatgaccatactgtgctaccgaggtaactccatgacgatgactgattgagttttactgcaaccggaacaagccttaaatacaaaatcgggatctgaatcctggatgcaactagcgacagtgcctcatggcagtgagaatccccaccgggggggcttacataggcagcttctactttaaagttacggactaacgctggtgctagagttattgcccttatgtgcaatgagtcaacatgagaccttagcaagaatgtagatgtgctaatgaagtgctcttcactggagggagggctgtttaaggtgcttatagggatgctctggggaacgtttgtaataaaggcttgagaagaaaaggatgctggagaccgtctcccgaggattggctttaag

SEQ ID NO: 81308 - DNA, 222 bp, Glycine max
  Clone ID: PAT_MRT3847_44436C.1
cctgttgcccgcgggcgtaccaatatgccctaatgcgaaccgcattacagctcgccgaaataatggccaaagctgccacctgtgggacattgctatccactcgcacttatcacacaacataccatccgggcgcataacgtggccagcctcggaggcctaatgagggagctaactaacaccaagagcggcgcgctcactgtccgcgcagcagacagaaaccct

SEQ ID NO: 81309 - DNA, 335 bp, Glycine max
  Clone ID: PAT_MRT3847_44437C.1
aacacgcgtgcgcttgtctgcgtaattcgcagctagggaaaatgaaatggatgcctaataatagaaacgtgtcggccgagtcgccgaggggatcggtactccgaccggtatttttaagccttccaacaacgctaacttatcaaccggttcggactggggcgaagtgtattgatgtttggaataatagttttgaggaggaaccgtgattggagaggtgtggagcaaggcaggggaataagggctaagatgtttgagaagcttagcaaggagaattcactagacagcctaagcttggacttccgatctagtgtgactattggaactagctaagtgag

SEQ ID NO: 81310 - DNA, 519 bp, Glycine max
  Clone ID: PAT_MRT3847_44438C.1
cgttccaaggagaggtttcccgatcatcacatgtatgacgtcctccttctttggggggggggggggggaaaaagagggtagaagcctcggaggaaccggaaaagcgtgttgataacgtgctaccgcgagtaaacgttggcgtttgtgatacgggggtttgaaattacgcggtggtagcgatattggaataatagacgtggctgacaattggcctaaatcaaactaccttaaaaaagcgtaaagaggttgggcgtatataggtagggaaacggcggcagaggtagtggggacgtagttacatgaaagtagaagaatagatgatgtttgcacgttgcaaggggggatagtaaggaaaggtgagggcggcaaaaagggaaatgaccagttaaataaatgaaggcgtaacgtcagggccggtaaagccaatcttaatgaggcgtaggccatcatgcgtaaggaccaacacaatccctacaagtgcggtgaaatgccaagcggcgtgaaacaagagttagtaaa

SEQ ID NO: 81311 - DNA, 383 bp, Glycine max
  Clone ID: PAT_MRT3847_44439C.1
cggagttgcttgaactgtgagatggagatggcggagttacttcttttccggtgaacgctttgttggcatgagttgcccttgttttctgttttctaggaattacaataggtaagatggattctttacctctattccttcacaacctctacttcttctagacaacaagagttggttgagtatgacctttgcccttccttgggacgagaggagcttcatcttctgtttcattcaaatcccttagcacttggatggttgtcttattctccacatgtttccttggacttttctttgaaagtgtagtcattggacacacaacttgaagagctggacgaggtggattggatgcggcagtttcttcatgttttttcttgggtcttttctct

SEQ ID NO: 81312 - DNA, 320 bp, Glycine max
  Clone ID: PAT_MRT3847_4443C.1
gctagagcagctattgctgtctttgcttctctatggagggcccactatctatctagagcaagaccgcctcttcctgctgcaagccaaactccaactctccgaccaccaaaacgccctattcgactggaaccaccgcgacgccacccgatgcaactggaccgccgtcacgtgcgacgccgcaaccggaggcgaagccactatcgacttctccaacctccaactcttcggacctgaccgcgacaccaccctttgccgactcccctcgctcgcctgcctcaactttttctacaacaaccttaacgccaccctccccgccgacg

SEQ ID NO: 81313 - DNA, 436 bp, Glycine max
  Clone ID: PAT_MRT3847_44440C.1
ggctcgagccttacttaagatctcggccttatagccgagattttccactgatacagggcttccgaggggcctctacgggtggatctagaccctactatacagggcctgaaccctctgccatttataggctaaggagctgggctgccacgcctgggtttgcacttgaagaattttccttgttaagccgaacctgctacatatgccccattattacatcgtgacatcccaggaacactattgcttcttgaacttctctgtgtgaagctggacttgttcactacactcaaaacagtgggatctttgggaactattctgttgcttgtgggacagagatttttaatccataacgcttgaacatcatctaaggggaagtctcttttactgaaaagaaaattctcttttttttaagacatgacctgataatgtcgtccatcct

SEQ ID NO: 81314 - DNA, 192 bp, Glycine max
  unsure (1)..(192): unsure at all n locations
  Clone ID: PAT_MRT3847_44441C.1
gttgttaacatggtagccctagaaattaaggcgcgttcatagtttgtnattactccacnattacnacagggtttatttcncagtnaaaacacangcttncngacgngccatgtgncncctttccccaatattgggaactttntaaaccccggannanncttgncccnaaancaatnnagngggcnccaaaca

SEQ ID NO: 81315 - DNA, 212 bp, Glycine max
  Clone ID: PAT_MRT3847_44442C.1
attatgtcttatccacgaaaactggcttggagagtgagtcttactcataatactaatacataaaggaccaatattcttttaattagatttaatcttaaccacccatcttaagtatcacctggaggatagacattattttctagagatagcatagatcattgcaacatctcttgtatttaacaaagtgagacttcaactatttcctcgtgccg

SEQ ID NO: 81316 - DNA, 2066 bp, Glycine max
  Clone ID: PAT_MRT3847_44443C.1
ggctcgagcttcccagctgtactttgcttcttctttctttatccgttccttcttcatcatcatcgtcgtcattctttaatcctggcaaaaaaaaattacgctactttcgttgcgatcgtttccaatttcatgcgctttcttgtgtggggtggattggtggtgggttggttgattttaggtttgggaaaaaacgcgtgactttggtgattacgaggattaaattgcatcaacaagtctctatgatatggatcaaatgagtcagcaaaggcatggctattttcattccgaaagtatccatttcagaggcagcaacatctctccgcctaatgtatgcacactcgtgacagcctcagggcacggaactaatctagattcccattatttactagatgcttatgacaatggtatgatgtatggaatgacacaatacaatggagttcaacatcaacataatcttgatatgggtgttccagctgctgccaacatatattattctagcatgaatccttcatctggtacagctgcatctctaaatgctgaagttaggagaggaaattatcaatatttcaatgcctcggctagttctacagttgctccccctaacgcaagacacactgaaaatggcatcccctcactaccacattgtacttcgtggagcagatcaggcgagtctatgatggtgcgtgaccctaaccgtataactcaaggaaattatttaagtcaacactttcaaccagcagctcctcctccctggctggaccagcagttgaatagcaataataatgatggtcatgctttgccttggcatcagtctcttccaatgccatatgtacaagctcccagtgctaatggaagttcattagagaaatgcaagaatgggtcctcagagatatcatgatacagctggcagcagaagtggccacagatttcctcatcctcctcttgtcaacccacactatcatagctttcatcatcaaacacagcctgtgcaagaaatgagaggtcactccatcaactttcacccccctcctccagtaactgcaccttcatatagagttccaacaaatgcatcacgaagttcttcgatcttcatacaagatgctattgagatgggtgctaggcatgttggtgctgcaccattggcaggttcacatatataccgaccccatagaggcagcacacatgagactactcttagacatcgaaatcttcctcccgtgacttttctccaagttgatcaggtttcattggaaaggtgatcgtggtgacgttgtgttgtggaggctgcaagaaatgccattgcggccaccttgcttgtcgtgcatcttgcgtcacagattgggtatggcagagcagtgaggtttcaaccatcattttttctccaagttgatgatgttactttactggttgaccatcataatgatatgcgcttggacattgaggatatgtcttatgaggagcttcttgcattaggggagcggattggcaaagtaaacacaggtttgtcagaggaaatgattacaagtcaaatgaagacaaaatcttatttattactagctactaatgctattaacttggaggaggcagcttccgaggaacaggaaactgattcttgcataatatgccaggatgaatataaaaaccaagaaaaaattggtattcttcaatgcgggcacgaatatcacgcagactgtttaaagaaatggttacttgtgaaaaatgtgtgccccgtatgcaaatcagaagcattgactcctggagagaagtgtgtataaaatctgagatttacatgtctctgttcctacatgcacacttcttagctactacatttttctaacgatttcatgttttgttgtgtatatgaacccgtacatatagacagtcgcattgtccaactcatttatttgttggcatcaaaacattgtatgtatcaagttgtacagacttctgttgatatattaactttaggcaattacattgttgctattttttattttcattttttatatggatggttgaatgtgccatgtccaagtatagaatgaaactttatgttttattcatgt

SEQ ID NO: 81317 - DNA, 276 bp, Glycine max
  Clone ID: PAT_MRT3847_44444C.1
aattttgattatttgaaaaattaccaacttcgggccggccttcacggcaagaagaccatagtacctttgacccttcaaccacacaagttcatgctattagtcagaaatgtcaaacagcaacgtcctctttttatagtgagatacatcatgctttcaatccctacactctattttgctgaatgatcattgttagcaattccatggtcgaatcacagcttcattaactttacacttgatgatagtacgatcactatcaattatcaacgacgctctgct

SEQ ID NO: 81318 - DNA, 227 bp, Glycine max
  Clone ID: PAT_MRT3847_44445C.1
aattgaaatacgcaaaccacgcactttggatgtaacgtgttagctacaaaattataaaatgtcttccaggatgcaaattcttttagataagcagagcctattttatagggatgcttttaacagacagacgctacatattagaacacttcttcgagaagggttgccttaggaaccctctatgaccgagatagaatagttgcaaccctgaatactcatgaatattgtga

SEQ ID NO: 81319 - DNA, 521 bp, Glycine max
  Clone ID: PAT_MRT3847_44446C.1
gctgtactttgcttctttctttctttatccgctccttcatcttcatcatcatcatcatcatcaccatcatcattatcattcttcaattctcgcaaaaaaattcgctactttcgttgcgatcgtttccaatttcatgcgctttcttgtgtggggtggattggtggtgggttggttgattttaggtttgggaaaaaacgcgtgactttgatgattacgagattttctttacatgggtttaagcttttaatgactttcctagtgactattttattcactctggttggtacattaggattaaattgcatcaacaagtctctatgatatggatcaaatgagtcagcaaaggcatggctattttcattccgaaatgaggcagcagcatctctccgcctaatgtatgcacactcgtgacacctaggcacggaactaaagattatgcttatgacaatggtatgatgtatggaatgacacaatacaatggagttcaacatcaacataatcttgatatgggtgttccagct

SEQ ID NO: 81320 - DNA, 427 bp, Glycine max
  Clone ID: PAT_MRT3847_44447C.1
cccgcgtccggtttccttcagatccaaccaattccatcgtcaccaggaacacaccccttttgcctattcagctttacctctcactcttcaactgtgtctctgataaggttcaaccctttttttgctctctatgccattccaacaggtttgattcttcgttttctgactcaaagtttgcgtttttgttgttgttcttttgatcttgattgtgggtttttttctttttctattttttttggatgaattgtgggtattgagaattttgcgggattttggatctgggtctgaattctttggtgaagtggttgattttgtagaagtggggtgttttgggtagatcttgtagttttagttgatggggtgtttgtggattttacttggattgagggggttggtgggaggggttgttgggggggggggggggggg

SEQ ID NO: 81321 - DNA, 475 bp, Glycine max
  Clone ID: PAT_MRT3847_44448C.1
aacaataacccacatggagcccttacatagagtttgggggcgcttctaccacttttagccatatagacttttaaccctttctcaaaacacagtactcccttgacccacttttctttactacttactaaacctgagcatggtataaaacaaaccccccttattacaacttataacaatttccttgggcgtatatttattttataaacactttcccttaaactgctttctattttgaactgggccttcacctacctgcataatcccataccctccttgatttctcataaaaccctgtgatttattgtccgtaaactcccagcacaaagctttattttcattgttataccatatcttttccaaagagaccaacttaactataccaacctactattaagcctagctatctctcttaatttggatcatctatacggatatgcctttaattagctgaacactattgtctccggaggatgcc

SEQ ID NO: 81322 - DNA, 1352 bp, Glycine max
  Clone ID: PAT_MRT3847_44449C.1
tcctctagagcggccgctttttttttttttttttttttttttttttgggtttgaaatgaaagctttttattaatttgatgatggcttttcatgtatagtaactccttacattttcaatcagcaattactctagcttgggttttgatcgctatttattacaataaagcaatcacacaagatatatagaactaggcatggtagattagtttgaggccccaggacttgcaaatggtcccctcattgaagcaaagccatgcatatatttggtttacaatttgtgtggggtgttcatcccagaaaagatgagtatctctgtttggacaaggaacagtgttgggatggcatttaagatcaccataaatggtgttagggcagcaaggcttccatgtttccactatcccataactctttccagtttccctcacccccttaaggaacccaaagagatctgcatgtacaaagctgaagccaggaagctttgactgcaactcatggagcacttcaggcaaccttctattgtaaaagctgatagctttgtttattttctcatcacattttcctcttggtctagcgcggatagcttttgagggaaagcaacctgctgggggaatgttgttcaccaaaaactttcttgctcctagattatatattctctggatgcgtagggtgaattcatttagcaggaacaaagcaaggtttttgttgccgcggaaggttccattatggaagtaatcgttcacgacggtagagtcaaaaaacaaggattcagataaatgcatctcaatttcttctttctctttgaacaccttatgcaaattatgcttaacagtactatggaagaacttaatttgcttgtcaagtgtcaaagacgtgacgttgttggtgtctggaagaatgccagacccaccagatgcataattaatgccagtgctgattttgttcctttgatgatttgtaagatccaagtagggacggacaaagggtagtcctagatgcatagcaaggaaatcagccacggtttttccattagtggcacgaccggtaggtttgttgccacccataaaatctataccataaggaagataatctgctccaccgcttggaagatgattgttgttcccacaatcaatcagggaatcaccaaaaacatacaaagctggaaacttttttgtgtcatacgactcaaatgagttcgttgctgatgataggggtaaaaccaaagttaataacacaaaagaaagggtgatgagatactggctattcatttttgagactgtatgagagggtaaggtggtgtagtaactgcaataaactagactcagtagccttggatttctctcttctttgtaccc

SEQ ID NO: 81323 - DNA, 155 bp, Glycine max
  Clone ID: PAT_MRT3847_4444C.1
aaagcaaagaaggtcggagagcattttttttttgaggctgcgcacaaaattttgtgactcctgacagagggggggcctctactcgaaaaacggcttccccttgtacatctaccctgatcgcacttaataatgagccgtatcgaacaatctataca

SEQ ID NO: 81324 - DNA, 375 bp, Glycine max
  Clone ID: PAT_MRT3847_44450C.1
ggcttggggcttgccaccctaggcaacctgagtcagagcgaagaggattcatcatgcatttttggcaagattacctctgctatattggtagagtttactagaaagggttggatctgactggaaaaggctggatattgttgagtatggacagaaaatgtgggatggggtcttctcaaatatatttttttgcttggtatctggtctcgtttgattagtaggagcatataagagtatacttgttgtattcctgtgtagctaaaagtctaactatagttagtagttagacagttagttgttagtatgttagttaagacagctgtatctagtcttttagattatctttatttttaatataatatgcttcaatttgattat

SEQ ID NO: 81325 - DNA, 872 bp, Glycine max
  Clone ID: PAT_MRT3847_44451C.1
ggtgtgctgttccccggggagctccgactgggtgacttgcctcgttccggcggagcgctggcggagtcgcgggccgcggcccggcgggtcgtgggccctagggggcgccgccgcggggccgcgcatctcccctagaagacggttccgctgggccgcggatctcgtcaaacgcaaacacgccgaagataaacgccgcaaaatacaggttctgttctgttctttttctttttctctcgtttctttttggctttgaaaaagaaaaaagaaatgaaaggttcataggaaaagtaaggtacgaaaagattagtaatgaatcataatacatcctagttgatacactcggaaagaagaaaagaaagttaaatcgattttgttgaaaatgaaacggatcgaaatctaattagtgttagttaaaaagtcacaggaaaatttctctcgtgcctggtggaatttacagtaatgttaaaaaattgaaagcagcgttgcagcttaatttgttgctaccgctgggataattttttaagatttaaaaaaaaaaatttgtgaccgccattttttactacaaaggtaaggttctcggagtcactgccgcaaacacggctagaattagagctgtatttgttcataattattttcaatatcaagaatcatgataaaatcgcaaggacgatttcaatttagagccttgaagcctttatttgatctaaatatctaagagcgtgtttggtttatgtttttattttttaaaaatatgtttgatttgattttttattttatattgtttttgagaaataaaaatattgaaaattatatttcttatcatttcatttttattttacttaaaatgagatttatgtaaaaattcaatcaaa

SEQ ID NO: 81326 - DNA, 533 bp, Glycine max
  Clone ID: PAT_MRT3847_44452C.1
ggggaaaccaaccaaaagggcgggaccgggaaaaaaaaactttaaaaaaaaaaagggggggggggcaaaagggggggaaaaaaacaactatggacagaaacaacaacagggggggaggggttaaaaaaaaaaaaaaggaggggggaaaaccccctaaaaaaccccactaaaaaacacaagggaaaaaaaaccaggggggggaaaacggggggggcaaaaacaaaaaattcggggatttccaaaagggggggggaaccaccttttaaaggccccctaaaaaattggattggaaacagccccggaaaaacaaaagccacccccgatttcattttaaaggtagggttcccaacggggggggggggttaaaaaaagttccttactttcccccccaaaatcggaaagctggggaaaaaaacctacaaaacattaggggggaaggccatttttggaaaggaactttgggggggggggacaataaacaactttgggaaggggcccattactagccaccaccgggggggtttcttaatttt

SEQ ID NO: 81327 - DNA, 516 bp, Glycine max
  Clone ID: PAT_MRT3847_44453C.1
tgtatttaaagaggctatgggttatgaacagtccagggtggatgattgcctacaagtcacagatgaagagaaacaggatggttattaaactggtaggcaattccaggagtgaagaagtggagaatggggacatgtgtcttactgtatattttttgtctgttgaggttcctgtgtgggtactgttttttgctctcggtgtctcatctgacaaagagattgtagatctcattggttgtggcaatgatgatgtcagaattcagaatatcctctttgcatctgttcgtgatgctgatgagaaatgtggagcatttcgaagagttaggaatgctgttcaatatttagaaaaatgtgtaaaaagtgttcaatttccaccttcggaatctatgcaggagtgccttgaaatgtatgtctttcctggaattagtggtttaaatagaaaggcgcgctttcttgcatatatggtgaaaggtctcttgctggcttatacttgccgaagaaaatgcgacaacagggatg

SEQ ID NO: 81328 - DNA, 565 bp, Glycine max
  Clone ID: PAT_MRT3847_44454C.1
cacaccgctagtgggtcaaataatgcactatcaagcaccagagtcactcttggcccttcccaatagccaacttttaggttccgtttctgaagacttaggcttgatccaataccttcgccacatcgatctctccaacaatttccttaatggctctctacccaacactatcttcaactcttctcaacttcaagtactttccctctcaaacaatgttatctcaggcaaactacctgagctaattggcaaaatgacaaaccttaaacttctcaacctctctgacaatgccttttccggtttgatcccagaaaacctctctactctaccaaacttaaccgttgtttcactgaagagtaactacttttctggcagtgtcccaaccgggttcaactacgtggagattctggatctgtcatccaatttgctcaacggatctttgccaaatgaattcggcggcgaaagcttgcgctacttgaacctctcttacaacaagatttcgggaacaataccaccagcatttgcgaaacagattcctgtaaacacaacaatggacctctcattcaacaat

SEQ ID NO: 81329 - DNA, 485 bp, Glycine max
  Clone ID: PAT_MRT3847_44455C.1
gatttaccaggctagagagacatgtccgataatgagatgctcacatgccgggaagttcttttctctttattcatatttgagcttccttgttgttataaatttattaattgtattaaattgttctcaaactcctttgatttttcatacattatctaatagaagacaatggttggatatctggagaaatcttgattcgttttgtgtcagtttctggcttgaactattaatgcaaattccaactcagcatgtcgtgtacaaatacagttaaacaggagaatctggattgatttaactatacaccaattctcagttactatcctagatgatttataggggggatagcatttttgtctttaacatcgttctctttttttattttgtacccttggtggcaattacttgtatccatgtgtcgtgtccttgatatggtcccgggtctagaacatgcagagagactaaatgctttctgtttcaaaatttcaatt

SEQ ID NO: 81330 - DNA, 203 bp, Glycine max
  Clone ID: PAT_MRT3847_44456C.1
tcgctcacgcgaacggtattggatgatgtgcggcctggctcataagcccttgttgctcatgcatacagcatcagatgccatattataagatctaggagacttcaagggttgcatataccagagtagggaccaagatcgtggtgggtcaccttgatcacactcaagcggaggacctgttggctggctatgcttaacttaatgac

SEQ ID NO: 81331 - DNA, 500 bp, Glycine max
  Clone ID: PAT_MRT3847_44457C.1
tatcgtacggctgcgagaagacgacagaaggggacagcttcaaactcaaactcacctcaacttccacttgctgttttccacgttatcctttccaaaaacctgttcttttctcaaatgggtggttcaggaagatggctcaagtccctcatttctctcagaaagccctccactattgatcaagagaagggtggtgacaagagtaagagaaagtggaagttatggaagagcacttcagaagggtttgggattggatcatcaatgcagaaggggcatggtggtggtggatcctttgtggtggacgatggagcatttgctgctgctttggctgctgtggtcagaactccactcaaagactttatggtcattaagcaggaatgggctgccattcgaatccaagcagtgtttcgaggtttcttggcaagacgagctttgagggccctgaaggcagtggtgaggttgcaagctatatttcgtggtctgcaagttagaaagcaagcagc

SEQ ID NO: 81332 - DNA, 384 bp, Glycine max
  Clone ID: PAT_MRT3847_44458C.1
gttgctccgcactttttatacagcacgaatttattgctgttaggagcgatccgtgaaaaactctgtaaacatggtggaggaccaggacctcgttacaggtgatgagtttttctttgacttcttgcgctacaaggaaattgagaatggaatgctgtgggaagttgaggggaagagtgctgaatttggttcaccgtcaggaacagcaacagccgctcaccattttttatgatggaaagatttgtgttgcggatgtcacagagcttcaggaatatatttatgtagaaattacttcttctttttttttgttgcgacacttaatcatccgtctgccgaccttaattcggatgtggttatactaaataaggaagtatatggctattacgt

SEQ ID NO: 81333 - DNA, 472 bp, Glycine max
  Clone ID: PAT_MRT3847_44459C.1
tgttggcgtactaagctcaggtggaaggagaagcatgttgaaactggcgcataagatgacgcacaatatgtgtaacagtgtgtgtgcctgcacagggcacaagtggaacaagctgaacgccaggcacgtcgcggaagacgtgagggtgatcaccaggaagagtgcggacaacactgtcgaccaccccggcatcgcgctaagcactgtcacctgagcgtggattccagtgtggtttcacaggctgtttgacttgctccgcgactagctgctccaaaaccagtgggatatcctgtgcaacagtggacccatgcgagaaatggttcacattgcagatggacatgaccatgctcactgcgactccctccgtagagccagtgctataaacgcgaaccagaacaccatgctgatcttgcaggagactttcaccgacacgtgcagctagcctgtggtgtacgctccggtggacattccg

SEQ ID NO: 81334 - DNA, 298 bp, Glycine max
  Clone ID: PAT_MRT3847_4445C.1
aagacgagagaacgggcagaaggagctcctcatgcctgacctgatgatgacaacgaagtggaatcccattgtgtgctgcagtggccatctgggccgttggattgagttcatcggcatggaaagacagtgccgcatgacacgcaccgtcagtggactgctcactgccggaaatgtcctcaccgggatcgcctccgcgtcgcattgccctggatcacggtcaactgaccacctggaaaagggcgacccgccatgaaaattgtgcgatgtacagccccttcatgagttggctacagcgctc

SEQ ID NO: 81335 - DNA, 366 bp, Glycine max
  Clone ID: PAT_MRT3847_44460C.1
gtgatgttttgtggcagaagaacgatgtgattggacacagccaaagctgtgggcgttgttctgttactacgtggggggattgtaatcacataaaaggctagagggtatgaagagtgcacagaaaaatactagtactagtttcaaacaaaactcaccttactactacccttccatctcaagccatagttgagttgagtggtgcacagtgtcactatacataccactaacacccttttttggttcttgttctgtggctccttgtgctttgagcaagagctttttgagaaagagcttggtggtggtggttgttgttgagtggtttcatggttaggctggtgttaaattgaagttcatcagattgagata

SEQ ID NO: 81336 - DNA, 251 bp, Glycine max
  Clone ID: PAT_MRT3847_44461C.1
cagacgtgcgcacgctgtgcgtactcggtgaatagaataagtatggctaccgtcccaggagggtttatatgggcggtcgtaatgaagaacaactctttcttggtgaaagagctctgatggggcactcagatcgtgcagtacaactgagagccctacactctttacaacttcaacactttcaagtacttagttttggcatacaagaataactgacaatgttcaaccttgtggtaacgaccagtatgagttgc

SEQ ID NO: 81337 - DNA, 271 bp, Glycine max
  Clone ID: PAT_MRT3847_44462C.1
atcatactatacaagctcctctctctggtctctctttttctaaaaccattcaagtcaagggctatgtacactacacttaaatctttctctcaatgacaaaacaagaacatggttacggctttcaaactcccatagattctctcgctctgcatcatcttcagaagcctgtttcttacaacctctagcacgagcacaccccgattacactccagtgacaccaaagtctttacttctctccagcaagctcaccaaatactcttcatgagcccac

SEQ ID NO: 81338 - DNA, 570 bp, Glycine max
  Clone ID: PAT_MRT3847_44463C.1
ggaaaaaaagggaacaaaaaataagacaaaaacaaacaacaatactgaaacacaggcacgaaaaatgaaaaaaaaggaaaaaagaaaaaactagaaataagaagaaaaaaccaaatagaacagggaaaagatacaaataagaacctataaaagaggcaaaacggacctgacacaagggaaaaacaaacaggcactaaatcaaaaaaaaaataacgggttggaagccaaacaggaagcaaagtaacaaaaccggaatgaagattctaaggtggaaaatagggaaaataataacaagggaagaggaaatatagtttaaaaacgaattaataaaaaaaaagaaagaaaccgggaaaaaagagactaaaaaggaaaaaaccaccctccactgaaaaaaggaaatattgaggccaaaactcaatggaaaagggacagccaaaaagaaggggagaaacaaaaaaagggatttggacaaaacataaaaggttataataggccaagtttcttctttttacaaaaaaagagagaaccaaggggaaataacaaaataaaaaaattcccgggaaaaaaaga

SEQ ID NO: 81339 - DNA, 860 bp, Glycine max
  Clone ID: PAT_MRT3847_44464C.1
aatacaaaatcaaacttttgataagttgcaagagcggtaatcaattgctaagattttttccacagtttaaaagttgttgaaattcaatttgtaatatttagcattactctttacatatatatgttagcttcagacctgataaacaaatcagactagaacacatcctaatttcatatacaatcattattttcatggttcgttgaagaccttctcctcagactcatcacatttttctcaagttatttaacctagcctgtagatcatcatatattccactgtcttcatttgcggttgattcagcttgagcaaccctgttctttgctgctggtgcgctgacagaggttgtggcaggtgcattcacaagctcagagttgatgtcaattccaatctcatcaagaaactgattcacaagctcttctgtctcttcctcctcttcaccaccttccaaagcatcatcaatggcatctcccattacctcagacacgagttcatcttgtcattctgcctttcaaactcttgcatcatcctctgtacagaaggcaaattcatccgcggtccacctattcatttgacccattgctttagtaattcctttcgtagcctcccccattgcttgagtggattttagtgtctgaaattccaattagactcaattttaaagcgatttatgcatttactcatacacactatgaaatctcaatttaatatagatgaaaacctttaagatttcaaaatcccttcatataggatcaatgttgttaaataacaattatagcactgccaattgccaaaacactataacgtgacatttttcgacccctctgccataggcaatttgtgaaggaaggccccctatagca

SEQ ID NO: 81340 - DNA, 360 bp, Glycine max
  Clone ID: PAT_MRT3847_44465C.1
aaaaaaaaaaaaaattaaaaaaaaaaaaaaaaaaaaaaaagaaggaaaaaaaaaaaaaaaaaaaaaaaaaaaaaaaaaaaaaaaaaaaaaaaaaaaaaaaaaaaaaaaaaaaaaaaaaaaaaaaaaaagggggcggcccccccttagggacctcgtccccccggaaataaattccggcccggtccctgggggcgtcccagttttccttatagggggtcgttttaaacctgggcgaaataagggccatagctgttccctggggaaaattgttttccgttaaaaattccacacaaaatacaacccggaagcttaaagtgtaaaccctggggtccctaatgagggacctaccccacattaatt

SEQ ID NO: 81341 - DNA, 393 bp, Glycine max
  Clone ID: PAT_MRT3847_44466C.1
gtgtatttaaggatacctattagtgcaaaccctaggctagaagctatttgaaactggatattgtttagttttctaaatagcttgctctttggaaacacgaggtcttatcttttgcgggtagaacttgtctcataaattcaatgttatcatctttacccttgttttccttttcgttttttaaagtgcctttaaatgtgggaatgaggttcataagcatctaaaggaattttgtgggagagtggcgagagtcataaatgatcccttgggttaattgggacaaagtgtgagtcaaaagagtgtgcgagtttgggggtaaacaaatattttcttgcaaattggtggtgaaatttatttcataaaaaatgatgctttatgggaggaggtgttgtgatt

SEQ ID NO: 81342 - DNA, 455 bp, Glycine max
  Clone ID: PAT_MRT3847_44467C.1
atattccgacgcgtggaacgaatgggagcgtaacgttcggcggaatctatggatatagatgaacttcatcttatatttaatggtagagaaagagagtttcactcacagctggaggaaaacgcaaagatatttttgccatacattaacaactttgactttgttgggggtgcgagatgtatagaaattcacggcaatgtcaattccgtatggagctctacttcgttgctgtcaatgagttggaagataacttgttcttcatggagcaatgggaatatcgattttcaatgtaaacaaaacagtgcaaaatgttctctctgccttttagtttaattataatacaccgtgcaatatgttttttttcttctaaaaattctaaagttcagctttagtctctgaaaaaattgttgtctctgcttttccttctttaattttgaaatgtgagtttctcatctctt

SEQ ID NO: 81343 - DNA, 1494 bp, Glycine max
  Clone ID: PAT_MRT3847_44468C.1
tcgggaggaaaaacaaccctggcactacgattctatctctgcgatgatcgggttcattattgttggcgatgatgactcataaatcacaatcatgatgagtagttgaaatcgaaaagagaaaaaaagttcaaaagaagaagaaggagaagaagcgctataccagcagcagcattttcttttccatttccaacatcaacagcgagagaaaggatcatcgatcatcatgtcgttttcgtttttcaaggctttgaggcctaaaacgccgcaagaggtggccaagtccatcaaggagagtctcatggccctcgataccaaaaccgttgttgaagttaaagcccttgagaaggctttagaggaagttgaaaagaattttgtaacaatgagaaccatgctttctggagacggagagtcagaaccaaatttggaccaggtttcacagttagtggaggaaatctgcaaggaggatgttctcactcttctaattcacaagctgcctatactaggatgggaagcaagaaaggatttagtccactgttggtcgatattattgaaacataaagttgagaccaattattactgtgtagaatacattgaacaacacattgagttactagactttcttgttgtatgctatgataacaaagatattgccttgagctgtggcataatgttgagggagtgcatcaaatttccatcacttgcaagatacatattggaatctgcaagttttgtgctgttctttaaatttgtagagttgcctaactttgatgttgcatctgatgcattttctacctttaaggatcttcttactaagcatgtaaacgtggtctctgaatttttgacagctcactatgatgagttctttgatctatatgagaaactcttgacatctcctaattatgtcacaaggaggcagtctttgaagcttctctcggaatttcttttggaatctcctaattcccagataatgaagcagtacatcttagaagttcgttacttgaaagtcatgatgacattgttgagggattcaagtaaaaatattcagttatcagctttccacattttcaaggtttttgttgctaatcctaataagcctcgcgaagtaaaaattattttgtcgaagaaccaggagaagctactagatttgcttcataatctgtccccaggaaaaggttcagaagatgaacaatttgaggaggaaaaggagtttatcatcaaggaaattgaaagactatcgatctaagttaattttttttctactgcagctgtgtgtgattttgtaacaagtccttttgtgacctgtatatccaaagctaatttgctgcaaggatttcatgtttctgtttataggaaacataaaaggtccatgagtttttatgtggacaagacaccaactatgtgtttgtaaaacaaactgaattaaaattatcgagctttcatactggtatagtgaagatgccattgggagtgtatttgttgcacagatgaactaac

SEQ ID NO: 81344 - DNA, 722 bp, Glycine max
  Clone ID: PAT_MRT3847_44469C.1
acactcccaatggcatcttcactataccagtatgaaagctcgataattttaattcagtttgttttacaaacacatagttggtgtcttgtccacataaaaactcatggaccttttatgtttcctataaacagaaacatgaaatccttgcagcaaattagctttggatatacaggtcacaaaaggacttgttacaaaatcacacacagctgcagtagaaaaaaaattaacttagatcgatagtctttcaatttccttgatgataaactccttttcctcctcaaattgttcatcttctgaacctgaaaaaaaggtgaaagagctcatacctgtgacttatagaagaacacttttatttaagggttcggaaactaaatggaaattcagaacaacattatgtaatcgtaggtttcaaattaagtaattactaaacgtgttataaccttttcctggggacagattatgaagcaaatctagtagcttctcctggttcttcgacaaaataatttttacttcgcgaggcttattaggattagcaacaaaaacctaaataaacacgtgagaaaagatcaaaacaaatatatgatcatctccacaacaaaatgttatgttgtagggtatatttcttcagaaataaaaacctttgtcaattagattaaatgcattaaaacaatttatatatgtaatctgccattaaccaaattcccaagtcattgctactaaca

SEQ ID NO: 81345 - DNA, 483 bp, Glycine max
  Clone ID: PAT_MRT3847_4446C.1
acggctgcgagaagacgacagaagggatatttaaatgatcaagatttaacattacgtgacgttaagttatgtcacataacttaattcttaatttatgttagtacaagtgagtgagcgagaaaaaaatttgtatgagagagtgaaataagtaaatctgaactatataattataggtaaatgattaagattaaagttgtctaatgatcacattactactactacttaaagaagtcacataacttttccgaacaaatttccaagacaataaaattttatcattagttttgggattcgaggtttggtaatagaaatacttaaccttgtgcaaaaatgctgttttctatgagcctgtgactgtgaattacgcatgcttgtctctattcgggtcaatctgaacagcttaatatcttacagggaaaagaaaatccatcaaacatttcaccaccccagcctaatagtatctgcacaataatgtatacgagt

SEQ ID NO: 81346 - DNA, 234 bp, Glycine max
  Clone ID: PAT_MRT3847_44470C.1
gtaaatgagtgttatggttgagctccctggtggatgcttaatcgggcattgccaaagtgcttcagaagtaattcttgccacttgttactcagttctcatctcatatggtgcggttgtaccactctttgacgaatcaactaaccttctacagtcttccaatattcaatttctaatcgctgagttcatagcaatacttctcttcctttatgtcatcgtgctcaccattattcgcta

SEQ ID NO: 81347 - DNA, 218 bp, Glycine max
  Clone ID: PAT_MRT3847_44471C.1
atcagcctgaatgcagctcacttcaattgcggtagcgtatctatagctagctgggtgactaggcatacatttagtatctcaaaatctctcggcgtctaagtgagaagcagcacatgttaattctcgtgtgccagtcgcatcgtgatgctatgtgatttgtgcataggattttcctgctttagaatctcgtacactcagtccgcctctgtctgggcccc

SEQ ID NO: 81348 - DNA, 162 bp, Glycine max
  Clone ID: PAT_MRT3847_44472C.1
ggcacccgccggcccggcccggcctggctgggtcgacccactcgcccgcccttgcttccggcccgaagctaaaagacaggaggtgaagtgtggtccaatttgagaggaaggcgatcctccctcataacctagacacagcgcactagaaaggtttgatggagg

SEQ ID NO: 81349 - DNA, 1467 bp, Glycine max
  Clone ID: PAT_MRT3847_44473C.1
gctataaataggcatgcgtgccccccacgggaattccgctcgagcaaagctagccaacctcaaataacccttgttatctctctttcattctcacttgtactcatctctttttcacaactttttttgtaccttctgatctaatggcagttccagtgattgatttttcaaagctgaatggtgaagaaagaaccaaaactatggcacagattgctaatgggtgtgaagagtggggattttttcagttgatcaaccatggtattccagaggaactccttgagagggtgaagaaggttgcctctgagttctataagctggaaagagaggagaatttcaagaactccacatcagtgaagctactaagcgattcagtcgaaaagaagagcagcgaaatggagcatgtggattgggaggatgttatcactctccttgatgataatgaatggccagaaaaaacaccaggattcagggaaaccatggcagaatatcgagccgagttaaagaaattggcagagaaactgatggaggtgatggatgagaatcttggcttaacaaaaggatacatcaagaaggcactgaatggtggagatggagaaaatgccttctttggcaccaaggtgagccactaccctccatgtccccatccagagctcgtgaagggtctgcgagctcacaccgatgcaggaggcgtaatcctactcttccaagatgacaaggttggtggccttcagatgctgaaagaagggcaatggattgatgtgcagcctttgccaaatgccattgtcatcaacactggtgatcagattgaggtcttgagcaatggtagatacaagagttgctggcacagggttctggccacaccagatgggaacagaagatcaattgcctccttctataatccttcattcaaggccaccatatgtcctgcaccacaacttgtggagaaagaagaccaacaagtagatgaaacttatcctaagtttgtttttggtgactacatgtctgtctatgctgagcagaagttccttcccaaggaaccaagattccaagctgttagggccatgtgagaaaagcaacttgctttcgtatagaaaatgcttttgcgcttccccccactttttttttttgaaaaaaaaaaaaaacttcatcttttactttgttttaagggtattggtactataagacatgcttgatagtagaaaagtataccatttggttatcattctctgcacggatttctccagaatagaaaaccaccatgggtattaattagtcttcctttttctagaattttgctttatctttcaatgttatggggggagctagtgtgaatccatctgtgcttgcattgtacaatagttctttcaaatatattctactctaaagttgtcccccataaaaaaaaaaaaaaaaaaaaaaaaaaagcggccgctctagaggagttttccggttatcatcccacatgaaagt

SEQ ID NO: 81350 - DNA, 365 bp, Glycine max
  Clone ID: PAT_MRT3847_44474C.1
gggaaaataacagaattttaatttatgcctatgaaatccttcgaatttataatacctccatataaccaccctgtaaaagaatgggaggaggctttcccaacggggagtcccatcacttgctttccaacttattaagataacattacccggttcaaaacggttttaacttcacgggggtattgaggcttctcatcacaaaaattgccttgcaaaagcgccatattcctaacgaggtataaatcaccaaatcattgggttttaagaatgtttagctttgataaaagctacactttcgaagtggttattttcatgcattgtaccccgcgcaagtaaatgctctgccgacaatctcaccagcggaaaac

SEQ ID NO: 81351 - DNA, 458 bp, Glycine max
  unsure (1)..(458): unsure at all n locations
  Clone ID: PAT_MRT3847_44475C.1
tgttactgttcatcttcttccttgttcttccaattgttcccttttttgttgagaactcttttcatttattaccgtggcgtcttcatctcaacaaaactctctagtagagcaacaagatgcttcaattaacattgagggaagtaatcaaatttcggctacaacggtaacgacacatagagaaaggggttttgatttaatctttattcctgggcaagaagaagagtatagaagagtctgggaaactcaggtattactttcaacatctctaaacaacaaaactatttgctttgtaggtccttatcgccctcgagtagatttggaagatattgaagaatggtttcacactcatgatggtgaataccctatcatccacaaagaaagtataagaactgacttctaaaagaatagagtagtatttttagagcctnccctccaacatatatgaccacttattttac

SEQ ID NO: 81352 - DNA, 129 bp, Glycine max
  unsure (1)..(129): unsure at all n locations
  Clone ID: PAT_MRT3847_44476C.1
tgcacacgcatagtcagacggaaaataacagnntaggctatacagcctcaacatcattgacattngataatggcaatgcctctgtttgcttctggatgatttttctcagcananaatcgancgcgctct

SEQ ID NO: 81353 - DNA, 325 bp, Glycine max
  unsure (1)..(325): unsure at all n locations
  Clone ID: PAT_MRT3847_44477C.1
cgtcttangcacgcgtacgtaagctcggaattcggctcgagcatcatttgctgtccagttatacattttaataagtccatgctcagtgtgtatactaaggaagcaaaccatcccctgagctatgcaggagaaaaatcccactaaagaaaaagtcacttgatttttaatagccaaatcaccttgctcccagttcttctgtcttctaactccatggaaattctattgggagttctcagtggggttttttttcaaccttaggaaacacttctggtctctgaactctaataatcaataagtaaaaatgaagaaaccacaagctatcaca

SEQ ID NO: 81354 - DNA, 406 bp, Glycine max
  Clone ID: PAT_MRT3847_44478C.1
acgagtgggatttggctcctcaaaagtgagggagggtaaagtaaaattccaatacattcatgatttgttatgcacatgcatgtaatatcaactgttgattttcccatgaacgactgagattatttactttaccctctagagtgaattgctcactttagaggagcggggtcctataacatgagggggtgtttgtttcacgtcattttctattatacccgagaatatgagggtgggaatgaatattcccatgtttgttagaatgttatgataatatattcccgggcatatttttattcccagaaaagttgtgctttcacattgtaagcagtttctattcccatgaggagagggtgggtatgtgatattcccatgggaatgaaagttattgcctacaattactacctat

SEQ ID NO: 81355 - DNA, 242 bp, Glycine max
  Clone ID: PAT_MRT3847_44479C.1
agaggttccatgttggctcttaaaatttctcaatctaaaattgcacttcccaagaacacagttgagtcgtaccagtctgcgtaatgatttattggcaaattttttgacaaagggcaattttagagcgagtgttgatttgcagcgcactcatcgtattcgaggaatgattaacctggtggccacagttagtattcctgagcatacaggtatagcattggcctggtgccataatagttctttta

SEQ ID NO: 81356 - DNA, 478 bp, Glycine max
  unsure (1)..(478): unsure at all n locations
  Clone ID: PAT_MRT3847_4447C.1
ttttaccttccaaccagaaaggtccttggttttatagtggtccccggtaaaaaatttaccaaaggaccttccnaattaccaaaattagggagggaagaagggaaagaaacccacccggaatgtagaaacacggggaaaggttttgggtttttaaaacttttttttaagggccaccggttaaaaaaacttcccaccttagaacgcaggggaatggaattacttataggcctttcttcccatttggagggggtttggaccactttccaatggtgaagtccagggtctttctttttccaaagtggtccattaggcaggcatgttttacaaaaacctggttttttcccacccctttcttgaaatccaaggttgatgggaaatcatacacaggcctggaaatcaaagtttctccttcacaatgttaggaaatctccttataatggatcttcccagggccttaggggtcaacaaacacaaacaa

SEQ ID NO: 81357 - DNA, 448 bp, Glycine max
  Clone ID: PAT_MRT3847_44480C.1
cataaagactgtgtggaaagctgacctacccaagagtgggagccagtgcttgtatactcgctcattcactcaaaaaaaagatggaaagactgaagtccactctacacatttaaatcatgaccattgtatgctcaagggaacgtaaccccaaccctagaccaggcccaaccataccacaaaaaaggcgtgaatgccactatagacaccacacccgccatggcacctgacacccccaaagccattgcaaaattcaaaacacacaacaacaggaacccacacacaaaccaaagtaggtaccaccgtgcagtacccagagatacctgcaagcttgaacaatacccactcgattaatatacaaaataagtgccaatactcctgtatagacacttgtgccctacaagacccattaaaccaactgataaaaaagcaacatccagacagcattgac

SEQ ID NO: 81358 - DNA, 278 bp, Glycine max
  Clone ID: PAT_MRT3847_44481C.1
ggaccccaacattctaccttgttgaattctgaaatatttgagtgaaagatgcatgtgcatgcccgagtgggtcccatgaagtagttatcgatggtgcaccacagtcgtgccaagaaaattgtgaatgttgctttataccgatgagctcaatcacatggtcttaagagcttcttgggcacgatcgagcatgaaatcttgtgatgggattaggaattaccccacacaacttgtaatgtttcaaagctaaaattactggaactgttttctttttttcggca

SEQ ID NO: 81359 - DNA, 472 bp, Glycine max
  Clone ID: PAT_MRT3847_44482C.1
aagaagttcaaccttccaatcctcccaaccaccacaattggatccttccctcagactgttgaactgaggagggtgcgtcgtgaatacaaggctaacaagatctcagaggaggagtatgttagttcaattaaagaggaaatccgcaaagttgttgaactccaagagaatcttgatatcgatgtcctggtacacggggagcctgagaggaatgacatggtggagtactttggtgagcagttgtcaggctttgcctttaccgttaatggctgggtgcaatcttatggatctcgttgtgtgaagccgccaatcatctatggtgatgtgagccgtcccaagccaatgactgtcttctggtcatccactgctcagagcatgaccaaacgcccaatgaagggaatgcttactggccctgtcaccattctcaactggtcctttgttcgaaatgaccaacctaggtctgagaccacctatc

SEQ ID NO: 81360 - DNA, 236 bp, Glycine max
  Clone ID: PAT_MRT3847_44483C.1
ggctcgagctcgagccgaatcggctcgaggaaatttaagtccaccctttctctctatatgtatggggcaatgcaaattcggatttagattaggattggtagaaacaaaacaagaagaatacgacgatgaaacaggggagtgggtcgggtacgatgagggaaaaccaggttgctgaaatcctttttaacctactaggtcttattggggaattcgagtgcggctgtggaatgctacaa

SEQ ID NO: 81361 - DNA, 275 bp, Glycine max
  Clone ID: PAT_MRT3847_44484C.1
ctcgagccgcactcatcaccatggccaagcttgttctttcactacgagtccatcatttcagtggctagttcgttctgagaaagcatgtacagcacaatgagtgccagatccaaaagctgaatgccctcaaaccggataaccgtatagagtcggaaggtgggttcattgagaactggaatcctaacaacaagcaattccagtgtgtcggtgttgacctctctcgctgcacccttaacagtaatgccctacgtagatcttcctacactaacggtccc

SEQ ID NO: 81362 - DNA, 244 bp, Glycine max
  Clone ID: PAT_MRT3847_44485C.1
cccacgcgtccgataaggaagacctaaaacataattctttaaagatctggggggattggagtgagtcgtgggactcggacaaacaaaagtttgtttaaggttgggtattgcggaaagaaagggttgtaaatctagtttagagcccccacctttgtcacagtagtgttatagcaaatgagggagattttttttacttagttattactatttgttttggcccagttctgaatttttgggtttctta

SEQ ID NO: 81363 - DNA, 561 bp, Glycine max
  Clone ID: PAT_MRT3847_44486C.1
gcaccagtaacattttcatgactcaatttttatgtctctttgtctccctaatcaacccactctggttgattttcatgtttccacaaccgaaacagagtgtctaattaaacagtagagctagccgggtagtgatatttttaaacttcaactactcttcataattgagcatgggaaaagtcaagagatcatgttatccatgaagcaacagcatcaattctatttacatatttgctcaaacacaactcccattacaagaagacactatttatttaaggtaggatgtttgcaaattggtgtctcaaaatgtgattaaatccaaacccatgtttgcaaacactcttttttttttcactatgtaacatgtgataaaatgtaatgtcaaacgactaaaacccatgattctaatgtcaacatgcaagtcttattcggaaataataatttccttaggaaagaaaaatatttatcacttgttttacccgtgttgcaaataataaaatgttgagtaatgtgaaacgggaaaaaatgagataaagatgagggtgtgaaaaaaataataaaaac

SEQ ID NO: 81364 - DNA, 307 bp, Glycine max
  Clone ID: PAT_MRT3847_44487C.1
gggatatgtttacgagtatgtaccacctcacctgggtcttccagtttttgacccttcttcttggaaatatgggtttcatcctcctcgaggcaagcacttaagcaataaactagaattagggatctccttgaggctcattcttctttcattacagaccggtattttggttcctttaatcaacatattgcatagaaatggtgggagcttacgggctactttacatatttatattacttctaatgtttagtaagatgaaaatcaagtcaataggatatgatttaagggaggaaggagcaagtttaatgct

SEQ ID NO: 81365 - DNA, 243 bp, Glycine max
  unsure (1)..(243): unsure at all n locations
  Clone ID: PAT_MRT3847_44488C.1
gagcaatagcaagagacaaaagatttttttatttattaaaatgcaaaatgaatgtatttattaaagacaaactcagttttagcacaagtgcaaaaaaccaagccagagtacagatgcgagagtacaaaaatctgagtaaacaatagaaaacaacttgtacataaagaaatattantcgtgaaatgcagacctcttgtagcttcctgcttcagcatattactaacttcaaatcaaccaacgatc

SEQ ID NO: 81366 - DNA, 205 bp, Glycine max
  Clone ID: PAT_MRT3847_44489C.1
aattccctggtctacccactcttccttccatactatctaccaaatcttttatccactaacatcattactaccttcgtcatcttttaacatccaaaactacttctaatccaactaattttatccaaactcaaactcttttatcacacatccatctaatttaccattctcatcttcaatttacatatacttaaacttacaccttcac

SEQ ID NO: 81367 - DNA, 338 bp, Glycine max
  Clone ID: PAT_MRT3847_4448C.1
tggcgggctgtcgtcctttttttttttttttttttttttttttttttaatcacataatgccccctgattaattgtattgaaaacaaagtgcaaagaaaagatcccagttgttaacatggcacaagttatttacatgcaaaatcaattttgtggttagacattccatcaagcctgatttgcgattcgtttgggagtgaacattttttgaagcaaatgttgatgcaacttaggaagaattttagatgactgagacgaagggttaggttcagaattttacgagttttacaattacggggccaaaaaatgaaaaaccacctttggggggaatatgaaaattt

SEQ ID NO: 81368 - DNA, 268 bp, Glycine max
  Clone ID: PAT_MRT3847_44490C.1
ccacgcgtccgggacaccgttgaatgagacaagataaggaagtttctgattggaaggagagtcttaattttaattttaattttaatattatttcttcttcttctgggggatggattttaattatttttatttttaatttgattttaatttttccaaattggggttaggagatgtcactgaaattaaggttctggtagcagatactcatcactaaagggcatgatatgccacaaacacctgcactatatataaaattcaattctttaat

SEQ ID NO: 81369 - DNA, 409 bp, Glycine max
  Clone ID: PAT_MRT3847_44491C.1
gttcagtgtctacaataccaggtgattttgtcattggtgtcaaggtgacaaccataaacaatatgggtgcatatgggctcaatcctggtatttcaagttcttggcttttgggcaccattccttaatccatttcacaacaaactggttggaatcaaatggccaccggggaaaccccattggattttgattctaaccagccaaacttttgtcaagtttctattgaccttctcggtggaggaatcttagtggacaaaactggagatgggatcacacttatacaaaattctccaattagtaaccttgttgagaagtgctgcttggaaaaaaaggctgttaatggtcaagattgtgatgtctgggaatgcagcagtcaaaaagagtgattgggcctcattggtacaagtgtttt

SEQ ID NO: 81370 - DNA, 252 bp, Glycine max
  Clone ID: PAT_MRT3847_44492C.1
atggaatcttcaacaattgcagtccaaactgctttgacttgtttgctggctcaaggatctaagtggtggagactgcacaagaagaagcgtgaaggaataagatataatggattgatgaagaagaaagtgaaattggttaaggaaggattgatgatggaaagtagaatagaaaccctaccaaagttgggggtgtgggagagaggctcgaaggcatgcggtaagtttaaaggggctgtgacacgtgagggatga

SEQ ID NO: 81371 - DNA, 472 bp, Glycine max
  Clone ID: PAT_MRT3847_44493C.1
aaaaaaaaaaaaaaaaaaaaaataaaaaaaaataaataaaaaaaaaaaaaaaaaaaaaaaaaaaaaaaattttaaaaaaaaaaaaaaaaaaaaaaaaaaaaaataaaaaaaaaaagggggcggccgttttaaaaaatccaaacttacatccccttgcttgaaacgtaataacttttttttagggtcccctaaattaaattcactggccgcctttttacaacttcgtaactggaaaaaccctggctttacccaatttatttgctttgaaaaaaatccccttttcgccagttgggttattaacaaaaaagcccccaccaatcgcccttccaaaaaattgcccacccttaatggcaaatgaaaccccccctttaccggcccattaaacgcggcgggtgttgtggttacccccagtttaaccgttacttttgccagcgccttaacccccgttcctttagtttttttcccttccttt

SEQ ID NO: 81372 - DNA, 502 bp, Glycine max
  unsure (1)..(502): unsure at all n locations
  Clone ID: PAT_MRT3847_44494C.1
tcctatccctgacgtcatgaaagtcctccatctcgcccggacaattgtcaaacttcgtaccactccaaccatcttcaaaaacaggccgacaactcctatggcagtcaggccgccggtgctggccaccaagacttccgcccgagtcctggggaaaccggtcgtgccgtctcccgtattcccccgtgttccccggggggcggaaccccatccgcgccgggcccagggagtcctttcggaaacaatgtgtcgtgggaggaacgcattgtttgcccccgaccaaagatctggcggccgttggcacanggaaaatcaattgtgaaccagaagcgctacgccggttgtctccggcatcgctggcttcgtcatccccttcctcgttctcgcccgctgtcaccgtatcgaatcccgtccggagcttccactcgtcgttagcgactccgccgagagcgttgagaaaacaaaaaaagcaatcaaagtcctcaagcagattggggcattttcc

SEQ ID NO: 81373 - DNA, 434 bp, Glycine max
  unsure (1)..(434): unsure at all n locations
  Clone ID: PAT_MRT3847_44495C.1
ttctnnctnanaataagtttattggttgttnctttcagtttcctaatactttctaattagcgcctcggtcaactagtttcctcgcccttaccgccgatcttagagttggtggttcaccctcatcccttcttttggggggggtgtggtttggcccctnccgccagggcggaccctttttcaagggtgccggaagaataacccttttaatggttagaacccttgttgtctccnctcacttgtcggtcctcacctcttggtcctgtagagttggcttggcttggcttcttgtgccttttttgggggctcccgcccctnaatccccctttttcatttcttgcgcccccntcnacctcttgctctttgctttgtgtccgttctgccttcgtttgttgctttgtgggacccctgggcctctgcggttcccctctttgcct

SEQ ID NO: 81374 - DNA, 450 bp, Glycine max
  Clone ID: PAT_MRT3847_44496C.1
taattctgaaagctttgaaaatgtttttgtttttgtttatggcaaattgaacaatgtgttcacacatatcttatactcttctataaatagaaaacattggaggtgaaggaagccacagattgctgccaccggtgaagcatcgtcgatcctctacactgctgctgctgcctactcagattcagattggtttcggtaatgtctcggactcaagaatcagtatctgttagaaaaggcaaaaatctgagttctggcaccacattgttatccaaaaccagtaaggatcctttcctgcctctgcatcaaaaatttttctatagctaaataggaaccattcattatatttttctctcccttggtttctttgcaatgactaatgaaggcctaagatgttgcaggattggctgcattctggttgaggagtacgactaattaataatggtcatggataat

SEQ ID NO: 81375 - DNA, 921 bp, Glycine max
  Clone ID: PAT_MRT3847_44497C.1
ttcggcgcgatgtccttttaagaaggagaacattaacatcacactggttttgcgatcaaagagatcgaagccagtgaagagcgagcgagagagctaggaacgtaacataccataccacattgaatcatcgaccacctttccaagaccacatgatgctcatgtctcagttattccctgctgatgcatacactcaaattatttctcaacaaggagagactaataagaagccaagacgccgtcgtaacaagcagcaccgagaagacgaaagaaggggaagcttagtgatgaagaagtggaagcttagtgaggtgcaagttaatttacttgaacaaaactttggaaatgaacgcaaacttgagtccgaaagaaaggataggctggcaatggagcttggtttggaccctcgacaagttgctgtgtggtttcaaaacagaagagcccgttggaagaacaaaaagttggaagaagagtactccagccttaaaaaaaatcatgaagccaccttgcttgagaaatgttgcctggagagtgaggtgttgaagctcaaagagcaactttctgaggcagagaaagagattcagaggctgctagagagtgccgagagagtcccaagcaacagttctagttcgtcacagtcacaatcaatggaagcggtggacccaccattctttggggaatttggagttgatggatatgaggatgatgtgttttacgtgcctgagacccattacatcaacggcatggaatggattaatctgtatatgtaaaactaccaataggaatttagaattttgtagataatgtgaatggtccaatgtatattaattgttcctagctagctaggtagctaagtgtgtttgtttcactatggtttggaaattggaaagtatccattaacataataatttgcaatttgacccg

SEQ ID NO: 81376 - DNA, 240 bp, Glycine max
  Clone ID: PAT_MRT3847_44498C.1
gagatagtggccgccacaatttcagttcgtgttcgtggaccttggtatacgcatctgactgataacctgtgatatagttgctacgttcatgcgtaatagtactaataataatactaataaatatgcacatttctacataggactgcgtaggcttgtaagctctggatcttaggtttggagagctgtggcagtgtgtgtagtctgcttttgatgtagccaacagagttgcagagaggtgcc

SEQ ID NO: 81377 - DNA, 236 bp, Glycine max
  Clone ID: PAT_MRT3847_44499C.1
actccgacttagaaattttacacgctttcgtctttgcactttgtataacaccacaatgcatgatatccacgagaatactaaagcctgtcccgcatatgatgctgacaatgcagaccaagtatacacacaccactacagtaatgagattacttccacgctcttatcattataatcatatgaatctttgtttaaatcagatagtgtgtcacttccattaccttccatatatgcactgt

SEQ ID NO: 81378 - DNA, 272 bp, Glycine max
  Clone ID: PAT_MRT3847_4449C.1
ggcacgcgtacgaaagttaatcattctggttctactagtcttatctcttctagttgtgaactggggagaactatagcgcccgcgtgacaaacatgccctactgcaaatcttgatagatcttggaaactcgaccactcttttctcatggcttctaaccacttattgctgcaacatatcatggctaggtgtttcatgctactctggcacccatacatattgagtcaacgactactaccttgactagcataaccttctctaaccccactctattt

SEQ ID NO: 81379 - DNA, 515 bp, Glycine max
  Clone ID: PAT_MRT3847_444C.1
atgatattattatatacttttttacaaaaattctctaaattcaatattttttttatctctctccttttcaaataaaaaaatattgattacatattttttatattttttgaaaataaatataaatattaaacaagatacataaatcaacaatttgactccatgtgggtacctcccccactggccactgtgatcgtccttttcatttgtgggtataaatattaaacaagatacataaatcaacaatttgactccatgtgggtacctcccccactggccactgtgatcgtccttttcatttgtgggtgtaattaatgctgctgccgtagattttgctgaaaccgatcgcttgcaaaggttttctgatttttgtttgttttgaattttttatatataagttttctgaaaatttaaacattcataaaagttgcatttagtaaagagtatattttattatagagctagagtatttttttttttttatgcttgggaaataacaggaaaagtctactataaag

SEQ ID NO: 81380 - DNA, 549 bp, Glycine max
  Clone ID: PAT_MRT3847_44500C.1
ggctcgagcttgtaagatggagaacattaacatcacactggttttgcgagcaaagagatcgaagccagtgaagagcgagcgagagagctaggaacgtgacataacataccacaatgaatcatcgaccacctttccaagaccacatgaggctcatgtctcagttattccctgctgatgcatacactcaaattatttctcaacaagggtagcaatgagaatacctagctacatgctcaaactcaaaaacgttactcttgtgttgtattcatcaaagttttctttataaaataaattggaagagcttcagctagctatatacctttgtttttaactttttcatgtgtatcattatttttcaggagagactaataagaagccaagacgccgtcgtaacaagaagaacaaaggaggagaaaacggtgcctcggaagccaacaagaagaggaagcttagtgaggtgcaagttaatttacttgaacaaaactttggaaatgaacgcaaacttgagtccgaaagaaaggataggctggcaatggagcttggcttgga

SEQ ID NO: 81381 - DNA, 307 bp, Glycine max
  unsure (1)..(307): unsure at all n locations
  Clone ID: PAT_MRT3847_44501C.1
aaaacaaaaacaacaaaccnccgggggaaacgaccgcaaaacaccacgcaaaaacataacaaacagcagccctgaaaccaaagaggcaaagcacaacnncaagggaaaccccctcccaacagggggggganangacaccacnccanaaaagggaaaaaaaccaccacccacggggggggcgagggacaaaaaacaaaggggacccccccngaaaaggggaaccagccaaggcacaaccaagagccaaaggccgcccagcaaaaaagacccccggccgaccaggagggacaccccccccgggccgaac

SEQ ID NO: 81382 - DNA, 330 bp, Glycine max
  unsure (1)..(330): unsure at all n locations
  Clone ID: PAT_MRT3847_44502C.1
caagcagcncagcaagaaaaagaggagaanangaggagggagagangnnngannnaagcagccaaccaagagacanggaaaagcaagaaggggggcaagggacaggaacccncnnngagaaacgacaagnncnngnccgcagagaacgggaccaagcagccaaagaagagcaggagcaagcaagaagaggagaagcnggngcaacagagcagaaagaacaaggggcagagaagcagcgcaggaaaagnaacccagcagcaaccaagggcaagcggcaagcaagggagaaaaggganggggaaaagacggagcgngcccaggaaaacaacg

SEQ ID NO: 81383 - DNA, 237 bp, Glycine max
  Clone ID: PAT_MRT3847_44503C.1
cagcaaaaaaggacccaaattgtaccccgaccccaaaaaaggggggggggcccatttttgattccataattaaaaccaccccctaaggcctcattttatttatgatttcacctttgggtagcatatacaacccattacacacttcactaccaacatggggtacctggatatcgggatgatatgtttaatcagtccagtccacaatttaacaaatgccaaaacttttggacccctggg

SEQ ID NO: 81384 - DNA, 1979 bp, Glycine max
  Clone ID: PAT_MRT3847_44504C.1
ctcgcgcaggagtgggcccacgcgtccgaaaaaaacaatctccataaccaaacacaccacatggaaatcagccaaatcccgtttttcacccaagaggactactctcacttctacaacctctacgaagacacagactctaacaacagtctcaacaataacaacagcaacaacaagagaaagcgtaacaacagaaaagaagaaggtagtggtggaggtgcagaacaaaaagggcataatggtaataataataacgagaacagtgaaagtaacttgaaggacttacttgcttcgctgattatgttagacgaggaagaaattcaagaggaacggaacagaaaagttgagtacgaacagcatcgcaacatgtacaacgccaacttcgagaaccagacccgggccatgaacacctacaaggcccaattcgaggcccattacgcgcagtcagaagagttcgaacaaacaataaccaaaaaagctcgtcgcgcggttgctgctgctacaggaactggttcggttatgttatatgaatccggttcggttcaggttcaacctcgaaccgattcggaacccggttcgacggttcagaggagactatgggtgaaggaccggtcgaaggactggtgggagaagatcagccggaaggacttcccggaggaggagttccggcggtggttccggatgagcagaagcacgttcgacatgatctgcgacgagctcgacgcggcggtgacgaagaaaaacacgatgctccgcgacgcgatcccggtgcggcagcgcgtggccgtctgcatctggcggctcgccaccggcgatccgctccggctagtctcaaagcgcttcgggttaggaatctccacgtgtcacaagctcgtcctcgaagtctgctccgctatacgcaccgttctgatgccgaagttcctgcaatggccgaacgaggaaaaaacgaagcaaatcaaagacgagttcgagaaaatctcaggaatacctaacgtaggaggagcaatgtacacaacgcacgttccaataatcgctccgaaaatcagcgtctccgcgtatttcaacaagcgccacacggagcgtaaccagaagacgagttattcgataacggttcaaggcgtggttgattcaaaaggcgttttcaatgacgtgtgcatcggttggccaggttcgatgccggacgatcgcgttctggagaaaagcgcgttgttccagagagcgagcagagggaacttaaagggcgtttggatcgttggaaattcaggccatccgcttatggactgggttctagtgccgtacacgcacgcgaatctgacgtggacccagcacgcgtttcatgagaagcttgcagagattcaaggcgtagccaaagaggcctttgcgagattgaaggggcggtgggggtgtctgcagaagagaactgaagtgaagcttcaggacttgcccgttgtgcttggcgcgtgttgcgttttgcataatatttgtgagatgaggaatgaagaaatggatgatgagtggaggtttcagattttcgatgatgagatgctgccggaaaatggaatacgatcttctgcttcccttcaggccagggatcatattgcgcactatttgttgcaccatgggagggctgggactggctttttctagtcttctaggttcttcttttcgggttttcttgctttttttagaactttactactatctcattctttttcgctatgtcacgttgaataactagagattaactggattgcatagattgaaatatggtcatttgtatacaacaactattgattgtatagagaatttttgtctgatgagaaatggaattaaatcaattatgttcgagccatggttggaaaataaaaaaatgtcaacaaaaaaaaaaacaaaaaattaaaaaaaaaggggggggggggggggaaaaaaacgaaaaaaaaaaaaaaagaaaacaagcctacggtacgcgtgccatgcgaacg

SEQ ID NO: 81385 - DNA, 261 bp, Glycine max
  Clone ID: PAT_MRT3847_44505C.1
atgaatctcaaagccttcatttttagtacctaatctgtttgtatctctagatgagtcaaagggtattatgtttaactcctctatttctgttgcagatgatgccccatcttgctgctgatgatctgcttcatcagtttcaatactacttgttcatcagtctcatgtctatatgctgggacaaggcttattattcctatgcttgtggcataaccaggatctttcaaagaagatacactagactttttcacaaacaagcaccca

SEQ ID NO: 81386 - DNA, 1442 bp, Glycine max
  Clone ID: PAT_MRT3847_44506C.1
gctaacatgggtagctccgaattattattattattaacaaaatcatacattggcgaccagggtcgaagattaaagaaatggaagtgctgcggatgagggagttattgacactttggtcaacgttgcaaattaacaacgttgccctagtggggggaaaccacaccgccgccagattttgcactcgctaagtccccgtttgtctcttcccccctctctctttttctccttctagctaactacacacaaaccaaacaagtcattacttaattcacaatcacaaaacaaattgttcaccatcttcctgttctctttctaatcaacatcaacatgatgaaaacacgttgtcgcttgccgcttttggcattcttcgcattcgcttctttcttattcctaatgagatcatccctgcttgaaaaaacctcttccaccatgcctcattccttcaacactgaccaggctctgtcaattctattcggcgaattttccaaccaagagaaagcggttttcctcggcaacaacgagccgagcctagtggctgcgccgaggaagctatgcggttacaccccggaggcaaagaaagcggcgttgcagaagctcgagaacgtgcttctggaaccgccgagagcggcttccgggaaatcaccaaattacttaaaacgcacgcggttcttgccggatttgatgggtgattctctggagcactaccctcgtcgcgttttcatcgacgtggggccgccggagaaggagggcgggagcggaacggagtggttttcgaagaattacccgacgagggacaagaagttcgagatgtataacatagagacggtgacggaggagtggtcggacggggaaggaacagatagagatgtccgattgggttaggaagaacgtgaaggaggaggagtatgtggtgatgaaagctgaggccgaagtggtggaggagatgatgaagagcagttccattgggctggtggacgagcttttcttggagtgcaaacccaatcgcgggagcagaagctcagggattaactccaaccgaagagcttattgggagtgcttggctttgtatggcaagttaagggataagggtgtcgcagtgcaccagtggtggggttagaatcaaagagaaagaaacccaatggtgaactctttgtggtgatactcatagagagaaattactactattcattatataaagtactgcttgtgcgcatgcgtgtgtatatagatatggagataaaagagtaaagagactgaggagtttcaacatcatttttcattttgcgtcttttctgggttctgattaatattgtttatgtgtattatacttttggaaggggttgtggaaaataatgagtactgaaacgagcattggatgggtaaaatgcccgaatgtgtattgaaggagggttgattggaggatcatatatatatatatatat

SEQ ID NO: 81387 - DNA, 215 bp, Glycine max
  unsure (1)..(215): unsure at all n locations
  Clone ID: PAT_MRT3847_44507C.1
tttcgtaataaccctctcagngaaanaccctacctgggcttttaagaagcagatcctcttcaagaccctcaccggcaagaccattacccttgaggcggaaagctctgacaccatcgacaacgttaaggccacgatccgggacaaggaaggaatccccctggacaacaaccggctaattttccccgaaaggaaacttatggacaaaccaaaccctt

SEQ ID NO: 81388 - DNA, 281 bp, Glycine max
  Clone ID: PAT_MRT3847_44508C.1
gactccaataacaaatccttcacttgttgctcgtcttagtttctgtgttgtgtcatttttattgctatatcctaattaaacttcaccctcaaaatgagtgatcccacactagcacaaccacacctagtcgaagtccacacaacactcgaaaccgttgttaccacgcacaaccataaccatagaccctcaataaatgtgtgttactgaatatttaattatttgtacacctgaccatgattaatatttaattcttcaactttgtttatgcatgaccgtgacta

SEQ ID NO: 81389 - DNA, 182 bp, Glycine max
  Clone ID: PAT_MRT3847_44509C.1
gcgtgcacaaaaaaccgataaaaagacgagaaagagccaggcgtacagaaagatatagcagggactgagtgaatttgttacgaaagaaaaacggccgggagggtccacccgggaagaacaaaccgtaaagcgcgggctgcccactgaaagaactaaggggaaggaaaagagctgggctaaat

SEQ ID NO: 81390 - DNA, 577 bp, Glycine max
  unsure (1)..(577): unsure at all n locations
  Clone ID: PAT_MRT3847_4450C.1
caatcatggaggagttcgaggatgcagtctcattcgtatctaagaacagcggcatgaagacatcacaagatgataaattgagattctattcgatgtacaaattagccacggtcggcccgaacgatacaccacgtccaggattttttgactttgcaggtcgtgcgaaatgggacgcgtggaaatcgtgtggtgaattatcaccagaagatgccaagactgaatacgtcaaactgctagatcgattagatccgaaatggcgggaaactctgcccaaccttccaaaacattccaaagcacagagcaataatgaagatgtgggaggtcccgtctttagcatgccacagttcgaagaagagatcattccggaagaagacaggacgttagcgtattacgtcagctctggagaggacagtaaggtgctggaattgatcgccactgcacataacaaaacgtcattgatcgataagagagataaagacggtatcgcagccatccattatgcctgcgacagaggtcaccaacaactgctnaaaatactgcttgacaacggggccgatatagacataccagatgaaga

SEQ ID NO: 81391 - DNA, 1929 bp, Glycine max
  Clone ID: PAT_MRT3847_44510C.1
gtaacaggcacaggtatttcgaacaaacacgagcactgaggaagtgtgtgtgtgtgtgggtgtgtctgaggaagtgtgccctaatttgaatttgaatgctaacacactgcaatttcactactagcattagcaaaacgagaattggaagttgagaattcgcagcgagaaagaaaaagagaaagagacatggcagaagacagcgaagggacggcaaagaaggaggagattttagagtctcagattgaaaccgctatgcgctctcgcgtttctctcttcaaggaacaatctgactccttgacgttcgagggtgttcgtcgattgctcgagaaagacctgggattggaggagtatgctttggatgtgcataagagatttatcaagcaatgcttgctcaagtgcttagaaggggttggagatgatgatggggcaaagatatcagggaaagaaggggaaaaaggtacaagtacacaagagtcagaagaaccaaaagaagaatgtgaagcaaaagatgcgaaggatctttgccctgaagatgaggagaaaatggaagactctccagtcttaggtcttcttaaagaacaaaaaagggctaaacttgaaaccaaggatgataaaggcaatggaaccaaagtagttccaattgaggccctaattaagaaagctgttagaaaaagatcttcgtacatcaaggctaatgcagagaaaatcactatggctggtcttcgtcgactcttggaggaagatcttaaacttgataaatttactctggatccctataagaagtttgtaagtcaacagcttgatgaggtattagcatcgtctgaagttcccaaaccttcaaataatgctaagaaaattgttaagaaaaaacctgataccaaagtaactaaaaaggtcagcagtgaagagaactctgatacttcagataaggagactgatgaggaagagagtgaggaagatgaagttaaacctaggaaaaaaattgttccaaaaggcaaggtgaagacttctgtccaacccaaaaagcgtaaaggagaggagactgatctatccagtaagaaaagggtcaaacctgctaaagcaacctcagaagacaataatgatgcaaaagatgatgggaagaactctgaagatgatcagtcctcttcatcacctgagaaaccttacaagaagaaagaagtttcaactcctgtgtatggtaaacatgtggagcacttaaagtctgttattaaagcatgtggaatgagtgttcctcctgtaatttacaaaaaagtcaagcaagtgcctgaaaacaaacgagaagagcagctaattaaggagttggaggaaatactgtctagagaagggttgtcttcaaatccatctgaaaaggaaatcaaagaagtaaaaaggaagaaggcgagagccaaagaacttgagggtattgatctaagcaatattgtgtcaagttcacgtagaagatcaacaagtagttatacatctccacctccaaagccaaaggttccagttgaaaccagtggcaatggggctgaaggtagtgataatgacgatgaagataatgataatgaagaggatgaagaagatgaggaagaggatagcggtgacgatgatggaagtcagagtgaagaatttaacgatgatgaagaggacagcgattgaactcggacagatttcacaataattaaggcgatttttttcacaattaattaggaggtgatggtgtataatgtaatgtcttgtaacgtgtttgctcttttgctttattttctgttgttccgaatatataatgtggtaatggccagtacttgttgctagttgcagaagtattaatttagtttcttccttggtccgttaatagtaacttctgctttgacagtattggtttaaatttagtatattttatttcccctacgaaaaaaaaaaagagaa

SEQ ID NO: 81392 - DNA, 381 bp, Glycine max
  Clone ID: PAT_MRT3847_44511C.1
gggacaatagcatttgaaagcattttgaatattggaaaaataaagcaacaattaggcaatatatgtatatacatcaaccatggcaaaaatacatcatcaagcatggccaaaaaaaacatatcatccaatggaacatacccccccccccccccccacacacacacacacttattcccaaaaaaaaatccaaagctcaaaattccttaagggtagggtgagatcatggtttttcacttaaggcttgtaatgagcttcaaaacaaagaaaggggaacataggctcaaaggggcaatcaaaggaattaattcaaggtaggctcatttggctagaggcttataagaacaaaatgcctaaatcatctcccaacatgcatgtgaacca

SEQ ID NO: 81393 - DNA, 870 bp, Glycine max
  Clone ID: PAT_MRT3847_44512C.1
cccacgcgtccgtacggctgcgagaagacgacagaaggggaagtctatgttcttaaaccaagccacaaatcaaccttgcaatccaaaataattgaaaattccataccagacagtgtttcagctatcccaaatgtcacacatgtggagtctgaatttgaagcaggccatgatgctgatccaccaaaatccaaaggtgatcttgtatcagtcttgaaggctgaaaaagaagagttggagtcatcactgagcaaggagaaacagcatgctcttcaactaaagcaagatctggtggaagctgagtctcgtaactctgacctttacaaggagctccaatcagttcgtggtcagcttgcatctgagcaatcgaggtgtttcaaactcgaggtggaggttgctgaattaggtcagaagctccaaacgattgggacattacagaaggagctggagcttctccagcggcagaaggctgcatcagagcaagctgccttaaacgcaaaacaaaggcagagttctggtggcgtgtggggttggcttgccggtactcctccccctagccggaatgcagatgatgcgtgaacctcttaactgaataccagtgctacattacttttggtttcattcagccaattttatttccaatatttactgtgtattaattcagttcttttttattgatgtaaataagatttagcttctatttggccaaaggattttccacaccggagaatgaggatcatggtatggtatagtgcgtgttactccatttttgctgatgattaaagtgagatacattattgaatgaattattgtttttttttttaaaaaagaaaaacaaagggcgaccaccgtctagtgagcgggtcttccccg

SEQ ID NO: 81394 - DNA, 679 bp, Glycine max
  Clone ID: PAT_MRT3847_44513C.1
aataaaattcgagacaaacaaactaagataacgtgaagttataatttaatagttatttttacgtgaaaatttataatttaatagttaaattgataaaattcgcattattattattttttgacgtgtaaaaaactgttcatgtagaatttatttttgaaatctctaaaattatatctttacttttaaataaatattttttattctataaaaaaaatatactcttatattgtagactagaatagaaatttgagagagagagattttactctcctcattgtttcaattatacattttcaacattttttccttctctttaataaatgtacattttacactgcttttacaatcaactaaaatatttctttttcaaccaccttaaattttcatttttaattatgtttatttttattttttattttcttaatcacgcatctctttaaatttactttcttttatatctaattctaaatttaattttaataattttttcttaaaaaatgtcaataattaaaaataaccttatataaaaatttaaatttttataagtttgaaatataatttttatataaaaatgtatattaggttcaaatcttacttataatattattatagatttaaaatatttgttataaatattaattatataaattaggatttatttcctagaaaacccccgcct

SEQ ID NO: 81395 - DNA, 916 bp, Glycine max
  Clone ID: PAT_MRT3847_44514C.1
tgttattgctagacagaagagttgaaaacaaaagaaaagcctaacctcaatctcttgttctagttcttaatcctgttgttctaatatggaggaagaaagcacttcagcggaatccaatccttcttcgagcgaccgcatcaaactaaacgtgggcggaaagctcttcgagacgacgttctccacgctccgttctggcggcccggactcgctcctcttcgcgctctcgaaccgccgatccgccgacccgagccccgtcttcatcgaccgcgacccggagatcttctccgtcctcctctccctcctccgcacctcccaccttccctccgccgcgcgccgcttctccaagcacgagctcgcctccccctccggcggcgtctggatcgcccacggcggccaaatctcctgctacgatcccatcctcacccacgccgccaccgtccgcacgcacctcgacgaaattgactccatctgcagagtctggcccgagatcgccgccgtcgggtccaaatccgacaccggcctccacttctacaacttctccggcagccgccacgttggatccgtccactggaccgatccgctcgatcctcgaatcttcaaagccagcgtcaacgccataacaagctcctcaaactccgttttcgcttcgttcgattgtccgcacagagagaattgcataatcgaagtcgataaggagaagcttctgatcgcgaatcagttcgctcggcaatcagggaaccaggcgaagaacatggttccccgaaagctgacgtggattccggcgaccggagttctcgtcggaagcgcggtcaccggcggcgcgttcggttactccggctacgtccggttgtgggacccgagatccggggacgtggtctgggagacaaacgagcctggtggttcgggacggagcagc

SEQ ID NO: 81396 - DNA, 286 bp, Glycine max
  Clone ID: PAT_MRT3847_44515C.1
atagggaaggcgggcggctccggtcccggttccgattcgggcacgcgcacgcgttcgccttttcaaaggtctaaagaaaactaggggggctttggatattaaaaagccaggatattgcgattgtgtcacgataagctttgatcggattactggtgttgccttggactctcccgagggcagggcaagttttttgaaacagcttatttacattttatgtcgcaacggggacatgctatacactgatctcatcaagcctttcggagggagtcgagaacggaattttctc

SEQ ID NO: 81397 - DNA, 346 bp, Glycine max
  Clone ID: PAT_MRT3847_44516C.1
cccacgcgtacgacacagatggctcgaacgaagcataccgctcgtatgtccacatgatgtgaggctcctaggaagcatcttgcaaccaatgctgcacgtaagtctgcaccaactactggtggtgtgaataagccctacattaatccgactggtaccgttgctcttcatgagatcaggaaataccatattagttccgagctattgatccggaagctcctcttacagaggctgggtcgtgaaattgctcatgacttcaagactgatctgcagttacagagtcacgccgtgcttagcattgcacgaagctactgatgcattcattgtcgggctcaatgaggacactaac

SEQ ID NO: 81398 - DNA, 310 bp, Glycine max
  Clone ID: PAT_MRT3847_44517C.1
caaccgtcccatccgtgcctgaacctcatgcttctatttggccgccgaaatggcggcagcctttactgcctgctacattgttttgatggacaacaggccatcttcgcagaagctggttcacggagcgactacgcttcttaatttctctacggatcagagagggatgtacagtccatatagcatggatgcttctttattttacaatatcaccacctattgtgataaattccttctgggtaggacatgggtatacttagccactgggaattcctctgacttaaatatatgtaccgctgatagcatcaccaaa

SEQ ID NO: 81399 - DNA, 795 bp, Glycine max
  unsure (1)..(795): unsure at all n locations
  Clone ID: PAT_MRT3847_44518C.1
cacgcgtccggaaagatcccgcatcgcatccgcaaatccagatagatcatcgcaggcaacacttttttggttttggagtttggacaacaaaagcgtcaactccgttatcgactctatcactgtcacactattttctcgtcgcaacttccactaacggaatttttaaaatcaaactctgtcgttgcaccctccgtctccgcaactcacacgccattttcctcatcttcatcttccgcgctctccttttcaccattcgctgttcgatcgatgccagtgtgaatctgaaattggagcggtggtttgtttaatcgaatgcgatctggttccggcgattgaatatattttttttaggtgcgtggtgtagttcaactacttgaagctctgtttcaattttgtttgatttagtacattggttgaggtgaaatttgcagttatttgaagactttggagtagaagcttcggttgagaatgccgggttttagggcgaaaattaggattggaattttgattattgttgtcgtagggatttgtctcgctgctttgtatggcttgttgaagcctatttcgaatggatgtattatgacctacatgtatccgacttacattcctatttcgtcatcggagagcatttcgccggtgaagtatggcttgtacttgtaccatgaggggtggaaaaagatagattataaggagcatcttaagaaccttaantggtggtgcccgtgctttttatcccagncaaatggtggcagcttcaacagggcagggngcgatcattggcagcagaatctgatc

SEQ ID NO: 81400 - DNA, 445 bp, Glycine max
  Clone ID: PAT_MRT3847_44519C.1
ctttttcgtccgcaaacacggtggatagcacgtgaggagttaagagcacacggggggatggcaaaaactgttccaattcacggcgttgacaaactttcagacaccacccaggtcgacaacgataagaatgctaaaggcgaaaatacaccgggcgagcaggaaagcgataataccaaaaaaggcaaccggatctcgtatcaaagtagtcgcgttataaataaccatggtactcacaatggtaatggcaacggatcctttaacgagaattgcactcagactcagaccacacaacaacatttctactatgcgcgtaaatagtttaacaattatctgcgcagtaatatgatcgatctactactatgttatgctatatgcattaccaataggggtatataataaactgtgcagtaagatcgtctactatgttgagctggattgacaataa

SEQ ID NO: 81401 - DNA, 336 bp, Glycine max
  Clone ID: PAT_MRT3847_4451C.1
tggatcctctagagcggccgctcttttttttttttttttttttttttttttaaaataataattcaacatttcaacaccctaatagagcaaaatagtaaaccacaatgcagttcatcaatcagtcacaacaaaaacagcccagtgtagccaagaagcccaaaacaatccctactcaagagtgtgacagtatttatatttatatacttcccttactaattaccactaaccactagctattataacccgtccacattaccactgtgctctagcacatactcacttatccctcttttttttaaaatacacttttaatattgggaccttacagtttcaaac

SEQ ID NO: 81402 - DNA, 768 bp, Glycine max
  unsure (1)..(768): unsure at all n locations
  Clone ID: PAT_MRT3847_44520C.1
ttgattgtcttaaccatcaaactcagctaagtatactataagagctttataggagctcttcttttcttctcttctggaaagatagatcaaagcccgcatttaataaacaaacccagatagatagatcatcgcagcagttttggacaacaaaagcgtcaactccgttatcgtctctgtcactgtaactattttctcgtcgcaacttccactaacggaatttaaaataaaactttgttgcaccctccgtctccacaattcacacgccatttccctcatcttcatcttcatctttcacgctctccttttcactattcgatctcttttttagttctggaaatttgatttgttttggctactgaagctgttcgattggtgcctatgtgattctgaaatcggagcggtagtttaatccaacgtgatctgttttcggcgatggaatagattaatcgaactacgttgcttgaagctctgtttctaccagcggcacttgttgttgtgttttatttagagcattggttgaggtgaaatttgcagtgatttgaggactttggagttgaagcttcgtttgagaatgccgggttttagggggaaaattaggattggaattttgattattgttgtcgtagggatttgtctcgctgctttgtatggtttgttgaagcctatttcgaatggatgtattatgacctacatgtacccgacttacattcctatntcatcgtcggagagcatttcgccggtgaagtatggcttgtacttgtaccatga

SEQ ID NO: 81403 - DNA, 233 bp, Glycine max
  Clone ID: PAT_MRT3847_44521C.1
ctcgaggcactcgagccgattcggctcgagtcgtcaaccgtcctattcgtcgtacgaattagggccatcactgatcttgaacaaccatatgccagcgatatgagcgattcacagtcatgaagccgccgcgtagtgcgtttacgtatgcgacttccagatgccggttcccgccagtcccagcggcggctccacgccaactcatcagcgggaacaatccacgcagcaagtgacgg

SEQ ID NO: 81404 - DNA, 1087 bp, Glycine max
  unsure (1)..(1087): unsure at all n locations
  Clone ID: PAT_MRT3847_44522C.1
annnttnnnttttnttttttnntttttttnnttttttntntnnttttttnnttatttttatannnttttttttttttttttttttttnnttttnntttttttttttttttttttttnnttttntnnttaaaaacatnngaaatnaatggannnangnnnngaaatnnnnntaannttaatttttttntatttnntttttttttnttnnnnttntttttttttttttnnttttttttttttttttttttttttttttttttttttttttttgttnnnnttcgcccggctctcgtccccgggcgccggcccccgcccccccccccccccgccgccccccgcctaccccgcccccccccccccccccaccccccccccccccccccccccccccccccacccccctcccccccccccccccccctccccccccccccccccccccccccccccccccccccctccccccccccccctccccccccacccaccccccccccccccccccccacccctcccccccccccccccgcatcctccaacgtacacttgccacagctgctcccgcatccccacccccaaagcgcgcgcagcgccggcccccagcagccaccaccacccccctcgccacccccccccccccccgcccgcccgccccccacgccccgccccccccggcaccgcccacccaccctccccctcccctccccccccccccccccccccctccccctccccccctcccccctcccccccccccaacacccgcccccaccctccccccaacccccccccccccctaattctaacctccctccatttcaaccctcttccccccccccccagttccaactcaacttaaccctcacctatatccccttaccctccacctattactcccccccttccccccaccccccccccnccccccccccccccccccccctccctaacccatttccccaacctcctcccccccccccccactccactcctcaccccccccccatatcccccccacctcctccccctattccaccctcacccccacacccctacttccccattccccccccttcccccccccccc

SEQ ID NO: 81405 - DNA, 382 bp, Glycine max
  Clone ID: PAT_MRT3847_44523C.1
ccggaaggtttatcgcgactcaactcttgatccaaggagaaaggcataccttgtgcagaatctaatgacaagtcgctggatagccgcccaacagaagttacctaaggctctatctggggagtctagcaaacaaatagaaggatgctcaccatcatttcgagacccagagaaagaaatatttggttgtgagcactataagcgaaattgcaagcttcgagctgcttgttgtggcaagttatttacttgcagattttgtcatgacaatgcaagtgatcactcaatggatagaaaagcaacattggaaatgatgtgtatgcagtgcctaactatacagccagttgggcctatatgcatgtcaccttcatgtaatggacttacaatg

SEQ ID NO: 81406 - DNA, 391 bp, Glycine max
  Clone ID: PAT_MRT3847_44524C.1
gcggggtagctggccctttgatatcaaccaagtgtggagaaacttatttctctgttctcccatttgaaggagggggacgcttacacctgtgtctgcagtactgaaatgattcaattacggcgcgcccagagtcttctatcttagctacaaacgcggtcgattaggactctttgcaacaagggctttacttgaactccgatggaaagagaaacatgttggatcatccactctgatgacagaccaagggcgactggggcgtaggattcattgctagaacttagagcggactgtgaaaaagaagcaactgctgactgttcggatgttatgccggaagacttgttggagcgaattctaacctatctccccatcgcacgcatttatagagctggct

SEQ ID NO: 81407 - DNA, 220 bp, Glycine max
  unsure (1)..(220): unsure at all n locations
  Clone ID: PAT_MRT3847_44525C.1
aaataaatttaaaaaaaannnnnnnnnnngnntntttnnnntnaaaaaaaaagaaaaaagatataaaaggagaaaaacttatatacacgcgcggtgccacgttttagcggtcctatactttcatctatttgccatccactgatcgctttttatagggtaacgaatgtgaaaaccctggcttgactcaatttaatgtccttgatgtaaatccccttttttt

SEQ ID NO: 81408 - DNA, 200 bp, Glycine max
  Clone ID: PAT_MRT3847_44526C.1
gtctaggaaaactcgatacagcatcaagtccagattttgacagttttgaggggaatgcaaggttgagaatgaaacaacaggattcagggaaggatcctttgactgaaatgtttgaggatattggtggacatactaatgacaaaaattacagcttgggtgttagaaaatctctataagcttggtgcgattagctgattgat

SEQ ID NO: 81409 - DNA, 603 bp, Glycine max
  unsure (1)..(603): unsure at all n locations
  Clone ID: PAT_MRT3847_44527C.1
tacgctttttngaaacaacgccacacgccccaaaccgagtctgagagagaggagggtcaacattgcacaactcaatttgacaatttccccttccctttgccccaaaccctcctctctctcgttgaaaatcttccattattatagggttagggttctcctgaatccgcaatggccgtttcaaccactttctccggtgccaaattggaggctctattgctcaaatgttcttcctcctcttcctcaccaccgccttcaaggtcatcattcaccacttttcccggccaaaacagaagaaccctcattcagagaggggttattcgctgcgacgctcagccctctgatgcatcatctgttgctccaaataatgccaccgctctctccgctcttgagcagctcaagacttctgcagctgatagatatacaaaggaaagaagcagcattatcgccattgggctcagtgtgcacactgcacctgtggaaatgcgtgaaaaacttgccattccagaagcagaatggcctagagctattgcagagctgtgtagtctgaatcatattgaagaagcagctgttctgagtacctgcatcgaatggagatatatgttc

SEQ ID NO: 81410 - DNA, 371 bp, Glycine max
  Clone ID: PAT_MRT3847_44528C.1
gcccacggcgtagcaggcgtggtgaacgtcctgctgctgcggcccaggagctcaacgctgccgtggccgaggggcaggtgagccctgcctgccgcaaggttttggaggacaccgtggactggctcatctcgcttcgatttcgcgattcgggcaactaccccgcgcagcttgacgacgccgacgacgtcctcgtccactggtgccacggcgcgcccggaatgggcctgcttttctgcagggcctacgaggtcttcaggcacgcccgctacctgaacgcggccctcgccgcgggcgacgtcgtgtgggagaggggcctgctcaagaagggcctcggcctgtgccacggcgttgctggcaacggatacctattc

SEQ ID NO: 81411 - DNA, 325 bp, Glycine max
  Clone ID: PAT_MRT3847_44529C.1
ctccgacttctctgcctcgcggcgcgtggtgactgcggacctgacatcggaggagcagaagcgcggtggcccggtggtggtggagatgttctcgccgcatgggtgcgcgactttaccggctgcggagctggtgctgtagcggctgtagagaggggatgtcgcgcttgatgcaccactggtggagcttgaatattacggttgctgcgggtactttttggtttgggaggtagcatttaatgctcttactcagttcaattatgcgcattgctatttgcgaggagtttgtttttgtctcaattttttactcttcatgtattaggttcaa

SEQ ID NO: 81412 - DNA, 626 bp, Glycine max
  unsure (1)..(626): unsure at all n locations
  Clone ID: PAT_MRT3847_4452C.1
cacgcgtccggcttgctcttccactcgcactcaaataccacttgaggtgagtgggactcttgtgcatgccagccacacttttcaatccctctcaatatcacttgaatttttattttttttaatctttctctctgtttgcgtgtgtttattggtttgggagtctcaataattttccttcccctggttcttttgttttagccatatgatagctagatgtatattttatttcgttactagctaatgttcatttttgttgtttgtaagaaagaccacttttttccagttattttacaactaacacttgttttattttggttataattttaataggaattcagatcttataatcctcagtttggtcctatgaaggacagacacatgaagaaaaaagtcaaaagattgaaagacnatggttgagccagataaaaattgcgagactagggttgaagatgttgcttggctttgctccctttcagagtctgagatcgacatgctgattagcttgaaattgttgatcattcagcgtgcaaaatgatggggttgtaaagagctggctagtaaatttaaccttaaaatgattcgagccattggtattgatgtatgccttttttttcctaactaaatgc

SEQ ID NO: 81413 - DNA, 190 bp, Glycine max
  unsure (1)..(190): unsure at all n locations
  Clone ID: PAT_MRT3847_44530C.1
cgccttaacccccncaccaaaacacccannnatattgatatttagttctgatgagcttaaaaaacaaacttctaatacgaaaaaataaatcatgaagttttacctgtgaaacacccaaccacttaaaaaagttggtcaaattctgtttaatcagaatctgacaccatagtggagataccatgcttttccc

SEQ ID NO: 81414 - DNA, 1832 bp, Glycine max
  Clone ID: PAT_MRT3847_44531C.1
caaaacaatactaaactaaactaaattaaaagtaaaaacaaaacatgttggtttttaaaatcaatggctgtgtcttcctctcactcattcccttttctccaagttacttcccagaacaaaacatgcagcaacagtgttatccccaagactatgccccgtttggtgtcattcagtagctcgtgccaccactctgcccacttctccaggtggggcggagcaggttgtggacagttcgtttgatgcacctaaagtgaaattattgaagcagaaaatggaacttcttggtatcaacttggaaaagtcttgtttgcctgggaagaccataacctgttttgtccaaaatgcaaaggtgggcagttaaaggagaggagtttgtcttttcacattatctctgattgtgaatttgcaatgtggagggtgttttcgagctcaatgtggttgggctggtcaggtttctgcagatgacaaggaattgtacagtggggtttgtactgcaaccttcaagtgttagtcgaattatttgcttatgtattgatttgctttttccctattttaggttgttgcttattttggagagagattgatatcagagaaaaccctgagcagaaatgctgtaagacaattgtctaacaataagactgtcattgcttttacttataaacaaaatgggttgcttgttggttgcaagtacagaacaatggagaaaagattttggcagggaaaaggcgcggacaagatactgtatggaatagatgacattagtcaagcctctgagatcatcattgttgaaggggaaattgataaactttcactcgaggaggctggctttcagaattgtgttagtgttccagtgggtgcacccagaaaaggtttcttcaaaagatttgccaccaattgaaaaggacactgcatttcgatacctgtggaactgcaaagagtacttggataaggcagttcgcattatcctggcaactgataatgatccaccaggtcaagctttagcggaagagctggcacggcgccttgggcgagaaagatgttggagagtactctggccaaagaaagatgaattcagctctttcaaagatgcaaatgaggttctcaaatacatgggagctgatgctttgaagaaattagttgaaaatgcagagccatatgcaaatgccaattaggtaatttcatctatgaaagtggatagatttcagtgctcatgatgaaaaccatgcatatgcctgaactactacaaaagtttagtcatacaaaaaaatgtaaagtagtgtgaccatattcgtattatttttaattaaattgggtatcgagatatctcatttatttggtggctaaattttagttgtttagtgtcagtatttcaagtgtatgtgggcagtgtgttatgagattttaattgggctctttaagggtcagaaatgaaatacttttgactatatatgaccttcagaatagcatcttaatcaaatgattatttgcaagtcatacgtggttatttctaattgtgaattatggaaaaaccaccttattgtccccaagtttctgccattcatgattaattatatgattacttatagaaagagaagatggagtcaaaattttaagttcatagtataataaccacatgtaaaattaattaagaatagttgcagatggcaattaagatgggatacgtgataatctaatagaatgaccggagcaatgtttaaaattttccataaaaaggagtatttcacaaaaggatatgtataaagggactaggaaatgaagttttactcatgcaggtcgactctagaggatccccgggtaccgagctcgaattc

SEQ ID NO: 81415 - DNA, 267 bp, Glycine max
  Clone ID: PAT_MRT3847_44532C.1
agaagccaaagaaccaaaattcatttcatttcatttttaaaagaaaacagattggcaaatcctaaaacagattccatgactttttggtctgggccctgcctgtgaaccaagaaaaccaaagttcttatgaatctttttttttgccccccccaaaaagaaagcctgcctgggacttttctggcttattaattattccgagttatggacccttttcctgcttcacttggcacaaaacccaacccaactaccctatgcttaaagggtggt

SEQ ID NO: 81416 - DNA, 410 bp, Glycine max
  unsure (1)..(410): unsure at all n locations
  Clone ID: PAT_MRT3847_44533C.1
agaaagttgaaggcattagaaagttggcgagctatatctgataaagaggattgtgatgctgaaattgctggttcagagtgcatggattattcagaagttgtaccatatgtccaccaggcgtttctggcagattggaggccacacacatctactcttacttatcctgaatgcatttccactacatctagagaaggaaatgttgctcacaatgcattttctcaaaaagatattcaattttataggggtactcatgattatggtttaagtggaaaagttccacttgagaatggtaatcagtctgcattaccatctgtatctaagcttcctcagctttttcatactacatctgatttgagaaatggaatgaaaggtgctcctagcaccattaatcctanganccagttnttgac

SEQ ID NO: 81417 - DNA, 731 bp, Glycine max
  Clone ID: PAT_MRT3847_44534C.1
actatacccaaaacccaaaggcatgtgatgaataaataccccatccattaattatgatacccattgagtcagaatcctattaccatcctattttgatggtaaagaagaccataaagtatccaaaaaaattgaataaaagacattaacgtcaacgtccacttgctccaaatcgtatacaaccaacaaaatttcacagaaatccttgctatggtagcatatgagaacgaaataagagggggtacgtgcaacaaaacccactgctccagcacacagaaagcaatggtccctgcttaaacttcccgtgaaatgaaaatgagattggttttggcttgtcaccaggccctcttataaatccaattaatgatgtagatataagaggagttcttcttgtatcatatatggcgatcagacccctatacatatcatctccacctttaaaagacacagctcatcgctccccggaattatcccatgctatcttttcaattccctgactgcctgtcaatcatagtttttctggcaacctccgcttctggacgcacctcctgatctgccagatgcagcatttccaggataagaagcagcccacatgcaaattccacccttgcaacccacagcaagcattttcccaccattgggcctccactccagcactctaggatctctctgcgactcatttgtcaaaatacttggatcctttccctcagactcttcggctcgagcggctcgag

SEQ ID NO: 81418 - DNA, 465 bp, Glycine max
  Clone ID: PAT_MRT3847_44535C.1
acggtagtataaaaattgtttatttaatatcttcaatgtagagagagatgctattctgcttacaatttcaatgacattttcacccgtatctgtacgactttaataaaggaagatgttaggcgtgagatccttttggttcaagattttttgtattcccattctgtaattctcaataaccaaaagaatcctacacattaaaaaatgaatatttgtcatcatcatgtagagctcaaattagagtcgaagatattagaaacctcgtggactttaaacaaaatggacatgctgtatccaattgattacacactggacacacttccctttgaagtttggatacacattgcgactctcctcgtcagagctcttttgacaactatgaattggagggagaaagcttcagaatagccgaaaggatatatgtaagcacaaaaaatagcgctaattctttcatttgaatacacccat

SEQ ID NO: 81419 - DNA, 271 bp, Glycine max
  Clone ID: PAT_MRT3847_44536C.1
ggagcaaaaccctaatccctatttttcttcctcagtagtgtcatttacgcttctcttctctgcagcaactatgcctaaccctaaggtcttcttcgacatgaccatcggcggtcaatctgctggtcgcatcgtgatggagctctacgccgacgtcactccccgcaccgccgagaacttccgcgcgctttgcaccggcgagaacggcgttcggcggagcggcaagcccctccagtaaaaaggctcgtccttccagcgcgtggatccgagtttc

SEQ ID NO: 81420 - DNA, 281 bp, Glycine max
  Clone ID: PAT_MRT3847_44537C.1
ttgcacgcgtgggttgccggtgagaagctctggggggaagtggagagcggcggactgatgagctatgcgaaaattaatgtcgaaaacgggtcggattcgtgtacgaatatggcgtcagtcggcgggactgacttacctgacaaacgggtgtatgtgcttgcctgtgggctgtctctctagtactatatgacacatgtggctacgcctcagagtgccgacaccaaaagtgaccatgacatagctagtgccttagacaagtgccatgctggatatgatgtcac

SEQ ID NO: 81421 - DNA, 242 bp, Glycine max
  unsure (1)..(242): unsure at all n locations
  Clone ID: PAT_MRT3847_44538C.1
ctaactttcgcatattcgaaaaccaaaagcatgggtcagggaacancggaangnctgnncnngcannntcttncgnngnnncggnagccgganggcggcgacaagaaggagaagaagttcgagccggcggcgccgccggnccgcgtgggccgtaagcagcgtaagcagaagggcccggaggcggcggcgcggctgccgacggtgacgccgctgtcnaatgcgagctanngctgctgaaagct

SEQ ID NO: 81422 - DNA, 300 bp, Glycine max
  Clone ID: PAT_MRT3847_44539C.1
gattacaaggaaacctaagaacaatatttgttgcacgaagacactttcattgcaagcacatagcttacttacaacacctagggacactgccgcctcatatctttattaaactcagaaacatgataagcaaatatatactcaaaaagcgcgcacagcacgcgccctatattacataacaagaatcttttcatagaatcttgtccacactaagaaacacctgaaagaaaaggaaaccaaattgatctcttatagttgtgtaacacacacaacaaggcacttaacatgtttggcacactgatc

SEQ ID NO: 81423 - DNA, 929 bp, Glycine max
  Clone ID: PAT_MRT3847_4453C.1
caataataataactccattttccctctgtcttccccccctcctctacacaaaaatatattattagcatggagaaggtgaattttgtgaagaatggagagcttagattgcctccggggttccgtttccacccgactgatgaggagctggttctgcaatacttgaagcgcaaggtcttctcctgccctttgccagcctctatcattcctgagcttcatgtttgcaagtgatttggagcaagagagatacttctttagcaccaaagtggccaaatatcccaacggaaatcgctccaacagagccacaaattcgggttattggaaggcaactggcttggacaaacaaattgttacttcaaaaggcaacaaccaagttgtcggaatgaagaagacacttgttttctacagaggcaagcctcctaatggatccagaactgattggatcatgcacgagtatcgcctcatccttaacgcctctcagtctcagagccatgttgttcccatggaaaattgggttctgtgtcgcatatttttgaagaggagaattggtgctaaaaatggggaggagagcaactctaaggtggttttctatgacttcctagcgcagaacaagaccgattcctcctcatcggtcgccagtggaattacacatgaatcagatgaacatgaagagagcagtagctccaacaccttcccttatactattagaagaaaaccttaacaaccttccttaaaaatttaagttcattatctagttgttgtttttaattgtctttccctttccctgtaattatcatcaatcacttgttgaaaggaagcatcctcttcccaaatgagaccggcattaagggtagtctggagagtatggtactaatactagtagtagtgtgtaatacacttctcatttcccttcaatttaaccccttttttct

SEQ ID NO: 81424 - DNA, 427 bp, Glycine max
  Clone ID: PAT_MRT3847_44540C.1
atgtggaaatggcgaggggttcaaagcaagctgttaatggagcaagtttggtagaaagagatcctagcctggccttgacaaagacaaagaaatctacaacctctaaagaacttccaccactggaagagctaaaagttttgccctcagatgaaggattcagttgggccaatgaaaattacaattccttgcaaagatcaattgatgtttggtcttttgttatttctttacgtattcgagttctgttggacaatgcaaaatgggcatatttgggtgactttacagaagaaaaacagaaaagcagaaggcggaaaactgctgcatggctaagggagtgtgtattacagcttggcccaactttcattaaacttggacagttatcatcaacaaggtcggatctattttcccgtgaatttgtagaggagcttgc

SEQ ID NO: 81425 - DNA, 501 bp, Glycine max
  Clone ID: PAT_MRT3847_44541C.1
cttcttggacaactacccaaagatataaatatcattaaacaaaaactaggctatgatacctataatcttccttttttttttcacaattccccaaaaaaaaaaaaaaaccaaataatttatcctttccagggttaaaatttacatcccaaaagggaaaaggaactgcatgaggctttataaagtggggaggggcagggcaacctcaagcaaaaaaggcggaggaactccctatataatcttcgccatgcagccaaagggttaagcttcctccatccaaggcacatgggctctcaatccataccaggggggggaaggaataaacattcaatcagggcaatcaacctcattggagccactgcaacttaatacgctaaaaatgggcttctttaaaccattcaaggcattcctttgcagttccaaagggaggggcaagttgccaagccattgttttatccagcgactccttaacaagaggccctccttttaagttgtggggcattc

SEQ ID NO: 81426 - DNA, 683 bp, Glycine max
  unsure (1)..(683): unsure at all n locations
  Clone ID: PAT_MRT3847_44542C.1
gtccggaattcccgcgtcgacccacgcgtccgttataagccggcggtctaagatatggttaggtagattatacttctcgttaacatcagatttaattatctaatttatcaaaattaaaagtgtttaatttaattgataataataaatttatcttaaatttatatattttttttaaaataacattgtcattaatacttatctttcttctaatggttacattatatttcttcttttaataaaaaatatttttaatcaaaaataattaatgtaagaaacattataaattgagttttataaaaagaaacaaatattatttcaaacttgatttctataaataaataaaaagagagtaaaatgttaattggaattgcacactttccctaatactaacatattagtctaagaacatctacactacatgngttgtttaaatgagttatttatcataatttaattttatgaattttagaatttcatataaatttaaacactttacataaaaattcactcaaatgctaagattattgaaatgagtatattaatgcttgaaaatattttatttatgatattaatttgttaagtaatgatttttatataagcaagattatgttataagctctagtgagganaataatgaaccaacgttgcttaaaattaaacaattcatataagtattctcattg

SEQ ID NO: 81427 - DNA, 1137 bp, Glycine max
  unsure (1)..(1137): unsure at all n locations
  Clone ID: PAT_MRT3847_44543C.1
atttcgtcaattccaacaacaccacaatgggaagaagtaagccacaacaacctctctcttctttcaatttccctattatatctgttggaagtaccattgagttaatcttataatggattatgtgttatctttctgttaacggttaaggtgtatgtatattcaggaccggcgaggtgttaccggcagataaagaacaaaccgtacccgaaatcccgtttctgccgcggcgtgccggagccgaagatccgaatctacgacgtgggaatgaagaagaaaggcgtggacgagttcccgttctgcgtgcacctggtctcgtgggagaaggagaacgtctccagcgaggctttggaggcggcgcgcatcgcatgcaacaagtacatggccaagttcgccggaaaagatgccttccacctgcgcgtgagggtgcatcccttccacgtgctccgcatcaacaagatgctatcgtgcgccggggccgacaggctccagaccggcatgaggggcgcctttgggaagccgcaggggacgtgcgctagggttaacattggtcaggtgctgctctcggtgaggtgtaaggatgctaacagtcaccatgctcaggaggctcttcgtagggccaagttcaagttccccggccgccagaagatcattcttagcagaaaatggggatttacaaagttcagtcgaagtgagtatttgaagttgaagtctgagaacagaattgtgccggatggggtcaatgccaaggttcttgggtgtcacggacctttggcaaatcgtgagcctggaagagctttcttaccagctactgcttaggccatttagcagttagcactaggatactcattgaatatgtggtttttcttttcacctggtgaatggatatgttgtaactataaaatgtgtttctgtctgcgttttgttagaagatatttgaattatgtatctatctgtcttccaagatgtcctgggggcatgaaagatgcacattcgatgtatttagatctcattattctgtaagagtttgaacagaatggaaataaatatatatggtctttattgtgtaaaaggnccgaacaacaatggtgagtcatggcctaaatcaggccgtatggcgtagtattcggacttcaggtg

SEQ ID NO: 81428 - DNA, 262 bp, Glycine max
  Clone ID: PAT_MRT3847_44544C.1
cagagatccaccttcccctgctcgcctccgctcacctgcgtgctccggcaacagccgctttcggacttcggtttccctccaacggcgctccaaagaacgttgacgaatatacagatcagctgatccaagaatgaattacatcaccaccaaaaaagatgaagcacacccaggttagcaaaagcatgccagattctacatattcaaagaatgacaacatttagtccatcatgaaatatatcaaggtatcatgctccatcacttt

SEQ ID NO: 81429 - DNA, 2096 bp, Glycine max
  Clone ID: PAT_MRT3847_44545C.1
gaagattctccctgtagatttaaagtgtgcttcaacaaatcaaaagatagactatgatatgcttcaggcccctaatctcccttctttccaagttgaggaacatgtgcccattaatagtcaaatccctggttttgcccacgattgccttcttaaagatggtagtagtcaatctatgatgacaatggatcctaaacacaaactagattgtgctaaacctccatcgggtgatgacttgttcgatgttttaggggtggatttgaaaaaccaattgctgaatggaaactgggataatctctttacttatgaatcagatgctaatgcagaaaatatggacaaaaagatagcacctatgaacatgcaaggtgcaacaactaatcctgatgtttatgcggttaaagaagcaatatcagactgcggcatcttttctgggatgggaacagaccacctcttggatgccgtggtctccaaagccaaatctgttgtgaaacaggattctgatgacatgtcttgcaggacaacattgacaaggaatagtacttcctctgttccttctcctgcacggaggacggtagtgtctggtcatttccaagggggattatttgatttgcctaagaatgatggtaaaacaggtgccacagaaactagttttcttaggtctggatgtaacaaggatgatgctggaaactgttctcaaactagttctgtttatggctctcaacttagttcatgggttgagaatagtgggagtgtgaaatgtgagaatagtgcttcaactagatactcaaagaggccagatgaagcttgcaagccaaatcgtaaaaggcttaaacctggagagaatcccaggcctcgaccgaaagatcgtcaaatgattcaagatcgagtgaaagagttacgagaaattgtgccaaacggagcaaaatgtagcatagatgcacttttggaacggaccattaagcatatgcttttcttacaaagtgtgacaaagcatgctgacaagctgaaacaaacaggggagtctaagattattaataaggaaggtgggctgcttttgaaagacaactttgagggtggctcgaggctacatgggcatatgaggttggtgcacaatcaatggtttgtccaatcattgttgaggatctcaatcctcctcgtcagatgctagtagagatgctttgtgaggaatgcggtttctttctggaaatagctgacttaatcagaggattaggtttaaccatcttgaagggagtcatggaagctcgcaatgacaagatctgggcacgctttgctgttgaggcaaacagggatgtaaccaggatggaaatatttatgtcactggttcgtcttttggatcaaacgatgaagggtggtgcatcttcgtcgaatgcaattgataacaacatgatgctgtatcattctttcccacaagctacccagataccagcaactggcaggcctagtagtttgcaatgaactacctacttatagtttcttggtctggatgctcttgggagaaagaaatcctctcttaagatgaatttaactttgtctaactactgtttcatctcagtttggagggggatgagtttagttagtgaagaacttctcaagattaatatgcttttgtataatgtatatgcatgtttcttcctgttcctgccaaggtgacttatcctgtggttggcccatttggcagtgtctgctgatgctttaggcattctttagataacttgcatccattttttttttccctgagtaatgccattggtcaccaagttggataaggcttttgttgatgttgctgagtaatgccattggtgttcatggtgtgattcagatgtatagatattgtaggatttgctaaggggggaggtcatgtgtttgaccatcaagctttatgaccttttttctccacgtttcttggagtggtgatattggctgttataatataccaattttattaatgtaagctttgcgtggtttgtgttagtctatgctgaatgatgtactagattaatactaccttttagaataagtgtcatttcagagtgttgtataaggattaaggaaatcttaaaactgcaagagcgattggg

SEQ ID NO: 81430 - DNA, 647 bp, Glycine max
  unsure (1)..(647): unsure at all n locations
  Clone ID: PAT_MRT3847_44546C.1
aataaatcctgatatttattcagttaaataaacaatatcagacagtgacatttttggtgggatgggaacagacaacctcttggatggcgcggtctcaaaagccaaatctattatgaaactggattctgatgacatgtcttgcaggacaacattgacaaggaatagtactgcctctgttccttctcctgcctgcaggccggtaatgtcgggtcatttccaggggggattgtttgattttcctaagaattggggtaaaacaggtgccatagaaactagtttgcttaggtccggatgtaacaaggatgatgctggaaactgttctcaaactagttctgtttatggctctcaacttagttcatgggttgagaatagtgggagtgtgaaacgtgagaatattgtttcaactggatactcaaagcaggcagatgagagttgcaaaccaaatcgtaagaggcttaaaccaggagagaatccccggcctcgaccgaaagatcgtcaaatgattcaagatcgagtgaaagagttacgagaaattgtgccaaacggagcanaatgtagcatagatgcacttttggaacggaccattaagcacatgcttttcttacaaagtgtgacaaagcatgctgacaagctgaaacaaacagggg

SEQ ID NO: 81431 - DNA, 473 bp, Glycine max
  Clone ID: PAT_MRT3847_44547C.1
aaattatgcaactaattgctcataacccttacttctattcattaagtggataattattctatccatcataaatatttttttatgggtacccatataaatataatcttcaatgaaaaatctccactaattaaattttccatacattattgaccataaatcttcaatcaataattttcctcacattatcaatcaagttaacctaatttatcataatttaattatattttcgtgccaaggttattttttcgtctccatacctcatttattaacacattaataacttaataaatgtctttggcaaaaatgtttggtgcgatttgattagaaatccccccccccccctcccctccacacaaactctatatataatgaatgtttaaaagaaaactataattttgggtcatacaatatcaaaattaataattagttggcacataatcacattaaaaaatcatatacattttctcttaata

SEQ ID NO: 81432 - DNA, 309 bp, Glycine max
  unsure (1)..(309): unsure at all n locations
  Clone ID: PAT_MRT3847_44548C.1
ggtttttgctttcttncaacaaaacaagagaaaattttgaatacccgagtgtcaaaattcaatgccaatcaaacttttacttgataaaggaaagaatatacccccccaaaaatgggagggaataccctgatttgacaaaacacactttttttttctccttttggtttgaaaaaaaatatcccttttttgggtttccccactcaccggagacgggtttggattaaaagattgggtcagcttttttaacattctcgaattaaaaacatcaaccccggtttcttccgggttcagaccccaaaatacacaccc

SEQ ID NO: 81433 - DNA, 453 bp, Glycine max
  Clone ID: PAT_MRT3847_44549C.1
ttgtttttttttttttttgtgtatgttaccatgtattaaagatcgaattacaaagggattgagcctcctccgcttccgtaagtctttccgaaaaccatcatctgaagtcggtcgtatccagccaagactccagctccagcgatagctcgaagaacgttggcacctgctcccttgaagagggacttgtctccctccttggcgatgatctcctggaagcaggggcaagagctcttgtactgggccgcctctcctgacgtcatcagcatacgccgtcgaatggtggcgtgaggataagacgcaagaacccgctccgagggcgagggaccatccgagcaagaaagaagcagggaggattgtttgccgcatttccagtgaggagaacaggcctcgagtgagtcatatagtccaaagctgagtcctcgatagacgatgataccaacgcaagagatgttg

SEQ ID NO: 81434 - DNA, 475 bp, Glycine max
  Clone ID: PAT_MRT3847_4454C.1
cacaagaaggggacgaaaaggaaaaaccccaaagcctcatcaagaccatcatacacaaagagcatcgcaagagtacaaaaaacaaaacgctaagagcaaaaaaccgaaacaacgggcatcaaccccaggcagaacatcacagcatggcaagcaaaaaaacaaggagggccaacaatattagaaggaagatagagcaggtgcaactaagcgacaaaatgaaaagagagcctaaagagcggcaaatagaaaacacaggtaacaaagtaacaggacataaatgaaaagaaaaacgaaaacaagccttaatcagagagcataggaaactatacaaaagggcacttgatccaatcaacacggggagaccaaaagacattggcatggacaagcaaacccccaaacaagacacccaaagaagacctcaagacgggagcccaaccccacagagccccgaaccaaccaaacaccaccaaaggaa

SEQ ID NO: 81435 - DNA, 624 bp, Glycine max
  unsure (1)..(624): unsure at all n locations
  Clone ID: PAT_MRT3847_44550C.1
ctgatgcgcctgcacgtgccggtacggattcaataattgtttatcaagcctcaggtccgacggctgcgagaagacgacagaagggagcagggaatttttctccacagccttttatagattaattcttattgcaattggtgctggcatatgtttgtttgtaaatattttcatataccccatctggtctggggaggatctgcataaattggtggtgaaaaatttcaatggagttgctgcatctttagaaggtttgcttgaatttcctcatgttctgaatcctcgcaaagattttttggtgttttttatgcctagttcctgtatttaattttctgttgttgtcactctgagttggttcctttgtaactttgtttaggctgtgttaatggttacctgcaatgtgttgcatatgagagggtcccttcaaaaattcttgtttatcaagcctcagatgatccactttaccgtggctatagagcagcagttcaatcatcaagtcaagaagagtctttggtattcatattttagttgtcatctatcccttcttcaataacctaaatgccaaaactagcagttacatnttatgatcatatcttaccctcacaggtagattttgcattatgggac

SEQ ID NO: 81436 - DNA, 714 bp, Glycine max
  unsure (1)..(714): unsure at all n locations
  Clone ID: PAT_MRT3847_44551C.1
ataccaagaaatccaagccaatgaacgtgcagctgatcccgcaactaatggaacataaggtgttaaaattgaagcattntgagttgtaaacccctccatcttgttgcgcaaaatatcataacaaaggcatgtagattccaacagttggcacagccaatgctaaacttgcacttgtgcctctccataatctcataaagccttcctgacgtgtaactttgtaaagaacatctaatgtccctttgtagcggttacacccggaaggacaaggccgcggtggctcagaactagaaattgcaaaacatctaacatcgtgtagagtcgtgttggccaattgacaaacaccttggtagggaacaccagcagcttgtgcttgaagtcttgtcttggcgacatcgaggggattaacgatgatagcagacacaaaggcggcaccggatgcggaaagagctcgttcttcaattctcaattgcgtatcggaatgtgttggtgacattccttcagaatcaacatccgtgagatggcacaacaattcaattgtttaggttttcaggcctgggtcctcaacacaacctgatttagaacatcaatatcctacaagccaaacaagttttttttttaatttctccctttttattctattctattttgctgtgcataaaacatgtttcaatgattttctttttctacccaggaaagcatattcaaacccccggc

SEQ ID NO: 81437 - DNA, 728 bp, Glycine max
  Clone ID: PAT_MRT3847_44552C.1
cccacgcgtacggttttgttagttcacacactaagttctgaaaaatgagttccaaagatggtcttatggtacttatgttcatggacactatacttttgatctcctctgaggttgcacccgatgatgcataccagaattttgacaaaacagatgggaagcgtagtgcaaatggggtagatgaaagcaaatattggcgtggtggctatggcgactatggtggttggcgtggtggtggttggcgtggtggctatggaggctggcgtggtggctatggtggtgggcgtagtggcccttattatggtggcggctggggtggcccttattatggcggtggttggggcggtccctggcgtggtggtggcggtggtggctggggaggttggcgtcgacctaatggcaaccctcacaactaagaagaaaacttgctaaagcttctttacgggtttaggttttcgcaataaataaaacttcatgagaagtgtagttgtaataaaagtggaagtctctcttctcttgtgatataaaggaataatagttttatataaaagaacacacacatgctaaaacatactcaaagatacacgctataccctaccgcaaaaggttacagaagcaacctacttaaccggatatcacacttaaccgtacagcgggtgtaaacagttatgttatatattagaaaacttgtgctttatgaatacgatccctttgaatgatcaaacgctgct

SEQ ID NO: 81438 - DNA, 314 bp, Glycine max
  Clone ID: PAT_MRT3847_44553C.1
tctcactattcttcggcccgccttatatatatgctttggctttagtgcccatacaacacctagctccctacccagagagattccctataggaaaggaaaggctatgcatttcccactccgagcctcagggcctaaaagaaagggaagcttaatcctttttttgtttaccaacctggaaagataaatgtgtggcctacgccacccgaaccaggtctaagggtggccctgactgataaaggcatgtggccggtatgattaatgtagatacatgggcatgcatatagagctataacaccgcgtatgcataacaccat

SEQ ID NO: 81439 - DNA, 256 bp, Glycine max
  Clone ID: PAT_MRT3847_44554C.1
tcgactccacgcgttcgcccacgcttccggatcaatcctgaccactctagccactagcgattatcggcttacttacagggcctatatggagcctggatgagctttatccaaattcaagctcaatacttcagaagacctcatacgtggcaaaaccttcatcataacatcgcttatatgccacatattcgataacacctattatgctacaattgatactgattttctatcataaaactatgtatctctaatatctaac

SEQ ID NO: 81440 - DNA, 474 bp, Glycine max
  Clone ID: PAT_MRT3847_44555C.1
ctcaatccttctttatttggctccaacaatatagaatttatttttgtgtgcttttattgaaaattgctacctactctatccagtctcaaatataagaaaaaatgatttattctaactataaaagttagttaatcgtataaatcttaattaaaaatttattctttttcaacttatatcctttacgggaactcggtattaagaataaaaaggagtatttaaattaaaatcttaattaaatgaaggttattttaaagacaataacattaaataagataaaattagttgaaattgttttatatttgagattaaatgaggtaaagttagttgattttttttattatatttgagaccaagattttttttatatttaagatcagagtagtacttgtatcggcacggggcaaataggtaactttgttccttgcttatcttctgtgaatgatctttcttcttctctaaatgatacttggtcag

SEQ ID NO: 81441 - DNA, 307 bp, Glycine max
  Clone ID: PAT_MRT3847_44556C.1
aaaaaccgtcggcactcacacgatagctacacacatattagagcgtacacgcacatgtagacgttgggcagggaagatttaacgtcttgaactcatattggcacacttgactcatggctggcgtcccttgtgacagatacctagtgtgcttatacccttgctgagcctaaaaacgcctctcgaactattgacacttaccgtatagagaccacaccttatcaataatggcgccgcttatctgagataaaagtcagtgcgtactacgcgcattgtcctatcatgaaagacccacttgtgagaaccgcat

SEQ ID NO: 81442 - DNA, 450 bp, Glycine max
  Clone ID: PAT_MRT3847_44557C.1
ctttgatattgtctcctttcccgtttcgttcttcgaccgcttcttcttttcttttcttttctctgagtttcaactttcaacgcagaagagagaaaaagatatacatatatatacacagagagagagagagagagagacagacagagaaaacctagagactattttcctttcgctggttactgttattgcaatttgcgtgtttcggactttcgtcttcgaattgaagaatcgttttgtctgagctgaggctttcaattgcgagcgaacattgagtttgtttgtttgtttgttcgagtttcttcgatgcgcgtgttatcgaaggacgggagttcgtttgaggtgttttgattccgcgaaacgaatcgaaatgttggttcggaatttaatttcgctggaattctagctccgatctcacgaaattactcgaatcttaaggttgaagcatggatg

SEQ ID NO: 81443 - DNA, 456 bp, Glycine max
  Clone ID: PAT_MRT3847_44558C.1
cttcgttctttttttttttttttttttttttttttttttttttttttttttttttttttttttttttttttcttttttttgtctcaaaaaacaaaatgaattccagaaaccgattaatacgcttgttttccccctcggccaaacccggaaaattcacgccatttactttagaaaaaacaaaatttgtaaaagaaggacccatgggaaaacttaaccgtagggaacaaccccttggaacagacatcaattcccagggacttgtccccccataccacctccttggggagggaaacgaaaaaaacggggggggcccttaccctccaaggacaccctggaagtcccaccgggcgccttgaaaagggcccaaccgacaagggggagtttccccgagtcccccccgggtgggacatcggccttttccaacccaccctggggggggaaccccgctcagttttt

SEQ ID NO: 81444 - DNA, 306 bp, Glycine max
  Clone ID: PAT_MRT3847_44559C.1
gcggattagagaaaaaaattgaggaatctcaggaacttgctagagatgccgctatcgttgtcggaagacatgtgagcccgcttagagatgaataggtggatgactatgaagaacctcatgttcgaggacacaggaacacaatgttctgataggatgtgacattagaatatatgttctattataattgtatgaaattttggacagccttgttttgagccaaagtgaatttattatttatttagacatgttttattatgatgttagaaaggtgaatgtaagtcttttacccttttgaaaggctggtat

SEQ ID NO: 81445 - DNA, 1586 bp, Glycine max
  Clone ID: PAT_MRT3847_4455C.1
gacccttttgctttctttatccaataataataataaccccctttttccctctccatacccttttgctttctttatccaataataagaacttcccacgagtggctttaactggtctggtctggtctggtcggacacacaaaaatattagtatggagaaggtgagttttgtgaagaatggagagcttagattgcctccggggtttcgtttccacccgactgatgaggagctggttttgcagtacttgaagcgcaaggtcttctcctgccctctgccagcctctatcattcctgaggttgatgtttgcaagtctgatccttgggatttgccaggtgatttggagcaagagagatacttctttagcaccaaagaggccaaatatcccaacggaaatcgctctaacagagccacaaattcgggttattggaaggcaactggcttggacaaacaaattgttacttcaaaaggcaacaaccaagttgtcggatgaagaagacacttgttttctacagaggcaagcctcctaatggatccagaactgattggatcatgcacgagtatcgcctcatcttatgcctctcggcaactggcttggacaaacaaattgttacttcaaaaggcaacaaccaagttgtcggaatgaagaagacacttgttttctacagaggcaagcctcctaatggatccagaactgattggatcatgcacgagtatcgcctcaacatccttaacgcctctcagtctcagagccatgttgttcccatggaaaattgggttctgtgtcgcatatttttgaagaggagaattggtgctaaaaatggggaggagagcaacaaggtgaggaactctaaggtggttttctatgacttcctagcgcagaacaagactgattcctcatcctcggccgccagtggaattacacatgaacatgaatcagatgaacatgaccatgaagagagcagtagctccaacaccttcccttatactattagaacgaaaccttaacaaccttccttaaaaatttaagttcattatctagttgttgtttttaattgtctttccctttccctgtaattatcatcaatcacttgttgaaaggaagcatcctcttcccaaatgagaccggcattaagggtagtctggagagtatggtactaatactagtagtagtgtgtaatacacttctcatttcccttcaatttaacccctttttttctaaaggtgatagagtgtgtaatggactccccattttccttcaatttaacctttttttctaatgcccatgcttcttcttttagcaaaaagctactcattttcagtttcaaaggagatgctttgacagaggaaaagtagaaagcataagaaaagaagatcaaaatatatattgtcaaaaattaaaacaccgttttcaggagaataagaacataatctatgcgacatcagcgacgcactagttacttgctcttcttcctttagggaaagaagaagggtgcccagctcctcaatgtttattcttgccggatcgaattttcaatatattttttttgggcttatacacaactgttatttatgtatcttaatcaactgc

SEQ ID NO: 81446 - DNA, 365 bp, Glycine max
  Clone ID: PAT_MRT3847_44560C.1
taaaacatgcaaacaacttttttttttttgggtggaatcaaaattaatttacaacttgttaattttttgatccaaaagattgaagttcccccaaccctttggggggataacaaaacctttttctttgggatagcacccaatgaattttggtaataaacaatttttctttgaggtgcccaaaaaaatttggacctttgcttaaaaaaaaaaaaaaaggccggaggccccctttttttgggggattattggaaaaacaaagcttttttacctgtccattttaaacaaccttgtcttacccatttttttttgtttttttacaaatttgaatttcatcgggaaaatgtttttgataaacaatttttaca

SEQ ID NO: 81447 - DNA, 358 bp, Glycine max
  Clone ID: PAT_MRT3847_44561C.1
aacacgcgtccgacttggccttattcgaaataatgaccgggatcatccactagattgaggagaccctgcatgtgctagggcacaagaaataggagcacacaggagatcaccatggtgagcacataggtgaactcaaaggagacctccttggtgagcacaatggtgatctcaaaggatatcaactccatggggtgcacaaggagggacttgtcgataagatcaaggacaagatccatggtgatggccatgtcaagggtgagaaaccgaagaagaaggacaagaagaagaaggagcatggacatgaccatcatggtcatagcagcagctgtgacagtgatcagatcttatatgttaagca

SEQ ID NO: 81448 - DNA, 428 bp, Glycine max
  Clone ID: PAT_MRT3847_44562C.1
gcccgcagttaaaattaggcctgcttgcccaggactgggtcgtgtgcctactccatatcgatcaaagttgaatcgtgatcctattaatggagcacattcaatgaaacaccaactagcaccatagagaagcggacataaactgtataatcttgaccaattcaaaagatcatttaaggcagttgaaataactgaattatcgggtgttagatcaactatgggaaactaaatggaattcataatcgtctccatatttttagatagcggtctaatctaaatgccttaatatgccaggaattcagaccattctaatgccctatattgccatgcataaactgcactaacatgtaggataagcacgcatgttaaagctgttataaacacggtgaccgctaattcatccaaactcattgcccaagaattattaaaat

SEQ ID NO: 81449 - DNA, 568 bp, Glycine max
  Clone ID: PAT_MRT3847_44563C.1
aagcgaaaataaggtacagagagaagcaaattttggcatatttgagggacaataagtcacgatatgcctgaaaatctcttgatataaaggaaacacggtggatgccaggagaagaatagggtggagagctaacaaatcattcaccatgttggcgcgaactggccctgaattggaccaacattctaaccaatttaccaccaatttagacccaccccttgcccacccgtggggaccttgtcatggccttcacaatgcttacaccgcacttactgaacctaccctttacctaacaccttggaaaaacggtgcttaaccgttgcctgggacctgaccctaaccccaacatacaagcaatagtccttccttgccaatttgtgaacgataggacaatgcctgaacattccctcatcatcagggggcattcaaaagacatgttatataggtgatttccgcgtgatgccctaaaactgatataactgtgccttgcctatgacctcggcaggactgcccccgaactacccccaaagatcggttaaggcaagttctggtcaagttaacccggccggaa

SEQ ID NO: 81450 - DNA, 450 bp, Glycine max
  Clone ID: PAT_MRT3847_44564C.1
gtagtgactcattttcatccttccccgacccccccaacatggagtgcacatacggcatctgcacatgcccaaaaacgtgggacaggctccacgcgacagcacgtgagcaggatgtcaaagaggccccactatgcaatttcgtcctggacaaggggattaggaccaaatgttgctactactcatgcaacaaccgttccttctgcataagtggacacgcaaagcttgaagaagtcattcaatgctcacacttccagataagcgctcacgccaaaaggacacggcctcttaatagatcccacagcacacttacatgctctatcagaggatcatggcaccaaaagatagagatgcctatgcatcttcaaccgcatctactgtctgcgaaatcatactcttatcagagatgatacgtgctctattatcctccagtatgccagttccataccaata

SEQ ID NO: 81451 - DNA, 162 bp, Glycine max
  Clone ID: PAT_MRT3847_44565C.1
agattttgttatataatacttgaagttgaagcctttaacgtccctaaaaaaaataagccactccagaaggtgatttttaattagtaagtaccgtgaacctatattaaaacgccctatagcaaccaataccgaatgctaataacccccaagtttacaagatga

SEQ ID NO: 81452 - DNA, 296 bp, Glycine max
  Clone ID: PAT_MRT3847_44566C.1
gctagaaaatcgtggggggaatatagagttttttgcgtggtagaatcctgccgtgttttggtgatcaggctcgtgccatggctcactgttcccatgtgattctctatctccaacgcacgctgcttctggcgaggcattattcgaacgtgaaagtcgcctattacaagcttgttgaagaggctcgcaacgtccgagcctatgatctcattactgcctatcgcatgcttgctacaaaggactacattgatggcaaccctttcagctcagagtatgctgcagccaactctcagcctatc

SEQ ID NO: 81453 - DNA, 340 bp, Glycine max
  Clone ID: PAT_MRT3847_44567C.1
actaactgtaaggctggctcgcccgccggcacgcgccgggcctgactggctggacccacccacgcgatcgtaacgattcgctggatggaaagatgaactctgatgtgcagctatactcatgagtgtagaatgttatgacaccaactgcgcaatatgcatatgggcacccctgcaaatagtgaaatcatgggtggtcatggacagttggatgcaaaaccctactgcacatacagccttggatgaaacatcttgcatgaggggataatgcagacagaccatgaaaccttgatactaacgcagggaagggacacaccagactcgataactgagtaagacagca

SEQ ID NO: 81454 - DNA, 492 bp, Glycine max
  Clone ID: PAT_MRT3847_44568C.1
cagtgataaacctttatttaaaacatcctgttttggcacaagaattaacacaacattttctgggattataaaattttttcttattgcggtgttacacaaattttaacaaaacgggttcatccgactagcttatttccgcaaaggtgtccaaagaacatcataagggggggaaaagttaaccaaaacaaaacaaaaaagtggttttcacaaaaaccagctggcgttttgcttgatgcccaaagagcatttcatgaaaagaatccctaaaacacaagcccacagtcatactgcacaaaaaaaggacagttttgccaggccacattgaaaactcaattggcctctacacaggacaccttgccaagagtcttaggggaatttccctgggtctttttaatgcgaactaaaaccaaggtagatgaaaccactggtgaaagctatctttttcttaaaaattctggacattttcatcacctgataagactggtttaggga

SEQ ID NO: 81455 - DNA, 448 bp, Glycine max
  Clone ID: PAT_MRT3847_44569C.1
tacggctgcgagaacaccacagagggtcaccctaccaggagagataccttagataggggactacttttataatgcgactatctcatatagaggcagcggcactaagacctaacatctcaatctcaatctcatgcatcatcttccactattgattactgcaagtttccctcccactatgctatgtagattattcaaatctaaatattacctgaccttctaaagatataaatcccattcaactttaagatcccaacctttacttctcaaccaatccaaagagcttacttaatctatgaaatttcttatgctagactactatcacaacctgctacaattttccatgatctctatgaacaagcaccttgcccagtacctgaacgcaactcttttcttgatcacaccacattatatcctccggtttccccaccatgcacctattatgtgaatc

SEQ ID NO: 81456 - DNA, 285 bp, Glycine max
  Clone ID: PAT_MRT3847_4456C.1
ctgtgccatccatggaaacataattttgtggttatgttttatcatatcccttctcttgtatccatccatttgtgacataattcatttatgccttgggagccaagcaaagctccctcaccattacttccacgactatggccccagctcatatttcttttctaatttgggattgtttgtatgtagaaatttttgacaggccattcatacgttagaaatctgactcgtgattcttattgattgtattactaaatatttcattatactagcccggataagttgttaaat

SEQ ID NO: 81457 - DNA, 727 bp, Glycine max
  Clone ID: PAT_MRT3847_44570C.1
attcccacaatcataaaagaaactaaaccattctgaattgttttgttttgttcagacatggcccttcagcatcccaagctttcaaggttgcatttatactactatacctcccttacttcaacttccatttcatgtttttaaccgaccatgccccttatcgatgattctccaacacgcttctcccacctctccacccctctgcccctgtaacttgttcgccaattccgcctccctcaaattccgcagaaaatgcactgtcctactctgcgccgttccctccgacaacccaaattggaacgccgatttcgccaattccgcccgcaggaccgccacaaccttcgtcctcaaacgaatttccaaccaactcgaaccccacaccaccaccaccaccaccaccaccaacgataacggtgttattgattccgaattacaagcaacaccgccggttcaattaggttcaaacttcaccgctttcagcgaggatcctattgtggataagctgaggacccagctaggggtgatacacccgattccctcccctccaattaaccgcaacgtcgtcttcctgttcgtcttcttcttcttcgtcggcgtcgtgttcgacaaattgtggacttcgcggcggcggaacaaaaataacagtgaagataggttgcgtggcggcgtgtggccgcaggtgccgacgagcttttcgctgtttctgagaaggattacagaggaaggagtc

SEQ ID NO: 81458 - DNA, 256 bp, Glycine max
  Clone ID: PAT_MRT3847_44571C.1
aatacctttaccctttctctgcagatgtgcgcttcacccctcatccacaacaagcagggagtgcatcaacaccaattgtattttcccctcgatagatttttaagcaaagcaacagttcaagcagtttatatatggagggagaccatccgtgaggaagaaggtgaatgaaatgagggtaaaaataaaagccaaatcttgtgaataaaaagctcaaaagattcttggatcttgccgttcaagtaaacacacatacttt

SEQ ID NO: 81459 - DNA, 376 bp, Glycine max
  Clone ID: PAT_MRT3847_44572C.1
ctagatatatgttgaataggagatgctaacataacagtgactagtcctcaaaaccagattttctctgctgagcctctacggtgacacactttgctcaactgacaagacgcgggtaccctatctacgcccgtcttgcctgcaggatctacctgatagaaggtgctgggctttacataagatagctgattctcttgaactgccctgcatactcatttctctcgggaggacaaagaccttgccgtagtacaggaaactaccacctggggctgtttgtaacttcataccgttcaactgaccgtatgccgggccacactgataagtgggtggggatatttcatgcccctgccgctaattgaagggacgaccaccgggcctg

SEQ ID NO: 81460 - DNA, 843 bp, Glycine max
  Clone ID: PAT_MRT3847_44573C.1
ttttttttctaagaactaggaatcagcaatcagcatagtatgaaaagataaataagtgggaatacactgaagaacacagctacagatattttccagcactcacaggagaagtttcatacaaacaaactcaaaatcctcctattgttatgtggacagcacgagacttatcctcaatacgtcaacagcgggaatgaaaagaaagattatacattaatgtcttttaacaaatggaaggaacacgtcctatcctataatataatgcgttattccaatttgctagcccattgcatacttctgagtccagctcctagcagttgtctcatacttggacctgtctgtcttgtacatatgagcaatttcaggcaccaagggatcatctgggtttggatccgtcaatagggagcaaatggagagcaaaaccttagatattgtcaaggcggggctccactgctcctttaagatatcaagacaaatactaccattgctgttgatatttgggtggaaaactttagtcctaaatgcaaccttgggtggcttgaatggataatccggaggaaaatgaatagtaactagaaaaacacccccagcataagggctatcagggggacccattatagtcgcttgccaatgaaacatatcttccgctacaggaccggcgctgcaagaggttggagggtctttctggaggtccttaagctccttcagaatccgcttggaggccatggaagaagattccctttcgatctacgaaggaagaaaagggagagttgcagagagaaaaagtcgcttttcaacgaaacgaacgaagaagagaaaaccaaacccaacttgccggacgcgtgg

SEQ ID NO: 81461 - DNA, 1469 bp, Glycine max
  Clone ID: PAT_MRT3847_44574C.1
cacaggagaagtttcatacaaacaaactcaaaatcctcctattgttatgtggacagcacgagacttatcctcaatacgtcaacagcgggaatgaaaagaaagattatacattaatgtcttttaacaaatggaaggaacacgtcctatcctataatataatgcgttattccaatttgctagcccattgcatacttctgagtccagctcctagcagttgtctcatacttggacctgtctgtcttgtacatatgagcaatttcaggcaccaagggatcatctgggtttggatccgtcaatagggagcaaatggagagcaaaacctgaaaaaggaaacggagacccttcccacccatttaaaaaacagcaatattccaagagaaacagtaaccatacattgcaatgggggcctcccaatttcccatagaaaaagtttcccaccaataacaacacattaagaaatgttccttgcgtgatttttaatattactagccacaattaggagtttgaaggtgcaaaaattgcatgcaatttagatcatggcactgaaaccaatttttaagaggtatctgcatatgtgatccactggaatctacattatggaacacacagaagtatgcatgcgatcaacatttcatggtacaacattactatactacaagaattgcatgcaacccagagtattaaatagacccaagatatttttcatcgcatacttatccatcactggattttgtcatacctcatcatcatataaccataagttagtaaccttctgctacatgatgctaaaaagttaacttatcgaattagctactagtcatttatatgttctttgactaatagaaatatttccctcagcacttatatgcattgttatttgttgctgtattacaaaaatttctttgcaaaacaagggatgcccaatgaagattagttagcgttaaaaagtttagtacagtcataaccttagatattgtcaatgctgggctccactgctcctttaagatatcaagacaaatactaccattgctgttgatatttgggtggaaaactttagtcctaaatgcaaccttgggtggcttgaatggataatccggaggaaaatgaatagtaactagaaaaacacccccagcataagggctatcagggggacccattatagttgcttgccaatgaaacatatcttctgctacgggaccggcactgcaagaggttggagggtctttctgtaggtccttgagctccttcagaatccgcttggaggccatggaagaatattccctttcgatctacgagggaagaaaagggagaattgtacagagacagagagagaaaagttgctcttcaacgaaacgaaatgaaacgaacgaggaagagaaaaccaaacccaacttgcagaaatgactatgtatggaaagagacattaatatactcatacaatacaacctttccatcactatttttgtgtc

SEQ ID NO: 81462 - DNA, 230 bp, Glycine max
  Clone ID: PAT_MRT3847_44575C.1
cttttggtgatcctgtgtcactgcaatatcatcagctagcttttgtggaaggatatgggatacctggacattatgactcactgggatttagagccagtgggggaaggcaaattaggcgttaagaatcgcaaaataggtacagttctggagtgtaattggatgatagaacattaaccgctcagagaacttgtgctaatatgaactcaagaagaggtggagtatcgattcct

SEQ ID NO: 81463 - DNA, 319 bp, Glycine max
  unsure (1)..(319): unsure at all n locations
  Clone ID: PAT_MRT3847_44576C.1
acgcgnntccgctttnntttctccttcacatttnnctccattctcacaactatcaagggnttcnntgatctatgtcggggaaggaggctcccggcctaatgattcggaanagttgtctggnnagttgttggtctttcgagaggctcgcnnacggtggcactcttttggacactctactggaagctctctaagaggcctcattagacattgannagatgatgcctaatctaccaagaggccttttaaaaaattattgaatctttggtgnngcgttggtnncttggaatnntgtggtggctttcttgtataaatctcaata

SEQ ID NO: 81464 - DNA, 274 bp, Glycine max
  unsure (1)..(274): unsure at all n locations
  Clone ID: PAT_MRT3847_44577C.1
cgaggtnnanggnacgtncttnactccgagtagagagctatangcagantgtntnngcagtnnctnctgctnctctgatgctccncattntgaccactttcttggnagctcctnctggagtgagcaggtggaagcanctcattctctggttgcattcagcctcttggctncctgtgcttttgagagtngtgttngnatattccggccancnnttatgaagatgaganctcaatacattcctgaggaggcnnggagcaccatcatgaactttttc

SEQ ID NO: 81465 - DNA, 387 bp, Glycine max
  Clone ID: PAT_MRT3847_44578C.1
acgagctgacataagactacaaacgcagcggtagtaaattgtaaattcaacgaggatagcagggtatggaaaaaaggtagaaagtcttatcactgtgaggaatggcatgtttgtgaaatctgtgggagttatagatataaaaaaattaataagactaaatatactgaaggaaaacctacattgtatatacaaaatagtctacatagaatccagtataatggactgtgatttcttactatacctgaatcctgattacctaatgtatgctaaatataatttcttcatgtagaggaattaactataaaacctttttgtcatgttgaaaacatttctaaatcttaataagatataattacttgctgtgacaatatctgatgtctcaatgtt

SEQ ID NO: 81466 - DNA, 536 bp, Glycine max
  unsure (1)..(536): unsure at all n locations
  Clone ID: PAT_MRT3847_44579C.1
aatttgngcatatcagctggagcacatattaatctcccagacgacgctgaagcactaactagtacctcccactgtctccattatcccacgactaattcgagccgagctactagcagccaataacatgcaggccattgtcaaatttcttccggttaacgcccggtccgccaccggaagatctccaatcaaccaaggatcgtgtgcgtcctttatctctttgaagggcagtacagttgtgcttggcttgatatcgcgttcttgcatctatgagataaacattgcacataaatgccgctgaccgtccgtacactgtcgtctgtctattgtatttgacacgccatctgcgtgctacatcattttccgacttgcacgcaatatgccagatgagaagaagtcacctgtgagggccgctagccaaccgggttcggatgtcgaggtgggccaagtagccttgcagggtatgatgagagtggatggagcaggnggcttgcgcctcgtgctggcattatgctgtccctcggtggtggaattggact

SEQ ID NO: 81467 - DNA, 1309 bp, Glycine max
  Clone ID: PAT_MRT3847_4457C.1
aggatatgtcgctacgtcgctgcctcccgtccttgttcagtgatacagagggtttcgccgccgcaagaatagaggttgaaatgaaggtagctcccatcgtggtgttcttgttcagagatacagagggtttcgcctccaccatctcacaagcttttcgccccaagccttcctcctccttcacgcgccaagaggactcctttgagctctccttggaggcttatggaatcaaacacctcaaagcatctgggagcgtttctcacttcgttgatgatcactgctttattaatgaggtgcttataaatcttcctttttacctacacttttggtaccatttttggtggaatcatccaaggttaaagggcacagtaaatccctaagatcagatgaaagcaaacctttaatatttggtataaagattggtcaaaatacagacataatgcaggcattactcaacaaaatccaggagccaccatcttctttgggggttcaacatgaaacttttgcatgttttcttcactttgttcatgtaatgcagttaccaaccttttttctaattggacaagctagtcaatatttggacaataaatccaccaagcagcatgagatacttcatgcaataggtgagattttggctagcactacaggtctgcagttttcagaagatagagtggtctggaatccgaaaaaggcatcaggggaaagcaaggagccatggcgtgcattatacggttgaatcatgggttacgtgcaaacatggaaccagtgttttcatgggtctggttctcagaaccattgttttttctgtaataactgtccttaaacattattataaattacctcccccctgccccctcttatatctcctaagtatcttagttgtgtaatgtatgtgtcaatgggatgaatgttgccatagcatgtagctgcaagttctttgtgtacatgtgggcgttattttcattcacctgtccaaaagcttagctgaataggtttaactgtttatgctatgcatcacattgtatactcactttgttactttgatgctgttacagcttttgaagggagataaacatgagaaccatgaggttttaaattttgtttctgtcatagaaacactttaatggtgaggatgagagtttctagtgtctataatttggtaatgtgaggtctccaaaatgataattatgaatgacttagttgagagaacagttttaggaaaaagcaggagtttgcaattatgttttattcgttttgttctagttcaatttccaatttttttaaaaaaaaaaaaaaaaaaaaaagggcgacc

SEQ ID NO: 81468 - DNA, 169 bp, Glycine max
  unsure (1)..(169): unsure at all n locations
  Clone ID: PAT_MRT3847_44580C.1
ntnnatgatgtanagnagatttataaatgagattatgtttatcntctnngnanntanggcatagccagatgaggtantagaactacagagttctagancctgtangncanaacggtcatattggccatttgnagcccgtctataacgtattccagcntangtggaatgt

SEQ ID NO: 81469 - DNA, 282 bp, Glycine max
  Clone ID: PAT_MRT3847_44581C.1
ccgaccatgctcagaccgccaacacgagagccataggggattgagccaagcgacaaatctggggcacgcatctagactggatgtgccctcgctttgactgaataacccgatttcgaaagcgcatcaatgacataagtaggcgtgatgagcacaagcgaacccgcagtgctagaaagaagataaagtataacagccacatgttgagcttgcacatcttagcacaaagccggaagcatagggttctatgtcacgatggctgatgaacaaccaccagagaccatt

SEQ ID NO: 81470 - DNA, 634 bp, Glycine max
  Clone ID: PAT_MRT3847_44582C.1
agccaaccacccatcattgtattcacaaataccaacaccggtttaaaatgtcttctattcgatgttacaacctgctgttaaacaggaaacacgattttcttctgaaaacccatcgagtgttgggtcatatcgagtatcatatatcttaaatcagtttttactagacacagaaatacaacaaggatacataaaggaacagatttcatttcataataaataaatagagaatgacggagcattcacatgggaacgacactattgcagtttcgttacatttttcacattatcacaagccaagaaacgggcactgcttcctcgcatgttctggaatcaatttcaccaaaatctcaactgggactcccttcaattcatgagatttaaaattgaacaatggtggaaggaaacgaccatttggcaagcgagtgtttgggtcacgaagttcatcaaagaaaggatgggtcaaggtatctaaagcagtgcaccgcaagttaggggagtattgtagtagtcttgataccagatcaacagcttctggaggcatgcgcttgtgaaagatcttgtgccatggatgcgctttaatctgtgggaatttaaattccgtgtagttaggattcatgcactttatctctttccc

SEQ ID NO: 81471 - DNA, 540 bp, Glycine max
  unsure (1)..(540): unsure at all n locations
  Clone ID: PAT_MRT3847_44583C.1
gtttcctaatacatttgtttttggtcttgatctttcttgtatgtcctttaatccactgcaacgtttttttatcattacactctttttttgtggcttttcatggcaatttaccacctaacattccttactaatgaaaataaccttgcaccttggttgatcttggtgggatatataacagtccttaataccatttattgtaaattcaacttgatagcattttggcttggtcagtttatgagtttattaactactaagttcatccaaattctggtgtgtgatgtacatccaatgtttgcttctgatttccttcgcttccaattaacttggatcaacaagtataataaatcgagtcatatgtcttccgtgaactagataacaccgtttctggaggcagccaaatcctgaaaataagaatttttttatgcctaatatcatcaaaaggaaaaaaagagaataaattgcactaccactcctcgaggttttgttaaattactcctaataccccttatttttttanacctacactaaaccctttatcgt

SEQ ID NO: 81472 - DNA, 420 bp, Glycine max
  Clone ID: PAT_MRT3847_44584C.1
atcaggaacaggaaccggtgcttcctcatcacgaagctaccaaattattttgttgtaagagtatgggaaaattgattaggaacattggtctgtggttattgttatagcaaaatgttttgattatgaacattgatctgtgactaatgtcttgttgaacaaatccttatttcctcctccttttatggtttagtgtaacttgattcatcaagccaatgttctgctcattcaaaaatcaagatgttggtacggacaggattcttaatccgtgtatattttatggtactggaaattattttactatatcgtttgcttcaattttttaactagtgttgctgtatttgtcttttttaggacagcagtgttgagcaagatgatttcaaagtcctgaaagttgtacatagtcattcaaaaaaagtgttg

SEQ ID NO: 81473 - DNA, 1867 bp, Glycine max
  Clone ID: PAT_MRT3847_44585C.1
cacgcgtccgcctatatctctatctctgttttcttccacagttcattatagaatcccctataacacatcctcacattcatctaacttaaacttcccgcgtccgctcaaactcactcacatccatctaacttcaacttcctcatcctcacaactcacaatcctccttccttttcctttactttttcttacatacattcatgccaaaggaggtaagtgattgggttttaagctgttaaaatagcaaggaaggtgcaaaatggcttcagttggtgtggcaccaacatcatcaggcttgagagaatccagtggtgttgataggttgccagaggagatgaatgatatgagaattagggatgataaagaaatggaagccaccgttgtcgatggtaacggaacagagaccggacatattattgttactaccattgggggtagaaatggtcaaccgaagcagactataagctatatggcagagcggattgttggacatggatcatttggggttgtcttccaggctaaatgcttggagactggtgaaactgtggctatcaaaaaagttcttcaagacaagaggtataaaaaccgggagctgcaaacaatgcgccttcttgaccacccaaatgttgtctgtttgaagcattgtttcttttcaaccaccgaaaaggatgaactataccttaatttggtactggagtatgttcccgaaacagttaatcgtgtgatcaaacattataacaagttgaaccaacggatgcctctgatatatgtaaaactctatacataccagatctttagggcactctcttatattcatcgttgcattggagtctgccatcgggatatcaagcctcaaaatctattagttaatccacatactcaccaggtcaaaatatgcgactttggaagtgcaaaagtcttggtaaaaggcgaaccaaatatatcgtacatatgctctagatattatagagcacctgagcttatatttggagcaactgaatatactacagctattgacgtttggtcagttggttgtgtattggctgagcttatgcttggacagcccttgttccccggtgagagtggagttgatcagcttgttgagatcatcaaggttctgggaactccaacaagggaagagataaagtgcatgaatcctaactatacagaatttaaattcccacagattaaagcacatccatggcacaagatctttcacaagcgcatgcctccagaagctgttgatttagtatcaagactactacaatactcccctaacttgcggtgcacagctttagatgccttgacccatcctttctttgatgaacttcgtgacccaaacactcgcttgccaaatggtcgtttccttccaccattgttcaattttaaatctcatgaattgaagggagtcccagttgagattttgctgaaattgattccagaacatgcaaggaagcagtgcccgtttcttggcttgtgatattgtgaaaaatgtaacaaaactgcaatagtgtcgttcccatatgaatgttccgttatgtatccttcttgtatttcggtgcctagtaaaaactgatttagagatatatggttactcaatattacccaacactcgatgggtattcagaaaaaagccgtgtttcctgtttaacagaaggttgtaaacatcgaatagaagacaagtgtcatgttaaaccggtgttggtgtttgtgaatacaatgatgggtggttggctaatttagttttgctctgcattggaaactcaattgtctttgtggctaatctttagcgaaataacgagacatagtcaacgagagtgcagtttgcaagtctggcttaaagctagaatgtcaggccttacttcgtaaa

SEQ ID NO: 81474 - DNA, 387 bp, Glycine max
  Clone ID: PAT_MRT3847_44586C.1
caggaatacagttgtgttgtcatttgttccagatttcaataatgattcttgctgctcttctaacttcagttgtaattaaccttggcctatgttttatatttttcaccctctactctgtattgaggaagcagcctggtaatattaccgtctatgctccacgcttagtttctgaagggaaacgtcaagagggtgatcaatttaacttggaacgtttgttacctgctactactgctggttgggtgagaaaagcatgggagacctctgaagaagaatttttatcaactgccggcttagatgcttttgttttcatgcgcatatttgtctttagtttaaaaatatttacttttggtggaattgtggggctactgattcttcttccaattaatt

SEQ ID NO: 81475 - DNA, 248 bp, Glycine max
  Clone ID: PAT_MRT3847_44587C.1
ggctcgggtgctcgggtattacaaagcttcagaacatgagagccttgcatccggttcttacacaggcgagttatcactataaaccctgccgataccagaatggactatccagggtcaggcatctaattcagagatggcttcgcgacaaggtatacgcacgattgacactactcgtgtctgatagtacaggctggagactccactggatgtatgcgaagaggacaactggaaagatgaaaactgcgacg

SEQ ID NO: 81476 - DNA, 309 bp, Glycine max
  Clone ID: PAT_MRT3847_44588C.1
ataagattctgctcctttttctctcttgcatttgcccttcttgcaatctatcgggcaaaacttacaacgtggaagggctctcggttgacaaacacatggttctataaggagattggggctggtcttcttcatctccctggattcagggacaaaaaattcatgaagctgcctcccttgggaggagattcatactgggttttcttcatgagaaccccgcagtctccatgtgacatactcactatctgcttatttgttgcctatcgccctcccctccccaatactgatgaaatgattttgggttttatggct

SEQ ID NO: 81477 - DNA, 338 bp, Glycine max
  Clone ID: PAT_MRT3847_44589C.1
ggctcgagctcgggccaagaacagaatttattctgcataccattgtatcccggatagagggggggccttaaaaaattattgaggggctgtctaccaaactaacacagccttaatggaacgaaaaacagatacacacactgtgagaagtcaaactctctgcaacacacaaagaacttgcgtaaagagaagccgatactggatgattacacattttgctctgaattgaagcattcagaacatatagggtataacctaactgctctattcccttgcatgcttaccaattctgttagtgataatcaattttttgcagaagacagctcgatatgcaaacactc

SEQ ID NO: 81478 - DNA, 313 bp, Glycine max
  unsure (1)..(313): unsure at all n locations
  Clone ID: PAT_MRT3847_4458C.1
cggcgcgacccacgcatccnaccttatcccttatcctttcaaaacctttccatgtctacctccnncactgctctttttctcccaaccctcactctccgaactcnacaacctctctgttctccccaatgcttctcctcgtccctctccctcacccctaactccaaacccatttccatttccgccgttttcctcaaaacaacgctgtcttcgtcgtcaccgttttcgctgtcgtctcgcttcgttccccatgtctctttgtttgatcatgaagaggacacctttctcgactgatactgccccagcttctctctct

SEQ ID NO: 81479 - DNA, 307 bp, Glycine max
  Clone ID: PAT_MRT3847_44590C.1
ccaaacttctcttattccctcgccattagtgcggctaaccttgagcgccaagcctgcaaagatgaataaacggatgctgaaaaggcctccccatccgatcttatgaaacaagcattgacgctccatccctcaatcacaaagaagctagtcgcaaaagcaccatcgaaagaccacacacccacagatattctcaagcatactttcttccggacacatcaaacaagagatccatctcaagaacactccattaatatatatagcgagagaaaataccttaaatagaggctgcctgacctgcaaaaactgc

SEQ ID NO: 81480 - DNA, 403 bp, Glycine max
  unsure (1)..(403): unsure at all n locations
  Clone ID: PAT_MRT3847_44591C.1
ccttttattgaagggggctaggtccctcctccaattctccaaatgcaatgaactctgtaggtgcttttatgcctggcgcagaagttggtcagctttatctgtgtttatgatatttttaggctgctggcatattggtcatgcaattagatgaatatgaaaactttttttgaaatgtgataggngacaaaggtccgagggtatttgatcattacctctaaaaaagaaaaaggaaactctttccatgttttgaaattctcagctcatgctccacagaaagaacaccctataccactggttggttgagaagattgaaaagaagaacatttcattagcgaaggccacacttggtggctggcttttttcaagggggaagggatgtgtgcggaactgcaactgccaaggg

SEQ ID NO: 81481 - DNA, 118 bp, Glycine max
  Clone ID: PAT_MRT3847_44592C.1
gggcacaatgcaaggtaacacatcgacttgaaattcggccgctctagatgatccaggcgtacgtatgcgtgcatgctacgtcagagctcttccacgagtgtcacctacattcgcctcg

SEQ ID NO: 81482 - DNA, 883 bp, Glycine max
  Clone ID: PAT_MRT3847_44593C.1
ggcaccggcccggtatccttttgtctttccacgcgtccgcccacgcgtccgacggctgcgagaagaccacaggaggggaacagccaaaggacttgcccacgttcattctgttggtggtcccaaatttacacatggaaatattaagtcctcaaatgtcctcctcaaccaagataatgatggctgcatttctgattttggccttgctccccttatgaatgttcctgctaccccttctagaactgcaggttatcgtgctcctgaggtgattgaagcccgtaaacactctcataaatccgatgtgtatagctttggtgtcctccttcttgagatgcttaccgggaaggctcctctccaatctccgggacgtgatgatatggttgatctccctaggtgggttcagtctgttgttagggaggagtggacggccgaagtttttgatgtggagctaatgagataccaaaacattgaagaggaaatggtgcaaatgttgcaaattgccatggcctgtgtggcaaaggttccagatatgaggcctagcatggaggaagtagtgagaatgattgaagagatccggctatccgactcggaaaaccggccatcttcggaagagaatagatccaaggaggaatcaactgctcaaactccataattaacacttgcctttttcttgtgttccaagcaaattgatttcttgaaccttttttttttttcagttagcaacattcagtggtatataagagtgcatgaaacaattctcacagatggaattacttctgttattttattccttgggaaggtttattttcattaattcttctgtattaacgttgtaattcaattgatgatcttcattcaagaacaatctatcccctttaattattgt

SEQ ID NO: 81483 - DNA, 573 bp, Glycine max
  Clone ID: PAT_MRT3847_44594C.1
aattcggctcgaggttgagaatacatattgtacacactcactgctctgtatctctatcactaaatttcaaaatttgctctctctaatcttaaacttgattgcatcagtgaggaagaatggaacgttcaattccagaggctgcagaatgtgatctctccattccaattccaaggggtggacccatttacgttcctaacatggtcggcccctccactagggttcctcactttcagacttgtcttctttctgaacttcggaatctcgaggctgaattgtctgaagatttttctcaccttgatatctcggtggatgaccttaaaatatttacagaggatgacttaatggatatggctctcaaagaagtatttcaaggtagggagaacgatgaaaatcatcctccgcttctggaccaacccaatgcgagcaggttcggtgagaagaaatcaaatagaaagaggaagggaacaaatgattctgttcttgaaagtgattgtatcgaaaaggtggaataagtggtgagaatcaaacagtgcttatatgattcttagcatcagtctacctcattatttgatc

SEQ ID NO: 81484 - DNA, 2535 bp, Glycine max
  Clone ID: PAT_MRT3847_44595C.1
cgctctcccgtcgccaaaaaacgccccattctctgttcctctctgttctctgttacgtttcggatttcacttcttaagccccaaatttatcatatttttccaaaccccattattattccccctccaaaaactcgttcccattttcttcattcgtcgcgttattttttcgattcttgaggcgcgtcgccgatctctggcggtgcatggcggcggggacaatggcgactgcggccggtgcggcggtgatgctctactacgtgttgagcaggcggctggcgcggaaggaggaggacgatggcgaggatcacggcggtgaggtgtcgaaatcgagcagatcggttcgccggagaaggatttcacggcggccggcgcaggctccggcaacgctgctggagtcaatcgtgacgctgtcagagactataaggttcacgtattccgagactctcgggaagtggcccatcggcgatttggccttcggcatcaactacttcatgcgcaagcagggtaatttggaaccgagaactgtagatgcaaggagtgtgtaattgctgggattaacagaaaaggaattagcaaagccagaattgttagtgaatacagatttcagttctctgctttttccctctgttgtaaaaaattttgattgtacggatttgattcttccttgatgatgtgctcattcagaagccaaaagctgggcttctgaagcctgcatttaccattatacgtgatacacaatcaaaatgtttacttctattgatccggggtactcatagcataaaagacacactgacagctgcaactggtgctgttgtccccttccaccattcagtgttaaatgatggtgggataagcaacttggttttaggatatgcacactgcggtatggttgctgcagctcgttggattgcaaagctctgcactcctaccctacttaaggctcttggtgaatgtccacacttcaaagtcaagattgttgggcactcacttggtggtggtactgctgcactgttaacatatattcttagagagcagaaagagttctcttcaagcacgtgcgtcacatttgccccagctgcttgcatgacatgggagttagcagaatcaggaaaacactttatcactaccatcatcaatggttctgacttggtgccaacattctcaacttcatctattgatgatctccgttctgaggtcactgcatcctcttggttgaatgatcttcgggttgaggttgaacatacaaaggtcctgaatgttgtctaccgctctgcaactgcacttggatcacgcttaccatctatatctagtgcaaaagctagagtagctggtgctggtgctattctgtggccagtaaccagtagcactcaggttgtgatgaagcgtgcacaaagtgttgctgaagctgttgtcagaactcgctcatcattgtcatcatggtcttgcatgagtgcacggcgccgaaatgtgggttcatcagtaaactctaaaactgacgacttaactgaaacctctctaatatccgagagaagcactgaatctcgtatgactgaagaggtggtaagagaacctatgcttaaggatgaaaatacttcctctagtggaggatctggtcacgatgacacagatgaagaggaacaactcattcctgctaatcaagacattactgcatctgctgttgacgacttcacagaaggccagttatggtatgaactggagaaggaacttcaaaaacaggataatactatgaacattgatgctcaagaagaagaggctgcagcagcaaaagagatcacagaagaagagaatcaactcgttgatgctgctgcagaatgcagtagcagttcaatcacaacagcagacaacgtggacagccatcgattttatcctcctggcaggatcatgcatattgtctctgtaccttccttggatgagtcaaattcaaattctgatgaccctttagaagaacatgtcggcttatatgaaacacctagagagctgtacagcaagctcagactttcaagaaccatgatcaatgatcattacatgccaatgtataagaagatgatggaactattaatccgagaactagagaaagatagcagctgtaatattttggattaactaaaaacaaaatagcaattgcagagttgttagtgaatacagatttcagttctcttctttttccctctgctgtcatgtgaaaattttgattgtacggatttgattcttttaaggtaggtaaatgtatagaatgagaaagtaatgatgtatttactattgattttaaaaaggttaagattacaaggtgtactacaaggtactttatttcaaatcaacgggaaatgcattttttttctaacacattttctctttttagagtcaattagtattagtactacattaatttaattgcgctgttcatgaatggttcatatgcaatcaacactcctaaatcactaggggttgggtgttgcaattaagatacatttatgtaattcatgagttaacataaatcagcaacaacttacgttt

SEQ ID NO: 81485 - DNA, 336 bp, Glycine max
  Clone ID: PAT_MRT3847_44596C.1
cgtaacctgatgatatcccacattgctaggatctgtaacactgtaacgcaacgcatcacaccttactgatatgaattcggcggcatccttatctcttacggtacaagaatgtaattatgaatgcgcactatacagtcggggatggaagaatttctgaataaatggatatggggtctgagaaaatatcactctctgaagaataacatgagtctgatggtgagaaagaaagacttaatgctgtcaccatatttagctattgctttcaccagaaactaaacccactcactggagcagagcccttattgccaatgcttcaagacaaagcatccacaccca

SEQ ID NO: 81486 - DNA, 515 bp, Glycine max
  Clone ID: PAT_MRT3847_44597C.1
gggcccaaatataatcttacataatgatgcttttgatttaccttaagagtaaatacctaatgcacaatacaagtattagggggaaatattatagtcttggcttcttaacccgaatacaaattgactagttttgttgaatcttctcaaacaagccaacaaattaaaccattatataacttatttgttcattctaaatgttggtgtccatatcctcataattgccaaatttattaagccagtagatgtcatgctaacatgtggaagcaacgatatccaaagaaaggaaatagcaaaatctcatacttcatgtagcaaaacgtatcagttgatggagctcatttgcaatctactttttgtctccgaggcaagtcaagcttgagcaacttggtgaactgagatgtcttgagctctagctcatcccactccaggtaaggactgctgccttccactatccctgtcccagcatatataaaagcaccaagatccttttccaccaatgctgacctgatgccaac

SEQ ID NO: 81487 - DNA, 284 bp, Glycine max
  Clone ID: PAT_MRT3847_44598C.1
agcacttgcttactatgaggatctttgttactccttttttttcttgaactcaaacatgtcagatgacgtgggtgtgctagatatctggccaagtccatttgatatgacggtcaacaccgccctcgctgaaaaggataggaactatgattacagagaagaggacttgaggatcaagaggcctattctactccataagaaccctgttgacatgaagaaggcagttcccatccacaatggcaaccctcattcgtgaataccgcatgtggtggacaggactttgagga

SEQ ID NO: 81488 - DNA, 390 bp, Glycine max
  Clone ID: PAT_MRT3847_44599C.1
cctacatatgcacctgctttattcatatacacaaaaatcaaactcatatcatatatttaaagagtctaagttactagtcaatatgttacaccttgtgaatagtgaaacaatatgcaaattacttgtttaacacttatgaatagtgaaccaattaaaattctaattcagtagattctccccgaaccaacaagaaatgaagctaagcatataccatgacctttattgagcagaaagaccagtttttcacaaattaaaaaccctcttttaattccacttccaggtctcacaaaacccaacaatgctacagggtatacaaatataaatataatctcacgattctcgtcaccgaatccaattcatacgccgctcttgatgatcttcctcctcgcg

SEQ ID NO: 81489 - DNA, 309 bp, Glycine max
  Clone ID: PAT_MRT3847_4459C.1
aaaccatatcaaagctcttagaatggaactggtaaacatctttagaaatcaatcgcagtttctttccacaaagaaacaacaccccacttcccgaccacagatgtgtagaaagttcatactggacttcctaactacggaggaatgctaatctaacccgatgagtttgaatggttacctagacgctgacctagtcttcgagactctttgctggtggatgagccacaatatgcacctggctcccaagactgcggaagtactaatatcacagctgaacgaccctatcattacgccggcgtggctaatacaatg

SEQ ID NO: 81490 - DNA, 293 bp, Glycine max
  Clone ID: PAT_MRT3847_445C.1
gtggagaagaagaagctcggagtcgaagaagacacgtcacaagagtgtaagtaagcaatagcatgaattcggtggcgatgacggtggcgtcaatgttgttcgccggcggctgtcgtatcctcgccgtgcctgcgcgggcgcgcgccatccgcatcccgcgagcagctctcagcagtcaccacaacaagcacgctccgagttggggctgtcggagttcacacaacagtaacactgcactcgccggtgaagccgaattctcaacaaccgacgccggaaacttaaccgctacctct

SEQ ID NO: 81491 - DNA, 384 bp, Glycine max
  unsure (1)..(384): unsure at all n locations
  Clone ID: PAT_MRT3847_44600C.1
aaaaaccaattggtgaccgacccngagaagaaaccaacaggcagggtttgtttgaaaacccacgcggaacaacaaagcacggcacnaggnncccacacccaaacacaaacagacgggcgggacccggaacgagaacgaccgacaggacacggacacacaccaagagcgccacgaagccaacgcnagcaccaacacaacacccccgcagcccaccagaaacagaacaaagaagcaccacagaggagcccgccgccgaccacggggaaaagacgccgcngagacgcgcgacacggcgcgccacggcgccaggacagggcacggcaccacccaaaccgcngaagaggcngccanggccnangaccgagccgcgcacaagaagagggg

SEQ ID NO: 81492 - DNA, 1934 bp, Glycine max
  Clone ID: PAT_MRT3847_44601C.1
gctgttgctttgcatttcgttactttcatttgtatttcgtttgttgttcaatctaacaaacttctctatatcgtttactttttcaacacaccttacacacttctttatttgagcctttcatataaatatcatggcttcgagggtggtttcggttttggtgatagcgatgatgttgtttgccatgaactgtaactgcactagtgttggccacatgccttcaaccaaagaggaaggtcacgattttcaggaggctaaagccaagacaacacaaactgcgaacaaggccatggaaactggtaaagatgggaaagaagccgcagagtcatggacagaatgggctaaagagaaactcactgaaggtcttggcttcaaacatgatcaagaatccaccactaagaaagtctctgactatgccggtgatgctgctcagaaatcaaaggactatgccggtgacactgctcagaaaaccaaggactatgccggtgacactgctcagaaaaccaaggactatgccggtgacactgcacagacatcaaaggactatgccggtgatgctgctcagaaatcaaagggctatgtcggtgatgctgcacaaaagaccaaagaatatgttggtgatgctgctcagaagaccatggattatgccactgatgcagcacagaagaccaaagattatgctactcagaagactaaggactatgcaagtgatgcaactgatgctgcaaaaaagactaaagattatgctgctcagaagaccaaggattatgcaagtgatgcaactgatgctgcaaaaaagactaaggattatgctgcgcagaagaccaaggactatgccagtggtggtgcgcagaagaccaaggactatgccagtggtgctgcgcagaagaccaaggactatgcaagtgatgctgcgcagaggaccaaggaccatgcaagtgatggtgctcaaaagagcaaagaatatgcgggtgatgtagcacagaatgccaaagattatgctcaaaagagcaaagattatgcgggtgatgctgtacagaatatcaaagattatgcaaatgatgcagcgcacaagagcaaagattatgctggtgatgcttctcacaagagcaaagaagcttctgattatgccagtgagacggctcagaagaccaaagactatgttggtgatgctgctcagaaaagcaaagaggcttctgaatatgctagtgatgcggctcagaggaccaaagagtatgctggtgatgccaccaagagaagcaaagaggcttctgatcatgccaatgacatggctcggaagaccaaagactacgccagtgacactgctcagagaaccaaggaaaaactccaagacattgcatctgaagctggtcaatacagtacagagaaggccagagaaatgaaggatgcagcagcagagaaggcaagtgacattgcaaaggctgcaaagcaaaaatcacaagagctgaaagacaaattaggtggacaacaccgggatgctgagctttgagaattgagacggtttttaatcactttgtaccttttaattatgccacaatagttgtctaattctgccagaaataatattgtgtgcgtatatatataagggagtgtccgtctttgtgttatctacggggtgtggtctgatataatattagcaactacatagtcgaggttggaatattttgtactgaatatgatgttttctttatgtatagttaaaaaataatagatactcagcatgtcatttctctgaataaagtgcccaatttgtaggttccatccaaaaaaaaaaataaaaacatataataagatgtagtatattgaatgcttttaaaaaaaaaaaaaaaaaaaaaaaaaaaaaaaaaaaaaaaaaataaaaaagggggggcccccaaaaaaaaaacccccccccccggggaaaatttccggggggg

SEQ ID NO: 81493 - DNA, 272 bp, Glycine max
  Clone ID: PAT_MRT3847_44602C.1
ctagctatctcgatcgaactgtccaaggtcctgtcaccagtttgatcttagccaattagggtttgtagaaaaggtgtgtggttgggtgcccggtgttgtaagttagcgttaacgtggtaagtggggtgtgtggtgctttgtgctattgttttgtatatttggttgtaggtctaccacgcaacagcgtcattttcctaccaacatatccacccccaggagaaaacagcttataagatttgctgctgagagtcccctcttgtacattagaagag

SEQ ID NO: 81494 - DNA, 1949 bp, Glycine max
  Clone ID: PAT_MRT3847_44603C.1
ctcgaagcattgcatttcgttactttcatttgttgtgcaatcttacaagttccaaacttctctattttgttattatttgttctcacttctcacacatacagatttgagccttttatattatcatggcttctaaggtggtttcggttttggttatagcgatgatgttgtttgccatgaactgtaactgcactagtgttggccacatgccttcaaccaaagaggaaggtcacgattttcaggagtctaaagccaagaccacacaaactgcgaacaaggccatggaaactggtaaagagggacaagaagccgcagagtcatggacagaatgggctaaagagaaactcagtgaaggtcttggcttcaaacatgatcaggaatccaaagaatccaccactaacaaagtctctgattatgccactgacactgcacagaaatccaaggattatgcaactgacactgctcagaaatcaaaggactatgcaggtgatgctgctcagaaatcaaaggactacgccggtgatgctgctcagaaaaccaaagactatgccagtgacactgcacagacatcaaaggactatgctggtgatgctgctcagaaatcaaagggctatgttggtgatgctgcacaaaagaccaaagaatatgttggtgatgcagcacagaagacaaaggattatgccactgacgcagcacagaagaccaaagattatgctactcagaagaccaaggactatgcaagtgatgcaactgatgctgcaaagaagactaaagattatgctgctcagaagactaaggactatgcaagtgaagctagtgatgttgcacagaacacaaaagattatgctgctcagaagaccaaggactatgccagcggtggtgcgcagaagaccaaggattatgccagcggtggtgcgcagaagaccaaggactatgcaagtgatgctgcgcagaagaccaaggactatgcaagtgatggtgctcaaaagagcaaagaatatgcgggtgatgtagcactgaatgccaaagattatgctcaaaaaagcaaagattacgcaggtgatgctgcacagaatgtcaaagattatgcaagtgatgcagtgcagaagagaaaagagtattctggtgatgcttctcacaagagcaaagaggcttctgattatgccagtgagacggctaagaagaccaaagattatgtcggtgatgctgctcagagaagcaaaggggctgctgaatatgctagtgatgcggctcagaggaccaaagagtatgctggtgatgctaccaagagaagcaaagaggcttctaatgatcatgccaatgacatggctcagaagaccaaagactacgccagtgacactgctcagagaaccaaggaaaaactccaagacattgcatctgaagctggtcaatacagtgcagagaaagctagagaaatgaaggatgcagcagcagagaaggcaagtgacatagcaaaggctgcaaagcaaaaatcacaagaggtgaaagagaaattaggtggacaacaccgggatgccgagctttgagaattgagatgtttgaatcactttgaaccttttaattatgccacaatagttgtctaaatctgccagaaataatgttgtgtgtatatattatatggcagtatctgtctttgtgtgatcaaggggtttggtctgatataatatattagcaactacgtagtcgaggttggaatattttgtactgaatatcctcatgttttcttcaagtttagttaaaaaataatagatactcagcatgtcatttctctgaataaagtgcccaatttgtaggttccatctagctgaattggagacatatcatatgaatgtatgatgtgtatttagcgctttaaagtttaatcttcacttcctgcgaatggcagaggaggcattgtgtgaatgtgatatgaaagttcaggagttatagag

SEQ ID NO: 81495 - DNA, 156 bp, Glycine max
  Clone ID: PAT_MRT3847_44604C.1
aagtcgctacacgctaccgcgaatttattttaaggtgtcgttaatgagtaagagaatgtacatatttcttgtcacaattggactgcttacacaactctaacttaatttaagaatctactaaacattacacagacaacattactcactacctctcaa

SEQ ID NO: 81496 - DNA, 336 bp, Glycine max
  unsure (1)..(336): unsure at all n locations
  Clone ID: PAT_MRT3847_44605C.1
cgccaacttaaaccattttgttatatattgagacataatcaagtccacaaccttcatagcaaaagggtttattaacgctgtaaaaggcgcattttaaccatacaacaaaaaatagttctccaagacctattaaaaacattcacattcttaacacgaaaattaggcctttccaccttgnatgcgtcccgctcaacaccctacttggtaactgcgtggggtttgctcgccttaacaaggtatcaaaatttcacctgcaaaccatctttagtaagggagtaggctttttgacaaaacaaactccctttctttggctttcctccggattcccccctcacc

SEQ ID NO: 81497 - DNA, 262 bp, Glycine max
  Clone ID: PAT_MRT3847_44606C.1
tgttcctcgacatgtctgtctgccggctagctatgatgagtagctctggaggttgtacgcaacgcgatactatcgctcatggcggacgtttacccaacatcaaccctgatcttctgtccatcaagactgtcaaggaggcgatgtagcccatgagtcccaataatgctgctaaccactcaacgaacgcttaaatctttgctctcgaactgttagctcaacaactcttaaacttgtgctcttaggctgttagctgtatatatat

SEQ ID NO: 81498 - DNA, 252 bp, Glycine max
  Clone ID: PAT_MRT3847_44607C.1
aaatcatttgacacttagttaatgtacataaaaacacaattatttatgtcgttgatatataaatctagggatatatgacttatctttctaaagcattaaatgcttttggtagtaggactagtccaccttttgtaccagactactagcaaatgcttttccttttttgctttgatcataaatcctcgtcatcgttcttccactcatcaaagttagtcttcttaattccaattttcctcttgagagttggtcgtc

SEQ ID NO: 81499 - DNA, 257 bp, Glycine max
  unsure (1)..(257): unsure at all n locations
  Clone ID: PAT_MRT3847_44608C.1
ggaacatccatgcagtgcagatgtggtgacgaaatagctgatgctccaactctgcgcagactggtctgccgcatacggcaagcaataaatgaaaacgagaacgcccccacgatccaggcccctaatcgactcgccgctaccctgctcgtcgacgcagtacacgagataanaacgacgacgaacgcgaagccactctcatccaagaagacgatggcccgacgagagcgactgcgcgcatcactggccngactccgggg

SEQ ID NO: 81500 - DNA, 502 bp, Glycine max
  unsure (1)..(502): unsure at all n locations
  Clone ID: PAT_MRT3847_44609C.1
ggctcgagcactgaccaaccccggagactctggcaggggctaaacctggaaaggtggaactagacacgtaggcctttnttgactcatattgtgtctatgattattatagtgttacgggtgctaaggttgttattcattgacttttcctttttatttgttttactcgagtatttttaatctgatttccttggctcgaactatgatattttctgcttaacattgaatactgaattaatggtttcatagttattagtttatggaggaaatatttgtaacgtaatacaaaattatttgtatgaaagtgttttgtttgtataattaatttgcattctattatttactttattagtcagctttaatctttttattaaaccaccttttttaggtatggtgatctcttcttataattttgaaaatgttttttcctttttgatataagtctatctttcttttcaatttttaccattttctttctttattcaatagtcttgttttttttttt

SEQ ID NO: 81501 - DNA, 103 bp, Glycine max
  Clone ID: PAT_MRT3847_4460C.1
cgcataataggaaatcatggcagatgcgccttccgccagacgagttacggctgccaatgtctctggagctgatgagttgtcctggtataattgcttctgggca

SEQ ID NO: 81502 - DNA, 721 bp, Glycine max
  Clone ID: PAT_MRT3847_44610C.1
tttaagaatgatggcgcaaagccacataaacatgaataaaataaaacatagtgagccgttacatttttttttagtaatccaaaggacgagatcaacaatgaaattcatttttttaaaaaaaattgtaatacaaagaagttaaaaaagaaaaggtaaggtgcatatttaaggagcatacaagttatgcaaggaattcattatatacaaaacattagcatgttcaataatgatcatacgccagtaatatacaagctagctgcaaatacaatgtcacgctttattgcattagaagcaatttccatttttttgcagagagcagaattacccataatagctgcagcatttttgaactcccgacatgtctcgtccaacctgacaatggtccttactatcagaccttcaggaacatcagtgagctcacaaatgtcagcaaacggagtaccctttgcccattcataaaccacttcaacgagaccaaatttgagattttcttgggcatactcagcagggtttattggtagattaaagtgtgcttggagctctccaagtcttatagctgtttggtataatctgtgtttcgcttcagacagcttgggtgtgagtgaaggttcagacgtattcttctgctggaacacaaaagctgacattatcgccactgcttcttctggttccagttcatccagagccttctcaaacaagcactcagtacttatcagttcct

SEQ ID NO: 81503 - DNA, 1343 bp, Glycine max
  Clone ID: PAT_MRT3847_44611C.1
ggctccacgtggatggagctctcagtttctggaacattgccgcaccctagatgtgggcatactgccacaatggtcgaaaaacggttacttgtttatggtggaagaggaggaggtggaccaattatgggcgatttatgggcgttgaagggcctcattgaagaagggaagagaatgaagcacctgggtggactcaattaaagcttccaggtcaagcaccttctccccgatgtggccatacagtgacatccggaggacactatttgttgatgtttggagggcatgggactggtggatggttgagtcgttatgatatctattataatgattgcattatattagacagagtttcagcacagtggaagcggctctccataggcaatgaaccccctcctgccagagcataccactctatgtcaattattggttcacggtatctgctaattggtggttttgatgggaaatcaacttatggtgatccctggtggttagtccctcaagaggacccaattgcaagtagattaactgcatctccacccaaaaatattcgtgaaagtaaggatgttaccttacttaatgatgattttcaacctcagttcaaggaaagccaaacagagaaatttcctttctctgaattgcaaagacgattgcaaatatcagtttcggaatccaattctaggcttcatattgtaaatgagttggaagataaagagctgcttgagttagcatcaagattagcaggtgaaaatgtttctacaaattcactggcaattgaagcacttcgtgaacactggagaaagtctgaatcgaatatggttaaactcaaagagcttggaccgttgcttcgggattaccaacgtctaatatacaggcaatatctagaaaggagtgcatctgctcaacaacctggatttggtgaacaagtgatgcatcaactttaccatgtaaaaaatgctactcagttgcgcatggatgatattccaaaacttttggcagagtacaaacagctacctatatgaatgcttgtttgatgaaaatgatccccccctcccccctccccccaaaaaaaaacccaaaagaattccatggtgagttgtctcaaaaacatggttccccaacaatacatgattcacagtgcatcgaccttgtttaatatcctgaaatgtagcttttctattttcaacattttttatgccatgtttgaacctacgatttcatgatttgcgaagatatcagcaaatttcaaaaccgaagagaacaattggtgttgaatcataccgagtgcataatgtttgatgtacaaaattgtttttctcctcccttctcaacatgctttttttccctct

SEQ ID NO: 81504 - DNA, 2335 bp, Glycine max
  Clone ID: PAT_MRT3847_44612C.1
ctctctctgcaattctctcatctaatgagccggcactaactacgcgtccgacctgtcctcctcctcctcctccgccaccaccaccctcccggtgttggcgttcctccttctcagcaccgccatcagcgccgcaccgatcatcggtctagactcattccttacccaccaatcccgaatcgatcctcaggcctcgaacgactccttcctctccctcccttcctccatcaaaacccccctctcccactctctcgacttctcctccaattccctcctctccctctctctcccaatctccctctccctccacctcctcggcgacttcccctccgacaccccctccctcctctccgccttcctctccgccgccaccaccaccaccacccacttccacgtcatcacccccttcgactcccaccctctctcccacaccctctctctctcccacactctccatcttctcgtcaccccctcccaaaccctaacctctcttaccaattctctctcccaaaccctaacctcacacctccactccacaccctcctccctccgctcccctctcctcaccatccctcactcctctattgaccaaatcatccaaaaccacttcatcacacaaaaccctaaccctaaccctaaccaagtccatctctacctcctcaacctccctcccgcttcctcttccaattccaaagcctatgcttactcatactcccccggcgattcttccgctgctgtgacgaaatgctccggcactttcttcacctcctcccaccgctacttctggatcgacctccgcgccggccccgtcgactacggccccgcgatctccggcgacggagtcatcccccgcggcgagttccaccctctcgccgcgctccacggccgtccgaagtccaacaaggccttcgccgccgacctcgcctccctcgtctggagcgcctaccacgtcttcctcgccccctccctccggatctccgtgcccttcgagaaatcgctcgtgattcagttcattcatatccatggcgggaatgataacaaggatttggccggtttagattggaaatcgatcgagaagagcttcaggttcgagagtaagagcagtggattgcttttaggggatcagagtttgagctttaggcagcacgagattaggtattccgagtgttcaatttgctcgttcgcaatctcgcggtcgattaattcgtatacctctaggtttttgtttgataattatactttgattgtgagtgagtatttggattcgaagcgattgcaccagattttgtctgattctggcgatgagttgaggaagctggctggtgtgctggaggaggactttggcagggttgttcctgtgtatgtttttgacttggattacacttcgttgttgttgcttgatcggtatcatcagtcggtcgcctttaaggacatggtgattgctgttaggacgaggaacacgcagaccgtgagtgattatagttgtaatggtaggcatgtgttcacacagacgagggagcttgagcgtcctattgtagggtcgattcttcagagtatgtggggggtgtcgccgactcatttgaattggagcccccagcacaatgagactttggtggattatacgtggagtatggggcagacaccctttgggccgttttctgagatgttgagtttgtcctttgtgcagaaggatgctgccaggaggaatgttctgttgacatcgctgaattacagcataacgagtgctatagatgttcttcagagtgttgagacgcatggcggggctaagaatctgctcaagcagaagcagcatgtggagtttgtgcagagatggaacctttttaagtacaagctgaacaaagccatgtctgcgttgtctcacttggattttgagatggctctgttttacttgcggtcttctgatcatgatctgtatgccattcactccattgtttatcatgcctcgcaggaaatagaggcgtcccttgtgtgctttagggaccctccgtttccctggggttcggtcttgctttctgcatcggctttcctttctgtctcttatatttatgcaagacgggacaaacttttcagaaacaaaaggaaacaattttgatgctttcactagaggacaggacagaagtttgtatgattttaagaaaacgcaaaacaaaacatgtatcattctacaagagaggtatgcttatggtgccatggtgaattaagtatttagattgcttgaactatttacttgagttcaactgtatacattttcctacttttttcatgctctgtgatcagttttgttttcttgagtttatcttcctttttcccttctcag

SEQ ID NO: 81505 - DNA, 457 bp, Glycine max
  Clone ID: PAT_MRT3847_44613C.1
ccaccgcgtccgattttcctctatagctttgctatcactggcctaattgttgtttttctcaatgagaaggatttcccctccgccttgcgcactttggcgcttctgtgtccccttgctgctacttgctagcttcaattgtgcgccttttgttctggccactgaaatttcgaggaatgaagtgagcactgatggaagcgttttaaatgaacagttagcaaaacctagtctacaggacatgatgatgaagcaaagtttaagggatttattccaaagccaattcccatggtgaagcctattccaaaaccattccccatcattaagacgtattccaaagataatctgctatctgcctaacctattgctaatccgatttataagcccttttcaaaatcaattacctattattaagctccgttccaaagataattccccatttgataaaccaagtttcaatttt

SEQ ID NO: 81506 - DNA, 1256 bp, Glycine max
  Clone ID: PAT_MRT3847_44614C.1
aagtacggctgcgagaagacgacagaagggggctttggtatggaagagagtagtggggcatgccgaggaaaaggacggtggcatccgaacgaaagcggtagcaaaatccgtttaagttaattcttttgacgcatacaaaggaaaacattttcttattcaaatactcaccaataccaaatccaacacccacacccacaccaataacaagcttggttggtacttatctacaatctgcatcatggaaggtgttattctgagaagggtcattccttcggataacagttgcctcttcaatgcagttggatatgttatggatcatgacaaaaagaaagctgctgagttgagacaggttatagcagcaacagtagcaagtgatccacagaaatattgtgaagcatttcttgggaagccaaacgctgagtattgtaactggattcttgactcggagaagtggggaggtgcaattgaactttcaatattagcagattattatggacgtgaaattgcagcatatgatatccaaacaactcgatgtgatttgtatggtcaggaaagtaactattctgaaagagtgatgctgatttatgatggtctccactacgatgcattagtgatgtctccctttgaggaagctccagaggagtttgatcagaccatatttgctgtacagaaaaacagaagcattggacctgttgaggggcttgctctaacttttgtgaaggaccagcagaggaaacggagttacactgacacatccaacttcactctccgctgtggggtatgccaaattggagtaattggtgagaaggaggcagtggagcatgcacaagcaactggtcatgttaacttccaagagtacagataatgcactccgttgatttgaatgggatacaaattcatgtgtaatctccgttgatttgaatgagcatcatcgatagaaggtagttgctttgttgcagacaaaaaaaactgaataatttctgcatgagaattgttgtggcaacttgtgttgtaataatagttccttggtcttgttccacaatgactgtgattataagaaactcacctctagtgactctagttgcagactagataaagaaattagtaatcaattattttttttatatttcacttcctttatataacttttagtgcaataactatgtaaactcacgccactattttaaccttgacgagtgttgaaagcttttgagcctatataaaaatcccttttattgatagtaaaaaaaaaaaaa

SEQ ID NO: 81507 - DNA, 189 bp, Glycine max
  Clone ID: PAT_MRT3847_44615C.1
ggggaggcctaatttaattctaaaacattctaagtgtgcattagccgggattgggggagaaagtacttggcctctcatctggctcacacttaagttcacataatcttcctttttggaaacacgatactaaagcctaagttctaccaatagcacattattggaggtactaatccggataaactgctcatc

SEQ ID NO: 81508 - DNA, 817 bp, Glycine max
  Clone ID: PAT_MRT3847_44616C.1
ctgcaggtcgtctctagacaggtgctcaaagttattttgaaaccacaggtcttgtgactttagaagtgcggtgcttaattggcgtgattttatttcgtcgttccaattttccattttagcaatgagctcaaaacttcgtagaaaactcattgggtcttttctattaaactctgggatgctaattttaattggttttacgtaaggattattaaattgactatatgaaaaattttgatttggatgatttccatagtaatgcggaaaattaggatcagaaattggggaaggataaggattataatttggtatatgaggtactggaggtggatagtaacctaaatgagcagagttttctggagtcatcgcgttaggtgggaattgagttggtgaattttgctgtggcaacactggaggcatgacgtgaggtggaatttgattcgatgaattttgctgtggtaacactggaggcatcatgtggggtggaatttgattcgatgaattttgctgtggtaacactggaggcatcatgtggggtggaatttggttcgatgaattttgctgtggtaacactggaggtatcgagttagttgaaccatgagcttgctgtggataagattcttgagtgtgcgactgcaaatttgaaggtttctcagttggtattaatccactttctaagttgaagtcaaattcttcattctccattaaatcttcagaaatttctgttccgaatgaatcgagtaggaatttggagatgttttcttttggcactttggctaggagcttcttccactcacgagccgattttgtgggcgttatc

SEQ ID NO: 81509 - DNA, 286 bp, Glycine max
  Clone ID: PAT_MRT3847_44617C.1
ggttgtgctaaaggtgtgtttggtgctactttttcttgtggggggtactactattgccagcttgaggctgagtgatcttggcctgctcatgaaaagtgatcatcatcaacactcaaatgattatgacttttcaaaaccatgctgtgatcaatgcgcatgcacaaattctaaccctccttattgccattgctcttatgttaggctgaattccatccatctatctagcataatgattattattgcatacttatatattgatcaggatatactatgtatagatatcact

SEQ ID NO: 81510 - DNA, 207 bp, Glycine max
  Clone ID: PAT_MRT3847_44618C.1
acccgccattttttttgagcaactccgggggaatcccaaacaaaaagtcactctgttattacgctatgaatctttctacacaaaacctaaattgaggtcctcatgctacagcaccctttgggcactgttgaacctatctgtataagggggagcagcctttcatcaaaagtttgctccttttaggttattgtgaaaatattggagttt

SEQ ID NO: 81511 - DNA, 442 bp, Glycine max
  Clone ID: PAT_MRT3847_44619C.1
tttgggctgatttatgtgcttggaaagatacagataaccaagagaaagcggctgcgagtcagtcgccctccgggtctcagggtgtcgtcgttccgccggttagcctctctaccctcccgtagtaaaggtattacggacttacgcaccctaccttaccgggccctactccctgccgctcccgcccatgccgtccggcttcggttgttaatccacttccgacggtccaaaaagttcctccaaaaggatgttaaatacgaatattccagccggctctggggtcccactactacccatagctagcctacccgtcgttccgtcgttaaaaccgggccggaaggttcctcccgaggaattaaccacgtcaaccgtacccgctccgccaggaaggaactctgaatagagagtcaagaccaaagtagttagcgacacgataggatcctcc

SEQ ID NO: 81512 - DNA, 359 bp, Glycine max
  unsure (1)..(359): unsure at all n locations
  Clone ID: PAT_MRT3847_4461C.1
ataaaaaaaaagttgacaacaaataaacaatataagaacatatgggctcaaatcactggaataaaaagatctaagactaatggacagcaataagaaaatacaaaagacaacaaactgtttggaaatcaaatagaaacaggggggggcagcattgaattttgattgtagcacgcggaattatttccggcccggtattggaccgtgtcagaagtggatttttagtggacataattagagatggggtcaaaactgataaaaaatttgttaatgtggaaaattattttgagttgcaaattgcaaaaaaggttgngtcgtggataaaaatgtgaaaacctggggtgcagtaatgggggggagaa

SEQ ID NO: 81513 - DNA, 472 bp, Glycine max
  Clone ID: PAT_MRT3847_44620C.1
atagtcgacgttttaagctaatagtcagtgttcaatttttcctcagggactcagatagtgaattttgaaaaatagggggactccgataatgaattaaaaaaaaggggaccgatttagtgaaatgagaaaaatagggtacattttttgcaattaagccacgataaaattctagaactttcagctaggggaatttctttccaaatgctttagctaagttgacacttcccccaccccgcacaaacaaatgtttgcacgtagaagtgtaccttgaacttaccttttggaacgctgaacccatgtagtattttagtcacatgcctcatcatgttgcctatcggagtttgttcatcaagacctactggtttgatcactttatcttttctgatatactctgcattggtatcaatctttttggcctaagtagaagtgaagatagaggggtttatattatgggaaatatagtgtatcccct

SEQ ID NO: 81514 - DNA, 148 bp, Glycine max
  Clone ID: PAT_MRT3847_44621C.1
cgtgtatgctaagcgcagcgcagctacagtcgtcgcgcaacattgcgattgataggggtgcgaaagccaagtttgcacaggcagactcacgtagcaagaggcgttgaacacaggctaacagtaagattgcctgatggcagactcacaa

SEQ ID NO: 81515 - DNA, 1409 bp, Glycine max
  Clone ID: PAT_MRT3847_44622C.1
ccacgcgtccgtacggctgcgagaaagtacagtatggaaaaaaaggttatgatgccagaaaagaaaagaaaaaacacttgggacgggatttttaaatccaaggcagatagatctgtagactgaagttaattgtccaaaattcgccagttagtcactgagttcatccattcatccttcgcttattcctcttgtttgggtcatggcaatttgttcctcactttcatcgtcatcgtcatcgtcttcttcttctacatcgtcctttggttcctcgagcaccgcgaaggcgtggatcatccatggcattgtggccggagtggcgattgctgcggcggtgggtgcacgcgcttacatgactcgattcagcaagtttcggagccgggtcgtgggcatcatacccgcccgattcgcttcctcgcgcttccagggaaagcctctcgttcaaatccttggcaagcccatgatccagagaacatgggaaagggcaaagctggcagctacattggatcatattgttgtggcaactgatgatgaaaagattgctgattgctgtcgacaatttggagctgatgttataatgacatcagaatcttgcagaaatggtactgagcgctgcaatgaagccctacagaagcttgggaaaaaatatgatattgttgtcaacattcagggtgatgagccacttattgaacctgagataatagatggtgttgtgaaagctttgcaggcagctcctgatgcagtgttcagcactgcagtcacatctttaaagcctgaagatgcacatgatccaaatagagtgaaatgtgtggtagataatcgtggttatgccatttatttttcacgaggattaatcccattcaacaagtcaggaatggtcaatcaacagttcccgtatttgcttcatcttgggattcagagctacgatgcaaagtttctgaatatataccctgatcttcaacctactccgttgcaactcgaggaggatttggagcagcttaaagtccttgagaatggctacaagatgaaggtgataaaagttggtcatgaggctcatggtgttgacactcctgaagatgttggaaagatagaatctctaatgcgtgagaggaacttgtcttgaactctcagacacagcagtgaaatcatatgcaaattaatcattagcaccccgcatcgcaaatagaaaaagggttcattttatttttttgttttagtataaaccttcttgttgcttacaacatagtacgcgtgttattatttataatatattttattttataacatcggcagtatgactaggtttctcggtttcttgtacaattattaatataatatatatgtgcagagaattaaaattttagccaaaaaaaaaaaaaaaaaaaaaaaaaaaaagcggccgctctagagga

SEQ ID NO: 81516 - DNA, 237 bp, Glycine max
  Clone ID: PAT_MRT3847_44623C.1
aataagcatatccaaattcgaagacatttatctatccttggcacgtatttaacacacagatccagataaaaacaggtcgggactgccgcttacattcagggggctaccgactcacgcggaaacaactcgcttcgtcttacggggggacgatacaatggtggtatccaaaacactcgccacccccggaccttaaaacaaccgaaaagggcccataacattaaactggctcattcttgg

SEQ ID NO: 81517 - DNA, 173 bp, Glycine max
  Clone ID: PAT_MRT3847_44624C.1
ttactacccaaacccaaaccaaatccaattgtatatcatccaattcatcaacctcccatatcactcatacccaaccacacactgcaaaaccaactccttatttcataatcaacctaccgaatcttcttataaaccctcaaacccatacctctaatactattcccattaacaaa

SEQ ID NO: 81518 - DNA, 103 bp, Glycine max
  Clone ID: PAT_MRT3847_44625C.1
aaaaggccgccggaagggtcctcttgcaaaaggcctccgaatgggtccggtggggtgatgccaccataagggttctgctttgagcagactactcaatggtacg

SEQ ID NO: 81519 - DNA, 309 bp, Glycine max
  Clone ID: PAT_MRT3847_44626C.1
aagaaccaactcacttatgaaaggctcaaactgtacaagaattaagttttaaatgagtatccgagtataacaacatttcaaacttgcatcaattgcaaaaaccatccaacttcttaaacatctctattaaatagagcacatccacaaattttttacttaaatcccagtaatgcatgacccttaaggctcaacacacacacacacatcacacaggtttccaaagataagaagattcatcaacaaaattaagtaacaagactaactacaattgacaacagaacaaaacataagggggtgtttggtttggtt

SEQ ID NO: 81520 - DNA, 246 bp, Glycine max
  Clone ID: PAT_MRT3847_44627C.1
gccacgtctccttccactgcatttcttcacttaacccctaaaataaatttcatcctatggttcatctccattgctattgttgctactattttcaccacctatctcttcagaataattctccattttgaagcagttcgtcgtgagtaccaacatccgatctgtgttaacttcttctttgcaccatggatagcccttttgttcctagctcttggagttcccccatcagttaccaaggacttgcatcaa

SEQ ID NO: 81521 - DNA, 229 bp, Glycine max
  unsure (1)..(229): unsure at all n locations
  Clone ID: PAT_MRT3847_44628C.1
gggcaggacacccctcttgtcctttttattactctngccatttccatatgctggctactaatatatatatattacggccttacgcctctaaggcatcaatctgcagcatagtcatgagctagaacaagaacacgaaaaagaagttcatggatggcactagtggtgagaaaaatgccattgcaattcatgtggggtcagcggagattcattttcaacggtgtgatgatgt

SEQ ID NO: 81522 - DNA, 281 bp, Glycine max
  Clone ID: PAT_MRT3847_44629C.1
ggccattggagtgggaatatgcttttctttggcaatggggccccctcaagtgcctgtccggtttccattgttaggcctcttaggtaagaatatcaatctgagaaggatggagaaacacaaattctacaatctggtgctcaaaagcaagagccaccgagagcgaaatcatttcagatgaaatattcatttgcctccaaacagcagcgaaagggtatcgaactagaccacagtggagtggaggaatacttgacatatggaatgatatttctcaagcataccta

SEQ ID NO: 81523 - DNA, 2394 bp, Glycine max
  Clone ID: PAT_MRT3847_4462C.1
ggggtttgtcacgctttttgtcttgacggtggtctgtggacgaggatgttggattttggttttgattctttgaggacacgacgagcagaagcaacaaggtggtgactacagatctcgcacgaggctgaagaagtatacaagcaagcattgtctttggcaacaactcaacaagcgcatgctatattatccaacttgggaattctctatcggcatcgcaaaatgcggagtgcgaaacctaactaaaacagaagaaatggcggagaagtcgggagcagcagaagagagctctaatccgatggcttttcaccatacgacgacgaagcttgtcgttttggcagaccttaacgtcgaagccgaagccgaagccgaagaagacgattcttctctcgtccctcctccactaattaccattttggcaaatgacgaaaacagtcaagataaaagttcgttgtccaaagacactgatagcattgaagctgaaagtaaaaagttgaacaaactgagcaaatcccgctcaagaaagacagattcttctcttgattttgtagctgatgtggatggtgatcaacatgttcaagggcctccttcatctcgggaggaaaaagttagcagtgtgaagacggcttggtggatgttgcaaggggaagatgcccaaaaatgctcacgctcattttatactcggcttgatgtaccaaagattaagccaacctcaaaaggctgtgttagcatatgagaaggcagaagagatcttgctgaggcctgaggctgagattgacaggcctgaattgctttctttagttcagattcaccatgcacagtgcctgatactagaaagttcatctgaaaatagttcagataaagaacttgaacctgatgaacttgaagagattctttctaagctgaaagagtcagtgaagtcagatatcagacagacagctgtatggaacacactgggttttatccttcttaaaactggtcgtgtgaagagtgctgtctcagttttgtcatcattgttgtccattgctccagagaactatgattgcctaggaaatcttgggatagcttatcttaaaattgggaatttggaattatctgcaaagtgttttcaagaattgattttaaaagatcaaaaccatcctgcagccttggtcaattatgctgctcttcttttgtgtaaatatgcttcggttgtagcaggtcctggtgcaagtgctgctgaaggtgccatgactgatcagatcatgtctgctaatgttgctaaggaatgtttgctggctgcagttaaagcagatagcaaatcagcccatgtctgggcaaatcttgcctgtgcattttctattagtggtgatcatcgaagttccagcaagtgcttggagaaggtgctcatggctccttgctacagtcatttatagcgtatttattgaggcagccaaactggaaccccattgcatgtctactcgatatgctgttgctttccatcgaataaaggagccagaaagatctcaagatcctagtgaactgctttcgtgtgctggaaatgagatggcttctataataagagacggtgattcatccctggttgagattccaatagcttggtctgggcttgccatggttcataaggctcagcatgagatagcggcagcatatgaaagtgaacagaatgggctaagagaagttgaagagcgtgctgtttgcagtttaaagcaggctatagcagaagatccaaatgatgctgtgcagtggcaccaactcggtattcatagtctctgtgctcggcaattcaaaacatcacaaaagtaccttaaagctgctgttgcctgtgacaaggattgcagctatgcatgggctacccttggtgtctcacttcaactatcagaagaaccatcacaagctgaagaagtatacaagcaagcattgtcgttggcaacaactaaacaagcgcatgttatattatccaacttgggaattctctatcggcatcagaaacaatatcaacgtgcgaaggctatgtttacaaagtcacttgaactacagcctgggtatgctccagcattcaacaatctgggtcttgtgtttgttgctgagggtcttttggaggaggccaagtattgttttgacaaagccctccaatcagatccattgttggatgcagctaagtctaatttgattaaggttgttgccatgtcaaagttatgcaaaggcctctcctcatgcggtcttaaagaatgatatcggagttcatcaaggataggtagtttttttatttttcttttacctttatcttttgttgtacatccaatttcatttataaaaatggataaaagaggaatgtacttgtatcattacgtgctttcaaaatgagcaattgagtatatagatttttcttttttc

SEQ ID NO: 81524 - DNA, 477 bp, Glycine max
  Clone ID: PAT_MRT3847_44630C.1
gggggaaaaaaaaacttttttttgtttttacccttttcggggaacttaccccccccggggggtgggccattcttttagagggccttatttccagttattttttaactgaagcttgtgcgggttcccttttcttctcccatttccattctccccaagacttaataagaaatccccccttcctcatgggttaaataatcccccctcccaattttgcccaaaatttaaaagaaaagcttaaagaaatccttttggcaaaaaaacagtcccttaaatcaaagctttcactccgagagctggtgccctttccactttttgggggggtccccttcatggggcccaacaaattaaaaccctccttgtttttctgaaaaaacccctccctttcaaagggctttgcaggggggggggggatttcccctgggtgaggaaccccccccttttttttctgcccaggggggggaatccccacaggggggg

SEQ ID NO: 81525 - DNA, 341 bp, Glycine max
  unsure (1)..(341): unsure at all n locations
  Clone ID: PAT_MRT3847_44631C.1
ggggnaagaacagagcgaatcacagacaccgcgagttcttttgtagaatttcctcattagcggcgctgctaccaagtttaggacgtagaacaccgatgaagaggatggttatgctgacgtgatccttggcacagatgagattgctgtatctgcgagtccagctaacaaatcgcatgctttatgcaacattgattccattcccagtatattcttcataggatgacaagacaatggtgtttgctataatgcatctagtactgacttcacatgtctaggaaagatctttgaacattttttccattttttgtgcttaagtttgacaagagagccaagagaacttt

SEQ ID NO: 81526 - DNA, 1539 bp, Glycine max
  Clone ID: PAT_MRT3847_44632C.1
tacggctgcgagaagacgacacgcttgggcacgggagaagggttttacattttattcgttctccggtgagaaacagaaacacacagaagacagagtgagacgcttctcacgatggagggaggagtatcctacgcgcgcatgcctcgggtcaaaatccgcgagctgaaggacgactacgccaagttcgagctccgcgacaccgacgcgagcatcgccaacgcgctgcggcgcgtgatgatcgcggaggtgccgacggtcgccatcgacctcgtggagatcgaggtcaactcctcggtgctcaatgacgagtttatcgctcacaggctgggcctcatccccctcactagcgagcgcgccatgtccatgcgcttctcacgtgactgcgacgcgtgcgacggtgacggacagtgcgagttttgctccgtcgagtttcatcttagggttaagtgcatgactgatcagaccctcgatgttacgagcaaggacctctacagttctgaccctactgtcagtcccgttgatttctctgacccctctgccactgactccgacaacaacagggggattatcattgtgaagttgcggcgcggacaagagctgaagctgagagcgatagctaggaaggggattgggaaggatcatgctaaatggtcacctgctgcaactgtcactttcatgtatgaaccggagattcatataaatgaggatttgatggaaaccttgactctggaagagaaaagagaatgggttgacagtagtccaacccgtgtctttgaaattgatccagtgacacaacaggtgatggtggttgatgctgaggcatacacatatgatgatgaggtgcttaagaaagcagaagctatgggcaagcctgggcttgtagaaatcattgcgaggcaggatagcttcatattcactgtggagtctactggagcggttaaagcttctcaattggttctaaatgccatagaaattctcaagcagaagctggatgctgtgaggctatctgaagatacagtggaggctgatgatcagtttggcgagcttggtgcacatatgcgaggaggttgattaatttgttagaaggatatcagacttgtttcccacaacttgtttcccggaacttgtttcttacttgtctttaactgaatacctgcagaacgtattaacttgttgagccaaggatgctaattagtaattactgtgattaccatttgaagatagatagttatctttcacattttattttacttagcttgccagaaacagtggttaccatatggtatttttttaatcacacaaactggagctctatcctcttgtcatctggcttggggagagggataggattaaacggattaagcagtctcccaaagagttaggatcacttaggctgcgaagcttttagaatattttaccgagtatttatcatgtttgttttctttattgtttataatggtcaaaagggataacttattggtttgtgaacaaataaaaagaaaagtaatgtatgtgatccttctcatacaaggataggcc

SEQ ID NO: 81527 - DNA, 655 bp, Glycine max
  unsure (1)..(655): unsure at all n locations
  Clone ID: PAT_MRT3847_44633C.1
caggtcatggtggttgatgctgaggcatacacatatgatgacgaggtgcttaagaaagcagaagctatgggcaagcctgggcttgtagaaatcattgcgaggcaggatagcttcatattcactgttgagtctaccggagcagttaaagcttctcaattggttctaaatgccatagaaattctcaagcagaagttggatgctgtgcggctatctgaagatacagtggaggccgatgatcagtttggtgagctaggtgcacatatgcgaggaggttgattaatttctgttagaaggatatcagacttgtttcccagaacttgtttcttgtctttaactgaatacctgcagaatgtattaacttgttgagccaaggatgctaattagtaattacattgattaccatttgaagatagatagctatctttcacatttatattacttagcttgccagaaacagtggctaccatatgattttattttttttaatcacacaaacagtagctctatcctcctcatatcatctgtggcttggggagagggatatgattaaacggattaagtagttttcccaaagagttaggatcacttaggctgtgaagctnttagaatttttaccgaggatttatcatgtttggtttcttttttgtttataatg

SEQ ID NO: 81528 - DNA, 473 bp, Glycine max
  Clone ID: PAT_MRT3847_44634C.1
ttggggggggggggggggggggggggggggggggggggggggggggggggggggggggggggggggggggggggggggggggggggggggggacccaaaaaacccagtttttattttaggggaaaaccctttaaggccctggccagggttttaataaaagttcccccgaaagggttaattttaagaaggggtttcctttagcggggcaaaatttttttttaaaaaaaattttcccccttaagataaattttcccccaccccggaaaaaattttcaaaaaccccctttcccaaagacccccttaaaaaaaccccaaaatttaacccccccgtttaaaaagttcccaaattggccccttttttatcccctaaagttcccaattggcaaacttgggtttgagagagagagcccttaaattaactgggtccccatagggccgttccccaaaaaccttttccggggattcccgttttt

SEQ ID NO: 81529 - DNA, 485 bp, Glycine max
  Clone ID: PAT_MRT3847_44635C.1
gaggggtgatgaatattaagttagaataaaggatcgcgagaagaggggggggtgtggagaagggttttacattttattcgttctccggtgaaacagaaacagagagagagagtgagaaaaaacgaaacgatggagggaggagtctcctacgcgcgcatgcctcgtgtcaaaatccgcgagctgaaggacgactacgccaagttcgagctccgcgacaccgacgcgagtatagccaacgcgctgcggcgcgtgatgatcgcggaggtgccgacggtcgccatcgacctcgtggagatcgaggtcaactcgtcggtgctcaacgacgagttcatcgcgcacaggctcggcctcattcccctcacgagcgagcgcgccatgtccatgcgcttctcacgtgactgcgatgcctgcgacggtgacggacagtgcgagttttgctccgtcgagtttcatcttagggtaaagtgcatgaccgatcagaccct

SEQ ID NO: 81530 - DNA, 267 bp, Glycine max
  Clone ID: PAT_MRT3847_44636C.1
gcgcccacacgtccggtcaaggttaggaggtagccaccaaaatggatgtaaaggcaatgccaacatttttgcggctgaatgacagagctgcggtggacaacgtggttggtgccaatccataagagataaacaataggatagatgtcgctgctgagtccactcgtgtatcactagcctagttaatcatatgtatgatattctactgttgcaagttgcatgatatgtgctcatagacatgcactgaactatggcatctgagtcaaagct

SEQ ID NO: 81531 - DNA, 479 bp, Glycine max
  Clone ID: PAT_MRT3847_44637C.1
aaaatacttaaaaattatgttatttatggtataaatattttaagtttttataaaaattaagtgtataattaaattttaaattgtgaaaaaaatttatcgattcattttacttttttattttcttctcctttaaatgtttattgagaaattatttggttgagacctcaaatgagtgttttaaataaactaagacttttaataatttaaagatgaattagtattttaatttgtgcattgttcgtgataaaatttattttgtgattaaaatttatactaaataaaattcagaacaaattaattatattaatttcatatgataaataatttatattataatacaatgatattttttattattaataatttcttttaaaattattggaattcaagttaaaagttaaaacaacactaaaaatgataaatcgagagataagatgttaaaaattccataaagatgctcttgttgaataaaggcttct

SEQ ID NO: 81532 - DNA, 389 bp, Glycine max
  Clone ID: PAT_MRT3847_44638C.1
tacgctgcgagaagacgacagagggggattgatttcagtatatatgtaattaattacgtacacagatgaaactttaatatcaatgattcatcatcatattatagcgttatgggtcgtagtcagaaaatttaactttctcagacacgtcgaagtgcatggtttgttaagagcacaaatgagttttcaaatgtgttaggtgtgtgtgtatatatatatctcaagtgatcttaggaaccggcacctcaacattctcacattccatcaccaaagcagtgtagttttccgttggcactggcctggctttcaaaaaagtactattccaatatttcactctggctttgcgtcttggctttccattttgtgcttttgagggcaatgcttgcactttt

SEQ ID NO: 81533 - DNA, 644 bp, Glycine max
  Clone ID: PAT_MRT3847_44639C.1
aagagaaaagtaggacaactaaattatagtttggaaccatatcatgttttacctcaaactaaaatcattttgattcattacaagcttccctgaaaagacgatacttgggcacagcaatcaagtgcttgactctcggtattgagaggccaaacttctcactcatgtccaactcacctggggtcatacctcctggaagttcccaactaaagcaatgtactaattgagcgacaacaattttaactgttgctaagcctaagtgtattccagggcatccccttcgaccaaaaccaaatggtatatattggaggtcaagtcctcgaaagtctaaatttttattgatgaatctctctggataaaatacttcagcattatcagaccatatcttggaatctcttcccattgcccatatgtttatgatgattcttgattttttctttaagaaataaccctgaaccatagcatcctctgttgactctcgggggactaatggtccaggagggtataatctcaaggtctccttgatcacaatatccaagtaacttaactttgccaaatcattttcctccaccattttgtccctcccaaccacattatccagctcatcttgaaggtttttcatcactcttggatgccctaggagctcg

SEQ ID NO: 81534 - DNA, 470 bp, Glycine max
  Clone ID: PAT_MRT3847_4463C.1
ccggaataccggtcgacccagcgtccggctattcgtggaaccgtattactattaaatccgatacgagcatgtaactcgtatgccacatgatggatagtgtttttcctcctttaacgctaacctcaaagagagttcaagtatttatacaaataaaagttttttctttttttatttctgagttttcgatttgagaatggctgaaatgggctgccgagtttgggggatcaaactttacgaccgcttgcatcaaaggacatagcctattctatggggcccccaaaattaaattacctggccgccgtttaacaactacttgccggggaaaacccgggcgttaccaaacttaatcgctttgcagaaaatccccttttggccggttggcttaatagcgaaagggccggcaccgtttgcctttccaaaaagtggttcagcctgaatgtctttggggacccgccttgtacgggaccttt

SEQ ID NO: 81535 - DNA, 314 bp, Glycine max
  unsure (1)..(314): unsure at all n locations
  Clone ID: PAT_MRT3847_44640C.1
ctcnacccaagtcgggtgcgaggatcaatctctccctttcacctttctccatagcctaccactgtgcttgtgggtgtgggggggagggggggcggcggcgccccccccccccactggggaccccagaggagggagagagaacaaaaaacgcacgggagcgatgcggtgggagggggaggcgttctgtttggagagcgaacgaaggactacacatccgcggctgggcggaggaggaggggaccggagcgccgcgacggccacccagagcacaagggacaaggcccgccgggcccttgatgccccttnctgccccc

SEQ ID NO: 81536 - DNA, 220 bp, Glycine max
  Clone ID: PAT_MRT3847_44641C.1
gagagtccaaattcggatttttgaaacggcttttactccatttcgcttctccttcactgtcgcacactctcacacactccgggggatcgtttctccctaccgattcacgaaaccctaatatttatggttcctattccgttgagcgaatatttagggttagattgagctgaggtgacatattcatcagcatcttctttgataaaatatgtaatggtttcat

SEQ ID NO: 81537 - DNA, 455 bp, Glycine max
  unsure (1)..(455): unsure at all n locations
  Clone ID: PAT_MRT3847_44642C.1
tcagtctctattgtcctcttgttgcagttctgttcacactccccttttgtatcctctaacttgtactcatggcatgagttttcctcagagcctgatactcacgtcacactcttcaaggaaccaaacctctctctcttcaatgaacacccaaaacctgataccctttatccttcttcttttcatacctttctcagtttcattctctaccacagataactttcttcttagttgtggatcacacagcaatgcttccctcttcaaccgtgtcttcgtgggagattccactgactcaggctccacttttctatcttcaggtgattccatttcactcacataccaaaagccacctcagaatttgcctactttataccacacagccagacttttcagaagcactgngaggtacaggttcaacatgaagaaaaacggcacccacttggtacgttttcatttct

SEQ ID NO: 81538 - DNA, 1094 bp, Glycine max
  Clone ID: PAT_MRT3847_44643C.1
ccacgcgtccgggatggttcagctgaggtggctatgcttcttgctgagggtgagggagcagtgaggaagaagagaaggcccaaaagaggggaagattttaagtttactgaggctctagttaaggcagattactggttactattttttgtttactttgttggtgttggaactggggttactgtacttaataatttggctcaaataggcattgcacaaggtatggaagataccacaatcttgctgtcacttttcagttttttcaattttgtgggtcggcttggtggaggagttgtttcagaatattttgtcaggacaaaaacgattccaaggacaatttggatgacatgcacgcagataattatgatcttcttgtaccttgtgtttgcctatgctatcaaaggaaccctttatcctgcaattgcaattcttggtatctgctacggcgtgcaattttccatagtgattcccactgtttcggagctttttggtttgaaagacttcggtctattgagcaacttcatggctttggggaacccacttggtgcatttcttttctctgctcttctagcaggacatatatacgacaatgaggcagcaaaacaacacggtgtaggcctcattgcttcaagtgttgcatgcatgggtccaaattgtttcaagctaacctttttgactctggctggtgtgtgtgttgcgggaaccatctccagcattatcttgaccgtaagaattaagcccgtttaccaaatgctttatgccgggggttcttttaagctacctcaaacttcaggccagtaaaaaatagtgaagctggataacaaataatgcagatcactccttggtttcttttctaggcaaacctgtttatctgctgtttcctggtcttccattatatgctacatggctgatcaacattctattagtcaaggaatgttgtcttcttacatgtgaccatgttggtttagttagtataattaagttcagaattttgttgttttacctttagaatacttgttttagtatgcatgttgggatctaatgctgaccactgagaagtgataaaggtaaatgatctgatacctgatagattaagt

SEQ ID NO: 81539 - DNA, 1544 bp, Glycine max
  Clone ID: PAT_MRT3847_44644C.1
cttaaaactatgtgaataaactacagatattcacatagttgttggagagtgaagacacagcctcagtagccaagttctgcttttagtatcttattttttcttattcaatcttgtgttctattctgaaactttgtatcttctctgttctgtaactttgcgtagtttttctgaacattcttagatcatgcaaagatcaatgtgcgcaaagtttattggttgttttcttcagtaatttacagtttgaggaaagtttttttttcccattctgaatgttttgcctcttgaattctgtcgtaatttttcaacggtgttagttcatctccacttttcttcaacaccatctttctctttctttttatttttatatttttgtcaattgttcgattcttttggtgttccagggagatcgattgataccgtcccgttgattttccaattcgacgaataagggtatcacatctcttaatcaaccatgtttacccgaatttttggtaaacctaaaccggaagtcaatactctaaccgctttagacgagttaaatgacaaacttgaaatgttagagaaaaaggagaaagtactcctaaaaaaggctgcagcagaagttgaaaaagccaaagaattcactagggcaaagaataaaagggcggcaatacaatgtttgaagaggaagaggctatatgaacagcaaatagagcaacttggcaatttccagttgcgtattcatgaccagatgataatgttggaaggtgccaaggctaccactgaaactgttgatgcattgagaactggagccgctgctatgagggctatgcaaaaagaaacgaatattgatgatgttgacaagactatggacgagatcaacgaacagacagagaacatgaaacaaattcaggaagcattgtctactccaatcgagcagctgctgactttgatgaggatgaattggaagcagaacttgaaaacttagagggtgctgaattggaagaacagcttcttcagcctgcaactacagctcctgcggccccagtgcaggtcccagctgggcagcaacctactcgcccagttcccgcaaagcgaactccggaagaagatgaattggcagctttgcaggctgagatggcactttgagcagaattttgcaggcttttttttgtgcatggcttcaatgaagaattgtaaccactattacgtggagaattctgcttctctcctgctcgcttatctttgaaattattgagctgaccagaggatgtatataaaagtggaaaaaaaattatcataaaagtcttcaaaacgtactacttttattttggatgagttcgaacccctcctttccattatacgtatcaagtatattgatgcatttgactatcttatactttatgtggttgagtttaacgtggtcagtttaatcaatgtattatatcttaaaaaaaaaaacgaaaggccgacagctggtttcatcaagaataacatgtcaagcttctcaataagacttggattccattatatgattggatgatcccttctaatttgaaggggac

SEQ ID NO: 81540 - DNA, 516 bp, Glycine max
  Clone ID: PAT_MRT3847_44645C.1
gtgctgtgccccctagactcagcgcgcctctaggggtgtctctcggccgttgtgtcgtcttcgctgcaaagccctggacctgcaccggcccctgagcaacggcacgggccggcccggagcacagagtttagtcaggaacctgggctcagcgcgctgcgaaggcaggctttggggcggagtttcctctgcaagctagagcctgcatcgaccgctcaccttcaagccacgtccagtgcgcgcccggctgtggtgcttatgtcgtgtctgactgttgttcgctctgggtgcgcctgctttggggccgtggtccctgcggttgcttggtgcagcattggccgtttcgggcccagggcgactcctgctggatggtgccactttgactgttgctggcccggggcgactcttgccttatgatgtggtcactgtcacaaaagcttacatgttgaggttttattcttattgattatttgattggtcgtatgggtgataggaaaatgttcagttgtgtgctgtacg

SEQ ID NO: 81541 - DNA, 394 bp, Glycine max
  Clone ID: PAT_MRT3847_44646C.1
gctatgaactcgtacgcacgctacgaaagctgctaatgctggtcaaggggaaagggtccctgttgcctactacattgacatctatggggaagagaatcgtcaaagggggacttaagctggcgacgtgcttgagggggacaaactttataacgattatgatgaccacgccgtcacctataatggacgagctacagaaactggacgatgcctcctgatgggtgcataaccagaagttgctgatagcaagacaggcctcgccgggtacgggattaatgaatggtaggcttctctgcgtcctacatgaggcgggtctatccatttcagatgacgtatattgaggccttaaatgcatttcatcagacactagggacgcaactgatgatagtctgtcttg

SEQ ID NO: 81542 - DNA, 405 bp, Glycine max
  Clone ID: PAT_MRT3847_44647C.1
tttcgttctttttttttttttttttttgtttttatttttttttttttttttttttgtttttttttttttttggggcctaccaagtattccaataaaaactttagggactttgccaagaaaaaattattttggaaatgggttaaacaaattaaggtcaatagtttagcaaattaaccgttttttaccggaagcgttttttgcaagggttcgggggctccccttctaccattgaacccaatcaccttaccattaaaaacaggattccttttaacaaagaccccctccttgatctctttggcaagaattttctcagccaagctggcccccaaaagtcaaattaggggttttcttaaaggggaagctccataaccaggggtataacctttttggcaaatttggccccga

SEQ ID NO: 81543 - DNA, 374 bp, Glycine max
  Clone ID: PAT_MRT3847_44648C.1
cacacgcgtacggacgacgctgccggtgacagtcaccgtcgaacatacattaactgctctcagaaatatgcggctgcatcgatgtgaaaagacagtattggctactcaactagcggagtttacaagccgaaggctgcttaaggaggtcaacatcaagctcggctccgtatccgctgaactgtcacagagacagcagtcagtggagttgctaaagattgaatactggcgccggacgtgacatgatgaccatatggctattgctgaattacgtgaagcatggctttatgaacatgctatgcatgacgttactgatgaattgccgctccacaaacttcgacaccttttctttgcacatattaggattgaggcagatg

SEQ ID NO: 81544 - DNA, 822 bp, Glycine max
  Clone ID: PAT_MRT3847_44649C.1
ctcggaattcggctcgaggaagaaccttctgcacctgctgagaagaaagaggggccaaaaagacggggtgctgcaaaaaagaagtcaagtgccatagtgttggacgactcagatagtgataatgaagttcacaatgttgacgatgacgatgatgacgaggactttgaaatcatgcagccagttgccccagggagaaagaaaggagggagaaagcctgctgctcaaaatgccaagaaggcacctgctgctgctgccaggaagagaaacgtaggtggcaagcaatctcagtttttgggtcagaaactcataactgatatgttggagagtacagggatatcaccagagaagaaagtgaggaagatgagggcgtctccatttaacaagaaaagcagttctgtattgggaagggttgctgctgctgacaaagatgaaagtgtaagtaaagacttgtctggtggttctgatgcttctggttcttctccaagcatcactgaggaggtggttgagattgcaccaccagcagcaagagctaggccccagagggccaatcgtaggcaaacgacatatgtactgagtgaatctgaaagtgacaatgattctgataatgaagattattccgattttgaggaagatgaagactaggaagggaagatgtgtgtgctttgtagaaacctgattgtggattttaacttccaagtgataattgtgaacgttatgagtgagttgcactaatttgtatatgctttcggatatgttttcatgatgaatgaaatagatttatcattagtacaaaaaaaaaaaaaaaaaaaaaaaaaaaaaaaa

SEQ ID NO: 81545 - DNA, 196 bp, Glycine max
  Clone ID: PAT_MRT3847_4464C.1
ttgcacataccaaccgatcagctgactaacgacagataccacacaacactacaaacaaagaagaattgagattccctttgcagaggagatggcatcccacaggcaaagctatgaagctggtcaacctaacggccgaactgacgaaaatacgaaccagacgatgggcaatatttgggacaaggctcaaactgcaaag

SEQ ID NO: 81546 - DNA, 429 bp, Glycine max
  unsure (1)..(429): unsure at all n locations
  Clone ID: PAT_MRT3847_44650C.1
ttttgttttttagttttttacagttcagtatgnattgttttagtngnnnaagagatccaataactggggaaactattgtcaatttccacctgttgccacattttgaagactctgtttaccctccactcctgttcataatttaatgctactgattaagcaacaacatccgtcgaggtctgcttgagaatcttaatagtcttactcggctgatgcaccaccacctggggctccacctgttctatggtagacaggcctggtgtttggggtgcaaacagcttccacctgtttgagcttctacacatattcttttttgtgcacgctctggttgttatccatccattccaatgcttattttaccgaagtctaaaccttctttttttcatgagactccaacttgacagcccgcttgtttttgtcactgacctggtt

SEQ ID NO: 81547 - DNA, 295 bp, Glycine max
  Clone ID: PAT_MRT3847_44651C.1
ccgggccggaacacccgggctgcccacgcgaacgatcacctccagaccggcagcagacggcccaagagggcgcaaggcataagaaggcccgccaggccccaaaccgcaccacggacagagaaccagagcgggaaaaaaaaaaaaaaaaggggggaccccccaaaggacccaagacaacggaccccagccagcgaccacaaaacccacccatagggacacccaaacccaacccacgggccgccgaacaaccagcgacgggaccgggaaaaccccgggccccacccaacccaagcgc

SEQ ID NO: 81548 - DNA, 538 bp, Glycine max
  unsure (1)..(538): unsure at all n locations
  Clone ID: PAT_MRT3847_44652C.1
gcgtncggtttattgctgtaggacaaattctatgtaacaagctctgatgggataggatgggttggttgcacacgtgacttnagaaagttaaagctactaaccgntgccagaccagattcaaattcaccaaagtggaccacgttacaaagaaaattactgtgtaacattataatttatatagacattatgctgtattttgtgtacatgcaacgtgactctttgcgagtgactatttaaaatgacacggtcattgaaatgtgaagtgtgctgacagtacgtgcatatatttncctgccatcgtacttagtagagtatgaatctttgatgcagtgatgggtttgtttgagattatttgttagttcaagtagtatatgtttgatttgtttaaaacaaagtctcggatttatgtgtgtatatacgcactcgcataaactgagaatttgttgtgtgagcctcttgaaaatgctgttaactcagacaagattgagtggaggatattatttgtcgtttaaatgaaataaaaataattttttttgac

SEQ ID NO: 81549 - DNA, 391 bp, Glycine max
  Clone ID: PAT_MRT3847_44653C.1
ggaggaattcgtcatatcaaataagcctttttccatgggctcttctcaaagccgggaaggcctcgaagtcacccgcactctaactccgactacgaaaacgatgcatacacggcgccctacgaagacgctaaaacaacccactccaccgatctagctggcgtgcacgcgagacttatggccttacttctaaaacaccactcgccgtataactccgacaccccgattgaacaaaacgccgctaagctctatccttgcatctgtggaaacactccgaacgcccagtgtttcctatgagacgcccacacctactgcgcttttgagcaagacaccgacgaaaacgagtacggcgatgttcggcaccttactgtgggctccaacgtccgtgctaggg

SEQ ID NO: 81550 - DNA, 406 bp, Glycine max
  Clone ID: PAT_MRT3847_44654C.1
gtctcgagtctagagccaccgtgcccggcctacaaatgttaacaaagcaattaccaatggcctttttacatattttttctttaatgaggaataatatgcatgtagaaaagacctacttaaagtcttcatttatattctttcaaatcaaatctttatttaataacttatatatgttgttggaatggttacatttttgcagccctttgtattttgtggtagttgaaattgtatcacttctaaacagcaaactgtttttgtttttaattagcagatatctgaagtactatttttgcagggtttgcacaggcccgtaactgtctactactttgatataatctgtatacatcctgtatgctgagctggtaaaatacattgtaaattacatattaaatattttatctgcttt

SEQ ID NO: 81551 - DNA, 386 bp, Glycine max
  Clone ID: PAT_MRT3847_44655C.1
cgtgaacgtccacatcgtttatggtgcgtgcatcaccatacagttcgtcaccaacgtgatcatccatgggttgcatattcatgactgcaaggtgactgggaacgccatggttcggagctctccttcgcattatggttggaggacccttgctgatggagatgggatctccatctttggctcgagtcatatttggattgatcataactcgctgtcgaattgcgctgatgggcttgtggatgctgttatggggtccactgctattactatttccaacaactacttcacccaccacaacgaggttatgctactgggtcacagtgactcttatgtccgcgacaagcagatgcaagtaaccattgcttacaaccattttggggagggactta

SEQ ID NO: 81552 - DNA, 343 bp, Glycine max
  Clone ID: PAT_MRT3847_44656C.1
gaaggatgggaaaaactgactttcccccagggcacttaccgaagagttaagagaatgcctctttctgtgggaggaggatctggtgcacagaatgctattctcatgaatatgccaaatgctgttttttcaatggggacgataatttcaatggagatctcgtctttgaacaacctaagaagacttaaacctacattaaatgcccagctcaatttctttatagcatatgcaaattttggctgatgacaccattaattaagaggctcttacccacaagctttcgcaacatggagagattcaggatgaagatgggtagaaaccttgacacgaggaattaatcacagct

SEQ ID NO: 81553 - DNA, 383 bp, Glycine max
  Clone ID: PAT_MRT3847_44657C.1
accactcgtgcgtccacgcgtccgatagaaatcttcattaagggtttaatggtagtgcatggcgtgatcacatagccaagccaaggttcttcattcttatcacaaaaacaaattgatacaacaactagactcaaacaaccttcgacaattccagttctaaacaaatccaaacaaaaggaatcctaacacggttttaaattacagccagcatcaacaattgcaggcacaatatttacagtttctaatgccttggcgtcacaaccacaaccacaatttaaatccacatatctttaagaatagcaatatttagcttacaagtagctgatagtactcatcctccctaaacagctctgagtactgagattccttgagagccagcacca

SEQ ID NO: 81554 - DNA, 271 bp, Glycine max
  unsure (1)..(271): unsure at all n locations
  Clone ID: PAT_MRT3847_44658C.1
cacaagccaagtgaaagtgcaganaaaataaaaatcaaagagcanaatgttcagggatcattcacaagattggggagaccttcatgtgggagggcacaagaaggaggaggagcataagggtgancaccatgctggagaatacanaggggagcaccatggtgaacacagtactgagtacaaaggagatccatctggtgaacacnaagcctggagantaccatgtgagnaaacccagagcacaaagatnggttcctagncaaagtcaangccc

SEQ ID NO: 81555 - DNA, 216 bp, Glycine max
  Clone ID: PAT_MRT3847_44659C.1
tttttttttttaaaaaataattgtttctatatttttatagctaggtacggctgaaaaggcatgaatccctgcttttcctgttacatatatctgccagtcttttgcagcttccccatctcagaagaaaaaaacatacaaaactaaattaaaggatccaggaagcacggtactacactactactgctactacctactgaaattttagacagcaataca

SEQ ID NO: 81556 - DNA, 261 bp, Glycine max
  Clone ID: PAT_MRT3847_4465C.1
gccgcccttttttttttttttgggacagaaccccatatttgggtttttaataaggcaaaagcaaattgcacacaaattcccaaaaaaaaacatgcttattcaccccaatttggttccatatcccaaaacccaacaggatgttttccccttaaccggtcccacccattggaacagaatttctagggaatttaaaattaaaaaaggctaaatttcttctacctcaattctgaaaggtctaccaccaaattttcaaaaaaggga

SEQ ID NO: 81557 - DNA, 423 bp, Glycine max
  Clone ID: PAT_MRT3847_44660C.1
tacggctgcgagaagacgacagaagggggtgatgcttattatgtccactagggtgcgacattactcattacagagagagagaggaaggactcatattgcagaaactcagcatgctcgagatggagagcgagacttgcctcgctatcgaagaccgacgtttctcagaatctcaataacccccttcgttgaaaccaatactacgacacgacacttcactgtgatgagaatagacgtttctactttgtgctgatgagcctaattcactctgtctgtcgcttgcaaccacacccttggatttaatttcgttcatggattggaccaccaactcctccctctgctcgtggctcgaagctgcttgcatgttacacacttgccactccgacacgaacaaaacccctcacgcattgttccgctcctccaaaa

SEQ ID NO: 81558 - DNA, 249 bp, Glycine max
  Clone ID: PAT_MRT3847_44661C.1
gctcttttccatttccatttaacccttacagagcctggtgtctcattcacacttaccatggaacagcatttcagcccacgcacccattctgctttatggcccggatctggagaacttgatagaccccacgtagcatcgaagctcgagagatgatcaaatacacgggtcccctcgacgctggcaccagcttgccgatcctgtatcctccagggtacgagaagatatgccaatcggatgcacctcttgctg

SEQ ID NO: 81559 - DNA, 181 bp, Glycine max
  Clone ID: PAT_MRT3847_44662C.1
atatggttgccctttatatatattttttgctttttacattatgtgcctttttgttttgttgaaaaaagaagctaccacctttactggaaggagttgttacccaaccccgaaaaactggccggaaaaagtttttcaagcgggtactgagccctggcctttgtcagaagagctacagagaaaa

SEQ ID NO: 81560 - DNA, 1644 bp, Glycine max
  Clone ID: PAT_MRT3847_44663C.1
gagaaaagaaccaatggatcactcagtttcagtttcatccaataagcctcttcatgttgtaatgttcccatggctagccatgggtcacgtatacccctgcttcgaggtttccaagatccttgcacaaaagggtcactatgtcactcttgtttccacccctaagataatagatcgcttgcccaaactccctcaaaccttatcaccatttgttaaactaaccaaattactcttatcgccccacatcgacaagaaccatctcccacaagatgctgactccacaatggacattccctccaacaaactctattacctcaaattggcctatgatgctctccaagaacctgtctttgaggttctcaaaacttcaaatcctgattgggttttctatgattttgcagcaagctggattccacagctagccaagaccctcaaaattcacagtgcctatttcagtccctgccctgcatggaccatatgcttctttgacacaccaaaacaacaacttggtgatgctgctgctgccaatagatcaaaccctgaagactactatggccctcccaagtgggttcctttccctacaaagattggtctaagaccctatgaggtgaggaagctcttagaagatatcaaggtcaacgagacaggtgcctcacctgtttttgatctcaacacagcaaattcaggttgtgacatgtttgtcatcagaagctccagagaccttgaacaagagtggttggattatcttgctgagttttaccacaagcctgtggttcctgtggggttgcttccaccgttaagaggctctgatgaggaggacaatagccccgattggcttcagatcaaggcatggctagatacacagaaagggtcatcagtggtgtacattgcatttgggagtgaggtgaaactgagccaagagaacctcaatgagttggctcttggaattgagctttcagggttgtctttcttctgggtcttgaggaagggctcggttgagtttttgcgagaagggtttgaggatcggaccaaagatcgaggtgttgtttggaaaacttgggcaccccagcctaagatattggctcatgcatcggttggtgggtgcttgactcattgtggttctggttcaatgatcgaaaatctcatctttggacacgttcttgtgatgttgcccttcttgctagaccaagctttatattcaagagtgatggaagagaagaaagtgggaattgagattccaaggaatgagcaagatgggtcgttcacaagaagctcagtggccaaggcattgagattggcaatggtggaagaggagggaagtgcttataggaacaatgctaaagagttgggcaagaaatttagcaacaaggagctcgatgaccaatacattgaagatttcattgcttcccttcacaatcacaagcatacataggagggattaggtggatatgagtatttgattatttgagttagtacaggtctttttacttttctaaaatttcacctgtttttttaaaataaattaagtatggttcaagttcaaccaaaaacgtattaaattttgaaaagaaaaattataccttgcacacacaatatgttaattgatactcagtgataaagagagagaagtataagttatacatattg

SEQ ID NO: 81561 - DNA, 181 bp, Glycine max
  Clone ID: PAT_MRT3847_44664C.1
gactaattcctgcgcgcgacacagtctagactaggacatgcggcctgcacgtctttatgatcatattgcattgggggagaaaaagggaaaactgtacactctctatgccacaaatgagaagaacaagaagcgtatttataatccaacaatgtcaaacagtgcttgcgctgacctaagcaag

SEQ ID NO: 81562 - DNA, 507 bp, Glycine max
  unsure (1)..(507): unsure at all n locations
  Clone ID: PAT_MRT3847_44665C.1
ataacttaatgatctacccaggttatgttcctcgcgagggaattgagccaattcttcttcactatgggttgccatttagtgttgggaattggtcattcaataaactggctcaccatgatgacggaattgtatatgaatgtaaccagctctttccagaacctccttacccaaaagaggtaagacagttggaacttgatcctaatcgaaggcgaggactatttctaagtttagagtgcataaacattataaatgagggtcttttattacaacatgcagcaaatggttgccctaaaccaacatggtctaaatacttgagctttccccaaagcaaagcttatgcagacctaactcacccaaaatatgtgaattgctacactttacaaatgatggaggatatcaaagaagaacatgtcgatgatggtgctggaaagccacatcccaaaatccataccattttttccacggaatgcaccccgtactttgattggcagactgtangacttatgc

SEQ ID NO: 81563 - DNA, 323 bp, Glycine max
  Clone ID: PAT_MRT3847_44666C.1
ggctcgagctatgatctagaaaccggcttctcctttttcttgaacggacccacccaactcgtcttgttaattggtcattggactctgccacccatgtgactataccctgcctagctttactcatgcatatgatgctccccctctaacatctatcatcatttactgctgttgactttcacgctattacgggggtcatccctctacacctgtttattacacagtgaccgatagcattcttgcaccgagggggaaccgtctaaagagccacatctatcctgtgttgaacgaactctggtgtcccatgcaaccaatcggacaaacga

SEQ ID NO: 81564 - DNA, 754 bp, Glycine max
  Clone ID: PAT_MRT3847_44667C.1
caactactaaagcgatcgaagaagggaactaaaaaccaagccagtgtctcactctcaccccagaaactcattgttgtgtggcacaacaaacttcaccaatgatgaaagccctcacaagctcttgttctaaggccatggtcgagactctaggacccttctctcccagagttcccctttgtgtttctgatagacccgaattctgcttcacccttcgttccaaaaatgagaaaaagggatggaatttattgctcctgaaactggttcgaaacaatgatctttaccctgttcatgcagtgccaccaaaggaccaggtggacttggagactgtggagcctcaggctcaacaaagtgaacaaacaaatgaatcaaagtttgtacgtgtatcgttccagttagaaaagacttgtaattttggtgaacaatttcttatagttggaggtgatcctgtgcttggttcatgggaccctttagaggcattacccatgacatggtctgaaggacatgtatgggctgtggagctggatatgcctgctggacaaacattccagtataagttcatactgaaaggagaagggggggatattatttggcagccagggtcagatcgattgatccacacttgggaaactatgaatagaatagttgttctcgaagattgggagaatgtagaacttcaggaaattacagaggaagatcaacttgccgagccaaatgaggaaccccaggttgactttgaagtgccaactttagctga

SEQ ID NO: 81565 - DNA, 286 bp, Glycine max
  Clone ID: PAT_MRT3847_44668C.1
gtataatataagccttttgtcttcccactttgattggttatataattttgttgtagattttaggtttttgttcatgagtttttttttcactgggagtgttgaggtttcaggtggaagttcttttttgagtgatggtcacttttgctctgtacaggagtagtgtttgaataagatgaaaaggccttaatcagagaaagtaaagtagcagtgtgtgaatagccaatgaaaatatgtagtacaaaaatgtaaatggccaaagaaaaaagaagggtgaaattgttgtggg

SEQ ID NO: 81566 - DNA, 755 bp, Glycine max
  Clone ID: PAT_MRT3847_44669C.1
cggctcgatccggtttgtagagaacacatacatacattttcattttcagaggaatgatcatggaagaatcctcggtacacgagatcaaaacccctctcctgtcatctaacaaggaggaagatgaagttggaagcagtactagccataggcagcaaaatgaagagaactcgcccataaaacaagtggccctaacggtgccaaccaccgatgacccatctcttccagttctgacgttccgaatgtgggtgttgggaactctatcatgcgtgctgctgtcgttcctgaaccagttcttctggtaccgcatccagcctctcaccatcaccgcgatctccgcccagatcgcggtggtgccgctcggccaactcatggccgcaacgatcactaagcgcgtgttcttcagaggaacacgctgggaattcactctcaatccgggacccttcaacgtcaaggagcacgttctcatcaccatcttcgccaactccggcgccggcaccgtctacgccatccacgttgttaccgctgtcaaaatcttttaccacaaacacatctccttctttgtctccttgcttgtggtcatcaccacacaggtattgggtttccggatgggctggcatatttagaagatacctggtagagccagcggcaaatgtggtggccagcaaatttagtttcaagtttcactcttcagggccctgcacgagaaggatgagcgaccaaagggagggttaacgcgaatcgcagttctttcgtaa

SEQ ID NO: 81567 - DNA, 434 bp, Glycine max
  Clone ID: PAT_MRT3847_4466C.1
tcaatgtcacgtacgtgcgctcgtacttaagctcggggttctactctgggacattgcgtcattgctgccggagcttttgtagaagagtgctattcaggaagattacgagcctggttccggccgtcctgacaaaggggagctgttttgagctggaggagagggcctgctcgtacgctatgctggtcatgaggacggagacctgtaccgtggacagggttgccaaggagaggatggagaggtatgagattgtggataatgtcgttgccgcgatcgccgggattgtggacgctgtgcccaataagtggtgcactgtgaggtcgctccattagcagctgctggagagcttggctgtgccggtctaccagactgttcctgatgtgaagttgaagatagacggatccaaggctgaggcgaagaagaatgaaaacgatacg

SEQ ID NO: 81568 - DNA, 492 bp, Glycine max
  Clone ID: PAT_MRT3847_44670C.1
gagcggaaaataaaaataaggggcccaacttattcagctttttattagggggggggttttccttttttttaaaaaaaaaaggggaatagacaaaacttgaatccgggggggaacaaaacatggggggaagcctccccgaagagcccttggggtttaaaatcagggggaaaggcaaattttctgggtgagattcgaggaaagattatttttagcaagagggcccgggaaaatatgctgaaaagggaaaagccctgctgattttattttattgggggcctgaacacccatttattttcggggggggtcaaacaacctttggagctcccccttttttacccccaccactttataagccacgttgccttttttaatcagcatgaaagggggcattccctgcacttgggaatggggagatacccccattaactcatcccataaattttacaaactcgacatttttgtactttgagcaaactcttggataactggggc

SEQ ID NO: 81569 - DNA, 428 bp, Glycine max
  Clone ID: PAT_MRT3847_44671C.1
aagcggaaaaaaaaaataaggggccccacttattcagctttttattagggggggggttttccttttttttaaaaaaaaaaggggaatagacccaccttgaatccgggggggaacaaaacatggtgagaagcatccccgaagagcccttgggatttaaaatccgggggaaaggcaaattttctgggtgagattcgatgaaagattttttttcgcaagagggcccggtaaaatttgctgaaaagggaaaagccttgctgattttattttattgggggcctgaacccccatttattttcggggttggtaaaacaacctttggagctcctccttttttactccccccactttatcagccacggtgccttttttaaacagcaagaaagggggcattccctgcccttgggaagggggaaaaacccccattaacc

SEQ ID NO: 81570 - DNA, 115 bp, Glycine max
  Clone ID: PAT_MRT3847_44672C.1
acgcggaacgctgtgggcttgtacgcgtgaggcgtgttcgcgtgggacggactgcgtgggctgtgtttaggcgggaactcccgtgattgacatttttagttaatgcgcagcagag

SEQ ID NO: 81571 - DNA, 771 bp, Glycine max
  unsure (1)..(771): unsure at all n locations
  Clone ID: PAT_MRT3847_44673C.1
tcgagcgaatcggctcgagtacggctgcgagaagatgacaactgggggcagccaagagaagaaaatcctcacccattgtcttcgtagccaaacactctgaaattctcagttatgtcgtggcaagcgtatgtggatgatcacctactgtgtgaaatcgaaggtaaccacctcactcacgccgctatcatcggccaagacggaagcgtttgggctcagagcaccaacttccctcaggtaagctttccattttcctttaactcttttttcccaatcggatcgcgatttattgttatttccttagggaagcttctagattcgccgatctatgctcacttgttatggatattcaacatgcacaatagttctcaacttgtggcttgtttctcaatcagcaatggaagttcactgcatcttcatcttctccgataattaacaattaactaattaacaacaaaagcagattattagttgtgatgattatgattatgtacttgccacttgccagcaacaatggtaacggatctggtttttttggttttcttgatctgttctaatgtatttgatttttattcagttcaaacctgaggaaataactgccatcaataatgactttaatgagcctggatcacttgctccaactggattgtatantcggtggcaccaaatacatggtcatccagngtgagcctggtgctgtcattcgagggaagaaggtaaccactgtttctgatctttgcttgaattctgatcatggatttgcagattgtgtag

SEQ ID NO: 81572 - DNA, 1140 bp, Glycine max
  Clone ID: PAT_MRT3847_44674C.1
cccacgcgtccgctgcgagaagacgacagaaggggggaccaacgattggaagtttcctggtgattaaacttaaagatcaagcgggccggcccagacatgccttaattgattatggtaaaaggaaagggaaagaggatgtcgctttctctctctctctctgaattggaattcaactcttctctttctctttctcttctcttctgtcgaagaagaagaagcagaagtagttacagaaacatgctggagaatcttcaggctcctccgccaacggaatcggccccagtggtgaagcgctatgctcctcccaaccagaggaaccgttctgccaacaggcgcaaatcatctgatcggcttgatcggacaaacagtatcgggaatgacttagaaaagaatcaagttgcttattcaagaagtgttcacattccagatcacggagatgctggtagcagtaatcttcttaatgagaatcactattcaagattaatagctttagaagggtgtagttgtagtgcagctgcccagctgcttaatgatcgttggacagctgcactacaatcctacaataatcccaaagattcatctgaaaagccagttatgtattcgagtgggacatcaggatggactccgttcagaccccctcaacaggacttccttggagaacttcgtcgccaaatgcacagtgctaatcctagtttcaccacatgatggttggcttggattgtttaataaagtttttggatgatcgtggatttgctgaatgctttaagaacactttgatgctcagctacttattgtttgtgtttttgtgacttgttttgtcaaactcattactaatatatgtatcttgaaaatcagattcagaatatcaacctcgcctgtgtatgtgtaaattggggtgtcgctcattcaggaattgtatttaaagatttattctgtatcttacaaatagtagctttcataaatacgtttttttgtccctctaagttagcatgtctttttttgtccttctcaattcatttttctaattttagttcaggtaagtggctggtttttttttttttttttttttgacccttgtaaaatattttgtttatttttagtttatgttagtttgcattttttcaaaaaaaaaaaaaaaaa

SEQ ID NO: 81573 - DNA, 306 bp, Glycine max
  Clone ID: PAT_MRT3847_44675C.1
atgtaatctcgcaaattttagagccaccctagtgcgcttattctaatacaacatgcacaaagttggtacaaaaataactcaaaagagcgggagaaacacatgtaaaaaaggctttcaaaaaacaagaaaactgcggaaaaaaaaaaacccaccacagaagggggatcccgttatttacaaaaccaaggggggacactaacccccaggtccaaaagatgcccaccttaaaattattgggcacaaacccctttgaataatgagccaaaaaaaacaatccctaacctaacggagactatcacgaacacc

SEQ ID NO: 81574 - DNA, 1334 bp, Glycine max
  Clone ID: PAT_MRT3847_44676C.1
cccacgcgtccgctgcgagaagacgacagaaggggggaccaacgattggaagtttccttttgattaaacttaaagatcaagcgggccggcccagacatgccttaattgattatggtaaaaggaaagggaaagaggatgtgctttctctctctttgaattggcattggaattcaactcttctctttctctgtcgaagaacaagtagtttcagaaagatgctagagaatcttcaggctcctccgtcaacaacggaatcggccccagtggtgaagcgctatgctccacccaaccagaggaaccgttctgctaacaggcgcaaatcatctgatcggcttgatcggacaaacagtgtcgggaatgacttagaaaagaatcaagttgcttcttcaagaagtgttcacattccagatcatgaagatgctggtagcagtaatcttcttaatgagaatcactattcaagattcatagctttagaagggtgtagttgcagtgcagctgcccagcttcttaatgatcctctgcacaaaacagaatttaaatttattggattgcaaagagatagggatgagtgggtgaggctgaagtttgttcatttacttacaagcccagttggacagctgcaatacaatcctacaataatcccaaagattcatctgactaactactgtaggccaaatatttttgcatgtttggctggcaatttcttgagtccaagtgctttgatgtatttcaagctgaaaactcaactaagcagcggtgttgactatttttgtttctatattgctgttgggatctcttgtttaaccatttttctcacttctgctagcgataataaactatgtgctgcatatgaactgttaagcatgggcatgttctgtattgctgaaaagccagttatgtattcgagtgggacttcagtatggactgcagctacaagtgcttcctcttctgtatctcaacgggacttcctgggagaacttcgtcgccaaatgcacagtgcaaatcccagtttcactacatgatggctgacttggattgtttaataaagattttggatcatcgtggatttgtcgaatgctttaagaacactgcgatgctcagctacctgttgtttgtgcctttgtgacttgttttgtcaaactcattactaatatatgtatcttcaaaatcggactcagaatatcaaaaaaaaaaaaaaaaaaaaaaaaaaaaaaaaaaaaaaaaaaaaaaaaaaacgggcgccgctcgcgatctacaaatatatcccaaacggccgcccttactggaagtaatgataagagattttcactttgcatgacatcacaatggttaca

SEQ ID NO: 81575 - DNA, 455 bp, Glycine max
  Clone ID: PAT_MRT3847_44677C.1
aatccattggatttaatccaaccgcacattatcatacaatttccactgcccagctcaatgggggcgagcataaaactatacattgttgctgttgcccaaatactgtctatgaaagttccatgcccacaacacctgccctcttttagcaactggtggtttgggattccaaactttatacatgatcgtctgactttctcttgctataacaggatcagtaaatcgagcatcctccatggcatgttcctgccaaaatatatggattcccctataacagggtgggctagggatctatacaacgcggccatgttacattcacatggatccatccattttggaaaggcacctcatacgagctgtttctgaagtctatctctcgtagatcacaaagatatgcatggtgcacttctttctgcgaatcgcaactatatggggaacattcattgacattgatgaaa

SEQ ID NO: 81576 - DNA, 384 bp, Glycine max
  unsure (1)..(384): unsure at all n locations
  Clone ID: PAT_MRT3847_44679C.1
tttttggtcaatttatataatttattggcttacagaggtctgacgaccaaagtaggccaaatagtanacgattatgcctccctctacttagatagagggaacaggctttcatataaggcaacttcaatctcatatgggtataaagttgatagggttatataatatcccaaagacagacagactatcaataaaaaaatttcaattgcttgcgacttcacaactacttattataacttattcacgccttctggcccaaaggccaacagatttaccttctttatagcttaaaaaagctttcctctgtgggacttgatctcatcgtacagtgccaagcacaaaaagcttccaacgcttctcattatgttactcaaattaccctttcag

SEQ ID NO: 81577 - DNA, 122 bp, Glycine max
  Clone ID: PAT_MRT3847_4467C.1
gacagcttagctcaataatgagaggtgcgtttaaacttttacagtgtgaacagtgaccgagattgcctcttccctgcgtcgtcgatcttcgcttctctcctctgtgttagggtttgctcggt

SEQ ID NO: 81578 - DNA, 176 bp, Glycine max
  Clone ID: PAT_MRT3847_44680C.1
tacggctgcgagaagacgacagaagggggcaccacgtttgttgagatggctagaagcaataggaggaaattgaaggggctggtttggtttgtggctccagtttgggtagcttatgatggccttggttaaaactaccagaggttcctcttcaaaaggaaacctgggttgggggggca

SEQ ID NO: 81579 - DNA, 809 bp, Glycine max
  Clone ID: PAT_MRT3847_44681C.1
actacattctcggcaacggatatctcggctcttcgctcgatgaagaccgtaccgcaaatgccatacttgcattcccatggtagctgccggtgcctccgccgcgctagctctgtgccccccaccgggcaaggcgatcccagcgcaaggcctcgaccatatcgccttcgcgactgcgcgctgccttggcttctgtaactctgcccctttgccgctcgcccaccccccccccctcctcccccctccccccgtctcccgcccccccccccgcccccccccccccccccccccgcccccacctgcacaccggcttgcgatgccctccagcgaaccccacaggcgctcccttgccgcccgcttgccgggttagctaccatggtccgcctcgctgcccgcgcgcggatcgccctcacatcacccgccccacttcgccgccccaccatacgccgcccgcggcgcatccccctcctctccggccaatgcgcacccgccttccgcccccacccccgccccccccgacccgtgcccccccccccccgcccacccctgcgccatgctccccccctcccgccctcaccccccgctctgccctcccccacccccgtccgcttcccctcccctgccaccccccccccccccctccccccaccatctcctcctccccttcacatctccccattacccacccctccccctacctccccccccccaccacactacaccccctcccctaccccccccctccccccccccccccccccactccaccacacctccccccccccgcacctctcccacccttcacccgcccc

SEQ ID NO: 81580 - DNA, 398 bp, Glycine max
  Clone ID: PAT_MRT3847_44682C.1
acacaattgcttagacattttgggttgatgattccgaccaaagcaaattttcttacttaacccttttttgcttgctccaaaactgaaagattaaatgttttcctaaatctcaaaatacctacattgttaacttgacccctacctttacaacacttcctttatttacaaaaggtgtcccgggtaccccaagggggaaggttattcttaccaccttcaaatttttccaacgtttgtcacggttcttatctgcaatttaagatgcatgactttttctgataggattatagattgaagagttgcccaccttttgatacatgctggattttgggataattgatttgccttccatggaattctgttcaaaattaaaaaaattgaaggtctagggctgtaaaggg

SEQ ID NO: 81581 - DNA, 210 bp, Glycine max
  unsure (1)..(210): unsure at all n locations
  Clone ID: PAT_MRT3847_44683C.1
ctccgngagaagacgacagcagggggctgcctagcggaagcaagcgagcagcaatcatagaaagcagcagacgacgagagagaggatgacaccacatcgctctggttgctttcattcccatgcttaggtgtgcctggcattgggattgtcacatgagctgtcgttatctatggctttgtattatgatgagccgctttggtgtggtggcat

SEQ ID NO: 81582 - DNA, 387 bp, Glycine max
  unsure (1)..(387): unsure at all n locations
  Clone ID: PAT_MRT3847_44684C.1
tgttcaatcaagttagaccatcttgatttgtgtagtagttaatattataaagaatataagtaaaaaaataaaataattattttaaatttttttgtacgacagttattatggaagggagaaaatactaaaaattgcttcaatttttatgtaaatgtaaatcacatggactttaagtataattgaattttgggattcaatgctcttgtggtactttacatagcggcaccattattatttgcatgacaataatgtgctatgattgtactaaaagtttcggaatccaacaaacaactgccttaaacattaattattcaacggctccagcattcaacctanagaaattaatgcactattttaaaatttgttttttaaaanaagaacaaaatt

SEQ ID NO: 81583 - DNA, 334 bp, Glycine max
  unsure (1)..(334): unsure at all n locations
  Clone ID: PAT_MRT3847_44685C.1
cggccgccctttntttttttttttttttttggaaccccattttttgnagaggaaagcccttttgtttaggtttgttacatttccaaagaggtaggtgcttacaagattacttgatgcatcactggtgacaatacataagccgaaccttaacctctatttcgtctcattatagatttctttagttatatccaatatatcatatatcatcatttctgtctcgcttctatcatatcttttacttgtttttgtctcaaaccaggctaagactacgttctccccaattttcatgtcctcctagttatcatgctctcttctgcggcttcttcaacgttgt

SEQ ID NO: 81584 - DNA, 169 bp, Glycine max
  Clone ID: PAT_MRT3847_44686C.1
ttaccaaagggccttatggggaaaagggaagggggaaaaaaagggattttccaattcaaggttttactttaaaattccacattaaccagagggttggttggccgggcacctggtcaccaacacagtaaacctaaaccttaataagtctaggtgcaaggtttctttaagg

SEQ ID NO: 81585 - DNA, 279 bp, Glycine max
  unsure (1)..(279): unsure at all n locations
  Clone ID: PAT_MRT3847_44687C.1
tttcggtctcgaacgntgaatcaggcaccacattnacnnatcagcttttttgtgangattccaaagcatggcttcccatgcagnatncactgctggtgnttccctggcatgtcagnnatgnttgggnaaccccatnaacctcagtgtgccacaaggccagctccatctgcctctagccctgcctccttcaagantgtggctcttttcnccaaaaagaaggctgcacctccaaaaaaagctgnagctgctgntcctgccaatgatgagcttggcaagtgg

SEQ ID NO: 81586 - DNA, 563 bp, Glycine max
  Clone ID: PAT_MRT3847_44688C.1
aaaaaaaaaaaaaaaaaaaaaaaaaaaaaaaaaaaaaaaaaaaaaaaaaaaaaaaaaaaaaaaaaaaaaaaaaaaaaaaaaaaaaaaaaaaaaaaaaaaaaaaaaaaaaaaaaaaaaaaaaaggggggccgttttttagttttaaagtttacgcactttaatatctttaatttaagattttttatggttttaacaaaaaaaaatttttttgccccctttttaaaaaaaaaaaaaatgggaaaacccaaaaaattccccaattaaaacattttcatttaaaacccttttttcctatttaaaagtatggcaaaaaggccaataccaatggcctttccaaattttttgcaaattggaatgccaaatggaaagcccctttaaccgcggatttaaacccgtaagctcgggggttttcccttatattaacctttttatttacacccttttaaaccccttaatttgggttttttttaatttttttagtgggttttttccggggttttctaattaaaagttttaaaattgaggggttcccttttaaaggttttaaaaggaaaggggttttt

SEQ ID NO: 81587 - DNA, 191 bp, Glycine max
  Clone ID: PAT_MRT3847_44689C.1
ctcgagccgaaaaaatcagagtcactggtggcattcataacttgtttcatctgctgctataccaccgtaatactttggattggttccttcgttgctgctcaaactttatgttatatatattattgccaaaaaaaaaaaaataaaaacaaagaaaacctaattaaaaaaaaaaaaccaaaatatgaaatatt

SEQ ID NO: 81588 - DNA, 307 bp, Glycine max
  unsure (1)..(307): unsure at all n locations
  Clone ID: PAT_MRT3847_4468C.1
ggtccgggggggggccacccttttttttttaaaaaaattttttttatttttttttaagcccaaggcaattaaacggaaggggggtaaagcnaggggggggcaaaaaaacctgggatggaaaaacccaacctaaattaagcctgtacaggagcaacaagaggcctttaattgtgcccaaatccacggggggggggaacccaaccataataataatttaaagggcaaatttcagggggacaagtgggggttactcaaggatcataaagggggagggccccagggggggggttcccctaaagaaggttta

SEQ ID NO: 81589 - DNA, 193 bp, Glycine max
  Clone ID: PAT_MRT3847_44690C.1
acagactgcggagacttgcaagcttttcaatgacaaaaataggtgctgggagctttcatagatcgctgaacaacccaagagaccttccgaatttgcaaggcttacggagcttcatactgtaaatggacatgtggagtcagtggtgaaactgaaggggctggacatagacacgattcagcagcactatacactt

SEQ ID NO: 81590 - DNA, 103 bp, Glycine max
  Clone ID: PAT_MRT3847_44691C.1
gtctgtgatgtgtcatgtttattgctgtgtgctaattaaagtacaccctgatgatgagtggtcccgcactagcacaaccacacctagtcgacgtccagagaac

SEQ ID NO: 81591 - DNA, 229 bp, Glycine max
  Clone ID: PAT_MRT3847_44692C.1
tttgtttgtcattataattttttgttagcttgtttcacgaccatcagatgctcaacctgaaaacctaaaccgcaccggatccaaaacaaaagcattcattgaatggacaacggagcttctataagtgcaaacactcacaaagttttactagagtttcctgaagccagagatacgatttgttttatggatgaatacgtatagcagtgaagtgtggatgcgaattggaaaa

SEQ ID NO: 81592 - DNA, 427 bp, Glycine max
  unsure (1)..(427): unsure at all n locations
  Clone ID: PAT_MRT3847_44693C.1
cgcgtccagggaaagaaaananaaaaaatcaaaagtggataatggcttcgttatcgctttgcatagccatgacagcacccactccctcagcttctctcattctcactgccccaaaaccatcttcgctctctttgaaccttacccgcacttgctccaacgctcgctctccgcttctccattgctccttcctctcttctccttcccttctctctcccccttcctccatttcagaagaggaaaaggttctggccttgttgtgagggcaggcaaggctgctctttgcctgactaagagaagcagatcaagaaaatcattggcacgcactcatggtttccgcaaaagaatgagcacaccaggtggaagagctgttttaaggcgacgacgcgccaagggacggagagtcctnatgcacaagacgcatccaaat

SEQ ID NO: 81593 - DNA, 620 bp, Glycine max
  unsure (1)..(620): unsure at all n locations
  Clone ID: PAT_MRT3847_44694C.1
gctgattctttttccgtaacgttacggaactttatgaattacgtaatgatacttgttttctttccgtaatgtcacaaaaccttatggattatgcaatcgtcccctctttggcttctggaatgttacagaactttacggattacgcattaacacttcctttcaactcccgacatgtcgcagaacttcacgaattgcctaatgatgggtgtcaagtacctcgaagtggtcaagcgaaggtcgcatcccaccaaacagatggtccccggacgaaattagggtatgactggagggtttagggaaagagaagaaggaagaagtggttgttttccgatgttgcacctaatttaaagcctgcaacactcaaattttatgcttcggtaaaaaaactcctatctcacactccgtatgttatattgtaaatcgcaacggtcaaattgtggaatgttgtcctaggaacctccagaaaatattttaagatacggttaacaaatctgggagaatgattttactgaaataggttttaggtntgcttccttgangaaacttccttgagaggcttctttgagaagcttccttgagaaacttctttgagagctagagttttgctacacacaccccac

SEQ ID NO: 81594 - DNA, 330 bp, Glycine max
  Clone ID: PAT_MRT3847_44695C.1
aaattctttctctcctctctcagttatcgcatggcctgatcgatcaactcttcttagtcctccctctcagaacacgctatgctgggtgatgtgtatgccctgtctctgttcccacacctcccacatcactgatatcatgcccaccggcttatgccgccacacgtctctaattacgacattgatcctgaaatcgtcatcaacctaccaccttaatagcctcgtccaatgagtgcgtacagacccatcccggtcggagataacacggcggtctgggtgagtcacgcttccaacatcactagctttcatagaaaccaacaacgcttttcccaa

SEQ ID NO: 81595 - DNA, 1053 bp, Glycine max
  Clone ID: PAT_MRT3847_44696C.1
cgctttatgaaaccccgaggccagcttgaaactagtgaaacggggaggtgaaggggaaaaaaaaaagagtagagtggataatggcttcgttatcgctttgcatagccatgagagcacccactccctcagcttctctcattctcactaccccaaaaccatcttcactctctttgaaccttacccgcacttgctccagcgctcgctctccgctcctccattgctccttcctctcttctccttcccatctctcttccccttcctccgtttcaggcttgtcacttggattggatttgacatctaatgttgggaccagaagaggaaaaggttctggcctagttgtgagggcaggcaaggctgctctttgtctgactaagagaagcagatcaagaaaatcattggcacgcactcatggtttccgcaaaagaatgagcacaccaggtggaagagctgttttaaggcgacgacgtgccaaaggacggagagtcctatgcaccaagacccacccaaatagtgggaaatagtggtgaaagcttacattgttctatttcagtggttaaaagaggaaaaggttctggcctagttgtgagggcaggcaaggctgctctttgtctgactaagagaagcagatcaagaaaatcattggcacgcactcatggtttccgcaaaagaatgagcacaccaggtggaagagctgttttaaggcgacgacgtgccaaaggacggagagtcctatgcaccaagacccacccaaatagtgggaaatagtggtgaaaagggcttacatctgttctatttcagtggttaaatttaatgtattgattcatccaaacttgtctgcatttcaagattttcattttccccctaaaagtggtttttcacttttttgtaccctgtatttgtaaaatgtttactattttgtagccttacttttcgtctctgtcatctataattcttgccaagttgcatctacatttgcttcaaagatgtttactacaaaacgaatcacaaatcagacttgatggaatgtcaaacaagataattgattttgcatgt

SEQ ID NO: 81596 - DNA, 418 bp, Glycine max
  Clone ID: PAT_MRT3847_44697C.1
gaaggacaataccggatctacaaagcatgtcatggaacgaaccttggaagagaacgaaacaacatgttcaaattagcactgttggacactaagggggtctaatttgtcatacaaactcggatatgtcgttttagcagtgcatggagccttgaatgggagaatttttgttcgaggccctaccaaagagagcttgcatccaggctagacaggtctaggctaaagtctcacccacagcttacttcaacagaaatggggtatgaaaacactatcacagctatgtgctaaacccggaggtactattggttgattaaagattagattggtgtgattgtttggaacgcgtatcttttgaacatgacacaataagtatgctatagaatttaatgtgccgatattggcggaagatccctgaaattga

SEQ ID NO: 81597 - DNA, 421 bp, Glycine max
  Clone ID: PAT_MRT3847_44698C.1
gggaacttgctacaccaacatcgaactcatctaccatgagctcggaaactacgagctcgcttacacatacttttgcgaacctctcagagtctgcatagaactgcaaggcgaggaacactttgacaccgccaagctcttcaataatatcgggctcagcctctacaaccttcatgattactcgaaaagtatggagtatttccaaaaagccttggaaatatactcggaactctgccaagatgaccatatcgacatggccaacttttacaccaatattgcctcaatctacgatcaagaagacaatcttgacatagctcttcaatactacgatgagtgcaagcgaatccgacgtcaatatctaacgcaagatcattctgaaattggaaccgtatattacagccttggtacgatttaccatagccag

SEQ ID NO: 81598 - DNA, 339 bp, Glycine max
  Clone ID: PAT_MRT3847_44699C.1
acacaacttattttaatcacattactccatttccatctattcacattacttaccattacttctctactctttctatacctttattactcttacattcttgtatataactctatcatacttttactatctttctaaatgtatacattacatatatctctattcatttgattcacattaacaccaactcttctttcattcacccataatttaaaaatacctctatacctcttacctatataacataacattatatatttaaatcttttatcatattaaattttctacattcattattacacttaaaccttatttatacttcttctcttccattatatattt

SEQ ID NO: 81599 - DNA, 423 bp, Glycine max
  unsure (1)..(423): unsure at all n locations
  Clone ID: PAT_MRT3847_4469C.1
cccactcgtccgcgctttccggcttcagggtctctgggtctgtcgactcctcaatttgaggcaatacattggatgtgtttcttttgtgcctgcacctgggtatgaagcttttggggatcccacaagttaccctggcaaatctactactagcaaaggaagcaacagtgatccaagtgaagcagaacgtgctaatttgcaaaggctttgctatcttacagggaaggccttggtccccaaaagttttttgaattctattaatcttacatccagtgatacggattttttttttttctgaatgatccagatttgtttaataaaaaatatatttaaacttattccctttcaacaagattgtcaagaaacaagaaaaaaattcgtgactagctctgctactatgtttactnngtttctattagcaattac

SEQ ID NO: 81600 - DNA, 636 bp, Glycine max
  Clone ID: PAT_MRT3847_446C.1
gaaccctaaagccctctcatattgaaaccagggcaacatatataaatacaaatcgccacgccgctacgttttcttcagctacatagctccatcactgcagcattagggtttatcatctgcttcaatggggaagggaacagggagcttcggtaagaggaggaacaagacccacactctctgtgtgaggtgtggccgccgcagcttccacctccagaagagtcgctgcgccgcttgtgctttccccgctgcacgcacgcggaaatataactggagcgtcaaggcaattcgcagaaagaccaccggaactggcaggatgagatacttgcgtaacgtgcctcgccgtttcaagagtggcttcagagaaggtaccgaagctgcaccaaggaagaagggagcagctaccactgcatagacctttcaaagatcgttctcgttgggtacggatttacaggaatagattgctttttgtgcttttggcaagtattttggaacacttatttttagagtctcattgcttctttatcccccatttaatttgtagttgctttatattcaacaagaccataagacttattgattgttcacttggttttatgacatttatagtttatggtttaaaacggttttcaattggtg

SEQ ID NO: 81601 - DNA, 206 bp, Glycine max
  Clone ID: PAT_MRT3847_44700C.1
ctcgctctgtctctctctctccatagattcatggatccttacaagctccagccggccgtttcctttaaaactcccttctggactacaaattctggtgctcctgtttggaacaacaactcctctttaaccgttggagctagaggtccaattctgctagaggattatcatcttgatgtagaatcatgcaaacttattcttggaacgta

SEQ ID NO: 81602 - DNA, 258 bp, Glycine max
  Clone ID: PAT_MRT3847_44701C.1
ctttctcgtacgtggcttcaagcttgatcagtccatggctttgtctttctttcactattgctgcttctctgagtcctcagaatccaaagagtttatatgcgaaggtgaagtttgcatgcttagagataggaagaagtacaaagccaaaaaatccaagagccaaaaaatgcaacgtgatcattatttttcagtttttctgtttttgaataagtcctcctaatcagagtagttatagaaatgggagagaaagctgtgccg

SEQ ID NO: 81603 - DNA, 772 bp, Glycine max
  Clone ID: PAT_MRT3847_44702C.1
tacggctgcgagaagacgacagaaggggattgtgaacaattgaatttcagattttgtgttccgtcagtccgtggttttagagaaattgtatcaatggattctcaggcaacagcaagaaggatctagggtggccaccattgatattgttacccatttgcagaatgagcttgaatatggaggagaggaggcaccagtgtccccaaggcagccaatgcatcaacagaattcccagactgcaatgcacaacactaactttggtgcgtccataccctctaatgcatttggagcaactgtggcaggacaggggatacgtgctggacaacctgatcaacaaccaaagaactcagtgttctcaaatgcactctctagtcctattcgacgcagccttcagccatatcatttggcacaggggagctttccttcatgtaatatcatgtcttcaggaaatggaacccggaacagtgacatgacttatcctaatggccagaacaggggcacaaatttgcatggatatgcattcaatgatttttcatgctgatgctgtcatagttagaacaaggaacaaaaaagaggtcatttatgaaatctgtggtcataaatgcgtggtgaaaaatgtcaaatttattgtggataaacttcaatttatttgtgtagcattgtcgtccagtttgaaagcttgaacatcagcttacatgttaaacagatagttcttgaaaaatgttggccatttcccaagcgatatatagtcatactagtgtgtgatgtttgcatg

SEQ ID NO: 81604 - DNA, 1110 bp, Glycine max
  Clone ID: PAT_MRT3847_44703C.1
acccacctcttcccccacgcgtcggaaatcatctcaaatcatattcatattgcggttggttatgttttgttttttctattttaacacaacacaagcaccaactttctttttatctttcttctagggtccttcctcactctgaatccgccattgggctgcgatggcgaagaagcgaaagtcggtggcaacgcgccttgacgaagtggatcgaacgatgtactccactttctgcagcaccgccaactccctctctcatctctacacccacgccatgaaccaacaaaaactctcatttcaggccggtgaacgacacgctcttgagaaattgtatcaatggattctcaggcaacagcaagaaggatctagggtggccaccattgatattgttacccatttgcagaatgagcttgaatatggaggagaggaggcaccagtgtccccaaggcagccaatgcatcaacagaattcccagactgcaatgcacaacactaactttggtgcgtccataccctctaatgcatttggagcaactgtggcaggacaggggatacgtgctggacaacctgatcaacaaccaaagaactcagtgttctcaaatgcactctctagtcctattcgacgcagccttcagccatatcatttggcacaggggagctttccttcatgtaatatcatgtcttcaggaaatggaacccggaatagtgacatgacttatcctaatggccagaacagggacacaaattcttccaactccagtgattgcatggatatgcattcagatagtcctggtcatgatttttcatactgatgctgtcatagttagaacaaggaacaaaaaagaggtcatttatgaaatctgtggtcataaatgcgtggtgaaaaatgtcaaatttattgtggataaacttcaatttatttgtgtagcattgtcgtccagtttgaaagcttgaacatcagcttacatgttaaacagatagttcttgaaaaatgttggccatttcccaagcgatatatagtcatactagtgtgtgatgtttgcatgagattttgcgaagtaaactactagataattttttcttgttaataaatcaatatgtgtttatgattgtg

SEQ ID NO: 81605 - DNA, 2905 bp, Glycine max
  Clone ID: PAT_MRT3847_44704C.1
cctcaagccaaatgatctaaatttgcataaaaacgcagccgtgggatgacttacagttgaaattgtcacactggtaatttgtcagggaaggatgattatatggagattgatggtcaaggtagcagaagtgaaactagtggttatcattcggatacagatttggaagatgattgcagagaaacttctgaacctccggttcctccacaaagagttgtcaacatgcttcagggttgtagaagttttgatgagtttgagagactgaacaagatagatgaaggaacatatggtgttgtatttagggcaaaagataagaagactggtgaaattgtggcattaaaaaaggtgaagatggagaaggaaaaagaaggttttccattgacttctctcagggaaataaacattcttctttccttttcaccaacccatgcattagttgatgttaaagatcatgtggtagggactagacgtgagagtatgctcatggttgtcgtctacatggaacatgatcttaaaggactaatggagggaatgaagcagccctttagccagagtgaagtaaaatgcttaatgctccagcttttagaaggtgtgaagtatcttcatgacaactgggtgcttcatagggatttgaagacttctaacctgcttctgaataataggggcgagttaaaaatttgtgattttggattggctcgtcagtatgggagcccattgaaaccatatacccaccttgtggttactctttggtacagggctcctgaacttcttctggggacaaaacaatattcaacagccattgacatgtggtctctgggttgtataatggctgagctattgtccaaggaaccactgtttaatgggaagactgaatttgaacaacttgacaagattttcagaattcttggcacaccaaatgaaacaatttggcctgggttctcagaattacctcgagtcaaggtcaattttgtcaagaataagcttccaactctgggtggttctggctggctatttggcctttcttggttacttcttcacaacttttactagtttatattaattaccagaatgttcctttcaggtataatctcctgcgtaaaaaatttcctgtaacatcattcactggatcaccagttctttctgattctggatttgatttgttgaacaagcttctaacttatgaccctgaaaagcggatcacagctgaagaagctctaaaccatgagtggtttcgtgaagttccccttccgaagtctaaagaatttatgcctacattccctgctcaaaatgctcaagacaggcgaatgaggagaatattaaagagtccagatccattagctgagcagcattggaaggagatgcagcagggtgaatcagggactggtggtatttttggttaagaatggtgcaatttaattttttgttcacaataatcattctaacatgctctgctgaatggttgcacacttgaggtgagagtaagcgctggatggatgctgctaattttgattgttagacaatcacttttgtggtttttttatcaggcgcttcttgttggtttgtgtcgagatatgtattctttacttccttggagccagatctatttcaggttaacctctttatgctttatcattatattgaaatgcacatggggcgcagcttgcgcataaagtctggcatatttgccttctgaaaataggaatagtcagtatctgctgaaagttgtatgtgtaacatttgcattttgactgtgtaatcaatttaaactggttttgagtattaaagcaacatggattttctcatagctacaagttcttttgattttttaatgttcatattgtgtttgcaagagacagttgtcacgtgaagtggaagagtgcattctgtccatttagttgaagaaaatgacagtaacttttaattccaaggtaatgaattcccaggatatcttagatatttatatcaaagctagcaggttgaggatgttccctgtatacctggaaaatatggaactttgttccatcaggctctttagagcctaagggacatgtaattgggggggtaatagatggcccaagtgctgatggtggtggcgccccgtgtaggtccagtggtgcagaatgaaaagatttgcaaatgggtaatgaaccaaaatgtccaatcctccaagagaaatcgcaacttgaaccccaatgatgtaaacaaaataaacgagaatctttataatttggccagtgatgatgcaagcataagctgtattctctcccccctctttcaatagtgttagggggaagatggcgatgatgattgacagtgattgccgtagtgggtgtatactctaatggaagtctaagattgcttgggttagatttattgagacccagtattatgtcctgaatcatgtgaaagtgcacaatggaaaattttgccctgaattataatatattaatatttaattatagcgtgcctgttagctgttttaataggtgggttatacgggtttatctatatctagcttgaaattagggaagtcaagtcatcctgatcaacacttccatgtgatgcgactcttaaaaaatactattaaacactggatccagttgaaataattcgttaacgttaactttgagctgattgaagggatattgatggatttgcagtttagtgctggcttaaatgtgtagttaaattgatgttcaattgtatgatgattgagtggtaactcttagaaaaagcatcttcatttaaagggattatccaggatgttgtttatgaagttttgcctgagctaattgggagagaattgatctcagtctggattttaaatgtaatagtttggtagcttgggcaatgtacatgttgattgattattaaactgagtaaataataaaagataaaaatatttaaa

SEQ ID NO: 81606 - DNA, 422 bp, Glycine max
  Clone ID: PAT_MRT3847_44705C.1
ccacgcgtccgcggacgcgtgggttctgattagaattggagtttcacttggataatctatgttgatctttaatgtaaacctatgttatctagattactgatatgaaacttcaattttaattagaaaaaaatgctagtgaaatgacatataatttttgtccatattgtccaaataacaattagcaatagaaagaaaagcaaaaaaggttttcatgtcttctgcaaaacagtgattgtagatagtattagattaggttctagacttctagtctagctataaaaataaatgtacatattttgcaagtttttcttgtagccaatattatttttcaattctctctgtctcttaagctttgtcaatctccctgcaaaatgtaatttatgaaagggtgcctatatgaaaaagatacttatgttatggat

SEQ ID NO: 81607 - DNA, 409 bp, Glycine max
  Clone ID: PAT_MRT3847_44706C.1
aataggcgaaatataaaagccccaattttattgaagggggcccatcctgttttttttatgcttctaaaaacaaaccccatttacttgctttttgaaccccaacccaccaaccccatgatactggttttgaaaagggaaggggaagggttttaaaatgatttccttaaccccccaatcccctaaacgacccccccagaaagaaaagaagagaaaaaaaggggccaaaaccaccccgcaagaaataaccccaattcaaagattaaagcccggggtcaacttcctctaaaaaaattacccccacttgggcaagacaaccggcttggagggcctgccgaagctggaccccaccttttcgatgtccttgacaacggtcaatacttcgagaacctgtgccaacacgaaatgcttt

SEQ ID NO: 81608 - DNA, 240 bp, Glycine max
  Clone ID: PAT_MRT3847_44707C.1
ctcgagccgctcgagccgaatcggctcgacacaaacacacggctgataccgcaacagtgagattctccatagggacatcaatgcaccagtaaatacgcagccctgaccagaatcccaaggcgagaattctgtggcaagggttgcgactcaggtctgtagccataagcctactgctcgaaggattgctatcccgtgtgctacgacggtctcgtcctacacgacaaggggtgaagtgcttgt

SEQ ID NO: 81609 - DNA, 334 bp, Glycine max
  Clone ID: PAT_MRT3847_44708C.1
ggtatttctttgaagactttttttttccttaagcgacaatgactaatagggttgaggagatgttgaccccggacgagcgtgccgcccgagatgctcaggatttattgatcgagcgctgggacccagttataaaccacgtataggcggagatcaacgaagtctgtaacaaagaagaaagaatgactatttgtgccggagtacgtgttgaaggctctaggggtttcttgaatttggcgagtacattgaggaagtctatgcggcatttgaacaacacaaggttggtgacaatgcatgacttcttttaaagggtggcaagtggggcaacaaatctgat

SEQ ID NO: 81610 - DNA, 303 bp, Glycine max
  unsure (1)..(303): unsure at all n locations
  Clone ID: PAT_MRT3847_44709C.1
gaattnccgggtcgacccacgcgtccgccctcatgctcttctcgtttggttggatttgcttgaagatattatgattatattttcagaaatgtcattttcgagaataattatgctttttttggttaaatttaagaacatgtttggttataacttttttgctaatataatgaggaatattctcttttaaactcaaattatacgaaaaaaaagtaagaatgagaatcaaagtcaataaattaatttcatgataattttcaatatttccatataaaaataaaatatctatttatcaccataagattg

SEQ ID NO: 81611 - DNA, 475 bp, Glycine max
  Clone ID: PAT_MRT3847_4470C.1
gtgtattctttttgcaaattttgtacccaacttttttacattttggtgaatttgacccataacattttcttttagaaaaatttgccccctccttttgctctattaacagaaaaatgacagaaggaaaaattagtcagtttttttttctttctaaagtaagggataaaatatgttaaattaatatgttagagcttaaattggcaaaatattaaaaagctggaggtaaaaagtatcagtaagccaaaaaaataattaattacatgccctgtatgtaattaattctaaggtattttaacaatgattcacatttcacaccaataccaatatcatagtaacgaaaaaagttatataaaatttttattatgaacatgtgatggtgcaattgtgcacaatgaatgctaaacataaaaaggaaaatgtgaacatttgtgggttaatacttttcacatgtcacaatgaatctcccttgctcctt

SEQ ID NO: 81612 - DNA, 370 bp, Glycine max
  Clone ID: PAT_MRT3847_44710C.1
gttgaatacaaattttacaaagagacaactaaattgcctataaggggtactcacagaactttgttgtctaccaattgcaatagactgttgaaccaagaacagataatacgaaagcggcccttgtgaccacgccagaatattacagcaaaaatagagctcacgattatggcctagcttgtccaactcccatggataaaatgtatttcgaaaaacctcacctcattacagatgaacacgggggagtttgaagagatccttccgaagaaatttgccaaaaggtatggcggaaataaacgccacttttcgaatacaattgtactgatccacctgtgctgcaacaaaattcatcacttgagttggcgataagcta

SEQ ID NO: 81613 - DNA, 401 bp, Glycine max
  Clone ID: PAT_MRT3847_44711C.1
atcaaagcaagctaagaaaaagaaaagagaagttaccaaggggaagaccaagaaatctgacagtaagatatcaaagagttctaacacgaaaaaggaagaggaaatgtggatggatgaagaagatttagatgcacctgtgcgtagcgataggtcaattcttcatgctgtgaaatggcagcggatcatattggatgaggcacactatataaaatctagacattgtaacactgctaaagcagttcttgctttagagtctacctacaaatgggcgctaagtggcaccccccttcagaaccgagttggagagctgtattctctgatacggttcctgcaaataactccttattcctattacttgtgcaaggactgtgactgcaggattcttgatcatagcactaaag

SEQ ID NO: 81614 - DNA, 152 bp, Glycine max
  Clone ID: PAT_MRT3847_44712C.1
tgaccttcttcgtgtgtggcaaagtttaagtaatcatgggttaagaaaaggttcacattaacattgtcgtcattggacatgtcgactcttggaagtcaactaccactggtcacttgatctacaagcttggaggtatttacaagcgtgtgatt

SEQ ID NO: 81615 - DNA, 450 bp, Glycine max
  Clone ID: PAT_MRT3847_44713C.1
cagtaaaaaatttctttaaaaaataatgagaaaaatatataactaaataaagaaaaaaagaaattgtgcaatggaatgctgtggataagtagatgggaaaagaggctgttaaaggaactagcttattgtattacatgtggtgcaaactccttctgctgggggtggaggatacaatgtgggagttgatgatgcacttgtgaaagccgatgtcattgttgacacacttcatacttcatgagcaaccctgcgttcaataagaaacaggttgttaccttcatgaataggtttatgaagaatttgactaccaagctcggtgccgagcatctggagttgtttaagaagcacatggggggaggaggttaaatacctgctctctcatatcaatgatttccacttttttgccggtgccatcatgtgtgatgattcttttttgggctttgcctactacat

SEQ ID NO: 81616 - DNA, 290 bp, Glycine max
  Clone ID: PAT_MRT3847_44714C.1
attattctttctatatgactcgaggcagaacagaacaacacaaccggaaaaccaaaccacctgtggctgctcccgccgctgtgtttcgccgctgtcacgggcgatcccaccttaccgtggcggagcgcgcctcttcgatgggaaagttcatgaagaaagccaagcctaaaggagaactcgcgctcgtataatccaccaccagaaacaccaccacctcctacatgggggtacgaacccgcggcaaaaccctagcgctttaaaaataacacgcgcagcaagacgagcttatc

SEQ ID NO: 81617 - DNA, 154 bp, Glycine max
  Clone ID: PAT_MRT3847_44715C.1
caagctccgtgccacacgtggaaacaagacaaaaacaccatgtcctggtgctcaatcagctctgcgagcccttgctcgttcatgaatgaaaataggtcgcatagaggatgtgacccctattgcttgcgatagcacacggagaaagagaggtcgt

SEQ ID NO: 81618 - DNA, 411 bp, Glycine max
  Clone ID: PAT_MRT3847_44716C.1
tacggctgcgagaagactacagaagggggagaggaagagagttttgtgggggtaaggagaaggaagatggagtgggagaagcattgtatatcgaaatcgaatacaaaggtgcttaaatgatgcaagcaaaactatgtgccgtcttctaacacttgaaccttctgtcgtttccacacttccttcttcgattgtcgccgacactacgttcaaaagaggaactatgtattgggcccggatgatccacctaattctgcctagttttatgactgttgtggggctgaagaccacttaatgctttgtctgcacaaccaattttaatgtcaattatggctaaaactgttaaattaatttctcatctcactacttagtgttggataatctactcatcttcattctttgtcttatttatac

SEQ ID NO: 81619 - DNA, 145 bp, Glycine max
  Clone ID: PAT_MRT3847_44717C.1
tctagaaattaataggacataaaaatttggtacctaattcaaacttaaaccaaaatacaactttgggtacaccataaacacgcttcgtaacataaaactggaatacaaattggtttggatggtttaaaattatgaaccaaacttt

SEQ ID NO: 81620 - DNA, 181 bp, Glycine max
  unsure (1)..(181): unsure at all n locations
  Clone ID: PAT_MRT3847_44718C.1
cttttggtaaaataaataagtggagtttttcttttatattanttcacataatgatcatgctaggggaattttttaaaaaaaattaatgtttacagtaagaaacccaagctagttcagctgggtggtttttgcagcaaggaaaagaacaattttgttctagttatgcacaagtaaaatagtt

SEQ ID NO: 81621 - DNA, 342 bp, Glycine max
  Clone ID: PAT_MRT3847_44719C.1
cttatgacagcgctgactgcataatatacaatgaataactggaggcgaggtacgagagaacataggaaacaactgctacttgacggcttcaggaccgaggcacctaaaaacggaccgactgggaaagtcgacggatagtgcattcacaatcgagaagtggtaacagacacatgataaaacgcatctgctcaggagaaaaggaaaccaagaagatgatcattttggacgtttcctgactgaaggggggtgtacccggacggacaagaagcccaaatctccaagccattgactgcggctcgaaaggctagaatgggatagatcaacttagctaacattcaatga

SEQ ID NO: 81622 - DNA, 470 bp, Glycine max
  Clone ID: PAT_MRT3847_4471C.1
atagaagggtgcaatgtaattcattatagacttatagtaaaggtccattcatattaaaatgtagcaccgaacatgacagacatgtcaccaaggatgcatgggttgactttcagtatttatatatattaacacttctatcaaatctgggagtaatcataaatagctgacacaatcgtgtctaaatgatatggcaaccattaatcacaatgcttaaacagatttcacacggagcaaatgaagaaacatctggcatactcaagatagctcatagacttagctgatgtaaccctatagaagaggtgggtgttgcgtagcctgctgccggaccctggtctggatctctgctgcatactgggtcaatagatgagagccttctgtcggggcaggatctgcaagatttggctgaacaagtaaggctcggatgcccacaagaatttgcttaactgtgatggctggtatgcagccactat

SEQ ID NO: 81623 - DNA, 327 bp, Glycine max
  Clone ID: PAT_MRT3847_44720C.1
aacgtgaatcttgttctttgttttcagtttcctggtgcagcattgatgttgctctctctctcccatccacaaaacttaccacatcttgcgggcaacaacaccttttgaagaagtcaatgttaccttaaattccttaaacattcagacacatcaaccctttaaagtttacaccccaaaactagtgccgatatcttaggcactgcacgtgttactccctactgtctcgatcaccctcaatactcctatacaaactccctctctttcccttcaaaagcctcactctttcttttctctttttcacacacacacgcaccctctttctttttc

SEQ ID NO: 81624 - DNA, 538 bp, Glycine max
  Clone ID: PAT_MRT3847_44721C.1
cctacgcgtccgcataagagtagtaacataggaatagaattagttactgatttatttacgttggttcttccgatcatttgtacgcggtggcgcagccgattacggcgccgggtatggacttagggagaagactaacgacacgccggagggaacgctacttgtgtacctacggctatagccgatggtacgccgccttgatcccataagagcttcggtgagaagatgtgtggggcgccggagatgacgccggggatcgacagtgggagccactcgccgacagcttagacaacagtggcgggagtcggcgccggattgcacatgacacggacgagcaccgactggtggtgggactggaactggcggttgaagcttcggctactgggtcggcgcccaggatggtgccccaggttgagacgcctgaggagacgacggggacgccgatgagggcgccacatggcgacgtacgcgccggagtgcgtgccgatctggagcaagatactgcgagacgacttggtcgagtcggtcgacgacgaggacg

SEQ ID NO: 81625 - DNA, 289 bp, Glycine max
  unsure (1)..(289): unsure at all n locations
  Clone ID: PAT_MRT3847_44722C.1
ccggnaattctagattagctgggtggtgttacttcatattaacagactcattcaaaataaaccagacaacagtagtagcatattttgaagagtaaccctgtttttacaaggcaacgcttgccaataggaatttttggtttggatttccaccctacttttatggggtcaagatagtgttccatcctataattgacattatctgattcattttgcattatgacatcagcagatcaacccttgtacataggaaaaaggacatcaacccttgtcataatggggcacaatgcac

SEQ ID NO: 81626 - DNA, 411 bp, Glycine max
  Clone ID: PAT_MRT3847_44723C.1
aagatatgctagattctggaacaggattgcctctagtaatacgtgtaatcttgagctctagtttcaaagtggttcctagcctcataaagcccaggttccatcaccatgctgaatgtttggtgtttctcaagaaggcttacgacaaaaaacatcgaaccctagcatttgatagcacctgtaaagtaacatcttgattaaactgcgtgcggcttcgaaattctataaattaattgatatggtatagccacgggtccgaaagagatatacaaagcgaagcttaattaataagaaccttaaattgtatgatatggtccataagaaaagtttgaggtgcttgtatttatgtgctatatatataaccccttgatttgctttttattttaaagaaatggatgaaagcagatttttcct

SEQ ID NO: 81627 - DNA, 982 bp, Glycine max
  Clone ID: PAT_MRT3847_44724C.1
cacgcggaacctaagtgagaaacaaagaaaggaaataattgatctttgaaaatgcagggaggaaagaaagctggagagtccatcaaggaaacagctgcaaacattggtgcttctgccaaggctggcatggagaaaaccaaggccactgtccaggagaaggcagaaagaatgacggcacgtgatccgatgcaaaaggagttggcaacccagaagaaagaggcaaagatgagccaggcagagctggacaagcaggcggcgcgtcagcataacacggcggcgaagcaggctgccacggcagggcacatgggacaacccatggggacccatcagacgtcagctatgcccggtcatggaaccggacagcccacgggccatgtcaccgagggagtggtgggctcacaccctattggaaccaacagaggcccgggtgggactgctacggcccataatacccgtgcggggggaaacccaaatgattatgggtatggaactgggggtacttacaattaaataatgatgatttagaaaaggaaagctacgacccataagaaggtttagttaagagtatgacttttgttgtggttatcttcttgtttggttatctttttgtttgtgtctccttttctctccatttttgttgtggagaattgggtgtggttacacgacagtgttttcacttctactaggtgcaagcattctgtgtcgtgatgttgtattccttcgtttcaatgaataaataaaatcgtggttgtgcaaaaacaaaaaaaaaaaaaaaaaaaaaccaacaagcgatctcgccgccccggcccttgatcccggccgggggcctgaaggcacacgcattttccagttagacttttttttcttttacctaaattattagttcgatcgatttggctttttattcatgagtgattagaaaaaaaacattgtcatctgtaaacccttaattttgttttactactaggggcatagttttttt

SEQ ID NO: 81628 - DNA, 734 bp, Glycine max
  unsure (1)..(734): unsure at all n locations
  Clone ID: PAT_MRT3847_44725C.1
ccacgcgtccgggaaaacagaggtagtgatgacgatgaaaatggtaatgggtgtccgtgtccggtgaagctgtgtgattgtttagaggaacttgtgaggttcactctgaactctaactctcaccatctcaatctttcttcccagtttttctccaaccttctcaaagatgacgcaacgcacccatcttcttcacactcactatcacaaccaaacgattctttggaaggagtgccaccctatcccttatacaagcgcatttcttcagctctgttgaggtgcatggaatctgaaacattttgtaggacaggcggcaatttagccatgaccaatgaatttgaagattcttccatgcagcagaagcgtaatgagtggcacagattgattgtagagaaggggtttgaaatagagaatattttgaagagtgtttcctttgaattccatgtccaagagcctttcttttcacagctaaatgatggcctaaaaacaattngaagggaggtgtgccactgggaaatacaataggtttcaatattttttttaattcaaaatatattctttgatatgtataactgttatttcaactcctgttcgttacatttcctccattataaaagagtgtcacattatcatgcattaacatttgtgattacattgagttggtttggtgttgtctgaatttctgaaattgagtcttctagatgtaaaagacatatgaagtaacattgagtaatcaa

SEQ ID NO: 81629 - DNA, 443 bp, Glycine max
  Clone ID: PAT_MRT3847_44726C.1
acggctgcgagagacgacagaaggggactcaccacttcaaaacactcataacacaaagcacagggcaaagctcatccttgagttaaaaaatggcagcagcttcttccatggctttcttatccccatccttggctggcaagggcgtgaagcttggcccatcaaccccaaaagtgggaagggtgggcctggaggaaacccgcaccaagcaggtcttcttaagaaggccattgtaccggccaaaccgagtcaaggacttgggcccattctttggccagcccccgtcctacctaaccggtgaggtcccaagccactaccggtgggacactggtgggcttttcgcaaacccagaaaccttcgccaagaaccgtgaactcgaagtgatccacttcaggtgggccatgctcggagcctttggctgggtctttccggagttgctgtcccgc

SEQ ID NO: 81630 - DNA, 545 bp, Glycine max
  unsure (1)..(545): unsure at all n locations
  Clone ID: PAT_MRT3847_44727C.1
gacgacgagggggggggccaacgagtttncaaaactcaaacgaagtacctgttctctttctcttcaatttcacccttattagcgtagcgtattcatttccctttcttgagtccgggtgagcgcgttgcgagtttccgcttatctttatttcaattttttgtgctgtgtttgggagggaggggggggaatttcaagtccaggcttaacggcgagaggggggatcacagagngtnagtgcgctcccattaataacagagctnagtgagctnagtggggctaaaggggggagnagnagggcngctactgctgaggcctttttntgcagnctcctctggagtacatcattgaggaggtgcnagcacacgggggggtcaanaggtgcanagctgggtncgtactccaactgggtccgcgagccatcctnagagtccctacgggcgggtgaggggtgncccccttantgctgcgtcggcgatatttttctaggctcttctcttctccgttttcttgggttcttccttgcgcttttgtgctctctacctaca

SEQ ID NO: 81631 - DNA, 371 bp, Glycine max
  unsure (1)..(371): unsure at all n locations
  Clone ID: PAT_MRT3847_44728C.1
ntgtcaggagngtcgatcgtnagcatgactcacannacaatagtcggggcanttcaaagtacntccacattgtntcntagtcttactgtgcnctgtgnttctgcatcatttgtncttnttnnngaatncanagccaaancnaaacataagcatccggctctttgactgctnccgaaataccccatacttccctttnaactttctggangctcctgggaacgaagattccccagaatctncaagcanacttntccagggcnactactgtgcncatgcaggatttnnaaccccttttncgttttaaacgaccancannctcaataanacnttggaaaggggttaaaatgggggctgtgtnccnaacncgggna

SEQ ID NO: 81632 - DNA, 1246 bp, Glycine max
  Clone ID: PAT_MRT3847_44729C.1
cccacgcgtccgcggacgcgtgggctgcaccatcgtcctgcatgtcagaggtccagagggtgaggttatcacacacactttctctctctctctctctcacccagatcttgtagcaatggcgagcgctcccactccacgcgaagagttcgtgtacatggcgaagctggcggagcaggccgagcgctacgaggagatggtggagttcatggagaaggtctccgcctccgccgagagcgaggagctgaccgtggaggagcgtaacctcctctccgtcgcctacaagaacgtgatcggcgctcgccgcgcctcctggcgcatcatctcctcaatcgagcagaaggaggagagccgcggcaacgaggaccacgtcgccgtcatccgcgactaccgctccaagatcgaggccgagctctccaacatctgcgacggaattctcaaactcctcgacacgcgcctcgtcccctccgccgcctccggcgactccaaggtcttctacctcaagatgaagggagactaccacaggtacctcgccgagttcaagaccggcgctgaccgcaaggaggccgccgagagcacgctctccgcctacaaagccgctcaggtttactttttcttttttctttcgattttatgattttttatttttatttttttgagatgtagatctgtttgccatttgactgattttgtgtatattgttcgcacgcgcgggagggaatctcacgcgcgcgcgatttggtggattttaggcgagaatagtggaatctttacggtaacggtgattttttttaaagcgaaggaagttgatttttgaaattacttgtttaaaattgaaaatattgaactatcgaattgttttcgcgtgcgtgtttgatctatggttcaatacatgtgattctgcgttgcaaaatttaggttggaaatagcggctttttgaaccgaaggaagttgaaattttgaaattgcttgtttaaaattgaaaatatgaaattattgaatcgtttttgcgtgtgtttgatctgcggttacttccattttgtggtttgaaattgatctgtgaattttcttttttttgaatgatttgctttgattttgaagtttggattccgctttttttttgttctgattttttttttgtttgacggtgttgcgtgcactgcaggacattgctaatacccagttgcctccaactcaccctatcaggctgggtcttgctctgaacttctccgtggtttactatgaaatc

SEQ ID NO: 81633 - DNA, 331 bp, Glycine max
  Clone ID: PAT_MRT3847_4472C.1
ggtcaccaattagcgccttaacatgttcctcgcccttaccactctgtcaacgccgtaatgtctctccgttaccactgccagtccttgttcagtgcttgacaacgatggtgcacactgagaattggctcagcctcagcttcggcagtgattggaacgacacgccatggccttgcatgaagtgttgtgtatcatgctctacgcgtcatcagggtctatcgtgtccgtctaacgattacattttcgtagacccttctgagctccagttgtgtggtgcttgaaaggttctgatcgatggtgtcatcactatgagattcgtactctgaaatgcccc

SEQ ID NO: 81634 - DNA, 363 bp, Glycine max
  Clone ID: PAT_MRT3847_44730C.1
attctttctcaaattgaccttaaccgtccatgacaagtgtcaacatgctaggtgagaacatatattatctagtgttcagaccagtatttacacatttatcttaattaatctcactcacactttattcacacttgcccattttgataataggtcatacactaataaccattgtctgtacttcattggtatatgtcatcttctacatctattcatatctcttaaatacatgctccatcatcatgcatttcattcataagcttttgaactactaatttcatatatcataccattaaattctattaataggctacattcacactatataatatacattgacttatcctataattatctttcatcctt

SEQ ID NO: 81635 - DNA, 475 bp, Glycine max
  Clone ID: PAT_MRT3847_44733C.1
aaaaaaatttcattcattcaactcaaggacaaagtgtcctattacttttattgacatccagtgagtgaaatggggggagaagagatggctgagcgcctgagccttacattgataagaatacaatgctaatacaatgcttgtggaacttcttgagagttgaaacaacaactctaacaaatttttgcatatgattcatgttcctttcctccccctttgctaacctaatggaaaaagaatgtgaaaagagaaatgcatctgcaggtcttgaactgtttgttgatgttccctcatcaactatcaacattagatatgtgtgtagtatttccacaatgaactaacttgcaatcgacttatatcagttgcttgtttgttattcttcattcttattcttgtcgcgaactgaatgcagttggattagctgaccccttaagctgcactcctccaactgtgatttgtatgtctttgataataaatc

SEQ ID NO: 81636 - DNA, 2068 bp, Glycine max
  Clone ID: PAT_MRT3847_44734C.1
ctcgagccgttcagttagaatcgacacaaaatatgatcctcaacatattacaacttcttcttcttcttccattgaccattgttgttgttgttgcttttgttcgttctcgccatgccaatgttgtcttcgagaggcttcatcgcttatctcgtatctgctttctcttgtgctgttctgtctgcgctttttctcaccaaccacatccatcatgatgataacaagccaattactttgttagcctctcgtgtgtctgaaactcttaaagtttggccagacttggagccaagttggagacttgtgttggcaacggttattgggctaattgcacttttggtgtttggctatggtgcagtgaagttgtacaaggagcaatccgtttggatgaacacgagggtcctagaatccgctactcaggctcctatagtaggttctgattttacgattatgggggcatcagcatcatcggttgggtatagtgtgagtgtgccgcatcctagcgtctgggggtccctttgttttaggacctcctcgccctgcgtgtgccggccttcctccgggcttggaatcactgttggatgttgctctcagtgtcgtcttcccttcactggcttatcaccctccccagcggctccctctccttaggcacttctcctcgcccctgcgtctgtggtattggggtgcgggggacagttctttgtaagaagattgattacatgtcttgggagggcatcaatcattgtattcatcctctcaggtgtcatttttgctagcgccctcaccatgggtgtcgttggcattgagaacagcattcaaatgataaacaaccatgagttcatgggattcttaggcttctgttccagtcagtgatatattttattctagagtgcactgcattgggcatagtaaacaaaaagaaaaatccaaagttggtgtgaaaaaaagcttgtaaaattaagtgtgtaggacaatgacactaacaaatgttggtcaatgcctagttgaccaaggagcaaaaaaggagtatgatcacaaggaactcagaatgcatctgtgatgcttctatagaatggactgctatgaaccttgcattttgtgcattgtgtggcattgtagggggaattgttggaggcctacttggttctggaggtgggtttgttttgggacctcttcttctagagattggtgtcattcctcaggttgctagtgctacagcaacatttgtgatgatgttttcatcatctttgtcagtggttgaattctaccttctcaagaggttccccattccttatgcattatacctcacctcagtgtctgttttggctggcttctggggacaattctttgtaagaagattgattgcatgccttgggagggcatcaatcattgtattcatcctctcaggtgtcatttttgctagcgccctcaccatgggtgtggttggcattgagaacagcattcaaatgataaacaaccatgagttcatgggattcttaggcttctgttccagtcagtgatatattttattctagagtgcattgcattgggcatagaaaacaaaaaaggataatacaaagttggtgtgaagaagacttgtaaaattaagtgtgtaggacaatggcactaccaaatgttggtcaatgcctagttgaccaacaaggaagatcagtgccaaattataaggttttcttgccttcctatcagtgagaataaatttgtgaatgtgtgttagctcctcgctaacacatatcttatagtggtttaatttatatggatgagtgttagctcctcactaacacatcttgtagtggtttaataaatctgtggatgagtgttagctcctcgctaacacatcttatagtggtttcagatgtattgaatttgtgtcagaaaaaaaagaataatggaaatgatatcagattgttttatatgtttggatgttcaaaaagatcaagatacctctgcccccaaaaagttcagatattctcatataaaatgagtggagctcaagaagcttagatctgaaaaatcccccgacaatgaattggggcccggttcctgtgggcccacc

SEQ ID NO: 81637 - DNA, 490 bp, Glycine max
  Clone ID: PAT_MRT3847_44735C.1
ataaaaattcccaagaaactcaattaacttgaaacataatttcccaaacaaaaggggctgttcaagcttcaaaagccgtttataacaaatataaaggaaaatgaccgacaaaactgacttaatcttagaatggtggtcatcaaataactcccttcaagggcaatttaagatgaagcccccctttaaagagcccccttttttttgcttggagccaatagggtctcacccttttttttcacaggcttttccttttgaaacaatataaagtcaatggggcttggaaatcacttgaaagggttgattcttcccttacctttgtaggtaccacccctttgcttctgggcttgattaacctggacatgggaaatgttcagaacattgacatccaaaccttttacctcaatattacttttaaggttctttaacaaatttaggatgaacttaactgatttgacgggccagcgtccttgaccattggagtgtctgcttt

SEQ ID NO: 81638 - DNA, 462 bp, Glycine max
  Clone ID: PAT_MRT3847_44736C.1
tttttttttttttttttttttttttttttttttttttttttttttttttttttttttttttttttttttttttttttttggggggaaggggaattttaataaaaaaaactgggggcccctccctatcccttttccaaaaattttttatttggaacaaaaaaggggtccggggaaaaactcttggttttgccccaaccccaacatggacccccgttaaacaggggcttttgggggctttttttccccggggggaatggggacctgggcccggaccgggattttcaaaaattccccaaaccccaaaatttaaaacccccatgttcccttttaaaatggatcccccggcttttgtgccttttcgggggccccgtttacttttcccgggggggaaaacccacccttttaaaattttaaccgccctccccaaggggagccccaaaaggggaatatttttcctttttt

SEQ ID NO: 81639 - DNA, 764 bp, Glycine max
  unsure (1)..(764): unsure at all n locations
  Clone ID: PAT_MRT3847_44737C.1
tttcctttctataacctatctgaaggctcaatctctgccacagaatccttagcagtcatagcatcaattctcatattactttgcttctgtttcagatcttcaagtatctaccttcttgactatgtttgttatatgcctcctgataatctgcgccttccttactctcatattgtagaacactttgaattgtgcaattttgaccctgaactcataggctttgaattgaaagtattggaaagatccggtattggcgtggaggcttgtgtgccagaatcagttcatgagctccctccggatgattccatgaagcgtgcacaggcagaagttgaatcggttctattcagaattgtcaaagacctcctttcaaaacacaaagtgcatcctaaaagcattgatatccttgtgtcaaactgtagcctattctgtcctacaccatccattacatcaatgatcattaacaagttcggattccggagcaacgtaaagagtgtcaacctgagtggaatgggttgcagtgctggattgctgtcaataaacttggccaaagatctgctgagagttcacaaaaactcattggctttagttcttagcatggaggctgtggctccaaatggctacagaggtaataccaagtccaagcttattgccaatgtattgtttcggatggggggagcagccattttactatctaacaaanaacaacacaagccggtggccaagtacaagcttgagcatcttgtgagaacccacatgggatcaaatga

SEQ ID NO: 81640 - DNA, 256 bp, Glycine max
  Clone ID: PAT_MRT3847_44738C.1
gactcttgatgctgttgaagctcgtgagaagaagctctatgaatccgacgtgcgggtgaaaccatagttcaatatgctagaactccaacagtccatgcctgctggtgatgcaccatacactacctatggtgatctgggcgtcaaaaaggatggtactcaaactacatggtggtccactccatccttgaccatcaacttcatgattgctcaatgctgcgatcacaccattcacaaaggtcttcgcactaactcactt

SEQ ID NO: 81641 - DNA, 2208 bp, Glycine max
  Clone ID: PAT_MRT3847_44739C.1
aaagaaaactccactataatttgtttgatgattaacattgaaatatcctattcaaatatatgtaatgggttaccgtttcaacaaatcgtcggtagcaaaaataaccaataattagacagatgctgttggaccctgtaaccatatgccaagatcaagtaataggataagcagcaggactaaaaaggaaaattacaacatatatgtacaaaaatccctacatataatataatatatacaaggtcagatttcattattacttgatttcatattcttggccttttccatccactttctcttctcatccaagctctttaaggtgcctttccatttacaacctgactcttgaaaaatgtttcttcaatccttaacttcatattcttttgattcctgatgtatttctgagcaggcactgaaaatcttctaagaacagccctctgctgcagaaggaggggacttttcaatgtctttcaatgcattttcttgtttttcctggttactaacaccagcttcagatttattggtgctaagttttgctacggcgttgccaactaaacccgtctcggacaagttctcctcatgttccatatcttccaatgcattttcttgcactacttgattttcctggtcagaaacaccagcttcagatactttagtgtcaagttctgctacagggttgccaactaaatccttctcagacaagctgtccacatgttcactcccttctgctgaagagcacaaagatgaagccccatcattagttgccgtttctggcacagccaaacaatctggagtaacatcaattccacctcccgtaacagcttcagattcttctgatacctgcctttttgcttggctgccaattatacctttcttagacaagtcttcccccttctcagctgatactgagggctttgggacttcagatacattttccatctcagcagcacagcttttactatctgtcccatcctcaatgtcagctagtcctcttgatccatcctgggcttccaatattccttgtggaccctcatcaggcaatgtctccacctctctttttccctctgatgctgtgacatcttccacagatagcccaccaatctgtgtcttgccttcattacatgtctcagcttcagaattaataattaattcctgcagcagtactggatttgtagagggaccctcagtggcatctttacagctcccctcttcagtctgacaatctttcgattccttgagtacttgcatactgcattgtggaccattgtcagatgacaccacaatattatcatcctcagtcatcaaggaagatgatggcacaataatgctacttgatgaaagctgtgtattaaccccagctacatcagatgcattcatttcattaccgatctcagcttctgaaggatttggttcctcattagcattttcacaattctctccggtcaaacaatattttggttctgcagcagccagtgggctatcatatgatgcagcagctttatcttgctccatcactaaggaagaaggaaaatctgcgattttggacttcagtcctggatcaaccctgacaacatcagatgttttcatctcatcaaccttcccagattcagaacattttgatttctgttgtggtaatggatttgcaacagaatcctcgatgccatctctactattctcaatcaaagggtctcttggttcactaggagcaagggaactgcaaagagggcccttgtcagacaacatatcaacattatctccctccaccatttggaagcaagaaggtacatccatgcatttggaagtaaccctttctgaattattctcagagacctgagaagcatccatttgatcactaattttaattactgaattgtcttctttcacaaatgacactcgacccttcacagagtggctaataatcattggggaatctgatgacattttattgatttccagcaaaggattttctggcaaaagatcagttccttccatgtcattttcagatacagacctcacaactaatttactgtcagaagatactccaatcttttcttcctctctcacttgggatgatgaagacttgacagcatccgggacagttactaattgatgaacattcagagatgttaaaggcctccagaaccatcaatatcagatgtagaactgagcacttcttccttcgtaactgaaggagatgaaactaaatccaac

SEQ ID NO: 81642 - DNA, 605 bp, Glycine max
  Clone ID: PAT_MRT3847_4473C.1
ttcgggcacaaagaagaatcaatgtgtcacccgggaattccttttgtgaaccgagaagggttgatggtgcatagaagatggcttgtgtcatcaccactggcaaggcagattcatgatggtggcagctctggagagagtggttcggtgcagcgatgcgtgtgctctccgtcgcagcatccggggtcgttccggtgccggttgcatcatgtcaagtatgtatggtgtggtagaacaattaagtgatgggatgttatacaattctaagcgtccataaaggttctggtttataagcatgcatgtaaataagtgtttcctcttttcttctttcacgatgaatggtgagagaatttgagatcacaaaaggttgggagctacttgcatttgtgatttataatgacaaaaaaaatagtgtttttctttgtttttcctgtgccaattaaggcaggctagtgcatcagaattcataaaggattgggatataaaaaaaaaagataatttgttgcattaattattgattctagtactcaaatgttgcattagaatgacggtatattatttatattaaatgagagacatctaaatagaagggagttgataatcgctgc

SEQ ID NO: 81643 - DNA, 528 bp, Glycine max
  Clone ID: PAT_MRT3847_44740C.1
cggtccggaatacccgggtcgacccacgcgtccgattttttcatactttgctactgacagagagaaaatgggtgtggagtatgacaactgctaggtgctgttacttgaccgaaagataacaaattgcaccgggatcgtataaacatactgcaggacgctattagaagtggacaccctaaaaagaatattgatgaggatattgaacaagaggctttaaaactcttggggaacaaacttacaggacactgaagatgcatcactgaagcccctagtttgagaacgctagaccagactgagaattgacaattgatggagcactggatcagaggaagagatagccttactttggcacaaagctgttgaaagaaggaactaggatatgcctccaaggtggtgctcaccaaggatacaaccacaatggttggcgaaggaagtacccaccaagcaccgatcgagagagttgcgctaattaggaacctaattagagcgtgctgaccaagcactatgagaaagaaaagctgaatgaaa

SEQ ID NO: 81644 - DNA, 290 bp, Glycine max
  Clone ID: PAT_MRT3847_44741C.1
tagagaacattattttgtctttcatgaattcaggcgcattttattttttttaggagagacctttgttttctttaaacgagcccctacgcctgatggggtttggaaaaaaaacctttattaatactgccccgagaggggaaacacatctttaagcatggacgttgatcatgccatttaaaatgtggcctatctcctttcaaaaaggggccgagtgtggtttattaataccgccccccctttgggtcgggagagcgtggatcttttgaatttgttacatcaaaaggggaagg

SEQ ID NO: 81645 - DNA, 469 bp, Glycine max
  Clone ID: PAT_MRT3847_44742C.1
tggctccgaacctttgggctgattgatgtgcttgtttaggtgcttgattatgtgcttgcatggtcgtgagaagatgatagaaggggagagaacggggacgaagctcgtcacgcgcgtagcggcggccgcagtatcctcctcctcggtggaggcggggtttacggtcgaggtcgcgatacgtattttaatagagccgatcttgcgctccttagtaactatccgtggcgtcaaattccttaacgtccgccgtatgaagtcgaagtagtacaaattacgtccacgcggtcattctaaaaatgtcagtccgaagtagcacgccaatctcttcaacgtttgaaaaattgccgtcctccgcgggacctttcccttaatctgccaaccaaccaagttcctccacaaccaaagcgcgggacacacacacacacagacaaatagctcaacccacatatatcccgacttcataaagtac

SEQ ID NO: 81646 - DNA, 232 bp, Glycine max
  Clone ID: PAT_MRT3847_44743C.1
attcatagaattggggcatttaaattatgtgtttgtacctacatattccctaatcatacataccatataatttaaacacaatatctttattctaataaatatactattcaaggaaaagtaaacccctttttcatgctattcacaccaaaacacagatatagaggtttccactttggacgggctaccagaaacggcaccactggtgtaaacaggcttgaacccccaacccgga

SEQ ID NO: 81647 - DNA, 247 bp, Glycine max
  Clone ID: PAT_MRT3847_44744C.1
caacagttcctttgatccatcctccatgattgtcttgtgtgacccttgacacagcaagtacatggtgcatctgccgatggggcgcggacatgtctatacctaaagcatgcaatgctgcatcttccaccatcaaaaccaacagaaccatccagttatgagattggtgccctactgcgttcaagtgtggtatatactatcagcctctaaccggtgtttctggaggtgaccttggcagagtgcataaagc

SEQ ID NO: 81648 - DNA, 331 bp, Glycine max
  Clone ID: PAT_MRT3847_44745C.1
gctccgaattattctcgagcaatcttttaaacctctttctagaattgcttttgcacaaaacagagcgaattttgtcatttactaatgaaagctttatatcgtttagaatagcttcaaaaagctgatttacctaccatatcacaaattgaagagtgccattcaaagcatatgatgataaatgctccagattcaaatgataatattgattaactcaacatcaatgaaacaattggttaacaaggtacatattaaattttttatcaaacacaaattgtttttattgatcggtattaaataggcattacacactttatttctttgatgcaaattt

SEQ ID NO: 81649 - DNA, 1057 bp, Glycine max
  Clone ID: PAT_MRT3847_44746C.1
cgagcgccgcaaagcgaaatcacactatctccgctgaaacgcaaatgattttacatggaccgtccgattgagtgacacgcgatcggtccgcgcgggttcgcgtggctgcggtcgccatcagcgcggccgcgcttctggggcgagtttttctccgtttgcagcacaacgaatttcgaaatcccgtggagaacgtaacgtgctctggtttctggactcgaagatgaaggccacaaaggaattgagcgagcaagtggaggaaaacgaggtcaaggttttggttgaggaggacgacgaagaatacgagtccgtggatgaagtagtagacgacgcagaagatgatgaagacgaagaagaggacgatgacgacgacgaaggagacgacaatgacgacgaggaagatgatgctcctgacggcggtgacgacgacgacgacgaagatgatgaagaagaaggtgatgtccagcgtggtggtgagcctgacgatgacgataacgactcagacgacgactcagacgacgacgaagatgaagacgaggaggacgaggaggagcaaggggaagaggaggatttgggaacagagtaccttatccgccctttagaaactgctgaggaggaggaagcatcaagtgattttgaaccagaggagaatggtgaggaggaggaagaagatgttgacgacgaggactgtgagaaggctgaggctccaccgaaaagaaagaggtcagataaagatgattcagatgacgatgatggaggcgaagacgatgagagaccctctaagcggtagagttgggtccattctttgcttaagggcttaaactataggttaacttatctccccttgtcccttaaaaacatttcagggaattgtttcattttctcttgcatcattatggtgctacattattaggctttattactttcatgtttggtgcatagtttataacatttggtagaacaaattttgcagacttgaatgttttctttgagctactttgtagctcggtatatctcatgttatgtatcactatctgttggtagatttcttctgcctttt

SEQ ID NO: 81650 - DNA, 197 bp, Glycine max
  Clone ID: PAT_MRT3847_44747C.1
acgacgtagtgaggcattgtttggatacatccttaatgctaagatgtaggagcattcaaattaaaatggatggataattcttccacatcataatcatataacccagccatctagggtgcaaataaaatggtatagaccatacaaatttttccataggacttataatatcctcaacctcaattaaatcctaaacaaaa

SEQ ID NO: 81651 - DNA, 292 bp, Glycine max
  Clone ID: PAT_MRT3847_44748C.1
cactggggatggttttattatttggggttggtgcttgtaatgttgttctgtttcagttcaaaaaaaaatgtcctcaaaaaaatgaaagttcaaaacaaaccttggaacgaagtcaaaaaggtgttaaatgaaactgaaaaataagcaaaaaccccaaaaaaaaaggaaaaaaagccaaaaaaaaaccaacaaaccctggtaaaaaacatcgacaccggaaaattacattgacaatctgggtggcctaaaagagctgagggcgtaccataagcagcggccagggaaattctta

SEQ ID NO: 81652 - DNA, 487 bp, Glycine max
  Clone ID: PAT_MRT3847_44749C.1
gtacctaccgggcaacttagggtgcagtaactctggatctcaccgatcaccaacgagccttcttcgcctcaggttcccttataaactttcgggtgtttgactgccgaggatggggctaggtctagccctggaggattgacacatacctcacagggctcctgatctactgcaaagcttacattcctgctagtactcgggttgatccaggcattactcgaactggaaattggaggatttacgaactacgagactactcaaagactgtccggacagactagaatatctctcgaggcgagcctgacgatgacacaaactagccggagaccgaactactaaccattgcccaatttaagctgagactatgcactggcactgacggtattccgtggcgagacctaaactcgatagcaatgctacagagaccaatggtggtacacatgcgtgacacaggccacacccatcactttacagcttacaaacacgatgg

SEQ ID NO: 81653 - DNA, 503 bp, Glycine max
  Clone ID: PAT_MRT3847_4474C.1
aaaaagtaaagaacgtggatcacacccgtattgaatgttaatgtggacaggtcagaaagggcgtagcagcagcaaaacaaaagacggttgaatcttggtagttgtggtcgtgacaggcactcgggctgacagccatcttagtgaggtagtatatttcgttgaagtagcgggtctcccccatctggtacttctcgttctagtcaacgaaggaacaatctttcgaggaataaccttttatgtagttggactaccaggattattcaatagtagtaggttcaggatatctaatactaataagaaaagggcttcttgtcggcaaatacccagtttctcccttctcatcaacgtatttgaagcattgatgaagggtggaaggtaccacgctgtggatccaagcaggaagtttaggaggtgtcaccgtcaatcacgtaagaagtgacctcagtcttcagatcccatgtttggcacacacaagagacgaatcttgccgatggctgcgagtc

SEQ ID NO: 81654 - DNA, 374 bp, Glycine max
  Clone ID: PAT_MRT3847_44750C.1
cccactcgtccggcgagacgaccactcaggggggagaattcaaatgagaggtggagatggcttgcatacatttttattcctttgctctattcatcttccattcgctgacaccaagaaccctaacagaagatcttacatcaaaacccataagctgaaatctacgaagatgatagttttgcatgtagccatatagaagatttagagtaatttatccgattttctagttagactttatttaagctgaagcaaaggaaaatgcaattagacttggataatgctggaagagtatcaatatattgtacattcactacatggagttccattcgtcattctcatcagatggtcatgtgatggatggtgatcatagtcttaac

SEQ ID NO: 81655 - DNA, 242 bp, Glycine max
  Clone ID: PAT_MRT3847_44751C.1
tgccctttctttttttttgttttaatcagacagcttgggttctcatgtcgaggttgaacgtacttagacaactgctattctcatacattgcaaccagtgggaggatacccgagactatattacaacaacagagccatatttataatgcgcatacataggtgacttcgagtacacaaaaaagggtgacttctaaaaatgacaatatttcagcacagtgcacatgaattcgagggctagaacta

SEQ ID NO: 81656 - DNA, 555 bp, Glycine max
  Clone ID: PAT_MRT3847_44752C.1
ccacgcgtccgaatgtataggtatggatggatcgattacggctattctaggcttacttggatgacacggggtgggagctcatacagtatattgaaggctgtcgaactgaatcacaagtgttctaggatctactttaacagattgggtcagctaccaaagaaggtgaccttgaaattgtttatgaatacctagtaaatttcgtggcagcaggtcttcgactttttctatcacgtgatgaattcataaaactagataaaatttctatgcctatagcgttcataaatgacttactttgacatgattcattctatgaactatgaagtgccataggggcatttgaaatatacatatctattcgacctacattcagctttatgtacacttgatcatacatctgatctaatatcagatatacataaccttgattaaaacgaatgctaccatgtttaaactacatacggaggtctcacagagacctacctgcttaacgcatctcgtctccatgtgttcaaacaggatgatattcgatgtgatgatccctatggtgcgagaaaa

SEQ ID NO: 81657 - DNA, 261 bp, Glycine max
  Clone ID: PAT_MRT3847_44753C.1
ggcagaatctggggttgctcctgctttggccagggctctcagctctgaaagattggtaccgattccggatgtgagccaaaacagctttcatttgaatcccctgtttttcctttcgggaaagttaacaatatgtgggagtttctgctgtgaattgaattcgagtcgtagcttctggattcggtgcttgctgctttggtggcataagttattggactaagtgagatgatacgatttgagtgcaaaggagacttacactgtgtg

SEQ ID NO: 81658 - DNA, 544 bp, Glycine max
  Clone ID: PAT_MRT3847_44754C.1
tgtaggttgtttataagatacttttgggggggggccacagatcaactatacgattgactgatacaccacttatgaccttgcgacttttctaactacactgtttttacgctccattttccaccaaacacaagcctaatagtgcttgtgctgtgatcgcgcaacctttccactacaggcaatgctgtggcgcataaagaaggactgtggtggtgataggagagatgatgcgcgaatgggctcccagccacaactggagtttagaagaaacacaagagggattgccttccaacggggacctgatactacccagaattggcataaagacgagatggaaaactctccatgtaagcagtcgagccggccgttgctgacaccgtctgcagggcttggacagccagctcaggctctattcctgagccccatctcgatggtaaaccaggtctatgagagactccacccctggcgccgcccacaaagagaccttgactgtttttacatagggacctttagacatattgttgtgcatggatgctggactacagcc

SEQ ID NO: 81659 - DNA, 265 bp, Glycine max
  Clone ID: PAT_MRT3847_44755C.1
aaccgcacaatgcggatccacggctaaggtggaagaggtcactgccggaagaagggagcaacaccatctatcatttaccggcgatctcttgagtcgaccatcatacacggctatccggcgatccctaatcctcgcaaacagagatgacgacatcacagcgcctcacggacaggctggtggagaagtttgagcagaacatcacaaaaagaggatttgtgccagacactaccactaagaccggagacgactagcctaatgatcgcac

SEQ ID NO: 81660 - DNA, 512 bp, Glycine max
  Clone ID: PAT_MRT3847_44756C.1
cccacatgctggtgcagtttggcgagattcaggaaaaagttgtattgaaatcttcacaagaggaattgcttacagcttggacaactcaggtgcgttctgcaacatctatgttggctgatgggtgtccatattctgcatgctatggtgcatgatagtccactgtctacaataccaggggatttcgccattggagttaagtctggcaaccataaacaatactgtgtgcatatgggctcaatcctggcatttcaggttctagtcctttgggcaccattcctcagtccatttcacatcaaactgtttggaatcaaatggcaacagtgagaacaccattgattattgatcctagcaagcagagcgtttgtcaattttctattgaccttctcggtggaggaattttagtggacaacactggagattgtatcacacttattcataattctacaattagtatctcgctgagagttgctgtttggaagaaaggctgttcaatgttaagattgcgatgcctg

SEQ ID NO: 81661 - DNA, 475 bp, Glycine max
  Clone ID: PAT_MRT3847_44757C.1
cacctatgaaaaataggagtggatctgcacataagatgttactggaatttattgctggcattttaacaacaatggttggggccttactctattgcctattctggagaaaggtcattccatttcttaagcaacgaaagactttgaaaggaaaggaacatgataaaatatcattaaggtattttgattttaaggaactagagagagcaaccaaaaattttagccaagattgcttgctaggttctggtgcatttggaaatgtctacaaaggaacctttgacttagaaggaacactagcccattaagagagctcattctgaatcattctcaagtgtggaagaattcagaaatgaagttaggctcctctcagctttaaatggagtaaaaaaaattcagacatcagttgatgttcttgatatcgatgatattcattgtaaaagcacattgctttggtagtttatatatgcaacagcaattc

SEQ ID NO: 81662 - DNA, 410 bp, Glycine max
  unsure (1)..(410): unsure at all n locations
  Clone ID: PAT_MRT3847_44758C.1
tgccctgagctancganncagcagagntgaaggaaatacgaagcntgaattcggtcagaaaatatagcaatctgccaagtcctcctggaggacgaaagaaccgacaggagggggctgttaacagctacataatcgcacgcccaatcaaggatcattatggaaaaaatatagatgacctacatcctgcaggtcaatgactgccttggtgctttgtaaaccatatatgtgggagactgaaggtcatagaccattatgttggggctaacttgaatactaacaccatggacaaagtatattgaaatgtgcaccgtgtgcgtgcataaaaaaagctgttttgagaaagcatctgatgcattacaatagcatacacacccaacggagacaatgcaagcttatggggggaatgtcac

SEQ ID NO: 81663 - DNA, 181 bp, Glycine max
  Clone ID: PAT_MRT3847_44759C.1
aagggaaagggcctaatttaaacacatttgggcttcaaacaatttttgaaagcccaaaatttgggccgaacccacgtttagtttttattacccaagcaaagggcaatcttgagtctaaaaacagggaaatacaaattccccaacagggaattgtcttttatttttctttggaaaacaaatt

SEQ ID NO: 81664 - DNA, 480 bp, Glycine max
  unsure (1)..(480): unsure at all n locations
  Clone ID: PAT_MRT3847_4475C.1
agaaactgtaatgaaaaaaaaatatatcagggttagaagtncgcgtgtgggaaacaccaagtaaactcaacctccttagggtcatccccggcaaagttccatcagctttagtgtgtcatcccggtccgctatgcctagaaattcttctacgtatggacacagctcgactcgtcgtgatagaagagccgtggtgaatgataaagcgcatagcagttcatcccgaacctatagcgaaaaagtgaattcggttttagcatccacgggaggctccatcgttcggagtgaaaaagcgcatagcagttcatcccgaacctttagcgaagtagtggattggcttttagaatccacgggaggctccatccttcggagtgaaaaaccggtttcacacagacatacggtgtctttgcttttggcatcccaagtctccaactccacctcaaaccgtttagcatccacaggaggcatctctagttataacta

SEQ ID NO: 81665 - DNA, 430 bp, Glycine max
  Clone ID: PAT_MRT3847_44760C.1
acgggtacagctgcgaaaggtccagatgcgggtacagctgcgagaggtccagctgcgggtacagctgcgagaggtccagatacggggacaccatttttgggttaggctgtgtaaacataacaaaaagttacgggagcgaatgacatcaacacgattcggcttctaaataacatcatgccgatactgatggtacgcacacgactaataggtacaagtcctccatttgtccaagttgggtcaagcagtgagactactacacttacgtgtcgatacgcatgcacagtacaatgtacagctttaacaccaattaaaccatggtctgacacatgtgtacaacaatgcgcttcagattctaaacatcaactgtccgttgctaatgattgctttactagttgtgccttaatcaagtccattaacatcatcaatgata

SEQ ID NO: 81666 - DNA, 226 bp, Glycine max
  Clone ID: PAT_MRT3847_44761C.1
actagggtattacttttaatggtcacatactacaaaggtgtaatattatcgcaatcgctgaacattgttttttaacaaaaggatcgaccacaaacaaaaacaacccaactccaataataataaccacgtccagtttaatacatgtaaggggctctctaaaaaggggaggaacccacaggggcgcattagaaaccttgttcataaaagggatgccacaaaaaataaa

SEQ ID NO: 81667 - DNA, 730 bp, Glycine max
  unsure (1)..(730): unsure at all n locations
  Clone ID: PAT_MRT3847_44762C.1
ttcatacttttctgcaataatactcttcctttaaaaattacactcatttttaattattattattattattattattattattgttattattattattcatccctttttatgtctcaaacactttcttaaagctctgcaccacaaccttcttcaacttgaactcgaagtatgcggtttgtttgagatccaaaagtctatgttcctttattcagtctcaattttccatcacaatctgcttcttcaattctccaatttcaatattcttattctgctttgaaatcctaagcaccaccctttgttcgatgtctctacttattcgttttctttagcagagttagtgattatcgccgcagcagatcctccaagattagttctttccgctgattcttagcttaacgccttgtaacaattcacactccaacttgatctgagactttggccttttcagctacatttcaagatcttctccatttctttttggtttttttggtttttttttttttttgttccctatttagtttttttatatttttcatattctaatactatgatatcctagtacgtgttttttagttttttagttgcagntgttgtattcgctgctaaactattctaggtctctttttttgttgagctccgttcaagtttgatttgaaagttttctcctttacttcttcattntttatttaggnttttttctactttgcattttgagcgccccttttgatct

SEQ ID NO: 81668 - DNA, 917 bp, Glycine max
  Clone ID: PAT_MRT3847_44763C.1
gtgtggacaaaacaagtaattataaactgatattttgtcctatcattatcgtttactatcttctttcccatataacacttttttgtgtctcagattttccactttgttctgctttcaattttgatcatcacacaacaaattctttagtgctcggtacaagattcgtgaggggccagcaatgaccacatctcttctactcccatctccttcttgtgctgctatactgagcaaagggactaatagaatttgcactcgtgcttcatttcactcacttaaatcccatgtgaagaagggattcagagtgagagctcttaaagaaaaaacagaggaaattgaaagtccttcacagccatcttcacctgaggaagttacaaagaagtatggccttgaagctggtctttggcagattttcagctcaaaagaggaaggaaaggataattctcaacagaaatcaaagggtgatcaagccaaggaattgctagcaaaatatggtggagcatacttagccacctccattactctgtcattaatctctttcgcactgtgttatgcattaattagcgctggaattgatgtccaagctttactgcagaaggttggaatctcaactgatgcgactggcgaaaaagttggtacctttgctttggcatatgctgcacataaagctgcatctccaattaggtttccacccacagtagctcttaccccaatagtagctggttggattggaaaaaaagttgagaaagataagtagcttgtagtggtttccacccacagtagctcttaccccttctaatatgcttctctatatagtattttcaaatcaacatttattttccacacttttggtcatgtacatccttattattactttaccataatgaaaatgatgtttaataatgaaccgtctattcgcc

SEQ ID NO: 81669 - DNA, 496 bp, Glycine max
  Clone ID: PAT_MRT3847_44764C.1
gcaatgaccacatctcttctactcccatctccttcttgtgctgctatactgagcaaagggactaatagaatttgcactcgtgcttcatttcactcacttaaatcccatgtgaagaagggattcagagtgagagctcttaaagaaaaaacagaggaaattgaaagtccttcacagccatcttcacctgaggaagttacaaagaaattttcagctcaaaagaggaaggaaaggataattctcaacagaaatcaaagggtgatcaagccaaggaattgctagcaaaatatggtggagcatacttagccacctccattactctgtcattaatctctttcgcactgtgttatgcattaattagcgctggaattgatgtccaagctttactgcagaagggtggaatctcaactgatgcgactggcgaaaaagttggtacctttgctttggcatatgctgcacataaagctgcatctccaattaggtttccacccacagtagc

SEQ ID NO: 81670 - DNA, 271 bp, Glycine max
  Clone ID: PAT_MRT3847_44765C.1
ctaaggcaaaatagacgcttagctgctgatctacagagaacttcttgtaattaaaagatttcaattcatagcaaactggtgttttaaactattgcagtagctggaactttttagtgtaaccagcatttattggagaagtgaatcacaaggaaataaagatgagtaaaagcaaagatgatgctcctcacgaactggagagccagtttatcttacgtctgcctccagaatatgcctctactgtgagaagggcagtacagtctggtcatgtcaa

SEQ ID NO: 81671 - DNA, 411 bp, Glycine max
  Clone ID: PAT_MRT3847_44766C.1
cccaccgtccgcccacgcatccgcccacgcgtccgcccacgcgtccgcccacgcgtccgaccacgcgtccgcccacgcgtccggtcatgcactgcctccctcaaaagcctcacttgttcttccgaaactgtcctaatctgaggaatatataggataattccaaattccaaatcaataatacacagtcataataattaagagaaagaagagacgaaagtaattcaaagaaggaaaaaaaaaagactagaatataattttggtacttctgacttttttttttcttgatttgttctcataagttttaaaatcttcattttacactcttgttattaaagtatttcagttagattaaaataatccatttattagttttttttacactattaatattaattctgattgatgtaaaaa

SEQ ID NO: 81672 - DNA, 416 bp, Glycine max
  Clone ID: PAT_MRT3847_44767C.1
gatccctctatgatgctcacattgtagagagcgggggggatattgcatgatattggaggttgcagacgtctcatcttaattcgatgtgatcatgacaacagtgaggcaagagttcgctcgaggagactgtgccgcatatcaagatcttaagcacatgcgggatcaattctttttgacatccatggcgagctttcaaacagtcagcaacggacctgagtgcagcaggaagcaactagcacttgacattgagtatcgggctctttcatgcaaatttcatagctaaaacatgtaaagccttgaacccgtgcacttaagctccgactgtgagtgctgttgaagaagaattatgaaactcgtggccctttttttgccatcattgactgataagggaagtcgatggcgaaagatgagtaagc

SEQ ID NO: 81673 - DNA, 283 bp, Glycine max
  Clone ID: PAT_MRT3847_44768C.1
ggcaaaagcaccaggaggaatcttgaatgtaccttggacatttgcatttagcttttgaaacattggttagtggagtctcttgtgctcgctattttttacgttagtcttggttgcatctgaatcatagctcaggattaaggctctagaattgtatagttactaaattctattttttttcatacaatagttgaattttggatttccagaatgtatgtttgtgtagtatctactttctgccctagagagtctataattaatggctataataagacgaatggcatcc

SEQ ID NO: 81674 - DNA, 370 bp, Glycine max
  unsure (1)..(370): unsure at all n locations
  Clone ID: PAT_MRT3847_44769C.1
gttgaggnncatcagcagaaatggttcaatccccatagggcaacaatttcttttacccataacccctccctgttttacaaactttaaatccgttctgaaaacatgcccaccgcccccattaccgattaattgttttaaaagccaactggctcgaaaaccaaaggctatttttcttaacatattcatatgggactttaagcaccaacaattgcggggtggttggctattggcaattgcagctcgtcttttttgggacccacaaccttgtccaccaacttgcctttttttaaaaacaagaagggtgggataaccccaattcccccctccttggaaacaggcttcaattcttccacatcccccttgggggagg

SEQ ID NO: 81675 - DNA, 230 bp, Glycine max
  unsure (1)..(230): unsure at all n locations
  Clone ID: PAT_MRT3847_4476C.1
gggatgaaaaccaccaccctccctnctggttgcaagggggcaccttaagccaacagccggggatcaaaccgaaaaacaagagacggagcggcgagagacaacgccaaagacagaaccgcacgctcacccttaaaggaaccagccgagaacccacactcccgaacccactaaggcacagaacggaaagggcgccaacaactaaacccaaggggagcaaaccaacctcaaaa

SEQ ID NO: 81676 - DNA, 431 bp, Glycine max
  Clone ID: PAT_MRT3847_44770C.1
tcgcctatgcgtacaaaaacaaatttgatgggaacgggtaagatttgatagccggatgtaacttgagacaaaatttgtcgagatttgactacaatttattagatattgttagctatcacaacatgatggaaacaattctatttttggttggatttgaaaaatttccactctcatgatagccctagatgaagaaattttttttaacgatgtacaatacatggttaaataatgtatatgaatgaaatgatgtagatgaataccatgaggatctttatttaaatgtggaactaaaggaatttgaaaatttatactatttgtgagaaatacctacgtagccacatgagacgttttaagatttgagaattgactccaaattgataaaaaatgaatgatgcgaaaatttatacgagaatttggatgaaacccaaatt

SEQ ID NO: 81677 - DNA, 238 bp, Glycine max
  Clone ID: PAT_MRT3847_44771C.1
tagcttgaaacgaagaaatacacatcgaggcatcatcgtcatcctcatcctctcttcttcttttacgaaagcataaagtttctccaaatcaatcccaactcacctccatttgtctcaaatcaattttctcgctaatccaatcctctaattgcccccggtgaatcaccaacaccccaatatataattcaaattttcacgtcaatctcatcgatctcgcgcttggatttaacgtgaggcg

SEQ ID NO: 81678 - DNA, 463 bp, Glycine max
  Clone ID: PAT_MRT3847_44772C.1
ggcatctgcttctaagttctgggctgagaaagcctcactttgtcaggatgtacagtatgaatcccttgaatcaatgtataatacaaagcattttgttgcaagaagggagtctccctggaaggttgatggtgattctgctggagtttcctctaaacttaaattacttgaacaggacttactaaatctggagaagattggtaagagtgatccatccaaggtgccatccttgattaagaagcaggcaaagagatatcaagcaatttcagaaaaaattgatgatttatgcagaagaataaatttcgaacgcaaactcaaacggagtttttactggaagcatttcggcttcaactgggagcatctgaaactggacagaagctaatggcactgcaaactgaaattgggaagagccattatatttatagggatgagttaagcgagactacactgaccacaagacggtctt

SEQ ID NO: 81679 - DNA, 615 bp, Glycine max
  Clone ID: PAT_MRT3847_44773C.1
gccaccgccgtaccgtaagccttgggatcctctagtagtcggcgcgccgccctcccccccccccccccccccccccccccccccccccccccccccccctctttttttctttaaaaaaataaaaaacctaatagtagttccttttaaaaggcccttggggaaatttagcgaatcccgatagatcctccttaaaaaaaccccctttggggcttttaccttccgttaaatcccttctttggggagaaaaagaaaaaaatttttttttcctcaaaaaattcccccttaaatgacaaaacccaaatgggcaaatcttttgttaataaaaagggattaattcgatctggcccggggtttccaaaagagctacctagatagatccattttaccatttcaacttcccccccaccccacatttaacccaggggtggatccttttggcaacaaaagggggaaacaaggcctgggactctttttttaattcaaacccaattaccctcttattgggtttgggcttgggcttttatgggactaactgtggaaggggaaaggaatatagctttttccctccaaaacaacaggttactttaaaatcggttctggggcaatcccttacct

SEQ ID NO: 81680 - DNA, 1081 bp, Glycine max
  Clone ID: PAT_MRT3847_44774C.1
gctacggtaagaagagtgaagagtggttccaaaaagaagaagatggtatggtggggtccaccgctacgagcttggaagaagacgctgcgtctgatgttatctatgaagaacagcatagtcagcatttcgggaacaataatggctttgattcaaagtttatggcatctgcttctaagttctgggctgagaaagcctcactttgtcaggatgtacagtatgaatcccttgaatcaatgtataatacaaagcattttgttgcaagaagggagtctccctggaaggttgatggtgattctgctggagtttcctctaaacttaaattacttgaacaggacttactaaatctggagaagattggtaagaatgatccatccaaggtgccatccttgattaagaagcaggcaaagagatatcaagcaatttcagaaaaaattgatgatttactttttgagcaggctaatgatccttgcgaaccctccctcagtacagaatttcgaacgcaaactcaaacggagtttttactggaagcatttcggcttcaactgggagcatctgaaactggacagaagctaatggcactgcaaactgaaattgggaagagccattatatttatagggatgagttaagcgagactacactgaccacaagacggtctttcgactctattaggaacaacttcaaagaaatccagcgaaatctggagatatggttggccagaattattggcgatcttgaggggattcttgcgagggaaggtgcatctcgtgtaagagaatattacatttctagatatccttttgttcaatagaatatgagagactggtggtagctagctgtaggaaaagcctcacctctcaagctaacaagttatctcttgtgggtatgtatattgtttcaactcataaaagtggtagttggatatccctctgaaattaaatcataccagtgcttcttatgttggcatattcttgaatatgtttttgttcccttcacccacgtggacatccatcttaaatgcatttgtccatttgctgatggaaccactcatttgtgacagcaaaaaaaacaagaataacggtt

SEQ ID NO: 81681 - DNA, 487 bp, Glycine max
  Clone ID: PAT_MRT3847_44775C.1
gacacaaaatacaaatctttatatttaactgtacgtatccgaaatggttaaacattgacaggttattgctcttagcaaaaacaaatttccacatttattgccccaccctgctttttttaaccattgaactaccccagttgaatgattatctatacaaaaaaccagccctataacccctggtatacaccctaataaaaaagtgggacgggaaaaaaactctcttaacatatataatgaatagactttggcttataaagtccatctataaacatttgccacaaggacaatttaaatagtcacgcagtaaatgaatcattacggcctacacacatactttgccaatggagtgagggcgcatgctttttggaacagggcaataactggtttgtgttccaccaaagatgcctaagacccattatcattaagcattaatcgccattacatgaggaccaaaaatgcctgtaaacttttttcaattgttgctaaa

SEQ ID NO: 81682 - DNA, 511 bp, Glycine max
  unsure (1)..(511): unsure at all n locations
  Clone ID: PAT_MRT3847_44776C.1
gnntaannntaaggtnttnttnganatgannatnggnggtnaatntggtggnngnatngtgatggagntntangnngangtnattnnnngnanngnngagaanttnngngngntttgnannggngagaagggtttagggnggagnggnaagnnnntnnantaaaagggnttgtntttnnanngngtgatnnngagtttnatgtgtnagggtggngaattnanngnnggaanaggaannggnggagagtngatttatggngnnaagttngnngaagagaanttngtgaagaagnaaannggttnnggaattntntnaatggngaaagnnggtcccggaaaaaaaggatttnagttttttatttgganggagaagaaagagtgggttgaaggaaagaatgttgtgtttggaaaggttattgaaggattgaaaggttgtaaggaaattgagaaggttggattaaggttagggaagaaattaaagagaggtgttattggaaaatgagggaaaatt

SEQ ID NO: 81683 - DNA, 368 bp, Glycine max
  Clone ID: PAT_MRT3847_44777C.1
ctcacactcaaaggccgagttcgcctggtcctttgcgcataatgaggtgcactagtattggtagaaactgagggggtccttactccttgaatccggtattgatccatagcgtggcctttttttggggctcttctttatgacggttggaatgtaaattgatccaaaactttttgtttgaaactttgcagtcatcatgggcgcactacgactttcactcatgaggaacgacattttcggaccgagggtttgctcaaaggtttggaatggcgataaatactagccttcactaacgtcaatgaccaagctgcgggtggggagtgtggatttgtcactactacggaagctgttaatgagctcatatatgtgtt

SEQ ID NO: 81684 - DNA, 692 bp, Glycine max
  unsure (1)..(692): unsure at all n locations
  Clone ID: PAT_MRT3847_44778C.1
ccacgcgtccgattttaaaataaatttcacactttgaaaaaaaataaaaataaatgttatgtgaactttttaatataatattaagattaaattacttactttggtttctactagtttcacgattcttatcttttttgtccctatagtttgaaagtggtttgtttagttcatatagtttacattttaattctcttttaatccctataattttgatagtggtttttttagtccttataatttatattttaattctctttcaatccctataatttgaaagtgatttttttagtcattataaattatattttaatttcattttagtccttaccatctgatgagtaatattatcaattacaattaactataaaaatattagtagataattcataactaatttatcgtaacataatttacaataaaaaatttataatttataactaatttatagctaattatttttatatttttattagtaaatactaaaagataattaaaatacaaattataggactaaaaatatcactttcaaattatagggactaaaagaaaattaaaatataaaatataaggattaaaaggtaatttaaatacaaattataaggattaaaaatatcatttttaaactataaggactaagagaattaaaatataaattataggaaactaaaanaactactttcaccctacaaact

SEQ ID NO: 81685 - DNA, 239 bp, Glycine max
  Clone ID: PAT_MRT3847_44779C.1
gcgtacataaactcataattcttctctaactctttaatttttcccaaacacacttatacatcgttcgggtttttaataatacagatctctccctcccctttactacttcacactttttcttacctgaactatattaattttatccatatttacacaccctattttttatttttctcattctctttcatatatcttattcgtataaacttatattctacctaacctatttttataattta

SEQ ID NO: 81686 - DNA, 412 bp, Glycine max
  Clone ID: PAT_MRT3847_4477C.1
caatttgggttttattggatcatggagatgagatatctaaagataaatgcggtcttaattagtgattattaggagtcagaccacaggaaggcgaaattgaaggcagtgtcgtcaaattaagttggttggctcaccatttttctcacatgaatattgatgaggataacgttgagcaattacaaaggtttacccgtgcgtggatccttcgattcataggaggtgtcctctttattaacaaaagtagtagcagagtttccttaaggtacctacaatttttacgtgactttgaacagtgcagcacgtatgcgtggggacctgccgtgcttgcgtatttatatagaaagatgtatgttagccacgacgaaagtttcgcatatgactcatcccaatcgccatattcaattgcaatgac

SEQ ID NO: 81687 - DNA, 471 bp, Glycine max
  Clone ID: PAT_MRT3847_44780C.1
ccacacttcacagattcgacgaagaattggcgaccggcgagagagttaatgggaggaagaataacgcttgaaaggttctgagtgagctacaggaacatagaacaaacatacatggggctgccgctactttcttctgcattatgggatccttctcataactgtgtttcctccagtgtggagtttatcaggccccttctatcagcttctaagtcatattctcttggtttgaagtttaactgccaacaattttgcaagggaagatcaaaattgccaggagttttagtttgtgccagtcgaaggcccaaaggaactgtgtggagacgaaaaactttaccacaaaatgaggatttaccgccaattttaccaaagaataagaaaaagccataccctattccctttaaggaaatcaagcaggctggaagggaggacaggaaacttgcacacatgggaatagagaaacctcttgagcct

SEQ ID NO: 81688 - DNA, 468 bp, Glycine max
  Clone ID: PAT_MRT3847_44781C.1
ggatcctgaaaaagaagacacaccactcacccggctgaaacaccaaggagactggggaacatgggaccggggaagactaccacctaacgcatgaacattaaagacggggacaatccatcccccaaaggccacgttacaaagtgctccacaagaggggcgcgccaagcacagcacgtagagccccaacaccatcccggggaaaagaacgtggacccgacccaaaaagaatgcacccgaacaacctgcccgagaaaaagagcacgcccgggggaaaagaaccggccgggctgacaagttactgatacctcccaaaaaaaacagtcactcccaaaggaccaagcgttgaccataacgcacgccccactccatacgagaaaccccccacctaggccgtaccccgcccactcaaagacgaagaaccatcttcatcggtgaagactgaaggcctatgctagggcacatacaaga

SEQ ID NO: 81689 - DNA, 308 bp, Glycine max
  Clone ID: PAT_MRT3847_44782C.1
gacccactcgtacgttacgccttcgtgtttttataaaattctattttaatttttttctaccgaacacatccttaaagcttaagattattttaattgtttcttgctctacacttcaaacttcaaaccctaactaaacattcactatcgccttctcacactctcacgcctatcacatgtttatttactacactcatatcctcaatttctttttatccatctttaattctttcacttcttacatttactttttaattctcacttcctttttatccttatacacttttttaaacccttcaattttatttatt

SEQ ID NO: 81690 - DNA, 353 bp, Glycine max
  Clone ID: PAT_MRT3847_44783C.1
ttatttcattttttcaaaaaaaatgaagaagttcatgtaacattctaaatacatggtgcatcatgaattacatgattatagcctcaggtacagacctgagactatttacggctgtaactgcggctataaccactatatcgatcctcgcctatgcaatcatgcccacaaccttatataccttgacactaaagtctttggtgcagggttctacgatatatgtgtgtactcttggaagcggacatatggagtaatccatgaatcacttccataggtagccggatgactgagaacaacggaagtatttcgatcagcactttcgagccaactgatcataaggcacaggctttttatta

SEQ ID NO: 81691 - DNA, 503 bp, Glycine max
  Clone ID: PAT_MRT3847_44784C.1
cttaaaccaaacccctcaaaattcactttatttcttacctatattattcatctctttctctctttcctattaacattcactctatttcttacctcttctttgcttattaaacagacccaaaatgaatttcaggttcctgtaggggtttttatttattaaaaagaaaaagaatacgtcaaacctcctccctctttttttgacataccaaaatcttagaacaaagaaaaatatatattctaattttcttttaataaactaaatataataaattaaaactgttactacgttactactatttaccaacaagtcatgccagcacatgaaaaacgactgacatacgtcagttaatactaataatcaccaatggtacataaacatagtatccgtcaaagcggaattttaaaagggttttataaatatttttgggtatatgaagagtatactccggctgaaggttaaaaataatctttgacaaaattttagggaaagatacatgtaacatc

SEQ ID NO: 81692 - DNA, 127 bp, Glycine max
  Clone ID: PAT_MRT3847_44785C.1
atttgaagttgagcagaaacatcgagccaatgctggatatttaaatgcattgaaactttttcaggctatcagagacaaatattctggtgtgacatatgcagacttatacgagttggctagtgctacg

SEQ ID NO: 81693 - DNA, 834 bp, Glycine max
  Clone ID: PAT_MRT3847_44786C.1
tagagggggggttcaacatatcttacgtaaagccaaaaagttgatataaacaaattaaagatgatgaactacttttgcggctgccacggccttgtgatcatcttggtgctaattgcatctccggcagaaggagaggacaaccaccctttgttggagttattatcaagtagagatgaagtggtgcaaattgctggctatggagaggagaagctttccacagtcctcattacaggctcagttacttgtgaggcaccacaccgacctcaacctcatgcatggccaatacaaggagcttctgttggtgtgaactgcaagagccatggcaggaataataagtggaataaggggaagtcaatggtagcaacaggtgtaacagatgaatttggagactttatgatcgacctcccttcccaccttcatgctattcctaacttggaaaaggtgtgcatagtgaaaattcatcggattcctaaggcatcactttgtcggccagctcatgtgatcaagaaacacaagggacttacactctcttcctttgggaatggcatccgcacctacaatgcaggaaacataaggatccaacatatatgattaattaagaccatgcatggctcatttctatggcgcttatagtcacagtattgggttgcatgggtacatacactgtacacgtacattactgcatagtattttctatacatatatacatcacttaatttgtaaagcatacgcggctcaaatttgagacttgcgtgagttgttacgtacattgttgtgtgaagaccactattatttggtcacatatataatatgaatatttgttgaaagaattta

SEQ ID NO: 81694 - DNA, 479 bp, Glycine max
  Clone ID: PAT_MRT3847_44787C.1
agatagataattagagtgactagaataaataaactctaatatttgtttacaacaagtggaaaacaatttgcaacttgcaataacaaattattaacttgattaatctaatatagtgctaattaagtaacattaatctaccgcaaaaggaaggctcctttttttggcaggaccccaaaaatgagttgttttaaggccagtgggactgttccaaaaagagcgtaggatgttcatcttgatgtgaactattttctgtattttgcagcctgcagcagagtccagacatccaatgtatgacattttaatttttcagtttgacactgtaaagtgtaaatatcaaacatataattaactttttacttcagataaacatataggttactgcatcgtatataggtaagttaacactagctaattgcctcctatatataatattagttttcttttcgcacttctatatattttttctttcattttcatat

SEQ ID NO: 81695 - DNA, 349 bp, Glycine max
  Clone ID: PAT_MRT3847_44788C.1
ccaagaattaccaatttttgatatactaatttatatcttttgtttcttaataatttagccagggaaactcttcaaacactatggactgcgttttgtaacttcatccatagagaaaaagaaattagctgtggcagctgaaaaaaatcagacaacatttgctgctactcagaaggaagaaactaatgaggagaatgggggagaaacaaaagaggaaaagaataatggtggatacatgataagtgcatctgctgcatatgagattgctgcttctgctgcctcttatctccatgctcagacaaggagcatacttccattcaaatcttctgatgctgtggaaggtgaaggttca

SEQ ID NO: 81696 - DNA, 193 bp, Glycine max
  Clone ID: PAT_MRT3847_44789C.1
actcggtcttgaattcccgggtcgacccacgcctccgtccacgcgtacgcacacatgcgatattacgatcgatgacgcaacaaatcttatcaggaactgactctttcttacatttgccactgtcattctcagccacacacatattttgatacatcatggtatacaaacctctatcactgatgaactctatgtc

SEQ ID NO: 81697 - DNA, 1088 bp, Glycine max
  Clone ID: PAT_MRT3847_4478C.1
agtcagctcggaattcggctcgaggccgattttctctctcctctctttatatattctcaaatacactcagtctctgaaaagaactagctagttcgaaaacgaaaaccaagtaatctcaacctccttagggtcatcatccccggcaaagttccatcagctttagtgtgtcatcccggtccgctatgcctagagattcttctacgtatggacacagctcgcctcgtcgtcgtagaagagccgtggtgaatgataaagcgcatagcagttcatcccgaacctatagcgaaaaattgaactcggttttagcatccacgggaggctccatcgttcggagtgaaaaagcgcatagcagttcatcccgaacctttagcgaagtagtggattggcttttagaatccacgggaggctccatcgttcggagtgaaaaagcgcatagcagttcatcccgaacctttagcgaagtagtggattcgcttttagaatccacgggaggctccatccttcggagtgaaaaaccggtttcacacagacatacggtgtctttgcttttggcatcccaagtctccaactccacctcaaaccgtttagcatccacaggaggcatctctagttataactacgaaaggagagtgagttccgcaattcggagtgaaattgcgtattcaatatcgcaatacgtcagtaaccaacagctgttggatcttatgattaggagtgtagaatcgcgtaactattctctgtatgccacgaggccatcccaacgttattactagctacaaaaggccaacttcgagcatggagcaaaaagtatatgaataaaaaacaaggaaacaataaaagaagaagcaaaacttcttcgtcctccattgccgcgtgtgaatgatgtgttgatttgtgtgggtttttttgtttattttattgtttgtccgtgatcagtttggactaggtaatgcatcaagtgctttccatactcgcccattgagtttattaatttgtgctgattgaagaggtgttgattcttcattcttcaatcctatccacttgtattgtcgtatttttaataaaatttaaattaattttcctaaaaa

SEQ ID NO: 81698 - DNA, 666 bp, Glycine max
  Clone ID: PAT_MRT3847_44790C.1
aatccagaaaagaacgtgaccccaacggatttatataaatggaacaggaaaacaaaaggcgacagaataattcaaaacggaggaaggaacaaacaaaacggaaaaagcgcgcgcggacgttattctcggggtcttgtttgtttgggagagaagaagagaaggtgcatgaatgcgcgcgcgcgcaacgcaaatggctatgtcgcgaaagcaagcgacacgcgaggtgcgttgcggtgacccctagcatgagcaagtggtggcttatttacactcccaatcacgttcacatgtgatgataacgatgacgtggcatttctttgtccctctgatccacatttcaccggttgcggccccacgctaaccgccttctggctccgacagctcaccaacaaaccgtttccacctttccgcttccacttttcttccacggccacgccgttggaaatggcctcgtcgtgtccctccgcggtggtcacgctccactcgatgctcgcctcgctcggttcgtagcattcggttatcgtttgagtggttgaaccttcttccatgcttcttcggccgtagaagaatcctgtcgcggtggcggtgctggaggcggcggcggcggcggcggcttcgtcgaacgagtctctgctgttgcggcggtacgcggcggggaaggttgac

SEQ ID NO: 81699 - DNA, 575 bp, Glycine max
  unsure (1)..(575): unsure at all n locations
  Clone ID: PAT_MRT3847_44791C.1
atcgccgatgacgtcattttacgggagtgagagtgaggactactttctctggtttctgttctaaacacatactctacagtgacgtcacttttgctttttctggaaagaaaaaaaaaatcttgtttatctatttatttatttattgttatggaccttaattatgccttgtggtggggatgtcgctgtcgaactttaggggttttttggttttcgctggttataattttatttttggcattttttttaagggataagggaaattccacaagtgagtagaggtcatgtatatctcaactttgctattggaaggaggaaaatttcaattaggattttgaaattaacaccacttatcaagttggtccataatattagagtatacgaatttagttggaatggaatagggtaaacatctaactgttgaaaattattagtttttataataataattgtcattatttctctaanaagtgtaatttagattgatctctagttagttagcataggtcctttatggataaaataaaattctctaaaagcctaagagaagaaaataagatttaaataaattgaataat

SEQ ID NO: 81700 - DNA, 209 bp, Glycine max
  unsure (1)..(209): unsure at all n locations
  Clone ID: PAT_MRT3847_44792C.1
tatggtgancttaccagtnatcatcaaaaggcttatttgagaacaattacaggaaagactgatgccttgtgggactaacagtgataganatattgtcaaggcntgntcgntgagtcaacttggccgaggcctccaatnggctgtgncaagcatcaacttanagtgnanacgagnatgngcnanccagggaanntcanctggacgatgnc

SEQ ID NO: 81701 - DNA, 294 bp, Glycine max
  Clone ID: PAT_MRT3847_44793C.1
acgacagaagacttcatcaagcggttcaatcccaacataccctagtgcctatctgtatttatctaccactcactacaacattcaaatccaatcttagaccctaacaccctagaccatcacccttgagactgaaagcacttacaccattctcaaccccaatgtcaaaatccaacacatgtacacaattcctccggaccatccacgattcaatctctcacaaaagcatcttaagaatggtcgtacccttttttactacatcatttataattatagaacttttcaccttttcctaca

SEQ ID NO: 81702 - DNA, 218 bp, Glycine max
  unsure (1)..(218): unsure at all n locations
  Clone ID: PAT_MRT3847_44794C.1
ggggggaaantcaacaatatataaccttgtggtacatatcaggggaacaacaacaatttaatgccttcctgaacaaaaaagcatcgcatataattgccagggtcttccctgacaaaccattcacaagggtggaaatgccgggatcataagaaacaaacctttctcaaggtttgcatttaacctattggaaccaattttgtcattgtggactctgcaac

SEQ ID NO: 81703 - DNA, 659 bp, Glycine max
  unsure (1)..(659): unsure at all n locations
  Clone ID: PAT_MRT3847_44795C.1
ctcgcccacgagtccgcagatcatagttcatagacacataacagcacctgactctgcttttttccttaaaaagcccgaaacctctttgcaaccaacaattccttggttaaaatcaaaactctgtttggtctcaaacactaaacacgtatactttctctcactctctcttccttaacggttacgaaagtgaaacaaaaatggtggcatcagacggtggcggtggtgggagattgatgaagaaagttctgggtttggggtattgggtgcaaggattcaggtgttttccatggttggtagtgagtttctacctcaaagatggtctcaatgtggacccttccattcttcaaattcttcagagttccgctaatcttccaatggttgggaagcccctctatggccttctttcagactctgtctacatctctggccagcaccgagttccctacatcgcccttggaggtacgctaatcttcactctttttgctgtctctatgtacccttttgctttctctctctgatttgatcatgttagagccaagttgcacacttttgcaactttgctacagtttgttgttggttccgtgatgtggggatattggaaatcgaggattggttcttcctttctatcccanatggataagagaattgatgaatgaatg

SEQ ID NO: 81704 - DNA, 232 bp, Glycine max
  Clone ID: PAT_MRT3847_44796C.1
gttagaatctttttttcttaatttttctatttttattttattttttagtcatatccaaaagttgatatactaggcaaaagcatgtatcagtaataaggttatatttgtatatttgagactagaattcagatcctccttcatgaagtgaagaacaagacgtgtctgttactaatttagacgaagaaccatacaacaattttgtagagcataaagacctgtctatcattaaatg

SEQ ID NO: 81705 - DNA, 1371 bp, Glycine max
  Clone ID: PAT_MRT3847_44797C.1
cggacgggaaccgaatatgctcccagctcaactcttgtcccgattctcgaggcaacttttcccttcttctaaatcaacggccacatttcatcttctaatccaacggctgcggttcgtcctcttcctccccaaaattagggtttctctttcagtctcttcttctgtcaatactttctcgtattttcccctcttcttcccctctctcgtgttatccgctttagttttctcgggaaaatcatggtgaaaggtccaggtctctactctgacatcggcaagagagctcgcgatcttctgttcaaggattatcagaatgaccacaagttcaccatcaccacttacacttccactggagtggaaatcacttcaactggagtcaggaaaggtgaaatatatttggccgatgtcagcactaaggtgaagaacacgaacatcacaactgatgtcaaagtggacactaactcaaatctgcgtacaaccattactgtggatgaacctgcacctggactcaagacaatttttagctttaattttccagatcagaaatccggcaaggtggaactccagtaccagcatgagtatgctggaatcaacaccagcattggattgacagcaaatcctgttgttaacttctctggtgtggttggaaataatttggttgccgttgggacagatctttcatttgatactgcctctggcaactttaccaaatacaatgcagggctgaacattactcatgctgaccttattgcatctctaactctaaatgataaaggtgacaaccttactgcctcatattaccacattgtaaacccgctgactaacacggctgttggtgcggagctttcacatagcttttctggcaatgaaaatatactcacctttggtacacagcatgctctggatccactaactctgttgaagtcccgggtgaacaactatggtcgggcaagtgctctgatccagcatgactggactccgagaactcgtttctctcttgttggtgaggtggataccggtgccattgaaaagagtgcaaaggttggtcttgctgtggccttgaaaccatagactaggtcgttttgtgcgtgatataggatgcttctcggggtgggggtaataagtagttgtaggatttcactttcccaatgaacatttagtgcttcattttggagatatatcaatttcttcatatcttggtgggcttgagtgtaaaagcaataagcacaaacaaaattttaatttgtacttatttgacagatccacccgaatgccatcgatttaggttcacctttgcgtaagttttttgagcatggaaaggtgattgctctgcaatttgattgttttggggtgtatatcaaaaagctttgattt

SEQ ID NO: 81706 - DNA, 458 bp, Glycine max
  Clone ID: PAT_MRT3847_44798C.1
ctccgcgttcgcccacgcgtccgccactaatgtgccaagctcgagagtctaaaattcaaatcctagcttgggttactaccactgaaaaaacctccttattttcttaaaaaaggggatgtctttgaagcccttgtgcgaggaaatatatggggtaattaattaagcgccctccaagactattcttgtgtgcgtggggttgctatccacgcagtccccttaggccattggctggggttaaccccgcattgttggctttggaggacccaatccaaccacccaaaatgtcgttttgctcaccactatttcataaaaagaccattgtgcctaatatgaaggggggggaaagtggccaccacttactacttaactttgaaaacttgctttaagaggggctaaactccaaattgttgggggttggacaacgtttggcgcccaaatttcccacccccataaaaagg

SEQ ID NO: 81707 - DNA, 313 bp, Glycine max
  Clone ID: PAT_MRT3847_44799C.1
gagtgcgctatcgttgataaatatggtgaaagggtggtgtcgctgaaactgcagaagctgctggccgcacgcttgctcatgtgtggcagaggaaaggtgtggcttgactccaatgaattcaaccatatatctatggccaattgtgggcaaaacatttggaagtttgttaatgcagggcctatcatctggaatccagctaagattcactcacgctcgcgtgctcgtatgatgaatgatgcttacaaaaagggccggctctctggttattgtaagagaaagggtacgcggtaggcgtgtcttctaccaagatact

SEQ ID NO: 81708 - DNA, 559 bp, Glycine max
  Clone ID: PAT_MRT3847_4479C.1
tttattttttgggcaggtgtattgtatggttgcacatactttgcagccgcatcttgtagctgttggaaccaacattggtgttattatctgtgagtttgatgctagatctcttccacctgttgctcctctaccaaccccatcagatagtaaagagcattctgccatatttgtaattgaaagggaattaaagctattaaattttcggttaaacaattctgcaaatccatctcttggaaataacagctccttgtcagaaacaggaagacccaagggagatttttttgaaccattacctatcaagcaggggaagaagcacataagtactcctgttccacatgattcgcattcagttctttctgtcagcagttcaggaaagtaagttgcctctgacttttgctacaacttggttgattttttttttctgtaaagaaattttgtaatttaaaagtaactaataatttgttcttcaatataactttgtggctttgggtctttctatagaatataagatgaataaaaatcttacttttgggcattcatatatatcagtgatcctaaa

SEQ ID NO: 81709 - DNA, 222 bp, Glycine max
  Clone ID: PAT_MRT3847_447C.1
aacgagcgattcggatcgcgattatagcgaaccctggcgaaggcgaattgcattctatctacggaacgattatttgaggaaacgcagagggacgaagacagagcaaaatcatactttgaccaagccattcacgccgctccaaatgattgtacggttcagggatcatatgcgcacttcatgtgggaagcaggagaggaagaagaagttgttaacggaggagtg

SEQ ID NO: 81710 - DNA, 492 bp, Glycine max
  Clone ID: PAT_MRT3847_44800C.1
aaaacataacataccaatttatataggcataaaatattcttggacattatacatttttggaatccgggaaatcaaaccaattgatgatgttgccctgctaatgggataaaaaaaattacctgaaatataaaaaaagggcaacaacacttaatttacccggcccctttttttagctacttgttaaccctaaaaaaagggagttaatcttgatctcttctaccattacatataaccaaatggaatataactcttggtttaattttccaaggactactgaagcctgcctaaaataattaagctttttttcaagatcccaaaacttggtcatcatgaagagatttaagaggagccagatccccataagaaattgacggaaggggaaaaaaaacccacgtatgaatcgatcctatcagctgttagccagttatgaagaaatccaaacaagggaagcccccacatgatctgaaggaaaacacatcccccccccccccc

SEQ ID NO: 81711 - DNA, 270 bp, Glycine max
  Clone ID: PAT_MRT3847_44801C.1
gggaagaaagtttaagccttagctagaaaaaggagagtgagtagtgagttttttgagaagcagaagaaaggaagaaaggtggagtgagtgaattcaaaaagatcacccaccatggggaggcctccttgctgtgacaaagttggcatcaagaaaggtccatggacacctgaggaggatatcatccttgtctcttacatccaagaacatggtccaggaaattggagatcagtgcctactaatactgggttatcaaggtgcagcaaaagttgc

SEQ ID NO: 81712 - DNA, 264 bp, Glycine max
  Clone ID: PAT_MRT3847_44802C.1
ttcggctcgaccgaggacccattcctggtggaggtggtgcaggaggaggtggaggtcgttaataaggaggctgcccaggacatattggacgcgatcgagcacagaggtggtagttggcggaagaattctccttgatgcaggatgacgatcagatagtgcgtatggtggctcctcagatcaatgtggtgtggaacgatgcctagtagtattacaagaggtccaggctacggaagtagtcacactaccatccacgcgggagttcgc

SEQ ID NO: 81713 - DNA, 173 bp, Glycine max
  Clone ID: PAT_MRT3847_44803C.1
ggagcctggtgttggaaagactgcattctctgaagggctgctactgttatctgtttcctgaatttcatgtgtgacctgtttcatacatacaagaatggcacctgtgatggtgtgaaacaaaatataaaaattatttgaacacgacagttcaattttttgttaatatttttaag

SEQ ID NO: 81714 - DNA, 265 bp, Glycine max
  Clone ID: PAT_MRT3847_44804C.1
catcaactgaagcttatatgtgaagtcttgttacagagcttgtcaataccaagcacgagtactggtagtacaattgacaacaacatggccaggctaaggtggatggagcaaagttctcaacataacttatctggaggagctaacataaaccttgctgacgggccaacagcacgtatggaggccccagaggggattaccagaacgctcagtggcaatgcttggagcttcgctatttgaacatctcctacatcagtacaccacggac

SEQ ID NO: 81715 - DNA, 303 bp, Glycine max
  Clone ID: PAT_MRT3847_44805C.1
gtcgaccacgcgtccgcttaaggttggggttttgggttctgatttgtgcacagaagatggtgtttgcactcgtgagggtgatgctgagctgaatggtgatgtgggttttgatggatctaaagaggagggtaaaggtgtgaatccttcaggtggagaagctgctgaggctcttggtgagggttctcaagttgtaagatccttagaaggtaagagtgagaatgagattgctgagttggatggaaatgatgctaccttgaaaacattggatgagaagaagaacattactgtctggaacgtgaaaaa

SEQ ID NO: 81716 - DNA, 834 bp, Glycine max
  unsure (1)..(834): unsure at all n locations
  Clone ID: PAT_MRT3847_44806C.1
tggtacagcctgcaggttaccggtnccggnnaattcccgggnnntcgacccacgnncgtccgtctgccgccgagcttagtagaagagaaaaggaggagcaggaggcatcaccgttaccaaacatggtgaaagggcgccaaggagagcgtgttagactttacgtcaggggttcaatacttggatacaagaggtccaagtcaaatcaatacccaaacacctcattaatccagattgagaatgtaaacactaaggaagaagttgcgtggtactgtgggaagcgtatggcttacatttacaaagccaaggtaaagaaggacggaagccactatcgctgcatttggggtaaggtcaccaggcctcatggtaacagtggtatagttcgtgctaagttcaagtccaatctgccgcccagatcaatgggagcaagggttagagtcttcatgtatccaagcaatatatgaggttctcaggactcgtgagtcgtggagcttgttttgtcagggtatttgataggaatttatattatgtttttcttttttggtagctctcgagcagggtagtatccttgtttaggatgaagagaatgtaccgcatgttttttctttattctcactgccatggttattagggaggattatgagtctcaatttcattaacggattttttttccttactttaccgtccccttaaaattgaaattgaagaactcgagctcgtagttctcaggaaaaattggatacaaaattgagcttttcatctccacccaaaaaaaaaaaaaaaaaaaaaatagtagaagcggccgctcacagccaccagcttaagtcgaggcagcgg

SEQ ID NO: 81717 - DNA, 513 bp, Glycine max
  Clone ID: PAT_MRT3847_44807C.1
accccacaaaaaaagaactgaatgtgtataataatattatgataaaacatacaaaatattgtttgtaaatgaaacaaactataagcaaatttaatctgagtcagtgtcttcccaatcttgttgtcttctgataaccatttcccagactttatcaaaaggcctgaagtaaaatgaaatttcatctccatggatgaagtcattgtctgccaaaaactgataccaaggtcgaacaatgcatttttcgtcaatgccagggtcattgacgctaacgctccattgaaggggaggggcatgttttttgaggattgtcatatgttaagcacatgcatcaacatagggtacaacagagggtagaagtgccagtggataaggggcactgagcacagattgagtcacttccacagtccatacatattttcttgtaattagtcgaggtcttccgcacgttttctattctagggttggggtgaagtgcaagttaaatatccagttttggcggctcgagctcgagcc

SEQ ID NO: 81718 - DNA, 399 bp, Glycine max
  Clone ID: PAT_MRT3847_44808C.1
ccgacgtatataaaacaagaagactaaataggaataatttcacagcccatcaaatccgggggggtggtgcttatgggggagggcatgcccaactacgaactcaggcccgactaataaacgttcacaacacttatgcaagggtgtatacgaagaggctgacgtggaaggcgcgctgaggattaacgtactcatggaggagtcttggtgcgagctcacgagtgtttcagttaatggttatgtgaatgggtcttgcacagaggggagaattgaggtggccttgaggtgttatttatcaggaggaagggttttgcgttgaccaggttacgtttaatgcgtttggtgaatgagttttttaatgattggtgtttatcaaacaggggtatggcgatgttgattctt

SEQ ID NO: 81719 - DNA, 198 bp, Glycine max
  Clone ID: PAT_MRT3847_44809C.1
ccacgcgtccggaagcgcgtactatgctggttccgctgctggtagctaccatggcaggttggatgcattgccgaaggagacaggtgttagggctgaacaaggaggttttgattcatgtgcgaggccttagttagtgatagggtcaaattggatcgtgcgtgggaaataaacaaagtaaaaggtcagaggaggatattt

SEQ ID NO: 81720 - DNA, 165 bp, Glycine max
  Clone ID: PAT_MRT3847_4480C.1
cttgaagttattcaagatctatacattgctaatcgatacaaagatgagaatccacaacataaaatgtttgaacaagggcattcataattgggaaaggtcaaccattttatgttgtggattttcttctttgtatcgattagcaatgtatagctcttgaagttattc

SEQ ID NO: 81721 - DNA, 439 bp, Glycine max
  Clone ID: PAT_MRT3847_44810C.1
aggaactctgataagaaaacataataatgggttcacaaaattgtatggataggaagcactatgttctggtgcatggggcatgccatggagcttggtgttggtataagctcaagccacgcttggaatctgcaggccataaggttacagtacttgaccttgcagcttctggaaccaacatgaagaaaattgaagatgttgatactttctcagagtattctgcgcctttggaaaaatgcttatgaaatattcccttatatgagaagttagttctagttggtcacagccttggagggctgaacatagcacttgcaatggagaaattcccagaaaaggtagcagttggtgttttcttaacagcttttgctccagacactgaacaccacccatcttatgtcttggagcaaattcagtgtctaaccatgcagctaacggggtcctc

SEQ ID NO: 81722 - DNA, 590 bp, Glycine max
  Clone ID: PAT_MRT3847_44811C.1
attgtctaaaaaaaaaaaaaaaaaaaaaaaaaaaaaaaaaaaaaaaaaaaaaaaaaaaaaaaaaaaaaaaaaaaaaaaaaaaaaaaataaaaaaaaaaaaaaaaaaaaaaaaaaaaaaaataaaatgggggggcctttttaaaggaccctggctaacgttcgacaccgtgaaaactgaaaatttttttttggggcccccttaattaattttgtggcccgtcctttttaagccaggtgggggaaaaaccattgggctcccccaattaaacctttttaaaaaatacccctttttaatgggggggggaacaagccaagaggcccccccttaaccccttcccaaaaggtggccacccccaatgggaaaggggcactccccttggcccgagcattaaatccttggggtttgttgcgttcctttaagggaaaccgtaacttttgcaccccccaaacccccacctttttcgctttttacgtttcctttttaccgctttacggcctttttcccccaaaaacttaaattaggggattcctttaaggagtggaatttaggctttatagacgcttttcccccaaaaaacttgttaggggag

SEQ ID NO: 81723 - DNA, 756 bp, Glycine max
  unsure (1)..(756): unsure at all n locations
  Clone ID: PAT_MRT3847_44812C.1
ttgaaggttctgtacatgagaagggatttgatttgatttaaccgattaatttacacagctgtattgcatgttaaattttacatcatgagttaatataaaaaaattatttcaaaaaccttcacaatgccaggttcccacttcccagcgtgttattagaaacacaataagaatagaaggaaaagaaaaggcatataaaattggaagatcatcattcgtaggtaagcaattagcaatttaccattaatacttctgcaccatcattttcaaaattttgagcaaaaaaatggccatttcacggagcaaccaatccttcaatggcataagatagagattgtgccaagtcagctttaaatagcagtgtttgcaaagcgtgcaacatatcatattctggatcaagtcttcgctgccaaccctccagaaccaatgtggtaactatcacagcgcaaacattgccatctatattgactttacagcgcctaacatgctcaagcaattgttgcatacgatcagctgtgtggacagattcaccttctggggatctccaaaattcaaatgatttatccacctcctcaatgaaaaatttcggatctgggcaattttgtcgttttgataatctaagctcgagccctgcagcagtgcnnnnatcttgaagtgcaatagccttaaagaattccactaaatatcctcgctctctcttagaannnncagtagtcatacccacatcgaggaaaattacatgannnnttgacnnnnnca

SEQ ID NO: 81724 - DNA, 1399 bp, Glycine max
  unsure (1)..(1399): unsure at all n locations
  Clone ID: PAT_MRT3847_44813C.1
ggctcgagctcgagccgaagaggcacgagttttccttcaagtcactaagataatggcaagcatttataacattccatcacacataaaagcttgggtctattatgaatatggaaacatagaagagattctcaaatttgaatctaacatacccataccagacatcaaggaagaccaagtgctcatcaaggttgtggctgcagcgcttaatcctgcagattatatgagggctcttgggtttttcaaggacactgatgcacccttacctattgttccagggtttgatgctgctggtgtggtggtgagagtgggaagtaaagtgagcaaattcaaggttggagatgaagtttatggtgatatcattgagtatgcttggaataatccaaagaccattgggactttggcagaatatactgctactgaggagaaagtgttggctcacaaaccctccaatttaagctttattgaagcagctagccttcctgcagccatcatcactgcttatcaaggatttgataaaattgagttttctgctggcaaatctatacttgttctaggaggtgctggtggagttggatcccttgttattcagctcgccaagcacgtttttggcgcatctaaggttgcagccactgctagtactccgaaacaggatttgttgaggagcttaggagcagacttggctattgattatacaaaggagaattttgaagaactggtagaaaagtttgatgtagtgtatgatacagtaggagaaagtaataaggcattgaaggctgttaaagaagggggcaaagttgtgacaatagtaccaccggcgactccaccggctataaccttctctgcagtttcagatggtgcggtgttggagaaattacagccttacttagaaagtggaaaggtgaagccagtattggatcctaagggtccctttccattctctcagacagtggaagcatttgcatacttgaagactaatagagccattgggaaagtagttctacatcccatcccataaacatatttaattaagcatataaggagagagcacagccttttaattatgtaatatgaatattgttagtcaagaatgtttagatttagaaacagattgtccttataaggttgtattggtaaattttgtcatatctagttcaaatgaaggtggtgttatcgttcagcaaaaaaaaaaaaaaataaagacagaagtggatttgcaggtctcttttgtgagttggaaggctaacattgctttagctggattatgatcaatatagaatcctcaaattcacattttctattgtattaattccaactcaaactatgtttaagaaataaagtttgaagagnaaaatgacaaggtaatagctccccttctccacaatattctctaatttgatat

SEQ ID NO: 81725 - DNA, 413 bp, Glycine max
  unsure (1)..(413): unsure at all n locations
  Clone ID: PAT_MRT3847_44814C.1
ggagttcaactctcaatgaaagcaatgttatttcaatactgctaaatattcgtgtagggatccaagtttctttancantattgaaataacattgcttaaaaaacttggttccttccgaatattatctgtttgccttcttccttcttggagtgccttttaaattaataattatctatgtgtcggtcatttcttgaacgtatatttttccgttctcgctttacttttttttgttttttattttccttattttttttttatttttataatttctttttttacttttatttcatattatattatcttttattttattttttacttatgttttattttttttttattttttctatttttttttttattttctttttattatattatctatttattttttttttatcttttttcctctt

SEQ ID NO: 81726 - DNA, 291 bp, Glycine max
  unsure (1)..(291): unsure at all n locations
  Clone ID: PAT_MRT3847_44815C.1
gactcaggtggtagtttaggtatcctctgaaataaaacgancaagaaatagtttttgcgaactactggactggaattatgaaaatgtagtgacgtgttgccgaaaaagcttaaagtcaactggatgatggtgtaaaaatagttacctcgcttctgaagccggattcatgaggtgatggtgttcctcttttagnntgttgtagcgttcaatcacagatttcatgctgtcataatgtaggaagtcnttacnagagcacgttagcatatttttttgtaagtaaataaaagatgt

SEQ ID NO: 81727 - DNA, 816 bp, Glycine max
  Clone ID: PAT_MRT3847_44816C.1
cgggcgacatggcctgcccgtgggtccccgagggggcctacgcggtgcgcctcgggaacgaggcctccatcaagcagaggatcaaggtgatcaagggcatgtactactccatcaccttcatggtggcccgcacctgcgcgcaggaggagaggctcaacatatccgtcactccagactggggcgtcattcctattcagactttgtataccagcagtggttgggacccgattgcattcgggttcaaggcggagaatgagacagtagagatgttgattcataaccctggcaaagaggaggatcccgcgtgtggcccgcttgttgactcggttgctctcaggactctctaccctcctagagctactaaccgtaagtttattctttctctcctcctctttctttattttttactaaagtatgtttattctctctttaattaatactggctaggagtgaaatcaagcgcatacttgtcttggtactttgagaaatagtgtagttgtataattgacagcccttgtcacttgagccagcctttggagttaaattagactcatccgaaattctaagaataataaatacataaaattagggatgataaaaataaaaatgcgtacttaaacatgatgatgccgccgatgaatgttacccacagagcggcgccgaaggcggtggagaagcagagaaggtgagcgagtttgaggtaggtggaaagtgtggttgattttgaccccagtgtctccggtgagaatatcactccgatggctaagaaagccacggcagttatgaaccgactaagccaacccatagaaaaagcaa

SEQ ID NO: 81728 - DNA, 365 bp, Glycine max
  Clone ID: PAT_MRT3847_44817C.1
tccgaattctggtaaagctgctcaaggaaaaaaataaattgatgaatcaaacgccttccacataactggaggaggaggataagtaactatgcctagaactccctactacagaagaaggcatctgctcaagagtggcacgtgaacatacacacatgagggggagctctaccttgcaaccactccaaagagcgtacgctttgatgatttgtgctgctgctgtggaccacacaccctatggatcatcaaagatatcttccacgccatctaaggtataagacacaggatcatgcaccacttaacagagcttagggtgaacttctacggtctttcaacacatggatgcaatttactattgcaggccatcc

SEQ ID NO: 81729 - DNA, 402 bp, Glycine max
  Clone ID: PAT_MRT3847_44818C.1
ggtttgtttttttttttttttttttttttagaaacaaaccaatgcctttattggtggtggcttagagtcacaaacattcttctggagaactctacttgggataactttcaaacattggtgcaaaaaagatattcaaatggactttgaaaagatgggggggaggtttagcgtaaattttgggactgacggtttcccataaactttaataggaattgatgataataacaatgttcgtaagctgcaatttagaggggggaataaacacaaccattcgttttccctctaatattggtaaacgcttcggaaaacaacttgggagatcaagaccacttaatccccccacgggatggacagatgaatcaaattcgtctatttcgaatttcgactactctacttatatgg

SEQ ID NO: 81730 - DNA, 306 bp, Glycine max
  Clone ID: PAT_MRT3847_44819C.1
ggctcgagcactggtacgaatgtggccgattgaatatcttcttgggaatatgttgttgatcattgatacaacaagcacctgtttaggaccgatgggaagctctgaaatgcgctccctggagagaagccaatgtcttgatggagactgagtcctcttggctgacaagctctgtttttgtagccgagttgtgaacgctacggctgcgcattgataaactgaaacacacaccatgtctacgtgttaggaccagaggatggtggcttatttggctaaacaccttgctctgaatatgcaagactttatttt

SEQ ID NO: 81731 - DNA, 566 bp, Glycine max
  unsure (1)..(566): unsure at all n locations
  Clone ID: PAT_MRT3847_4481C.1
gaacccagagcggcgcccaaaaaaaaactttccgttgtcaacaggacaaaggaaccccggggggggggaaagggacaaaaaccaaccccacccccagggcgggcccaaaggganngcaaacaacccgaaggcagggggacagagaaccacgaaagaaaaaggacccaacccnnaaaacaagggccaacaaggaaagaccncacggcgccccccggagaaggaacaccgaaagcgncagnncaacanacncgcccgcacacaaaggaggaaancagccggcaaggggcgaaccagcaaaacgccccaagggcnacagaaccgcaccagaggccaagcgcgcaaacaacgcngaagagaccccccacaagcgacaaanccgcgcgcgggccaaacaaaaagcaacaaggggccacanagaggcaacaaccacaagcangccagcnaagcagaccccnccagggaaccacgcaaacggccnccccggcggaagaagaaaacaacccaggggaacccgcaccccaacccgcgggccagaccccaaccagaagcccaaaccaggaaaacca

SEQ ID NO: 81732 - DNA, 510 bp, Glycine max
  Clone ID: PAT_MRT3847_44820C.1
cagcatacatttcctcaagcaagttcacagtgaagagtgacatttacagtttaggtataataatttttgaactcatcactgccatccacccacatcaaaatttgatggaatatatccaccttgctgcaatggattatgatggtgtagatggaattcttgacaaacaacttgtgggaaaatgcaatcttgaagaagtgaggcagcttgctaaaattgcacacaaatgtttacacaaatcacctaggaaacgcccctccataggtgaggtttcgctgggtatattgaggattaagcaaaagcgcctcatgaaagaagactccatgtcatttgcaagcagtaacttctcccgaagtgcctttgggaaccaaggaagtttgtagaaaaaaccatcgattgtcgctagctgtaaaatgtgagtcaatatgtacagataacaagagcggatcccatgctactctgaaacattttgatttgtgaatgatcagttctgccttgtgagtttttgttgct

SEQ ID NO: 81733 - DNA, 349 bp, Glycine max
  Clone ID: PAT_MRT3847_44821C.1
gctggctacagtatgtctgaatgacaactttgttcattaaggccaatatccggtagctaaggagttacaacacaatcttatcatcgtactctaactcgaagacattgctatgatctgatgaaaatggtatgcacatcacttatttctatgtttcaatcactccacctattttgcatgttattccctttatacaagcaagatatttgccaattaatccagcaccatgcaattcatttcaattggaatagaatattatactatacaattcacaaagaggggttgttgttgatctgttggttaacgccttaattgtcatagacataccactactagttctgtcagtagcttt

SEQ ID NO: 81734 - DNA, 422 bp, Glycine max
  Clone ID: PAT_MRT3847_44822C.1
tcatatcatgcaaggtatctttctttctttcttcattcaattctcttcttgtcttttctcaacaccaaatcttttccagctccaccacttttatttactctgcaaatgacgtcttgttttagcagttgttgtagttctctgcctctgcttatcggtttgttaatatttctgctttttattttcttccttatttttctccgcgtctgtgctgtgcccgaaggtgttcttctttggatgaaaatctgaattctgagaactccttagcagttgcttttatcaatatttctctaaaaaaattaatgtctttctggtttatactttggatcctatggagcaaaataaatttatttactatttaccatcctgttttagagagatagcggtgattattgatgcttttgcgcagtgtatacattaacaat

SEQ ID NO: 81735 - DNA, 1886 bp, Glycine max
  Clone ID: PAT_MRT3847_44823C.1
aattcggctcgagcgaaaaatgaaggcgcagtcgctgtgtttgaagaaagacccatcaaattaatcctcattttcttctttttctttcgttctccgcttcaaagcatgaagaagcctccaactcagacctcttccactttttttttcagtattcatttccatttacactttctttttctcttcttcttcttcttctggctacctcattcttaataagcacaactaccaaaagtgggggcagttttctgaatcacaagtgaaattgttcatctctagagagttgtgcaagatgattgagttgtttgagtatcaagagagatcaagtgatggttgatcaagctgatttagttatcatttgtgtctctgttggggtggcccttggagttttgatagcttgtctcatatattttggcataaggtggtacaagaaacgtgctcatcttagtcgatgctcaggtttctgatgttgggcactcaagccaacacgtcgatgatggcggtaagtcagtagtgacatttgcacatctcttcatagatcctgcataccttccctcaagcaacctcacactgaaaattcacatttaagttcgtggtataatcagtttgaagatccgcattaatcagcacccggctttcgtatctggttgtccaaagtacttcaacaaaccacataaaaatgctcaacaaggtttcatcaacgaccatctggcgcaggatcatttggcacaatttataaagcagtgatgccaacaggaaaggtggtagctgcgaagatccttgaagccaagtctaaacaaggggaggaagtatttcaaacagaggtgcttcagctaggaagacttcatcatcggaatcttgtaaatttgttaaaataccaactagttcaagggtatgagtcaatgagtgatgaattcatgagtaatggaagtttagaaaaccttttatatggtgaagaaaaggaattgagttgggatgaaaggctgcaaattgctggtgatatttcacacggaatagaataccttcatggctgggagaagccaacagaaggacatcgtgatttgaaatccgcgaatatattacttgatcactcaatgagagctaaggtttctgattttgggttctcaaaggaagaggtctttgatggtcgtaattctggccttaaaggtacatatggctacatggacccagcatacatttcctcaagcaagttcacagtgaagagtgacatttacagtttaggtataataatttttgaactcatcactgccatccacccacatcaaaatttgatggaatatatccaccttgctgcaatggattatgatggtgtagatggaattcttgacaaacaacttgtgggaaaatgcaatcttgaagaagtgaggcagcttgctaaaattgcacacaaatgtttacacaaatcacctaggaaacgcccctccataggtgaggtttcgctgggtatattgaggattaagcaaaagcgcctcatgaaagaagactccatgtcatttgcaagcagtaacttctcccgaagtgtgagtcaaatagaggagcaacaggttgaattaactaaaataaccaccataaaccacagggaaatggggtgaactcattcatatgttttggggtgaatttttttttttgtaggcctttgggaaccaaggaagtttgtagaaaaaaccatcgatgtcactagctgtaaaatgtgagtcaagatgtacagataacaagagcggatcccatgctactctgaaacattttgatttgtgaatgatcagttctgccttgtgagtttttgttgctaaataacaaataagttctatgaacgagcctagtttaacaactatccctatacgaacaaatggattagaaactagcattgc

SEQ ID NO: 81736 - DNA, 472 bp, Glycine max
  Clone ID: PAT_MRT3847_44824C.1
tcgtccacgcgtccgaacacgggttcctgcccgggtatgcttccaattccctctctcttgctctaagcgaccgggccagatggcaaaatgggccaacacacttctctattcacatccgaatacaagaacaacgggcaccctggcaagctctgtgaccagatcgccgagagcggagatctgagcatgcacaggagcaagaccctgacaggcaggggggacagaccaacctacaccaaaaccaacaaggtgatggttatcggagagaccacaaccaaggccaacgagaaccatgacaagattgtgcgtgacacatgcaggaacattgattgcggctctgatgaggtaagtattgatgctgacaactgccaggaacgtgtaaacatggagcaacagagacccgacatgggacaaggcgtgcacggacacatgacaaccacgcctgaagggaaaggggctggggaccaaggagata

SEQ ID NO: 81737 - DNA, 239 bp, Glycine max
  unsure (1)..(239): unsure at all n locations
  Clone ID: PAT_MRT3847_44825C.1
aaatatttaangaacttaaatatttaaattaataaaattngncgngttttattcgattttttgaattggnttttttttacagtagctaatgcnagtcaccgaacttagtcaangagctagaatgggttataangatatctatagatatatanagatatatttatctatagatatctttncgaaaaaaaaaangaaantaaccaantaagncgtatcattttatgtatngtagnggggac

SEQ ID NO: 81738 - DNA, 266 bp, Glycine max
  Clone ID: PAT_MRT3847_44826C.1
ggaaaaagaaaggaacaacatggccttacgggggagggtttacaaaataaaccaaagatttacgggggggaagcccccccaaaacccccagatgggttggggcccccaggcgaaaggttttcaacaaaaaggggggttggagaaacctcccgcctggggttttctttgcaaaaataaactggggggaaaggggtgggcgctaagttattttgacagcgcgctcccagattccccaagggggggcgaaggggggcctttaggggggg

SEQ ID NO: 81739 - DNA, 496 bp, Glycine max
  Clone ID: PAT_MRT3847_44827C.1
gtatagtgccttttttgcatgaaaaaattaaagactataattcataaaagaaagaaacaatagaggaaaagtctcataattctctgttacccctacatcttgtgttcttcctttatactttctcattttctttcaccttcaactacttatgcattatgttacttcaacttagctcatgcagtatttcaataccttctatcattgtatctcttagatcaagagccacctgatacatacatgtatttcaaaagtgagtttgtttgacaagttcaaaagtgggataagcaacaagaaaatgtgagaactgagaacccaaatataacaatttaatcctgcccaaatgtatcaaggcttgagactccaaagagtatcatatcctgtgatgtgatgaagataaaggatttcaagtggcgaaataataagttgatcacagtgactacaaagggaagtaaaacatattgatcagaaataaagcctacacatttctttctggtgc

SEQ ID NO: 81740 - DNA, 292 bp, Glycine max
  Clone ID: PAT_MRT3847_44828C.1
ttcaatggccaccacagcatctctatccggaaccattgtgagcacctccttcatgaggaaggggcctatgacgaccaagagcctaaagacattccacaacgctctttctggtctgaaaggtggacgaggtggtcgtgtaacttgcatggactcgtgcaaggtgaagctcataaccccagaaggtgaagtggagtctgaatgcccagatgatgctttcatcgttgacaaggctgaagaagaaggcatagaactttcctactcgtgcagggctggctactgcgtttcatgtgtt

SEQ ID NO: 81741 - DNA, 257 bp, Glycine max
  Clone ID: PAT_MRT3847_44829C.1
agggatcaacatttgtctcacatctttcactttcagtcaacggttaatcccttttcaaaatttagcatcaacatttccaccgcaacgtaccccaaggtcaatataacggagtcttcaaataaccacctctcacatcctaccttccccttaatgaaatcggatcgcgatacctattctcaaggataaaaccggttctagccattacaccataactacaattcatcgaaaggacgcacatggacttgcttccaacctac

SEQ ID NO: 81742 - DNA, 1246 bp, Glycine max
  Clone ID: PAT_MRT3847_4482C.1
accaggcgcaacatcatcttgatgtcaaataagaaaactgaagctgatccagccatcattgctttgctgcttgaaacacgaatcccatatattgctgaaagcatgacctatgtagccggagatagagttataactgatcttctgtccaaaccattcagtattggcaggaatctcatttgtgtttactctaaaaagcacatgcttgatgatccagctcttatagagatgaaaagaaatgcaaatatacgagctctgaaggaaatggctatgcttttaaggagtggttcacaaatagtctggattgccccaagtggtggtagggatcgcccagatccccacaccggagaatgggcgccggcaccctttgatacttcttcggtagataatatgagaagacttgttgaacatttgaaaccaccaggtcatgtatatcctttagcgatattgtgccatgatataatgccccctccactgaaggttgagaaagaaattggggagaaaagaattatatcctttcatggggctggcatatcagtggctccagcattaagcttttctgaaaccactgctactagtgaaaatcctgaaaaggctaaggagttattctcaaaagccctgtacgattctgtgaccgagcaatataatgtgctgaaatctgcgatacatggcaaaaaaggatttgaagcatcaactcctgtagtttctttgtcacagccatggaagtagttgaaatttgcatttcttcattacaatttgctctgatgcagaagcaagttacaagacttcagtcaaacaatttcaactgatttacttctgagggactgcctattactacaccggtcaccgaatgatttgagcttgatggaagtttgcagtcaaatacatatttttcatttcatttgtccttttgctcttggttgccgttatcagcattcaattcatctggaatctgtttcagttcagaaggttcaaattcagctgcgtactgtacaggtctcttttagttcggtgtcagattcagttcattgactgataaaatactaaattttttccctgcaattttgtgatcaggcttagctagctgaatagataaaatctaattacttccgtttgtattttaagttaactttgttccattatagatgaatagatgttaatattacatgttcagaatcaagttgttcagacggggtcagtgaataaactggtccaaatgctaatgcaagattatttatattggcaaaat

SEQ ID NO: 81743 - DNA, 344 bp, Glycine max
  Clone ID: PAT_MRT3847_44830C.1
gccttttgtttgttcagtagtgagaagactataaactggggtgctcctttatatcgctcgaccgctccggacatataggagcgaataaaacaggatccagtgatgtttattcttcaatcataaaccatgccgcctctgatcctgctggggggaaacccacctaaatttcttacgccacaatcattggtggggagtgtgttgaggacaaaccagactctaatctatagttggcaatgggaatatcccatacaactactgctttccttaagagatagcctattggattggtttctgtgtgacatatagccgaaaggacaatattggagatcattaccattgataca

SEQ ID NO: 81744 - DNA, 493 bp, Glycine max
  Clone ID: PAT_MRT3847_44831C.1
ggctcgagcttacacagcacttacaccttattggactctacacagagagtgcatggtatagatgggaccgggccaaaattctatatgggatacactgcaacagagcaaaccatgcacttaccgcacactggaaccagccgaacgatgacataccaccggcctgaaatcgaagaactccattacagctgaggggagaacgaagaacacatatgtgtgcagaaggaccgtaccaagccaacaatattgaccatggcaaggctggatagagtgaagaacatcacacgactagtggacatggtacggtaagaacgcgaaactgaacgagctgctgaaccttgtgaacggcgctggagacaatgacgaaggacttaaaggacttggaacacaaggcccacatgaagaatatgtacggtgtgttcgacaactacaaggtgaactgtcaattgaaatggatcacagatgatataaaccgagagaggaatggagagctcta

SEQ ID NO: 81745 - DNA, 652 bp, Glycine max
  unsure (1)..(652): unsure at all n locations
  Clone ID: PAT_MRT3847_44832C.1
cccgcgtccggtcaaattgaggctgtgtgtgtgggggaggggtgtattttgatttgtcaggcagtgtatgaatctgtcgattgagaaatgcaaccccagctgagctcaagaatcaatttggttgagttgaaagcgcaaattgtgaagaggattggagtggataagtcgaagcggtacttttattacttgaacaggtgtctgagtcanaagctgagcaaggctgagtttgacaggtcatgttatcgggtacttggcagggagaatcttccgttacacaatcactttataaagtcaattttgaagaatgcctgccaagccaagaccccaccgccagtccagctgacaggtcctccaaaatcaggagcacttgtcaataatttatctcctgggagagaggatgggcacgaacagagtgtggctaacttccaaaatcagaatgcttccatttgggccaatggggttttgccgggttccccacgtaaggcaagatctggagtgcgtgatcggaagcttaaagatagggcgagccctcttggaccaaatggaaaaagtgattctggtgctcatcaatccacagctacagaagaaagtgggagtaagggtgatatggggaaatggaatttcttactccatgcgattatcaaagatcaat

SEQ ID NO: 81746 - DNA, 395 bp, Glycine max
  Clone ID: PAT_MRT3847_44833C.1
aagacccggggggtatttttgattttgcaaattaaattacacaattacagccgggcattaaacatgaattgggccttttccaacttaaaagccgaggataacattgggccttgacccgacacatgccccacctaaaaatcataattttacatttttacctacaaaaaacaaagacttttaatttttaaaagaaaaaaagagataaaccgttcttttttatgaaatgaaacccaaacccccaaacattgggttgatttttggtgggggggggggtccccacctggttaaacatgaaccctttgattgaatcacttggacttgaagggaaaggcccttattaccacccggtggtaaagtgcttcaaaaacttcccccataaatggtcccccccaaaa

SEQ ID NO: 81747 - DNA, 2150 bp, Glycine max
  Clone ID: PAT_MRT3847_44834C.1
caacccactgatcaacagttacaatagcctatttatactagctctctaacactgattatctgtcaactaaccaatggttagttgagcttacatctggcacaaaacagtaagatataactacagctgtacaaagaaaaaactcttaaccgttagagtaagtctactctaataataagcatgcaaactaattctagttgagtagcattttccttggtgtgatagctgaatcttttagattgattgatttgttagcaagtaatgtttgtggttgctcactgctcaatattatcacaatgtgtgacaaaattgcaaatggtgccactctgacatgtggactggtactgggagagcacttgtcaagcttgctctttgtgaagaacacgatgagaggatgcgggatttgagaaatgagcttcagtcatttgaagttgaagaatatgatgaaagccataagaaaaaggccatagaggctttgaaacggatggagagctggaatctattcagtgacacatatgaggagttccaaaattacacagttgcgcgtgattcttttcttgcacatctaggtgcaacactgtggggatctatgagacatattgtgtcaccttcagttgctgatggtgcctttcattattatgacaagatatcctttcagtaatcaataatgaggtaggagaaagttgggcacattaaacagcttcctgtggatatgaaggctataatggatgggttttcctcattgatggttccttctcagaaaccaatgttcagtccgcacgtgttgcctttgtcggaggatcctgccttagcaatggcctttgcagttgcacgacgagcagctgctgtgcctttactgcttgtcaatggaacctaccgaaagacagttcgtacatatcttgattcttctattctacagtttcaattgcaaaggctgaataagcatggttctcttaaaggaagccaagtgcattccaggtctgtgctagaggttccagtcttttggttcatttacagtgaaccactattactagacaaatattttcaggcaaaagcactgtctgacatgattattgatgataaagtaagagccctcttcctgggaaagccaactacattgtaatgggcattcacttctgctgaacttgaggcagcctataaaagctgcagtcgcttctactgctgagcatcttgctggtttgcttccccttcatcttgtttatggacaggcccacgagactgcagttgaggactggttatggtcagtagggtgcaaccctttctccattacatcacaaggatggcacatttcacaattccagtctgattcaattgctcgaagttatgtcatcactacccttgaagaatcaattcaactggttaactctgccattcatcttctgctaatggaacgaactactgaaaaaacattcaggatcttccagtcccaggagcacgagcttgttaacaagtacaattatgttgttagcctttggaaaagggtatcaactgtcactggagaattgcactatggtgatgcattgaggctactaaacaacttggaggatgcatccaagaggtttgttgatcaagttaatgtgactcttgcccttctccatccaattaactgcacaagagagagaaaaatacatatggtgtttgatatgacaacaattccagcttttttgattgttctagggtgcctttttatggtattgaggccaaggcgaccaaaacccaagattaattgagcttgaagctcccataatgaattttaattaaagtaaggattattcaagggttttcaatgttggaaagttcaagtttggtggtaaggatttacaatcatttttatgatagagatggacgtaagacgtatataattttttaggattttaaggttgtgttggttatggatagtgccccagcaaatttagtttatacatggttttttaatgcgtcaactttttcttatgatagacgtacataatgttggaaagtttaagtttggttgtaaggatttacaatcatttttatgatagaagtacataattttgtaagattttaaggttttgttagttatggatggatagtgtgccggcaaatttagtttatacataattttttaatgcgccaatttttttcctatgtgc

SEQ ID NO: 81748 - DNA, 233 bp, Glycine max
  Clone ID: PAT_MRT3847_44835C.1
gaaacacatattttagtataaaataacgcacactgcacacatccttacgacaattcaagcatgagtggaccctttttggttggctatacgcatacatcccacgaggggcctgcttacttctttctgttgcctcccactcgcgcacaagcgatacagaactcaaaatgcataccatgcttatgccaccgatttgacaagacaaccgccaaaaatcctgtggagcaaaataagcc

SEQ ID NO: 81749 - DNA, 385 bp, Glycine max
  unsure (1)..(385): unsure at all n locations
  Clone ID: PAT_MRT3847_44836C.1
tcccggntggacgcactcgaccgccggcacttatcaatttaaactcttgtccttaacaaaaaacgttctctctagaggcaatagagaaacttccaaattggggcgccaaactacaattcatctatcgaactacacaaatactatggatatccaactgtcatcgaccattaccaattaacctacgaacagatcctaaccatggacactatattcacaacgatcccatattctgtcgacaaaatataaacaactatgaacaatacgattttcagatcctaaacatcctaataacaattcataacacgttcaatgatccaaaaactctggctgatgcttgctataacctttcacagcatatccactgccattctactagaccgatcat

SEQ ID NO: 81750 - DNA, 700 bp, Glycine max
  Clone ID: PAT_MRT3847_44837C.1
aattcggcaccagatcagtgaccacgctcgtccgttgtcttcctagtgctgcagccttcatataggcatcaatatcaggatccggtttaatctttgcatgcttctctcttcttagtagctcagccaacatctcatagttctgtccaaccccttggcatctagctgagaaagccagagtttctctcacagtcatttctccaatgtggttatcatattgacttatataagctgaagtcctttgtggcacaaactcttcaagcccatgcccattgtatgttactctccctgaatgattcaaatctttatcaagttttccagccaacgctaacagcaaagtggtctttccagaacctggtggccccaaaagcaatgtcattcttcgaggctttatgattccactaacattctgaagtatacgcaacggtttctttggacttggaattatgtgaagataatttaagaacccctcaattacattagcaaaaaagttcagcattgaaggcagtgctcttcctccaacataaacttgtgcttccacatttatatgctcaaatctaacttcaattgtcggaatatcaagcccaactctgtccattctttccctgagtttcagcaagaacctttcattatcttcttctgctatcttcacaagcctgtccacaataatctttctctctgtgaagcccagttgcttgatgtc

SEQ ID NO: 81751 - DNA, 249 bp, Glycine max
  Clone ID: PAT_MRT3847_44838C.1
ccaacaaacaccaaccccatcggtaatttaaaccaccaccattttcgaggttgcccaaattattatggcccactgttatgcttgagcgtagcatactttggcggctgaattgggtcaattttcttaggaggggtctctccttttattgaactgggcgcggttcaagaccgaactaacagattaaattcttggaggacggactctgagggacttgctaatcaaaccattaaatcacgtggtcacataaat

SEQ ID NO: 81752 - DNA, 341 bp, Glycine max
  Clone ID: PAT_MRT3847_44839C.1
gggggggcaatgcttccattaggggcaatgaattatgctgatcaaaaatgtccaagttcatttttaagtttcaagatcccccataatctaaaaaggggtttttgggtttttcttttcttttttatggaaaaatttttgtttaaaaatagagatgaatttttgaccatttgctatggggggggtctaatttccacagggtcaggtttgacaaatgaaaattccccctccctcctactggggggttctcccccactatcttggctatgttccgcttgggggggggcgccatgatcaacttttacaatgaaacttgttgtttgcgaccccaacggaaacaactt

SEQ ID NO: 81753 - DNA, 670 bp, Glycine max
  Clone ID: PAT_MRT3847_4483C.1
aaaaagccctgtatgattctgtgacggagcaatataatgtgctgaaatctgcaatacatggcaaaaaaggatttgaagcatcaactccagtagtttctttgtcacagtcatggaagtagatgaaatctgcatttcttcattgcaatttgctctgatgcaggctccaactgctatgttccctttcagaagcaagttacaagacttcagtcaaacaatttcaactgattcacttctgagggactgcctattactacaccggtcaccgaatgatttagcttgttggaagtttgcagtcaaatacatatttttcatttcatttttccttttgctcttggttgccgttatcagcattcaattcatctggaatctgtttcagttcagaaggttcaaattctgctgcttactgtacaggtctctcttagttcggtgtcaaatttggttcgttgactgataaaatactaaattttttacctacaattttgtgatcaggcttagctagctgaatagataaaatataattggttccatttgtattttaagtcaactttgttccattatagatgaatagatgttagtattacatgttcagacggggtcagtgaataaactggtccaaatgctaatgcaaaaaaaatcaaaaaaaaaaaataaaaactctacagttaccgtt

SEQ ID NO: 81754 - DNA, 247 bp, Glycine max
  unsure (1)..(247): unsure at all n locations
  Clone ID: PAT_MRT3847_44840C.1
gtgacgaccntgaggaccttctaagctcatagncgccgagcaantcaaggcnncggntgcngctcganggccaccgcggctaccaagaaggnnccggntcagcanaacaagccggcncagctcactaccaagcngctcctncggctnaggntgtgagggatgccanaaacgagccagttcgtggaggcgtngangtggacgaggtgggggatgtggatttggacgtggtcgtgggtttagtcgtgac

SEQ ID NO: 81755 - DNA, 256 bp, Glycine max
  Clone ID: PAT_MRT3847_44841C.1
attcgtgacccacctcgccacgctcgtcgtggaagcacgaaggtgaatgcttttgggtcgggtccctacactattgtggtctggcccggagcgggcctttcgttgatctttttgtcagctgtactgggtaaaatttggctttgtatgactgattatttgagaataatggaattggttttaaaattacaagcctatgtggtgtatgaggtcaaactttaaggcattgagctattacaattttcctgggcaaactcat

SEQ ID NO: 81756 - DNA, 428 bp, Glycine max
  unsure (1)..(428): unsure at all n locations
  Clone ID: PAT_MRT3847_44842C.1
ccatttcttctattttcctattatttacttttttttctctaccctgctttatacctcatctgagcgggggtcataagtcaggagaagaacacaantattcataactatcaatctctgaattttctggaaatggtactttgatactatcttctgctatcacatttgccaatacttttctcttatttttttctgctgaattattcgacaagtcatttttttccacaatttcccttacaacatctttcttcttcccttgtagtcatatctgcatcacttgctgttcattttattgcaacttttcttcctttacttgggggttctttactcgtgacatattttttataaaaagttattacctacatctcaagttttctctttctcttctattccgcaattacctcattttaaattgtccaatatgccttaaa

SEQ ID NO: 81757 - DNA, 559 bp, Glycine max
  Clone ID: PAT_MRT3847_44843C.1
gggatgaagcacatttttttttaaatgacaggagttaacaatatttttctcaaaatataaccaatgagcgtgacaaaaaaaactttgaaggatatatattgctgtgacaagtacaaatgaccccacctagactctcgggaagagaaacaccggtaaataaggtaccccacgcatgaaaaaaagtataaaaaatgacttgaaaataataagtaattgaaagagggaaaaaaggtaaatgcttgtaatattttatagaaaaatattttattaatgatcataatttcaaaacatgaattattaaatatggctcatttaatttttttaaaatgaagacccgtataaatattgaagcaaattacattaacacctactgagattttttcgaattatacaaaatatccctctttgttaaatgtcacaagagaacttataagttaataattctaagtgttaaaaaactttccgtgtaaagagaaaattttagtttccaattaaaatgggttatcaaagaaacaagtgtaattgtttaagagcaaaagacaacataatcaagcgtcta

SEQ ID NO: 81758 - DNA, 368 bp, Glycine max
  Clone ID: PAT_MRT3847_44844C.1
ttgaagagtttcattctatgcaaaggatgatgaatgctcctgattcaaatgataatattgatctaccgttgaccattgattcgttgggattacaaggagcatgtaaagcttttccaaacaagagtggttttgatgataagcttgtgttggctaacacacaacaattattttatggacattttccattggattcttggttaccattactcgcgaatagtatttattctgtaagtaaattaccttcacaatcttgtgttgtgaatgcaacatgtgagtagtggacgtagtggttgtctcaccacttcttggattaatcttgtgcattgcaatcgctcctatgactatctcaaaaggataccatcaacact

SEQ ID NO: 81759 - DNA, 267 bp, Glycine max
  Clone ID: PAT_MRT3847_44845C.1
ttacgtaagcattcagctcgacgcatggtgaaagctttaaggccacactatgagcttaacaatgctgtgcacattgtgacgacttggaactacttatagaatattagcagactagattgccactacctttactgcagactgaacccataatatgactgtacgatcgcggcataatgtcatcacgactgctctacgcgacatcagcatctccaattcacgcatcactctagcagatgttgctaataaactgaggctgaactctgataa

SEQ ID NO: 81760 - DNA, 352 bp, Glycine max
  Clone ID: PAT_MRT3847_44846C.1
atcacaaaattctgagatatatttatagatatagaacatagctatgacaaagaatgagatgcacataattggaattgtgattataatcatgattgtgatggatttctcacaagctaattacaatccttcatttgggcaaattgagcgaaatcatgtgtctaatctagcttgtgaggataaatgtagactaaaatgtgcatttttactaatacctccatttactcctgggtatctaatatgtctttacaagtgcatggcaacaaattgcaaagccaaccccattgtccaagattgtaagagtggttgtggcttgaccaagtccgttagcgtcaacgatgatgctcatggagtt

SEQ ID NO: 81761 - DNA, 556 bp, Glycine max
  Clone ID: PAT_MRT3847_44847C.1
ctgaagagtaaacttcgggaaattgcataccctgatcaaaattctatgtgtcatcctccagcaaaggttaacacaaaaggtgcaccgaagaaatcgatgaacagaaatccaaggtcaacaaagcgtgatccatcttactggaagtatgtagatgcttttcattctgtgcaaaatagcaattcgtcagtgaggcatagtgtatcatcttcttatcagcccaatccaagaaggatcatgcctatgttggaccaatttcagtcatttatccaggatttcattgataacattgtggatgtcaaacctgacagaaactgtggatatcgatcggttgctagtttattaggtatgggtgaaaactcttggtcgttggtctgcaatcatctgcttaaagaacttgacaaattttcaaatgactatattaagctctttggtggcatggacagatttaaggaattaaggatgtcactacttgttgatgggttaaccaaggtgaatatggataagtggatggatataatcgacatgggatatgttattgcatcaaggtataatgtaa

SEQ ID NO: 81762 - DNA, 221 bp, Glycine max
  Clone ID: PAT_MRT3847_44848C.1
cgggttacaatctagcattttacccccctttttggggctttaaaagggttgcacaataaacgcctggctgcctcaacccgggtatccaaaaccattatttacttcttagggaaggcctgaaggccaaaccctgggaccaccccacggcaagagggaccttgcattttccaaaaaagcttcctctttgtgtaaggcagtaactccccccctggccagccagg

SEQ ID NO: 81763 - DNA, 706 bp, Glycine max
  unsure (1)..(706): unsure at all n locations
  Clone ID: PAT_MRT3847_44849C.1
gaaattcatgtttttaaagcaaaaggacccatgataaaacaatcaacttgtctgtcacaattattatgccatgaggaaatactcaaaagtacaggtacggaatgattttgttttcaaaataatattttattcaaatctttgaaattgaattattctttttcagccaaaaatccttccattttcccccacctcaacagttcatttttaatacataaatacaatgtcgtttttaatcatgaaccactaagacaataaactaacaggggaaattgctacttgccagtgtggaaaccttgctgccatgcccatgcccattgcccaccataacaggatccataatctgggggtgcatcggtaaactaattaaaaaatgaggaaactgtctcaccaagcaagcatcattagacgtagtagtagtttccatttctggagttgggattttttttttatatagattatgggtaaattttattagaaatgattataattgaattgaataagattattataggtaacaaaactctacatatttaacacaatcatatatctaaatttgaacttaaaatatctttacaacaattgataaacccatatgatagtagtttangttttttggtttgggtgaatatggnaatttaaggttagtatagtataagaaattaatcttttataacataattaaactaaaatttgnatattacactng

SEQ ID NO: 81764 - DNA, 212 bp, Glycine max
  Clone ID: PAT_MRT3847_4484C.1
gtgcatgtggcggtgatgtttgcgctgcactcttcattgccatcgcactgcttccccgacggacgaggtgggcttcgtggcggacatcggcttctaggtcccgaaactgggcaccacgctggcgcacgcgacgcacgtcctgatgggcttcttcagcatgtctgttgtggacctgttgctcgtgatgtacatcccccacgtcttccaccggc

SEQ ID NO: 81765 - DNA, 402 bp, Glycine max
  Clone ID: PAT_MRT3847_44850C.1
atgaaaattttattaactaattctatatgtatgcttaaatttatgtgtgcaatactagcccactttatcataaaagagaggttgcacatatttggtgtgcttggatgtgctctttgtatggtgggatctacaattattgtgttgcatgctccccatgaaagagttattcactctgttaaggaagtgtggcaacttgctacagaaccaggtaattttctacaactaacatataaagaatgggacacagaagatgcatctcaaattgctactgaggtttgtggctttgtcacaattttatccgggacctttcttcacaaaaccaaagatattgcaaatagacccgtagagcttcctgtttttacaagtactccacaacatgataatagtcactcagggacttaa

SEQ ID NO: 81766 - DNA, 297 bp, Glycine max
  unsure (1)..(297): unsure at all n locations
  Clone ID: PAT_MRT3847_44851C.1
ggtctcggaattcccgggtccgactccacgccccgtccggaagaccgaccagaagggggatccctggcagcagtaagaaaccaagggtagttgagaaactttaagaagggagagagcccaaatggctttttcctcaatgggagtctcttcnncccagctgtntnnaccactgnntcaaccgttgccccggtgccccgtacatggttntngctccatnntcactgnngccttaagtcccccatggctgnngcttccccaactcaggaagactcaaccaatggaccannttacctccat

SEQ ID NO: 81767 - DNA, 781 bp, Glycine max
  Clone ID: PAT_MRT3847_44852C.1
aaggacccaattcaataataataagtgcaatactagcccactttatcataaaagagaggttgcacatatttggtgtgcttggatgtgctctttgtatggtgggatctacaattattgtgttgcatgctccccatgaaagagttattcactctgttaaggaagtgtggcaacttgctacagaaccaggtaattttctacaactaacatataaagtttatttagtttattagttatagctctattttattattttaaggaactttttttttatgaaaaagcaaaatcacatttaattcacacagtatgtacttgtatgtcataatgccttcgatagtcacaatacaaatccacaaattttggaagaactatatttaatctgaaaatgccaaaatgatatatagcataaggacaaaacccaatttaggtatatcagataaaagattactgtttctccttattgctcttatttgtaaattccaactagaatttcttttaaaaattattatgagtcttaaataacactatatatcttcgtcggtagtttgcgaatggattgcaagtcattatctgctttatttatctgaaacaggaatgggacacagaagatgcatctcaaattgctactgaggtttgtggctttgtcacaattttatccgggacctttcttcacaaaaccaaagatattgcaaatagacccgtagagcttcctgtttttacaagtactccacaacatgataatagtcactcagggacttaacagccatgctttttttttttaact

SEQ ID NO: 81768 - DNA, 560 bp, Glycine max
  Clone ID: PAT_MRT3847_44853C.1
ggctcgaggaaagggcgaaaatggtcaaactgagcacgaaaaccacatgagtttcctaaaccagtcacacgacaattcactcaccccttcatttgaacacaacttaacataaaaaaatatccaagacaagagtgtgttgtttgaatttgaacggaaattcaattctctcctctcccatttcatgtctcacaaacaaaaaccgatgcaaaatctcaaaaccccagagagagatgtctgacgcgttctgcagcgactgcaagagacagaccgaggtggtgttcgaccactcggcgggggacacggtgtgttccgagtgcggcctcgtcttggagtctcactccattgatgaaacctccgagtggcgaaccttcgcgaatgagtccggcgacaacgaccctgtccgtgtcggtgggcccaccaacccgctactaaccgacggcggcctctccaccgtcatcgccaaacccagtggcggctccagcgagttcctatcgtcctctctctgccgctggcagagccgcggctccaactccgaccgcggccttatcgtgatcttcaaa

SEQ ID NO: 81769 - DNA, 323 bp, Glycine max
  Clone ID: PAT_MRT3847_44854C.1
aaattcttgaataaaatagcgatactccgtggttccccaagggaacgtcttatttaaaagcccatatatcaactaatagccatttggtcaacgggggagaggatgcacaatggccttgcccatagccaaatcaactcattaagatctcaagcgagctgcttctaccacttgtttattgcctagatctttattccaagcacaggatgaaccacatttttcactgttttagccaattgaacagctgctccaacataaagatcaagcgtgaactgaaacagattatgatgggctctgtctgggatatccaagccttcaatgaaatc

SEQ ID NO: 81770 - DNA, 171 bp, Glycine max
  unsure (1)..(171): unsure at all n locations
  Clone ID: PAT_MRT3847_44855C.1
tgagcggcatatttttgattcactggatgtgtctgaccaacaaactaatgnatttgtatataataacattcttggaaagtggacgtctcaggatcgcgcttcttggagaggttaaaaaaaaaaacgaaaccctacacaacatccctgcagatgcataaactttatatattt

SEQ ID NO: 81771 - DNA, 263 bp, Glycine max
  Clone ID: PAT_MRT3847_44856C.1
gggccgtacgggcaaatcgtcaagttcgacaactttgtgtttgggcagtcctgcgcatggaacaactgggccaacgggcattacaccgagggtgtggaattgaatgactccgttctcgatattgtgcacaacgacgctgataactgcgaatgcatgcaaagttttcacgtgtgccaatccctggggggaggaactggatcaggaatgtgaaccatgctgagttctacgatcaaggaatactacccagatagaatgatgcttaa

SEQ ID NO: 81772 - DNA, 104 bp, Glycine max
  Clone ID: PAT_MRT3847_44857C.1
cggtttcgtgttgttggcaagacaaaacacagcacgccgactctaaaatctgtaatcggtacgtaaaatgaccaggggttaagtgtagagcatttggaaaggac

SEQ ID NO: 81773 - DNA, 150 bp, Glycine max
  Clone ID: PAT_MRT3847_44858C.1
atcggccacgcgtccgttatagcttttcttcaaaaactatacatagagggtttcaatgctgcaatggggcggtgccccttaaagggatccaatgcttacaatacgcattacatggcgacattcataaactttttttttgaggaaacccat

SEQ ID NO: 81774 - DNA, 440 bp, Glycine max
  Clone ID: PAT_MRT3847_44859C.1
cttagatggcatccccgagaatacaggcatatcattggcctgcgctaagaaaagcccaactagggggcgtgccagatctgatatttacaccacccgctctcaagactgtgaattatggaaacctgctcgcacaaaagcaatgactatgacatataacccaaatccgcgtactgatgcatggagaacggaaacatcgaagcgcaccggatttcatcgagaaaacaaatgcgtcactggaaggacagccaccccaatgcaggaagatcaggttacaatcgattgagataccccccctcacgaacgtattcccaggacctatagagtcataaaaccacaaaacccattgggataaaaaggcggaaggggaaaccgaatttcccccaaggcaccacccgaagagttaaaagaacgccccttattatagggggaggagccggcgc

SEQ ID NO: 81775 - DNA, 165 bp, Glycine max
  Clone ID: PAT_MRT3847_4485C.1
ggctgtcaattatatgactggagagctgtgccattaaagatcataaacactgggcggtagcatctgctatagaattaagagaaggctagacattacattcactacaacactactgaaccgccgataaatattatttctccagcttaaattgcgtccggcctaaat

SEQ ID NO: 81776 - DNA, 873 bp, Glycine max
  Clone ID: PAT_MRT3847_44860C.1
aaaaaactattaaaaaaaattcataataaacacatattattccaataagctccatattcaaaactttagtttgaacttgaaaggagtagataaaaaaagcgtccctgaatcagcttttgaaaagaaaaataaaatttaataattgtgacaggttgatgtttcaatttcaaccgttttcttcccattctaacaaaaaaattcaaatgggcttcaaactttgtatcttacaacaccttcagtgtgcttggtctatcatctcattcagcaaaaagctatggtatggcatcttagttcattgtgcttgcttggtctagctagtatctcactgctcacaaattaattaagctaagagctattagccgttgtaaattgagaagttccaacatatatagtaaatgtatagtaccctgaattcttcaaggcttgaaaccataaactcttttagttgccactactgcataaatcagtagcttcttccttctgcacaaggattgtgatcctttcatctcttggaggctcacatggacatgccgtggctatgaatttcgggatgtcatcgcctggcatcaacacaggcaaagcctttgcataattctgcttcatcatcacaacaggaaaagctggtttctgatagggggaagccaattcagcttgtaattgagtctgttccaaagattgagtgttgatgattccatgagatcgaagaaaagattgaagcttagtccaatgtaagcagcagcaaaagaagccacacatgaagattaaacagacaaagagaagggctaagcccaaaggaaatccaattgacacacggcttgcagcagtgtcctgaagctccattttctcactttagtgttgttgttgttgttgttg

SEQ ID NO: 81777 - DNA, 597 bp, Glycine max
  Clone ID: PAT_MRT3847_44861C.1
gtgaccatgttattagtatgaagtatccatcgactttgtcaatgattaatctttgtcgaggaacctaactaaccacctttagtggggttctcccttccaaattatgtttttttcatccacaatactcgaaccctagactttggttaagggaaccaagtctagtaccacttggaccaatcacttgttggtgattacatttgtttagtgaatatcaacagttgtattctagttatatttttgtatatgcataccacccacttttaagtaaatatatttctagtcttattcttgaatctatgtaaataatttttatttgtctatattattattttgcaaattcaccatagtaatgaactattaataaggttataaaaacatcaaactccaagttcatgcatgacattcttttataaaaaacaaaaaaagttcatgcataatatcaatattcaaattaatttattttattttgtgaattcaaggtatttattgatggaaattgaacgtgattctaaatttgtatgtgatatgtacgataataaattttatatatttttatcaactaatttttgtaagaaatgtaaaaccttaattcatgat

SEQ ID NO: 81778 - DNA, 2064 bp, Glycine max
  Clone ID: PAT_MRT3847_44862C.1
gcttatgctgcaggctcgagcaaacacgttttgggattcggctcgagcgaccttgcgattcagcgcagcattgaaggcgattttttactagcatggcagcaataatgttgacgactatgaatattcctctgcacacttcggtttgggttaattcccggcggaagagttggtgctgctacgcctcactttcgcagccagacaggaaggagatccgtctcggtttgcccagcaaaggtcgcatgtccgctgacaccctcgaacttctcaagaattgtcaattgtcagtgaagcaggtcaatcctcgtcagtatgttgctgaaattcctcagctatccaacctcgaagtttggtttcagaggcccaaagacatcacaagaaaattgttatctggagatcttgaccttggtattgaaggactcgatactttcagtgaacatggccagagaggagatgatcttatcataacacaagcagtgctcgagtatgaatctgtgtttgttgtgagcgagatctcttgttatggtgaaagcagcaataataatgttgacgacgaggaatcttcctctgcacacttcggtttgggtaaagtcccggcggagttggtgttgctacgcctcactttcgcagcccgataggaaagagatccgtctcggtttgcccagcaaaggtcgcatgtccgctgacaccctccaacttctccagaattgtcaattgtcagtgaagcaggtcaatcctcgacagtatgttgctgaaattcctcagctatccaacctcgacgtttggtttcagaggcccaaagacatagtaagaaaattgttatctggagatcttgaccttggtattgtgggactcgatactttcagtgaacatggccagggtaatgatgatcttatcattgtccacgaggctctggagtatggtgattgccgtttatcccttgcgattccccaatatggaatatttgaaaatgtaaattcactggacgagcttgcaaaaatgcctcaatggacagaagaaaagcctctacgagttgctactggtttcacctacctggggcctaaatttatgaaagagcttggactgcaccatgtgacattttcaactgctgatggagcactggaggcagtggagttcttatatcacccttgacctatatttttgatgaagaaactccaagatggcgtcagctcctatctaaacttgggctgtagccatttatgatcaatctatggagtcatttgtggatgtttcgtttttcagatacttccaaagtagatgagcattaaatctatggtgaaagctgcaaaagcctagtacaccaaaatggaggacgtagataactaaaattgcacttttagattgtaatttttgtagcaagcctgtatcttcttcctttcgttctcttcataacattggtaatcgctagaaaagtgactgtcttcttggtcctttccggggggattgttatttcagttaaaagcggactatgatgccatagtcatatgtgtgcctcagaaggcactatacaagtctatacaacaactgagagcgattggaggcagtggagttcttatatcacccttgacctatatttttgatgaagaaactccaagatggcgtcagctcctatctaaacttgggctgtagccatttatgatcaatctatggagtcatttgtggatgtttcgtttttcagatacttccaaagtagatgagcattaaatctatggtgaaagctgcaaaagcctagtaccccaaaatggaggacgtagataactaaaattgcacttttagattgtaatttttgtagcaagcctgtatcttcttcctttcgttctcttcataacattggtaatcgctagagaagtgactgtcttcttggtcctttccggggggattgttatttcagttgaactgggattttgcttcggtgttttaattttaaactttgaagtagattttattttatttgtgcccttaatgagttggccatctttcgaatgatgtttgatacgttagaaagcccagcgaagaaaagtgtttaatgaataaaattttggttat

SEQ ID NO: 81779 - DNA, 1726 bp, Glycine max
  Clone ID: PAT_MRT3847_44863C.1
cagcaataatgttgacgactatgaatattcctctgcacacttcggtttgggttaattcccggcggaagagttggtgctgctacgcctcactttcgcagccagacaggaaggagatccgtctcggtttgcccagcaaaggtcgcatgtccgctgacaccctcgaacttctcaagaattgtcaattgtcagtgaagcaggtcaatcctcgtcagtatgttgctgaaattcctcagctatccaacctcgaagtttggtttcagaggcccaaagacatcacaagaaaattgttatctggagatcttgaccttggtattgttggactcgatactttcagtgaacatggccagggtagtgaagatcttatcattgtccacgaggctctcgagtatggtgattgccgtttatcccttgcgattccccaatatggaatatttgaaaatgtaaattcagtggacgagcttgcaaaaatgcctcaatggacagaagaaaagcctctacgagttgctactggtttcacctatctggggcctaaatttatgaaagagaatggacttaagcatgtgacattttcaactgctgatggagcactggaggcagctcctgcggccgagaagacaaagtgggataccccggatatacggcacaataaacttaaatccgtcaattatccaatatagatatgttcaccgatatattgacctatcttccatgtcaaccattactcattactataagcaattcatacattataattcctgagcaaccatcattaatgggtttacaattacccactctaactcctgttttctgcaagcgtgatgggaaggtaacagcagactattatgccatagtcatatgtggcctcagaaggcactatacaagtctatacaacaactgagagatattggaggcagtggagttcttatatcacccttgctctatatttttgatgaagaaactccaagatggcgtcagctcctatctaaacttgggctatagccatttatgatcaatcaatggagtcattaggggatgtttcgtttttcagatactgtcgaagtagatgagcattaaatctatggtgaaagctgcaaaagccaagtacaccaaaatggaggacgtagataactgaaattgcatttttagctcattattcatagaggaactcctatttccacatcgctttatagattgaaatttttgtagaaagcctgtatctttttcctttcgttctcttcataacactggtaatcgctagagaagtgactatgttcctggtcctttccgcggggattgctatttaagttgaaattttaaactttattgtagattttattttatttgtgaccttaatgagttgcccatgtacaatatacaagtccaccttcatggtgtttgaaagggtgagtaatctgcatcagcgatgacaagagaaatggctggtggccaggtaagactttcacaactcgaagtggaagaagtccatacacggccccatgtatgcacgtaatagtttaattcctacagtatcatacttagaataatttctaccgtatttctttctggtatgattatgaagtcgcaagtgaaaggattattttatcccaaagtggaattatacattgggtactgttgattactccaaaataagagagtttttatggtacccaaaaaattggagggattttggtattgttattctcttaaccaataaaattattatgtc

SEQ ID NO: 81780 - DNA, 174 bp, Glycine max
  Clone ID: PAT_MRT3847_44864C.1
ggaaaatcatataaagcaaaaaattttttacccttttggatcaagctaaaactttttttttgcataccccctcctacggacccccataccaaaataagaggtaaaagttgattattaccatattctaccaaacgggggattttttcacctactggggatccccggacccgtggg

SEQ ID NO: 81781 - DNA, 462 bp, Glycine max
  Clone ID: PAT_MRT3847_44865C.1
tccaggaaggtttcccgtcatcactgtatgacgtcctccttctttgggggggggggggggggggggaaataggccgtggtaggtgagaagggtgcgactaagagtatatggaaaagacgaatgaggacaaccactgagtgtgaaggaagggaaataggaaaatagggaaattatagtactgtaggggtacgaaaagcatacagttcacagtcgagtacgggtaaaggattaatagatcaaataggttggcacgctgagcccgtaagagctattagcggctgctaaaccattgcaatcgaaacgctagaaggtgtcgcgtattagcacgttacaataatcgtagatagtagtaagtacgcgtgcgttagacatgtaagaaccagtgcagaattggtgccaatacaacgtgcgcgtgctatataggttcgtaagctaccaatagtactaggtaccgtgaaaatt

SEQ ID NO: 81782 - DNA, 166 bp, Glycine max
  unsure (1)..(166): unsure at all n locations
  Clone ID: PAT_MRT3847_44866C.1
tgtatttgattanggagcacattggttctgatcagcagacanngattnttgngtccaccaaacatcatgnggagnttctcaaccnnntgnttggtgaagagggtatcgagccatatgngtgntanngcgacatggatcngatgctcgcaaaatccangtatcaagg

SEQ ID NO: 81783 - DNA, 321 bp, Glycine max
  Clone ID: PAT_MRT3847_44867C.1
aagggaacaaaaaacgggtccgataaaatttaatgtttcttagccaaccaagggaaaaagttgccgggggggttttcccccaaataaaaaataccccaggcctttagttttcttaaagatttcccaaaaaaagggaccgactcttttcaactatttcctttttgctgctgttggggaggggcttggtaacccggatatcccggataactgccctacatgttgggatcccgtccaacaggggcataacccttattttttttttcttgggggggattcccattattttcacccccaaaacccgggcccgagaggccctttccc

SEQ ID NO: 81784 - DNA, 535 bp, Glycine max
  Clone ID: PAT_MRT3847_44868C.1
gtgattcgtaatgattgagtttggtgtttgaatgtggagaaattttcaaaggaagaatcagattaatattaatgggaaggaaggggggtgtgacgaaagcatgggatgaaaatggcacgtggcttgcatccagatgcctttggtgctgttcactcactgacctgtcagtttaaactctcgatgaaggacatgcgtaagaactaaggaaaggaacccaatgctcctatactattctatcccaaaatattactattagatatcttttatgatgtctatacaccttaataagattgatgataaaaaaaaatatatttgaaagtcttaataaggtaaggtatttataaatatcactcaattttattatttctcatcagaaaatattcgcataccataccacacggcacaggaacgatcattaatttcttgctttcaatgaagtattattagttaagtttttggtttttctaaagtaattatcgtgcttgatgcggtggacaacagtttccagtccacgaccagaccaattatgtatcta

SEQ ID NO: 81785 - DNA, 427 bp, Glycine max
  Clone ID: PAT_MRT3847_44869C.1
ggtgaaccccatggttacctattctaactcacatataggataaatcttttcataagtcttaagttgtcaagaaacattgatcactatttgtcctcctacaagcactcctctaaacttaaaaattatttcaaatattttactactccaataaggacctacgcgactaagatagcactcaacaatttacagtggtcgacttctctatgaacttatggcttactccttacaaggatctcactcaaaaacttaaacttacttaagtcatcttcagcaagcattaaagttaatccaatgagtcctaaaataaccttttggttcgactactaattaagaacatttcatcttaatcctagggttcctctcatcttaaaacaacttctggccaagaaggatttgtaggtatctttcacctagacgtagcatactt

SEQ ID NO: 81786 - DNA, 257 bp, Glycine max
  Clone ID: PAT_MRT3847_4486C.1
cttacaggttaacaccggcgggactgcttaacaacctcgctcgttacgtagtcaagtggtggcagaggagcgaattagcatattcactactcaccaccgcagagagaattagaccctgcattgctgcgcccaggatcgctggacatagcacattcgattgtccgtcctacaaaggccaggccttacgagtcttagcttccaattatttaggaaatgaagatcattcacttcttggagatagtgatcggatattggag

SEQ ID NO: 81787 - DNA, 142 bp, Glycine max
  Clone ID: PAT_MRT3847_44870C.1
gactcaagcgtaagtacaggcgtcagtatagcagcgaatgggtttgatcgaggtgtgatactttcattattatgagctgattttaattcgattttttgaccttgatgacgatggagggtcgggatcgatgccggtttgccta

SEQ ID NO: 81788 - DNA, 720 bp, Glycine max
  unsure (1)..(720): unsure at all n locations
  Clone ID: PAT_MRT3847_44871C.1
tttttttttaaaaggggaaaatgggttagtggatcaaattagattgagtttggtgcttggtcatacagttgatggcaatccctcgcccacccgcccaacatgggaatacaattttgggtaatgctacccacccccaagaccctaattgagataaacactgttttggggggatgtgattctccataatctccatgtcagatggaaagaaatataaaaggggaagaaaacatcaaaataaataataatcagaacccattacaatagaaaaattggaaaaagaaagaggaaaaaagggtttagatcataagttaacaattagggatacaattaacacgatgcatttgaagttacttgggggtcctcacttttcagtttgtggttctaccgtaatggagcaccatgacacgatctgcgggggtggtggtgtccctcggactccaaatgttatccctcacatgctgcaacgtcaagaaaggtaaaagttgctgccctctgcatgttatctctatctcnnattcgctttccaatctgagtttgctaaccnnatacttcaatagcaaccgaactgtcatccttccgtctttaattctaanntagttcttnngtatttgtggcaagaatgnttctctcgcttggtttggagaggcttgtancataaaccatattccaaaatgnnntcttcntnnngggggggcccnntacccaattcgnnctatngtg

SEQ ID NO: 81789 - DNA, 372 bp, Glycine max
  Clone ID: PAT_MRT3847_44872C.1
attgaaagttctatatttattaaaacatgattgcaaattgtacacattcataaatttttaaggacctttactgggcccgacatgcgcacatacacaaagtttatgaacatataaacagaaaggaccaaaatataggctcttacatacttcagttcacaccaaacaagggacctgcagaccattgtcaaactcaaaacctaccacgaagacgcacgacatggcgcagaggttactctggctgaatgatgtagtcacaaagagtccttacattcttcaggcgctttccagcatagatcaatcttttgcgagctggggggataccttgctctgcctgaacaaatgcctggacattatcaacagtgtctgaacttt

SEQ ID NO: 81790 - DNA, 400 bp, Glycine max
  Clone ID: PAT_MRT3847_44873C.1
cgtgtttttttcattttgtgatgatttttttgttttcattttaccttttttttttttaagcaagcgtttgtttcgctaatctgcaaaaacccattggaattataggccccaaagcttgaagcctcagtttgccggattttgtttatgatagaccccctccttaggtctatggccctaactacatcggtgagtgccttactttacgaaagccttcatgctacttggagggggtttttcaagggcaaacctctcaaccccgaattgactcccttcaattaacacatgcgagaaaaaatttacttggcttctttacgtgtttatcagaactgtgccacacatacaacctcctgtgtgggatcgttttatgagtcacagcttaccgctttttgaaggatggagc

SEQ ID NO: 81791 - DNA, 1184 bp, Glycine max
  Clone ID: PAT_MRT3847_44874C.1
ccccataatttgcttaggctctctctccccctctctgatttcgttcaatctctggaatttgatgtataatctagtaacaaagaatatctgattctttttttattttatttgatgtgtgatagttgttgatgtggtgttgcggtagaattggcatggagccggttacaattcttgtccttcgtggccaatgtggtattgctacttgtcgtcattctctttttcttagttaaagctgccagccttctcaattggtatttcacttcctcaaaatcatgttgcatttgttagattactgtctctgctacattcatatgcttgatttccgatattaaactgttcatgattgaatgaaaaataaattcattttggggaaaagtactttgattaacacattgcttacaatctgaatacatgttccatttcctacaattaatctctctaactatcagatagttttattgattgcataacttctctgcctggcaattcagatagtttcattgattgaatcgttgtttcgttttaaatcccttcttgaatttttatagtctgctttacaaatgtccttcttggttcactaacgcaaatcataaaccacaggctacatatagcataaatgtgtccactaatcttaatttccatatgcaaatagttatcagtaatcactagtcagagtaattagtaccttacaggttgtggctattgtaaggcctatttactgcacaactttcttctaccttgaggtgattcatcatggtggcttgtgaagttaaccgttaacaagttcttagtaagtagtaacccaatattttcaaagttggaactaggaactacaattatttccactggactgggccaatcccaagtcaacttaagatatgctcttgaattttatgtgttaaaaaccaacagtaatagtcagtggggatgttaaatgattagaactatacatgaactctccagccattcattgtttatctatatgcattccatgcaggtgaaattttatcatgtgttggtttgggattgccaattccaagtctgtcttttttatttgctaatggaaagcaatgccaaacttgttacatgcttttgtgccagggtggttctatgcttgtgcgattatgagtagttactacgtctagttctactcaatgaaaagagtttagttatagtcatgtacc

SEQ ID NO: 81792 - DNA, 193 bp, Glycine max
  Clone ID: PAT_MRT3847_44875C.1
cactgcagctgacggacttccgtgagaacatacagaccccgggcaggttctataaggaacagcccacctacatttactataagagcataaacaacatgaactccctgccgagtgaggaggggcagacacgccaccaattcatcaacatgaggctcatcttatcaccggccttaataaacgcactcacacagaa

SEQ ID NO: 81793 - DNA, 379 bp, Glycine max
  Clone ID: PAT_MRT3847_44876C.1
aaaacaaaaaaccctgaaaataaaacatcatttttacatattcagggatgcaccccacggggtcattagcctaatccggaaaggcaattttgactcatacaatacaaccagattcaatagagctccgggttccacatgatttgataaaaccaaaaagccccaaaatttagctgggctaacaaaaagggacatggcaatgccacagctttaatttatttattttcaccaggctattaatctaaataggggacaacaagcggaggcacttaaacaggcttaaacattactggcactggcactgggggggtcaaaaaagctatactctctccatccgctgagttaaataaaaacagtccccgggttctcttccctccattaa

SEQ ID NO: 81794 - DNA, 291 bp, Glycine max
  Clone ID: PAT_MRT3847_44877C.1
cactgctgtgcttttcaggacagtgatggtagaactgtggactaagccactcacaaagccattactgtcccatactccacataatgaaagatgatgcatgacgaaaatgacagatccaggtactgaaagtgcagaatgagacagtatcccacttattgagagagcccaccaatatgaagcagatgttgatggccatgatattcatcgcacagcattatttgcgccttggttaccactacaacacacactgttcatgcgaatgtgagcgtaagcaatgaagatgcattcatg

SEQ ID NO: 81795 - DNA, 695 bp, Glycine max
  unsure (1)..(695): unsure at all n locations
  Clone ID: PAT_MRT3847_44878C.1
ccacgcgtccggtggaagcccctttactcttgtccttccaactagaagaaccataattagtggaactccttttggcccacctttcctcttcaattgttgctctactcggattgttttgtgaagcaaatcctccatttcaacaaattcctgcagctcaacaacatcatgaatatcactatttaaaccactaagaaatctagccataattacctctttatcctcttctatattggcttgaatcatgagcacctccatttctttatagtattcctcaacgcctttgctaccttgggacaacttttgaagtttgaattttaagtccctagtatagcttgccaacacataccacttcctcatgatccttttcatctcaacccaagtttccaccaaaggctcctcatttctagctctctccctttgcactttgttccaccacacaagagcataatccgagaattctacggctgctagcttcaatttttaggcctcctcataggtgttacatgagaagatatgctctatcttgagttctcactccaaatatgcctnncggatcactnnttgcctttaaagggnaggaatgttgagcttngactccttcaactcagtttggccttggaccaccaccatttcctnctttcctttcttnctcatgacngtcacgattctctaaccgcttaaattcttcatacaac

SEQ ID NO: 81796 - DNA, 398 bp, Glycine max
  Clone ID: PAT_MRT3847_44879C.1
ggttaaactttcaccttgaatattaaatcaagactgaacacacgcattccttgatagaaactgatgagttatctcatcccataattgggagagggattctccctcaaaataggggaacctagtactagctaggagagaaaacttcagtcaagtgcacgttatcgaaactattgcccctttagggcattaacacggatactgagctgtaacaaacaatccataatagctatctctgtgataaaatctgattctgaattaaacggggaatattaatgttaacttgcaccaacgtgcaatgtatgccgaaggcaatgcaacacctttacagcaaaggccacgtcactacagctactgaaatctggtataggaatggctatccgccttgatgtctccaagac

SEQ ID NO: 81797 - DNA, 770 bp, Glycine max
  Clone ID: PAT_MRT3847_4487C.1
aaataacaatccactacaacaaataacaactatactgcttcaaaccaacaacagtttcagattcatagttgctttgtaacagagaaatggcctacaactcttcccgaaattctcaacctgctctccctatgcacctgtgtttcttcttgctcactttgttcatgttccttagtttctcattgtactcaagctacgagccaataatggagagcttcatggaccaagtgaagttggttctaatggtttctccactgctgcttctgcttgttgtgcacttcctttgcaactatggaagtgctggaggggtcatgtctacactgattcctttgccagagagagagtcactgcacagagcaggtggaactccttggggtgttgggttggttcttgttcttcttctcttcatggtctcttaccagtcttctttccaagaacgttggtttcctatcctcacaaggtgaaaagtgtgggattcttgggtttttatccgtagaaatcaaaaacaagtatcatgatttacaacaaagactcgcacaccctacttaactaattagctgaatccttgattggagttcttatttatgaggtaacatgacatggcatggaactttgtttgtaattactgtaatttaatttagtgagttctcagggtttttcatgaaatgagatttcactttgttcttgtatttatttgtttttgttcaaagggatatggtgttcttgcaatatatgaagatgtgattttcaggttttttgagatagagactttg

SEQ ID NO: 81798 - DNA, 808 bp, Glycine max
  Clone ID: PAT_MRT3847_44880C.1
tcacactttatgcaacatgggaccccagagaaggaagcggcggagattcatagaaggtggccatgaattactgaggaagattcctgtacgaagagctccaaatgtgagtgaggaagttaggagaatgcaacagagaatacgaagtggtggtgttattctaccaaagaaaatcagagaggactcactgttatcagcagcaatctggagtagtttacttgatcagtcaataaataaagggaattgttgtactagggagttgggagtgctttttcctgggactagtgatgtttcccagatattgaaatccaaaagggtgttgcataggataaagaagatgctgtttgattgtgtgaaagatattgccataacccttccaacacaagacgacagaaagaaaggtagcagaaaattcatggggcctctacagattggaaaggtccttcctcagagaacaaaaaaatggggccaacaagttggctatggagaaaacctcacctacttactcactttggattacttgaactcaatcatggaatggagaaggttcgaaccgcacgtgaagggcatcagcgttgagatcactgatgcaattttggatagcatccacaatgagattgtgttagaaatgataggaactttcacacgaaatagataaaattcatcttaatgtcttgcaagttgcaaccttactcaatttgaatcctgaaagatccaaagccccaaaatttgaatttggattttatttataaaaaaaaaaaaaaaaaaaaaaaaaaaaataaaaaaaaaaaaaactcgaactagttctctc

SEQ ID NO: 81799 - DNA, 791 bp, Glycine max
  Clone ID: PAT_MRT3847_44881C.1
ataaaaatccattttttgtatttgttacaaatataccagaaattgcatcatcctctgaaacattacaactaccaaaagaaaagtatcttttgccaaccaacaccagcatcctagaacaaccgaaaacattatttaaaatttgcatccctgattctttagttgagtcatcaacaactaaaaatgaaagtcttaccatttctcctttgcttgtagcttgcataatttctgatgatatatttgcagcaacttgattgagttttccagggagggtttggcagcatcttttcttccttctgctgagattcttcctttgcttctttttccttgattttttccttcattttgttcaattgccaaaaacttgtgcttctaagctgacaaatttccgctatgcatcatagttaagtttgatagttcaagatcctgtttatatacccaatgatacccgtatttcttcacctcaacatgaaaacctggctagtagctaattattttaaattcctgtttcatgctaccgaggttagatgtgccctgcagatgatattcttcaatgaatagtctttgactgagaaagaatagccacatgtgttctgattcgtctgaaactagttctagatctccataaaaatccaccgccatatcaacaataaaaggataccttccttttgttttgaaggactcatagctaaaactgtttcatgatgtaccacaaatataacacagcacgccgatccaatcattgtcatccataacgggtgatgcgtctatgcttattaaactgcccaaatgtt

SEQ ID NO: 81800 - DNA, 217 bp, Glycine max
  Clone ID: PAT_MRT3847_44882C.1
aagaaataatgcttctatttcattcaacaactttttgagccagaataccatacttcactttccattgggaaagaggtgaaaatcattattggtcaaataggggaccaatttttttccacggtcacttcaaaccaattaagggaccacttcaccggttgggccttaccatggaccttatttaccattcctggtggatttggttaatccctctaaaatt

SEQ ID NO: 81801 - DNA, 1360 bp, Glycine max
  Clone ID: PAT_MRT3847_44883C.1
agttagaagaatatataaatataatggcggaatttacatccaccaccactaacactaacagtaacagcggtctcaggttgaaagccaaagtagccatagtcaccggaggtgcaagtggcatcggcgaagcgacggcgcgtgtgttcgcggagcaaggcgcgcgtatggtggtgctcgcagacatccaagacgagcttgggaatcaggtggctgcgtccattggaacccagcggtgcacctacatccactgcgacgtggcagacgaagaacaagttcaaaacctcgtccaatcaacggtcgacgcttacggacaagtggacataatgttcagcaacgctgggatccttagtccctcccaacagacggtgcccgaactggacatgtcccaactagacaggctgttcgcggtcaacgtacggggaatggcggcgtgcgtgaaacacgcggcgcgtgcgatgttggaggggcgcgtgaggggaagcatagtgtgcacggcgagcgtgggtgggagccacggtgggccaaatgcgacggactacataatgtcgaagcacgcggtgttggggttgatgcgttcggcgagcgtgcagcttgcggaacacgggataagagtgaactgcgtctcacccaatgggttggcaacgccgttgacttgtaaacagcgagggatgagcgaggaggaggggcaagaggtttaccggaaatacgcgagattgcaaggagtggtgctcacgcccaaacacgtggcagacgccgtgttgtttctcgtctctgatgactccgcctttgtcactgcccttgatcttagggtcgacggtggctttactttgcctagtatatcaatttcaaattctatactattgtaagacattgaagctcttgccaatttatgagcaacaacattggcttatatattgagttttagcaataatgtgacatgagcctacaatttcaaatctgagttggttgtaacacctctttcacttctggcttgcaattaattaacttcattgatcatgttatggtaaccaagctcttcattccaaaaaaaaaaacaaaaaaaaaaaaaaaaaaaaaaaaaaaaaaaaaaaaaaaaaaaaaaaaaaaaaaaaaaaaaaaaaaaaaaaaaaaaaaaaaaaaaaaaaaaaaaaaaaaaaaaaaaaaaaaaaaaaaaaaaaaaagggggggccccttttaaaggaccaaattttactaccgggggttggaaaagaaaaattttttttttggggcccccaaattcaattccatgggccgggtttttaaaagggggggaggggaaaaacctggggttacccaaattaaaccccttggaaaaaaatccccttttcccaggtggggg

SEQ ID NO: 81802 - DNA, 137 bp, Glycine max
  Clone ID: PAT_MRT3847_44884C.1
cgcgcccgcaagctccgatcctgaattgcggacgcgcgccacccactcgatagacggcaacagtttttgttttcaaatcgccaaacacggagacacgggaggcttatccaactcatgagccgtaacaaaagaccctg

SEQ ID NO: 81803 - DNA, 588 bp, Glycine max
  Clone ID: PAT_MRT3847_44885C.1
cggtccggaatcccgggtcgacccacgcgtccgatttcaacctctctttcttttcttctcgcagagcgaaatcccaatcccacacaaatggcatgctcagccacctctgcttctctcttctccgcaaaccccacacctctcttctctcccaaatcctccctctccctccctaacaactctctccacctcaaccctctccccacgcgcccttctctctccctcacgcgcccctcgcacactcgccgctccttcgtcgtcaaagcctcctccagcgagcttccgctagttggaaacaccgcaccggatttcgaagcagaggctgtgtttgaccaggagtttatcaacgtgaaactatctgattacattgggaagaaatatgttgtgctcttcttctacccgttggacttcacttttgtttgtcccacagttctggcaccttgcatgggtccaaacagatagaaagtcaggtggccttggggacttgaattatcctttgatttctgatgtcaccaaatgcatatcgaaatcttatggggtgtctcattcctgatcagggtaattgtattggagagggttggtcatttattg

SEQ ID NO: 81804 - DNA, 328 bp, Glycine max
  Clone ID: PAT_MRT3847_44886C.1
tacctccttcaaaactaatactctcttctccgtaaagaaagctacacctacaaaaaaagctgtacctgctgctactgccaatgttgagcttgccaagtgttatgatcctgacataaagatcttcttggctaatggtatctcccaccgatctcagatctcacagtacttgaccaacataactcctttagacactatggcttataacccatttaatcttagcaagaacccataacatttttgcaaatatcactcattaaaattgattcaccccactataccattacatagatctactgaattcattattcacaaagcctgcaacaaatat

SEQ ID NO: 81805 - DNA, 252 bp, Glycine max
  Clone ID: PAT_MRT3847_44888C.1
cctttgttgatttcaatgtcgcttttgaaatttcataagtatagtttcattcttttgtttatagaataatactctcaacagtgatgattgttccaaatcacatgctttagtttactactttgcttttgtagccactatgtatgtagctgcaaggatgaagttatactgtgggaactttaaactttaatcttaaattctagatatggaacttattctgagatggtagtttaatgaaatctcttatttgtggtt

SEQ ID NO: 81806 - DNA, 183 bp, Glycine max
  Clone ID: PAT_MRT3847_44889C.1
gacaaacactacattactagaacggatacttatagcctttcacttcgttctaaatccatcaattcgggatgaatatacggattgcctataccaacaaacacatgaaaatgaaacttctcatttttctacttggatataaatcatatctctctgtttgctataaggtattcatataaaaatgac

SEQ ID NO: 81807 - DNA, 352 bp, Glycine max
  Clone ID: PAT_MRT3847_4488C.1
ggatagacaagttccactgatggacgagattgatactaaggtggacagggcatcgtctgaccttaaaaataccagtgttagacttagagatacagtgaaccaggttttttatctgcaactcttagtcttagattctcatcaattttcagttgcatcagtgacagattttatattgaatcttatatggttttttggttctcgttcagcttcgatccagtcgaaacttttgtattgatattgttttgttgattataattttgggaattgctgcttatttgtacaagtaaggttcttatctcttttctacagattaaaatatatgctagttccttctcttttcttgtgtggattt

SEQ ID NO: 81808 - DNA, 387 bp, Glycine max
  Clone ID: PAT_MRT3847_44890C.1
gcatgttctagctatctcgttcgaactgtccaaggtcctgtcacaatagagataaagcgtgtgcgctggcggcggctgcgatggctgcggaagtgcgccggcaagcaggcagacccagaacgggaactgcgaacgacaccaagccagcacgcaacgctgcgtgagcccggcataggccgcgtgtctcgctatgccggcagccggcaacgcaccgtttagccgtgcagcgtgcaactgcatgccatatatctaatagacggcaatgttggcgtggttcttaaggaaggtaccggtggtattggttcacgtggcggcttacacgtgcaacactaaaacttagcgtggtcgcctgattgaaagattgactgcaagtctggctgaatgtgt

SEQ ID NO: 81809 - DNA, 171 bp, Glycine max
  Clone ID: PAT_MRT3847_44891C.1
cgcgtccctgctccgtaccagtttcactgcatatttttgagagaaaactctgcaaacattgtgggggatcatgacctccttacaagtgattaacttcttttcggacttcttcccgtaccaataaatttaaaattgaaattctttggaaatttaagggaaattggtttttta

SEQ ID NO: 81810 - DNA, 474 bp, Glycine max
  Clone ID: PAT_MRT3847_44892C.1
gggggagaggaaaaatgcttttaattgggaattacaatgaaaaagtccctctattctaaaaaaaaagacttaaccttctttaactctgctggggggagcacaagaaattctgctgttttttgcgagagcctgatcttccagcaaaggtggaaattaaaattacattgggaccttctttttccaacacacattcaacaaccatgccattagggggctttttttagttgacagaccccccatgggtttgcttttcttatcaaaaaacattggcgttgcttaaataatcaaaccccaaaaattaaagattccagattcttccctgaacaaaacaagattcttagctttttaccaatgcccaatgctttctgatctttccctttggccctggtttaaattaaatcttcccttttttttttggaggttggcaacctcacagagaatttttaactggccctttaagcattgggtgatttg

SEQ ID NO: 81811 - DNA, 312 bp, Glycine max
  Clone ID: PAT_MRT3847_44893C.1
tgtatttcctcttgccacatctgagggttttcctcatgtgctttcacgcaaaaatggtgaaaaaggcaaaaggagatttgtttctggggatggtgaagagatgacattgatttcaggaaccagtgttgaagaaggttaccaccaggttattagtggaacttgagaaaggggttcctacatgggtgggcttggattgtccaaaggttgagaaacttcctcgtcgcaaaatttttgacaaacttaagaccctctgcttcactattcttcctattggaggttaattttttggggtttcgtaagaagtttttaaat

SEQ ID NO: 81812 - DNA, 680 bp, Glycine max
  Clone ID: PAT_MRT3847_44894C.1
ccggaaaacccgtcgacccagcgtccgaaaacttgaaggtcttgaacttctgaagactgccattgctaaagctggttacactggaaaggttgaatctttgtctactgaatctaatttagtatcttataacatatggctgattagtttctattcttacaggttgtaattgggatggatgttgctgcttcagaattttacgataacaaggataaaacctatgacttgaattttaaggaagaggttgacaaattagaaacattttcccttttttcttttgaattttcatttttctcagttgagatatatttctttgtcagatgctttaactagataactgactaccttattgcagaataatgatggatcacagaaaatctcaggagacagcttaaagaatgtgtacaaatcatatgtgacagattatccaattgtgtccattgaggatccatttgatcaggatgactgggagcactatgcgaaattaacagctgaagttggccagcaagtgcagattgttggtgatgatctcctcgtcaccaacccgaaggtatgctatattaactttaaatctgagatatgttctgcaaatatgtatcattgacaatgttctgtctattattaactctgtagcgtgtggagaaagcaatcaaggagaaggcttgcaatgcccttctgttgaa

SEQ ID NO: 81813 - DNA, 269 bp, Glycine max
  unsure (1)..(269): unsure at all n locations
  Clone ID: PAT_MRT3847_44895C.1
acctttctctctcttctttttactctctctctgtctctctctacgcttacctcgtncgagatccacncaagggatccactaactgaatgaganatngngttgacattcaccaagctnttcagccggcttntcgccangaagganattcgaattctgatggacggtctcgatgcagctggtaagaccaccatcctgtacaagctcaaacttggagagntcgttaccacaattcccaccattgggttcaatgtggagactgtggaatacag

SEQ ID NO: 81814 - DNA, 268 bp, Glycine max
  Clone ID: PAT_MRT3847_44896C.1
tttttttttttttttttttttttttttttttttttaatttttggggggatttttagggggaatcttgggccaaaccccgggcggaccccgggataaaccaagaaattcctgaccgaaaccagatgcaaacaaattcatacaatatagagttgaaataaaacatgggtaaataatggacaagaaataatcctttgtcaaaatataattccaaacaaaatcacaaaaaaaaaaaaaactgtaaaaataaaggggaaaaaaaggggtgccc

SEQ ID NO: 81815 - DNA, 228 bp, Glycine max
  Clone ID: PAT_MRT3847_44897C.1
ccatcctgaatatcagtttaatgcaaatccgggacattgataaagctatctaaatcaagattcaaatgtgtactattctttaaatgtttagaaagaaatatctgtgattgtcttcaactacagggtttcttaaccctccccactccactttcgaaaaaaagaaaatgaaaaaactaattaggaggccctaatgtgtaattcataactcaaactttcagaagaaaattt

SEQ ID NO: 81816 - DNA, 203 bp, Glycine max
  Clone ID: PAT_MRT3847_44898C.1
cagtacatagaccgctgaacatctgagggacactatatccctaatatgtatcaggtccattactgtctccgaacaactgttgtcgtactctaatgctattgccgatgatcttagccatacatacatgccgtgctatgcgagtatataatattgatgaggaagaataacacttacttgatgtttaatcacaactaccatccata

SEQ ID NO: 81817 - DNA, 296 bp, Glycine max
  unsure (1)..(296): unsure at all n locations
  Clone ID: PAT_MRT3847_44899C.1
gatataatcccttacagtgactgtaaatgaatactctgaaaagaggtagatgtctatggaacatggtgagagatggcccttantctctcagtgagcgcgttgggcggaagagtgcatgcagaatatgcgtctggaccaaaagagatagttgaggatgtgtgaggaagcttaatacagctcttaaccaatataaaagatcaagcctatcctgcttaaagttgttgatgtgaagccagccagcacctgtagaaaaagttgacgtgttcttatcgacctattaaaccaaaagtttgctc

SEQ ID NO: 81818 - DNA, 392 bp, Glycine max
  Clone ID: PAT_MRT3847_4489C.1
ttttgtgttgtcagtaaaaaaattattggatttactaactgtgagggcccaaggtacttactttacaaggaaaaaagcagcagactaccaaaaccataggttctacaaataaagtgccaatataaagggaatacaaaacaccctgcactgctaccctattaaaaaaatgctgatgaaaaattgctcgaccaataaaacgcagggctgagcaaagcctgctgtgccactgtctcaacaccaaccaaacctggaaaatcgcaacattcattaccttggacccatcaaaagcctagaataaggacacaatatgcttaccacgccaccagattgatccaacaaaggacacccacgaacacttccaactagaactgagatgcattactgtggagata

SEQ ID NO: 81819 - DNA, 489 bp, Glycine max
  Clone ID: PAT_MRT3847_448C.1
agaaaaaattttattttaaaaataaaaaaaaaaaaaaaaaaaaaaaaaaaaaaagtaaaaaaaaaaaaggtggaaacgagggtgggcctttttatgggttccatgtttactaacgcgataatgctacgtctaaagttatcctatagggtcacctaattgcaattcattgaccggggttttacaggggcaaccctggtaaaacccttgggtaaccaacctaaatggcctggccgaaaatccttttttagaaatgtgcagtataaccgaaaaggcccgctccgataagcagttgccaaaattggaccacccttaatgggaaacgtaaaccgccctgtatcggcccattaaccccgtggggtctggtggtttcgccaatcggcatgtctacatttgacagccccttactgtcccttttttgctttcttttcccttcttttctagccgctttcgccgtcttgccctcccaagctgtaaaccgggggatccttt

SEQ ID NO: 81820 - DNA, 297 bp, Glycine max
  Clone ID: PAT_MRT3847_44900C.1
gatacgtgttattgccaaatgccatttcacaccgcagttgcctctgtcagcatcctcttcacgagcagatatcattgctgcttcccagttgcaaattcggatctcacacattcccaagagcttatgtgagcaaagtgtcgccgtgcaaatcgatccaaaaatcgactttgccgagcgtgatcgggcagagatggatgaggtgagaactaatgccaatgctaagataagtccagaacaacgattgagggagttgccacataagagtatcctgggatgtagcattactaagaggacatg

SEQ ID NO: 81821 - DNA, 562 bp, Glycine max
  Clone ID: PAT_MRT3847_44901C.1
ccacgcgtccgggaggtagtggtggtgatcaaggaggtggcggaggttacattgggggtggtggtagtgaaggaggaggttctagtggtggcgagggcggaggctacggtgctggtggcggcgataaaggaggaggaattggaggtgatgaaaaaggagacgatcatcatggagaaagaggaaaaggtgggaaagatagaggacacaaaggtggcgaaggaggatattgaattattattaaagaaggctatggcatatagaataaagggaaaggacgtgttggttggcatggaaccaaagtctagagttagacaactactacctagttctttcttcaacttaaatgtagctttagagatgatactcggtttcattgttcccttttcatgtaatactttacgttgatccatgaataaaaatttgacaatttacgtagaaaaaaaaaaaaaaaaaaaaaaaaaaaaaaaaaaaaaaaaaaaaaaaaaagaagggcggtctataaaaaagaaacaaaactggggcggccgttctagaggatccaagtttacttccgcgtgcatgc

SEQ ID NO: 81822 - DNA, 870 bp, Glycine max
  Clone ID: PAT_MRT3847_44902C.1
ttttttttttcattcaattgtttagattaatatactctattttgtcaagcctaattatttatccttttaattcttgaatgatataaaatccttaataagcattataatttcccatactagaaaaacgacaaacaccaagcccccttcccctagtcacatcaccccgaccaacgaatcttctacttagaacacctacccaccaaaacaaaagcaccatgacaaagtgctaggcaaagacttacgtagaattacaattgtaatgcacacaacaaacatgataattagagcaagaggccgaattttaattctaatatgctttacgagccaattgatacctaatatcatttcatttgctattaattctctggctcatatcatccaccataatgggacttctctttctctagttgattgattaattgttgtaacaccttcagatagttcctcgtgagatgatcaattatcatccctcttgaaagtcttagcttgccatatagctgtctaggcgtttcatataagtagacctctttctcttcagaactattatggtttgatgaattagaattattttcagacgaaggtgaagggataatatgcatgatccttcccggaggataaagatgtgtatccaatttgtctttggtatcaacaacctgatcattgatctcttcttcagtgatgtctttggtcttggctccttctttttcctgagcattaattttagggttatcatcctgtgcctctagttcaagctccttcaattcattcaacagatcattttcagagatatcacaggcagtgtgagtagtaacgttctgagcggcagatatgatttgttcctcttcatctatatcatcatcattatcagat

SEQ ID NO: 81823 - DNA, 429 bp, Glycine max
  Clone ID: PAT_MRT3847_44903C.1
tgtgtaagccttctaccaaattcttcaaaagtgatctccttatctggcattccaacatcagtggggccagtttcaattcctgggtgcattgctcattgttttggtgttattactgaacatctgtttaaagaggttgacaatctgcttcttggggcctcacaagggctggtcctttctgacccttttcgatgctgtggatctcctaagcttaagaatgtgcctgttcctagtatttctgtagtaccaccacttccattgttgatatcacatgttgttggaggtgatggtgccatcattttgtatgaaggcgaaatttcgtgatgtaggtgatactgcctggctaatgcaggtacttgtccaattgaacaagcccatattttcctggcagaggaaaaccaagattctgtaatttcatatttttctgagact

SEQ ID NO: 81824 - DNA, 368 bp, Glycine max
  Clone ID: PAT_MRT3847_44904C.1
aaaccgtaattacttttaaaaaaagtaccgccgaacctccaccaccatagtaaagtatttattacctacacacggggttcactaaccttccccgtttctgatcaaaatcaaactgcaaaaaccttaaaaccttagtccattacatttgaaaaaaaaaaaaaaaatgtattcgtgtattcctcaccatctttttctgcaccttcactttgcatcttccccaaacccaaaggcgttaaattctcccctacgcaatttgaggatccgtcccgtttcaaccaaagagaatcacataccagctgcttcaatttttctccccgaaggaccttggaccagatttcaggtggagttactgctgccgagggattcaa

SEQ ID NO: 81825 - DNA, 651 bp, Glycine max
  Clone ID: PAT_MRT3847_44905C.1
aaaagctgaaaagctatgcgtttgtgtatatatactgacccatccaaacgcactatacgaaatccaatccgcccacgctctttttcttcttcctttttctgctctctctctctctctctctcagttctcaaattccacacgagacgaggacaaaagaaaacattctagggaagcgtaacccaaaattccattcccagcatttttagagaccaaaacaaaacaaaagaaagcaacaagcttccttgttttccgctcttggtgtcatatcccctaaatgtaattttacacactcgctggttataggaaaaagttgagatagatggcaggtaatagcagctcggaggggttggtcgatgatttcttcgaacagatcttagcagtgcctgaagctgctgctttcagaggagctgctgggttaatgcctctgggcttgaatttggagcaagctggctttctaagacaccaacaccaaattaacgttgacgacgttgttcatgttaatgttgatgatgccaccattcaccaccatcacctcactctccacaataacaccacctcctcatcaccttcttccactgcaccaatcaccgatagggattcgatgcatatgagaggcttattttccgcgtttggacaactccatactcctac

SEQ ID NO: 81826 - DNA, 427 bp, Glycine max
  Clone ID: PAT_MRT3847_44906C.1
attaaccctgaagaaaatcctttcttcccagaaaatttaccaccttcggttgtgccacgttaccccttctcacagtttttgcatcctgcagccgctctgatcaacataaacaatgccatatggaaactgtactttgatgagctgcttccaatgtttgttgcttctggtgatgatggtaactatgcgcaaactgctgctactgatctttcattgttgcaggccatctctagaaggattcattacggaaagtttgttggtgaggctaaattcagagaatctcctcaaggctatgagcctttaattcgtgctaagatccatcccaatttttaatatagcagaaaattgtgcacaaacgtggctcatgcaaccgtaattgaggacaaaggagcattgatgaaattgttaacatatgagagcgttgaagaga

SEQ ID NO: 81827 - DNA, 483 bp, Glycine max
  unsure (1)..(483): unsure at all n locations
  Clone ID: PAT_MRT3847_44907C.1
ccaatataaagaaggcaaaattttcattcgaagctgattaaaaaaaaaatcattcgacatcaatataacacaccccggaaataatatgattatcctccacaggagaagggagggtcgagacaataatctattttcctccctatngctcaactttacacatgtttgaacttttaaacagataaaggccacctataatagcctaccaaactttaaagctctttctgatagatggcaccgttgaaactatttataaagtctttttcagttcactctaccacaaggtcaatcacatgggttttgtctcccatattttcaccagctgctcaactgtttctggattttagaattgtgagatgacctaccacctttgtctttgtaggaatttctggcagcaacagtcttccgtcccttatgagctttcgctatggcgcatcgtctttgcttactcaagttcttaacgagttcagcttcactttgcaatgc

SEQ ID NO: 81828 - DNA, 3185 bp, Glycine max
  Clone ID: PAT_MRT3847_44908C.1
cggtccggaattccatgttcgagccacgcgtccgacggctgcgagaagacgacagaaggggggaagatgagagagataatggtcaaccaagcaacagcatgtgatttgaaagaattggtgcgcaagttcatccccgaaatgattggaaaggagattgagaaggcaacatctagcatctatcctctacagaatgtgttcattcgtaaaggtaagatccttaaagctccaaagtttgatcttggaaaactgatggaggttcatggggattactcttaaaatgaccttgattccttgaatggctaataaccattctcttcactattttaacctagacgaggaagcatttagtgagagtgagagcgatagcaaaaacagcaatatcttcttccttccctaagcctaaaaataaaatatcttgtcattcaattccactcacattcgccatatcgtcttctcccatggccgccaccgatgaatccctccgcaaatccctcgccgagaagcacgccgcagtggaagcccaaggcaacgccgtccgcgccctcaaggccgccaaagccgccaaacccgaaatcgacgccgcaatcgaagccctaaacgcgctgaagctcgaaaaaagctccatcgagcactccctcctcggcggctccgacagccgcgaggccttccgtcagtccgtggtgaacacccttgaacggcgcctcttctacatcccctccttcaagatctaccgcggcgtcgccggcctcttcgactacggccctcccggctgctccgtcaagtccaacgtgctctcgttctggcgccaacacttcgtcctggaagagaacatgctcgaagtcgattgcccctgcgtcactcccgaaatcgttctcaaggcctctgggcacgtggacaaattcaccgatctcatggtcaaagacgagaagaccggcacgtgctaccgcgccgatcacctgctcaaggacttctgcaacgacaagctccagcgtgaccttgcgttgtcttctgataaggttgcggagcttaagcacgtgcttgccatgctggatgatttctctgctgaagagcttggtgccaagattaaggactatgggattgtttctcctgagactaagaactctctctctgatccctaccctttcaatttgatgtttcagacttccattggtccctccggcttcagccctggctttatgagacccgagactgcccagggcattttcgtcaattttaaggatttgtattattacaatggcaacaagcttcctttcgctgctgcgcagattggccaagcgtttaggaatgagatatctccacgacaggggcttctgagagtgcgggagttcacgttggcggagattgagcactttgttgaccctctagataagtctcatcccaagtaccctgaggtagctgacttggagttcttgatgttcccgagggaggagcaaatgtcgggtcagtctgccaagaggattcctcttcgtgatgctgtttccaagggaattgtcaacaatgagacacttggttacttcatcgggagagtgtatctattcttgacgcgtcttggtatagacaaggaccgattgaggtttaggcaacatctcgccaatgagatggcccactatgctgctgactgttgggatgccgagattgagtgctcctatggttggattgagtgtgttggcattgccgatagatctgcatatgatttgcgtgctcactcggataaaagtggtgttccgttagtggctcatgaaaaatttgcagaacctaaggaagtggagaaattggttataactccagtaaagaaagagctgggtctggcattcaaggggaaccagaggatggtggttgaagcacttgaggcaatggctgagaaagaagctttggatatgaaggctgctctggagtcaaaaggggaggtggagtttcaagtgtgtacacttgggaaaaatgtgactattaagaagagtatgctgaccattcaaaaggagataaagaaagagcaccagcgagtttttacaccatctgtgattgaaccatcatttggaattggacgtataatctattgcctctttgagcacacattctacacgaggccaagcaaagctggggatgaacagttaaatgtatttcgtttcccttcacttgtagcccctattaagtgtacagttttcccactggttcagaatcagaagtatgaggaggttgccaaactcatttccaagtcattgactgctgttggaatttcacacaagattgacactacaggtacatcaataggaaaacgatatgcaagaacagatgaacttggcgtgccctttgctatcactgtagattcaacatcatcagtgactattcgggagagggacagcaaggatcaagtgcgtgttgatgtggataaagctgcctctgttgttagggaggtgactgaaggccagaggacatgggaagatgtgtggtcaacttttcctcatcattcctctacatctgcagatgaatgattgagttttattagtcaccatctaggttgacccatcatagttttctgttgcaaaattgtgttttttgagtagcgaatcaaactacagggatattaccagttgtcaactattagatacccatttcttttgtgcaacatatgcagttgtttgtagtcatagatatgttattttgagaaatttctggtttgccaattgcttctccaggttttctcgtgggggttgggtcttactgtctatcctagctgatatcagggggaatccgaagattatttaataaataatgtcttttttgctgtggattttaggctacgtggcttaaccaaaagatgtttgggttccaaggtggacagacctgccgatgaaacattggctgaggaagcccctgaagtagttggggcttgatctggctcataaagcatttttgttattttagaaatcctgtttttcttacaaaaattaattttcagttttgttttaaaatttaaaaacacatttgttgcaaaaaaggatttttgttttgtcaaggttttttggaacccaaactaaacccggtatgaagacgaggcccaaaaaaaaaaaaaaaaaaaaaaaaaaaagcgccgctcgaatcggacgcgtgggcggacgcgtggggaagacgacagaaggggggatagaagtattcaggtcagaggc

SEQ ID NO: 81829 - DNA, 1594 bp, Glycine max
  Clone ID: PAT_MRT3847_44909C.1
ctcacgcgtccggtggtaagaccgacatccgacttctcctccggcatttgctatgagaatgaatgaatgaatgatacaaactaagcgacgactgacgtggtggattgtggaaacgcaaagagcaattgttccgagaatgagcaattaatgaatgaatgatcactgtcgcctcaggcgccgtccttaccctcttttatttctcagccagctctctctttcctccgtgcgcttttcggctcgccctccgtctccgcctccgtccgcccctccctccaaatcgaccgaccccccgacggcgctccgggcgctaccgcaattccctgctgcaccgtcgacgccaagtcggccgtcgatggcacctggaaaaccctgagaccaggtgtattggtttctcgcgagtccggcgataaaggtgttattcttcaaagaactcaaacgtgtatatacaatgactggaaaggcttattgggatggacttctgatcttcgagccatatgtgcaagatcttggagacagcaagagtctacatctttaaggaaggtgccttttcttctaactgatgttggacggcggccaaatgctgagtatgttgttgtaaacatggatggctcaagacatcctttacctttgacaacagtctatcataaattgcaaccaataactgcttctccttatacttttttgcaagcactttttgggcatgaatatccggttggactactagatgaagagaaaattcttccattggggaaggatatcactgctgttggcctttgcagtttaaaaaatggaattgctgaaattaagtcgtgcaaatatctaccatattttctgtctgacttgagtaaagatcagatgatagtggatctttccatcaagacaaaaatactgttttggggtggtattgctcttggttcaatgtcagttggggtacttggctatgcagttttgaggaactggattaagtggaaacggtggaaggtacagaggcagctccagcaacaaaggcaagcggtgagtgatgctgaacctcaggtggatgatgagattgaagatgttccagatggacaattatgtgtgatatgtctgatgaggagaaggcgttctgtcttcattccctgtgggcatcttgtgtgttgccaagggtgtgccatatcagttgaacgtgaagttgcacccaaatgtcctgtttgtcgtcaggagattcgagattcagtgcggacttatgaatcttgaacagacacagactgatttttctgttcactctgcggcaggaaacttttatgactgctattgagaagagtgtttgttttttactatttctataagatctggaatatggagttttagggaaaacttgcctctgctcttgtttcctgtgaacttattactttatctggtgtagatatttgaacttggtttagataggttggtcgaggttaattcgtagtctcctcacttctcactctgcaaggtcttttggggaaccttgtaggattttccaattatcccagttgctgtgtacataaacatttaattttgcctaacacctatagaatgaacactgatatgttcttgtgcagttgtgcaagtc

SEQ ID NO: 81830 - DNA, 399 bp, Glycine max
  Clone ID: PAT_MRT3847_4490C.1
aaaaaaaaaaaaaaaaaaaaaaaaaaaaaaaataaaaaaaaaaaaaaaaaaaaataaaaaaaagaaaaaataaaaaaaaatgaaatcaaaaaacaaaaatattatattatattacaataaacttaattaactgtccttatcttcaaattttacttactgtaattcccctacccttacctaatttaatcccctttaaaaacatctaacttttaccaaatcacgttttatccaattggtccactcctatcgaatttcccttcacttaaatatactgaatttcaaattggaccctccctttaacgattcattaaacttgttgtgtattgttttttaactcaacttaaccttttcacttgccatagccctaacgtccacttcttttatttcacttatttcctt

SEQ ID NO: 81831 - DNA, 357 bp, Glycine max
  Clone ID: PAT_MRT3847_44910C.1
gattgatgctagcagggaagaaaagataggacatttaaggaaatttccattattgagaggctgttgagtcactgtaagaatgtttctcttgttagtactgtgaattcctttagcttgtgctcccacaaaagttgaagcacccttcgatctgtgtggcattgcccttcaccaatttgagaacaactaaacactttataatttctactgtcacagacaaggccaaaatggaaaggagtctcaaaataaaagcagcaaaaaaaagtagaagcaatgacatggcatatgcaatttcagcaactcagagagagagagagagagagaaagagagagagagagagatgaacaggccatgtagaa

SEQ ID NO: 81832 - DNA, 248 bp, Glycine max
  Clone ID: PAT_MRT3847_44911C.1
acaaaaaatagaacataaattacgaacttgagttgggatgtgtaaacagtgtatttacaataaatattatacaagacatgatccttactactatatgtagaattgcaccagactggaagtgaaatatttaatatagatgaggacatcatctatattatttcgctccttcactgggattacccactactacttattaccatcaaccccttttcatcaagcctggaatatccaatgacttcaagaggctg

SEQ ID NO: 81833 - DNA, 295 bp, Glycine max
  unsure (1)..(295): unsure at all n locations
  Clone ID: PAT_MRT3847_44912C.1
gataatgtcaaggccaagatcnatgacanggagggtatcccgccagatcancagaggttgatatttgctggtaaacaacttgaggatngaagaacccggnctgatnacaatattcagaaggagtctaccttacacttggttcntcgtttaagaggtggcangcagnttttcgtcaaacttntacnggaaagaccatcnccttggaggtggaganttcanatnccananacaatttgaaagccaagnttcangagnaggngggtagccccccagnccagcngaggcttatctttgt

SEQ ID NO: 81834 - DNA, 944 bp, Glycine max
  Clone ID: PAT_MRT3847_44913C.1
ggctcgctggccatctgcggggggcgctgttttacatcacaaaagataaaaacagagaaagaaagattatttaggaacaagaaggtgtgcgcgcgcgaaccatccataacagaaacaacaatggcttccatgagtatattcaccaccatttccctcgccgccgacgcccggaatccggccatctattttccccggcggcggcagcccaacacggtcattttcgccgccgcctcatcgccggaatctcctccagaaatagagctcgagttcatcgggccaaaaccgggaagtgatggatcgtacccggtggagagagtgaaagcaataagcggagagaagctgttgaggaacatcatgttggataacaagatcgagctttatgccacctatgggaagctgatgaactgcgcgggaggtggtagctgcggaacatgcatagtagagattattgaaggaaaggatcttttaaatgaaagaacaaacactgaactcagatatcttagtaagaaacccgaatcttggaggctggcttgtcaaactattgttggaaacaaagaaaactctggcaaggttgctgttcaaaggattcctcagtggaagaagtagtaaaccatggatgcttagaaagaagagctccatatgttcctcctcaatttgacacagtttgaagcaacactacaaatcattgatccatgcatcataaatttatgaaaacttttgctttggttcttaatggaatcttgcagatatctgtaatgtataatttcccttcatgttttgtaatggttgccacttggcttcaattctttaggttagggtacaaatctttggagtatacattatcaaagcaattttgaatttgtttacatcatcaatgcatgatacattatcaaagaaactctattagagtgcaaatgacacattatctttgatgtgcaattccc

SEQ ID NO: 81835 - DNA, 322 bp, Glycine max
  Clone ID: PAT_MRT3847_44914C.1
ttccattctctttttggcctacaccttagaaccctggattggcattgctgcttcagcatcaaatgcattgcttgtcacctcaggccagaagctgagaacaggtgtcaagtcattactattgtgctcagtgatcagaggcaaaggtggaggcctaacagtaactagcaggggtaacaacacatgccccctctttgtggtgcaagagaatctagaatatgtagatggcgccccgagtaccttgtcaccctacaatgccaaaagtggtgtctaactatcctctaccgatcttaacatctagtcttatgggaataccaccacttgt

SEQ ID NO: 81836 - DNA, 1448 bp, Glycine max
  Clone ID: PAT_MRT3847_44915C.1
gatctcacgtaatacattttctcatatatatctcacatggctattctttacacattaaattccatatggcaaacctaaagacacaccttgtccttaatatgaaggatgttgtgatagttaaaccctccaagcccacaccatctgaacttctttctttgtccaccattgacagtgatccagttctcaacattctgtgtcaaaccatttacgtctacaaagcaaatcttgattccccaaatgatcaactagaccctgtaaatgtgataaaagaagctctctcaaaggccttggtttactattatccacttgctgggaagatagtaacatttgatgatggaaaacttggaatcaactgcaatgctgatggagttccattcttggaggcaactgctgactgtgaactctcttctcttcactaccttgaagggattgatgttccaactgcacagaaactggtgtttgataaccctaattctcaagatgaagctagtgatcaccctttggtttttaaggtgaccaagtttctctgtgggggttgcacccttggaatgggcttgtcacacagtgtttgtgatgggtttggtgcatctcagttcttcagagccttggctgaacttgcatgtggaaaaagtgagccctcagtgaaacctgtgtgggagagggagagactaatggggacacttcttaaggagccactccaatttcctatagatgaggcttcaagggcagtttcaccattttggccaaccaaggagatttcacatgaatgctttaacttaaacggtaagagcatacaaagactcaaaatggaactgatgaaggaaagtgatgatgtaaaggaaagcttcacaactgttgaagcacttggtgcctatgtttggaggtcaagggctagagctttggaattgagctctgatgggaaaactatgctgtgtttagcagtaggggtgaggcacctattggatccacctttgcctgaagggtattatgggaatgcctttgtgggttcaaatgtggtgctgacagtgaaagaacttgatgaaaacccactctcagaggttgtgaagctcatcaaagagagcaaaaagcttccttctagtaatgagtacatcagaaacactataaacatgttggagacaatgagacaaaggaacattagggttgaaggaacatgtgcatctgtggtgttaacagattggaggcagctgagtttgatggaagaagtggattttggatggaaggcttcagtgaatatagtaccagttccatggaacattttagggtatgtggacttgtgccttttcttgcctcctagtaacttggatccttcaatgaaaggaggagttagggtctttgtttccctccccaaagcttccatgccaaagttcagggaggagatggaggccctcaagcttatgagaggtgatgagggtagcacccagcaataa

SEQ ID NO: 81837 - DNA, 258 bp, Glycine max
  unsure (1)..(258): unsure at all n locations
  Clone ID: PAT_MRT3847_44916C.1
tacggctgcgagaagacgacagaagggggtgtgattgtttagtcgttgtcactcgttcttcttcttttgttcgtctgagtttgtagttgttttatctctcacctgataatgccttgctagccgtggtatctgtggctgccgattctcctgccagggctggaacgtctgctggcgctgctagatgtacccanacttgancctcacttgaccaaccaccaccgacaccttggtcattgtagcggcccctgttaaagctca

SEQ ID NO: 81838 - DNA, 263 bp, Glycine max
  Clone ID: PAT_MRT3847_44917C.1
ggaattcggtcgattcgagcgaatcggctcgagcttaccacccaaggatacaaatattatttggatattgattggtaacccctggttagtatatttagttagtgagtgaagtgggtgatgatgtatataaagaggaagaggggtcatgagggaatcactcattgtgtgggaatttggagagagttggatctttcaaaagtccaggagcgttcacttcattgtctttgccttgtttttgattgtgaaaccaattgggaccagga

SEQ ID NO: 81839 - DNA, 392 bp, Glycine max
  Clone ID: PAT_MRT3847_44918C.1
gcccattccctgtggatcttgttcgggaatttggacgtcagcttttggaatctgtagcatgtctggggattattcttggccttcagtttatttttcatgtttcattcttaagtctcttgcttccaaaacaagccatggcttttcccttggcctgctttctttgtccagggatgcagtgtatcttggctgtgtctgcttatttaacttgtttcttgtactttatcatattcagatatgcatgaattacgcctaatccacactgacctgaagccagaaaatattcttcttgtttcctctgaatatgtaaagctccctagctataaggtctaggatggtcatatccatgtgatttgtggagtgttggatgtttctcattgaactatgctcggggg

SEQ ID NO: 81840 - DNA, 335 bp, Glycine max
  Clone ID: PAT_MRT3847_44919C.1
acgagtcccaataaacaactttctattcttaggtccttaattagggtaatacggacactagttagcatttgctaaagaaatagcatgcccaacagggacaaacaagtctatgacatgctccattaagggagaaaaaacaagggcataaatttcactttgaatgtttggctgatcaacaccctataactaatatatacagatggctctgtgtatgcttttataaaaaacacaagttacaaaaggggaattaaaagttcaaagaataatggaattttcagacatgcgccagcctcccctggagaaacttctaacctttatctacatttactattctg

SEQ ID NO: 81841 - DNA, 1203 bp, Glycine max
  unsure (1)..(1203): unsure at all n locations
  Clone ID: PAT_MRT3847_4491C.1
cacgcgtccggctgtggagtgatgattttgagggcaagggaacattcacccagtatcgttctagactgtcggagtagattaagcttgcttcttcttacaaacccctgatagctgctactaaagtttctgaaaaaattgatacaatcatcaaagatctcttgctttcaccggcaccaactcaagacttagctgtgatggaaagcatgcaatgggctttagagaatgttgtaaatgcagcttttgatggatcaaatgactttaccaagacaaatgctgaagtccagtttgcattatgtagaacgtttgaaggtttacttcaacaatttatttccttaaaatggacggagcctgcacttgttgaagtacttgtgcactatttggatgctatgggcccctttttgaagtatttcccagatgcagttggcagtgttattaataaattatttgaactactaacatctcttcccctctcgagccgattcggctcgaggcataatgcacggcatgcaaggctgcagacctgtacatcatttattcggatagcaaaaactgctgacaaaagcatcttgcctcatatgaagggtattgctgatacaatgggatgtttgcaaagggagggtcgtttgcttcagggagagcataatcttttaggtgaagcttttcttgttatggcttcttctgctgggatccaacagcaacaagatgttttaaggtggttactagaacctttgagcattcagtggacacaatcggagtggcaggataaatatttgtcaggtccacacggtttggttcagttgtgctcagatgcgcctgttatgtggtcaatttttcatacattgacattctttgagagggcacttaagaggagtggattgaagaaagccaattggaattcagaaaacagctcaacaccaaactcaactcctttaaatccaatggcctctcacatatcatggatggtgactcctctcttgaaactactgcgctgtatacattccctttggtctccatctgtaagtcaagctttacctggtgaggtcagagctgcaatggtcatgggtgatgttgagaaggttcagtcttcttggagaagggaactctaaattaccaaagggtgtcacagatggatctaaggttgacatgaataaagaangatatgctgaacccatgaatcagatatacganactggtttaaggcat

SEQ ID NO: 81842 - DNA, 250 bp, Glycine max
  Clone ID: PAT_MRT3847_44920C.1
gctgcgagaagacgacagaaggaagaataatggtggatattacaaatcccccccctcaacatgaccaagtcattctattacctcaaaatcaaaaggaagaatgatgattgatattatagattatcttccaacataatcaagtcatcctgttacctcaaaatcacaaggaagaatgatgatgaatattgaagattatctccccccaccccccgttgaaaaaaaaaactgctccaagtcatctcattatctc

SEQ ID NO: 81843 - DNA, 831 bp, Glycine max
  Clone ID: PAT_MRT3847_44921C.1
tgatggttaagctttgatagtttcatggattgatgattgtagcttttgccaagtggccttgtgttttgggatttccattctttttctcgatcttcaactcatggctcttcactccaagtttcttttaggttcaattggcttcggagaaggaatatgtgtttcttggtctcctttcttgatttctcgtctttggcttcagttttgattctcgaatttggcctattgcaagggattctcgatttcctcttcttttttctttccctttacgaaccgtagctaccatcttttcctctgattttttgccaatttgagtcgcgattcgtgaaaccaccaccaccaatcaattcctctccgcgtccgcaacaaaatccctaaacatttgtcaccgccgtcacaccagtgatctctggcgaccgtgctccatcatgacaacgattttcaaccgccgttgtgtctagatgcttacgatgctgttccattggagcgagtgtcatggagatgccgaaagaagttctaaaggccttgtagttggttgaagacatctaggaattatgcacttcagtcgcaccatttctcaccttggtcgcaccatttctctccattgttttcttgcttatcaaccttgtattttctggtttcattatcatttgatattttgatgtaactttgtattgtcctctccaagctgcaagtgttgtgaatatacttcacttccagcttacgggaatattagagatgtagatagtctggccatataaatcacaccacatactattgtaactcgatttactcattttgagtaatgtcctaataatacgcacttttaccttt

SEQ ID NO: 81844 - DNA, 333 bp, Glycine max
  unsure (1)..(333): unsure at all n locations
  Clone ID: PAT_MRT3847_44922C.1
ctggctcatcttattaattacagatacccacgtctttattacagtttaaatcttctagcttctgataacccgattattgcatgcatcttgaagattctgcagtaagagtaagcacgctttcagttggagaaaaatactactataacggcgtagaacaatttgtatccaactgaaagcgtgcttactcttactgcagaatcttcaagatgcattgaataatcacgctatcagttggatacaaattgttctacgccgttatagtagtatatctctcttattntttcttggggacctcgaatatttatcgagagaactcttgtagatgcagtctca

SEQ ID NO: 81845 - DNA, 422 bp, Glycine max
  Clone ID: PAT_MRT3847_44923C.1
tccgttccaaggaaggtttcccgtcatcactgtatgacgtcctccttctttgggggggggggggggggtgggggggggggaagttataaaacaaatggcggagggcagaggcctaagtgataggcaatggcggtaggaggtggggttggacaaaaaaggatggggggttcccaacatgggccaaacgtgtgttatggttataattggaagtgcaaaatttaaagctaatggcatagcaagttacgttaaacaatggaaagtggggcccgaaaggttagcgaggggcccagcgaacctatattagataatgtcgaaattggccaagttacatttggccattctaattgtaaatgtgggtgagcgttgtgagggtttattgccaggggcgcgttaatagcagtattagcagcgcaattatattg

SEQ ID NO: 81846 - DNA, 403 bp, Glycine max
  Clone ID: PAT_MRT3847_44924C.1
gatgtatgttgcacgctgccctcagcttgggctcggaatcgagcatagaggaaaaccctactctatattttattaggccgctcagatagacaaataacgggaggtggtggcgaactgaagggaaccgtgcgcgcccacacgaaggttgtggctgcatttgctcctcagatcttccgaccgtgaatgagcttcttggccaaaatccagctttagattattcgctggcacttttccatgggggacacgctcttcggtgtgcgacgactgcgcttccacagatattgtgacttacggctcgacagatgctactcactcatcaatcagaggagcttattggggtcttgcgactgcaagatccggatctgactgctttcgtctatgaaaggacacttccgcataggag

SEQ ID NO: 81847 - DNA, 957 bp, Glycine max
  Clone ID: PAT_MRT3847_44925C.1
gggctcttccaagcttgatgctgttgattccagcatggtcgaacgagatgccaccattcaagcaattcgaaagaaacttttgaaagcacaagagcgaatgaagaggtacgctgacaagaaacgcagagaggtgactttcaattgtggtgagtgggccctggtcaaattccgaccacaccggcagacatcggccaagggagctcagcgtacccccggcaaactatccaaacgcttttatggtccatttcagatactagagaggatcggaccagtagcatatcggttgcaattgccggaagggatgcacattcatcctgtatttcatatttcttccttgaagcagtttaagggaccaccggacaacgtggaagcaattgaattgccggacaactttgatggctaccaaccactaatctcacccatggccatcttgaaccctcgtagaaaggattctacttcgaatgctccctgggaggtgttggtgtagtggagcgggttatctcccgacgaaacatcatgggaggattggtcccaactctgccaggaatttcaccttgaggacaaggtgactctgcaagggccaagggatgatacagaggcaggggtagaaaaggaagaagaaacagcaatagagaaccaagaggcaaacatggaagcaggggtaagcatagcaggaaccatagcagatcagcccaagggaaccaagaggaaaattactaagcccaattaccttggtgattacgtttagaagaatcagagccagccaaggaatgcttcgtgaatcttgcttgaaggattggagctgtcgaccttagggggagcagtgcaccaattctgttaggattgttaggataaaattccttagggggcccacagtagctcaatttagttattttcatccattataaataccatgtactcaataacaagcaagatcaatgagaattattcagcttt

SEQ ID NO: 81848 - DNA, 493 bp, Glycine max
  Clone ID: PAT_MRT3847_44926C.1
cacagattatgggttattgcacacaggaaatactcaggtacatgtatacccaattggactcgaagtctagcgagagttccaggcactcagatgagtgatcctggaacgttgactgaacatcatcatgactgaccggttttatcagacctaacaagaggctgcgccttaccaatgcagatgatgccactgaagcagccgatttgcctgaccttaaaacagaaattgtggataacagtaagaatattaccaaattcaatactcgtaaacagttctaggaaactgattgggcacacatacatgtcatcgaccattaatgggacaaatgagcatgcttgacaccatttacttgtatgctccctagccgagggcctctctcatgacagtgggatgagaggttgctggcccagagcttctgtcattaagaatactaaagatagagccaaggtgcaatatcaagatattcaggatgctgtcgatgaacccaagaagcttg

SEQ ID NO: 81849 - DNA, 1138 bp, Glycine max
  Clone ID: PAT_MRT3847_44927C.1
ggctcgagtgatgatccttctcttccactaacttttccttcaagaacatcatcaaattgacagcaagcaaagaaaagcatgtttaagaagttaccttcatttatatcctccttttttaactccatgtcagattttggatctagcttaataaagacaagaatgattgtagatgacaaaacacccataaggtctggatatgaaggaactgagtctatgcctttcaccttgtcaaacatatcattatctattgacaatatcaaagcaatcaagtccaagcttggagtgacaataaatgatgtgattactggcttgattttctatgggattcgattgtacatgcaagagattgaccgcatggctagaaaagcaaattccacatgtgtggtaatgcttaacacaagaaatgttagagggtaccaatcagtgaaggagatgcaaaaatcaaaagtcaaaggtctttgggggaataaaatttctttcttacaagtaccaattccaaagctaggccaatccaaaatctccaaccctcttgagtttatttggaatgctcgtaaacaaatcaagaagaagagacgttctttcagtgtttatctcataggtctgctcttggatttggagatgaaaataagaggccctgaggctgttgctaaaatcatctacaagactctgcgaaactctagtgttgttatatccaacctttttgggccaatggaacaaatgactttggcaaatcatccaataagtggtctgtatttcaccatgactggtggacctgagaatgtagacataacaattatgagctatgtgaaagtaataagaatcaccttgagaacactaaagggattcgttgatgaacagaaattcaagttttgcatagagaaagcctatgatgtcatgttcaaagctgctatggagatctctgagacacccaacaaaaattaattggggcatatatgcagatcttgatcatatgcattgcatgggcaaataacagaatatcaatcattccagaaagagtcacacgtacattatttcaaattaaaaccatatagctgattaattattgtatcttagttttacaaaaatatgaatattgttctttaaggcaatgaagatatagaaatccggtggaactatt

SEQ ID NO: 81850 - DNA, 2192 bp, Glycine max
  Clone ID: PAT_MRT3847_44928C.1
aggtaaggcgtagcttattgatggttttttatgggttttttttcccccccatttggggtgtttgagacaaagacaaaagacaagaacaagaagcaccgaacagaacagaacagaacacaacacaagttgcttgaaccttacacgtcaccatcgttgcgtgttgagtgttgagagatgggaaattcgttcggatgttcggcctccggcgaaaggctggtgtcggcggcgagggacggcgacttggtggaagcgaagatgcttctgaactgcaacccgtgtctcgccaaattgtggcattgttgctggagaatggagctgatgtgaattccagaaattattgtggccagaccgcattgatgcaagcttgtagatatgggcattgggaggttgcacagacacttttactcttcagatgcaatgttataagagctgattatcttagtgggaggaccacttttcactttgcagctgtgcatggtcatgtaagcagtattagacttgttgtggctgactttgtaccaagtgcactttatcaagctatacatgctggcacagatgttgacaggggtggtggatcaaatgcgaaagggaaacatgagcaaagtgccctgtccaagtttataaataaaaccgctgatggaggtatcactgcccttcatatggctgcactaaatgggtactttgattgtgtacaactgctgcttgatcttaatgcaaatgtgaatgctgtgacttatcattatggaacatcaatggatttaataggggctggaagtactccattgcattatggtgcttgtggaggcaatttaaaatgttgtcagatccttgttgcacacggtgcaagtcggctggctttaaattgcaatgggtggcttcctcttgatattgctaggatgtgggggcgtcattggcttgaacaattgctggcacccagttctgatgccacaatgcctacattctctcattcaaattacttgtccttgccccttatgagtgtgctcaacatagctagagagtatggattgcaatcatctacagcctcctctgatgagattgacttttgtgctgtatgcctggagaggccatgttcagtggctgcagaaggatgtgggcatgagctttgtgtaagatgtgcactctatctttgctcaacaaacaatgtttcttctgaaatggttggccctcctggctctatcccttgccccctatgtagacatggagttgtctcttttgttaagttgccaggttcccaagcaaaagaaaataaactacatgtgtctcttggcctgtgtaccccatgcatgctacatccacgtgacctagacaagccatccctttctcatacaccagaggttggaagaaatcgtgtagcttctgttccttcggagatactctgccccgtcacttgtagtccatttccatctatggcaattcccttatgtacctgcaatgatggtccatgtccatcatttgaacccagagaagtagaaacacaggatggattacctcatcactctcaagcatcaacagtggatcaggataaaattgaagggccaagactagataaaacaacctgctctagcatgttttggggtagaagaagttgcagcagggagcaccaatgcaattcagaaataaatgcttgactcgcaccatgcttgtacgacacatacaagtgtcgtggatactgggtacactatagatcaacaggatcagtccacaattttcttattaaccagcctcaaatagtgaaactcgggatctctctagaagagaaaaaactgctctgcagatcctcttggctgctcaggttgtatggtaggtgatagacacaattctggcgtttcagcaacacaaccaccctctggatatgtcctttttctgatatttagggagcgtgtgtgaaattagtttcagtttcgtgagatttttattgtgatttattgtaattggatttcattttatccaggaaagtgtcttctttaaggggaaaagaatatcgtatgctttttataacatgtatgaagttaggggcatctgtatattatgcttgtcataaattttataggtttacaaagcacaaatttggggactgaaactagctgatatagttataaatacttgttttttgtggatgatgaggtcgagaccaattatgtcacggctgctgcctcggatgatctgggtat

SEQ ID NO: 81851 - DNA, 1985 bp, Glycine max
  Clone ID: PAT_MRT3847_44929C.1
ttttcgtccgaaaacaaaaggtaagaacaagaagcacagaacacaggttgcttgaaccttacacgtcagcatcgttccgtgtggagtgttgagagatggggaattcgttcggatgttcggcctccggcgagaggcttgtgtcggcggcgagggacggcgacttggtggaagcgcagatgcttctgaactgcaacccgtgtctcgccaagtattctactttcggtggcctcaattcccctctccattttgcagctgccaaaggccacaacgagattgtggcattgttgctggagaatggagctgatgtgaattccagaaattattgtggccagacggcgttgatgcaagcttgtagatatgggcattgggaggttgtacaaacacttctactcttcagatgcaatgttatgagagctgattatcttagtgggaggacagctcttcactttgcagctgtgcatgggcatgtaagatgtattagacttgttgtggctgactttgtaccaagtgcactttatcaagctatacatgctggcacagatgttgacaggggtggtggatcaaatgcgaaagggaaacatgagcaaagtgccctgtccaagtttataaataaaaccgctgatggaggtatcactgcccttcatatggctgcactaaatgggtactttgattgtgtacaactgctgcttgatcttaatgcaaatgtgaatgctgtgacttatcattatggaacatcaatggatttaataggggctggaagtactccattgcattatggtgcttgtggaggcaatttaaaatgttgtcagatccttgttgcacgaggtgcaagtcgtctggctttaaattgcaatgggtggcttcctcttgatattgctaggatgtgggggcgtcattggcttgaacaattgctggcacccagttctgatgcctcaatacctacattctctcattcaaattacttgtccttgccccttatgagtgtgctcaacatagctagagagtatggattgcaatcatctccaacatcctctgatgagattgacttttgtgctgtatgcctggagaggccgtgttcagtggctgcagaaggatgtgggcatgagctttgtgtaagatgtgcactctatctttgctcaacaaacaatgtttcttctgaaatgcttggccctcctggctctatcccttgccccctatgtagacatggagttgtctcttttgttaagttgccaggttcccaagcaaaagaaaataaattacacgtgtctcttggcctgtgtaccccatgcatattacatccacgtgacctagaccagccatccctttctcatacaccagagattggaagaaatcgtgtagcttctgttccttcggagatacgctgccccgtcacttgcagtccatttccatctatggcaattcccttatgtacctgcaatgatggtccatgtccatcatttgaacctggagaagtagaaacacaagatggatcacctcatcactctcaagcatcaacagtggatcaggataaaatcgaagggccaagactggataaaacaacctgctctagcatgttttggggtagaagaagttgcagcagggagcaccaatgcaattcagaaataaatgcttgactcgtgccatgcttgtacgacacatactcgtgttgtggatactggatacactatatagatcagcaggatcagtccacagttgtcttattaatcagcctcaaatagtggaactcgtgatctctcttgaagagaaaaaactgctcttcggatcctcctcttggctgcacaggctgaatggtaggtgatagacacaattctggcgtttcagcaacacaaccaccctctggatgtcttttttttcctgatatttaaggagcgtgtgtgaaattagtttcgatttcgtgagatttttattgtgattattgtaattggatttcattttatcaaagaaaagttgtcttttttaagggg

SEQ ID NO: 81852 - DNA, 217 bp, Glycine max
  Clone ID: PAT_MRT3847_4492C.1
gtcttcaaatcgcatcctccatgatcttaatgacttgcaaaaagaccccaccacctttttgcagacgctgttccttgatctgacggacttgtttccatcgcaagccaccataatgggtcctcgcgatcgtcctaatgccggaggggttttcctagtccctactcaccttttcgccgataatacataccacacacctcacgactcctttacgacaaag

SEQ ID NO: 81853 - DNA, 725 bp, Glycine max
  Clone ID: PAT_MRT3847_44930C.1
cacgcgtccggcttgttacaccaaaaagttgattagtaaggcgtagcttattgatggttttttatgggttttttttcccccccatttggggtgtttgagacaaagacaaaagacaagaacaagaagcaccgaacagaacagaacagaacacaacacaagttgcttgaaccttacacgtcaccatcgttgcgtgttgagtgttgagagatgggaaattcgttcggatgttcggcctccggcgaaaggctggtgtcggcggcgagggacggcgacttggtggaagcgaagatgcttctgaactgcaacccgtgtctcgccaagtattctactttcggtggcctcaattcccctctccattttgcagctgccaaaggccacaacgagattgtggcattgttgctggagaatggagctgatgtgaattccagaaattattgtggccagaccgcattgatgcaagcttgtagatatgggcattgggaggttgcacagacacttttactcttcagatgcaatgttataagagctgattatcttagtgggaggacagctcttcactttgcagctgtgcatgggcatgtaagatgtattagacttgttgtggctgactttgtaccaagtgcaccttatcaagctatacatgctggcacagctgttgacagggggtggtggatcaaatgtgaaaggcaaacatgagcatagtgccctttccaagtttgtaaata

SEQ ID NO: 81854 - DNA, 805 bp, Glycine max
  unsure (1)..(805): unsure at all n locations
  Clone ID: PAT_MRT3847_44931C.1
cccgcgtccggacaaaacaaaaggtaagaacaagaagcacagaacacaggttgcttgaaccttacacgtcagcatcgttccgtgtggagtgttgagagatggggaattcgttcggatgttcggcctccggcgagaggcttgtgtcggcggcgagggacggcgacttggtggaagcgcagatgcttctgaactgcaacccgtgtctcgccaagtattctactttcggtggcctcaattcccctctccattttgcagctgccaaaggccacaacgaggtccctttatttcactttttatatctaatccaatataatctaatgcaaccctttttacttattcatttatttctgttgggttttctgttagattgtggcattgttgctggagaatggagctgatgtgaattccagaaattattgtggccagacggcgttgatgcaagcttgtagatatgggcattgggaggttgtacaaacacttctactcttcagatgcaatgttatgagagctgattatcttagtgggaggacagctcttcactttgcagctgtgcatgggcatgtaagatgtattagacttgttgtggctgactttgtaccaagtgcactttatcaagctatacatgctggcacagatgttgacaggngtgggtggatcaaatgcgaaagggaaacatgagcaaagtgccctgtccaagtttataatanaccgctgatggaggtatcactgccctttcatatgctgcactaaatgggtactttgattgtgtacaactgctgcttgatcttatgcaaatgtgaatgct

SEQ ID NO: 81855 - DNA, 1543 bp, Glycine max
  Clone ID: PAT_MRT3847_44932C.1
cctgcaatacaatatcatggccatatatgacactattgcaaaacaataaattgtgtttaatttttacaatgcaggcctgtgtgtttgtgaggcttaagcaaagaataacaacatcgcagaaggatgtaaaccgtgattttctacgtctccaaataattaggtgtcatagtgaactaaagttagataaagccttctccaatttcaccaatgattcgtggaaaaaagcttggcacttttactgtgagtttgggactaagggagttatgtttgactatcgtcgtcatggtggtaactgtctaagaggaagtagcctgctagatactgtgtcgttccgctggaatgatttattgagagcagattctttaactttggaaaaggaagttagtcaacaggttaatgttgttacgtcaataaccccaccagttcaagcaccatacttgttgaaatgtgtgcctgatcgagtcactgatgattctggggctatgatatctgatgtgattctgaagatgaatagttatcgtccacaagaaggccgatggttgtctcgcacagttcttgatcatgcagggagagtgtgttttgttattagaattagggtaggaggaggattttggagaagagggggtgaagctccttcagctgtaaaatgggaagataggattatagagatacgcgaaggatcttggtcttatgttgccggttacattggtagagcccctgaaaaggtggtgtccactgcaacaccaaaggaacctactgaacaatgtaaagctgcatggtgcttttcaacaggagatgaacttacaatacaatgggagtcatcacaatcagtgtcaggtctcacctttagtttgctaaatcaaacatctctagagtcatcggtacagttattgagagggaggcagatgcaatatcaagtaaagaaaacaaagtcaaagagaaaaggcgaagacatgaaaatcgagttagaggagaaagagatcgagggagaagaagacgaggagagttttataacagtagtccgtttcacagaagataacccagatggaaaagcaactgctcttctaaattggaggctattggttgttgaagtattgccagaagaagatgcagtactgatgcttctcctttgcctttcaatactcaaaagtgtatcagaaatgaagaaacaagacgtgggaggcttgttggtgaggagaagattaaaagaagcaaggcttggaagtagggattggggttctgtgatacttcatccatcttcatggtcatcatccattgattcaacttatcttcaaccctggcattggaatgctgtggttgtcatgaaatctgatgctgtagatcagctgaaaaggtatccaacattaagtccatcaccagtggaaggtagtgacaagttatacaaacaaggaattttaagttaagcctgtcttcaattttagcaagtactattactatcattaattcccaaaataaaataaaaaattgcttgcttcaagttcacattttttctgttcaaaattctgagccagaaaagtttgtt

SEQ ID NO: 81856 - DNA, 492 bp, Glycine max
  Clone ID: PAT_MRT3847_44933C.1
taagaaaggaattcggctcgagacttatcaggaaaagatataagtgggttcatggaggaaccaacaacattgaggttcagttttcgagaattttacatgggtccagatgtttcaaccgtttctgacaatgcatatgccagcacaaaaattattgccgacaaggaattttcagagtttggttcagagaaaaagcctctggctcaagcacaaacagaggactctgttcaagaagaggtttcagcaccttctacccatatccctcttcactttgagagtgagatgtttggtggatccgattcatccgatgaagattattttctttacaacgaaaactcggtgacatccgattcggagtcagagtcggctagctcaagtggtctgaactggggcaacagcaacaaaatggatgattcaattgtataccagtttctgggtggtaaaaatggtggtgaaggatttcaacctgagattctgaagctaatgatgagagaa

SEQ ID NO: 81857 - DNA, 2168 bp, Glycine max
  Clone ID: PAT_MRT3847_44934C.1
gttgattagtaaggcgtagcttattgatggttttttatgggttttttttcccccccatttggggtgtttgagacaaagacaaaagacaagaacaagaagcaccgaacagaacagaacagaacacaacacaagttgcttgaaccttacacgtcaccatcgttgcgtgttgagtgttgagagatgggaaattcgttcggatgttcggcctccggcgaaaggctggtgtcggcggcgagggacggcgacttggtggaagcgaagatgcttctgaactgcaacccgtgtctcgccaagtattctactttcggtggcctcaattcccctctccattttgcagctgccaaaggccacaacgaggtccctttatttcactttttttacatctaatccaaccctttaatttatttatttttctctgttggttttctgttagattgtggcattgttgctggagaatggagctgatgtgaattccagaaattattgtggccagaccgcattgatgcaagcttgtagatatgggcattgggaggttgcacagacacttttactcttcagatgcaatgttataagagctgattatcttagtgggaggtcagctcttcactttgcagctgtgcatgggcatgtaagatgtattagacttgttgtggctgactttgtaccaagtgcaccttatcaagctatacatgctggcacagctgttgacaggggtggtggatcaaatgtgaaaggcaaacatgagcatagtgcagtgccctttccaagtttgtaaataagactgctgatggaggaatcactgcccttcatatggctgcgttaaatgggtactttgattgtgtacaactgctgcttgatcttaatgcaaatgtgaatgctgtgacatataattatggcacatcaatggatttaataggggctggaagtactccattgcattatgctgcttgtggaggcaatttaaaatgttgtcagatccttgttgcacacggtgcaagtcggctggctttaaattgcaatgggtggcttcctcttgatattgctaggatgtgggggcgtcattggcttgaacaattgctggcacccagttctgatgccacaatgcctacattctctcattcaaattacttgtccttgccccttatgagtgtgctcaacatagctagagagtatggattgcaatcatctacagcctcctctgatgagattgacttttgtgctgtatgcctggagaggccatgttcagtggctgcagaaggatgtgtgggcatgagctttgtgtaagatgtgcactctatctttgctcaacaaacaatgtttcttctgaaatggttggccctcctggctctatcccttgccccctatgtagacatggagttgtctcttttgttaagttgccaggttcccaagcaaaagaaaataaactacatgtgtctcttggcctgtgtaccccatgcatgctacatccacgtgacctagacaagccatccctttctcatacaccagaggttggaagaaatcgtgtagcttctgttccttcggagatactctgccccgtcacttgtagtccatttccatctatggcaattcccttatgtacctgcaatgatggtccatgtccatcatttgaacccagagaagtagaaacacaggatggattacctcatcactctcaagcatcaacagtggatcaggataaaattgaagggccaagactagataaaacaacctgctctagcatgttttggggtagaagaagttgcagcagggagcaccaatgcaattcagaaataaatgcttgactcgcaccatgcttgtacgacacatacaagtgtcgtggatactgggtacactatagatcaacaggatcagtccacaattttcttattaaccagcctcaaatagtgaaactcgggatctctctagaagagaaaaaactgctctgcagatcctcttggctgctcaggttgtatggtaggtgatagacacaattctggcgtttcagcaacacaaccaccctctggatatgtcctttttctgatatttagggagcgtgtgtgaaattagtttcagtttcgtgagatttttattgtgatttattgtaattggatttcattttatccaggaaagtgtcttctttaaggggaaaagaatatcgtatgcttttt

SEQ ID NO: 81858 - DNA, 329 bp, Glycine max
  unsure (1)..(329): unsure at all n locations
  Clone ID: PAT_MRT3847_44935C.1
atagagaataaaaaaaaatatctccgaaagaaaaataaagaaagagataaagaagttaagnggtaacaaaaacaaaannananananaacagggggagaataaaataaaactgatagactgagataacantactctcnaatatanaaaagatanttccaagctccaattcccaaaaaaaaattaaaactntgcttcttcactttttctcttaccccttctgatctcatacaatttcccctcatagatccctttgatttgattcgcaaaaggtttggctgaacctatctggaatatttctattacagtttttaaaatctatctatatttt

SEQ ID NO: 81859 - DNA, 282 bp, Glycine max
  Clone ID: PAT_MRT3847_44936C.1
ggcagcattcaatgagaaggacaccgcctactctgggtcggcgactttcacctacgaggccttcatgctgaccgtgctgcctttcctcattgcgtagtggcagtccactccgccgctcaaaacaagctttataagcttttccaatagtactgtaatattatgcctgctgtaaagagatttatgttcgcagagttgtttttagacgagttgttttgattctggatttaacttgtgttgtgaatcataaagttgctctgaaatggagaatgtacctgttggttg

SEQ ID NO: 81860 - DNA, 288 bp, Glycine max
  Clone ID: PAT_MRT3847_44937C.1
gatattacatcacattgaagttggagaacttggacttggacactaaaacagaaataactagaccacaacccatcatactgaaaaagaacctcacatgattagagaccaaccaagctcactatgaaaaggtttaacactccgcatatcacaaaaaagtatggatgtacattcgaacacaaagactagcgaaaacacatcaataaaaatataaggctgagtaaggggatagagaaggcccttaaattaatatgtatcaagcactaattaaaccacggcggctaaatatag

SEQ ID NO: 81861 - DNA, 317 bp, Glycine max
  Clone ID: PAT_MRT3847_44938C.1
gtagaaaaaacaaatggggggccggataatatacaacaatcacatgtaattcgacagaatgcacatactcaatcacatgtcgtcaggtttggtgtaagctaatccaacgcgggcaaaagataaactcctttcccaccaacagatgctcaatcaggttggatcaactgtaatacaaccttcaaatggatcactagggccgaactcaagcttcagttcatccatttatgaggatttacaagccaatcaataaccgtttcaatgtggacggaggctctacaggagatcatgaagcaacaaacgtatgtaccattgatgca

SEQ ID NO: 81862 - DNA, 1374 bp, Glycine max
  Clone ID: PAT_MRT3847_44939C.1
agggacccgaacctcgttatgtgcgcaccagccgaaagccaagaaaaagctttcgatccctgtaactgcgttcgactgcaccagccgaaagcgaagaaagagctttcgatccctgtaaccgcgttcgacgatttagggttttttttcggagacaatggcggatgaatcggagcacacggcggcgccggcgagcggtgaatcgctgcttgacaagattgccgagaagattcacggccaccacgactcttcctcttcctccgattccgattcggagaaaaaggaaacttcgtcaattaaggaaaaggttttccgcctctttggaagggagaagccagttcactccgtcctcggcggtggaaaacctgctgatgtgctcttgtggaggaacaagaagatatctgctagtgtacttggtgtagccactgctgtttggatcttttttgagttgcttgaatatcacctgcttactctagtttgtcacatttcgattctggtgcttgcagttttgtttttgtggtccaatgcccatacctttattcacaaggcaccgcctcgcatcccaaccgttcatctccctgaagaaccaattcgccaattcgcatctgcattgacaattgaaatcaaccgtggatttgctgccttgcatgctattggttctggaagagatttgaagacatttctcattattattgttgggacgtggattatatcaattgtggggagctggtgcaatttcttgaccttgttctacattgtctttgttttgttgcatacggttcctgtcatctatgacaagtatgaggataagatagaccctctggcagagaaggcactcatcgagttcaagaagcagtatgctgtgtttgacgaaaaggtcttgaataagatcccgaaaggcccattgaaagggaagaagttagcttagtgtttaagcatttgtattctcaagaacaaaaataggaggctccacttgagtcttttctattttctagagcctcgtttcttttaaaccatacaccaagcattgttttggattttcttttaggcgggtgtggtattcatggttttagcttcaagatgtaaccttttgattttgctacaagcatgtcgattttgctgattacattgtttgttagacttgtactcttcaatgggtaattaatttgtaagcaaaaaatatttatgttaattgtcagcatttttcttttctttgataaaaaattgcatggtgagtctacggtgttggtgtgattcatggtattattttaaatcgaggtaaaatgtcatctattgaaggtgatgttatcttcatggtatcctaaatcccaagaaccgaataccatgactcacaagattaataaaatattttattat

SEQ ID NO: 81863 - DNA, 351 bp, Glycine max
  Clone ID: PAT_MRT3847_4493C.1
gtgataagaactaaaattattattttactttacatttcataaaaaatggtggccggtctattcaacattccggaagggaatgaggacacttcaaaaaagcctattaattatagacatctcatttttttttataacacattgcattatagggggggcttgcttgaaagtttatatgccaaccaatttgaacctgaattgattttttctatttctaaagaccagagcgtagttattttgggaataaaatactaaattatattttactatggcacaggggggtgatatatacatttagtattaaatttaattgaagttcttcaacataaatacaatgccttggcttttaaacct

SEQ ID NO: 81864 - DNA, 841 bp, Glycine max
  Clone ID: PAT_MRT3847_44940C.1
gtaactttatgttgatattaaaataaccaccaagcttaattgactacctagtacccctcctccataacgacattccccaccaagatatcctactacactacactaacagtgatgatagcttgtcaccgccagtgtaaaaatagagtggccagctactgtatgcaaaattgctgcatgagaaccacataacactgtcagaactcagagaagcctgagtattggacgaaagagacttgaaaggagggatcaggccgtaaaaacacaattcctatcaggcacggcattattgaagacaactttatttctctttttccaaaggaagaagttgacagcactccataaaatttgcccgcccacagaagaagttttagagaatcccataccttgttgaaaagtgcatgagcattgccaagttttggaagagcaccacattccctttttgattacataaggtcagagttccattcaggcaaaactaattacaagaaatacattcaaattcagctaactataatgggtttaatatatataccactgaccatatatcacttggcatggccacgataagcttttctgttacacttactgaggattgaggacctgatgtcccaaaggaatctgatacatgtgcaatagaatcttacttagtcacatccattgtcacaagccctacaatttctatttcatccaattgaccaatgtcgtggatgagtgtgtacatcaatgttaatgtctattgacatactacccgcactccttggcctctcacgtgcctgtattctcgttggttctactggtcctttgtaagtgctcctacttcttggtggttgtcccctatttt

SEQ ID NO: 81865 - DNA, 333 bp, Glycine max
  Clone ID: PAT_MRT3847_44941C.1
ctcgagccgcttgcatgctattggttctggaagagatttgaagacatttctcattattattgttgggacgtggattatatcaattgtggggagctggtgcaatttcttgaccttgttctacattggtaagaacaactattctcgttttatttataataatgttttgatagttatgaatatgaactatgcaatttactgatttccataatcttcatttgcagtctttgttttgttgcatacggttcctgtcatctatgacaagtatgaggataagatagaccctctggcagagaaggcactcatcgagttcaagaagcagtatgctgtgtttga

SEQ ID NO: 81866 - DNA, 682 bp, Glycine max
  Clone ID: PAT_MRT3847_44942C.1
caacggcacagcaggtggtggaagcatcagtgccaatgacaagaaagcagtgtacaggcacattgtccgtacggcgagaagacgacagaagggaatctcaatgctattattagtgggaaagcaggcttttcttccaacacgccttcttcaattaatccaaacatatcatgtgaaagtaagactccacaagtagaggatatacaagatggttctagtgtgcttcacctggcatgcataattagtgattctgcaatggtagagctgctcctacagtatggtgcagacataaatgctattgattctagagggaggacacctctacattacagcactatgagagggaagaatgcaactgcaagagtgcttattacaaggggggccaatccacttgccgtagacaaagaaggcaacactccttttaagcctgcaacggaacctgacactgcaggcaaagaaactcttgctctaaaccagcaaatcgcatgccctcaaaacttaatagaaaaatgattcatggggtcaccttgtgttcgagatagaaatttggcaagagagcaattgacaatgtgtacaggaccaactttgttttatagagcaatagataatagaagagaagaatggaagatgcgactttttccctaaaagaaaagaaagaaagaaaataaacatttcttataacagt

SEQ ID NO: 81867 - DNA, 361 bp, Glycine max
  Clone ID: PAT_MRT3847_44943C.1
acgggtctcgggctgatgcaggtttttaaaccactcagccactaggaggggggccaagagtgacccctggctaagaggatgcgcaaatgggcctatagccggtgatgcacaacttagggaaacggttcaagcgtgagactcttccacctactggcaatgagacatcactgccgatactgctactatctgacaagggccatgactaggaaagcttattgctaacccatcatgaaggaatatacgaatagggagctggctgaacctataaaacacgtgttatgcagagacctatacaggataaagcgctgcctcaaggaagcaacagcatatgatgcacgcctatatggatagagtgcatgat

SEQ ID NO: 81868 - DNA, 1607 bp, Glycine max
  Clone ID: PAT_MRT3847_44944C.1
catccttttttttttttttttttttggtttttttacaattttttaagctttattatgaactccaatttatttcatccaataaccctgctctctattgtttagtatttgaataaaacaaatgagactgtgagaatcattttctgcagtccaaaaatagaaaagatgaaaaaaaaaacaaataaatttacatttgttacagtctctgctttgtcagcctatttagagaaaactccaggcaggcccagattttattcaggcttttatgacaaagcccaaatttcaattgaggcttgaatttccaggtcctaacttaagggcttgtcttgaactgaacccttttaggcccggcaccaatttaggaatgaagcagaggaagaagctgaacaaaaactggctcaatgtcaatcatggaattaaaactaaatgtgcattgcaacatcatcatcagcttaatccctgcctagaagaaactcaattctgagtctcagctttggagtgccgtttctgagcaagaattttcttagtcttctcaagaacacaaaaaaatattgaacctccaattcctatccacaaaactctaggcccaatacctttaaaaagagcatgacttccttcttctttaactattgttctcacacaatcagaaatgcctttgtaatggttttgtgatccctgaaccatcaatctggtctttactacatcaagaggagttgtaactgctccagttaccgcaccagccactgccccaagcatagcattctctggatcattaggatctctttttgccgctaatttatacccaatacggagctgctcataaatgcataattctatagcatcaaatggtaaatctcgcaataagaaagatccatatcccgcaaaaagacctttaaaaccctcattagcaacaataagacggacagcatctggggctgatttaaattgcccaatctgcatcctttgcttaacaacctcagttggaacacgaacaacagaagaagcaatgcctccaatagcacctgcagcaaaatgagccacggcactgagattttcaggcaatgactttagcaattgctgctttgtgggttcatacacaccaataaaaattgctgaagctggtaagacaccaacaatatttccagccaacccagagtacagacccttcaaaacaattttccctccgtcgcgagcaacctgtagtcgagttttgatggtatcaatggggtataaagctgtttctacaacaacaccagcagcacctccagcaatgcaaccatcatataaaacacgtaaaaagtcaaatggtttttttctctccttgactgatggacaagaagaacttatcttgatccttttgaacagacattttagacttcaatggatctgtacgttacggtttgacattcgttaactacccattattcaatctctcattctagagaaaaggaacagcatgaagaacctttaggcaattgaatctgggtggggacttttggaggttattggcaatgtgcaaagccaaagatcaaagctttatctaacaaaacaaaaactctcagacgcgtgggccagtttcgtgtcctcccatacgagttgcggcgaagtga

SEQ ID NO: 81869 - DNA, 247 bp, Glycine max
  Clone ID: PAT_MRT3847_44945C.1
tacggctgcgagaagacgacagaagggatccttttgttgaatacttctaacaagactttcactcgagataactattctaatttatagacagaatataaaaaatttcataaaaaaattagctctggtaagatataaaacaaaggatacattgtatagaaaaatgaaattaagattgtgaggtattcatcagttattaagattgtgacatataaatgtgtgcctttgttttttttttttctttttaaaa

SEQ ID NO: 81870 - DNA, 352 bp, Glycine max
  Clone ID: PAT_MRT3847_44946C.1
ggctcgagacgcgaccttcgcatcttttacttttaagagggagctaagactaaagggggatgggggtcattggactactcttaggataccaagaattgtatactatcttcatccaagactaaaaggatcaataaaatatgtgttcgactatgctaacacaggaaaacatttttttatttcttctacagaaactatgctgacattattcatgccaccttgatttcatgaaagtggcactaagaaaaagtgccatggctcaaaggacaccctcatatatagttctacataaggctataaggactccccatctacacaaacgaatggaatggatgagactcttattacagatgcc

SEQ ID NO: 81871 - DNA, 307 bp, Glycine max
  unsure (1)..(307): unsure at all n locations
  Clone ID: PAT_MRT3847_44947C.1
ngcatgcncgcgttacgnangcncnncnagtcggntcgagttccnggctaccncgccaaccnccnncanaattnaatnnccgntggcgccncccnctgctggagtgnccaaggataagttggcncnnngtncgtcngtccntgcgngcatttnctcnaagacttcaaggcanaaactnagcnnnaagttcncncnttccacncnttncagnngnnatctgctgaggattagagtaaaccaangntntnccncacgtgantgngccactntgcnnaaggatggtttttaaaggtcgaaaaaaaaaaan

SEQ ID NO: 81872 - DNA, 485 bp, Glycine max
  Clone ID: PAT_MRT3847_44948C.1
cccacgcgtccgcccacgcgtccgacggctgcgagaagacgacagaaggggactgtcgccctctcgttcctcactgtctctgactcactctagtattcacttcgatactcctcatcctaagaattaccatcaagatacactcaatggttctcatagtccatctgcactggaatgccatcatcgctgctctaaatctgccaccgataggtctgatgctgcataactcaatcattgaccaccttctcagtgactttgctgacaatattgccaccaccgatctgggatactttcttgcagggaccacactgcagaatacaggggatggactggtcactcaacatactgatgatgtgctcttccctgtggtttttaatgccatcaccttcaatgttttcacacggtgatatattacatggtgttgtccacaaaggtctgacacatgaaattgtcatgatatgtgatccaattaagaatgactatctctc

SEQ ID NO: 81873 - DNA, 424 bp, Glycine max
  Clone ID: PAT_MRT3847_44949C.1
accactcgttcggacttgcgatcaactacgtcacttgtctcttagacttcttcatcgggcaccttcacctggattacttccttcgataatgaactttgtcaaaatcaaactttgatgttcttgcttgtcttaattacgttctctgtcgtttgacgaatagtattacactattgtctgggaatgctgtcttttcctcttttctgaattccgcttctctgaaaagaagtttatcataaacacggtaggtagaagatgatcatcgcatttattagggtactctttttcactttacatataagattttgatttccgatggttattccccatccgcttctagtttttagctaattatttgctagcttcgagttgctcaagtttaatttttgtcgttttatgtattaatccttttagataacatgattga

SEQ ID NO: 81874 - DNA, 592 bp, Glycine max
  Clone ID: PAT_MRT3847_4494C.1
cacgcgtccggccagtcataccgagtatgatagcgagaaagaaaggaaggaaggaaagatcgaatgctaacttcaaatcattctatgactcattctaacccgccttcttgcccgtcttgttgctcttcttgaactaacccatgtagttaaacacctaaaaagacctctaataggccctaaatgccgaaccaattgccttacccttattcttcacctaacccaccaccaacccggcgtaaaaccatcgttcagaccaacggccgcacctacggaaccctcaaaggaacgcattcgggatcgtactctgtatacgactacgtaaacgaccacattcagggatcccttaactgatgagatagacgaccatatctgcgactctgtgtgctgcttccaggactcctcctaggactattgctcctatcattattcctagatcgattactacagaaacgactccggaacaggcacagcaagggactcaacgagggagaagcagacgccgaagcaggcgattgcggagacgattacgctgacggaggcgctgaaggacgcacagaagatcgaacacatgaacgagcacaatgacgatgtc

SEQ ID NO: 81875 - DNA, 334 bp, Glycine max
  Clone ID: PAT_MRT3847_44950C.1
gggggaaaagaacattggccctttggaattataattattacaagggcccatgacatccggaacaggcccttgaacataaaatcccaagcccccctcagtcaaagaaagatttttttcggggggaggaaaacgggggggaaaactttttatagagatttgagaaaactggttttcccacccaagaaaaccctaaatttttcgggggttttcattcctcaagcaatcgaaatacttgggttttggggctaacttcaattatgcaacccctttttggagattcttcccccgttttttttttcaaaataaagaacccaaaaaatccgagaatttttaa

SEQ ID NO: 81876 - DNA, 376 bp, Glycine max
  Clone ID: PAT_MRT3847_44951C.1
agcggtcgcttttttttttttttttttttttttgtgattacataagcaactatacaaaatggaccggtggttttcaactaaaaacatcaccttatacgctcccgtcgaaatatcagaacggccattaccatatgttattttggtaaatacttaaattaaacacgaccctgtcccttaatcttctggagttttttcatgtaaaacttcaacaacttaccttacaaaatgtctcctataactcttccacattgaccatgattaaaattaatgcattctttcaaacgcgcaccaccaatctgatacttaatgtgtacatcacgctttttatctttttggcactcctccaaaaaattctacacattgttactcttttttg

SEQ ID NO: 81877 - DNA, 1041 bp, Glycine max
  unsure (1)..(1041): unsure at all n locations
  Clone ID: PAT_MRT3847_44952C.1
aagaaatgtcatgaagttgcaaaacaggaccaacaacactcaaacaaattactttttcagcagcttcagtcacattttaatcaacaacagcagcttcatgtttacactttattgtcaagacaacaggttattgacctaagagaggtaacgggtggtgatgaaatgacgattaaattacctttgtgaaaagctaggagtgaaactgcgttggaagaaaaggattgggaatgaatgctgattcaatcattgattccattaaagctgaaaggggcaatcgtaagcccgtttcaacctctctggctcttaaaccaggggtgtcgtcaaagctaaaggcggcgggcattatgaagcgcaagttagtcagaagggcaaaagtggtgaggaaaagcaatgggtccataaatgtgcggagtgccatcaaagtatctgaagaggttaaaataacaaatcaagtgcttcctgatgtacctgtttcagggagcaatcaaaatgacttgacaaattcataaatggatggccatcgttcacccaggagaaagactaagatgccattcaacttgttctgcccgagtgcttttcttggatcatcctatgtcttggatccttggaagattatctgctatatctcttttgacctttttcttaatgaatggtaacttgcaagaaaatgcaagggaaagccttgcgcaaagcaaaggttgctgccttgtaacctagaagtcactggttcgaatcttggaaacgaacaacatctgtgggggcaaggttgtgtacatctactcttcccagacactacttggtgggagcctcatgcactagggtaatctgtaagaaataggtttcaaagttgtggtaaatatattttgtaaaagaatagatcatcttgcaactaaagttggaggatgttggctcttgcatgtacagaggtatcattctctntgacattctctntgacaatgaaggcaccagtcatctactgaagtnttcattcatcaaccttgtggtatgtctttggtggatacagtatctatctgtagtgtt

SEQ ID NO: 81878 - DNA, 433 bp, Glycine max
  Clone ID: PAT_MRT3847_44953C.1
aaaaaaaaaaatccaattttgggccccagggggggggggaaaaacccaccggggggcctgggggggggaaaccctggtttccaaaaaattatcccccccccggggggattccttttaaccccttccccccctttaaaaattccgggatcccggggccccccccccttttaaacaaaaaaagaagggggggggaggccggaccccggttccctcccttttctggggggcccggcttttaaggcgggtgggggaaagcccaatgggccaaaggggggcattgcttccaaacaaagcccctggttgggggggccccaccggccccccaaattttttgtaaacaggggaaatttttttcccccccccccacggggggtttccccttaaaccccaaattgctctccccccccttgggcccgggggtgggggttttttt

SEQ ID NO: 81879 - DNA, 116 bp, Glycine max
  Clone ID: PAT_MRT3847_44954C.1
gggggggttgaaatatatttgctggatagtaaaaagatgtgtcaactacatccgggcttgggctggcataggttgaatgttttccgccaacccggacccgtgggcggacccgtggg

SEQ ID NO: 81880 - DNA, 1508 bp, Glycine max
  Clone ID: PAT_MRT3847_44955C.1
ttttttttttttgagttactgagcagaagtgtatgaatgaatgtaacattaatcaactgagttgaatgaacataagtgcatttggtgaatatttacagtgaaatattcaactatgtgcaatagtcctcaaatagagatgtaccaaaaatgagatagtaaaacctatacactctgattcagtttacaaacaaaaaaaaatataagtcccatccttattcctcaaatgcttagaatctaaaatcacgcatctatatgtaacacaatacaggagactgcagaagaaagataaaccatcaagactatgtccgggtagctatgttgctatatgtaagcaagtgaaatttattgacgacccttcttaagagacaggaagtgggcagcaaaagaatcatagtcgggtaactttggatgaacgtgcccaaccttctgcttagaggaagtatctgcatcatcctcttggccctcttcattatcttgtatcactgttttaagagaactggaaggttgcacccttgcagatgatttcgaaatttccccatccaaggatctattaggttctgaaattggctctgatgctttgtttttggctgatccaggcttagatcctgtcccattttcagagctcttcattatggttgaagcattttgattattactctcataagaagtccttgaagatttccatccgagtgttgtagcaggagtcacagaagccttggataaaggagcatctcttgagcttaaacctgtagcagctttagaagaagctgatgtccttcgagatattccactaacaggacgggcaagactaggtgaattttgtttagtaagttcttcttcagaatcactattatcagaattaaagtaagtaaaagaggcccttgagcttgatttcttttttacttccctttgctctttctgaatgtgaggttcattagttctagcaagagtctcttgtgaatttgcaaccacacgataactatcagaatcagaaggtatgttgtgcgctcccaggcccatattcctgtttcctctgctcacttccctcgtgtacttgtcctgaacaggagcatcagaaccaattgaagtcctcactataggcaaagatctttcattctggaccgaagcatcccccaatgaagatgccgcatccacggaggtattaggtactgaaattggctcggatgctttgtttttggctgatccaggcttagatcctgtcccattttcagagctcttcattatggttgaagcattttgattattactctcatatgaagtccttgaagatttccatccaagtgttgcagcagaagtcacagaagccttggataaaggagcatctcttgagcttaaacctgtagcagctttagaagaagctgatgtccttcgagatattccactaataggacgggcaagactaggtgaattttgtttagtaagttcatcttcagaatcactattatcagaaccgaagtatgtaacagaggcccgtgtattcttaatat

SEQ ID NO: 81881 - DNA, 1232 bp, Glycine max
  Clone ID: PAT_MRT3847_44956C.1
cccgtttaccgacccatactctccgtacctactttgaggccgcaaacagaagggtacggctgcgagaagccgacagaaggatacggctgcgagaagacgacagaaggggagggttttactttagacccgtcgtggagcaaaactttacattttgagaccgcaaaatgtctgaagtgaatgcgacccctgaaattcctcaaagcaacaccatctacatcaacaacctcaacgagaaaattaagattgatgagttgaagaagtctctgaacgctgttttcactcagttcgggaagatacttgaggtgttagctttcaaaaccctaaagcacaaaggtcaagcttgggtggtctttgaagatgcctcttctgcttccaacgccctaaggcaaatgcaaggtttccccttctatgataagcccatgagaatacagtatgcaaagaccaaatctgatataatagcaaaagcagatggtactttcgttcctagggaaaaacgaaagaggcatgatgacaaagccaaaaagcggaaggaccaacatgatgctaatttagctggaatgggcctgaatccagcttatgctggtgcttatggtgcagcacctgctatagcttatccaggcggtgcaaaatctatggtacctgaggctcctgcaccaccaaataatattctctttattcagaatcttcccaatgactcaactcccatgatgctgcaaatgctctttcttcaatatcctggatttaaggaagttagaatggttgaaacaaagccagggattgcctttgtggaatatggagatgaaatgcaatccacagtggctatgcagacgctgcaaggtttcaagataaccccacaaaaccccatgttgataacttatgccaagaaatagacagtggtttcttgaacttatgagaaaggcaggaatcacatcttcaacatggaggttttaatccatctaattcagtggtctatcttaattggtatttattgcttcgtgtatgattgtagttagggataataactttgccatttttatacaaatatgtatttaaaaaaatactgtttcaaatttatctgttacaaaactatttctctttctagaattgtcatttgtcatgcttttgtctcgatgaagatcacctgctatcatttgctggatgaccgctcagtacgtaaatacccgatgtcttcttccttgggcatgtgaaaacaatcatgttggttgtcctct

SEQ ID NO: 81882 - DNA, 1058 bp, Glycine max
  Clone ID: PAT_MRT3847_44957C.1
gtgaatgcgacccctgaaattcctcaaagcaacaccatctacatcaacaacctcaacgagaaaattaagattgatggtacgctatttgtttcgtgtttccgcgacttcaatttccgatggattatacgttttctgagttgtcgtatgttgttggatgcagagttgaagaagtctctgaacgctgttttcactcagttcgggaagatacttgaggtgttagctttcaaaaccctaaagcacaaaggtcaagcttgggtggtctttgaagatgcctcttctgcttccaacgccctaaggcaaatgcaaggtttccccttctatgataagcccatgagaatacagtatgcaaagaccaaatctgatataatagcaaaagcagatggtactttcgttcctagggaaaaacgaaagaggcatgatgacaaagccaaaaagcggaaggaccaacatgatgctaatttagctggaatgggcctgaatccagcttatgctggtgcttatggtgcagcacctgctatagcttatccaggcggtgcaaaatctatggtacctgaggctcctgcaccatccaaataatattctctttattcagaatcttcccaatgactcaactcccatgatgctgcaaatgctctttcttcaatatcctggatttaaggaagttagaatggttgaaacaaagccagggattgcctttgtggaatatggagatgaaatgcaatccccagtggctatgcagacgctgcaaggtttcaagataaccccccaaaaccccatgttgataacttatgccaagaaatagacagtggtttcttgaacttatgagaaaggcaggaatcacatcttcaacatggaggttttaatccatctaattcagtggtctatcttaattggtatttattgcttcgtgtatgattgtagttagggataataactttgccatttttatacaaatatgtatttaaaaaaatactgtttcaaatttatctgttacaaaactatttttttttcaaaaaaaaaaaaaaaaaaaaaaaaaaaaaagcggccgctctagagga

SEQ ID NO: 81883 - DNA, 247 bp, Glycine max
  Clone ID: PAT_MRT3847_44958C.1
gacacggtcccctaccctatccctaactaaacctaaggatggatgggctaaaaatgttcagcaatgtcatccctgagttacttacaacttatgagcacatatgttcagttccgaaatgtaatcagcaatccggaattgtttttaggtacattgtgattccttaatttaatttagccgctctggaaggaacacggggccatcatgaaatttaaagaccaaaaaatatgggggaatttttctaatcact

SEQ ID NO: 81884 - DNA, 343 bp, Glycine max
  Clone ID: PAT_MRT3847_44959C.1
ccgaaaccttttcttctcaccgcagcaacagtcttcttcttcctcttgtttgcggcacagcaatggagccttgtcggtgacggacggcattgagctgcagcggaagagtctgtttccttcacagcgtattctgtgttgccgccaccatgccttcagtgccacggggaaacttctccaatcgccaaacccaattctccgagcggtattctcctaaacccaattagggtttcacaatcacttcaacacgaaaaaaaatacaaacttttcaatatcttcttacgcaggaggcagaagattatacaacagaggaagtctcttccgattacaccagttgagaaaaggc

SEQ ID NO: 81885 - DNA, 236 bp, Glycine max
  Clone ID: PAT_MRT3847_4495C.1
atttctctatcattatgacaatgattcgttcaaacccacgacgcgtttttcacctttctcttcttctcctattcctctattcttcctcaaccgaatccctcagatttctaatccaatccaaccacaccaaatgcatcttccaggatatctacagcaattacatgaccgttatctagtaccaaattgttagccccaactaaagtcaacctctaccagatacccacacattcaccgtc

SEQ ID NO: 81886 - DNA, 452 bp, Glycine max
  Clone ID: PAT_MRT3847_44960C.1
gcagcgggtgccaatggggagaggcggtctctaccaaatgcgacaatcatgattcaccagccttctaggtggttatagtggccacgcaaaggatattgcatttcacaccaagcacattgtgcgggtttgggatactgtaaatgagttgtataccaagcatactgcccaaacagctgaggctattcacacatatatgggcagatataactttatgactccacatgaggccaaagagttggggctcattgatgaggatatagatcatagacctatggctttggtttatgatgctgtatgtaaccaaggcaaacattaaggtttcaattaaaaccagatggagggtaagatgtctttgacgaatccttgctgtatttaaatgctttgactgccaccttaagacttagctgaatgtgctattattgtagcgactgaacataatctttgccagatat

SEQ ID NO: 81887 - DNA, 877 bp, Glycine max
  unsure (1)..(877): unsure at all n locations
  Clone ID: PAT_MRT3847_44961C.1
ggaacatggctacattctttggttcccctccaattttctccctccccctcactagaactcaccacatttcttcatcatcacaaactccaccaccaactcctcctccacaatctcagcctccaacttcgtctccacagcagctaagaacaacaaatttgaatgatgaatcaatgcaagtgtgcactgaagctaagcaacagaagcccatcaaaccatccactaaggttgaatccacagattggatagccacttccttgaccagaaggtttgggataggagctggtcttgcatgggttggctttcttgcatttggtgtcatctcagaacaaatcaagactcgccttgaggtgtctcagcaagaggcaaatacaaggaacgttgagaaggtggaagagtggtgctataagggaaaaattgaaagtagtgaagtgtttgtagtcacatttgagggggacaagaaaccattggctctagtgatggggtcaaggccatatagtaagggagtctgtgaaggtatagaatatgcacttaaaactatgaaggctggaggcaagaggaaggtaatagtccctcctaaattggggtttggagagaatggtgctgacttaagcactggtgtgcaaattcctccacttgcaacacttgaatacattctagaggttgaaaaagtctccattgcacccgcttaatccaatcttgcagggtgctcagcttctatcatctaatataatatcattcatttaattattntctcattcttttcgatgggattgaaagatagtaatatacatttaaactgtcaataattntgtcaggctgacctttaaaggccatgatggggctttgtttaacttctatnttcaaatttagtgcctac

SEQ ID NO: 81888 - DNA, 112 bp, Glycine max
  Clone ID: PAT_MRT3847_44962C.1
gaagtataaggacaatgaaaatttattccccaaaggcatggagtctatgctacccagcaaaaaaacaccgtatgtataatacgtaatcaactccacactagctgggaaaagt

SEQ ID NO: 81889 - DNA, 1186 bp, Glycine max
  Clone ID: PAT_MRT3847_44963C.1
ctttcatcctgaacatggctacattctttggttcccctccaattttctccctccccctcactagaactcaccacatttcttcatcatcacaaactccaccaccaactcctcctccacaatctcagcctccaacttcgtctccacagcagctaagaacaacaaatctgctttctttggttccccaccaattttctcactccaccctactaatacccaaaaacacctcaactctggatcaacacaaacttcgccaacaacaccttcaccacaatctcagcctccaacttcgtctccacagcagctaagaacaacaaatttgaatgaggaatcagtgcaagtgtccactgaagctaagcaacagaagcccatcaaaccagtcacttcatccactaaggttggatccacggattggatagccacttccttgaccagaaggtttgggataggagctggtcttgcatgggttggctttcttgcatttggtgtcatctcagaacaaatcaagactcgccttgagctgtctcagcaagaggcaaatacaaggaacgttgagaaggtggaagaggtggtgcttcctaatggcataaggtactatgagttgaaacttggtggtggcgcttcaccaaggccgggagatttggttgtgattgatatcatgggaaaaattgaaagtagtgaagtgtttgtagacacatttgagggggacaagaaaccattggctctagtgatggggtcaaggccatatagtaagggagtctgtgaaggtatagaatatgcacttaaaactatgaaggctggaggcaagaggaaggtaatagtccctcctaaattggggtttggagagaatggtgctgactttgactcaggcactggtgtgcaaattcctccacttgcaacacttgaatacattctagaggttgaaaaagtctccattgcacccgcttaatccaatcatgcagggtgctcagcttctatcatctaatataatatcattcatttaattattttctcattcttttcgatgggattgaaagatagtaatatacatttaaactgtcaataattttgtcaggctgacctttaaaggccatgatggggctttgtttaacttctaatttcaaatttagtgcctacaaatacaataacacgtgcagtcctcaactttatacattttatttttctgggt

SEQ ID NO: 81890 - DNA, 312 bp, Glycine max
  Clone ID: PAT_MRT3847_44964C.1
aaacccaagggctaatttaaaatttggggggaaaattatggaaaggggagataaaaaacaagttttagacccaagaatccaaacaaccaattttttccttcctccaactcccaaaaaaaacttttataggaaacgtgagatttttccataaaaaaaaaaactgatacaaccttacgggggtgtatatgggttcataaccatttgctgcaggggcggggggagctttaatttggggaaaaaacacaacaagggccccaaaaaagaaggggaaaatggcagggaaaggtaaaaggaaaaccttaaaaaccaatt

SEQ ID NO: 81891 - DNA, 289 bp, Glycine max
  Clone ID: PAT_MRT3847_44965C.1
gagaggagaacgcagttcacagtacagagccagttgtccaggagaatggggacgaagctggggaggggagagaggctaaagattgtgaccccggctctccaaggaggtgttacatcatcatcatctctggccggaaagaaaagtgtgaggctgccaaggaagctctggaggcattggttcctgtcaccattgaagtagaggtgccctttgaccttcaccgttacgttattgggcagaaaggaagtgggatccgcaagatgatggatgagtttgaggtgaacatacatgt

SEQ ID NO: 81892 - DNA, 242 bp, Glycine max
  Clone ID: PAT_MRT3847_44966C.1
gtagtgctaggtcttgaacccgctaaagggtcgtcgaggctggagtgagttgaagtgggagcgtggaaaacagaaaaggggtggtcgtcgcattaaatttgtcaaaaagagaggggttttatcttcttattactttgtgtgtttttatgttttttgtggggcttctgtgaacagtggttgctttttggaagcttattttggaagcaatttactcttccccttttgaacgtgattgtatttag

SEQ ID NO: 81893 - DNA, 194 bp, Glycine max
  Clone ID: PAT_MRT3847_44967C.1
ccactcgttcggtttttttttgtttttgaccgcaataattgatttacattttcgggccagagtcattgtgattataatatgtatatgatgatgatcatgatcaagatgatccctaccgccgagagatcgaatgtgttgtaaaactctggtggatgattgataatagtctgacaggacaatagattcgagaccga

SEQ ID NO: 81894 - DNA, 126 bp, Glycine max
  unsure (1)..(126): unsure at all n locations
  Clone ID: PAT_MRT3847_44968C.1
tgcttttcagagcaagttcagctttctcaaagagcntcgngaaggttcatacatagttgcttggtttgtttagnagtactgctcnatancccncacancagacnanngnaaaataggcancangng

SEQ ID NO: 81895 - DNA, 711 bp, Glycine max
  Clone ID: PAT_MRT3847_44969C.1
gagagccacgcgtccggggagattcgaaaacgctgcggtttcctactctccttaccgtgcacgccggcgtgagatccattccgccaccgatcccacctccaccggcacttcccgcgttcaaatcgattaagctcgtttatttgctgatttctcttccactttcgttctgcagcacagtttccccacactcagcttatgctggtcagacttgtgctgcaagaggttgattgcatctggtgaaggggatactggtggaatgatggatactcacgcagaagattctgctagatctgaggagaattttcctgatgtgactcatcataatgaagatggaagcaacggaaatcttatattggaaaatggtttgtctgatggcaatcaaggtcctgctgatactcatgatcagcttctacaaatggttatggacctcaggtttcagaatgacttcttgaagtcccagtttgagggatttaaaaatgtagacagtgtacatagtgactctaatatacagaaaggagttggtggcttggaagatggggaatctgacattgtgaaagaactaaaggataagatacaattgttaaataaagaatttctggaaaaaaaacaaacaagaattgcatcagaagaggctttgaagcatcttcaaacggcttactcagaggaaaaagcaaaggcccaagagctctctgaaaagcttgcagaagctca

SEQ ID NO: 81896 - DNA, 268 bp, Glycine max
  Clone ID: PAT_MRT3847_4496C.1
cttagctttgattctatgttctctgtgatgatctgtatcgcgtattactctcatacacgaacttgaacaatgacagaatgcatagggcaatggatcagcaatggcttcaacagaatcactgaagcccgttcatgaccgtaatgttggaaagcggaacgcttccggtaagcctgggagaagtagtgcatcaaagaaggataagaaggccaagaaagacgccatcaagcctataagaccatccattgctttctatgtgcaccttgacgag

SEQ ID NO: 81897 - DNA, 1220 bp, Glycine max
  Clone ID: PAT_MRT3847_44970C.1
ccacgcgtccgaaaggtgtgggttccactaagtacaaaatttctctccatattgtttttgtctttcctttcaaacacactcttaaatgtttgtattgccatagcatagggataacttgctaagtactttttgtcacaacattttgacaacatgcataatataagtggtaacctgagaagtgtggtgggactagacctttggctctactcttagtaacagaagaataggaagataatgttgcaacagccaataaaaaagagaaagaaattattaaacatcaacattgaaatgttgctctgaagttacttctcttgatgatactaattttcaacttgatgctaagttttatttcctttgtaacatgcacatctggctgtttgtggctttctcactgaaaagtaatttataatatggatgcatatgagcaatcttagcaggagaatgtagagatgaaaactttatagctgatgataaaacattcaattttaatggaaaatttgaaatctaaacaagagagaaaaatctaaaataattccgaattcaaattttcaattgaaatctttgaccagaatacactagctaagccacgtgcctgcttagcctggtgaatttagcttacattctaatttctataactctgttatgtgacaaacttatgctgttattgtttccaagactcaaaccatgtaaaactatttttacaagctatttggggctttcttgcgaaaacattatttgacatggtgtgttgtactgttgtatgtgtgtgtaaaacacctgcagtagcaggaaatacaaatatttaaatgaaatgtctgagctgtttgtttttgttgaaccaagtccatggttaacccagttatttttatttaaatcctaatttctataacccagttaactcaaggtatcaatcttttgccgaccattattttgccttaaaattagtgtatgttggtgtgttgccagattatttacatcatattactttaccgacacattttcctttatgctgtccaagtgtccaactgttgataactcaaataatgacttatctctggtctttcagtcaaagtaggaaaagaaaactttcaaacgctgtttctttaattacatttaatagaatattttatcaattgtttaatacaaagcatttggattgaatgccattttgattaatctggaacatcctctaatatggttgatagcaaccggacgcgtgg

SEQ ID NO: 81898 - DNA, 669 bp, Glycine max
  Clone ID: PAT_MRT3847_44971C.1
cggacgcgtgggctttgagtcctctggtttctgacaaaaaataaaatctcccctgtttgaccgaaataatttaagagggaattttcagttaattatcactaagtttattgttgtagtgaatattagtgttgcaattgcaaattggatctctggtgctttttttcccctttctttttcctattatgtaggttaagtcttacctcctaagctttagaggagttaactgggaactgtgtttctctcaaacatgattagaaagcttcatctgcaacttacaggcttgaaatagatgttttgggcctctgaagatttgattaattgatatttgttatttttaagatgttttgattaatttattggccacgttctctacctacttgtcattttgaatttaataattcatcggatcctgaatttccaacttgtgggatggacatggacccacatgcctatctgttttggatttgagtgagaaatgagctgtcattaacaaaaaaaatcatgatattcagagatcctttgaatctgaattaacactaagttccatctcatgcatcacgaggtcaaagttacgtatgaagaataacttattatacaattaccagttgatattcctagttgaatggtgctatcacttttaggaggtccctacatcttacgtacatttcc

SEQ ID NO: 81899 - DNA, 343 bp, Glycine max
  Clone ID: PAT_MRT3847_44972C.1
gaaacaggatacaacaaattcttatattaatacttagtcacacacacaaaccagaccagaccctctcgaaaagaactatcaaacaaaagacctctgcatggtacatattcatttccccatgacccactacgagctgctcgtaagattcggcgacggagtgcgtacgtggtcgcggagtacttgaggggtgggcacgagtgggcttccgatcgctgttgggagcctggaggagagaccgtacccgttgggttgagtctccttgcccgcatcctccgcgtgagcggcagcgtcactctcggcgctcttggccgcgttcttacccatctctccctcggcctttttg

SEQ ID NO: 81900 - DNA, 244 bp, Glycine max
  Clone ID: PAT_MRT3847_44973C.1
gaaacatattacatacacaagttatataacttatatataacagtgtgtgcatatatgacagatgtcgatatactactcgtattacatccaaatatcatatatctctgataactgctgatgtacaaacaccaaatttacttggaagttctcatataatatataacccacgtcggatgcaaataatctttctggtgcacccgaaagccacggaggaatcctgggccctgatgacatgaatagccca

SEQ ID NO: 81901 - DNA, 310 bp, Glycine max
  unsure (1)..(310): unsure at all n locations
  Clone ID: PAT_MRT3847_44974C.1
gccgttccgccaacccgtccgccaacccttccgccaacgcgtccgccaacgtgtccgccaacgcgtccgccaacgcgtccgccaacgcgtccgaaaaaaaaaaaaaaaaaaaaaaaaaaaaaaaaaaaaaaaaaaaaaaaaaaaaaaaaaaaaaaaaanaaaaaaaaaaaagaaagaaaaaaaaaaaaataaaaaagaggggcgcttaaattaaattggttgaccgcctcttaaaaaaaaacggaaagggaaaaaacttgggcgtggccaaacaaaaatccccttggggaaggggcgggttttcccaggg

SEQ ID NO: 81902 - DNA, 118 bp, Glycine max
  Clone ID: PAT_MRT3847_44975C.1
gtcatcaccaattccatttcgatttttggctcagccaaccatcacaaatagacactcgatgacgcgaaacaagcaaagtacgaacccagatacgggaacaaggttgttatctctgtta

SEQ ID NO: 81903 - DNA, 1513 bp, Glycine max
  Clone ID: PAT_MRT3847_44976C.1
caccttgccgaccagcttaagaacatgcaaattaacaaccatcccaaaagtggtggtggtggtggaaaccacaacaacaaaggtcagaatcagaaccaacccaaaggtggtggtggtggtggtggtggaaatagccaagccaagggtggtggtggtggtggtcaacaacaaggaccaactcctcaacaacaacttcagctgcagctccaacagcagcaacggcttcagcaacagctgcaacaacttcagcagatgaaagggcttcaagatctgaaccttcctcaattcaaggacctgaaacttccccctcacaatcccaaccccaacgccaaagccgttaagtttgatatcccagaggaagatgacgactacaccgacgacgaattggacgattttgatgacgatgatgacgacttcgacgacgagtttgatgatgatgaaatggacgaccttcctccgagtaaaatgaaaccaccgcccatgatgatggatgctcctcccaaggctgccaacaatggcggtggtggaggcaataacgggagaaaaggaggaggtcctgttcctgttcaagtgcatggaatccccggcaatggaggaggaaagaaaggtggtggtggtggtggtggaaacaatcagaatcaacggagaggtaacaaaaacaacgttggtaaaagtggaggtggtgccccggagggtaaacatggtggtggaggaaacaagaatggtaacggtaacaacaacaacaacaacgggggtaaaaaagtcaatccaatgggtggagttggggttcaacctatgaacggtggattccaaaacatgggtggtggtccccacgttatgtctgggcctaatgtggggcccatgagcatgcctatgcccaacattcccgccgttcaagggcttccggccggccccgtcaacggcggtgggttcttccaaggcgcaggtccggatgcgatgcccggtaaccctttccagcagcagcagcagcagcaacaacaacaacagttacagcaacagtacatggctgctgcgatgatgaaccaacaacgcgcaatgggtaacgacagattccagccaatgatgtacgcgcggccccctcctgccgtcaattatatgtatcctccttacccttatcctcctccagacccttacacccactttttcagcgatgaaaacacctcaagctgcaatgttatgtgatcgatggtggcggtgcgagcttctgatttcagatcttctaatattattattattataccaatgcaaatgagtttttaatttgtagtatcattttccatttttctttcatcccttttattcctcttaagttaaaattaggggttttagttcaccataggggactagtttatagattttataatactatcattattattattactataagattttgagtagtagaggtagtagtagtactgtgataaggtaatatgtctatatgtgtttatatgttgcaaacagaaataaaaaaaattgtttcagaacagtt

SEQ ID NO: 81904 - DNA, 261 bp, Glycine max
  Clone ID: PAT_MRT3847_44977C.1
ttccacgcttgacccacgcttgccagaagacgacaagaagacttcagatagagagcatgaactcgcacatatgggggactcatgagaaactaccaggtgttcttacatacaatcactaaaactctctcaagagtgaccaaagtataaccacacatactaacattaacactaagtaacaaggatcagtcaacgattctacctttactcttgcctgctactcatactctctaacctaattcttgattccaatggagcccattc

SEQ ID NO: 81905 - DNA, 477 bp, Glycine max
  Clone ID: PAT_MRT3847_44978C.1
ttgatcagaggaaaaagatccaagtttactgcatgtatggctcacgagaatcaatctatccccttaattgagacatcaatggatgcaaatttaataaaaaaggagagtggatcattagaatccaaggagaaggatattgagtcattagcatcaaagaatcttttggaaaatgacaccatgtgtcctacatctgtagcccattttaaacaatctgttcccttaattgaaccatccactgattcgagagcattggaaaagaagactggtttgttagggtcaaaagagaaagcaattgaatcactaaactcagaggcattgttggaaaatggtagcagattaaaatttgagccaaagccacttccagaaattgatacaagaagtcctacttctgaagttgaagggaaaccgtctatgtcctcatctgaatcttttaagtatgctcctatggaaaagtacaaagatcctctagaattaaag

SEQ ID NO: 81906 - DNA, 179 bp, Glycine max
  unsure (1)..(179): unsure at all n locations
  Clone ID: PAT_MRT3847_44979C.1
gttgcggcngcgtacgtngctcgganttcggctcgaggttgangatcantcctgagaatgttangaanncngtgcantcctcngatnctntcgtaagtctngnncctgattnnatgnagccangnannnnngtacgttgtncnagctggctggctcttggggannaacgtgactgagtn

SEQ ID NO: 81907 - DNA, 716 bp, Glycine max
  Clone ID: PAT_MRT3847_4497C.1
ccacgcgtccggccactgcgtacctatctgtgaacctatcataccacatatcctaccaaatcgacatctaggttgagatcttggggaaaaccatggggtaatctatcctatcataagtccttggatacgtgtgctgcagctcttactttacatctaatgagtcttaacccgagccgaaaccccggccggaaggcgcgcgctgaggctcttgcccactctctagaccactcgtcatgttatgagtcatgtatttagtaacatatttacatgcgtaacttcatctgacacttcaactaactatgattgaaactataatcgctaacttattgtctaacgtttggtggaatgattgcagcatgtatttcaacatgcctttacacactcctgaccgagctctatactgggttctagtcatggatagggtcatgatgtggaagatgatacgaacagcattccaggcaacatttttggcttagaatctttttatggaacaatcaactaatcagacagttaataggtcactagatatgcaccttgtgattccctctctggataccactctatgcactccactatgcactcgataagtcactgaattgacctctgcattgacatgatctatttaactatatgattaactatttgagtctatagtaaaaactaaattaaacacattttcccccaatatatccttgattatattcatgatgtaaagc

SEQ ID NO: 81908 - DNA, 272 bp, Glycine max
  Clone ID: PAT_MRT3847_44980C.1
gtcaatcatgcatctatggcatgacagtacattttcctcgttgcagttgagatatctctatcacctatatatatctaacttctgtggttatgcacactcttgactctcgtagaattactgtagcagtcgcggatgttgtcagctcaggacaaatttgtactttaccggatggcacacctaccgaaaaccagcttcagtgatcgataccactttaggcttaattccctagtgctgagacgcgtggtcccactccaaaagacgactgcaaatgt

SEQ ID NO: 81909 - DNA, 421 bp, Glycine max
  unsure (1)..(421): unsure at all n locations
  Clone ID: PAT_MRT3847_44981C.1
acggcaaaaacgccccnccgcaagcgcgccccagagcggcagacgaaaggaaaggcaagaccccaacgaagccaacgaaaaccccaaggacaaggcccggcaaaacaccaggaagcaggccaaggacggcgacancagcaggaagccaaccaagaaaaaaaccagcactttttttttttagatgaaggaggcaaagaggaagggcagccacttccgtcatggtaaacgtaacggcacgagggagagcaggccttccaacaccaaactaagaatgacaaagacgcgtgtgctcagacggctgcatttaaagtccgcggaatcaaagaacactgaccaacacatgcgccatgatatgtacatgaaagtgaaaagccctgttttcaaaaacaacaaaaccctgaagcagagaatacaccagtcc

SEQ ID NO: 81910 - DNA, 715 bp, Glycine max
  Clone ID: PAT_MRT3847_44982C.1
atttttccctttagcgacccatttacgaagatggtaagataattattgggggccatttttgttctgggcagtggaagttgtggttgattcagaatggccggaaagaacaacccgcgatccaattcgcgaatgaccatctttctcttcctcctcgctttctctctcctcctattcctcttctctctctctcctctccgcaccccttctcccacgcagcatttccacgtttccgatgccgaaacctcgttcttggcctccctcgaccacttcctcctcgcccacgctcaaacgtccctcaaagacgacgacacagcgccccgcgacgaaccccaaaacgacgacatgacgaagaagctcgacgacgccgtttttcactccgagatggacaggctcctctcggatccttactacccggtgtcccttccccttagggtttacgtctacgacatgccccccaaattcacccacgatttgctctggctcttcaaaaacacctaccgagacacctccaatctcacctctaatggaagtcccgttcaccgtctcatcgaacagcattccattgattactggctctgggcggatctcattgctccccaatcggaaaggctcttgaccagtgtcgttagggttcaccgacaggaggaggctgacttgttctacatacccttcttcaccactatcagcttcttcctcatgggaaaacaacaatgca

SEQ ID NO: 81911 - DNA, 214 bp, Glycine max
  Clone ID: PAT_MRT3847_44983C.1
aggggagtatcaggaccactgattaatggcacgtatgctgagaagacactagaatcacaagagacgatcaaggcagatatcacttgaagaccttgcagaattgttcatttgggtgaactgcctatagaaggtaccgctttacgggcaacaacagcagttttcatcagatttacagttcacaatccaatgttcagagtacgacggattaaccatg

SEQ ID NO: 81912 - DNA, 1901 bp, Glycine max
  Clone ID: PAT_MRT3847_44984C.1
aattcggctcgagcatttacgagatggtaagataattattggggccatttttgttctgggcagtggaagttgtggttgattcagaatggccggaaagaacaaccagcgatccaattcgcgaatcttcctcttcttcttcctcctcgctttctctctcctccttttcctcttctctctctctcctctccgcaccccttcttctccttcccccacccatttccacgttcccattgccgaaacctcgttcgtggcctccctcgaccacttcctcgcccacgctcaaacgtccctcaaagaccacacagcgcgcgacgtcacgaagctcgacgacgccgtttttcgctccgagacggacaggctgtactcagatccttactacccggtgtcccttccccttagggtttacgtctacgacatgccccccaaattcacccacgatttgctctggctcttcaaaaacacctacagagacacctccaatctcacctctaatggaagtcccgttcaccgtctcattgaacagcactccattgattactggctctgggcggacctcattgctccccaatcggaaaggctattgaccagcgttgttagggttcatcggcaggaggaggctgacttgttctacatacccttcttcaccactatcagcttcttcctcatggaaaaacaacaatgcaaggccctttatagggtgaagctttgaagtggatcactgatcagcctgcttggaagcgctctggtggcagagatcacatactccccgtgcatcatccctggtcttttaagtccgttcgaagatatgtgaagaatgcaatatggctcttgcctgatatggattccacagggaactggtacaagcctggacaggtttatctagagaaagacctgattctcccttatgttcccaatgttgatttatgtgatgccaagtgtttatctgagacgaatccaaagagaagcacactgcttttcttccggggccggctcaagagaaatgcgggagggaagatacgctctaaacttggagctgagttaagtggggctgatggtgtggttatagaagagggaacagctggagagggaggaaaagaagctgctcagaggggcatgcgcaagtctctattttgcttaagcccagctggtgacactccctcctctgctagattatttgatgcaattgtcagtggatgcattccggttataataagtgatgagctggagcttcctttcgaaggaattcttgattacaggaagatagcggtgttcatttcttctaatgacgctgtaaagccaggttggcttttgaaatatttaaaaggcattagacctgctcatatcaaagaaatgcaacaaaatcttgccaagtactcaaggcatttcttgtattctagtcctgctctaccattgggtcctgaagacttggtttggaaaatgttgttactatttgttttgctatttaagtttgtgttattatttgtagacactttgttcacaaattttaaagcccatggctggcaaggtggtgaacatcaagcttcaccccaaaagatcacaacgtgtagaggaaggatcaaaaagtcagtgtacttgtgaatgcaggtttggtaacatcactaatactgcttcaataatttcttaaatcattttgttttattttaggattgtttggcgggctagtttgttgtaaaacatcactactactcgacgggaaaaataatttaaatgtctgtaggatgatcagccttgtgtgaaagctaatggcaatcaaatatcataattgcccatatatgttgtcctttgtgaccgaggccatgctgggttactgtaagataaaatgacggaaaaccagattttacaagggttagataaaaaaaaaaaaaacaagcaaataaaaa

SEQ ID NO: 81913 - DNA, 446 bp, Glycine max
  unsure (1)..(446): unsure at all n locations
  Clone ID: PAT_MRT3847_44985C.1
tgctccgagcggcggccgctttnnnntnttttttttttttttcttgangggggaatagcaattaatattataagcagagaatcatgattcagattcgccgcacattatacagaagcgaccaatttccgaacattaagaaaaaaaaatgaagccaccctgaggttaacacacccatcacaagtccaaaataacagaacttgctaaaaggcaagacatgaccacaaaatgcaaggacgggtgacggcacaacaaaccaggatggccaaaaaccaggtcagacataacaccttaggggtcagctacacattaatagttgatcatgatacctaacgaagggctatgtctgattgaagctagctctcccaacaccaaacttgcaagtgcacgggttgcctgagcagttaggcccacatatgccgtcatcggcctgagggggcacacccatt

SEQ ID NO: 81914 - DNA, 401 bp, Glycine max
  Clone ID: PAT_MRT3847_44986C.1
ctttcttcctcttttttttttttttttttttttttttttttttgttttttttgggccccccaataggcctttgggattaaaatggcctgcccctgtttttcggaaattttttgaatcccctaaacccaaccctgggtaaacccccctcaaatttccccaccttttttccccgccccttttttttaaatgtcaaatttgcccccctgggccccttttaccgatggctggatggttttttaacacaaacggccccctgccccaaatttcctttttttggccatttcccgccctgcccagtttttggtttttattttcccccatggggtttttcgtgtgtccctgtgccccccttgggattttcctggaaatcaattcataacctgttttattacccggttttt

SEQ ID NO: 81915 - DNA, 387 bp, Glycine max
  Clone ID: PAT_MRT3847_44987C.1
tgctcgcgtgcgcacgctcggaatctggctagagcgcttgagggcgattccatgtaggatttacgctcgcgagcgagtgggatgtggcatttgacgaggtacgtgcacacaacgcagctgttgtatatcgggacgacaacgcccctcctgtggataccgacaatgattgctgcgacaacgagtagcctgtgttgaacaggaacgaccacaggctcatgtcgcaggccgaacacgacactttcattgtgtccataaccccgacactggaggcggggactgacaagctcttccaagataatcaggaggctgatctctacgaaggagcagtgagcctcactatgaacatagacatgcgggatggctccgacgaacacaaaatcgatgatg

SEQ ID NO: 81916 - DNA, 405 bp, Glycine max
  unsure (1)..(405): unsure at all n locations
  Clone ID: PAT_MRT3847_44988C.1
aaagcttgggagccttccaccacgcgnngtggcggccccgctcttagtaatctagttgggataccccccgcggcctgtcagnngaattgcgggcgacgagtctttagtctctganngggggggccccccggtaccccaannnttcgcccttaatagtnggagtcgnntattacgcgcccgctcnnactggccgnntcgttttacccaacgtcngnntgactgggggaannaaccctngnngcgttanncccaacnnttaantnncgccttnnngcagcacaatcncnncccttnntcgccagcntnnggcgtaatangnncgaagagggcccccggcacccgggatcgcccctttttcccannacagttnnngcgcagccccctgaatggggcgaatggggaccc

SEQ ID NO: 81917 - DNA, 371 bp, Glycine max
  Clone ID: PAT_MRT3847_44989C.1
tgtggaacagccgaaacctgtggtgtgtgctgtgcttgacttgagtattgaacatcgattgttaattggaagtgaaagaaagtagattgaattgaagaacaaaggcaatgccaggtcctggtcctcacctcatgtatgccatgggttctggtttgtgtctcacaagcatcagcaatggaaggttcggtccccaccacacactcttctacaccattaacgccttctttggccctgatgttggttccttcacggagtggcttggttcactctttggtggttctgctcatgctttgggatcttcccttgaagatctcattcaccatcccttcttctacatccttcttttaagacttcctctctcttttctctat

SEQ ID NO: 81918 - DNA, 208 bp, Glycine max
  Clone ID: PAT_MRT3847_4498C.1
cttttctctgtatctccccttctctctgactctctctctctcttcagctcatccagcaccgagtcacatactcatcgatctcccgaatctctaccgtcttcggtcatcagctcgaaggaggcacacactcttcgtgagacgggatgaaggcccgcaaacggtatattgctgcagcgctggaacctgcagcattctcggatgcagtggt

SEQ ID NO: 81919 - DNA, 1511 bp, Glycine max
  Clone ID: PAT_MRT3847_44990C.1
caagaaggaggaggaagagagtcgtttagagagaagtagacgactgaagactgagaagggccagagaggactgttacaacattcttgaacaggaggaaataaaattgattagtgatttgtctaacattgcggaaaaccaagaatctcgggaaggtcaagctgagtctgctgcaactcctgaacgttccccagctagggttgatgatgatgctctagaggctggtgagattaattctcctgagctttcaagtgatgataagaatgatgagggtgacttggtagaggaggctgctgatggttctgacaagttgattgatgtcaacgaacctgaatatcagctgagagcgatcaatgtggctgagcctgttgcgagtgagactgttccttcgacaagcactgttgcagagagtagctcgtctaaagtgaacttacccattccaacgcaagggacccctagtgcccccgctgaaacagaagagacaaagcaggcatcacctgttggtagtacttcaacaaccataaatttatcagagcgagcacgggaaagggctcaaatgagacaggctgggttggtttcttctacccttagaggtcgtggaagaggcggtgctccccgtggtcgagttggtcgaggtaggggagtagtacgccgaccacctccaccacctggcagtgatcaatgaacaacaaattcaccgtctgtgatttgacttagggttgtaaacttctcccttagtctgacgaagacagtatagaccagttaggtgcaaattggttatcagttttcgtcatgtaaatacaattttgcttttcactcatttctccccttacctatttaattttgcctcaatttacttggtaggacttacatcatgttagatatgcgggaattgtggttttatttagctttcatttcccgagggggtgtttatgttgggaaaaatttgaataccaacgttgtttttcactcatttcatttcatagaatcatgaatgggcatggaatctattctttgggtggaaaaagcggtgctccccgtggtcgagttggtcgagttaggggagtagtacgccgaccacctccaccccctggcagtgatcaatgaacaacgagttccccgtctgtgattgatggttaatgaaatgatttgacttggtattgtaaacttctcccttcgtctgaacgatggcattgtagaccagttagtaggcgtaaattggcgaccagttttcgtcaatgtaaatacaattttgcttttcactcatttctccccttacctatctaattttgcctcaattagcttggttggatttacatcatgttagatatgcgggaattgtggttttatttagcattcatttcccaaggggtttttatgttggaaaaaaattgaattacttttcactcatttcatttcatagaatcatgagtgggcatggaatctgttcttcggaaggtgttatttgaattcgttcctggtattagatataaaagtattcccatttttgggt

SEQ ID NO: 81920 - DNA, 1910 bp, Glycine max
  Clone ID: PAT_MRT3847_44991C.1
gaaggagaaggaagagagtcgtttagagagaagtagacgactgaagactgaaaaggccataaaggactcttacaacagtgttgaacaggagaaaataaaattgattattgaaattgagaggtataaggagtctctgaaaaggttatctgatgaagttgaaaagcttaagattgttattggcaatcttcctgagggttcaaatgtggttcaacttctttctggatccaatgtcgatgactttgctgctccttacatatctgctgtggaaagttttgaaaaggaagctcactcagcgtccggtgagcttggaggtcgcggtaatcttggagatgcagcaacagttacggatggttcagcagctgctacaggttctcttgtccatcctcaaccccaaggcattacattttcagcggcccctggagctagtggtttaccacctaaagccagtggagaaagtgagaaaagacttgcattacccaaagctagtgttgaaactcgtcgagcaggtaggagattggtcaggcctaaactactaagacctgaggagctacaaggtggtgacacggaaatgtctgatgccgaaggaccagggggcaagcctgggccatctagtgacactgaaactagtagtgttgttcaatcatctcaacaattggctcgtaagcgtgttgctcctacctccacttctgaattacgtgaagaatcagttgcacctggtgagaagagctccgatgtcttgaagaagtctaaaggatctgagtccccagaagagaatacagaagaacaacctgctgcgactctggaatttactggcagtcaccctgtcactgaagaattattggatagtagtgacatgccccaaggccaaaatgaggaggttggtgacgctcaaaatgaagatggtgaaattgctgttgggaatgatgaggaatccaaagatccacagaacttggatgttactggtcaagaggaattacaaggtgacaaaactggaactttagaagagaatccggatcaacctgttgatgcaaaaatgctgtctgatgagatgcagagggatcagacagacccagacaaccagcagtcaacattggcgcccagtggtgagagagaagagggagaattgttgccagatatcggtgatctagagggtgctagtgatttgtctaacattgccgaaaaccaagaatctcgggaaggtctatctgagtctgctgcaacccctgaacgttctccggctacggttgatgatgatgctctagaggccggtgagattaattctcctgagctttcaagtgatgataagaatgatgagggtgactcggtagaggatgctgctgatgcttccgacaagttgatggacgtcaatgaacaaatatcagccgagagcgatcaggtggccgagcctacacctgtggcaagtgagggtgctactttgacaagcagtgttgtagagagtagctcctctaaagtgaacttacctgttccaaggcaagggacccccaatgcccctgctgaaacagaagagacaaagcaggcatcacctattggtagtacttcaacgactataattttatcagagcgagcacgggaaagggcccacgtgagacaggctgggttggtttcttctacccttagaggtcgtggaagaggcggtgctccccgtggtcgagttggtcgagttaggggagtagtacgccgaccacctccaccacctggcagtgatcaatgaacaacgagttcaccgtctgtgattgatggttaatgaaatgatttgacttggtattgtaaacttctcccttcgtctgaacgatggcattgtagaccagttagtaggcgtaaattggcgaccagttttcgtcaatgtaaatacaattttgcttttcacaaaaaaaaaaccttacctatct

SEQ ID NO: 81921 - DNA, 295 bp, Glycine max
  Clone ID: PAT_MRT3847_44992C.1
tctcggcaacaaatatccctgctctttgataaatttaaaacgcaccaaaacgccattcttgttataaattgcaaaaacccataaaccatcaactctcttaacgcataatgcgcccaaagccattaaacctatgtcacacctgcctgcgtgtcacacatctaattcccaacgcaaacatgtaacaatctttctgctcagcgaatatgctgacctcccacaatcacccccctccaacttcgttgaaatctaagatcatggcctactattccaacataaaacccagcattaaccactc

SEQ ID NO: 81922 - DNA, 707 bp, Glycine max
  Clone ID: PAT_MRT3847_44993C.1
aagacaaaaatggaatcattcaaaagtaagtcaacatgctattacaactctatgggaatccaaaatactcaagagaataacttgattctgtggctttcttggcttcaaaaggtcacctgcatcaataatttcatacaaagaacttgaatgtttcatgtttctgcatatgaaatgcctaaattaatctgaagaaagccatcacagatgctccccattttccgctgctcatgcagcgtgcgtgctcacatgctagtagctcttggacatttcatagtgcaaaaatctaatgtcggggttgaaaattaaactcttcaagatatatattcttcaaatcaacaagtgaggtaaaagtgacgtcaagagaggaaacaggagtacaataacgagtacaatgccacgaagaatggcatagcaagtccacttcatcttactcttttgatactctctagcgtcttaaagaactcgcacgccccacctcactaactatgttgcttggtccacatgcctgagactcaacaagagctgccatgtccaaaaacacacaaggcagctcaatcaagttaatctctatctccttaacagcatcgtgtccctctcctccttaacagcatcgtgtctctcttgaatctccgatatggtgtccattatctgacccctcccttgttcctgaatcgccctctgaagaaaactctcactttctccacttg

SEQ ID NO: 81923 - DNA, 548 bp, Glycine max
  unsure (1)..(548): unsure at all n locations
  Clone ID: PAT_MRT3847_44994C.1
gtcgagtcgaatcgagagaatacgagcgggnggaaaaaaagtgtgtaccgtcgggtggtggacgggttgacagtgccaggcgtcgtgccgttgacgaggagaggctaggctcggcggacagcccagcccccgtgtgcaaagatggctggccaagaccccaagtggcagaaggatgctgctgaccaaaactttgactatatgttcaaacttctcatcatcggcaactcatccgtggggaagacctcatttctattccgatacgcggacgattcattcacgtcagcgttcgtgtcaacagtaggaattgacttcaaagtcaaaacagtattccgacatgacaaacgcgtcaaactacaaatttgggataccgccgggcaggagcgctaccgcaccatcaccacggcgtactacagaggcgccatgggcttcatcctcatgtacgacatcaccaacgaggagtcattcaacagcgttcaggactgggtgacgcagatcaagacgtactcgtgggacaacgcccaggttgtgctcgtaggcaacaagtgtga

SEQ ID NO: 81924 - DNA, 268 bp, Glycine max
  Clone ID: PAT_MRT3847_44995C.1
ccacgcgtagaagcacacgtacgggcagttgctagaagacgatagatgggtggacgccaggtgccatgtctataccatgctataccagacaattgtactgatgcgagagagatatgtctgtactgacttgttcactgtctagaactttgtggcgttgaacgtttcttaattgccttctggactattcttggactactaatggatatattcattccacatacagttattatgcccacattatagctcagtaccttgctcaagacactgt

SEQ ID NO: 81925 - DNA, 487 bp, Glycine max
  Clone ID: PAT_MRT3847_44996C.1
ggttcatgctgagccacgcaaggctagtgaagaggatgcaaagaagcatggtatcccccctggctactcactaaagaactgggaccctactgaggagcccatccttctccttggcagcgtctttgactccaactccctgggcaagtggatctatgactggaccgtctatagccacggctccagcagacctttctctgagatggctggtgacctgtggcttcttctgatccagcttgccggcaagaccaagcgtgccgctaaggcggtccctgccgttcgcaagtctgacaacagggaagtcctcgaggacttcattggcgctggcgagcgcctcactgacaaactccgtgacctacttgtcgcctgtgagcagcccatgctcgaggccagcaagaagggtcgcaagtcctccaagcttggcaagggtgccggtgttgagtttgtcgagaccatgtttggccgtgaccgtatgctttccaacaccgag

SEQ ID NO: 81926 - DNA, 653 bp, Glycine max
  Clone ID: PAT_MRT3847_44997C.1
gtaaggagttattttgcttttaaattattgaaaccatcccccgtgatggaagatttttgtgctaactagcttagaaaataatcaattggaaatttctcaagctcaatatctcataggtgttacctaagacacatttcaaaaggtacaaaaaatgtttgagcccaactaaaattcttaactttgtttaagcacttaactaatactgatttatcctcttcaaaaccttgagaactctcactacttcattcaacacaattgctggatcagtagtgtcaactccaaccattgcagccaatagttccattttctcctttgtttttccatcaaacagcaactcatccaaactcatcatcacttcttcatctgatgcatcaccaactccctcattagatgaatctgtgtctgacttggcactagaatgctccccaagaacatcacaatagccagatgagtcttcatttggtgtgaagcaattggaattgttcagatcattgaattccatggtagaaaacatggggcagaatgtgcttaaaagggtgtgattatttggagtgaagaggctgaaagaagggtaggaaaaatatggaaaagtgtattgttcttgttctccaaagggtacctttgagttttctctgccatgatccattgttgag

SEQ ID NO: 81927 - DNA, 1598 bp, Glycine max
  Clone ID: PAT_MRT3847_44998C.1
ctcgagcctattcggctcgagtgcagagtttgccgggtccattctctctatacccactcacctctcattcgttctggtcaatcaatcattcattctttcctattacacttcaccttcttcttctttattccttgctcttcaatggcttccgatcttgagcttaaggccaaagaggctttcgaagatgataactatgatctcgcctacgacctcttaactcaggccattggtctcagccccaacaacgcagacctatatgctgaccgtgcgcaagtcaacatcaaagtcaacaacctcaccgaggctgtttctgatgcaaacaaggcgattgagttgaatccttctcactcaaaagcatatttgcgaaaaggtaccgcatgcatcaagcttgaggaatatcagactgctaaggcagctctagagatgggtgcttcattggctcctggagattctaaatttactgatttgatcaaagactgcgatgaactgattgcagaagaatctggtgtcatacccatacaagaagagagcacaacacagggtgctgctacaaaagctgttgaggcagagaatgatcttccagagccacctacagtaaccgtggttaaacctaaatacaggcatgaattctaccagaaacctgatgaaatggttattaccatatttgcaaagggcattccacgagacagcattactgttgactttggtgaacaaatattaagtgttacaattaatatcccttgcaaagatgcttatgtcttccaacctcgcttatttggaaagatcataccctccaaatgccggtatgaagttttgtccaccaaaattgaaatttgccttgcaaaagcagatcatatccaatggacatctctagaattcaacaagggtagcacagttgcacagaggtttagtgttttgccagttgcaagaggtgaaaaacctacttatccatcctcaaaaccgaaaaaatacagattgggataagcttgaagctcaagttaagaaagaggagaaagaagaaaaacttgatggtgatgctgcgttgaacaaatttttccgtgatatatatcaagatgcagatgaggacacaagaagagcaatgagcaaatcatttgtggagtctaatggaacagtactgtctacaaactggaaagaagtgggatcaatgaaggtacaggaaagtcctcctgatggcatggagttaaagaaatggtaatattgagatttttgttggggtataggataaggattatgctttgaaaccttataaattgtttagatgatgagaaaataggttatgcattcatagtgtaaaacagtttcactttatcatccaatcataactcaaccattaaactcttagattattgttgtgcaaaggatatttagttgctttggttgtattggtttttctggtgtatatcttccctaagatcagaaggttgatgctagagttttttagtattttgtgcatgtaatgccgacgcagctctagttcttgtgttatattgtgttttgagatttgagtctaatggatctggaatgagcacttatattgataatttaagattcaagaataagcttaaattcttctgacc

SEQ ID NO: 81928 - DNA, 552 bp, Glycine max
  unsure (1)..(552): unsure at all n locations
  Clone ID: PAT_MRT3847_44999C.1
agaattaaacatcataagttcattcaggattacagttaatttccatagaccaatcacgtagtgttgagttccagatttaataatagattaaatttaaataattgaattggtacaatgtacaattatattatctttcaagacatcaggattttggaattgttctagtttagaggagaaaagtcatctagtttataactacactgtttttgaattttagcatctatcaatttaagtaattataatatttgatagatgaattatatagtcagttatattaatagaaagcagagcttaaaagggacagtaaaacagaaagttgcaatatattcaccaaagacaacagccttgtcctctcaaccaacaaccatgaattcaggtcctagcgaagacggacacacaaaatatgtataacattgatccagaaaatgtcttaatattcccatttcttcaactccatgccatcaggagcacttccctctaccttctttgatcccacttctttccagtttgtagacagcactgtcccattagactcaacanaagactttttca

SEQ ID NO: 81929 - DNA, 432 bp, Glycine max
  unsure (1)..(432): unsure at all n locations
  Clone ID: PAT_MRT3847_4499C.1
atcccgatctcatttactttcgctgtttgatagccctaatatgataacacctcattccaattcatatatgagcgttnctttaaaaatatttgtcgtttatgaacaattggaattcccccaggaattcctatctcatttcctttggctacaagataggcctaataagaaaacaaataattccaatccatatatgaacatttttgcctccttatttcttgaaaatgtgacaatcgcaattccccgacgaattccgatctcatttcctttggcttcaagataggcctaatacgaaaacaaacaattccaattcatatatgaacatttttgcctccttattaattgaaaatgtggaaatggcattcccccaagggatcctataaagtaaaactgcaagcatgcaagccttttctctacctttaatgagggttaact

SEQ ID NO: 81930 - DNA, 773 bp, Glycine max
  Clone ID: PAT_MRT3847_449C.1
aaagtgcggcagacccggactccactgcaagttgcaacctcgcgcgttttctccaacaagaacatggcgccatcgctcattgagttgagttcactggttatacaatgtcgaagagagaaggatttgctctgtgccgcttcttaattattattcttctttggggctttgtcgctggcgacgcgccgggaagggaggtgtggtgcgtggcgaagaacaacgcggaggacgcggcgctgcagtcggcggtggagtgggcctgcggcgccggcggagccgattgcggagcaatccacggaggaggaccctgcttcgacccttccaatatgcagaatacggcgtcgtacgctttcaacgattatttccgcaaacacgctatctccgaagagaattgcaacttcggcaacaacgccgccattacctccttcaaccccatttgttagtgaacaatggaagtttctcggggtcggcgtcatctatgggaacgatgtccggtgaagacacaagtgggtacagtggagttgtttggaattggaggtggttttcgtcatttattgtcaccactcattttttgtttatagtttcaccttcacggattgtttcatggtaatcagtggttatgctcagctgcttccaaatttgtagttttgctagcaaagtattgattgattaaaaccaccattttgaaggagattgcacctcattcaaaattgaatttgagtaaatggaaggttgtgttatgtcctctgctaaaaaaaaaaaaaaaaaaaaaaaaa

SEQ ID NO: 81931 - DNA, 188 bp, Glycine max
  unsure (1)..(188): unsure at all n locations
  Clone ID: PAT_MRT3847_44C.1
cttcaagatgcacntcttcgtcangnccctcacnggcannaccnnnacccttgacgtggaaagctgctgacaccntngagaacgtngggcnaagntccaggacnaggtaggcatccccccggatnagcaacgtctcatnttcgccggaaagcaacttgagganggccgtacccttnctgactacnaca

SEQ ID NO: 81932 - DNA, 132 bp, Glycine max
  Clone ID: PAT_MRT3847_45000C.1
acagggaatcaactttccaaattccaagtcagcatttacataaagaaaagccttctcccacatgttttcgactcttctttggcggaagaggacttcgtgtggctataacctgtggttggatccaatctcata

SEQ ID NO: 81933 - DNA, 1029 bp, Glycine max
  Clone ID: PAT_MRT3847_45001C.1
tttgaatcctaccagaaacctgatgaaatggttattaccatatttgcaaagggcattccacgagacagcattactgttgactttggtgaacaaatagtatgactcatattattcatcatgatgtaagggactgtaactgatggggttgtaacatgaagataatattctaagattgctccttccttttttttcttaattcttttttatgatgttgtagttaagtgttacaattaatatcccttgcaaagatgcttatgtcttccaacctcgcttatttggaaagatcataccctccaaatgccggtatgaagttttgtccaccaaaattgaaatttgccttgcaaaaacagatcatatccaatggacatctctagatttcaacaaggctagcacagatatcttgcacagagggttaatgcttcttcagttactggaagttaaagaccttcttacccgtcctcaaaacaaacaagagactgggacaagattgaagctcaagtcaagaaagaggagaaagacgaaaagcttgatggcgatgctgcgttgaacaaatttttccgtgaaatatatcaagatgcagatgaggatacaaggagggcaatgaaaaagtcttttgttgagtctaatgggacagtgctgtctacaaactggaaagaagtgggatcaaagaaggtagagggaagtgctcctgatggcatggagttgaagaaatgggaatattaagacattttctggatcaatgttatacatattttggtgtgagattatactttggtttgtttttgttggttagcttaactgctgaactaaagatacttattttctttaattttttatttattttcatgaggtgtgtccgtcttcgctaggacctgaattcatggttgttggttgagaggacaaggctgttgtctttggtgaatatattgcaactttctgttttactgtccaatttaagctctgctttctattaatataactgactatataattcataacttaagactcagagtatttagctctttttcc

SEQ ID NO: 81934 - DNA, 586 bp, Glycine max
  Clone ID: PAT_MRT3847_45002C.1
attttaaagaattctgtttaatgattaactgtgaaggttagatgagatatttatttattttattgggcattaaataatgtaccttttgtattagtgttaattaaattttttaattattttagcctcccgaaaaattaagggttaatagataataaggccctttgtagaataaaaggtttaattttttattaggaaagacaatttattcgtttaattttatatctggttaatttcataaaatttagttttattaagactatttgtttaattattaaggtatgttaacaaatttgttttaattatatgtaaggggcttagctcttgcatcagtgaagtttataatttattttattttactatttattgtaggcttaaaaactgcttacctagtaagttacatttaatagtagcaaatttgggatttattttaaatttaattttttaattttaggggcttgatttagagtagccccatattaatgattaaattagtagagtatatgggtttattaattaatgtaatgatttaatatttatgaattctacagtataccttgcgaatgtttatcaaaaacatttcttttag

SEQ ID NO: 81935 - DNA, 2212 bp, Glycine max
  Clone ID: PAT_MRT3847_45003C.1
gatacacatcctccaagacacacacagcatttaatttttataaagaatgaaacggatgcacatttttgcaatccgccgacacaacataaaaaatcgtttttttgatactgatttctaacactctgaagcacatttcatctgtggtccaaacacaaaatcttttgtttgccctgcttttgttttgttttgttccattccatccattcaccttgttctatgttcatctccagcaccccttgattcattcattcaaaagccacaaacttgaattgatgatggggtacctctacctttcttgcagagccgaatccgctgtctcaacctccaattcggtgtcctcttccaaagagaaaagcagcagcatcaagatccaagagtttctgtacagtgacctcgaagctgccaccaatggcttctccgaccgcaagctcctcggcaaagggagccacggctacgtctacaaagccgtcgtccgcggccgtcccgtggcggtgaagcgtccatcgcggccacagcatcatcataacaatgttccccgacgaccggtctcttcttccctgcaccctccgagatcacaaacgaggtcgacaacgagatcgacatcttgtccaaaatccagagcccgaggttggtcaatctggtcggtttcaccaataatgattcaagagacaggcttttggtggttgagttcatgagcaatggcaccctctacgatgttcttcatacctctccaaggcctcccaattggggtaggatgattcgtttggctttgcaaaccgcaaaagccattgacactcttcactcctcaacccctcccgtgattcaccgtgacatcaaatctgccaatgttctcatcgaccgcagctacaatgcaaggttaggtgattttggtttggccttaagaggccatgttgatgattacagactcaggtctactcctcctgctggcaccatgggctatcttgatccttgttatgtcactcctgataatttaagcaccaaaactgatgtttttagttttgggattttgttgttggagattataagtggaaggaaggctattgatatcacttattcacctccttccattgtggattgggctattcctcttattaagaaagggaaattgttggctgtttatgatcctagaatagcaccccccaaggatccgattgtgaggaagcagttggctgtgattgctgccaagtgtgtgaggtcttgtagggagagaaggccctctatgaaggagcttgttacttggctttgtgggttgtgtaaattggtgcctcttcattcgtggaatggttttaacaacccttgcatgatggctgagattgcagggcgcccagtggaagcggcggcggcggcggcaaggaattatggtcaattcagttctaggctggaaggtgtggaggaaggaaagtttgatgctttggatggcaggttgtcaaagtctgcaatgaggtattctaggagggtgtactctgatttggggttcagcagcaacttgatggacttgatggctaccactgaggagcccgaatttcttagagatgcggatggggtggaacatagttctaagtcagctgaacaagtttctggtagctccagcaggtttgggagtggaagatattccataagagggaggaatctgtaccggccttgttggagcgacaaggatgcattaggcttgagtaaaggccagattttaggtcagagtgagactacttcgaaacaggatggggtttctggttccaattcgaagaatttgaattctgttgctgctgaggttatctagtttgaatttaattgccgagacatttaattggagtgatgatgcctaggcttgtgagctttccttgcttgcaaattgtgtagatttgttgttggttcattatttgtggatttcagattcatttttagtaggtttttggattgaagggcacattcctgatgtccccttaacgttgttcaaaaagctttgcctaaagattttgtttccccctcaaaaacaaatgcaaaagccattgtatgaatgattcaagaacaattctaaaaactaatacatgaagctgccgcagaaaaattgtaaaaaaaatctaccattgcttgttggttgaataaactgtttgtatgtagctcaaataaaattttcaataccaacactgctggtccttttttttgcaattctgttaccagcttttggtttttt

SEQ ID NO: 81936 - DNA, 1692 bp, Glycine max
  Clone ID: PAT_MRT3847_45004C.1
gggaggataatttttccatgaaggttttgaccaaactgaaacagagagggaaaatgccaaaccagatgactcccgaaaatcagtagtgtctagtgaaaacagtgatggtaatgataacgatgggtccattgatgagaagacatcaaagagtacgcttgattctgtgcatgaagaacaaggatttaccgctgaacattttctgaactcagatgtgattgacacaaatgcagtggcttcaaaagtccaagataatttttccaatgaaggttttgaccaaactgaaacagagagggaaaatgccaaacctgatgactccagagaatcaatagtgtccagtgaaaacagtgacgggaatgataaggatgggtccgttgatgagaccacattaaagagtacactcgattctgtgcatgaagagcaagggtttatagctgaacatgttcaaatgttagatgttgaaatagatgcagcggcttcaaaagttgaagacaaattttctaatgacggatttgataaagctgaagcacagagggaagacgccaaacttgagagctctagtaaatcaataatttcctgtaaaaacagcaatggtaatgatgaatatggatctggttatgagatcacatctaacagtatgctagattctgtaggtgaagaaaaaagactttctgctgaatactttcagaagtctgatgcaattgacataaatgcagagactacagaagttgaagataaactttccaaagaaggctttgatagagctgaaacacaagagaaagatgataaacctgaggactccaataactcattgtctagtgaagacagcaacagcaacgataaagatgggtccattgatgaggaaaggtcatcaccaattgcacatgctgttaaggttgagcatgacactgacactggaaacaggttgaaggaaaataaaaaccctgaagcatttacagaaggctcacgcatggacggcttggcttgtgagagtaatgaaacgcgtccgggtaaggatgaaggacaagcagatacacacacaatcagttgttcaatgcataaagaagttgacaatgctgtcatggctgataagacaccaaatggcgttccatcaaggacacacatatcaagaggtggtgataatacttgccatcaaagagctgatgctctggaatctctgctcgagttatgtgcacagttacttcagcaaggacagcttgaagagcttgctgctgtgctaagaccatttggagaagatgctgtatctgtatcatccagagaaacagcaatatggcttacaaaaagcctcatggcctcacaaaaacttcatcctgagacatagtttgagaggtgtggtgctcctcattatttatacattattgtaagaaaatggtgtatttccaactgttacatgagtttgttcctttgaaacttttgcttgattgaagattggaagctggaaaataacatccgataaattctttgctggtgagaggtgttttgtaaatggattaaattatatttgaaatggttgaatattcattggtgtttgtgtaagaaatggccattgattgcatgaatattgatatcgtcatagtccccctcccctctcaaacttggaaaaataaggccttgagcttcattatttttttggacttattgtttataaaatatcttaatttagttggcctgatt

SEQ ID NO: 81937 - DNA, 655 bp, Glycine max
  Clone ID: PAT_MRT3847_45005C.1
gcagatacacacacaatcagttgttcaacgcataaagaagttgacaatgctgtcatggctgataagccaccaaatggcgtttcattaaggacacgcatatcaagaggtggtgataatacttgccatcaaagagctgatgctctggaatctctgctcgagttatgtgcgcagctacttcagcaaggaaagcttgaagagcttgctgctgtgctgagaccatttggagaagatgctgtatctgtatcatccagagaaacagcaatatggcttacaaaaagcctggtggcctcacaaaatcttaatcctgagatatagtttgagagtgtggtgcccctcattatttatacattattgtaagaaaattgtgtatttccaaatgatacatgaagattgttcctttgaaacttctgcttggttgaagattggaggctggaaaataacatccgataaatcctttgctgttagagaggtgttttgtaaatgggttaaattgatattcgttggtgtttttctgtaagatatggccattgattgcatgaatattgatatcgtcatagtccccctcccctctcaaacttggaaacataaggccttgagcttaatttatttggtgaacttattgtttataaaatatcttgatttagttgacctgatt

SEQ ID NO: 81938 - DNA, 450 bp, Glycine max
  unsure (1)..(450): unsure at all n locations
  Clone ID: PAT_MRT3847_45006C.1
gctcaatcttaaagactgagtttaatataatatcaaaagtttgatccttattgatccacctatgtagagactgaactaatttattaagctctacaggaatcataaaagcataacttaaaccctgcaacctagctgacattaatactgttcaccaactttgtcacttctgagtaaatataagaagtgcctaaaacttggtacatttgtatctgctttaagctcatgcaaacctgagaatatcagacaccaaaacctattgatatcaaattgccgaacccttaaacaagcaaggcaataataaattaaataaccccactaaacaaaatttgtcagaataaaatactaaaggaacccgctagtgacaaagccaaagaacatataggcagtaaatntattgttttttagtatttagcttctactatgttcaatatatatatatatataaaaaga

SEQ ID NO: 81939 - DNA, 821 bp, Glycine max
  Clone ID: PAT_MRT3847_45007C.1
aattcggcaccaggaaccatgaaaaggatttgactggtaaggtgtcaatgaaaactatatttagtaagaaaaaattgaaaaaggatggatctgagggtaaaacaagtatcattgctcctgttgaagagctacagagagaggagcgtataccttggatatgctattctgccttagatgctagcagcactttgaagctgtatgagagcctaaagagccatctttcagacatgccctggaaatttgatggcctgccagtttatgggaaaaccatgtatgatttctacaatgaatattggcgaccatttggtgagcttctagtcatgatggaatctgacggcccgctagttgatcgggcttatctcgaaagcatagaaaaggtggccaaagcagagcaagaggtagctgttaatagattccgtaaatgggccactaggtattgtcctgatgcccaatatatgaatgtgggaagtgattcacagttgcgccagctgctttttggtggcattgtgaacagaaaggactccaatcaaacgcttccaactgaacgaatattcaaaattcccaatgttaataatgtgattgaagaaggcaagaaggctccaaaaagattttgtgatataaagttgacgagcttaggttataatctggagactgagatgtacacagcaactggttggccgtcagttagtggtgatgctttaaaggccctggctggaagtatttccgctgattatgacttttttgatgaggattgtaacttggatgatcttgatgatgaagatgaaaatccttctcacagtcaagttgcatctgtaaaaatt

SEQ ID NO: 81940 - DNA, 879 bp, Glycine max
  Clone ID: PAT_MRT3847_45008C.1
gtactacttcagtcaaattatagggtatcgatgtaaatatgctgtctcctatttggaatttgtgtgtcatgctgtccaactaatcagaatttagaagaaattgccctttaacgtggttgccgaaattaacagagcaagcacgttttgaacaggtgaagagatgcgatgagggtaagctagtagcaagagtgagaagaataggaggatggagaattgggaaacggaggaggttgaaggtgaaagtccccttccggttctggaggctgttgactacagaggtggagcctcggtgagatcgaaatctgggtcatggagatccgctgggtttatcataggtgtggaagtggcggagaggattgcatattatgggattcaggggaacctcataacctacctcacgggcccactccatcagactactgccaccgccgccgagaatgttaatatctggtcaggaactgcttccttgcttcctctctttggggctttccttgctgattctcttctcggccgctaccgcactataatactcgcttccttcatctatattttgggactaggcttgttaacactatcagctatgcttccctctcccaccggttctgagtgccaagttggcaatgaattcaaatcatgctctcctcagtcgcaaatagttgtgttctttatctctctttatttggtcgccattgggcaaggtgggcataagccctgtgttcaggcttttggagcagatcaattcgatgaaaaacatccaaaggagtacaagatagaagctctttctttaattggtggtattttactatgtgtgcaggttgcatggcaactctttccatcttgaactatatacaagataacctaagttgggttcttggattg

SEQ ID NO: 81941 - DNA, 369 bp, Glycine max
  Clone ID: PAT_MRT3847_45009C.1
ggaaagagaacgaattattactgcgggggcaatccctacagcataggtcaaatgcctttcatccaacaattttgtacccaaaaaccgtgaccctatttatataaaatgaaaggattagcggttagaaataaccagcatgctgaattaatttcgaacggaaattgggacatgaacctaaagagttggctgattacaaattataaatttcggacagccgccttttttaatccaaaccaaagggccacccattatgggtttcgaattatgaggcctaattgactcaatttaaaactagaggttgacttcatatggcaagcataaccctgttaggatcctccacagtgtctttggtgcgtgacagaaagaaca

SEQ ID NO: 81942 - DNA, 572 bp, Glycine max
  Clone ID: PAT_MRT3847_4500C.1
tacggctgcgagaagacgacaaaagggatcttaaaagcatgttgaagcccctggtcacaattcttgtgttcttgatggttgccagtgctcaagatagtctgagtgataataccatttttgaagggaagcaaactgtgcgtgtctacaatggcatgaatgatggcattcttgtgtatctccattgtcgatccaaggacaatgatcttggccaacatgttcttgcctttggagagttccaaaaatggtccttcaatgataacctttttggcacaactcttttttggtgcacaatgaatgcaagcaatgtgcatgcaagttttgaagtttatcgtgccaaaactgaggaaaataagtgtgatacccaatgcaatagaattctaaaaaaagacggaggctatttttttaatcagttcgttggccattgggagaagagattgtcatggcatattcctaaaacaccatccttttaaattatatgccaatgttttgctaagcaaaattaaataataaaataactatggataatcattatgcaaccttctatttttttgctaatgaataatcatttccct

SEQ ID NO: 81943 - DNA, 372 bp, Glycine max
  Clone ID: PAT_MRT3847_45010C.1
ccaattccaaagttttgctacaaggttttagtgaaaacaaattctcacacttaggtgggcacagcaacaaatacatgtgtcaacataactacaagcagtagatagcttcatgcagctaaccagggcgggcaggatcgctcgtaaccaggcatctacacattgcatacttaaggcttaaggcttggaaccgaatggcaaataaactgatattggtatattaagcccgagctaaaacattttgctcaaaaatgggtcgacgccaccaaaattgcaggattcgcccttgccacctcagctctgggtgtttctggagcgagtgccaaacgtgtttcaaagaggctaaccttctacgaattccatatcaagacatac

SEQ ID NO: 81944 - DNA, 693 bp, Glycine max
  Clone ID: PAT_MRT3847_45011C.1
agagtgcgatacagctaagttggaggtgttgacctgattgtggagccacgtcgattatgggcatttggcagatagatccacagtgaattagatacagacatttttgaaaaagataataggaggtaaggtaaggggactaaagaatgggatgccttcctaagagtaactttctcatgttccttcaaggggattccaggaattccagaaaactcagagtgaaacaaatgactcatctctgcttctgcttgcatcctaccggggagagggaaaaaatatatatatatatatatatatatatatatgtaaatgagactggtatagtgttttcctttttcaaagggacaaatagttttaacctgtatttatatatttgatcatatacatttgggaactggtaatgcctaagtcgggggtgagaaaattaaaaacctcgctttactttgaatttctactaccaggtgcgaactcattttgctaggcctaactggaagaaggttttctctaaaatgtgctccaagcactgtaatggacgaataggtcagttggtcttcatcaagcatattttggtagtcgttaaaacttttttttctttttatagtgtcatcatttgaacatctctagtaaatctttgacattgtatgcaattttatttctatgtcacttttttatgctattcttttatacacggatccc

SEQ ID NO: 81945 - DNA, 1043 bp, Glycine max
  Clone ID: PAT_MRT3847_45012C.1
ttttgataaaatagtaaggctggatatattttctttttatattaaggctgaaaaatagttagtacatatattaatgtttgtaaaggaaaatgtaatacagttaagattccttcaacaggcatcacagaacgggcaactcagacaacagtcaaaaccccttccaattaaaggccatgttagcagagaaggttttcgtctgatctgggattactggaaatatcttcgtagacatagttatgcaaaatgccgctacaaatttagattccgatcctaatttataccaaatctacggagactgatgaataattcaaagcaccttgatgaggatctggcactttgacatgttccaacacaggagacattttcaaaccaattatctggatctgaaggtttgagtggccattgagaaaagcatctgttacctgactgcatccaaaaagtttaagtgacctcagtgccaaacagctatccacaatcaaacccagtgcattgtctgtcaaatttctgcaccaagatagatctagagaatgcaaattttttgcatggtttgcaagtgataaggttgtgtggtaaccaacctggatcaaataaaacgaggtcctcagtaaaacaatctaccaaagaattagcacgcagcaattaaactgacgatagaaaacccaaaagacatgcgcatttactgacaagagaagagaaggattttgagcaagaaaataaggaaaacttgctgtacttcaaagtaattatgttttacaggctaatgataagctcaaaataggttagttaatctccttacaatcacatagcagctcttccagtatgtcacaatgttcaagtactatcgtcccgagcatgtctagctgttttatatagaatgtgcgcccattgtataccccagcaaaccaattgtggtaaaatcatgaggccaaaaaacaacgtaccttattaatgttgttaagtgacaattcttttaaggaccctccggtggtctccacaaatgcagcaattgcttcatcactgaatgggttacggcaaagtttcag

SEQ ID NO: 81946 - DNA, 250 bp, Glycine max
  Clone ID: PAT_MRT3847_45013C.1
caaacatgtccataaaactttttatccaaatcaaagaatttcaaaatgtgatcaatcccggggcagaaaatccttactcaaaacattatttccaaactacctaatcattttttcttctttttccccttttataagatttttttcttttccacttagaaaacctggtccatatccttggttttttatcccctttcagggtatttgttcatataattcctttttctaattgttaaaattatctcccaaaatt

SEQ ID NO: 81947 - DNA, 1385 bp, Glycine max
  Clone ID: PAT_MRT3847_45014C.1
gttttttttttttttttttcaagtaaacagttcaaatcacttcattaaaagcaaacacaggaaatcacaggattatggacatacaaccaattagcagatggtcctttttggtcaaaagacatcaagaaacctaaaaacaccaattcccaaaacccagaatacaaggtcaaataatataataacacaaccccactaaaaattaattaaaacaaaacaagacggtatgaagatgagttagaccctaataaattataccaaggcaatgctgctctcgccaccaggtggcttccgtacaccacctaggtagtctctagcttctaccttcccatcagcaaagatgttactgccactcatctctcgtagtttggccccgctcaacgatttgtcagcagatgaaggtggtgcatcccctttgaatatgtcattccctgaaagttctgcaaatttcttgtcatagatcttctttgctgtcttcccagcagagttggtatcgccttgatctccatcagcatgacgttctccaatgtctatgcttcctttcaactccagtatgcgaggagttattggcctgggtttgatttctggtggcggagcaaatatgtcatgaccgctaagctccttgcactttgcatcagagagttgctttttcaatatagagtcttcactttccaaagttccacttagctcacgctgcttggccacctctggcaaagaagtgggcttttttggagaaacattctcctcctcaccaaatgagatatggctgattccagaaatcgcttgctgatacatacgtactccagtcttatttgggttggcactgccatcttctaaggcgtcatcttctccattggctacaaatattccactaccagttatctccttcatcttataatccgaacaaggctttcttttatttaagctctcgacctcttcatcggtgacctgaccaccaaacaccaccttcctgatcccatccgacggctggtgagaacgaacggcggaggaaggaggagctggggaatcagaaatgggagtttcaggccacgtaagcagatctgcagttgaagtgtgtggcttcctcaccggattgcttctctccatgtccttcagctacacaacacaataccctgttcctgggtgcgcgaggtcgttatgttaatcttgagcgcagaaatgacgacgatgacctccctgatctcccaagattctttttgattgctcaatggtagagagaacaaaaacacgggagagaaagttaattttatttatatataaggatataaggacaagaaaaatgttatgctggtagtagtaagtagaaagaagagagagtagtacaaagtagaagctactcttctcccacgcgtccgcggacgcgtggg

SEQ ID NO: 81948 - DNA, 411 bp, Glycine max
  Clone ID: PAT_MRT3847_45015C.1
caatgacatctctcacactttccaaagccttctcaaaatcgtcgccgtgcccggcggcgccgcccgcttcgccgccgggttcacgggatccgtgatggcgctctccgccctctgtctcttctacgcggcggcgaattttttttactctgccgtcccactccattccgagatgacccaacgcatcgtcgatgcagtcagtgactggtcgacggtgcggcaggtactcgatctgggctgttgtggccgcggcattttattgaatgccgtggccgcccgccttaaaaaggaaggaagttcgggtcgggtgattgggttaagtggcccgaacaaggccaaattatcggccacgcttcgggctgctaaagtagagggtgtggaggaatacgtaacgtgtcggacaggtgatgcaac

SEQ ID NO: 81949 - DNA, 389 bp, Glycine max
  Clone ID: PAT_MRT3847_45017C.1
cttttgcgggcattgtgagtttatggtcacaacttcattatgtttcatgccataatctgcaattgcaagaagcttatcttgtcaatctcataaatgtgttacgagaattttatctgcacagatcagaggtagctctccaattgataaggaaagctctctctcgtattgaatggctgcaaaaagctgatgtgcctaccattgcacagaatggagagttccacctcatgcaaacgatgatgaatgctcctgattcaaatgataatattgatctactgttgatgatggatacgttggtgtaacaacgagcacttaaagcttttccaaacaagattgcttctaatgattctgcttgtgttggctaacacacaagaattctttgattgaaattt

SEQ ID NO: 81950 - DNA, 213 bp, Glycine max
  Clone ID: PAT_MRT3847_45018C.1
attgaatatttgttgaggaggaaaaaccaagaagaaagttttacttgtgacagacctgccagccaatgcatggatgggagagaagggatggtctcacctggtggctctgacacatattacatgcggcattgaggcagaggcgattgaacctttatgaaggtcaccggaaataccaccataagcgcagagacttatatgagataaagagaggga

SEQ ID NO: 81951 - DNA, 291 bp, Glycine max
  Clone ID: PAT_MRT3847_45019C.1
caggacacgaccataattggaagggcttctgggttggcttgtatgacagttatgttcataactacatttctgatgacactagtcgcaatctttgtctggcagaaaagtgtcttgattgctgttgcatttcttttattcttttgggtgatagagggcgtatatctatcagcagcattcatcaaagtgcctcagggaggatgggtacctctagtcttatcattcatcttcatgattgttatgtacgtgtggcattatggaactcgtaggaagtacagctatgatctgcacaac

SEQ ID NO: 81952 - DNA, 357 bp, Glycine max
  Clone ID: PAT_MRT3847_4501C.1
cttcaaaaaaccatttttggaattgtttggattgctcgtccttgacaaacttgtctaaagaatattgggtgatgaaatcataaggattgagatttcctagttcctactattatattataaacccctcaataatgcttagatgatagtttaaaatataagtttaagtacaaccctagacaaggattaaaagtatatagttaactgaagtcatagtgccctaaacattatgatcaaccccacaatcaaaactagacaaaaatacttgagtattttaatctttaggcttttgctttttttattctattgttgtatgtattattcttacctttcaaaacaaagtgaaacaagcttgttttt

SEQ ID NO: 81953 - DNA, 252 bp, Glycine max
  Clone ID: PAT_MRT3847_45020C.1
gacaatggcaactgattcttactatatagttaataattaatgtacatggatcaatcaaaaaataataattttaaatgaacattatttccttgatacaaactgaatctgagaggataatttgacagcgtaggcccatcatttcattgagatttggttgccgaatttcttcaactaaaatcgatggttgatgtaaaatcttatcctgtcccaaagggagaatgtggtttcgtaaaatctgaccatcactgattt

SEQ ID NO: 81954 - DNA, 438 bp, Glycine max
  Clone ID: PAT_MRT3847_45021C.1
cccacacgttgtttcaggatttcgctcccgcctcaacacaccagtgacggcactggtacctacgttgtgaagctccacaatactgacgtgagcatgccagagacagctgcagaataaggacgaggatgtagatcaggtgagcactccactgcgaacaatcactctggcactctatgtatacaaggactagaagattgtggcggacatagtgatggttgggataatgatcaaagcacaagcgatcccaaaaaagcactcctcatcacgaagggtggcaggactcaggataccttggggacctggtaaacagccacagaagatacagctaaatcccacatcaaacaactgtggcgttgacacaaaaggctcgaccctcttgcaatcatacaattgtgaacgccactagactcatagaatcgcccgcaaatgcctactcag

SEQ ID NO: 81955 - DNA, 380 bp, Glycine max
  Clone ID: PAT_MRT3847_45022C.1
aaccgattcaacgttgaggttcatttttaatgagctcattgctttgataaaggatactcgtcaacatacaggatatattgagtggcacattaagatttaagatgtatacatagatgcttctcatgagacgctggtcgacgctattctgctggcatcttgcgagacagaacagtccatctagaagtatccctatggaatttggtcaaagtgggtcatctatgttcgctcccaaagctcatgtggctgccatgcgtgcgattgcctactcaagttcgtgggtatggttctcatgatgctcacattcatgacaagtaatcttaagacgctatgagattgtaagttccattgcctcacacaactttacgtgatgaatccatgac

SEQ ID NO: 81956 - DNA, 234 bp, Glycine max
  Clone ID: PAT_MRT3847_45023C.1
gacattacaaacattctctccattgtctttgaacactcatcaccatggtcaaccttgttcgttctctttgtttccttcttttcggtggttggctcgctctgagtgagcaggcttaccatagtgagtggcatatcgtattgctcaatgccctcaaaccggctaatcgtatacagtcggcatgcgggtgcattgagacttgggtcccttacagtacactattccactctttcggtg

SEQ ID NO: 81957 - DNA, 291 bp, Glycine max
  Clone ID: PAT_MRT3847_45024C.1
aatcttccttaaaccattcaattttaaaactccattcttaaaaacttgtattgacggattaattctgcaattgtaaaacggaaccccaaactgaccccattacctattggcctaataaagcgccattttaacctttttaaaggcttaaacagggttaagggtctccaaaacccagattatatgtgagcgctctcatatgggggatacccccattttgacagagcatactctcatgcccggttgcaataatacacaatttgccactagcttcttagcagatcttatcaccct

SEQ ID NO: 81958 - DNA, 243 bp, Glycine max
  Clone ID: PAT_MRT3847_45025C.1
aagcaatggcagcgggataatttagagtcactgatattacgagaggggtctttttgtaaacctccttttcaatgtcaaagcaccaatttataaaacgctgcagatgtagaggttatgtgcaactgatctgtccagtttgtgtatgaaatggatttgataaagtttttgctagttatttactacattttgggattaataagtgcattatatgcatatttttccggaaatctacagttttttgta

SEQ ID NO: 81959 - DNA, 300 bp, Glycine max
  Clone ID: PAT_MRT3847_45026C.1
ggctcgaggttctagatcgcgagctgccgcctttttttttttttttttttatattggattcagtgttgttttttatcgtccgtatccccaccccattataacatcaagcaccatcaagaaaatgacgccttatttaaaccaaaatacccgaaataggtaaacaagaagtaaccgcctccttgtacacataaacacctaatactaaaccaagacaaatgtgcatagctaaatcgttaacaaaagaaaccttccaataagaaccaaggatgaaggttgccgccaagagactccacataaaca

SEQ ID NO: 81960 - DNA, 253 bp, Glycine max
  Clone ID: PAT_MRT3847_45027C.1
ctgaagattcatgcacaaattacgtaattagttgtccacgatataagttgaattaaatacagttctttgtgtcgttcacccttgttttggttctttctcatccaaagtccgggcaccatgtaggttatgatgctaaatgcagccaataaaattgagccgcttttaactatagatatgttcccaggctaggatttgcattaaactagcctgacttatttaactagtgtcttttgaaggcttgatttgatttttt

SEQ ID NO: 81961 - DNA, 591 bp, Glycine max
  unsure (1)..(591): unsure at all n locations
  Clone ID: PAT_MRT3847_45028C.1
cttctccccgttgccagtgatcctaatgttgctccgtgcgcgaargagtcgggcttcaacctgatcccgccgacgggtctcccgaacgacgaccagctcaagatcatgtgtggatcggctgcttgcaagggcgtcattgatgccgtaaagaanacnagccccagcgactgcgacctcaccgttggcaaggtcaccttgaacgtcttctcgctcgtgaacaacttcccgaacgactgtcagcgtgttgctggtacccctgctcctgcacctggcccagctccgacgacggctcctgctccaggcccggcaccgacgacggctcctgcccctggccctgccccgacaacgactcctggcccggctccgaccactgctcctgctcctggccctgccccgaccactacgccgtcgccggttggacaacagctgctaagcactctctcactgaggttccgtcgttagaaccgacgccgatccagtacaacctcncgctcgcgaccaattttcggaagctggggtaactgacnatgtcgttgtgccctttgatggcgttgttgcggtatctccggctancttgcgtcttgttcactc

SEQ ID NO: 81962 - DNA, 859 bp, Glycine max
  Clone ID: PAT_MRT3847_45029C.1
aaagagctgcagattgagatggattaattatctgaggccagacctcaagagaggtggatttactgaaatggaagaggatcaaattatacagctacattcatgtctaggtaacaggtggtctaagattgcttcacattttcctgggaggacagacaatgaaatcaagaaccattggaacacaaaaatcaagaagaggttgaagctcctaggtttggaccctttaaccctgaagccatctgagcaaaaggaaaagtctgttgatgacaaaaaaaatatagaattacaaccaaacacttcaaaagggtctgaacaaggtgtagagaacaagtccttagatatgcatagcacaagagaagtgccaaaaacagaagggaaaatagaagaaaacaaggtgacttgggatgataccactggatttttcaacaattatgaaatgttgtgctcacagttggacttgggatcatggatgagccaagaaaccaaaaccagcactagttcttattgtagttcttctttctcacttgatgattctagcaacctttctgtgggtgaatcctcttaccttcaggaaaattccttacaacaatgggttgatggtttggattccattttgtcatgggatagcttcaatcctcttgagaaagattttctcttcttggataataggcaatgagcacaaccacctcatgaaactgcacaatttttacaatctctcaatcaataaaatgttacaacatttcttgtgtagaatactgccactgcttttcttaatgtgattccatattgttgaatgtgaattggatattttgttattgcttgttcatccatattatatgaattaaccaagttgaatgaaaaa

SEQ ID NO: 81963 - DNA, 472 bp, Glycine max
  unsure (1)..(472): unsure at all n locations
  Clone ID: PAT_MRT3847_4502C.1
cgaccatctactaggaagcggccgccctaggtttttttttttcccttcggccactaacgacagcatagaggtagaacgatactacagatggtcattgaaacttgagaaggcgaatatccttatcgccgcctgcaaagtacgcctcactacccctggttccactcgcactaacttcgttgataccgtgtggacattcaagtggcgtgttttttggggaaatgactgaaggccccgctaactttggggngagtgaaagtacctcctctcctacatctccttttacggacgggataattgggcttggctttcacgcataccttctacaacggacaccgacgaccccaccttgccacgggggctgcggcctacatgggccaccattggttgctgagcccccagaatctcggcgacggtgccctgggtcttgtcaacttaaacaactactacgaaccttcccttagacgcgcccggc

SEQ ID NO: 81964 - DNA, 440 bp, Glycine max
  Clone ID: PAT_MRT3847_45030C.1
gagatgtcctgtgtccgatcaagggagggagggattggcaaatggcgtgcccaatttggcgaaagttaaggctaagaagcgtaagggggttacccctgagggtggcgattggttgaggaggactagagggtgagttgctgttaatttaaatactgttgaggcataccttcaagaagcgagtgctattgatggaggggcacacgacaatcgctgacagttttctcagatgcctgcccaaatcggggccacagcagcatctgcatcaagcatcaccactcggtctagttcgatcaagttgagattagggcttttgtctggaaggagtttagtgtctaacacttttaagagatgggcaggtggtaacactagtgcacgccatggttatggatagcacggccaaagctaacctgagattttgggcatttttcattgttttggga

SEQ ID NO: 81965 - DNA, 253 bp, Glycine max
  Clone ID: PAT_MRT3847_45031C.1
ctagggatatacagaggactctaagaggagcaacatcgagcaaaatctcgtgcgaattgctagcaatggcgaggatcaaggtttacgagctgaggcagaagacgaaggctgatctgatgaatcaactgaaggacctgaaggcggacttgccttgcttcgtgttgctaaagtcaccggtgggtgccctaacaagctttccaagataaaggtggtgagcacccacattgcccaggttttgacggtgattactcag

SEQ ID NO: 81966 - DNA, 772 bp, Glycine max
  Clone ID: PAT_MRT3847_45032C.1
gagagtaaagtacatgcgaatccgatccgtaggtaataataacatttgaagaaacacaaacacacgacagagttcccacgcgtccgccgtggttgagtttgaacctcaacaactacgcctcttcatccccaacttcctctccctcgatgaatgcaaagaattggaattcatccataagagtagcagcacggtgggttacagacccaatgtcttctccaccactctctcccatctcattgctaccaactcttcccacttcatcattccttttatacccatcagagaaaggttgaaagacaagttagaggagtttttcaagtgtgagtatgagctcttcattgaattcactggtttaatcagttggagtagaggagcaagcattggatggcatagtgatgataacaggccctacctcaaacaacgccacttctcagcagtatgctatttgaatacttatggcaaggatttcagtggtggactctttcacttccaggatggtgagcccaagtcaattgtgccaaaagccggagatgttgtgatgtacacagctgatgaccgtaacattcattctgttgatgagataactgagggagaaaggctcacacttgctttatggttcagtcgtgatggctcccatgatgaggatatgaagctcatttctcttctttcacaacacctgctacatgagaacgtggctgattcatacctacctttgccagcatccagtaatatgtactggttttctaaggaccaagcttccaattatcaattc

SEQ ID NO: 81967 - DNA, 413 bp, Glycine max
  Clone ID: PAT_MRT3847_45033C.1
attatgggaaaaaagaccattgtattgccactcttatgctcaattttgaataggaaaaacaccatatctccatgcaataattgggaaaacgtcctagccctccgttgactgaacatagactgaaaattggcccatcacatcagatcatcaacatttgatggacactactctacacccacattcgagaacttccgaatataaaaccgccctcttagatcatccaaagcctcacagtttatggaaacacgtttcctttcgaaactcccagtttggcctatgtgaagaagatccttccctggtcgcgtgggcagataataggttataaccaaagacacctgctgatcatctatgccaccagccaggatgtcagtgggaactagacctggggaagagcccgagcaccattcccgcat

SEQ ID NO: 81968 - DNA, 383 bp, Glycine max
  unsure (1)..(383): unsure at all n locations
  Clone ID: PAT_MRT3847_45034C.1
agggatcgtatctgatctcgganactaagttgaangttcgcgcgcgtcagctagctatctggctcgagatccacaccacagagtaaaactacttcctcttgaggagaatggtcctctgaatccggagccggggctctacccagcgactttgccagaaggggatatctggagtaactgaaagtgtcccaatctcatttaggagaacagtactatttgcgtgccactttctggattgattaaccatcttatggagcagaagggctgtaatttacttccttcatgtctctcgaataacattttttaattgggtctcaattttcctttaaaaatggtagacttacttgcttcttaaggtagcatccaagttgatgatgcaagctttc

SEQ ID NO: 81969 - DNA, 505 bp, Glycine max
  unsure (1)..(505): unsure at all n locations
  Clone ID: PAT_MRT3847_45035C.1
ncttctctctctctctctctcaactcaactagttcttaacttgttacagaaagttctctctttttatgttctttctgcctccaaattaccactctcttcctatgctatgatacagatacaggaagaggatcaaaataccccaccataagacaaacccaaaggaatagcaacgtcaattatggtgggaggtttcaatggagaaggtgttgtgagagaaaaagaggaagaagaagaaaacaacaagtggccttcatggctgcagccacttctcaagacacgtttctttgttcaatgcaaagtccacgcggattcccacaagagtgaatgcaatatgtattgcttggactgtgtgaatggagccctttgctctgcatgtctctctttccacaaagaacacagaataattcaggtgtccaaacttacattattaacagtgccaagattgtgttcttaaatgaaaggccccaacctaggcctggaaaaggggtcaccaatacctgccaag

SEQ ID NO: 81970 - DNA, 1459 bp, Glycine max
  Clone ID: PAT_MRT3847_45036C.1
aaaaatgtcgtcgttgataacagatttgctccgtcaaaccggcggcaccgccgtcatcgacggcggtctggcgacggagctggagcgccatggcgccgacctcaatgatcctctttggagcgccaagtgcctcttttccttccctcacctcattcgccaagtgcaccttgattacctggaaaatggtgcagacattataatcacagcatcttaccaagccaccattcaagggtttaaagccaaaggctattctgatgaagagagtgaagccttgctcagaagcagtgttgaaattgcacgggaggcacgcgaagtttactataaaaattgtgctggatgtcgttcgggtgatggggatgatgatggtagaatcctcaaacaacggcctatcttggttgctgcatcagtagggagctatggggcttatttggccgacgggtcagagtacagtggggattatggtgatgctatcacggtggaaactcttaaagattttcatcggagaagagttcaaattttagcagattcaggtgctgacctgcttgcatttgaaacagttcccaataagcttgaagctgaggcttatgctcagcttctggaagaagaggacataaaaattcctgcatggttttcttttaactctaaggatggagttaatgttgttagcggtgattctttaatggaatgtggctctattgctgaatcatgtaataaagttgtcgctgttggaatcaactgtactccaccaagatttattcatggtctgattgttttgcttaagaaggtgactacaaaaccaattgttatatatccaaacagtggggaaacttacgatgctgacctaaaggagtgggtgcaaaatactggtgttacagatgaagattttatctcatatgtaaataaatggtgtgagttaggagcttcccttgtaggtggctgttgcagaacgactccggatactattaggaagatatacaggaccctgtctagcagtcaatcaatctaatttacatgtcaacaaggttggcagctgcactggatctagttgcttctctgggctaagataggaccataggatgatttggctaattcattatgaaatattggtcaatgcaacttggaatatgctttgcccttggagctagcaacctgaaaatcgcaatttgtgatcaagagaaagatgcgtgttgtccttctcgttgattttgaaaaaaaaaaagaacgtggcaacttatgcagaattttagtaattgttatgtttattataacataatttaggattattagtatcttaaacattttcctaactaaaaatcatgttgagtggagactcacgagatgaatacttataaactcatatctttttgtctgttttgttcctttttttcggacctggaatattttcattttaaaattgtaatcttaaagattagccagtgttatggccaaattaatacgt

SEQ ID NO: 81971 - DNA, 739 bp, Glycine max
  Clone ID: PAT_MRT3847_45037C.1
attatttatttgaagcaaaggaaatttttattgatgatgagcatgcccaacaacagccaataaagcaaatacatatgcatagaccctaatgtgatcacatgctttcataaagactaggagacaaacgaggtttgatgagaacttcaagtggagtaaccttgacattggtaatttctaccgcagcagtcatatctataggttcacttgatgtctttgagacttcaaagcagtgaagaaagtttgccaaagtcaaaagagatgttctaaggccaaatgatattccaggacatatcctcctaccacttccaaaaggtatgagctcaaaatgccttcccttaacatcaatgtctttgtgggtagtgagaaacctttctggcttgaactccaagggctctggccaaatgctagggtctgtttggatcttccacaagtttgtgattagtctagttcctttcttcacatggtactctccaaccttgcaatcttctctgaattcacgaggtcctgaaagaggagtagctggatatagcctcagcgactccttaagaacagcttgtaggtacaccaacttgcttatatcttcctcggttacaattctctctttcccaatgtgtgtgtcaatttcttccttcactttttccaatgtatgaggattgttcaatagcaaacacagtgtccaaatattggtagcagagctagtgtctgttcctcccaaatcattgccattgccgttgctttg

SEQ ID NO: 81972 - DNA, 1196 bp, Glycine max
  Clone ID: PAT_MRT3847_45038C.1
ctctctctcaactcaactagtttcaccacttattacagaaagttctcttttttttatcttcttctttctgcctccgaattaccactctcttgctttgctatcttacaggaagaggatcaaaataccccaccataagacaaatccaaaggaacagcaacatcaattatgggaggtttcaatggagaagaaggtgttgtgagagaaaaagaagaagaaaacaagtggccttcatggctgcagccacttctcaagacacgtttctttgttcaatgcaaagtccacgcagattcccacaagagtgaatgcaatatgtattgcttggactgtgtgaatggagccctttgctctgcatgtctcgcttcccacaaagaacacagaataattcagataaggaggtcttcgtaccatgatgtgataagggtgtctgagatacagaaatttctggacataacaggggtccaaacttacattataaacagtgccaagattgtgttcttaaatgaaaggccccaacctagacctggaaaaggggtcaccaatacctgccaagtctgtgaacgcagcctccttgattccttcaacttctgctctcttggttgcaagattgttggaacctccaaaaagttccggaagaagaaaatgttaagtgaggcagatgggtctgatggtgaagaatcagtaaatggcataataagcaatgcaagtgccagaaacaaaatccatagctttacaccctcaacaccaccaccaacagtggttaattacagaactgccaagagaagaaaaggaattccacatagagctccaatgggtggagggcttattatagaatactaatgttgtatagtggttttctgtcacttaccaatcaatatttatgccaaaaagatacagcagttgttaccacttccttgggtggcaccctcagaaaaaaaaaaaaaaaaactatgctccatatatattttatgtagttgcaatacctgtgccctgtcactgaggccggtgttgggaactactgctttatcttgtataagacaaaaaaataggatgaaaaatgtgtcaaaaagtaagtaataatataacagagtggggagtactttatgttgatatgtgatgctaaatgtacatagtggcttgtagaaaggaattgtagagcaatagaatcaaattagacaataaaaaaatattatgaactc

SEQ ID NO: 81973 - DNA, 1366 bp, Glycine max
  Clone ID: PAT_MRT3847_45039C.1
cccctcgagcttccttcttccaaactttatctctctctctctctctctcaactcaactagttcttaacttgttacagaaagttctctctttttatcttctttctgcctccaaattaccactctcttcctatgctatgatacagatacaggaagaggatcaaaataccccaccataagacaaacccaaaggaatagcaacgtcaattatggtgggaggtttcaatggagaaggtgttgtgagagaaaaaggaggaagaagaagaaaacaacaagtggccttcatggctgcagccacttctcaagacacgtttctttgttcaatgcaaagtccacgcggattcccacaagagtgaatgcaatatgtattgtttggactgtgtgaatggagccctttgctctgcatgtctctcttcccacaaagaacacagaataattcagttaaggaggtcttcgtaccatgatgagatatggctgtatgagatacagaaatttctggacataacaggggtctaaacttacattattaacatgcccaaaattctgttctcaaaggacaggcactaacttaggcatggaaaatagagcaccaataggtgcaaggcttgttatagaatcctaatgttgtatagtggttttctgtcacttaccaatcaatatttatttatagcaaaaagttacggcagttgttgttaccacttccttaggtggcaccctcagaaataaaaaaatatgctccatattttatgtagttgcaatacctgtgccctgtcactgaggccggtgttgggaactactgctttatcttgtataggatgaaaaatgtgtcaaaaagcaagtaataatataacatagagtggggagtactttatgttggtatgtgatgctaaatgtaaatagtggcttgtagaaaggaattgtatagagcatcaaattagagaataaaaaaatattatgaacaagagaagaaaaggaataattacatagagctccaatgggtggagggcttattatggaatactaatgttgtatagtggttttctgtcacttaccaatcagtatttatgccaaaaagccggtgttggtatcagctcctccatgtgggatgttgtatggtacaaaatataggaggaaaatcccccccacccccaaaataatcataaaggaaaaagtataggttaaaaattgaaataaatatagaatatagagggggggtaatttacgctggtgtaactcatatcatatgtgttggtatcagatgcgcaatgtacaaagtggcttgtagaaagttgttgtattttacacaataaaagtctttatcgtgattattaaaatattccagagagagagagagttgtaaaacgcgtcg

SEQ ID NO: 81974 - DNA, 4438 bp, Glycine max
  Clone ID: PAT_MRT3847_4503C.1
cccacgcgtccgcaatcatgagagagaaataccacaacaacatctccattttctctctaaccatcgttgcctaaaataattcatcctcctttttatattctttatttatttattttgttccatcggagctgcattttccttttccttttttttttttttgtgttttttgaatccgatcgatatgaacgcagcttcttcttggtttgttgaaattttggcattaaatggtcggaattcggcgttgggattagcttagggtttcaaaaaaataattctcttttttttttttctaattttgtgttttttaatggaacctcgtattgggaataagtttcggcttggccgtaagatcggtagcggatcgtttggagagatctatttaggtactaattatcaaaccaatgaagaggttgcaattaggctcgaggttattggcaataacaactggaaagtatcacaccttgttgatcagcaattcttctgtctattcttgtggttctggtttgtgtggtgtacttggtcaagggtctgaaacaacacagtgtgtagcatttacccggattgatttcccacctttggcacgagtggttcacgtttcagcctcctttaaccatgcagcttttgttatgcaatctggagaggtattcacatgtggagataattcatcttcttgctgtgggcatacggctgcgagaagacgacagaatggggccacgccttgttgaatccctgaagggaattccttgcaaacaagttgcagcggggcttaatttcacagtcttcctcaccagacaaggtcatgtttatacatgtggaaccaacacacatggccagcttggtcatggtgatactcaggacaggccaacccccaaaatgattgaagtccttagctctgttgttcagattgctgcgggaccaagctatatcttatccgtaacagaaaatgggacagtatactcctttggatcaggtgctaatttctgtcttggccatggtgagcagcatgatgagttgcagccacgtcctatacagaaattcagagggaaaggtattcatattgttcgtgtatctgcaggggatgagcatgcagtggcacttgactcaaatggatttgtatatacatggggcaagggatactgtggtgctttaggccatggggatgagattgagaagacaactccagagttgttgactagtctcaagaatcaattggctgttcaggtctgtgcaaggaagaggaaaacatttgcctgatcccaccatgcagcaccgtatcatatccaaatcccatcactcttacgctttctttctttttttcttccaaattctctctttcttctaacctaaccctacaattatgccccattaacacaaatcgcaattaccccaaattcctcaccctagcgtagatcgatctcttcttccttcgtgaattctggttcagggtggctgccatgtatggcacttagtattttccctttttgaagattaggggtgggtgggttgtgtctcgcttagggttccaaagtttgttgttttgaatggaacctcgcgttgggaataagtttcgcctgggtcggaagatcggaagtggctcctttggggagatctatttaggcactaatattcagacaaatgaagaggttgcaattaagcttgaaaatgtcaagacaaaacatcctcaattgctgtatgagtccaagttgtacagaattctccagggaggaactggaattccaaatgtcagatggtttggagtggagggagattacaatgttttagtgatggatctgcttggaccgagtcttgaagatctttttaacttctgcagtagaaagctatcactaaagacagttctcatgcttgctgatcaaatgatcaaccgtgttgagttcattcattcaaaatcgtttctgcatcgggatatcaaaccggataattttctaatgggattaggaaggcgtgcaaaccaggtttatgctattgattttggtttggctaagaaatacagagatagttcaacacatcaacacattccttacagggaaaataagaatttgactggaactgcaaggtatgccagcatgaacactcaccttggcattgaacaaagcagaagagatgatcttgagtctcttggttatgttttgatgtacttcttgagaggaagtcttccttggcagggtcttaaagcgggaacaaagaaacagaagtatgagaaaatcagtgaaaaaaaggtttctacctcgattgaagccttgtgtcgaggttatccaacagaatttgcatcttacttccattactgccgatcattgaggtttgatgataagccagattatgcgtacctcaaaaggatatttcgtgacctgtttattcgtgaaggattccagtttgattatgtctttgactggaccattttgaagtatcagcaatcacagctagccactcctccaacacgggccattggtcctagtgctggaaccagttctggaatgccccccgctgttactaatgctgataggcatacaggaggggaagaaggtagacctcctgctttggtttcagtggattcctcgaggcgcagaatgtcagggcccattttaaatactttatcaagtgccaatgccttgggtcagtcaagtggatcatctaggagggttgctgtctctagtagccgtgatgcatttgttggtgctgagtcagatatccgtactcgcactgctgaggctagccctggagcagcacatcgagctttgagtgggcaaagaagttctccaattggatcttctgatcctaagagagttgtatcatcagggagaaatgcttctcatgtgaaaaattatgacactgcacttaggggcatggaaggtttgcaattagaaaatgatgagaggacccattattaatttcacaacttctctcctagtaatttgtgagttgataggcactgccaacgttgcttgtgttgctaagttgagctgtgagaaaatttggatctgaacttgaaattctggctttgtattgttaacccatctggtcaaaccgatgaagctgtgaagctgaaataatttgagccaaaccagggattgtgcttgctgtaaagctcagttttaattggttcttctagctggaactcctaagttttataacatttttctgagttattatattggtttaccagatgtttacagtttcacgtggactgcaaatgtcaaaaactatcaaataccagcaaaaatgtaattagccattgtactcttgttggataagattcccttggtttacacgatgtaattgtctggcaaatattttggtattaggaacttgaatgttcgtatttgtgaggttccttcaaaagcttaaatgcatctctgtagtttttattagatctatcacaatgaactcgtatgcattttatgttgatctgtgaaaaggttttcattattgctgatcaagcatggaagctgaaaaaatttgagctaaatcagggattgttcttgcttcgaagctcagggtttacgctggcactagtcttctggcgggaaccctaaattttgtaaccttttcctgtgagttattattgatttaccagatgtctaaagtgtcatgtggatcacattgttcaaaactatcaaataccagcaaaaatatctactcaagttttggataagaccaaagtttccaagatgtttctggagattactgcggtatttaggaatattcaaggttcttgaaatgtttctaccttgtgaaattcttataagcttgaatcctcgtatttctttagtttgtctttaatgttatctcgtaataatatctgtaaatttttattctttaatttggaggttttttttctagttggttagctagggctttggctccatgggatttggcagcctcggattcctcgatagaagggtatctgataaagtattgaaacctagaatcttagataccttgagaactcatcatgtttctcaaattagcactggcttgtaccacactgtggtgatcactagcaggggacagatatttggctttggagacaatgaaagagcacaacttggtcatgacacattaagaagctgccttgagcccactgaaattttcattaaagatgtatctgaagatgtagaaagcatctgaggctccaaaagcaatcacctctttttatttgtggttctgctataccgcattgatcactactactgttaaagtttactgttctattttatagtacgttataattatattatagttattaagaataataaatataacatgcaacattgtcaccatttttcaatagggtatgattttattttgttgagaagattctggaactccttttttggtttgctggcttttaattttattaatgaataatgaactgttattagtccttaaaaaagaaaggaaaaagggggggggaaaagcg

SEQ ID NO: 81975 - DNA, 515 bp, Glycine max
  Clone ID: PAT_MRT3847_45040C.1
ttttcttatcttttagccttttttctgtaaaaaaaatgtagcttattttgctttcagaaagctttataatcaagatgctgcagatagagcttgtagctgaaaagtagtttctgcataaaaattaagcaaaactatgtgaattatcattcacaaacacccatatgcagtacatcttaatgcagccgtttctcctcttgagggcaaacgacatctaattctgctagtcactctgcaacacccatttgcataaaattttcattaattatctcaatggaataaaagtcaattcaaacgttaaaatggcaggtttgtatacttaactctgaagtttctgtcaatgtctttttttaggttagtggaatattggtatgtgaagctgggtgcatattggaaaatataatgtcattcctggacaatgaagggtaatcctgttcactttataaagttattgtaatttggatcaatttcatagaactgtaattatctttattgtaaaatttgggtaatttatgctg

SEQ ID NO: 81976 - DNA, 330 bp, Glycine max
  unsure (1)..(330): unsure at all n locations
  Clone ID: PAT_MRT3847_45041C.1
cggatngatnttcccaanagaggtatgtggtcccaataatggttttgaaatgtggagtttctgagtgggcaaatcaaaacttccatgggcaatttgagntttccntnaattngacaaatcccccaaaaccaatcctaaccagttttttggataattcctccttcggggaaatctcctccaaggattttnggaanattgccngggtaaataactccttaatggcccagctttttcctgttcccaacaggggctaactgnccagnatcctttctggaaaaatgncgggaatccctcctgncatggatcctgggaaattttgtgttnttcctt

SEQ ID NO: 81977 - DNA, 998 bp, Glycine max
  Clone ID: PAT_MRT3847_45042C.1
acggctgcgagaagacgacagaaggggttcttaaatgaaaggccccaacctaggcctggaaaaggggtcaccaatacctgccaagtctgtgagcgcagcctccttgattccttcaacttctgctctcttggttgtaaggtatatttaaatggaattcctaatcttaactacatcttagttgtaacaaaatatgatgaatagatttcctaattttttaagaaatgttgtatgtcctttgtaaattgtaactacctcctacttttttgctgtataaagtatgtaacattatagttgtactttttatgcctgctttgaaaaagtaagaaaaaaatgatgatgagaacagttggatacgaatgaataatgatctcttgaacttttgaattttcttctcagattgttggaacctccaaaaagttccgaaataagaaaatgttaggtgaggcagatggtgaagaatcagttaacggtataagaaataatgcaagtgccagaaagaaaatccacagctttacaccctcaacaccaccaccaacagtggttaattacagaactgccaagagaagaaaaggaattccacatagagctccaatgggtggagggcttattatagaatactaatgttgtatagtggttttctgtcacttaccaatcaatatttatttatagcaaaaagatacggcagttgttgttaccacttccttaggtggcaccctcagaaataaaaaaatatgctccatattttatgtagttgcaatacctgtgccctgtcactgaggccggtgttgggaactactgctttatcttgtataggatgaaaaatgtgtcaaaaagcaagtaataatataacatagagtggggagtactttatgttggtatgtgatgctaaatgtaaatagtggcttgtagaaaggaattgtatagagcatcaaattagacaataaaaaaatattatgaactactcatgatgggtattaattatattctcttggtttggt

SEQ ID NO: 81978 - DNA, 287 bp, Glycine max
  Clone ID: PAT_MRT3847_45043C.1
cgtacgaattctcgtcgagaggctcgagttccatagataccatatccgatcacttggcttcaagcagtctgccgatagttgcaagggtgtgcgtcagtgtcgcggctttccgcgtctataggcgctaggacatagaaggtctcgggtgctaagttgggtttgacgcggcttctcgacgttgtaggcaactgtagtcgactctcgatttctcccagaggatgacgaatgctgccgtggtatccatgtcgaacaactgctcggatcttgtggtgtttcggttgtctaga

SEQ ID NO: 81979 - DNA, 162 bp, Glycine max
  Clone ID: PAT_MRT3847_45044C.1
gcgagacatttgatcactacctactaccatgagactgtgtatagactgatgaatgcacattccactaggaatcttgaagatcatgtattgtgatgatgatgaaagctgcataaatgttacagtgcttcatgtaaggaagttttccagatttccagactagag

SEQ ID NO: 81980 - DNA, 254 bp, Glycine max
  Clone ID: PAT_MRT3847_45045C.1
gcgaaatatacctcattatgtgattatcttgtaatttcacagttttattgttatatatttccagggtctttctgaaggaacattttcttgattttcaatgggaggaacaactttgattttttttcccgctgaaggaaattgtaaaccaatatctatggcaagaaacaaggagagtgaattatgcttatgacttaccaataaaaaaacctagtattcttttcatatcaaaaaaaaaaaaaaagggcgtccgccga

SEQ ID NO: 81981 - DNA, 362 bp, Glycine max
  unsure (1)..(362): unsure at all n locations
  Clone ID: PAT_MRT3847_45046C.1
tggacgagaggtgggagccaaaaggatggagcatccgccggtggtcgctggtggccgcaatctgtggtgggcctgatcggggttgtctcagtnctgcctgatagtctacttcgccgacgcagcgcacagcgagggcctgtaagaacgggttgcggttgcaggatgagtgccgaaacaccacgcacctgttgaagcaccagctcacccgcgcccaggacagcctgctgcagacggagatgcaggcaaactcctgcaaccagaccgtgatggaccttcgggattccctgaagaagaaggtgtctcaaacccaggagcagcaggcccgcatcaaggaattgagaataagatcgagaggctgaacc

SEQ ID NO: 81982 - DNA, 232 bp, Glycine max
  Clone ID: PAT_MRT3847_45047C.1
acagatccagatatatcaccatgcgatcccaacgcttacatcggcacaaccgaagtacatctctccttcacagattgatcctcgcacgagacacattgtgcctcacaggaggctgacattcgctgacgccaatattcggactcttaagacccttatgactgctgctcttcatgccacgaatctcagtaacccttcttcacagaatatgatgcgggaagcgtctaacactcat

SEQ ID NO: 81983 - DNA, 502 bp, Glycine max
  Clone ID: PAT_MRT3847_45048C.1
cccacgcgtccgtacggctgcgagaagacgacagaagggggaagaccaagacgaagaagaagaaacaagagcagcgagaaactgagtgaggaaaggatgaagaaagcagagtgagtcccgttccattccgtatcgttcatcacattatattgattcctctccaaaaaaccctctcaattgcacgttcctcaatctcacttatgggcgaacagacgctaggtcaagcacaatccctaatcgaacctcaacctctccccgccccctcctcaactgccgtccccgacggtgccacggtggactccgaactaaacaatgtccctcggccgacaacatccccagccacgaaaatccccctccgtccccgcaagatccggaaggtctctccggacccctccacctccgaatcccaaaccgaaacccccaaacccgccaaaaccgggggccgcaacaccaccaaggctgctccgccgcgagcccttacggtggtccctcgtatagtggc

SEQ ID NO: 81984 - DNA, 222 bp, Glycine max
  Clone ID: PAT_MRT3847_45049C.1
gaaaagaaaataatattttcataattgttggtagacaacccagaacaaataagcgaatgttccatacatactctaacggtgatacttttggatcactgaatatagctcgctgactgactgactgcaaccatagatgataactacgctggatctctgatctactcatccgccaaactattaattgtttttatacacccttgaaataaacaagtataccactaa

SEQ ID NO: 81985 - DNA, 361 bp, Glycine max
  Clone ID: PAT_MRT3847_4504C.1
gggttgagtttttgaatcatggttatggttttaagacgacaccgctgctctgcggggtgggtttatttgttaccctggctattatttccatcactcattccaagacttgtgccacccattcttgacgttgctaaggacaaccgaaccagcttcccctcaggttatgcctctgggacagcgtcagttgcctaccattaataaggtgctgaaagggcaggcggaaatggaccgagaataggggatactttcactacataaatacgcagaaaaaataaaagaccacgcttacgcccatgcaacggtacacgaaaaacatcggtataaggaggatattgtaatcatgaagtacataaagttggat

SEQ ID NO: 81986 - DNA, 422 bp, Glycine max
  Clone ID: PAT_MRT3847_45050C.1
gatatgtaggtagcacgggagttgtgcctttgctaattactcatgctcaaccttgcgcagaggccattctagaagaacacattttgttggaggaggatcattaagataagaaacactaggcgctgaacaagggtctttgctttgttttcctggctaggcagcacacaccctacaataattgccctgagtatgcaggttcaacgcgagagatgggaattactgagagcactagggtcaaagggggacgcagttgcattaatagcattttcatgatgttgaccattgaggaagcgccaagctggaaccaaatcaattcagtggatctgagagctgcacacaagaacatcaagagggacgcatcggttgatgaatgaagtggcggcaaagttgacagaggatggttgcatgagaagacactgaca

SEQ ID NO: 81987 - DNA, 372 bp, Glycine max
  Clone ID: PAT_MRT3847_45051C.1
ttggggggggggggggggggggggggggggggtcgtgaattagaataacagagttagctaaacgaataacgaaaacggattttagcaatctacgaaccaatgaagtaaaattacaagagaattaaacgctatgatataccaggccgtaaaggcttattgggtggatagttggccttgatgtcgggtaatgcaagccaacacttctgatgccgaaggttggattagtacaccagagtggtaaccaattgtcagcacttgcaggttgcgatcagccatgcgctagacatttcctttacggagatacactatgggtagtaggtatgcaaagtaggtaataaagatctaagagctagtatagcgcccttttcaaaa

SEQ ID NO: 81988 - DNA, 407 bp, Glycine max
  Clone ID: PAT_MRT3847_45052C.1
tctgttcaaacgtgatcttattaaatgaaacataggaaatgaagattcacttatcctattgaaaaaacaatcgcgtgtttttagtatgaaaaaacacaaccgcggaggtgtattttctgctagtgagagttggacacaaaatagaacacacacgggtaaggggggattgaaggctcattacgtcgctttggaaaacaccaatgctatcggacaaaatcacataattggtgtcgcaaacagcaaccattctccgtttgaagggtaacaccactttgtgaatactgtagttcccgggccaccttgttgggtttgagacgaatgtccaacattctttcctgggatgggaaaagaaaaacttcagccattttgtgcagaaagtaattgcaccctctttgatccgaaacaaa

SEQ ID NO: 81989 - DNA, 133 bp, Glycine max
  Clone ID: PAT_MRT3847_45053C.1
tgacacgaaactacattcagaggctaagactacacgagtcgctacatagaacatagagagagagtatcttgaagacgatgaccctaatacggaatgttgaggtgaggcttgtgatgattttggaggatacttt

SEQ ID NO: 81990 - DNA, 266 bp, Glycine max
  Clone ID: PAT_MRT3847_45054C.1
gacactaattaacagagcatgaaaacaaccttcgttgggtgggttcttgatcagtgtcaaaaccaaaagggtggttgcaaattgcaatggctaatcatggtgttgagggtggttccttcactgcaaaggactaccatgatcctcctccatcaccattgattgatgctgaagaactcacacattggtccttctacaaggcttttattgctgattacattgccacaatgctcttccttttcatcacattgctcactgtgattggttac

SEQ ID NO: 81991 - DNA, 234 bp, Glycine max
  Clone ID: PAT_MRT3847_45055C.1
ttagaattgaacatgtcatccatggtcatccaattcacaacttgctccaattcaacttatgctgcaaaactaacaagagttaaaactatgtggcatagcaataagacccaaacctttatcattttataattcatagataagccatagacgttaagattgtggtctacaaggtttacctctaaatcaaacatgatttatcagcactgtaagccaaggataatttcatcagcactg

SEQ ID NO: 81992 - DNA, 505 bp, Glycine max
  Clone ID: PAT_MRT3847_45056C.1
ggttttgttttttttttttttttttttttttttttttttttttttttttttttttggagagagagaaaaaagaactgaaaattttttaagaatagacccccaacctttttttttttttttgggcaaaaaattttttttaacccttaaatttttaggcaggggggaatgcttctttaaaaagaaacttataaagagaaaaccttttttttgaattgggggatctaaaaatctccggttggggaaagccccccccctagttttggtgaagctttgcccgtatagcccggggcttttttttagtctttgaattcggtgaacccttccaataacccccccccccgatttcacaggttggctttttttttttggaggttggggcaatattttttttggcttacccttttttaaaaaaaattggtttcctcaatttccggggggggaaagctttttcctcccccaattttgaaaatgggtgccccttggtatctgcccccctgtaaatttg

SEQ ID NO: 81993 - DNA, 338 bp, Glycine max
  unsure (1)..(338): unsure at all n locations
  Clone ID: PAT_MRT3847_45057C.1
gacatgccctccacccttacctaggcttggagttcgggttgaggacaacgcacttgagtatacttcagcaaagtttaatcaattctgtgaagaagctggcattgaacatcaactcacagctccatacactccagagcanaatggagttagttagtgaaaggagaaacagaaccgtgatggagatggctaggtgcatgttgcatgagatggagttgcctaaaacattttgggcagaggcagctaatacggctgttttcatgcaaaattggcttccaaccaaggctctgaataataaaactccattttttgaggctcggtattgggtttaagccttcact

SEQ ID NO: 81994 - DNA, 385 bp, Glycine max
  Clone ID: PAT_MRT3847_45058C.1
gcaaaaactggttatgctacaccaatctctatctattatgaagtatatctacatgcagaatatgaaggcggacttaacatactttcaatattcaatctttactgtatgggctatgatagatggacccgtacactatggcacatgttacattcatcataccggaatgcatcaatgatcacatactactaaaatttgcggatgacttgaaaaggctacttatagggatataaagatctcgacttgcttgtacgcttgcaatgaactgaacgtgaccatagatctcgagatcaaccaatgtccgtggggattgcactgccttggctgtgggctggacatcagctatatttgacggagcattgttatccacgaaagccatacacagaag

SEQ ID NO: 81995 - DNA, 404 bp, Glycine max
  Clone ID: PAT_MRT3847_45059C.1
cgcatctcaaagccaaagttgatgctggttttaagctgaggggactcatcaacacacatcaccaccatgaccacgccggaggaaacaaagagatttctaaagcattcggacttccagtagttggcggtcgtgattgtgctctcgtctcggagacacccagccatcaatccaatttcaaaattggctccatcaacgtgactgcattgcacacgccctgccacactcaggatagtatctgctttttcttcgaagatggtcaggatcgtgcagtgttcaccggcgacaccatgttcatcggaggatgcggacgctttttcgagggcacgccaaaagagatgcacaaagccttgaatgagactctcgcatccttgcccgacgacactaaggtctacccaagccacgaa

SEQ ID NO: 81996 - DNA, 472 bp, Glycine max
  Clone ID: PAT_MRT3847_4505C.1
catgaagggatgatgtgacgtgttgcccgtctaccacgtggagggttttgattggatgggagagtggattccaaaagaagggcgacctcctgctttggtttcagtggattcctcgaggcggagaatgtcagggcccattttaaatactttatcaagtgccaatgtcttgggtcagtcaagtggatcatctaggcgggctgctgtttctagtagccgtgatgcatttgttggtgctgagtcagatattcggactcgcactgctgaggctagccctggagcagcacatcgaggtttgagtgggcaaagaagttcaccaattggatcttgtgatcctaagagagttgtatcatccgggagaaatgcttctcatgtgaaaaattatgacactgcgcttaggggcatggaaggtttgcaattagagaatgatgagagggcccattattaatttcacaccacacctagtgaatttgag

SEQ ID NO: 81997 - DNA, 1249 bp, Glycine max
  Clone ID: PAT_MRT3847_45060C.1
atctgggttccacggtgatgtcatgtcaatggctgcaactctcactgctgtaagaattcccactttccaccaacgccatctcaaacaacacttcacggcaccctcttcctcttccttacgcctcctcaatctcgcaaagatggaaggaagtgagatcagtgagcaagtagtaggggaggatttgggagcaaagaagaaagtttttgtagctggagccactggtagcactggcaaaagaatcgttgagcagttactggcaaagggttttgctgttaaggctggggttagagacatcgacaaggccaagacaaccctttcctctgccaacccatctcttcaaattgtgaaagctgatgtcacagagggttctgataagctagctgaggccattggtgacgattcagaagcagtagtatgtgccacaggctttcgcccggggtgggatttacttgctccctggaaggttgacaattttggcacagtaaaccttgttgaagcatgcaggaaacgcaatgttaacagattcattcttatcagttccattttagttaatggagctgctatgggacagttactgaatccagcttacatctttcttaatgtttttggactcaccttggtagcgaaactacaggcagagaaatatatcaggaaatctggtataaactatacaataataagaccaggcgggttgagaaatgatcctcctactggaaatgttgttatggagccagaggacaccctttatgaaggttccatatccagagatctagttgctgaagtggctgtggaggcattggcttatcctgaggcattttataaagttgtggaaatagtgtctcgccctgatgctcctaaacgcccataccatgacctttttggttccataaggcaacaatgatgcctgagatttggacttgattgcagattagcaaatgttgatttgctttatggtggcaaatttgtatctcaactgtgttcctatgtgtgttgtttcattcaattggtacactagaataatgtgtaaatatttcagtatatctttaattttattctcctacctgccaaattaaaggttggtagataattcagcactaaaaataaagctacttctgtttagctaattcaattagcacatgtttgggtaaacgacttaatgaagcacttaataagctcttaccaaatgagagttagtcataagcttattgtaacaagttaaaaagagcttagtttgataagtttttttttt

SEQ ID NO: 81998 - DNA, 295 bp, Glycine max
  Clone ID: PAT_MRT3847_45061C.1
ggttttatctctatttttttttattccgttgtttttgtttttttttttatctattgatttctttttttccgcagggggaaaaattatttttgtttagtgaaggacccctgggacccgtggaaagaaaaaaaccagcggtggggaaaatccctccaaaaaaaggggggggaaaagcaaacctaggtaaacccccaaagttttttacccttccagaaaaaaacacgtgttcttttttagagggggaagggcctcccttaacaaggcgattacctccgcgacggggggggggacctta

SEQ ID NO: 81999 - DNA, 1116 bp, Glycine max
  Clone ID: PAT_MRT3847_45062C.1
tgaataggagataggattttttgtgcgggcttaggcagtcacattcatcatattcttcaaaaaaagaaaaaactagtcttagaaatgacacgatccttggtaatggcttcttcatcaatgtcatgtccgaagctggggaattgtgcagtgtcacatacaaagttccaagcttttcatctctcttcaatgttctctccactggatcgaggccttttctcaccttggagtggtttaaagcatctgggtatctcagctaaaccaaaacctcttcttcacatagatagaaagggagggtgtaagggtaaagtggtatatgcttctctctttggggttggagctcctgaggctttggtaattggggtcgttgctttgttggtttttggccctaaaggtcttgctgaggttgctcgaaatctgggaaaaacattgcgtgcatttcaacccaccattagagagcttcaggatgtttcaagggaatttaagagtacacttgagcgggagattggtcttgatgacaatttaagtcctacccagaacacatacaattccaatgtacgtaataccacaccaacttcatcatccccgcttggccccgttgcctcgcttgaccctgctaaagcatacagctctgaggagtatcttaagattacagaggagcagctgaaggcatctgctgcacaacagcaggggcaaacacctcccaaggaaggcgagaatgggcctcaaatccagcctcctgctgaggaaacagctactacagtgcctccacctctgaagccagaaagtgaaacgtaaactctgggttcataggcatagggagttaaaagtaacttgtccaattatcacttcagtgcccggaatgtaggcactactattggcacaagagatgagaagggtcaggcaattttgttaccaggtagtcattagagttatgtaaaatgtaaagaacaaaaccattagcgagtagtgtgtttccaaatttattgtagttatatttgtcattattgatcattggatatcagaaccgcaatgtaagcgttagcaatattttgtttgagctttgcttttggtaataaatccgactccttaatagcggttctgtttaaaaaaaaaaaa

SEQ ID NO: 82000 - DNA, 1833 bp, Glycine max
  unsure (1)..(1833): unsure at all n locations
  Clone ID: PAT_MRT3847_45063C.1
agggctcgaggtttctgcttgcggccaaccaagcagcaataaacgcaaacttacaaactggtttattctcaaacactttctttttctctctcttcaagctctctcccttcttctatacgatacgaagtttcctctatcttctcttctctgagggtagctttgattcattgaaggtttttccttcaccaactttccagaggaagaaagtgacttgatttctgggcctgctcgttttattactgagaaaccaaatacatgatactaaaaactcaaatggaagaaaagcagttagattttaatcagcctcttttatcggtaaggcgaatctcatcaacggcggcctctgaaaatgacaataaaagaaaagctgataaatcagtgcggaaacgacctcctcttccgttttacaaatcagagttaaaatcaggtccagtgactaaccctggaactgttccttttgtatgggagaagactcctggaagacctaagaatgaaagcaaactacaaacaagggctgtcgaacggccttccgttgctccaaagcttccacccgggagggttttgaaagttgaacagcaatgttctgataaagttcctaaaggtgcatcagttactcaatccagaacaggaagcagtgtttcagattctccgcgtactgcatctctagataataaagggctcgaacatgaaagcccccaagaagtaattgaggaaaaggaaagttctggttcagatgatgaggatgagaactatctagatgctcttgatacactttctagaactgaatcattcttcatgagctgtagtgtgagtggtttgagtgaatgggatgatcaagaggtccaactatcaggaaatttttcaacagatcaacaggcacgtgatttcatgattggcaggttcttgcctgcagcaaaggcaatggcttctgaaacacctcaaattcagcacaactctaggaagccacttgttacacaagaacaaccaaaacaggcatggaaggtagttagtggagcgaattcccgtccccttaatccaaaatggcaaaaggttttgccgcattatgctcaagatattggtagggaagagagcgaagatgaaagtgatgataatgatggatatgaaaacaatgcacccaaagtttgtgggctatttcctcggttctgccttttgaatccagttccaggattaagaatggagggtaggattcgaagttctacatttcatggagtgcagagtaaatcaattacttctcacagaagaactgcaaaagagcatggtagaactgctactaatgggaaaaagtcagtaaactcccagtctggttatacagaagagagagattttctgagtactgcagaaaaatctaagcatgatattgatccacatcgtagagcttgcagcaaatcatcagcctctgagagcaccgaatttgaatcaagttgtgatagccctgttgttgagaaaactctatatgtagattctgtacataaggtcaaatcttcagacaccaatatcagaggggatgattttgatactctaagaaaagacactgaccttgataaaagcctttctatagattcttcaattgaggatagcaaacccttgggtattgtggatgagaaggaagtatcagaacctaaaagttcagcttctcttgattcatctctccccgtttgttctgataattcaaatgacaatatgcaaatggaaatgaaaaatcattccaacaaaatatgcccagaaaagcaagagttgacaaagcctgattaccaaggaagtaacctagatcgcgatttggttgcaatctcagtccanatatggttgcatgca

SEQ ID NO: 82001 - DNA, 385 bp, Glycine max
  Clone ID: PAT_MRT3847_45064C.1
caaccttattttttttttaaagggggaaacctaaattgggggaaaacaaacccctaactttgaaaagacgagcccaaggggaccctttaaaagcccaccaaaattaagacccggtcaaaaaattcgccccccccccacgcggtgtcacaaaaatgggaggccccctgacccaatatcaactttaaaaaacccaaccaaagaccccccccccccccctttaaaagaaaacccccccccgggggggggaacaacccccatctgatttcgggacaaaaaccccttttaagagggcccccctctaggcttcgggggctccaaaaaagggtcttgcctcttgctcccaaaggccctaaaaacattggccccaccaatacaaggatgcccc

SEQ ID NO: 82002 - DNA, 424 bp, Glycine max
  Clone ID: PAT_MRT3847_45065C.1
cccacgcgttcgttttttgttttccagccgctaaattattcgttcttttcactgacgagagtgaatacacccaaatgccgccagtggatcgttttgttacatccgagggcctacctattttaaagagagagtgctattttacccaaacttacactatctcggaagaagggctggaactaactatcgtgctgcatgcatgatcgtgatctcaaaaacttctgacccacatctgtacactaggaccctcctcatgtttatacaaatactgcatagcccttcaaaaaacccccatattctatgtggacaccaaaccctgaaaagccctaccctctcttataacaggacgaaacatctccctgtgaggacttcttctggttgctgaagagcacatgcccctctggatatatccaaaacgtttgagaag

SEQ ID NO: 82003 - DNA, 514 bp, Glycine max
  unsure (1)..(514): unsure at all n locations
  Clone ID: PAT_MRT3847_45066C.1
ggctcgaggctctttctcttcgcaacatcttccttttccatccaagcactctgctctgcctccttgtctggcattgcacccttaagaccattttccacaagaccgaagcctcagaacgtccattgacgcacatctggcagccatgtccaccaccgcagcaccggttacgggcaacccttcccaggcgagcagcgatggcctctctggcaaacgacacatccgtccgttcgctggctctagtaggcccatgagcccacctgcctcgcacactctcttccacccgaagacacgatgcttcgtatacggactgcagccccgtgccgttcagggcatgcttgatttcgacttcatctgcaagcgcaagcagccctccgtggccggtatcatttacacattcggcggccagttcgtcagcaaaatgtactggggaacaagcgagactctgctgcccgtttaccagaccaccgagaaggccatctncaagcacagcgatgtcgacactgtcgtcaacttt

SEQ ID NO: 82004 - DNA, 695 bp, Glycine max
  unsure (1)..(695): unsure at all n locations
  Clone ID: PAT_MRT3847_45067C.1
ctccttttcattcaacccctctcttttctttttctcttttntatcttatcttttaataccccctattttcttttcaatntttttaaagggttcaccatgctttttantctttctattgtttntgttgattcaagttgttttttgttggattgctttgtaaagactatgaacttgttaatgattcctagactcatgcttttcaaagaaatttgttaactttcttattattggcatgcctttattattgaataaaaccaaaattttggtgctccaatttcattttagactcatgcttctttcttattattggcatattatgcatttgtttgcataaaagaagcacctgactttcgatagggtaatttagctgtcgcttaacacaggatgataagttgattcaagatttgaaaagattaaccagtattttttttaatctctataccaagtccttacaagtatcttataggagcttttgcatggcacgtcagatgatctgatttctatgctttctagtctgtttacaggaagtaatgtttttctcttccatacatctctttttcaatacagaccgtgagttcattttctgaccatacacatgcttagcactagctgacttgtcttgtctgtttgtgcatgtataaatttaacatgttcattaatagtttgatatgtttacatcatttcaaattctcaaa

SEQ ID NO: 82005 - DNA, 1368 bp, Glycine max
  unsure (1)..(1368): unsure at all n locations
  Clone ID: PAT_MRT3847_45068C.1
ctacgactaactccaatctccctatccatgtatccctcttcctcttcctcctcctcctcttcctctcagtccatgacccaagctggcctcactcgctacggttccgcccccggttctcttctcaccagcacggttgattctcttattggtggatcccgtcccagtccctacttttccggagagtcttctgagtctccctgcaaagagcaaagatctttccacaaccacccccccttcttcgcttcctccttgctccgccagaaaagctctcccgccggcttcctttcccatctctccaatcaccatggtgtgggtttcaccatcacccccgggtggtttatcaaattcaaattcaaattcaaattgttctctcttgaagtctcaactcagcttcacccacgaatctctttccaacactgttaatgttgatccctccagcaccaccttcggaatggatccctgggacaacaattccatcgccttttctgcaacttcaaccaagcgctccaaaaccaacaccaatgatcctgacattttacattccctgaattcggccttggaatcacagttcaatcttccacatacaagtctggaaatgtcaaccgtggacaagctattgcacattcctgaagattctgtcccttgtaaaatccgtgctaagcgaggttgtgctactcatccccgtagcattgccgagcgggagagaagaacaaggatcagtggcaagctcaagaaattacaggaccttgtacccaatatggataagcaaacaagctatgcagacatgctcgatttggccgttcaacacattaaaggtcttcaaactcaggttcagaagcttcacaaagaaatggagaattgcacttgcggatgcaaacaaagcaaataacttcttttttttacgagattctatagcaacgtgcatagaagtcaaggttttgatggcaaagattgaaaactgattttgtaccgatctacttaaatgaataatgaaggaactgaaactttgtaggttgtcaatgctacaattgtacagtgtatgttgtaatatggtagtctagaaaaatttcttcgttttcttcaagaattggctttcaaagtccaggttgattttctattcagattgtttattttcttgtttgggtaagtatggtacaatgaaagactaatttttggaatcagaaccagaatagaagtgagaatggggtgaattgaaatctattttgttttatttcaatctatttttatgttcggtgaattactgtggaagcttataaccaatgaaaatgtgtacatttttgcctgaaaaaaaaaaaaaaaaaaaaaaannnnnnnnnnnnnnnnnnnnnnnnnnnnnnnnnnnnnnnn

SEQ ID NO: 82006 - DNA, 374 bp, Glycine max
  Clone ID: PAT_MRT3847_45069C.1
aaaacaaaatttaaaggcctattgaaaaaaaagcaaaaggaaaggggaattgaacattaccctaacggggcccaaggaattaattttacataacagaactaacatgcataaaaaagcccctcccgaaaaaaggggaaaaatcatacaaaatctgggggggcttgcgggtgaaatatatggagcatttactttgggaaaaacccaggtataaaaaaccccttccttttgggggggggaaacacccggcttgttttgggggtgaaattttgatagaaagcgcctgctttgggttttacgctgggcaggttaggggggctggggcttttttccccccgggttggtgggagaaaaccgagaagttttggacttttgaa

SEQ ID NO: 82007 - DNA, 235 bp, Glycine max
  Clone ID: PAT_MRT3847_4506C.1
tgaagagcggagagcatgggtcccaagggtttggtcgtgttgggcgtgttatgcatctcagcacggtcactgagtcggtgtcttgaggaggatgatgggctcgtcatgaacttctacaaggaatcatgcgctcaggctgtcgacgtcctcgtagagcaagtcaagcatcgctacaagcgcaatgagaacaccgcgttctcctggctcatacacatctgccatgaccgtgctggtc

SEQ ID NO: 82008 - DNA, 449 bp, Glycine max
  unsure (1)..(449): unsure at all n locations
  Clone ID: PAT_MRT3847_45070C.1
acgagagcaggttggccttcaacccagaatgctacattagcatctgcatgcattcaaatggttttggtgcaattaatatataaagacacacactctcgatgaagccaaaaaaacggttccatcgaatccccgaggataagatcaaacactaaaatttgttctttataataattttactgccccaaagaagttacctttcaacttcaattctttccctttccgtatatataatcctctcataacctcttcaaactaccacccccctcattgcagcagtttttgagtttccttacattcttaaagaaaccactcgttgttctttaggatatttctcttttcattttcctcttttcttcaaatcccaaaggatatttgtctctaatatccaaccttcaagatcatggatgttgcgcatntcattttccggatatttgggaatgcttctggtt

SEQ ID NO: 82009 - DNA, 813 bp, Glycine max
  Clone ID: PAT_MRT3847_45071C.1
ccacgcgtccggttgccggcagacaagatggctgttatcgcaatgcataagttgatggggctgttgatgacaggaacagaacatgccaccgttggcactgccagggttgtgcaggctgcgtgtggcataggtgatgccattgaaaatgagaatacacaagttcttggagaaaactaagaagaaaaagggtgatagaagcaagaaaaataaagcaagtgagtctgtcgctgacatcaaagaggaacaaaagctgcggaaaaaagtcattgatttgatgaaaaagcaaaagctagttgcagtgagggggctagtgaagggcaaggatgatacaaaaccgtggggagcagccataaagacaaaggtaggaagccgtttaattgagctcttaatgcaaacagcatatatacaaccaccaccagatcaattactggatgctgcacctgatatccggcctgcatttgttcattcatttagaacagtggcaaaagtgtcagctaaagcaagcaaaagatatggtattgttcaatgtgatcctctaattcttaaaggacttgaaagaaccgccaaaaatatggtcattccttatatgcctatgttggttccaccagtcaactggtcaggttatgacaaaggtgggcacttgttcttaccctcttatgtcatgcgtactcatggagccaggcaacaacgtgaagctgttaagagggcccctaggaagcaattagagcctgtgtttgaggctctggatactcttgggcatacgaaatgggaggtaaataaagaagtactgagtgttgtagacaggatatgggc

SEQ ID NO: 82010 - DNA, 463 bp, Glycine max
  Clone ID: PAT_MRT3847_45072C.1
ccactctgccagtgttttcttttgagaggaatctgggtgtgagtagtaataaaagtgttgagtaagatcatgtttcatatttccagtaccgccaagtgaaagttgtttgaagacagaagcattcaatttgttgtgggcatttgatgtctcgtatggaagtggtttatgctagtttgaagtgtcttgaaacttgattcatgagataatggaatagtaaaatgggatattggatgggaaaaatagaacaacacacttcctcgtatgatctttctgtgttcaacttatattgtccccctttttattagtgtgttattttgaggggaaactaatgatttatgtttgggtaaagtatgtttttaatccttgtatttttggtaagaattggtatttgtttccgtagtttaacttttgaataatttggttcctgaactttagaaaaataatggttttttgtccctcatca

SEQ ID NO: 82011 - DNA, 415 bp, Glycine max
  Clone ID: PAT_MRT3847_45073C.1
cgaacaaccagatcgcgtatcttagcttataacaaattcggacgtcatacaacttaacgggatgaccgatgtgcttaactcttaatcttaaaaagagctacatcccaatggcatattgcttaaaaggaggaaatattaggaactaacaagggccaatcaaaatgattcttacttcttattatggtcaaacaacactcccacactccatatttttattacactgctgcagtaatataaattgaatggaatagggactggaggcaattaacgtacccttgtcaactgcacacaatatccgtgagcaaaggtatgacttggtcctcacacaaattaaggtatacaagcgtatctccggcggtcttgtagaactctgacaccgagacctccggatccacgctcaaatacctccaccgtg

SEQ ID NO: 82012 - DNA, 342 bp, Glycine max
  unsure (1)..(342): unsure at all n locations
  Clone ID: PAT_MRT3847_45074C.1
ctcgagagtaaaacatacaccaattcctctcttttcacttttttcgcctaaccaactgagagcttgttgttttttacgttnctttctctcttcactactctcttttctcaataggaacaagaaaaatggaaatttccgttactaaagcgctgaaaccaacctttcaaacagagcttattttccctcaagcaattcacgactagattcaatcttttaaccctaacaacgttgtggccgattaagacatctccatggaccacttacttgacttttccaaccacaaattccaagttcgaaaatacttctatgcttacgatgaataagaataccatgaataaaaca

SEQ ID NO: 82013 - DNA, 340 bp, Glycine max
  unsure (1)..(340): unsure at all n locations
  Clone ID: PAT_MRT3847_45075C.1
tgacactgtgggcagnctggctataatatgaccatgtgtgatggtattgacaaaactagcgcaactttgctatttataaagctagcagatcgtgattttctcaagagaaactttaagcagatgtctaatgttttatgggtggctcctgaggacaaggcgagcttatggccacaacttcattatgactcatgcaataatctgtagatgcaagatgcttatcttcgtaatataggaaatgtgttacaagaattgtattctcacacaccagaggaagctcttcaattgagaaagaaagctctctctcgcattgaatggttgcaaaatgctgatgagcctacca

SEQ ID NO: 82014 - DNA, 120 bp, Glycine max
  Clone ID: PAT_MRT3847_45076C.1
tattaaagacagggcgttgcgtccatggagccttaaccatggctagagtcaagggacagaagctgtgacacacagagatacgtacttctatacatcttactcggctcagaacgtgaccat

SEQ ID NO: 82015 - DNA, 263 bp, Glycine max
  Clone ID: PAT_MRT3847_45077C.1
gtgacaaaaatgaagttacaaatttaagatacctctccagagcgctggtctttgacccctaatgcacgtacccctgcttggaaattttttatgtttaacatatcaatattgcatgcctttgtatcctccccagattaagcctctttgaggggattgcttctttggaaaagggaattggcccaccagaatgtaattaattaggcgtttgggccttttaatttgtttatctggactcccctaaaaaggtccagggtcgaatgttg

SEQ ID NO: 82016 - DNA, 281 bp, Glycine max
  Clone ID: PAT_MRT3847_45078C.1
gactggttcattgacaccaccagaccggactggtactgccgtttataaccgtaatagagactatcttcctcattttccgattgcgcactgcaaagggcgtcccaaaccttctacatctggaggaccgtaccctccaaagctagaataaacgtgttttgcatcaacagaccctttcgcttcgcgctccttctctgcggataccgtcgtggcaccaaccaccacaagatagcatcaaccaggagattctcgagcacgctccatacatggggtacaggctggat

SEQ ID NO: 82017 - DNA, 245 bp, Glycine max
  Clone ID: PAT_MRT3847_45079C.1
cttagatcatacacttagttgcttcccaattagatggttctgctagaaaaactttgggagggaggtgggggttggccttaaccttaacctggccttggcaagcttaaaaaacttaacaaccttaaaactattgatgaaagataaagttaccagctgcagaagaccttgtcgatgccggcgacaccaacaaccccgatgacttcgacgacttcaacgacaccgggatcggcccgtaaagctgacaa

SEQ ID NO: 82018 - DNA, 1766 bp, Glycine max
  Clone ID: PAT_MRT3847_4507C.1
ctccattttctctctaaccatcgttgcctaaaataattcatcctcctttttatattctttatttatttattttgttccatcggagctgcattttccttttccttttttttttttttgtgttttttgaatccgatcgatatgaacgcagcttcttcttggtttgttgaaattttggcattaaatggtcggaattcggcgttgggattagcttagggtttcaaaaaaataattctcttttttttttttctaattttgttttttttaatggaacctcgtattgggaataagtttcggcttggccgtaagatcggtagcggatcgtttggagagatctatttaggtactaataatcaaaccaatgaagaggttgcaattaagcttgaaaatgtcaagacaaaacatcctcaggtgctatatgagtccaagttgtacagagttctccagggaggaactggaattccagatgttagatggtttggagtggagggagattacaatgttttagtgatggatctgcttggacccagtcttgaagatctatttaacttctgcagtagaaaactatcactaaagacagttctcatgcttgctgatcaaatgatcaaccgtgttgagttcattcattcaaaatcatttctgcatcgggatatcaaaccggataactttctaatgggattaggaaggcgtgcaaaccaggtttatgctattgagtttggtttggctaagaaataccgagatagttcaacacatcaacacataccttacagggaaaataaaaatttgactgggactgcgagatatgctagcatgaatactcaccttggcattgagcaaagcatgaagggatgatgtgacgtgttgcccgtctaccacgtggagggttttgattggatgggagagtggattccaaaagaagggcgacctcctgctttggtttcagtcgattcctaaaagcggactatgtcagggcccattttaaatactttatcgagtgccaatgtcttgggtcagtcaagtggatcaagacgagctgctgtttctagtagtcgtgatgcatttgttggttctgatttggatcttcgtactcgtactactgaaactaaccctggaacagcgcccaaaacatcatctgtaagaaatgcttctcatgtcaagaactatgaaactgcaatcaagggcattgagggtttgcaattagaaaatgatgagaaggcacattattgattcctcaccttttcatgttgtaaatataagctttggttgacgggcactacaatagttgcatgttgccaaggtgagtcgcgaagggacgtgaatttgaactcagaagtctgggcttgtgttgtttaacccttgtgctcatgctgatcaagcatggaagctgaaaaaatttgagctaaatcagggattgttcttgcttcgaagctcagggtttacgctggcactagtcttctggcgggaaccctaaattttgtaaccttttcctgtgagttattattgatttaccagatgtctaaagtgtcatgtggatcacattgttcaaaactatcaaataccagcaaaaatatctactcaagttttggataagaccaaagtttccaagatgtttctggagattactgcggtatttaggaatattcaaggttcttgaaatgtttctaccttgtgaaattcttataagcttgaatcctcgtatttctttagtttgtctttaatgttatctcgtaataatatctgtaaatttttattccaataatttggaaggt

SEQ ID NO: 82019 - DNA, 1296 bp, Glycine max
  Clone ID: PAT_MRT3847_45080C.1
gctcggaattcggcacgattttaatttgtttgttttggtgcaaggagagagagaggagagtgagagatggaaatcagctcaaggcttcaagaaagagagaaccacaaccacatccataaccataaccacccttctcctatgaactctccaacaagcaatgtgagcaactgcatgagcagcagcaacagcaatggcatccaaatcccaacaccaccactcactcccaaaaccattcccagatctgattccaacccttaccctaccacttttgtccaagctgacacctccactttcaagcaagtagtccaaatgctaactggctcatcagacaccacaaaacaagcatcacaagatccacaaccaccacaaccaccatcatcatcatcatccagaaacttcaacataccccccatcaaggccccaccaaagaagcaacaaggaggcttcaagctctatgagaggaggaacagcctcaagaacagcctcatgctcaacaccttgatgcccaattttgcttataatcacaacaacaattctccaagcttctcaccaagaaacaacatgcctgagatcctctccccaagccttcttgacttcccttcccttgctctaagccctgttacaccattgaatgatgacccttttgacaagtcctccccttcattggggaactcgtcagaggaggataaagccatagctgaaaagggcttctacttgcatccctctcccatgaccactccaagagactcagaaccacagctcttgcctttgttcccagttacctcacctagagtctcatcacaatcaccccgatcttgatgagattggagaagagattgtgttcctgtgctgtggatgatttgaggttaattacatcatgggttttttttttttatttgaatatggtttatggtttcctccatcaacaaggttcaaaagctttggtctaattgcaaaagtggctttcttagcatgaaatggcaactcttttctttattctcctgctttgttttcccacctcaaaatattgctatcttttcttgttttccctttccataaatgcaaaaaaaagtatctttgtccaatgattttttttcctgctttgttttcccacctcaaaatattgctatctgttcttgttttcaaacatccataaatgaaaaaaaaaagtgtctttgtcgaatgaattttattttatttttctctccatgttccatctagtttttcaagggttattcttgtttggaaaaacacatcttgggaattatcatgagccagggtgtctcttttgattga

SEQ ID NO: 82020 - DNA, 1100 bp, Glycine max
  Clone ID: PAT_MRT3847_45081C.1
gatcatccaacatcacacacaactacaagaaagaacttccttataaccaaaaccaacaacaactatggcaagttatcagaagcactacgatgatcagggtcgcaaggtcgacgagtatggcaatgttgagaggcaaactgacgaatatggcaacccggttcatgccactagtgtcacttatgtagccaccaaaagtgttggtggctacaatgatgacgctaataagcaacatgatattactggtgtctatcccgagaaagacaccggtagacatcattttggtcgtggttacgacggtgacactaataagcaacaacatgatgctattggtgtttatcccggaatagacattggtagagatcatgagactaccggtgtttatggcctaaacaccgatagacatcatggaacgactggtgtcaatcccggaatagacacccataaccaacaacatgggactaccggtggttatgctggtgacactggaaggcagcatgggaatacaggtggcctttactatggaaccgacaccgcggacacaggaaccggtcctagaagtggaaacaccggtggcaccggttatggaggcactggtggtactgattatggaacagctggtggcactggttatggaagtggaactggctatggaatcaacactgggggtgcgcacactgaagcagggtatgggaaggagcatcgtcagcatgagcaatctcatggtggtcagcacgagaagaaagggatactggacaagattaaggagaagcttcctggaggacacagtgacaagtagatgcatcgtgcatgcatgcatatagtatatatataatattgttgtctttgaataaatttgctgcatatgtacttggaggatatagcatatggttatagtatattatatagaggaataaaaaatgtatgcctgtaatgtaagggttctcatatacatggctgaaatataaagcataataaaggcattgatgttgtgccaatacatatgttgagagttattgggcttaagcctacgcggttgtggagcaggtttcttcacttttggatttagaaatgaagccagcttttatatttctttctttctt

SEQ ID NO: 82021 - DNA, 138 bp, Glycine max
  Clone ID: PAT_MRT3847_45082C.1
ggctcgagctcatagagctggactgaatcttcctgtttatacaaccattcgttctggaccatgtcatggtcctaacttctcatgtaccgttgagattgcaggaatgcattttactggagacccatctaggaccaagaa

SEQ ID NO: 82022 - DNA, 355 bp, Glycine max
  Clone ID: PAT_MRT3847_45083C.1
agcgtgggatactctgaaacattcatgtagtactctccgactttttttttagaaaaagaacattctgtacgatatgcgcgtactacatttgtgagcgaaggtgccactcatttattaccaaagagaagatccctagagaagagaagaggcgaatggcatatcaaatggagcattctgaaacggttaatactcctgaggaccaagaacgacctgttcaagtgtacgcagatggtatttactatctctatcactttgcacacgctcgctaactctagcttgccaagacactggatacatcactcatatctcattccattgctttgattctcgatctgataatctgatccatttatat

SEQ ID NO: 82023 - DNA, 302 bp, Glycine max
  unsure (1)..(302): unsure at all n locations
  Clone ID: PAT_MRT3847_45084C.1
gacggataactattcggtggcacaggcggtgatcactccatgggctcacctcgctttgactgagacacgacattcggtggtcatcgtaatggacacactggaggtcgacgcggacctgtcagtgattacggtgactcagttggcgctcctgctgattacacgacttcatttgggggttgtcctgnccgactgccttgattgagttctggatcatgtggatatcgcgcaccgactaattgatacattcggtcgtacatattggatatcagtgctctagtgggtgctgttggggcagtcatagg

SEQ ID NO: 82024 - DNA, 346 bp, Glycine max
  Clone ID: PAT_MRT3847_45085C.1
tcaaatctcaacttttttacacccattcgatcttttcttccttctatttgatctttgcacgtgtcagcactctccacatgagtttcagaatgatgacgaatggagcacagaaaacatagttggatttctatcagcaccggcatcaaaaccatcttggggcaaaagcatttccaggtcaagaattttcggtctatacttcccattttgtcatactgttggggttgtgatctgcaccatggcaaccacattaaaaggaatctacaagagtatcaaatacatcacacaaatatttgttttgaaggagcgggagatggaaattgggtaccgacagatgttaagcatgtgg

SEQ ID NO: 82025 - DNA, 204 bp, Glycine max
  Clone ID: PAT_MRT3847_45086C.1
caccagaaagaccaacaaggacagaaccgacagggaaggccacgggagaagagagcaacgcacgcaggcgcgggaacgagtacgacagaaaaagtacgagacgccggcctacccgccagaccatgaagatgcacacagggcaaaggaaggagaaaaccgtgcagagagggacggacggccagacaggaaggccagacagagcac

SEQ ID NO: 82026 - DNA, 156 bp, Glycine max
  Clone ID: PAT_MRT3847_45087C.1
tacggctgcgagaagacgacagaaggggaccctggtagttgaaattatcaagcgaacggattcaagaggccacatgaaatttcttctattgcattacaagctgtgccgcaaactaatcgtttcagctcatgtgaacaagataattctcacaaaata

SEQ ID NO: 82027 - DNA, 156 bp, Glycine max
  Clone ID: PAT_MRT3847_45088C.1
gaccactagtcatgcgggagagcggaagtagcagatgaatggcatggctgcgctccaggtctcgttgtgttttcgagagtctagatagatcggctcagggtgacgttgttgtgttaacaggttcccgtcgtttcgcaagtcgagggagaatggaag

SEQ ID NO: 82028 - DNA, 434 bp, Glycine max
  Clone ID: PAT_MRT3847_45089C.1
cgttcgcccacgcgtccggtttgagattgggaatttgtaatttcagttaaataatgtggcattattgcttaaatagtgcatatcttttatttttgatcaccttaaatacaatatccggttcggttttgactcggcaaaggcgacaaaatgccaaaataactgcttacaatgaacagtatgccaaaacaatggcggcactgtcggccggggcttatgccccatcgccaaatgaatgcatccggcgatggatgccaaattcgagcctttggcgtgtatttacattgtcaaaccaggcttgcgatcttcttgagcagacttgtgcctcatatacccttgtttcggagcagtatcgtcaactgattattgtgttcaggggcaccaatagcagtgagcaactgtttttggaaggctggcaaagtcttaagccctgcaca

SEQ ID NO: 82029 - DNA, 277 bp, Glycine max
  Clone ID: PAT_MRT3847_4508C.1
acggctgcgagaagacgacagaaggggagcctctttgatcctttctttcatagccctcttacccttgaccacgttacaagcgcaataaagcccatgtggatcgaggaatgactaattttgcttttaagttgggattctggaatggaacccgcacacggttatgattgttgaaaaggaaaaaaaaaagaatccttgaggtttcgcacttgcacatttatgaagaaaactcatttgaccaagagctcgtgggaaatgctcagtgacaattgtgatagta

SEQ ID NO: 82030 - DNA, 527 bp, Glycine max
  unsure (1)..(527): unsure at all n locations
  Clone ID: PAT_MRT3847_45090C.1
ccacgcgtccgcttaggttttataatctctatgtgaagccatacccggagtgtgagaagatatatgggaggttgaaggggtgtggtggtgaaggtaagaggaagcatccggtggggctgtggaagctgtttaaaccagagaagtttcctgagagtggcgaggatgtgaagaatatgaggtccttcatggagtcactggtttagtgggggtctttgttatagactaccatgtatccttcattgaatgcaatcttacttgagtctagtagaaccaatgtggactcgaaagtttttgtctgaaatctgaattcaatataactgtatacttaggactcaagttaagcctaaacaatttcacagtagttgaataatgcattcagttgtgctggtgtgctgggttttgatctctgtacatgattttagttggaacttggattttgataggatcgactttgagtgaatgactctgtcaaaattttgagtcatgaccagacacatgaacaccttcctttttattgatgttnnnnn

SEQ ID NO: 82031 - DNA, 1584 bp, Glycine max
  Clone ID: PAT_MRT3847_45091C.1
aacctcaacaattgtttatgtacttttttctttaatattgctaacaataaaacagagttgtcaaagccaaaatgaaaagtacaaaagttaatacattactatacacatgaaccgagaatttatatgggggggaatgggaacggccccccttcgagttttttttttttttttttgaaaaggaaaaagattttgtcttaaataagcttttgtcttaaatatgctgttgtcttaaatgcgatgaaatcatgctccttcctctattatatttcacgataataaaaaataaaaatacttctcccaattgggcttcctgtttgatggtaaatatagaaaagccatatcaactctacaattttgtaatcctaagggatggaaagataaaaacaaatcccgttgagcattaagctaaggaatttgagctatttccaccaaaattttgtgaagagattgtggcttagaaaagaatggacagtggtcactgcctttgatcttgaaaactccttcaggtggattttccctcacaagcttctcttggacatctggtgaaagcgcacgatcatccaatgtttgaatgtaaaaccggcgaccagtaccatatttgtcagcagatagagacagtttctccattattggaccaagagggctatgtctcatggaaaccatggctaaagcaacatcctttgccggggattggttaaaatataaccctttcatctgctctttctcaaacataaatcctgttgggggcttttctttaccattcccatggatcaaaaacttagattcttgcataaaacgttcagcagatcctagctcttcagcaaaaacatcaaaaggtttttggccatcagacaccatcgtagcacaaaggaaagttgcttttgagatcttctgtggataatgttccaatgcgtaagaaatacatgcaccaccaatgctatgaccaacaagaataacctgttcatcctcaggaaggttttgcagataaacagttaaaggttttgaataatctgccaatgtagtgacgttgttggtgtctgtgagatcaattccagagcctgtaagatctaaggcaacaggaagcagccctgcttcttctagaagggcaacagtcttgtaccaacaccatgctccaaaaccttctccatggattagtacaaacttctttattttaatgttctccagatttactggaacctgcttgttggctgaaaaagattcagagacagcgtgccttctggaggagccaattctcctagacatggagccttcaaacctctgagacagttgatgctgttgaagtgccatagaaagtgcctgaagatgcagctcttcctcactcaccagcttcctctgtgatctacccattctcttgcttctcgatccaacatctttcgactccttcttcgtcatgcagatgaaacgattacccatctttcactttcttcactgaaattgagcaaagcctcggtttttctttctttccctatatttatcgcttgtctttttttgttttttcgtggtctaggagggttggaggagttgttaagttgttgggtatgaatgaatgccaaaaaaataaag

SEQ ID NO: 82032 - DNA, 690 bp, Glycine max
  Clone ID: PAT_MRT3847_45092C.1
acgagagtatatactgttgtacaagaaggtaattttctgcttctgatggagtttattttgctaaagtttgtaatacaattattacaatggagaaacccgtatcatccgaatccttatctgtggtcggaaaaagtaaactgtgataactggtagttgacttgcacattggagttagtttttagcattttgtgcaatttggaaatggtttttaaatggtgatactctttttttctttttttgtctctttctcttctttcctgcttatagactgaggagagaggatcatacaagaaacaaccaatccatttccatgcatcattatctctggtatttagttaaaccaagtatgccattcacaccccattcattagaactagaaattgttgtttgaattgtttataatctgtaaaactagttggggagatcagtttcatttttttaattttcatgtgagagagagcaatgatttgttacttggatatgccataattgcttaaactcaagcattgaggtactgaagaagaatttatggtacttaagcacgtatgaaaacagcagtttgtcagagctttaagtcagttcttcaaaattctgaccaaatccgcttaattctttaagcaattttcttactcttttaatcagtgttctcttgtcttacaagactggcatctaataaatgttcccatacta

SEQ ID NO: 82033 - DNA, 481 bp, Glycine max
  Clone ID: PAT_MRT3847_45093C.1
ggggaaaatgattcattaggaagagaagaaacccaggtaaacaaaggaaagaggtcactgagtagtgtacataaaatgattgataatacccaaatgccttttggagaggtatctactgtttctaagaagtttgagtcattcagggcacagcattttcgtttgttaatggagaacctatgtgttttagaagaaacttttgttgattctgaagcactgaggttggaaaaggctattatattgcaactaggaaagcttggtgctcttgagttattcaatgtttgtctatcaagatcacttggaacctcacttgtgtcaaactatgctgacaaagtggatgactacaaggacaaagttgttgtccagtctagcaagaaaaaggaaaataaaaccagaagaaagagagaatttgtttccacagcagtgtcgtcccagtcattgactttaaaagctaatcaggaagatctgttaggtttctcagctt

SEQ ID NO: 82034 - DNA, 469 bp, Glycine max
  Clone ID: PAT_MRT3847_45094C.1
ataaaaaaatattaaattataaagataaaaaatatatttaattcaatttcttattaagataatgtatactacatataattaattagagttgaaaaacacacaaaaatatagcgaaagcttccaaaagttaaaattttgtgtaccctaccacatgtcacatgcaaatttagggcagaatttaaataaataaataaaagatgtatcctaactttcaacaagattcaatgggttttcaagttcccattgatcttgtttaatttatcccaacttacacaacagaaatgaaaactaaaaaagaagcatgcatgtaacatgctcgatcaattccaaagtatcactacgatggaaatgcttaaaccttcattgctgaagacgtactgattttcaatcctgaacaaaggatgacaactacgaacaaaatttctaagtataaaaatcctgtagattttacgcatgaatccttcttttg

SEQ ID NO: 82035 - DNA, 1359 bp, Glycine max
  Clone ID: PAT_MRT3847_45095C.1
cggcgcctccgctcgcttgtgacagcatctgtggcttcggcttcagcccttgtgttggtccttctagccctgctgcttctgcccttgttcccgcgcttgtggcccccatggtcctgggcttttactcccggaagtggaggccttgctccgggctcggtggttcggttcccattgacgtttcagtctgtactcctagccgcggcccgctgccgtgcgggtcgctggtccgggcctcggggttctgccgcgccggtcacggcagtggcatcgccgggtttcccgctgcctgccaggcggcgtgctctcccgcgttcccgggggctcccacacgtcccgccggtggtcgtgtccctggggtgcctccatcctccaaatcttgtcactctgattggttatcatgcttgtgaaacagagatgtttctcatatacaattttttatcaggtggtaatctcgaaaagtttatccaggagaggtccacaagggatgtggagtggaaaattcttcacaagatcgcattagacatagcccgtgcactcgcctatctgcatgatacgtgtgttccccgcgttcttcaccgcgatgtcaagcccagcaacatcttgttggatgatgatttcaatgcttatctatctgactttgggttggctagacttctggggacttcagagacacatgctaccactggtgtagccggaacattcggctatgttgcacctgaatatgccatgacgtgccgtgtttctgataaggctgatgtgtacagctatggtgtggtgcttctggagttgctctcagacaagaaggcattggacccttcattttcttcttatggaaatggtttcaacatagtggcatgggcatgcatgctactgaagcaaggaagggcaaaggagttcttcactgctgggttatgggaagcaggaccaggagatgatttggtagaagtgcttcacttagcagttgtgtgtactgttgactctctctctaccagacctacaatgaaacaggttgtaagaagacttaagcaacttcaacccccatcatgctagccccttgtgtggctgtgttcctttaacattattaatcttagaaatgttccctttggaatttaatttagcatttttgtggatttaggttgagctcccgatttgtacttattcccctccttgtacatttttatatagttgtattgtatccccaattttccatgctcttttcttgatttggtattatttaggtttggggccttggtgttgattctgctgaagaatgcagatatttgatttccccttcatacacgtgtattccatgtctatctgttcagtaaaattgaagaatagaatttgttttttgaaagg

SEQ ID NO: 82036 - DNA, 369 bp, Glycine max
  Clone ID: PAT_MRT3847_45096C.1
gtctcaactcctcaagggtgcttcccattcccaaagagccataccacccattttcccatttcccctcaagcatgccaaagtttgcatctttgagaatcccttcttcttctgtgtcttgctctctcacaagagactcttcctctgttgtgccattggaggaacatgacaaaatgggtaatgggtcggttctgcttcagagacccgattcgtttgggaggtttggcaagtttggagggaagtatgtccctgagactctgatgcatgctctctctcagcttgaggctgccttttattccctcgctgctgatgaagagtttcagacagaactggctgggattctaaaagattatgttggccgggagagtcctc

SEQ ID NO: 82037 - DNA, 176 bp, Glycine max
  Clone ID: PAT_MRT3847_45097C.1
agggacaagcccatgtgattgatgtcccattccaactcccataacatgaagacattacttgatgacgtcgttcctcatcatgctaatagacgagtcgtgggtaaatccatctcccagaacaagataccgcagtctcgctcgccgccagtgtgcacattctgtacaactcgctctcc

SEQ ID NO: 82038 - DNA, 246 bp, Glycine max
  Clone ID: PAT_MRT3847_45098C.1
ggtgtaacaatatttctggcttctatttgagaattcaacaccaatattccggccttcggtttcaaattttttattttgaccattggccaatattaccttggtcccaccaaatggggcccttacaccttattattacccttagaacaaaccttgaaaagtgcctatttttgaaccggcaagaacacttttattttaaagggcactttttatttccaattaagggcgcccttataaaataaaagggaa

SEQ ID NO: 82039 - DNA, 225 bp, Glycine max
  Clone ID: PAT_MRT3847_45099C.1
cccttcctaccggttggagaagaccaccaaagggggggttccaaacttaaaaccttttaaccccaaagcctttaaaggacctcccaccttggagttcgtgttacacaagggcttttaacattttttttaacctgcacaaggtggagaatttccacttaaaggggttagaatttttattccttgtttaactgggaaaaaaaagaatggttttggttttttggattt

SEQ ID NO: 82040 - DNA, 1250 bp, Glycine max
  unsure (1)..(1250): unsure at all n locations
  Clone ID: PAT_MRT3847_4509C.1
cccacgcgtccgcccacgcgtncggcaccatttccttgtctccagattttttcctccccaactaattcaatctcccttctctctctctttttttcttctttaaacgaaaaagaaaaccctagaacggaagagatttcattccccatcaaatctcttccttctctctcctcatttctaaagttcccaactttcctaacccgagatctggtgaattgaattgaaattgaaattgttgtcgtggttgctgctgctgcagctgcaaggaatgccgctgatattagcgaaaagcgattcgatccagattcgcgaggtgtggaacgataacctggaagaggagttcgcgttgattcgcgaaattgtggacaactacccttacatcgccatggacacggagtttccggggatcgttctccgaccagtggggaatttcaaaaacagctacgattaccattaccaaaccctaaaggacaacgtcgacatgctcaaactcatccaattgggcctcaccttctccgacgagcacggcaaccttcccatgtgcggcggcgacgacgaagaatccgacacgtgctgctgcatctggcaattcaacttccgcgaattcaacgtcaacgaggacgtctttgccaacgactccatcgagctcttgcgccaaagcggcatcgatttcaagaggaacaacgaaaacggcatcgacgcccaccgttttggggagcttctcatgtcctccgggatcgtcttaaacgacaacattcattgggttactttccacagtggttacgatttcgggtacttgttgaagcttttaacgtgtcaggatttgcccgatacgcaagttgggttctttaatttgataaacatgtatttccccactgtgtatgacataaagcacctcatgaagttctgcaacagcctccatggaggcttgaacaagctcgctgagttgttggaggtcgagagggttgggattagccatcaggccggctccgatagcttgctcacttcctgtacattcaggaaattgaaggataatttctttagtggctccttggagaagtatgcaggtgtcttgtatgggttaggtgttgagaatggacaaggttctcattgaggaaaaaaaaaaatgataaaacttgttagatctctctttgtttgagctgcttctgtatatctgttgaaataccaatttctattaatgtaaacctttggcattaagtgtctttattaatactctctctttgttgctactt

SEQ ID NO: 82041 - DNA, 171 bp, Glycine max
  Clone ID: PAT_MRT3847_450C.1
atatgccatttgacattattcattagagggaatgatctaaggataacatccaactcaagcgatatacgataaaacaaacgaaaagaaacagggcacacaatggacatgtacacggtgctctaagttggtataactcgaaaaggtgcttcgccgatcaagtggcagagaact

SEQ ID NO: 82042 - DNA, 382 bp, Glycine max
  Clone ID: PAT_MRT3847_45100C.1
aaaaaaaaaaaatttaaaaaattttaaaaaaaaaaaaaaaaaaaaaaaaaaaaaaaaaaaaaaaaaaatgaaaaaaaaaaaaaaaaaaaaaaaaaaaaaaaaaaaaaacaaaaaaaaaaaagggggggccgtttaaaaggaccaaagttaaatacccctggaagggaagggaaaattttttttataggggcccaaaaatgaaataaatgggcggacttattaaaacgatcggaattggaaaaacccgggggtacccaaaataaaagccatagtagataatccaattttcaaaaggaggcaaaaaagaaaaggggctctgataaattgccctttacaaaagataggaccagctggaagggaaatagggcaaaccccccctaaa

SEQ ID NO: 82043 - DNA, 507 bp, Glycine max
  Clone ID: PAT_MRT3847_45101C.1
tgacctctcatgcactcgttcttaattcttttatacgggctcgaggtacggctgcgagaagacgacagaagggcaagaagagcaaaacaatacacttatgagaccagcacttgcaagtagaccactaggaagtctcaagaatttcaatgatccagtgagtggtggtggatggtgcaaagaccaacaaataaattcagctaaaccactcgctgagaacaacatcttgaaaccttgtatacccttttctacaatggagagctccatcaagtgcattgatcatgctgagaaagaaaacaatcctgacatggctgacaaggctctattgccaaaaaggcctggaagagcttctactatatgcatgatgacaccgcgtgttccttcagccattgcctcaaggagaaactctctgattccactcccaagtatacctagcttaacacagttccagtcaccattattaccaaagttaacaaaccaagctgatcagaaagatgtcaatggggaatt

SEQ ID NO: 82044 - DNA, 409 bp, Glycine max
  Clone ID: PAT_MRT3847_45102C.1
gctcgaggttgacgcgactttaatccgtgaggtgcaacgtaaaacaaaggcgaagggttttaatcaaacgaatcaaccatagtccattaccttcttcccgcgctgaaaaaccagtgacagtgagtgaggatctaagctccaatggaagacgaaatggcgatgggcacttctcccagttacttcgaccctcacaacctctcctccagacagcagttccgcagatacgggaagagacactcaagttcaggtgcttcaatccaatacgacaactcggcttctaagttaagtgaaactgggttgttatatgatggccaaagcatccatagtccaactaatgcagcacttgttcttgaaaatattaaacaagaggttgagaagtttgatgctgattacctggaagagaaaacac

SEQ ID NO: 82045 - DNA, 492 bp, Glycine max
  Clone ID: PAT_MRT3847_45103C.1
gaaggaaaattttccctggttcttggattgtcttaaaaggtcggccaccaagggtcctaaaaaatgtgcccaaaggttcccctcaagagcgagaattcactccccttaaccacgttgggcgggggcatcggtcctaaaaaacaccgtgcacggcatacaacttttgtgcttcagggccggtgttaattttagctgcaagaacccgattggtgatatcctgaaaaagctcgcctgagagtgcctcgggcgattttttttaatccttaggctttccagccatgacctgtgttaaaatcaccacccaactacccttccctgggacccccatcatcctgaacctttggccaagcctttttttttaacaatgttcttaacaccaacagtctccctggctgaatcctttgcccctggggctgccccaaggggaaacaattgttgaaggaagaacctttcttttaatggcaggtgagagactattgcttcctctgagtt

SEQ ID NO: 82046 - DNA, 653 bp, Glycine max
  Clone ID: PAT_MRT3847_45104C.1
cccacgcgtccggcgttggcttggctcctaaaaagcgcgcagtagaattcagtaataaacaacaatacacaataaactcgagactccgacgctgcaccaggaaaagaaggaagcaaagctcagaacgatgtcgtttcggtgggagaacgagaaccctaaccctaactctccgttgaagaaacgttggtccctaaaccaaatggtaatggcgatgaagctccagtccctctcttgttctcctggcatcaccgacaaaagcaaccctattctctccccattcccacttcctatcaccgatcgaacccttctcttatctgacgagcttctcctcaaaatcattgcattagtctccgattcctccactcagcgaaactccaactctctggtctgcaagcgctggctcaacctccaaggccgcctcgtccgctccctcagaatctccgactggaacttcctcctctccggcagactcatccaccgcttccccaatctcaaccacgtcgacctgctctccgacgccttaatttcccccaaatattccgacgttctcttaacaaaccgagtcatatccatgcatcttagttcagactctttcccttattggtgcttctgcgaggacaacatgctccccttccaagtcatcgacaacgggc

SEQ ID NO: 82047 - DNA, 553 bp, Glycine max
  unsure (1)..(553): unsure at all n locations
  Clone ID: PAT_MRT3847_45105C.1
cgtacgtaagcctggatccctctggaggcggccgctnnntttttttttttttttttttttttcacagatattgtttaaaattttatgcgcagatttggagttttcatattccccgctctttatacaaacgccccctttccccacactttaaaaaaaaaagaggcgcccccgtgctctaaacacacctatcacgtgcacaaaactcttactctctctaaggggcaacacgtcccctcttttttatgggggtgtgtgtaacacacaaaaccccagtgcgcgcaaaccccatcacacacattacacatgtgttttgcgccacacataaagtgtatctcattatcccaaataaggggctatctgttttagaatcttgctctcaacacacctcttttaaatgcacgggtttcgcgggcgcattttgccacatatttgcagacattgttctgagggggcacacctttttgagccccctaaaattgcgccaaaacgggcgcctctcatatcaccagggtctggggggggggagacacagtggctcaaaagtgggggcaca

SEQ ID NO: 82048 - DNA, 727 bp, Glycine max
  unsure (1)..(727): unsure at all n locations
  Clone ID: PAT_MRT3847_45106C.1
atgaaaccttaggggattaaaattaaaaactagaagctcggacaatggaagtatctacaattactgaaaccttaggggattaatgcagaaatttggcccattatggcggatctgcgaagtttgcaataacgtctagttaatattaatcacaccttgctcacgtcactccctgaaggagcaacgcaaaaagaacgaggcatcatattcatattgatataagtgtagtaggatctgagaattggagtgagtttgatggcgagagcaagctctggtctgcaatacccagagcggttctacgccgcggcctcttacgttggattcgacggatccaccaaatctctcacttccaagttctccaactccaccgctcttcttctctacagcctctatcagcaggctagtataggaccttgtaatgtcccagaacccagttcatggaaacttgtggagcatagcaaatgggccagctggaaccagcttggaaacatgtcttccacagaagccatgcgcctttttgttaaaatattggaggaagaagatcctggttggtattcaagagcatctaactccgttctagaccctgttggtgatgtgcaaatgaatcacaattccaaagttgagccagtaattgagaatgcanacgcgtatccagagataaaaaccatttccacttgaaatggaagttcatgttggaactcangataagnatgtttgtcattgaaggctt

SEQ ID NO: 82049 - DNA, 359 bp, Glycine max
  Clone ID: PAT_MRT3847_45107C.1
ggactccactgaacaacagtttaaaaacggaaaacctggaaaaaccccaccgtaacccccctgaagcacctccccttaaatccccctgtcgccatcccgaataggcccgaagaggtccgccctaatagcacttgccaaaactgaatgaccaagaatgcccaacctgaaacgcccaataaaacccccctaatctcgggggtacacgcagttacacccagacagtccccaacactttaaagccccctattgccagttccttaccttcctttcctttccttttcgcccactttccccggcaaaccctaaaaagctgtaaccctgaagctccctaaaggaggcctatacagggcttcaccccc

SEQ ID NO: 82050 - DNA, 273 bp, Glycine max
  unsure (1)..(273): unsure at all n locations
  Clone ID: PAT_MRT3847_45108C.1
accagggtatctaggcgctctgaatatcgtgttctagtcactggattgccctcttcagcatcctgacaggatcttaaggatcacatgcgcaaggcaagggatgtttgcttttctcaagtttttcatgatggaaggggtacanaatatttgaataaagtttctggttcttaataatactctattgcttaaatgtattgataatttatcagtttttaaactgctctatttttctacctccttagtcctttcttctcttatctcaattcttttttt

SEQ ID NO: 82051 - DNA, 474 bp, Glycine max
  Clone ID: PAT_MRT3847_45109C.1
gggtttttgtttttttttttttttgtctttttttatttgttttttttttgggcctaacacaaggggggcccaatttcaaaataccatgttgggatttagtgggggcaagaactggcacaccaacaaaatgtgggaacaaattttataaaaaaaaagtggggggggggaggcccaaaccttcctttccctggaaaaccctttatttttttttcccattacccttcccaaaaaaaaaacgctgaccgttttttataaaagaaaaattttttttgtaccctgcctccccaacaaaaagacttaccagttttgggcttccccttatataaaataaatacctttgcacgctaaaaaaaactagccctccaaaaattttggggggcgtttcttttattttaaacccctttattttgcttttgtttgtcaaggttaaaaaaaattcttggcaattccggtgtgggagagacaccttttttt

SEQ ID NO: 82052 - DNA, 469 bp, Glycine max
  Clone ID: PAT_MRT3847_4510C.1
gcttggggggggggggggggctatatgagggagaaggtagtaaaggggtagaaaaacgaaaaggcggtggtaagaggaacgtgttgaacgttgaaggaagaagaataggagacgaagaacgaagcgtgaatagtagtcaacaatttcattaataatgtagtaattatcatgctattattttgtacaataattaccaaaaggataaggagaattttgttcgtaatcatgataagggtaatattcaatgtattcggttccgctcaagatgtgtatgtgatgttatttggggtaggggtctacggaaggaggacggaagggaattaaacggctgagggggagacctccaccaccaacggctccatggccaagccggcgtgtcgggtcgtcaacaggtgaagggtgtccaagaggtgtgggttggttttctaattcgcatgcacaaacgcaaactcaaagtattccaattccc

SEQ ID NO: 82053 - DNA, 478 bp, Glycine max
  Clone ID: PAT_MRT3847_45110C.1
tggaacctttgggctgatttatgtgcttgcatggtcgtgagaaaatgatagaagggaaggacaagaggtaaagtcggctcaagtttctcgatagagtcgaccacgacaatacgtgcggaagatactcagactacggagacgagtaacactacggagcaaagggcccggtactacacgaattagactcaagcgtcgccgaagaaggggaggcactggtatccgacgataccggggcagggtccttactatttaagctaagtaactgtaagagaaaagtaggaagtcttttcgaaagaggaacggaggggaagtaatgctacaaccacggctccggattaaattataacaactgccccgaccatgcggaggactgaaataaggctagctggtcaggttacatcgagagggatagtaaaaggtacgcataggaaaattacgcccgaacaacgcgcattacggccgcgcgcggttcgcgcgc

SEQ ID NO: 82054 - DNA, 189 bp, Glycine max
  Clone ID: PAT_MRT3847_45111C.1
cttattcgtccgcccacactaccgatttgggtgggggcggtatattataatgaggccggccactactagctgaaccgctttggagaggctaaataccacgctttactcaactgctcttactgggggaggcattgaatgtctcatggatggttaagcttgtacggacaaataaattgttggtcctaagac

SEQ ID NO: 82055 - DNA, 298 bp, Glycine max
  Clone ID: PAT_MRT3847_45112C.1
cgttcctaattcatataatacatactgcatgagcaaggactgcaggaagcacacgctgcacaatgatacccattacaagatggcgcaggatagcattgctgtccaaggtaaactctgttatgatcgcaagcaatccttttatggaggacgaactaggcccgacttacacaagaaggctgaagccaccatgaagattgtgtctgagtgtgcatgccagggttgctagcatgtctctcaacacgctatttaaaggtgcaagcactttgggaaattgtgtgacaataaaggggcagggtca

SEQ ID NO: 82056 - DNA, 808 bp, Glycine max
  unsure (1)..(808): unsure at all n locations
  Clone ID: PAT_MRT3847_45113C.1
cggaattcccggctcgacccacgcgtccggaggtggtgttgagtgtttgaagaattactgggattcagggactcaaattcagagtcttgaagttgcggttgtaatgttgagacatttggctgaaagtggtccaattggtgaagttcttgttggtgaaggttttgttcagaggcttgttggggtgctgaatcgtgaggttttggcggttcggattgcggcggcgagggcggtttacgcgttgggattgaacagtgggagggcgaggaaggagatgggggaattggggtgcgttttaggtttgattaaaatgttagatgggaagggtgtggaggaaaaagaagcttctgcaatggcattgtcggtgctgctgatgcacccggcgaatcggagggttttccgcaaggacgaaagaggggttgtgagtgcagttcatctcttgaacccttcgttgcaggggttggataagaagtaccctgtttcgttgctcgctttgcttgttcattccaagagttgcaggaagcaaatggtggctgctggagcctgtgtatatacgcagaagcttgttgagatggatgttcccgggtcgaagaaattcttggagagcctcgggcgtggtaagatttgggggtgtttttgctagaccctagaggtgatcttgaatttctgntacatgaaagccatgattattcattacattgatctgtatgcatgatagggcgtgtncaggnttctttttcttcttcttttncccttgaaattattattaataattgatgcttgtatgtagagaggtagtacgttttttttc

SEQ ID NO: 82057 - DNA, 2904 bp, Glycine max
  Clone ID: PAT_MRT3847_45114C.1
ggctcgagaaattttcttttctttcctgcaaccattttttgtcctttctgtttttcatcccattctcatttctctctcatcaatcccacaccagcgacctttattctcattaataatataatctgagttcatgtatttacttttattttattcctgaaacaagtttttggtcactggttatagttgcgcattacatttgtgtccactttggcattttgcccacgcgtccgcccacgcgtccggttctttctttggttgtgttgtgagcgtgatcctgctccatgctcacctcctttttattccctgcaactgcaacaaaagaaagaagataatggtatggcagtgccatcaccgggagccaactacacactcacatggaatgaattatagaacccaaacccacaccattcacagatctcaaggatctcacaatttcctttttttcccttcaataataaagttttgctctttttggtcttctgagtgctcactcctcttgcttggattcaaattctccattttccaacttggttttgtggtggcaaagaaagaagcaattttggcatctgggttctgtttggtttgatgttcattgaattgggtcaaagagaagttgctgttttggtgagagtgggaatctgattccaaagagtggctttttttctgtttggataaggtgatagtgatatagactggaccttctttgtgggaatggggattcaagttgttaattatggtggctttgagcatttctcagtggttgtgtgagggagagacagttgaggaaactgattgtacagtatggaacatagtagtagtttggttttctggctactggggttgcttcttttgttgttgatggagatttcttctgctgctctttctccttctggcataaactatgaagttgtagctctgatggccataaagaatgacttgattgatcctcacaatgttctggaaaattgggatattaattctgttgatccatgtagctggagaatgattacctgttcccctgatggctctgtttctgcattgggattgcccagtcagaacttgtctggtacactatctcctgggattggaaaccttactaacttacaatctgtgttgcttcagaataatgctatttctggtaggattcctgctgcaataggaagcttggaaaagcttcagacacttgatctttccaataatacatttagtggtgagatacccagttctttgggaggcctcaagaacctgaattatttgaggttaaataataacagccttacaggatcctgccctcagtctcttagcaacattgaaggtctaacccttgtggacctctcctacaacaatctgagtggttccctgccaagaatatcagcaagaactttaaagattgtgggtaactctttaatttgtggcccaaaagcaaacaactgttctactattttaccagagccactttccttccctccagatgcactgagaggccaatcagactctggtaaaaaaagccatcatgtggcacttgcttttggtgcaagttttggtgctgcttttgtccttgtgattatagttgggtttcttgtttggtggcgatatagacgcaaccagcagatattctttgatgtcaatgaacattatgatccagaggtgcgtcttggtcatttaaaaaggttttcattcaaagagcttcgagctgcaactgaccatttcaactcaaagaacattcttggaagaggtggctttggaatagttttcaaggcatgcttgaatgatgggtctgttgtggctgtcaaaaggttaaaggactataatgcagccggtggtgagatccaatttcagacagaagttgagaccataagtttggctgtccaccggaatcttctgcggctttcggggttttgcagtactcagcatgaaaggctccttgtttatccctacatgtctaatggcagtgtagcctctagattaaaagatcacattcacggtcggccagctttagattggacgaggcgaaagagaatagctttaggtacagcaagagggttggtttacttgcatgagcaatgtgaccctaaaattattcaccgcgatgtcaaagcagcaaacattttgctagatgaagactttgaagctgttgttggtgattttggtttagctaagcttctggatcatagagattcgcatgtgaccactgctgtgcgtggcactgtcggtcacattgctccagagtatctatccactggccaatcatcagaaaaaactgatgtgtttgggtttggaatcttgctgcttgaactgatcacaggtcataaggctctagattttgggcgagcggcaaaccagaaaggtgtaatgcttgattgggttaagaagctccaccaggatggaagattgagtcaaatggtagacaaagatctaaagggcaacttcgatctgattgaactagaagaaatggttcaggttgcactcttgtgtacacaattcaatccttcgcaccgccccaagatgtcagaagtattgaagatgttagaaggggatggcttagctgagagatgggaggcctcacagaggattgaaacaccaaggtttcggtcttgtgagcctcaaagatattcagatttaatagaggaatcttcactcgtagttgaagccatggagctttctggtcctaggtgacaaacaagtatcttggttttccactatagctccttgtttaaaaggtgtagtttaaatgttaaatatgacattgtcattcgtgtcaatagctatgtaatgctcgtattcatctgtaaaaagaaaaaaaaaaggaaagtcatgtataagtatcttctttgttggaatgttgatttagttgcttcagaaattttttgaatcaatgttagaaaattgtatgtagttgcactt

SEQ ID NO: 82058 - DNA, 441 bp, Glycine max
  Clone ID: PAT_MRT3847_45115C.1
gtattattcatttctgtttttttgcttcatgcttttttgattggcatctcatcctaactcttggaactgtgatttacatttctaaaacccatttttgactgtgggagaaacaaaacaccccccctctattagaactgcctattccacagctaaaagtaacaacgtacaggctttactgagggccagaggcaaaagaatttctatctcccactccccctaatagacgaacgacccaaatgcaacttgagggggggaacaggaagccgcccatgtcattggaagggagaagagttcgcccaccaacaagcatctctccaccaggaggggcactgtgagccaacgccacatgagctttacgcacctggagtgcatcaacgcccccaataccaaacacgaaaatgactttcctctccgcaagacaaggtggggcctgaccaaagc

SEQ ID NO: 82059 - DNA, 1062 bp, Glycine max
  Clone ID: PAT_MRT3847_45116C.1
ccacgcgtccggctcatttaggcctcgctaccagcatacctggcaaacacgcaacgcaaagcactagaagaagggaacagagaagcaaccagttgccacactatttttctctctccttttttttgacttttccttctttctgcaactccaaaatgtcttccataggggcaaaaaatctagcactctcctcagcctttttgctccttttggtcggttttgcaacctcagacatcaaccaagacaaagcagaatgtaccgacaaacttcttggtctagctggttgtcttccctatgttggtggtgaagccaaagtccccgccatggattgttgctctggtatcagagaggttattgacaagagcaagaggtgcctctgcatcctcatcaaggatcgtgatgaccctaatcttggcctcaagatcaacgtcacccttgctctaagtttaccagatgcttgtcaaacacccaccaatataactcagtgtgttgatcttttgcatttggcacctaactccacggaagctaaggtgtttgaggggtttaaaaatgccttgaccaacaaaactagtccctcctcagtccctagtgctaataacgcgactgctaatggaacaagcacaagcgcgaacaacaacagcagtagtgggtgggggaaagggaaagaggtggttagtggcagaggtggtgtgtgtgattttaccgattgtttttatttcccattttttcttgttcctagtttgaaccgtgatcaagagtagaaggatgatgttttagtggttgtgtctatttattatttcccggattcatgacgtgttctgcatatatatatgtttatgttatgcaatttgtgatttatttttaataggagatgtactgtctttttcctttagttattttttgcctcagtgtgtgcccatcttttgatgtctgcgtgattaattctgtaactaattaaactcatttaaagggacccgtcacttgagctcaacaatgcgtatgctttaaatatccttctgctagcatctgctaggaccttctatttacacttgggattatgtaatt

SEQ ID NO: 82060 - DNA, 271 bp, Glycine max
  Clone ID: PAT_MRT3847_45117C.1
tttggcgggtggggtggggggggagggggcgggcggggaggggggcgggggggtagaacccagatatacaagaacgggcgatgcctagagacagggaggccccttccggaggacttgaacaatttcgtgggcagggagggggggcctggggggcaagggaaaggcgagatcccggaacaggaccaagcggcgcccccctataaaaatgaggggatggggcctagtgattaggattgtttaaaccccctgtgtgaggccaaccaaaagtgaa

SEQ ID NO: 82061 - DNA, 356 bp, Glycine max
  Clone ID: PAT_MRT3847_45118C.1
ctggggcaccgcttgagcagacttaacatcagggcaaagcgtcatactgggtgctcaagctaccatgtctatatctatctttactagtgcctccttgccacaagctaaaatggcccaagagactctcatattcacatgcgaatcaactaacgaggggcaccctgaccagctctgtgaccagatctccgattctgtactcgatgcatgcttggagcatgaccctgacaagcaacgatgtctgtgaaacctgcaccaataccaacatggcgacggaattccgagagatcacaatcgaagccaaagtgtactatgagaagaatgtacgtgacacatgcgtgcacataggcttagcctct

SEQ ID NO: 82062 - DNA, 488 bp, Glycine max
  Clone ID: PAT_MRT3847_45119C.1
ggccgccctttttttttttttttttattttttttttttttttttttttttttttttttttttttttgatttttgttatttttttttttttatttttttttaccgatggggaaataaaagttgaatttctttaaggggaaatatccatccgggaaaaccaaagcgaagggggtacaaaccacagagagcccccatctaaaaggccccaaaataacaaccaataacccgccctatatctcccggcaaaaaataaaaaagaccagggggaaaaaaaaaaaaagacccaggcctaaatacaaggggcccaacccccttaaaaaaaatatgggggatcccaccgggggaaaaaatgaaaaccctggcacaggtgctggggcagacaagggcatagtaaggactgttgcatcccctatatattttataatgtgccccctaggaggggggcccacccttttgcggggggaatcgtcccaaaaattgtttagaaac

SEQ ID NO: 82063 - DNA, 580 bp, Glycine max
  Clone ID: PAT_MRT3847_4511C.1
cccacgcggtcccccacgcgtccggaaaaccctagaacgggagagatttcattccccaaaaaatctcttccttctctctcctcatttctgagttcccaactttcctcacctgagcaaggaatgccgctggtattagcgaaaagcgattcgatccagattcgcgaggtatggaacgataacctggaagaggagttcgcgttgattcgcgaaattgtggacgattacccttacatcgccatggacacggagtttccagggatcgttctccgacctgtggggaatttcaagaacagctacgattaccattaccaaaccctaaaggacaacgtcgacatgctcaaactcatccaattgggcctcactttctccgacgagcacggcaaccttcccacgtgcggcgacgaatccggcacgtgctgcatctggcaattcaactttcgcgaattcaacgttaacgaggacgtcttcgccaacgactccatcgagctcttgcggcagagcgggattgatttcaagaggaacaacgaaaacggcatcgacgcccaccgtttcggggagcttctcatgtcctccgggatcg

SEQ ID NO: 82064 - DNA, 356 bp, Glycine max
  Clone ID: PAT_MRT3847_45120C.1
tcgcggacgcgtgggtttcttcattatttcagcttttgcattggtgtcatagctccttgctgcggggggatacaaaggcatgaaggcagatgattgttgggtccaacttaaattataccatcatggaaaaattggttccaaggctttaacatttgctacatgaattaaagctctggctcattatgttcatgggaaaggtttgaagactttgatatattcacatgcatgaaattcaactctgatgaaacgcatgcctggatcacttggacacgaagaacaagatgccaaaacatttgctttttggggagtttactacttggagtaatgataattgtgaaaatattggtttatttgcc

SEQ ID NO: 82065 - DNA, 438 bp, Glycine max
  Clone ID: PAT_MRT3847_45121C.1
catcaaaatagccacatggagcttgctgagttacattcacttaacggatataaagttaacatctcaaagcttacagcatggcataccattccgagatactaatgataccataggcacacacggctaccggccatttttttaccgtaggggcgattcactaagtttcaatgacagccttactactggcgggaagaaaacatcatagatctggtacatacttgatgaatatgcaactccatcagaacatttcactaacttaatgcgggaatcccatggatatacttctggagacagctggagacagtgaccttattcttggccctgtcaggcttgtacatgagtgcacattcaggaacaacaggcttatcaaaccagggatccgtacaacattgagcgaatggacaacatgtccttggcaatggatggagctgggctcca

SEQ ID NO: 82066 - DNA, 250 bp, Glycine max
  unsure (1)..(250): unsure at all n locations
  Clone ID: PAT_MRT3847_45122C.1
atggatgnnattgtgaagnctgctgagctggcagcagaagctgtatctcaagcaggaaaaattgtaactatgggtgatcctttgccaataagtcagttcgtagaagtggccagagggtgttgacanaacccgagagtntctcagcaagttggatattcaaagacattaccagagtatggtgaacattatgtgagantatcctgaaacttcttatacacataaccnggacnnctatccggtggctttctgt

SEQ ID NO: 82067 - DNA, 513 bp, Glycine max
  Clone ID: PAT_MRT3847_45123C.1
ggctcgagaaaaaagttcaatagaatacaatcctaaactgagggtctacaggtgcactatctcctctctcggtcatacctcattctttcactacaacagcgaacatggcacatgtgacagtggaatcatagcgccctcatcggcagctgcacactgacggcgtccatttatcgtgtcgactgtgctatagcatgcatgcaactctctgtgtgaaccatcctgctttgatcttggcatgacggtcgttcctgtaattaaggatcacaaggagagagcttatggaccggataattgacataccagaagagactgaacctgagatggggctcgaactgtgcatctacaatgcacctactagtctattgaatgtgctagaggaggcctcaacttctgtattgctctgaactggacatatccaccattacagaatacgactatatgagatgcaagagcagaaacgcgaatactttcgtttatttcgggatcgcctacagaacaggcttgatttagaga

SEQ ID NO: 82068 - DNA, 263 bp, Glycine max
  unsure (1)..(263): unsure at all n locations
  Clone ID: PAT_MRT3847_45124C.1
tctaaattgtgtacatccatcttcttctcaaagaagttatgacagcacattacttgcttgacattccctaattcatttgttcatgtttganagttgcactttaattaagaagataacaatanagtgtttttntgccctttaacccaaagtagcttattcttttggatgaggtgaaattgtgggaaatgtatggctttttcagtgatttgttcttgtgttagagcatataacataatgatctatattctttaatgggatgcaca

SEQ ID NO: 82069 - DNA, 331 bp, Glycine max
  Clone ID: PAT_MRT3847_45125C.1
ggacacaaaacaaaagcataataatgctgtcgatctatttattgatgggtggagctttagtcataggtacatagtcctgtacttgacgtggctgctatgagctattacaggaaacattctagtacatacttattcgagaaaaagccctcaagattgtggacaagagacccttttttcccttattcccctactctttcttgttacgctgaacattcgcataggaggattactctgtggttctttaatagcgtgtgaacagcttgtgcagacccagggtgtgcaaggtcctggacttgactaggggtaaggcttatgacattgacttgggaac

SEQ ID NO: 82070 - DNA, 642 bp, Glycine max
  Clone ID: PAT_MRT3847_45126C.1
tttttgcggacgctttggtccacatgcatgttctagtgaagtagtgaggcctaagtcaacctcaaaccctaaggattttagcgaagtgcttaagagcagaattatcgtagcgtaaacaacacacaaaaaaatctcgttcttttactctttcaacaacgacagcagggaaaggggtaaaatatccaggttttgcttaacaatgccgtgtcatcaaacataatcaaagtaactgttccaaattcatgaattcttttcatcctttgactcaccaatttcccaagttacaagccttggtttcttcaattcgaaaatcgttggtgtccccacaaaacccagatcttgggttggaacttccgggcaaagtgttagaccaatacccagacatcaaaaccttgaaaaatgtgcattccaaggtttttaatcttagttttcacgaaaacccatctctggggatcaaactcatgagggcttatgctgcccgtggagaacccgggttggcacgcaatgtgtttgaagtaactcctgagaggaatggtattttctataatggcatgatcagaagctatatgaataaccatttggacgaagatgcattgcttggttttaagggaccatggttagcgggtggtttttagcccctga

SEQ ID NO: 82071 - DNA, 725 bp, Glycine max
  Clone ID: PAT_MRT3847_45127C.1
ctggtctctaaggaagatccctggtcagagagggttgattttcttattgaagtaatgctgtcctattttgagaaggaacaatctcaaaaagaagctattaatgctcttcctctttatccaaatgagcagattatgtgggatgaaagtgttgtacccagcataaattactctggagaaggttgtttagcattgcccaagctgaacttacagttcttaacacttcatgattatcttcttcgaaattttaatctttttagacttgagtcaacatatgagatacgtgaggacattcaggaagctgttccacatcttcttgcatatattaataatgatggaggaactgcttttcgtggttggtcaagaatgggtgtgccaatcaaagaattcaaaatcactgaagttaaacaacctaacattggagaagtcaaaccatcatccgtgactgcagaagttacttatagtgtttccagttatagagcacatattagatcagaatgggatgcactcaaagagcatgatgtattgtttttactatctattcgcccattatttgagcctcttagtgccgaagaagaagacaaagctagtgttcctcaaaagcttggcctacaatttgttcgaggttgtgaagttattgagattcgagatgaggaaggaaaccttatgaatgatttttcttgaaagattaagcgtgatgagtggaagccaccaaagggggaactgag

SEQ ID NO: 82072 - DNA, 645 bp, Glycine max
  Clone ID: PAT_MRT3847_45128C.1
ccaatcttatctcattaattttatatcactaacaagttctacctataaaatttcatagatacgttgggtaaaaaaagaaaaacattcattgtatatgtaggaataagctacaaataaatcatcctcccattttttttaaattcatgggggtacattagtaagtcatacttcccaattgaaaagctttttccatggccctcaaaattgacaaaagctctccattaatcaagttgctaggttccaaatttgctatgtcattgttattgaaggatgaatgattcccccttccaatctcacaaatcacaaacctacaaactgggcactggcccttacttgttagccatggtactatacaatcctcatgaaacatgtggttgcatggagtgagcatcacctcttcattgggatcaaaatcttctaaacaaatagcacagctcttgctatcttcatcattttctctctgcttctctttcaaaggctttgcagcattgtttctgtagtataagctcaccctcctagcatacctctttggggggagggtcatagactactttcttaagcttgctcaaagctgttgattttggtaatttctaccactgggagagccttgtgtgcttgtttggaatgggggatctttgagggggg

SEQ ID NO: 82073 - DNA, 781 bp, Glycine max
  Clone ID: PAT_MRT3847_45129C.1
aaccaaaaaagaaatgctatcatatcattcatttaaactatgtcagacacaaataattttgaaattaaccaattaatgctcgtttggcattaatgtctcttaaaaagtaagttacaattggttacactcgtacatgctttaaacatcaacaatgttttttttttttagtttcaagtaaattagctaaacacacatcataccattgatataatggggtatggcatgcaggagatgttgaagaatttctccttattcctctttcctttagaggtctataggcataggcatggcacatgaaagctcacacatgtactactcagtttagatgcttctctataagcttttgcagctcttccttttttgcacccaccaccttatcaacaacttttcctttctttatcaatatgaatgttggcattgcatgcacctggaattcttgagagacccccatcaactcatccacatcaattttgatgaattccacgttggtgtactttgcagcatactcttggataattgggtccatggatttgcaaggtccacaccatgtagccgtgaaatcgattaccatcaacttgttagtttctttggaagcatcaaaatgagtcttccatttagcagtggaatggaaggtgagaatgtggtctgatgatgactttgatgatttatgagcattctccatgttggataagttggctcccatcttgctcctttctttcggtgactgagaaaaccacaatttatttgtataactctctacttagaagaggttggcgagccg

SEQ ID NO: 82074 - DNA, 197 bp, Glycine max
  Clone ID: PAT_MRT3847_4512C.1
gaaaaaaaaacccaaatttcaaaatttgtaggtggacacccccgatctatttccaaggcctaataaaatcccccttcattcaaactcttgaataaatgaatcctaggacgttgaaaccaaggccgtaacgaaagaaattaaacactttgatgtattgttcacccattgcgaaaactctaaatgttataccatactgc

SEQ ID NO: 82075 - DNA, 1282 bp, Glycine max
  Clone ID: PAT_MRT3847_45130C.1
gcatgagccaaatagttgactgtatatttaacagaaccaaaagcttggggagcaggaagggattgaatatgattctgcgccaatcaagcagagcacagaactagttattctttcaaaacaattcactcaatataatactcatctaaggcaaactgcataagaatcaatatatactaaaaatatattgccccatctacacacaaaaatttaaaccaaacttgaagaagaagtctcattcatgaaatgaagaaaccactgagcatgtagcagttatttcatgcatttgtcttaggcaatgtcactggcttcacgaccatgacaacacatgtatttaacagaagaaacttccatttcatgtccacacttatttggacatggtatgtgagctagaatgtcagtggggtaattggcaaattccctatgttcacatttgggaggaacactctttaccttgcatttatcatagtagttcttgaaagctacatcaaagctcacttcattgtgcattgtccctttccaactctcaaagtctgtgacagttctaagcatggcatcaccatgacctagaagcttcacatgagacccttttgtaagaatggcccatccaagtggatcttgtttgaggaacatcaatttctgaatctctcttgttgtagaatcttgcacttgttcactacccttttttgttagtttcctgctagcaagcaagttgtctatggtgatccagaagcgcggaacaatctttgggctgtcccttcccaatggataggactcaattgtggtttcttcctctagggtaagagtttcattctttttcaatttctccacagctgtggtgaaatcttggatccacttagtgttggtgcctccatagatgaagatgtaagagtcccttttgatcaattctcttattataggactgagggtgatcatttcattccaaaaccagttccattgctgagtgagtcgagtgtgatctgaggttctgaaagggaagccatcaatcccccatttggaaataatctgctttgcatcagagttttccactttaccctcagggcttatgagcatgataatggggttacctttgtaattgaatacctcttttatcagatcaatacctgtttggaaattgaattccttcaccacataccactcacttagtaacatctaactttttcttttgctcttcatcccaaacactcactatggggatccacaaaatcttgaaatcctctttcctataaccctccagctagattggttcttccttcctcgagcc

SEQ ID NO: 82076 - DNA, 913 bp, Glycine max
  Clone ID: PAT_MRT3847_45131C.1
gagacaataaattaaaacgtatattacaggctggcaaacatgaattattgcttttatgattgcatgcatatgcaactgttgactgaagaggagctattctattatgcatatgatttcctaagatattgctatatattacataattgaatcatttcatcgacattttgatcacataaataaatcatcgatatcattggagatggcattcacggttagctcatgtaaactaaaatcattatcaaagatcaatccatcatccatgcaattaattggcctataagagttacccgacgaagttggaagaaagtgtccactttgctgctcttgcatcaagtgttgctttggaagtggcacagaaacttggttttggttagaacttatggtgccaataaacggtggcattgctcctctagttgttatttttgtgtggtgatgatgatgaatatgttgtttgctaccaccttgttggaaatttaaggtaacgggacccttatggattgcaagtgacatggctgttgtggtgggacacccagtgaattgttgtaccaatgccctgaaattggaggtgttggccttgagaagggtaattggagtgctcttagaagctctagatctccttcggatttgtttgaatgcacaaccctttggagttaaattgtggtggccaattgttgtgttgttgtgtgaattgcttgggctcaacatgatcatgccctctgatgatgatgacatggatgcatccatgagtccttctatggatggatccatagccatgccatccatgagaggttgttgataaaactcatgcatgcattgatcagctgtggcagtcatgttatcgttcaggaatttgggtggtggtaaataatggtcgactaattaatttggtgagggtagtaatattattttgatc

SEQ ID NO: 82077 - DNA, 254 bp, Glycine max
  Clone ID: PAT_MRT3847_45132C.1
tgaaaggcaccattacacttacttacgggactttagttttgaacttctcctctcttacaagagcgcattcacaacagggcacacgctaccccaaatagcataacatatgcagccacttcttcaacactgaaccggtacccaactgctgtactatgttatcaacactgaattgccgcttaataatacgatgtcatacaccattctctatacagaacttctaggcaccaatttcatggtggtcgaatagccaaaaa

SEQ ID NO: 82078 - DNA, 214 bp, Glycine max
  Clone ID: PAT_MRT3847_45133C.1
tgataatacgagcgttgatgcctgatggcatacggaaccatcgactttcccagaagttcctcatacctgatggcgtcgcaattatgacaagacatccgacttcagtaggatggagctttaagggaggccttttccgttgtcgttttgacatagggatcatgaatgggtttcattctcttgcagctgagcttctgccatgtcatgacattatctt

SEQ ID NO: 82079 - DNA, 159 bp, Glycine max
  Clone ID: PAT_MRT3847_45134C.1
gcgatcatatttacaccacataggacccaccctcaccctcttacagattggcaaggactccgggcgggtttgatagggttgaattcgcctttgactctcacgtaccgcatgggaagctctgcaatagcagcgagaatgagcagtactcgcctgatgact

SEQ ID NO: 82080 - DNA, 124 bp, Glycine max
  unsure (1)..(124): unsure at all n locations
  Clone ID: PAT_MRT3847_45135C.1
annangagacagcagncgcangtacgtnagctcgggntnggnntcgagntatagtnnnctcngcnaattccatatccccgttttccatcactnnttgaaccncgnattacatttncaccagnac

SEQ ID NO: 82081 - DNA, 214 bp, Glycine max
  Clone ID: PAT_MRT3847_45136C.1
cttcggaggatgcaatttactttgagaaggtatagcctgagtctcatctgatgaagacaatgctgtgtaagtcgtataggccgaagaacgttgccgctgatgaacaaaacgttgaattggtggtgggcaatatcagtaaggacactcttgtgaacgaggagaggagtgaagtgaagggctcaagttcgggggctgttgcgaacaggaaggacgg

SEQ ID NO: 82082 - DNA, 665 bp, Glycine max
  Clone ID: PAT_MRT3847_45137C.1
cggtccggaattcccgcgtcgacccacgcgtccgggagtagtctagcattggccaggactacattgtcaggacctacgcgagaccatccctcgtctactagcaattcaactgttggagcccatctgggctggactgaccgattggcaggcttttgcggagcaagaggtggctaattttaaaacagcatgactatatccttacgtatttgacgaaattcaattcacctgccacatagactccgctacagagcctatttttcttggcaagagatgtatccttgacaccgttggtctttgccttacgtaagctgacttctcagggctaaggatatggtcttgttagcgaagacttgctgccttcgagtgagggagttgtagcttacattctgttactggcaaatgcttatgttgctgtgaatgattcgtgctaccctctactcgtctgcctctggctaaactctcatgccgttgttgagccattcgctatacccccaatcaggcatctgagcgtgcttcaccctatttacaaacttttgtttcctctctctcgtgactcctttaacttttattcacttgcctcgtcatccttggtctatgcttactgtattctggacaaaacattcttgtggggttggtactctgtggcaatgtctgctgctttttac

SEQ ID NO: 82083 - DNA, 1163 bp, Glycine max
  Clone ID: PAT_MRT3847_45138C.1
cccactcccacccctcaccctgcaccaatgagcaacctccctacaactcaagggaaagccatccctgatgcctccgactacaagggccgccccgccgagcgctctaaaaccggtggttggaccgcttccgccatgatattaggaggagaagtgatggagaggttgacaacactaggcatcgcggtgaatttggtaacatatttgactgggaccatgcatttgggtaatgctgcctctgccaacgttgtaaccaacttcttgggaacctccttcatgctctgtcgttgaacaccatctactctattattttattcttttcaattcaatccaaagaaagaaatagattgagctagatctcgtgagtgctcattgggtttttcgttttcttttctccacagataccgcaccatcgccatcttcgctgccgttcaagcaactggtgtgacaatcttgacaatatcaaccataattccgagccttcaccctccaaagtgcaacggagacaccgtgccaccttgcgtgagagcaaatgagaaacaattaacggtgctttatttggcgctttatgtaacggcgctcggcaccggaggtttgaaatcgagtgtgtccgggttcggttcggatcagttcgatgattcggacgacgacgagaagaagcagatgataaagttcttcaactggttctacttcttcgtgagcatagggtctctggccgcaaccacggttcttgtgtacgtacaagacaacataggacgaggttggggttatggtatctgcgcgggtgcgatcgtggtggcacttctcgtgttcttgtcgggtacgaggaagtaccgtttcaagaaacttgtgggaagtccattaactcagtttgcggaagtgttcgtggctgctctgagaaagaggaacatggaattgccctctgattcatcattgctctttaatgactacgaccccaagaagcagactcttcctcatagcaagcagttccgtttcttggacaaagctgcaatcatggattcatcagaatgcggaggtggaatgaagaggaaatggtatctttgcaccctaacagacgtggaagaagtgaaaatgattctaagaatgctacccatatgggccaccaccatcatgttttggacaatccacgctcaaatgaccacatt

SEQ ID NO: 82084 - DNA, 1820 bp, Glycine max
  Clone ID: PAT_MRT3847_45139C.1
gtccctttttcttccacgctcctctgtttctctctcacacactcacacgttcgcttagtttcattacctcactctttccgtatcaaagtcaggtgcgctttttgttcctcggtctttgaatgcacactctcacacatacacagtagtagcagtagttacagtacggtcaaaactctctctctctctctctctctctattctcttctcttttctttcatcaatcatttcatttttcattcaattcaccgatcgttagagacaaacgctcattcgccgcgtgatccgacgcaatggacgtacgcgagacgccccgcccaccgccgcccaccatgatggtgggccctacatcctacggttccaccaacctcggccctaatttctcctcctcctccgccgccgccatgctggcccccgccaccgcgcgattcccctttggcgccgttcctccgccgcaacagcatcagcctccgccctcgtcggagcccttccccgcctccgccgcatatgacggctcctcctcgccgatgaagccctgctccctcgccaagaagaagcgcgggcggccccgcaaatactcgccggacggtagcattgccctcggcctcgctcccacccatacctcgccgcccgcctccgcagccgccggaggcggaagcgccggcgattcggccggcacagcgtctgccgatgctccggcgaagaagcaccgcggaaggccgcccgggtctgggaagaaacagcttgatgccctcggtgctggtggggttggattcactccccacgtgatcatggtggagtctggcgaggacatcacagcaaaaataatggccttttctcagcaagggcctcggacagtttgtattctttctgctattggtgcaatcggtaatgttacccttcgacagcctgcaatgtctggtggtattgctacctacgagggccgctttgagattatatctttatcaggttctttgcagcaatctgaaaataacggtgatcgtagcagaacatgcactttgaatgtaactcttgcagggtctgatggacgtgttttgggtggtggagtcgctggaacgctaactgcagcatcaactgtacaggtcattgtgggtagctttattgcgtttgcgaaaaagtcgagctcgagtgccctgaaatctgggtcttcttctgcaccaccaccccaaatgctaacctttggtgcacccatgaccccaaatagtcctacctctcaagggccttcaactgaatcctctgaggaacaggatcatagtccattttgtagggggccagggcctggacatggactctataataatgctagccagcccgttcataatatgcccatgtaccatcatccactatgggctggccaatctcatcagtgaaggtgtgatttcggattaacagtgcagaaactgcgtatttagcatgatgcctgttcaaagtagtggctcgaggtcaattctaaaatgctaactgcatttttgagactgactttagaacagtctatcttaaggttaaagttcttcagttgattattagtttttttttccttctccttttaattataatcgtaacatttctagtgatgatagccaaagatacggtgccaattatccgaattttgtcattttgaagattgctgtctgcactccgcagtagcatatagcagaatcagaatgtgctttcctccatgcatcgtgctttattgtttatgacaaatgctaatcagtaaaaaaagtaaatgtttttatttggatgcgtaaaaaaaaaaaaaaatatagtttttaaaaatatgctctaatataatttctaat

SEQ ID NO: 82085 - DNA, 1452 bp, Glycine max
  Clone ID: PAT_MRT3847_4513C.1
acacaattctagagaaagaatggcttttacgaagcaaacaaacagattcttccacgaataataataataatatacattaaaagcaaaacaagttgagcaaccaaagaaaaaaccaattcggctcccgctaatttctaacaaaatattttaatttgctcctcctctttcgcccccttctccctctctctattttttttttctttcccgctttttcatagcaaaacgaaaaagaaaaccctagaacgggagagatttcattccccaaaaaatctcttccttctctctcctcatttctgagttcccaactttcctcacctgaggtcagaatcatacaataattcctttctgttttcagtttcttattacaattcaattggatgatgattattgagtctaataattttgaacagatctggtgtgacgtgcatcacaattgaatcgaattgaaatttgttgtcgtggttgcagcaaggaatgccgctggtattagcgaaaagcgattcgatccagattcgcgaggtatggaacgataacctggaagaggagttcgcgttgattcgcgaaattgtggacgattacccttacatcgccatggacacggagtttccagggatcgttctccgacctgtggggaatttcaagaacagctacgattaccattaccaaacccctaaggacaacgtcgacatgctcaaactcatccaattgggcctcactttctccgacgagcacggcaaccttcccacgtgcggcgacgaatccggcacgtgctgcatctggcaattcaactttcgcgaattcaacgttaacgaggacgtcttcgccaacgactccatcgagctcttgcggcagagcgggattgatttcaagaggaacaacgaaaacggcatcgacgcccaccgtttcggggagcttctcatgtcctccgggatcgtcttgaatgacaacgttcattgggttactttccacagcggttacgatttcgggtacttgttgaagctcttgacgtgtcaggatttgcccgatacacaagtgggcttcttcaatttgataaacatgtatttcccaactgtgtacgacataaaacacctcatgaaattcggctcgagctccatggaggctgttgcaaaacttcatgaggtgttttatgtcgtacacagttgggatttgccatcaggccggttccgatagcttgctcacttcctgtacattcaggaaattgaaggacaatttctttagtggctccttggagaagtatgcaggtgtcttgtatgggttaggtgttgagaatggacagggttctcattgagaaggaaaaaaaaaacaaataaaaaatgaaattagaaaaaaaaaaaaaaaaacttggtagatctctctttgtttgagctgctgtatatctggcgtaataccaatttctattaatttaaacctttggcattaagtgtctttact

SEQ ID NO: 82086 - DNA, 254 bp, Glycine max
  unsure (1)..(254): unsure at all n locations
  Clone ID: PAT_MRT3847_45140C.1
gacgagcggcgctagaccgcagtcgccctttntttttttttttttttttttttttgggtgcataaccaggggcaaatgggaggtaaagtttgtatggacaaaacaaatctaatcctttctataaaccaaacacagtaaatagaccacgaaagtgcggagtgcgaactaacttattccataaaccactgctttctcccccattatccagtggcacacctgcaaactaattatttatggtggctgacacattttac

SEQ ID NO: 82087 - DNA, 304 bp, Glycine max
  unsure (1)..(304): unsure at all n locations
  Clone ID: PAT_MRT3847_45141C.1
gcaatttagcttcaactcgttagggcccatctcaatctagaannaagccaacctatctaagtgattcaacccaatcaacgcgtgatctccttcattggaaagccttgaaaccccagttacatccagccccttgattgcatggtacttatcgaacctccccgcatacaggaccgcagtgagcccactactaagagggatcgaggtgggcctggcccatggctaccttctggcccgnncattcgtgaaggccggagctctgaggaacaccgagatcgccgggcaagcaagctctctcgccgctggt

SEQ ID NO: 82088 - DNA, 134 bp, Glycine max
  Clone ID: PAT_MRT3847_45142C.1
gggcaaatcaagcacagctttaacattaaaccaattttcttgccatggtaataactatttgcacaaaccactttcattacttaaaaacgtaacatatcccccgaaaaaatctaaccacaattaataaaggtaaa

SEQ ID NO: 82089 - DNA, 256 bp, Glycine max
  Clone ID: PAT_MRT3847_45143C.1
ttgcccaaacccaagcgtacgctctccacacacacacacacatcttaccggcgtatcggtcacactagaaccaatccaaaccccactctctctctctccgccggaaacgacccttctccggggcggcgccaccgtacaacccccgattttactaaaggagcttcttaaggagggggtgggcaccaatgggcggcaccggaagcaaaattgacgttagtcagcgccaacgacgggcccgtgatgagccttataaaca

SEQ ID NO: 82090 - DNA, 556 bp, Glycine max
  Clone ID: PAT_MRT3847_45144C.1
cccttggggtgttttttttttctttttttttcttttttttttttttttttctttttatcatctttacacccttgggtggtaattttgttccttttgttgtttccggttagggtcattttttctctttggtgggggaagaaatttttccaatggtgctcaggtagcagggggggggggggcaagaaaaaacccgcccaaagaattccccccggggggggcaaagggcccctcaaagggggacagggatggaaccacagtcgcccggttaactaattcactttgagaaacctaaggggtcaccccaggggacccccaacctaaccgagggggggaaacaagggaaaaagcttaaatattcaacccggaagcaaaaaaaagttgaatcaaaaaaataaatttgcccgccctggaggccaaaaaaagcctggggggttcagaaacagacaatcttgaactcctcctgtccttaccaggagcattcatgggggacttctgctctctcctaccccatattgccgctttgacccccgcggggttttggggcccaaagaaggca

SEQ ID NO: 82091 - DNA, 435 bp, Glycine max
  Clone ID: PAT_MRT3847_45145C.1
cataaatttattctactaatacctttcaaggctcatgcggccttgggtgtatctccctattagacgagagtaatggaatgttgccaaggctctgggctgatgcttcgatcaatgggtgtgggaactcagtcagctcccactgacgaacaggagagggacaggatgcgcccagctgccatgacaaacacgatatgcgccatgcagacactactcaagcgttgtgaatgtgaatgaacaagctgggagagcacagctctcttggctagttgatacaccaactagtcttgaaccacgtccaagatcactaggggagaggatcaatggtggaactggatgcgactctatcgattatggagcagctgatgatatgagaccggttagatgctattatgacgggaatgcactccactgcaatcctgatgcgaagaacaactt

SEQ ID NO: 82092 - DNA, 494 bp, Glycine max
  Clone ID: PAT_MRT3847_45146C.1
aagggaacaaactgaaatctaaaatatagataaggaaccaaaattctattttagccatttagagggtattgacattctgatattagaaaaactacatttattaaagctgatcttttccaactttcatcttggcctaatggttggtatctttccactgacaaggtcactacctgacacatctgctgaaacaaaaggagtcctggtagtagatgaagaagaatgtggattgaatacccttccagaatcacttgtaacatattctgcctccatagcgtcggtctcagttaacatagaacagatgctttcaagctctctggccacatctatcattttaggccgctcatctggttcatctttgcaacactttaaggctaaagtcaaaaatttatccgcacactcagaaagataagactcgatacgtttatcaacaaccgaaaatactccaccagattgggattcctcattaacctgtctaataatattttttgccatga

SEQ ID NO: 82093 - DNA, 914 bp, Glycine max
  Clone ID: PAT_MRT3847_45147C.1
gccatttgacacagaaccaccttttacaaaccataccacttttggggaaatcgttggactaaccaaatggatgagtttctacttatgtgggttaggtgtcaagcaatcaaggttagagtaattggatctcaagtgaaagctatcaatacttctaatgggaggaatttgcctgaatgcccaactttaatctttgaattttgttggacgtggggtttgaaggtgcgatcgaaggttcagttgacgacttctctgaagtgttgagtgaacggatatgtaaaatatgaacaaatttgagagtgcttgctgatagttacaagaaacagtgctcggccattgagcttctgaagatgttgctgaaaacagtagggtttagtaattttgcaccgttattggatgtggctaaagatgactccaagaataatgtacaacagagtcagcaaaaagttcatggaatgcagccacagctacaacaacaacagtagagttcccttcggttgcctcaacaacagctacttatttttggatccttgagaacccttcactatggtagatgtattttgtgcttcctcaaaacagaattacccctacctcaagttgaattgtgatttattttttgtctggccagttaccattatttatagcatccatcaaaaaaatattttctacatatcgtgtgttatttgagtatgaatattatgaggctgcagttcacatgcctttcttttttatctgtggctgcatatttttcactcgtgttcaatttgtagtatggggtgctatattttaaatatttgttcatgatcccttattttgttattaagttttgtgatttataaggttcatttggcctatttgggttgtagctctatgtttgagctttggagaaatacagcagacatccccctttctcctct

SEQ ID NO: 82094 - DNA, 456 bp, Glycine max
  Clone ID: PAT_MRT3847_45148C.1
tcggtgcttttgtcaattttctattgaccttcttggtggaggaattttagaggacaaaactggagattggatcacacttatacaaatttctccaattagtaacttgatggagttgctggttggaagaaaggctgattaatggttaacatagtgatgtgtgggaatgcatcagacaaaaagagagattgggcctcagtggttcaagggtgtttaacaaacagaagcagtccagagcattctgatgcatgttaagtgacaaaatgggcaccacattactgggaattgatctccccaatagaggtatgtggtatctaacaatggttttgaaaagtggagttctgaggggggagatgaaactgcatggcatcagagttttcttagtgacaatcccaaacagtctacagttgttgatattctctagacaatttttgaagatttcgaaactgctggtaatac

SEQ ID NO: 82095 - DNA, 814 bp, Glycine max
  unsure (1)..(814): unsure at all n locations
  Clone ID: PAT_MRT3847_45149C.1
ccacaatcacataattctattggtcttttaccttgtattacatactaaaggacacagcctctgatgaaaatttcctttcacacaggccacttgaacaatggataatattaattcatggaaactaaactaaccaaagataatctcattgtttccacttccctctacattccaagatgaatgaattataaatccattcacattgcctctaaaatgagttagataaaacagtgatatgcttcattggattggccacttccttgcccccagcatgcatgacaaactcagctggggtgagaaagttaccatggcagacacaaacaatacacacttgaccagacctatacttgtacagaaacccttctatcctcttcccattggggccatctccagtagtagtcacacttggcatccgtctcaggatctccattacatcacctttaaggctgcagtagttcccaagtttatgctttttggccggattctccggcttagtatcagcaggcctaggtgaaattcccttggcaattgttttgtgggaagccttggaatcgttttcctccttggttgatgtttggatgttcaaagcaactcctttggctgcatgtgtaggaccctgaagccctgaatcctgagannnacttgggagtgggtttggtttgtgaagtgatgannatgtgttgttgacattgacagcagnnnnnncagccacccaagcaagcactngnnnngagagtgcaaccaccctcctctnnntctctgctggcaatgagcaanatctnccangnnntgtgccccactggnnccnannngcaca

SEQ ID NO: 82096 - DNA, 170 bp, Glycine max
  Clone ID: PAT_MRT3847_4514C.1
gacaaaacgtgaatactgtcattttttttaggtgaaaggatggcatcattttattgggcatactaaaaagaagaagtcccagaaccatggtcgctagttagcatttaaagggagggtatcctaaacctttcttactatagaaacctgtctaaaccatacaaacttatttt

SEQ ID NO: 82097 - DNA, 239 bp, Glycine max
  Clone ID: PAT_MRT3847_45150C.1
taagattctgataaggagccgccgagccgacgtaatgacgttggcgtcattttgggagagagttgtgttttgtaatcaactcccccgtagttggtttttaagttttattttgttgagttaaagatgtaaaactggaattttaattatatatatgaacatatttaattttcattatatgtatgacatgtaccgaattattgtttctatgtaattatgcatattcacttaaaaaaaaaaaa

SEQ ID NO: 82098 - DNA, 214 bp, Glycine max
  Clone ID: PAT_MRT3847_45151C.1
ttgcaattgcacatatagtccccttcactaacacatggaagccagcgctggactggtcgatgggtcacatagccggaatgagctagaccccattcatgggcatgaacagcccaacgcttccaacatctttgatgggcacgtgcgtcagagttgcggagatatcgcgagagggacggcgaatagaaacatgcctgcggctttttatttatggggg

SEQ ID NO: 82099 - DNA, 107 bp, Glycine max
  unsure (1)..(107): unsure at all n locations
  Clone ID: PAT_MRT3847_45152C.1
gcagaggtttctacgcgtcgatcgttgggaattgcgctactcngcgtctcgcacggctaatcctcctcatgagtgtcagcagctgcgcgttcatntggagagccgag

SEQ ID NO: 82100 - DNA, 151 bp, Glycine max
  unsure (1)..(151): unsure at all n locations
  Clone ID: PAT_MRT3847_45153C.1
atgtcgcgtacatagctggaattgggntcgagctctagcaaaaaaaaagaattcctactttgtttttgaccgaggggaaggatcacgatgggtcagtgggatctaacaaattcctccatagacaaccaattgggacggctgcgcaaaatcc

SEQ ID NO: 82101 - DNA, 1166 bp, Glycine max
  unsure (1)..(1166): unsure at all n locations
  Clone ID: PAT_MRT3847_45154C.1
cacgcgtccggataactcacctgacgcttgtatgtaactcacactctccttctcaccttaaatttgccgtgttgaggactcttcttgtaaactggcacttactgaaagggaagcactaattcacaattcacagggcaagaactgtgacttgttgactaccgatggtatgaattactgcatccgaattaggttgcactgaaggtattggtaagggaaactttttgaatggagcttgtgggntggtgctggacatggtggaaaagagaggggtctggatatttcaatgggagagagagtattggtgggaaatgaaattgaaaatgctattcttccatgtgaataangaagtggaactgagggtcctaatgagtcatatggaattgttgttggaggcggaatgattgtgatgggatccattcagtggccacttttgagactagacctttatggatccttgagggctgatggtgaaagctttagcaaatcaataaaaagcggtgatggttctttggttgggggtcttggcggaggttctggtggaacagtccttcttttccttcaagaacttaggctcttggagaattcatccttatctgttgttgggggcaatggtggtccagttggtggtggtggtggaggtggaggtcgaattcatttccattggtcaaagattggtatggaggaagaatatgttcctgttgcaagtattactggcaccgtgaataacagtggaggtgctggggacaatgatggccatcatggacaggagggaactataactgggaaagcatgccctaaaggcctttatggaattttctgcgaggaatgtcctattggtacttacaaagatgttgatggttctgatgaacacctttgcattccttgtcctcttgatcttcttccaaatcgtgcaaatttcatatataaacgagggggtgttacaagacggacttgtccatataaatgtatatcagacaaatatcgaatgcctaattgctatacacctctagaggagctcatttatacatttgggggtccctggccattttcagtattggtgtcattcattttattgcttgtggctctgctactaagtactttgagaaacaagttgaccggttctggctcatatcgtagttcacgttcaattgaacaccataatcatc

SEQ ID NO: 82102 - DNA, 530 bp, Glycine max
  Clone ID: PAT_MRT3847_45155C.1
ttacataccagttcttagcttttacaactttcttagcttgagaactatctcacacttctatctccccaagcattctcttttgtttctttttgaacaagtctgtctcttgacttactcttctcactatgcaccttcgtgagtgtaaccccaagcattctcttctgtttctttttgaacaagtctatctcttgacttactcttctcactatgcaccttcgtgagcgtctccccaagctttctcttccgtttctttttggacaagtctatctcttgacttactcttctcactatgcaccttcgtggtgggcgttttggacaagtctgtctcttcacttattattctcactatgcacctttgcgagcgttgcgggttttcaaaacacttggcgaggtccggaatcttaccaagtaataacatttaacctcgagagacgagctcgtgtaaagttgggaattcgttaaggagctgttgctttgttagtgtagaaacacttgtgtagaattggggattgttttttttggagtgattt

SEQ ID NO: 82103 - DNA, 149 bp, Glycine max
  Clone ID: PAT_MRT3847_45156C.1
atttttcttatatttaagtattttgaatttttgggaggatggttttgctctcatccttccacttgctgaaaactctgtaggttgggatgatttgattctgcgtgtgaggttctctacatgccaattcgtccacgggaagacatcagcaa

SEQ ID NO: 82104 - DNA, 387 bp, Glycine max
  Clone ID: PAT_MRT3847_45157C.1
ctccgcaccagttgtaccgcacgaatatctagtggttaggagcgatccgagaaaaactctgtaaacataggaggattaccaggacctccttacaagagatgatcttctctatgactccttacattacaaggaatttgagaatgaaatgctgtgggaaggtgaggggaagtgggttgttaaaggagcaagtgctgtagacattggtgcaaaccctgctgctgaaggaggaggaaaagatgagggagctgatgatgcatctgttaaggttgttgacattggtgacacattcagacttcaagagcaacccgcattcggtaaaaagcagtttgttaccttcacgaagaggtttatcagaaattggactcccaagcgcgttgcgaagcaaca

SEQ ID NO: 82105 - DNA, 623 bp, Glycine max
  Clone ID: PAT_MRT3847_45158C.1
tacggctgcgagaagacgacagaagggggtaatagattccattttactttttttctcaatccagactttctggaatgctcaaacatttcttcatcaaggtgattcaaagtcatgaattcaattattgcaactcagaacaatgcaacagcaaaaaggtttcccactgaggaaactgttgttgatggggaagacataattagcaagttgcatgaaagcattcttggtcacattctgtctttccttccaacaatggaatcagtccacactagtgtgttatcaaaaaggtgggttgatgcttggaaatccataactggcctacaatttaatgatactttgctttgttttgggaaaaagatgcaaaaagaacagtttgtgtgttttgtgaacatggtgtttcttcaccttgccaattcaagtatccacaatttctctctttgtttaacacgttatcagtatgattcaaccttgataagtgcatggatctcctttatctttaaaaggggtgtccataatcttcatattcagtatgctgataatgtccactttccttcccattcactctttagttgcaactctctggtacaattagtgcttcaaatgaaatgtactagagagttgcaact

SEQ ID NO: 82106 - DNA, 173 bp, Glycine max
  Clone ID: PAT_MRT3847_45159C.1
cccaaacccaatcaccaaatttaacccaaactaacattcataaatctctatccctacatataccccacttaacccactaaacctccctctcccatcactctaataaaaacaatactctttaattacttttcaaccattctacccaagatctccacccccattaaataaccttc

SEQ ID NO: 82107 - DNA, 279 bp, Glycine max
  Clone ID: PAT_MRT3847_4515C.1
cccacgcgttcgatcagtttgagagctgacagaaaatctggccctacattctaataagcactaatcagttcaataaaaaagttttagacacacttgcatcttttctgctttcaattaatggcttgaggattgaaaagttgaacggggaacccctgatctatatatacctgcacttttgtccaatatgctgtcttccctacgttgagaacgtgcaatttcaaggttaataaaaatggggggtggggaggtgactttaaaggtagggtaatataagtcaag

SEQ ID NO: 82108 - DNA, 1140 bp, Glycine max
  Clone ID: PAT_MRT3847_45160C.1
ttaagacttccctttcataatctctcagatatctttctgccttctgtgccttattctttggttcattttgtttagtttttccctccatctaaacaacacacacagttgtttctgtgacacgtcacatagctatttcaacaagccatggaaatgaaggcaaagaacaacaacaagaaggtagggagtgaattgggttgtggtctcatggggagaattctccacctcaaaagccataagatgagaaaagcatctgttcattccctaccctttaagaatgcacagagtgatgatgatgtcaaaagtgaagaatcaaaggtttcaagaaaaagatccactggcactgagccaccacacaaaccgagtggtgtagaacaaaaacctgccagaaaaagtgcctctattcaccaacaaccttgtacaaatcgaaacaaccaacatcagaggcattcagatgttgctgcaagaagctcaacatcatcgtcctctagtacctcaatttcaactaaggttgttcaacaaaacaaggacaaaagtcatgagagaaaaccacaaggacagcccactggaaattctcttgtgcttgctaggataagtactagcaatgagaataatgagaacaacaagtctcaattgaaactcactgggaatttgcttgtgaataacaccccaagaaggaagagtgtggaatacatgcctaagagtgcagagttgaactctgtgcccagttcttacaccaatgcaagcaaaggcttgatggggaatatcttgaataggaacagcgatggcaataaggttgcacagtttttgagtccaaggatgaaaaaagtggaccctgaggtgtcgaaatccatgggaaatgatgcatacaagcagggaagatttgaagaggccttggctctgtatgatcgagcaattgcacttgattcaaataaggcaatatatcattgcaacaaaagtgcagctttaattggcttatgaaggcttcaggaagcaattgttgagtgtgaggaatcaatcaagctggacccttcatatgtcagagcccacaaccgtttggccacaatatatttcatgttgggagaagcagaaaaagcactgaattgcaatcagataaccccatatgttgattcaatacttact

SEQ ID NO: 82109 - DNA, 645 bp, Glycine max
  Clone ID: PAT_MRT3847_45161C.1
agcatataaaacattttaattaaaaatacaagtatggttacataaaatatacattacaaatctatgccaaagttttaacttaatttcttttggttgagacctggtctctgtccagctgctctgaagcttgtggcaatcctcttgtctgagccctccaagtccagagattacaggtgttaagccaccacacccaccgcccaaagcttagcatagggacattcagcccagtaccctaacgcaggacaatcaggttttcaccctggtggaaccagctgagttaatgcacacgagagacctcactccaccattgctaagtctctgaggctgggggacttttgtctcttggctttatagccggggcgcaggaactctatcttcctcttctttgcttcactcttatttttatgtttcttcaacttcttcttggcagcaatatcgggattagttacaaactccagggccttcctctttttgcggagagccctcttctcactagcctgtttctggacggaggcaaaggctagtgagaagctctccagcccgaccagcttcttgagtaattctatgatttcctgggataaattcttcagcacaggatcttgctccgcaaaggtgctgttgagttctcgaaacggggagcgatga

SEQ ID NO: 82110 - DNA, 336 bp, Glycine max
  Clone ID: PAT_MRT3847_45162C.1
ggaactatgaatatctgtttaggaaaattttgtttaatgcaaattgttgtttcttgtgtgttttgaaaaaaaaaaaaaaaaaaaaaaaaaaaaaaaaaaaaaaaaaaaaaaaaaaatagtcaaacaaatatataaaaaagtatattctcttgtatagagacacataaaatcaaatatctggccgccgattgacaatttcgtgcctgggaaaaccatgtcgttccaccgctaataccctttgtataccatacccctttctctcactggcatcttatattatacgcccgcgcagatcgcccattaaaacagttgcacactctttctggcaaatggcgc

SEQ ID NO: 82111 - DNA, 1104 bp, Glycine max
  Clone ID: PAT_MRT3847_45163C.1
ggggcccgtaaacacacgcttcgtcctcattagagtgacatcgtctttaaaccccgcgtggcaatccctgacgcaccgccgtgatgcccagggaagacagggcgacctggaagtccaactacttccttaagatcatccaacttttggatgattatccaaaatgcttcattgtgggagcagacaatgtgggctccaagcagatgcagcagatccgcatgtcgctccgcgggaaggctgtggtgctgatgggcaagaacaccatgatgcgcaaggccatcaggggccacctggagaacaacccagctctggagaaactgctgcctcatatccgggggaacgtgggcttcgtgttcaccaaggaggacctcactgagattcgggacatgctgctggccaataaggtgccagctgctgctcgggctggtgccatcgccccgtgtgaggtcactgtgccagctcagaacactggtctggggcccgagaagacctccttcttccaggctttgggcatcaccacgaaaatctccagaggcaccattgaaattctgagtgatgtgcagctgataaagactggagacaaggtgggagccagcgaggccacactgctgaacatgctgaacatctcccccttctcctttgggctgatcatccagcaggtgtttgacaatggcagcatttataaccctgaagtgctcgacatcacagagcaggccctgcactctcgcttcctggagggtgtccgcaacgtggccagtgtgtgtctgcagatcgggtacccaactgttgcctcggtgccacactccatcatcaatgggtacaagcgcgtcctggcattgtctgtggagactgagtacaccttcccacttgctgaaaaggtcaaggccttcctggctgatccatctgcatttgcggctgctgcccctgcagctgctgccaccactgctgcccctgcggctgctgcagcccctgccaaagctgaagcaaaggaagagtcggaggaatcagatgaggatatgggattcggtctcttcgactaatcccgccaaagcaaccaagtcagcctgcttaatttgagaaagatggaaataaaggcttacttctctt

SEQ ID NO: 82112 - DNA, 335 bp, Glycine max
  unsure (1)..(335): unsure at all n locations
  Clone ID: PAT_MRT3847_45164C.1
aaaacccaagaaccacaagaaaaagaaaagnaaagaagaanaagaccaagaagaaancagncccaaanacgncaaggaaaagnnncaaancngngncnaaggggggggggccanacnnccacaccagaaaaaggggcnaagnngaagnccaagggacaaganaggagcaaacccgaganaccgggcaaaagcggagcaannagggagcaagggcgaanggaagccacacaaagacaaggncgagccagacgcagcgccgaaacacaaagcaagaagggggaacngnncgcggcagaagcaggcgcaaacgncccagaaaagggaagaggacgaca

SEQ ID NO: 82113 - DNA, 386 bp, Glycine max
  Clone ID: PAT_MRT3847_45165C.1
agaaaaagataatagaaaaaaaaaaaaaagcgggcgatctaaacgatccatgttgacgatccaatgtttcctacgcgttcattctactatatagctacctaatagcgataccttggtcgaatttactgaacgtcgtgattgaaaaaaccgtgtgggaaaaccatttagttacccagcttaatatccttgtttcacatgctggtttagtcagctggaggcctagccaaaaggcccttaccaatagttgttcacaacagatgggcaatgtgaatggccattgggacgcgcattgtacccgggcattaagctcggtacgcgcagcgggtacgctcaacttgaccgctacatttggcagggtcctatcgctcgcttcctttgctttcttg

SEQ ID NO: 82114 - DNA, 442 bp, Glycine max
  Clone ID: PAT_MRT3847_45166C.1
taactatctctctctctgtctctacaaaacttagctctgttttttaattattccttgcattctcttgagttcagatggaagcaactaatggccaccaaaatggttcgttttgcttgtccagtactaagggaagtgatccgttaaactggggagcggcggcggaggcgatgaaggggagccacctggacgaggtgaagcgcatggtgtccgagtaccggaagccggtggtccggctcggcggcgagacgctcaccatcgcccaggtggccgccgtggctggacacgaccacggcgtgacggtggagctctcggagtctgcccgagaaggagtgaaggcgagcagtgagtgggtgatgaacagcatgaacaacggaactgacagttacggcgtcaccaccggcttcggtgccacgtcacaccgccgaaccaaacaaggtggtgc

SEQ ID NO: 82115 - DNA, 837 bp, Glycine max
  Clone ID: PAT_MRT3847_45167C.1
cccacgcgtccgattgacaacaacacacaaacccgatctctatataaatgcccaaccaaacttgttttctcctcaggctactaaatttgttccctttttaatttctctctgtattaagatggaagcaactaatggccaccaaaacggttcattttgcttgtccactgccaagggaagtagtgatcccttgaactggggagcggcggcggaggcgatgaaggggagtcacctggacgaggtgaagcgcatggtggccgagtaccgcaagccggtggtccggctcggcggagagactctcaccatcgctcaggtggccgccgtggccggacacgaccacggcgtggcggtggagctctcagagtcagcgagagaaggagtaaaggcgagcagtgagtgggtgatgaacagcatgaacaacggcactgacagttacggcgtcaccaccggcttcggtgccacgtcacaccgccgaaccaaacagggtggtgctctgcagaaggaactcatcagattcttaaacgctggaatatttggaaatggaactgaatcaagccataccctgccacacactgcaaccagagcagccatgttagtgagaatcaacactcttcttcaggggtactcaggcattagaattgaaatcttagaagccatcaccaagctcctgaacaacaacgttacccccatgttggcacttcgtggtacaatcacagcttctggagatcttgttccactttcttacattgctggtttgctaactggcagacccaactccaaagctgttggaccttctggagaagtacttacgcaaaagaagcttatgaattggctagcatc

SEQ ID NO: 82116 - DNA, 958 bp, Glycine max
  Clone ID: PAT_MRT3847_45168C.1
ccacatcaccggggaatatatgcataagctatcccgggtgtgtttggttgtaccagtggatgctttagctgcgagaattgcacctgtaagaacgaaatatatgcacaagggagttagtgtttggttggatgtaccagtggaagccctggcacagagaattgcagctgtaggaactaattctcgcccccttctacactatgaagcaggagatccttacacacgggcttttatgcgtttgtctgctctttttgaagagagaggtgaagcatacgccaacgccaatgccagggtctcattaaaaaatatagcaataaaactgggcaaaagagatgtgtccgaattgtctccaacagatattgcaattgaggcgctagaacaaattgacaactttttgaagggggaagggggccgctatgcagaatgctagtacaagctttggttacaagcttctttttgattgttcatatttttttttatgcaattgcgattaaggacatgctgtcgacctcgcttttggtaaaaaaaaaaaaaggtggtaatgcaacatggcacttgtttttgcagaatatgtgtaggcaaactggcaaaatccaacagccaattgcaacaacatttaatttatgttctgtttattgttgaatgttgatgtgtgtgtgtatatatactggagaacgaagtgttgtaatcggagttgggttgatcaatttatgtaaagattgttcatatttttttatgcaattgcaattaaggtcatgctgttgacctctctttggtaaaaaaaaaagggggtagtaatgcaacatggcacttgtttatgcataatttgtgttggcaaattagcacaatccgacagccaatagcaacaacatttaatttatgttctgtttattgtttaatgttgatgtatatagacatagacactggtgaacgaggtgttgtaatccgagttcggttgatc

SEQ ID NO: 82117 - DNA, 273 bp, Glycine max
  Clone ID: PAT_MRT3847_45169C.1
ctgcttattcacattcataaccaaaagtgtgtgtaatgccgtggcggttgatggatacacaaccctgatctaaggaaagtatatgtcactgcggcaaatcccggataggatgatcacgcgagggttgtccaagctgcttttctctctgaacacccactgttattgctatgtactgtagataagagcacataccaatgttcgctttttggacctcctcctgcaataggcggtcgtggaggagggaactaccggcggacttggaggacctggaag

SEQ ID NO: 82118 - DNA, 313 bp, Glycine max
  unsure (1)..(313): unsure at all n locations
  Clone ID: PAT_MRT3847_4516C.1
nantcgcatgcacgcgtacgtaagctcggaattcggctcgagnggnactgtngctngggcntcatctatnnnatcantaggtcggacnatgatttacnacngtanctctnctcttttccgatccttncgcacacctgnagcagannntccantgagtancaggatntcgaangancagaaggccagnagagcagatncccnangccatcgngaacnancctattntnactgagtnntanctgccgngctncattcagttgtagaatgaaaataggttgtaggtatatattngtgctnaactaanntctnntgg

SEQ ID NO: 82119 - DNA, 376 bp, Glycine max
  Clone ID: PAT_MRT3847_45170C.1
ggtgacaacaggttcactgagaaaattaacgaagggacactcctgctgttggctggttgctcaaggatgtcaatctgtaataaagatatttggtgagtaggacgccgaatacgatctgtattacctctcacagtgatttgcaatagcatgtccaaagacacgctcattgagagatctgtatgaggatatcctgagccaggctattgctcctagcctgttgatagaatcattcaaaaatatggttacattgtgtgcgcatggtgatgagaccttaatgaccgttcatgacgagggcaagccttactgtacggggactatgctcttaaggtagctagctgaggagaatatgaccattactgatggtattgacataact

SEQ ID NO: 82120 - DNA, 238 bp, Glycine max
  unsure (1)..(238): unsure at all n locations
  Clone ID: PAT_MRT3847_45171C.1
nantttttaggtttctttttattttgtctctttatagccgtggaagggtatatttggtacttctacatatgacacgcccaaggaaactgttgattgtactccatacaaaggccaaatgtaaaatgcaatactaaaaggggggggtgtaccaagcgtcgggggcaatctttttttgcaactcaagatgcttgattttattaggtttggacttgccaggggtattacttgtattaaaaag

SEQ ID NO: 82121 - DNA, 289 bp, Glycine max
  unsure (1)..(289): unsure at all n locations
  Clone ID: PAT_MRT3847_45172C.1
gtcgcacgcacgcgtacgtaagctcggaattcggctcgagnnnncacgnangcnnnancngangntcccttnnnanattatgagccttanggtttatcttcttattcacagtaangggcctaacagggatcgtactatctaactcatcccttgacattgtacttcatgatacatactacgtagtagctcacttccactatgtcttatctataggagcagtattcgcagccatagctggcttcgtccactgattcccactattctcaggctataccctaaatgacacagn

SEQ ID NO: 82122 - DNA, 462 bp, Glycine max
  Clone ID: PAT_MRT3847_45173C.1
tttttaaatgacagagcacactttcatacattttagaattatcatagacagttatacagtgcagctgggagaaatataatttgttttataagcactagatctcaatatattatccatgaacatgctgaaacttactaaaaaaggtaacttagaaatgaactgaaattacaactttggaacataggattaatattgatgggcttagaagggctgaaatttattgagataaagaacgaggccttatatggaaccaggagctgacataataaatacaatcactgaagatcagttcaatatctggagccatgtccacgtgaacgaaaacctttgcttctttcactgctaaatggacatttctatggagaagaaaacggacaatggtcataaggacagtgaaccattgatctctatgcagacattgaagaacgcaatcttcactattatcaaagcaatgatgatgac

SEQ ID NO: 82123 - DNA, 389 bp, Glycine max
  Clone ID: PAT_MRT3847_45174C.1
ttccgcttttggggttttgttttttttttttttttttcttaaaaggaaaaacctgctggctgagggcctattgagagggaaaagaaaacaccaaaacctgctaactttttcctgagatatatcagtaccactaaatgacatatcaaaatcctaaaaaaattttttttaagggggtggggcttaaaacggaacaaggaaaaaacaaaacgttgttcaaaatgtttttgagagacaggttcccattacccgaaaaactcggggttgaaactataatggggaataaatttcttataaatggaacatacctcatccttgctgagaaaattttccccaataagtttttaaagagaaacctcctcctccaaaattatttccacattttcccaacc

SEQ ID NO: 82124 - DNA, 805 bp, Glycine max
  Clone ID: PAT_MRT3847_45175C.1
ccacgcgtccggtaaaacaacagcaaataacccagctttttctttgcactctgccttaaagaattgggagttctctctctcctgttcttattctttctcccttcttattcttctattcaattctcttcttcatcttccttcacaccccatcttttctctctctctctctctctctcttgtattgtggtttctgcaatggcaacccttgtagacattggggtctcagctgccatcaacattctctcagcctttgccttcttgctggcttttgctcttctgagaatccaacccatcaatgatagaatctactttccaaagtggtatctcagtggagggagaagcagtccaaagaggtctggtgagaattttgtgggaaaatttgtgaacctcaatttcaggacttacctcacttttctgaactggatgccacaggctctcagaatgagtgagtctgagattattagccatgctggccttgactctgctgttttccttagaatctatattcttggcttcaaggtttttgctccaatcacacttgtggcactcttcattcttataccagtcaacgtatcaagtgggacattatctttccttaaaaaggaattggtagtgagtgatattgataaactctcaatatcaaatgttccacctaagtctataagattttttgttcacatagcattggaatacctgttcacaatatggatttgtattctgctgtacaaagaatatgataaaatagcaacgatgagattgcatttcttggcctcacaggggaggcgtgtggaccaattcacagtag

SEQ ID NO: 82125 - DNA, 299 bp, Glycine max
  Clone ID: PAT_MRT3847_45176C.1
aaaaaccccccaccttacctttttccgatttttacacacccaatttcaaaacaaactaagggcaaatcctaaatattcaattttggcaccattccgatttacaccaggcgtttaaaataaattaattaacaaactcgttttcttaaaaggagctagcagccatattaacaacttctccataccgcaaaacggcaggaaaattgtgagcaacctgaacctaacatgatacatggtttggatgctctgggccaaagaacctgaccaatattcataatcacatcacgtccatgttatgagtt

SEQ ID NO: 82126 - DNA, 377 bp, Glycine max
  Clone ID: PAT_MRT3847_45177C.1
ccacgcgtccgcggacgcgtgggctctggttccatatttccaaactttgtccaacacacccaaaatctctctcgtttgttggctccggtgattgttttgttaagagagatttgggttctgaattctgagcaatttggtgatctgggttttgttgatcctctccccagtttcaaattttcaatatttatcatattttcttttctctctggattctggggtgtcttgaattattgtttttcaggttttgtatcattgagcgtgtgagttttgctgaactaattgctccaaagtttcaatcattgctcaacttaaaaaaaaaaagggtgtattttgtttctgacagattagttaagctggttggtttcaaatttctagtt

SEQ ID NO: 82127 - DNA, 321 bp, Glycine max
  unsure (1)..(321): unsure at all n locations
  Clone ID: PAT_MRT3847_45178C.1
gtcgcatgcacgcgtacgtaagctcggaattcggctcgagnnttgaangangnngnagnancagnntttggaagcccttncagtcactgtgttggagatgcnanggtattcnagtagaggangcanancttatctgtctagactcnnnngggnttgacgtaagagngtgtnctggaantnngattnaancantgagatntacattnnannnangggncagntncgagtanagtgntganagannactcaacgntatantatttcnaggaatnacccagagcagcatatnatgaagcacacgcttcnantgnntgntggant

SEQ ID NO: 82128 - DNA, 391 bp, Glycine max
  Clone ID: PAT_MRT3847_45179C.1
aatggagaaccgggggtgatttttggggggtgaccagctaggataaaaaactactgcttaaaagcataaacctgggcttgggagatacccccgccataaaattgtgcgccacgtaaagaatcaagatgaccactttactggggcccctacagagatgaggatttcgtgcctacaggatatgggtataaactaacactggcagttgctccggaacctttgatggcacgcctcttttattgtcactcccaaagattccctgtgaggcttgaaaacccagattttgcacacaaaacaccctttggatccaatgaggactatccccaaaaacaccagaatcaaaggaaccctatccattgccgaaaaaaatacacctgagccccaaaaggctgtc

SEQ ID NO: 82129 - DNA, 419 bp, Glycine max
  Clone ID: PAT_MRT3847_4517C.1
ccacgcgtccgatatgatgctgttcgttattacctatatacaacggcgcgcatctctatatccaccatacagtaccaaacgataatggtctcagcacttagacatgttcatgatattacacatctgttcttagccttcgaccctccactatcataattagtaaaagacaatgaacagagtgctgcccagtccttcgagcgagagttagggtcaacagacacctgatcaacacaaggcgagcacgctccacacgaatgggttattaaaaagggtaaatgctggactctgacactcactaccacactagcgacaagcctcacatgaggactgtcactcctcacagaaacgaaagcgcctctttatttctataggatggatgtgtcttactaggaggatgattctacggtctcacacacttt

SEQ ID NO: 82130 - DNA, 166 bp, Glycine max
  unsure (1)..(166): unsure at all n locations
  Clone ID: PAT_MRT3847_45180C.1
tcgccgtctaggtttttntctcaaaattncgaaaccccgatttcnactcaattcgnatctgcgattccatcacnaacctaaattattagatagttanatnatctctctgcgnnnctttcagcaatntnnnanngnctnctctcanggcttcagattccaaaaagga

SEQ ID NO: 82131 - DNA, 684 bp, Glycine max
  Clone ID: PAT_MRT3847_45181C.1
gaatgactcaagggtgatgatatacgagtaaacactgaatttgaattacaatccacaaaagcatgcaacatgatcttattcaaaacccctcaaaagctaaaacaacttatccatgtcacctcattcaatagtttaaacttgcatcaacacattatcgataccttacaataaaaacgaaaatttgatgaatgcctcaaaaaggaagatatttgatacgtatccccaaaaacagatatacagtacacctcattcagatgataaacaattgtacattttaataactagtttgtttggtcgtttctcttctatttgtatcctattcttttccatgaataaattacaagctcctggagcagtctgcagaaatatgccagcaattccttggactgaacgtgaagagttcagaaggagaatcacatctgagttacaagcatctggaacattctgcaaacattgcaatagcaattccttggttggcgattgtatagtccaatagaagcagaatatcttcctcaccatgcttctcctttaagaaaatgagttggtccttgattccttgagacccagccgtttgaaggatctgttgtaagaagttttctttgaattctcggcatctggtttggcacgattcagagcctgaatcaaggactccacacgccgccgcatacgtgtatgcataaatcc

SEQ ID NO: 82132 - DNA, 462 bp, Glycine max
  Clone ID: PAT_MRT3847_45182C.1
ccccctgttggtgctaaaataaattttgtttcttggtctcctgatggttgtcatttgtcctttagcattcgtgtgaatgaggaggacaatgatagcagtaaactcacagtatggattgcagatgtgaaaacagggatagctagaaagttgtttcagtcacctaatgtacatttgaatgcagtttttgacaattatgtttgggtaaataattcttcattgttagtttgcaccattccatcatcccgtggagctcctccaaagaaacctttggttccaagttgcccaaaaattcaatccaacgaggagagaagcattattcaagtaagaacattccaggatttgctgaaggatgagtacgatgaagatttgtttgactactatgccacctcacagcttgttttggcttctttggatggtactacaaaagaaattggcccaccagctgtatatacctgcatggat

SEQ ID NO: 82133 - DNA, 492 bp, Glycine max
  unsure (1)..(492): unsure at all n locations
  Clone ID: PAT_MRT3847_45183C.1
ttactttttttaaaaaaacacaaanaaaccactccgccgattttttttatagcggggacccaatcaaacctacatatatataattaataaattattctcttcaaataatataacttacaaatcaatcatttcccccccgattcaattaccaaccaattatatcaaccacttttattccccattgattgtatgcattcatatcacacccactattctttataataataaaaaaaactatctaattttcacacaccttatttttttcaaccctatctcttgcattatttttttacttaatatattttcattccttcctatcactcatttcatctacctagctcatgataccaaaaatattttaaaaaaatataataacccaacctttattccccttccctatccaaaaaattttccttcatccccccctctatttataaaatataatttctcttcccctcccctccccttccctttaaaaaaaaaaaccaatac

SEQ ID NO: 82134 - DNA, 148 bp, Glycine max
  Clone ID: PAT_MRT3847_45184C.1
gcgtccgctcaggaggagaataaggatgtctcacaggatgttctagcacccaaggcacgggtcacttgcatttcttcccaagaagcgggctgctcttacaagggaaaaagtaaagccattccccaaggataacccatccaaggcaccc

SEQ ID NO: 82135 - DNA, 969 bp, Glycine max
  unsure (1)..(969): unsure at all n locations
  Clone ID: PAT_MRT3847_45185C.1
taccgcctggcagggtannccggtnccggnnaattcccggggtcgacccacgcgtccgctccctctctattttcctctccacactccacattccgccatggacgacagcttgtacgacgagttcggcaactacatcggccccgagatcgagtccgaccgcgactccgaccgcgactccgacgccgatgacaaccccgacgaccaatccgacgccgtaggagccgcccactccgatggagaggacccgagcaacgggtggatgacgacaatctccgacgagctggagaaccaggtggtgttagcagaggacaagaagtactaccccaccgcagaagaggtgtacggcgaggacgtcgaaaccctagtcatggacgaggacgaacagcccctggagcaacccatcataaagcccgttagaaacataaaattcgaagtgggcgtgaaggactcctccacctacgtgtcctctcagttcctcctgggtctcatgtcaaaccctactttggttcgtaacgtggcactggtggggcacttgcagcacgggaagacggtcttcatggacatgctcgtggagcagacgcaccacatgtccacgtttgattcgcagagtgagaagcacatgcggtataccgataccaggattgatgaacaggagaggaggatttcgatcaaggcggttcccatgtcgctcgtgctggaggatagcaattccaagtcctatttgtgtaacatcatggacacgcctggccatgttaacttctccgacgagatgaccgcggcgttgcggctcgctgatggcgctgtcttgattgtagatgctgctgaaggagtcatggtaaacacagagagagcgatacgtcacgcaattcaggagcggttgccgattgttgttgtaattaataaggttgacaggcttataactgagcttaagttgccaccgaaggatgcttatcataaactaaggcatac

SEQ ID NO: 82136 - DNA, 408 bp, Glycine max
  Clone ID: PAT_MRT3847_45186C.1
cggccgagaatccctggggtcacccacgcgcgcggtgattgagacaagaaaaaggctcggcagacgggtactgtctggcacataggggcagcaatcctttcgagtgagtcttagcagaccaatccagaaaatgcagatcgtagggtgatcgatgagcctttcataggcagatggcccattcgggtggcagcattggcgaagcccattgcgcagatagaaccagacatgaaatgaagggctcagcctttgagtgccactgccaatggtgatgatgttcatggcaaagatcatggcagtggttaaagttgaggtcgcaagggctatggatgcctaggcatcaagtgacactgccactccattgatgggaactggtatgcagcgagacagaggggcaagtgacgccttttc

SEQ ID NO: 82137 - DNA, 4283 bp, Glycine max
  Clone ID: PAT_MRT3847_45187C.1
gctcgttgacgattgaacgagaatctattggattgcgaatttgatgtactcgtgcttgtaagccacctctcatattgttctattgataactaacgatgtcttgaaaggggagctttatttgagggtggacgaagtgttctcctgtgtgcatctacgactttctgcgttgatttggattgtagccataagagcctgacctcttttaaagaacagtacgaagcaatattgacccacttcatatgtatccagaagaagaaatttggaagagccttgagcgctgccaactgcaagatgttgtggctgcaaagccgtttggatgaaccctttgctgaataaagggtaccaaccactggagtgtggggcaaaggcagcttctttgcttgggaaggatcatgctaaaacgcagcaaaatactgttcatggatgaggcaacagcatccgttgattcacaaactgatgctgtaatacaaaagatcatccgtgaggacttcgcagatcgtacaattataagcattgctcacagaataccaacagttatggactgtgacagagttttagtcattgatgcaggctatgcaaaggaatatgacaaaccatcacggttgctagaaaggccttcactttttggagcattggttaaggagtactccaatagatcagcttaaccagaggcttagatctaataaggacacagttgatgtactcaatttccatccaacacacagcaccaaagtcaaaagacattggtcgacgggtctactaagatcaatattttttagcattaattttgatgttttactctttcagtagtttattaattagactaggataataggtaagaaaaatttaaattttttactaataaaaaatcaaggttggctgcgctctggtccttatctacagcaacattggcgtgtcggctttcgcggcgctgcttggatcgagtattgtgtttgttttcactctcttccggacaaagagaaccaacagctttcagtttatgataatgaagagccgtgacttgaggatgaaggcaactaatgaattgttgaacaacatgcgtgtcatcaagtttcaagcctgggaggagtactttggcaacaagattggcaagtttcgcgaagcggaacatggttggattgggaaattcttgtactactttgctgttaacatgggggttctgagctctgctccgttgttggtaactgttctcacgtttggaagtgctactcttcttggtgttcctctgaatgctggcactgtatttacaatcacttcagtcatcaagattctgcaggagcccgtgaggaccttccctcaggctctcatcgtcatttcgcaggcgatgatttctctcgggaggctggatgagttcttgatgagcaaggaaatggatgagggagcagtggagagagtcgagggctgcaacggcagcgacacggccgtggagatcaaggatggcgaattctcgtgggacgatgtagatgggaatgcggctctgagagttgaagagatggaaatcaagaaaggggaccatgctgctgttgtgggagctgttgcgtccggcaagtcttccttgttggcttctgtgttgggggaaatgttcaagatatcaggaaaggtcagagtttgtgggtcaatagcctatgtagcccagacatcatggattcagaatgcaaccatccaagacaacatattgtttggtttaccaatgaacagagagaagtacagggaagccataagagtgtgctgcttggaaaaggatcttgaaatgatggaacatagagaccagactgagattggagaaaggggtattaatctcagtggtggccagaagcaacgtgtacaacttgctagagctgtgtaccaagactctgacatctatctccttgatgatgtattcagtgctgttgatgcacaaactggatcatttatttttaaggaatgtattatgggagctctcaaaaataagaccataatacttgtaacccaccaagtggacttcttgcataatgttgactgtataatggtaatgcgagaagggaaaatcgtgcaaagtggcaagtatgatgaacttctcaaagcaggcttggattttggtgcacttgtggctgctcacgaatcctctatggagattgcagagtctagtgatagagttggtgaagattctgctgagtctccaaaacttgctcggatcccttcaaaagaaaaggaaaacgtgggcgaaaagcaacctcaagaagaatccaagtcagataaggcttcagcaaagctcattgaagacgaagaaagggaaaccggtcgtgtggacctcaaagtgtataaacactatttcactgaagcatttgggtggtggggtgttgcactgatgctggcaatgtctctagcatggattttatccttcttggctggtgactactggctagcaattggaactgcagaagatagtgcctttcctccttctacattcatcattgtctatgcttgcatagcaggtcttgtatgtactgtggtgatgatcagatcagtcttatttacatattggggtctaaagacatctcaaagcttcttcagtggaatgcttgaaagcatcttgcatgcaccaatgtcattctttgacacaactccctctggcagaattttgagtcgtgtatctactgatatactttgggttgatatctcaattccaatgttggtgaacttcgtcatggttgcttacttctcagtaaccagcatcctcattgtaacatgccaaaatgcttgggaaacggtcttcctcttaatcccactgttctggctgaataactggtatcggaaatattaccttgcatcttctcgggaattgactcgccttgattccatcaccaaagctcctgtgattcaccatttttcagaaaccattgctggtgttatgaccatacgcggcttcagaaagcagaacgcattttgtcaagaaaatattgacaaagtgaatgctagtctgagaatggatttccacaacaacggtgctaatgaatggcttggttttcgcttggactatatgggagtgattttcctttgctttgccactatttttatgatctttctgccaagtgctattattaagccagaatatgttggtttgtctttgtcctatggcctggctctcagtagtctcttggcatttaccataagcatgacttgttctgttgagaacaaaatggtttcagttgagagaataaagcagttctccagccttccctcagaagctccatggaaaattgctgacaaaactcctcctcagaattggcccagtcaaggcattattgagttaaccaatttgcaggttcggtatcgaccaaatactcctctggttctcaagggaatctctctcaccattgaagcaggagaaaagattggtgttgttggtcgtacaggaagtgggaaatcaaccctcattcaggtgttatttaggttgattgagccttcagctgggaaaataactgttgatggaatcaacatttgcaccctgggccttcatgatgtgaggtctagatttggaattattcctcaagagcctgtcctctttcaaggaacagtacgaagcaacattgacccccttggactgtattcagaggaagaaatttggaagagtcttgagcgctgccaactgaaagatgtggtggctgcaaagccagagaaacttgaggctccagtggttgatggtggagacaattggagtgtggggcaaagacagcttctttgcttgggaaggatcatgctaaaaagcagcaaaatattgttcatggatgaggcaacagcatccgttgattcgcaaactgacgctgtgatacaaaagatcatccgtgaggactttgcggatcgtacaattatcagcattgctcatagaataccaacagtcatggattgtgacagggttttagtcattgatgcaggctatgcaaaggaatatgacaagccatcgcgtttgctagaaaggcattcactttttggagcattggttaaggagtactctaatagatcagctgaactagaggcttagattctaacaaggacccagttgatgcactcagtttccatccaacacacagcaccaaagtcaaaagacatgagtcgatgggtctattgagagatcaatatttttgagcattagttttgatgttttactctttcagtagtttaataattagactaggacaataggaaggaaattttaaaattttttactaataaaaaatcaagtttggctgcaattgttactattttacaaaaaaaaaaaaaaa

SEQ ID NO: 82138 - DNA, 809 bp, Glycine max
  Clone ID: PAT_MRT3847_45188C.1
cccacgcgtccgtacggctgcgagaagacgacagaagggtcatagtataaaccaacattagaattttcagctcaatgaggcaagattaattattttcaaaataaaataattgtctttacatgaaattgatgcaaagtatgttgttatgcctttttatgtgtcctaaacattaataaggccaattatgttgaaagcaactatagaaatattgcatgtatagaaagtaggaaaaaaaacagaatgatggtacacatatccaataggttggtaattcagatatgcttatactttctttctaaaattgcatttctttgaatttcctaaaattgcattttttttctttcccttgaacagtcactattaccaatgggtaaactataaaattaaatgtatagtataattgtatacatttaatgataaatatgtaaaacttattaaatgataatcaaaactaatatgatcaaaatatataacatattttataaactaacaaggtctatttagcttcgatgatatgaatagttattcatgttttaaaatcttataaacaatgaaatacatatttaattttattgaggttattgttattaaatatgttgttagtatattatttagaaaagactacactatgaagaaaaaatataaaactgctaacatattaaaatgcattcatgataaatatattgaagaacaattgcaagactaatttggtgcatcagcttggcaatgtcatataataaatgatttaataaaaacatgaaaccaaataaaagtatttttttttaaatttagaaaccaaaattaacccc

SEQ ID NO: 82139 - DNA, 681 bp, Glycine max
  Clone ID: PAT_MRT3847_45189C.1
agctgctattactaaatagacaattgtagccaaaggtggtttttcacaattatacataggaagttagcaactttttgtagttttgatcctgcctgcacagggaatatgcatattgattactgatgatttatgcatataatctttggaagctgttagtaaagcagaaacctaatgataatcatacacaaaaatagctatggcctatagcaacaagtgcgaacgaggaaagcaaggggctatatgcctttagtattcacattgatggaggctatagaccccaagtatgtatatgtcaagggatgacatttcccaacaagctgtttgatgaaggtgagctgtgtccacttgaccaaggaattggatcatgcactgatacaggggagctgtccttcacctccatagattgcaaaaagctctccgtcttctgcggaacaatcaatctctcactcccttggccttgccgagcttttttgataccacccagtgacttctcacttccatgacgaggtgatgaactagtggacccaatcggtgaagccgggagagtttcccccatagatgcccatccactgcgtctaatgtgtgctagctattctcctactggatcataggaggcctcatgtcacttatgaaaaagcagggatcttaatggaacccgcgcccctttatgaatagaaatac

SEQ ID NO: 82140 - DNA, 964 bp, Glycine max
  Clone ID: PAT_MRT3847_4518C.1
ataatatcagtatggaagttgaaatcagtgatgctttgcggtggccatggagctgctcagctctttgaggaaggaggacatactggagctcttctctcatggcttctgttcccactgcgaggatattctgcatactcgaattacaaaccttcgtaaaagaaagttggatgaaacttcatctccggatgaagaaggctttgaatcttctggggatcatgtagtagacaagccagtgaatattggtaatgtttcaaattcagaatctttgactaaaaaccatgaaaaacaatgggatagtcctaggaactcctcacaaaggcgtgattctactacaccaatgaaggatgatatcaaaaacattttttattcttcacctaagtgtttagtaggctgcaaacaatctgatttcaagttgttgttaaatgatggaatttgtggagattcttcatttgaaaatggtgggttatcagaggaagaaaaggagcagatcaggtattctcaggttcactgtaaaaaggactttaccttcgttgaaagggtaaataggagatacgtaaatgtactccgggggcttgaacttcacactggagttttcaatgctgtggagcagaggaaaattgttgagtggatttacagattgcaatggaggggacaacaagggaaactgaaagatcgaacatattcagaaccaagaaagtggatgcgtggtaagggccgcgtgacaatacaatttggttgctgttacaattatgcagtggacaaaaatggtagccctcctggcataatgagagatgaagaggttgatccattaccacctgtgttcaagcaaatgataaagaggatggttaggtggaacataattccttccacatgcattcctgatagttgcattgtgaacatatacgaagaaggagactgcattcctcctcatattgaccatcacgattttgtgaggccattttac

SEQ ID NO: 82141 - DNA, 955 bp, Glycine max
  Clone ID: PAT_MRT3847_45190C.1
ggggaataaaatctactagaacatgggaatataatttttgtaggaataaaatacccccaaaaatatacatcctaacaaacttcaaaataaatatcccaaccttcgtattctcataaatgacattgataacttcagcaaagtgtctccttatattctatcctaattatatcttagccaccgaacaagtcctaaatgatttcagataacagaaatttgttacaacaaccacatcattcgaaatttcttacctcccagtaactgtaatcatatgaaagagtgcacaacgatcttgcctctttccaagttgactcctcatctaattacatccactcactcagtgctggctatttgctttccattcttctcagtacagaaattaacgtttctacttcttaatctgcattgataaattcttaactatggttgtgggttttggataatcttctgcacagaagaagaataatgagattcaagcccttttaggctagcagcagcttcctccccaactctggataaagtgcgatctgttttttctgccagctgattaaattcaatccttctttcttctacatgatcattaagagaggcaaatcctgaaaaaattgcagtctgcttcagctctgacaccaacttcaacagagaatcagctgcctgtaccatcctagcagcacgcatctccatcataaaagcttcctgtgaatttctaactggtggatcatttacccttgcaacgttgacgaggtggttgaaattgtcaacgatattagcgatatcgccttcaactctttgtaacagcgtcttctgtttctgcgccgctgctgcagccgcagccgcggtgggcccacttccggcgccgccccctaaccctcctgcagcacctttgttcattcttttctaacaagaatctcagttgttgctcactgctacttcccccttctgtcgtcttctcgcagcc

SEQ ID NO: 82142 - DNA, 343 bp, Glycine max
  unsure (1)..(343): unsure at all n locations
  Clone ID: PAT_MRT3847_45191C.1
taaacaaactattgcttactaggggnaaggatntactcgtacttcaacatttccatggcttttacataccaatactatgtttcatgctaggaattgtccgatattcgaacaaaacaaacaaagggggtggcctagggcaacctatcaaagatagtcaacgctgattgacactgaacctcagaccaattatcacgatctaattagatacctcgtggaccaaacttataaaatgaggcgtataatccaaagggcgagaaatatatctggattgcctatccatgggaagatccaaagcagagctaaaaaaattggggctgttacaagcaagcatactctgaaatct

SEQ ID NO: 82143 - DNA, 474 bp, Glycine max
  Clone ID: PAT_MRT3847_45192C.1
ctgaattcaaatcatattttaaaaaatccaaacattgtaaattggtttttgaatcaaaaactggttttactttttagcaaatgattcagttaacatggttaatatgttaacgaaaactggtccaagtcaaattttaaaactactttaaaaccagattgaaattagttttggttcaaaaatcagttttggttaaaaactgaattgggaccaaaaccagtttaaaactggtttgaccaaaaccaaaccagttttgaaatataaaggtagttcagttttgaaatccaattcatataattggttggatttgaactggttttacatgataccaaaccttgcacatccctacctagccaaacgtggcttttggctttggtgttactaggggtaagcgccggtcggtacagtcggattcacgccaaaatttctaaaattgaaggtaactgactgagtactaatcaagaccaaaactgcccg

SEQ ID NO: 82144 - DNA, 265 bp, Glycine max
  Clone ID: PAT_MRT3847_45193C.1
ggcaaaaaacgggggcgggtgtaacattggaggtgtgatctaaactgacttgccaaacaacttgacatatacttggatccctgcctactaagattgacagtcaaggatttatcttcgctataatacaattttttgacattagcacttaaggctcagcataaacctatctaagcttttttaattatataaactgatgggacaatcagtggccaagaacccgctcaccaattgcaagttatcctccatataatgacaacaggccatg

SEQ ID NO: 82145 - DNA, 1172 bp, Glycine max
  unsure (1)..(1172): unsure at all n locations
  Clone ID: PAT_MRT3847_45194C.1
tcatgcaggcccaactgtgttaattattaaggataaagagggttatatatatggagggtatgcttctcaaccatgggagcggcatgctgatttttacggagacctgaaatgtttcctttttcaactaaatccagtggcatctatattcaggccaactggagcaaacaataatctgcaatggtgcgctatcaacttcagttcagaggacattccaaatggcattggctttgggggacgagtgaatcacttgggtttgtttatatcagcaaactttgatcaaggacatacattttcgtgtaccacgtttggtagcccttgtctctccaagactaaccgtatattgcctgaagtaatagaatgctggggagtcacacaagatgcgacacaagacaagaatgatgctgtcaagggcactattctggagaggttcaaggaagatcgcaacatgctcaaaatggtaggcctagcaaattccagcgagtaaagtgttgcttgcatgcgtttgatataatccacccattggacttttaatatcattgttcatatgccatgagaaatacaactttatgtagcggtaatctttgttaaataacatattgtgaagcctttcttttataattctttttggtcccttgagaataataattaacataaagtggggctgtactgtacttgcatgataaatacatgcgaagattttttaagcatccgagcttgataatgctaccagtatactacaaaaatctacaaaatttaaatgggtaaatgatcaatttggtccctccgactttacactcgctgtcaatttaatctccatattatgggaatacataatttagtcccacaattatgtaaatgcattgacaatttaaccctgcaatcaatctcttccatttccagttaatgtttatgatgacgaacntgacaaatgtaggtggtggaagttggaagccccatgtttagtcacgccatgttggggacaaaattgttagttggattatgtttagttttttttttttaccttttatnagttatcacaatggaccttantaccctcccttttatatttggtgaaaaaaancaaccanggttgtcngccctcccccttgcttgtccgtggcctnaaaattacggccccagggcttgatggggttgcnttacttgaactccgg

SEQ ID NO: 82146 - DNA, 413 bp, Glycine max
  Clone ID: PAT_MRT3847_45195C.1
cccacgcgtccgagaaattatagcttcacttaactgtttccgtgtgctctacgccccacaaggcccacatcgatatgaatcgcgtggggaagagcaagaaacgttggagattcgtcgaaaatggttgcggaagaaactagagagggcgatgaaggtgttgtcagaaattttggtgtggccaaagaagagtttttctttgcggaggttgaggacgtgtattagtgaagccaaggaaatgaaaaggaaaatgcaattccagtatgatccaagagttatgcgcttaattttgatgatggatcaatagaggaggatgatggtgtttttcttgatttctcggctcggtatgcatgtccattagggataaacaagctatatttggaatgggagcacagtgaagcttaaacattcttaat

SEQ ID NO: 82147 - DNA, 657 bp, Glycine max
  Clone ID: PAT_MRT3847_45196C.1
ccggaattccccgggtcgacccacgcgtccggcttctcaaccatgggagcgtcatgctgatttttacggagacctgaaatgtttcctttttcaactaaatccagtggcatctatattcaggccaactggagcaaacaataacctacaatggtgcgctatcaacttcagttcagaggacattccaaatggcattggttttgggggacgagtgaatcacttgggtttgttcatatcagcaaactttgatcaaggacatacattttcgtgtaccacgtttggtagcccttgcctctccaagactaaccgtatattaccagaagtaatagaatgctggggagtcactcaagatgcgacacaagacaagaatgatgctgtcaagggcactattctggagaggttcaaggaagatcgcaacatgctcaaaatggtaggcctagcaaattccagcgagtaaagtattgcttgcatgcgtgtgatataatccacccattggcgttttaatatcattgttaatatcatagtaatctttgttaaataacatattgtgaaacctttttttttataattctttttggtaccttgagaataataattaacatacattggggctacattgtacttgcaatcttgcatgatggatacctgcgaagatttttt

SEQ ID NO: 82148 - DNA, 136 bp, Glycine max
  unsure (1)..(136): unsure at all n locations
  Clone ID: PAT_MRT3847_45197C.1
ggagaattgttgagatgctaatgtggaanngnatngttgagaagntgagattggtaangaaatggatgcanctgatgtagctgggnttantacataantttgatgtagtaanaatattgtggttnatnngtnntga

SEQ ID NO: 82149 - DNA, 583 bp, Glycine max
  Clone ID: PAT_MRT3847_45198C.1
agacaagtgacaaaccatctgttgaccatggattttcagattccctggttgctgagaatatgctgtcatctgcaagacctttggagcgtaaactacctaaaagtcttagagctagtaaagttagcaagaccaaatctaaagcttctgactcaactggcaggaaaaagactactgctggtatacgcaaggagaaacagataaaggcaattaataagagcaaagtcaagggaaaaggtgtttctcttaaagttacatgtgaagtggaagattgcctgcatccagaagaaaatgctggaaatcataagctggatgctgttggaaaaattattgctgatgacaacagagtatcggtcaatttatctaatttggacatgctgtctggtgttggttatggggagcaacttctatcaccccgtaatgcatgggttcgttgtgatgattgtcacaagtggcggcgaattccagctgtgcttgcagaccgaattgatgaaactaactgcacctggacatgtaaggacagcagtgataaagcctttgctgattgtgctatccctcaagaaaagtcaaatgcagagaataatgc

SEQ ID NO: 82150 - DNA, 253 bp, Glycine max
  unsure (1)..(253): unsure at all n locations
  Clone ID: PAT_MRT3847_45199C.1
tcaagcgcctttgctggcaccagagagaaatgtnttggatgncagcaaccacagtctatccaactgagagggtcactgttaacaacactatgnaccacaagagctgcttcaagtgctgccatggagggtgcaccatcagcccttctaactacattgcgcacgangggaagctgtactgcaagcaccaccacatccagctgatcaaggagaaggggaacttcagccagcttgagaatgaccacggaagacatca

SEQ ID NO: 82151 - DNA, 348 bp, Glycine max
  Clone ID: PAT_MRT3847_4519C.1
ctgaaaatggatcttgccaacatagggatggcgacctaataagggctttgaaatgtgcaggcctgagcgcgcaaatcaaactccatggcataccgaattaacttattgacaattccaatcagtctacagccccagatattctactgggaatctgtctacatcttgcaaatgctggtattactcctatgccagattgttgtggtacacacgctactgccagatctcatgaaaatgctggatcctctggaagatcccgaatgcgcggtctcttcacctagctcatgacgcgcaatccaatacaccaaagtacacgtgaccctgccgatgacgatgccctgcccattcgca

SEQ ID NO: 82152 - DNA, 754 bp, Glycine max
  unsure (1)..(754): unsure at all n locations
  Clone ID: PAT_MRT3847_451C.1
ggnnnnnnnnnncttagtgcatacaatacatgtatgtttccaataaatgagtatacaaaaaaggcaatcaaaatcattggaaaatgtacattcaaatagcgaagaacttttgttcatcacaaagtagctggacagcatcggggaacaccgtcgacgtcttcaaatccaaatgaagtgcaaaatcaattaccacatgcattgctcggtgcctaggaaaaagaggccagaggcttcgagcggagaaagaaattccttgaacccaagtttttcaacttctcatttggcttcaaactttggagggtgtagggggaatagtgaaggtcgtagcactctgggtcagtgtccttcaagagtggcctcctcttctccttttcataaattagcaacgctgcatttaccaaatcggcgacggtgtcttcaggcgacaacagcacctgtattgcacccaagctgttctcgatagtcacatttagtagaagtttcgatggccgaacgtagtcacaagtttccatggtcggcaacggaaacttgtgtgtcggaggagtagagacggttccacccattggcggtccccactcaaagtttgatgactttgtatgttttttatttttccccttgtgttttgtgttgcttagagatggatatttgctttgcttgcatgcaatggagtagctatggcaatgagaatgttgttgggttgttagagcttaggaattaccctcgtctatttcactagaaactgacccacgcgtcc

SEQ ID NO: 82153 - DNA, 416 bp, Glycine max
  Clone ID: PAT_MRT3847_45200C.1
actcgagccgaatcggctcgagctgcgagaagacgacagaagggggcaacattataacataaaaggaccaaagcaacaaagacaaaaatgacatgtattcataacaattggaatcctattttatagctacaccatttttttctaagttatcagtagtagttaatgataccccactcactttgacactattactgtgtactctatcctctatattcggaaatcagaatccaactttgtgcagtctcacttcccccatttttttctcttatttctcaatttgcaataaatcatattatcatatgccataatagctcacccttttcaactaggccaatcaagagttcatattcatcttcattcttcagggttgtgttgagcagaatcattttgttcaagatggggagggaaatgcaacc

SEQ ID NO: 82154 - DNA, 216 bp, Glycine max
  Clone ID: PAT_MRT3847_45201C.1
gctcaacttttgcttaaagctctagaaaccttggggaggtaagctgattgctttttgaagaacaacaatgctatccaatatgattgttaggacccattttgcagaattgtttaatgataactttcatgattaaaaattttattttttatggcacaattgtgacttcagtttatcatcaatcaaatagctggacactttggagaaatagccattatt

SEQ ID NO: 82155 - DNA, 349 bp, Glycine max
  Clone ID: PAT_MRT3847_45202C.1
acgcattcactagatggacctgtgtattgatggacgagctttcatatgtctgctgtgggtcagtgagtttattttaagattttgtttgagaaatatggtattggcttagattagagacaatggatttactggaatgaggctactattaggattgacttacgtgcacttgcttagaatatgatgagatatgatatcgctttacaagcgtttcttcaacttaatttctgggttgtccacttttgtgtagtaatttttggatagattcaagagggggggcgttttaggttccgagtcttgtagggctgcatgcaaagtcatagctattgtattgtgcaccttaatgcaattt

SEQ ID NO: 82156 - DNA, 955 bp, Glycine max
  Clone ID: PAT_MRT3847_45203C.1
aatttttgggtattctatatcatgtcagacaaagggcttgctttcatattcagaaaacttggctttaacgtccagacaccaacaggttcattcactgctggtctagtaggggattcctcaccattttctgtactacctcagatcaaaccatctgtgaccttcataatggttcttcttgccttatctccttgccttttcaaggcttggaagaatccacagccacagatgattagtagatggatagcctatgcttatacatgtggctttctttttgggtggcatgtacatgagaaggcatcactccattttgtaataccacttgcaattgttgcggcacaaactctggaggatgcaagacattactttttgctgtcaatagtatcttgctattcaatttttccactactatttgaggcacgagagtatccgatcaaagtattgttgctgcttctgcactccattttaatgtggtcaggattttcagcacaattttatgatggggctgaagctacaagagtgccaactgctaattcaaagaaaaaagctgatcaatttggatctgaaggtaattcgggtgcaactgtgaagaaaggttttgctattggctggattgagaggatttatctgataggtcttgtagttgtagagatatggggccaaattttacaccctctactttttggtgataagtttgcatttgcacccctcatgttgatctccatatactgtgcttttgggatcatgtactcttggatttggcagttgatatccatagttaaatgtcgttgaattttggactgtctgcagttgatatttgattttctttttatgaattttatatgcggaatttgaagagtcaacatttgatttaattttgtagttaaatcaagtcactgtttgacatgatcccaaaacaattattaatccatagttaaacaattatttgatcttgcct

SEQ ID NO: 82157 - DNA, 366 bp, Glycine max
  Clone ID: PAT_MRT3847_45204C.1
gtgagtgggcagagagatggtttcaaagtaatgtccacatgggtgaatggtttgagcttatgacaaccatttcctgcgatttggtcgtggtctgggtcgcaaatttcaggggtggcttggcttgggatccttataacatgtccttcatcttcaacatttatttcagtcttattgttattggcttactagtttatgggggtgaagctttaataatgttcaaagcttttcctctaattaatgatgattctatatttattacactcttaattttcatgccattttctttattcttggtattattgatacttattctgcctttaagtttcacaatgaaagttttttttccaatttttacattttgtatac

SEQ ID NO: 82158 - DNA, 1045 bp, Glycine max
  Clone ID: PAT_MRT3847_45205C.1
ctgcgcagcactctccgtctcgcgctcgcgcttctcgccccccaacggctgcgagaagacgacagaagggggttttgcactgccattgaaggaagagcacaaactgtttcttgttcgtatactgattccgttgcacaagccaaagtgcttagcaatgtatcatcaacagttatcttattgcattacccaatttgtagagaaagactgcaagcttgctgatacaattattaggggattgttgaagtactggcctataacaaatagtccaaaggaggttatgttcctgggtgagttggaagaagtcttggaagcaactcaacccccagaatttcagcgttgtatggtgccattgtttcgtcgcattgcacgttgtttgaatagccctcattttcaggtggcagagagagccttgttcttgtggaacaatgatcacatcatgagcttgatcaaacaaaaccgaaaagtgataatgcccatcatattccctgcattggagagaaatgctagaagtcattggaaccaagctgtccatggtttgaccttaaatgtgcggaagatttttaatgatgttgatgccgatctatccaaagaatgtttacaaaagtttgaggaagaagagtcaaagaaaagtgaagtcatggcagggcgtgaagccacttggaaacgcttggaggaacttgctgcaaatggcgaagcagtgcttattggtaaagcaccacctcgcaactctgcaggttagatcgaactggaatactgggaatactggaatacatgtattctgctccaatagcttcatttttttaaacaaagatattatagtattttttttcttttgcatgtggtgggttggctaagaggggcaattccttgaaatactttcttattcacttcttgtagaaggctatgattagtaacaaatatctcatgcaaggcaacatccaaatcttaattagtatatactatatagcttatacttttgtacccaagacgcacatttgggcacttccctttttaatgaatctccaatgaatttcatttcaagacc

SEQ ID NO: 82159 - DNA, 2280 bp, Glycine max
  Clone ID: PAT_MRT3847_45206C.1
ggctgcagaacattctttgtttcgctctcgcttttcaggtccaacaacgccgaagaagaagaagattgtgtctccgattattatttgaagatttctgaaacaccagagtgtttctgatcatcgtcgtcgctgatctctgtttcctccgttactgtttctgattgcagaggcgaaaaggttttccgcatcaaaatcgaattttgtttgctccatcatcaccatgggtagaatcacgaaactgggttttcttcttctacccagataagtaaaagggttttcttctttctcatttattccgacaagtgcacaaataacaacatcatcatcgtatcaatcatcggacaagtgcacagacaaacaacatttgtgtctgattagcagaaaaaggggtaaagggttgttccgtgtttgtttgatgaattatgttcaaacagatattcagtaaactccctcggaagtcatcgaaaggttccgaacacggtggaagtgggagaacacatcatggtgttaccacttcttcgaagagcagtgattctgttagtgttacccctggtggcaccaaacccgggaattcttcctctgcgggaccgaatcatggtaacagagttccgttaccgttggctgtgaatgagaacaacattcacaacaaccccaataatgggaattttggttcctatgaggcattgcctgcgttcagagatgttccctcttctgagaagccaactttgttcatcaagaaacttaggatgtgttgtgtggtgtttgacttcactgaccccgccaagcacatcaaggagaaggagattaagagacagacgttggtggagctcttggattatgtgacttctgcaaatgctaagttcgtggagaatatgatgcaggaggttgtgaaaatggtgtctgcaaatatattcaggacactcagtcctcagccacgcgagaataagattgttgatggcgttgacgtggaggatgaggagccttcgatggatcctgcttggcctcatttgcagattgtgtatgagctttttctgaggttcgtggcatctcctgagctggatgcgaagctggccaagagatacattgaccagtccttcattttgaagctgctggatttgtttgactctgaggatccgagggagcgtgagtacttgaagatgacgctgcaccgcatctatggcaaattcatggcacatcgccctttcatcaggaaggccatcaataatgtgttctttaattttatatttgagactgagaagcacaatgggattgctgagttcttggagattcttgggagcatcattaatggttttgcactgccattgaaggaagagcataaactgtttcttgttcgtatactgattccattgcacaagccaaagtgcttagcaatgtatcatcagcagttgtcttattgcattacccaatttgtggagaaagactgcaagcttgctgatacaattattaggggattattgaagtactggcctataacaaatagtcctaaggaggttatgttcctgagtgagttggaagaagtcttagaagcaactcaacccccagaattccagcgctgtatggtgccattatttcgtcgcattgcacgttgtttgaatagccctcattttcaggtggcagagagagccttgttcttgtggaacaatgatcacatcatgagcttgatcaaacaaaaccgaaaagtgatactgcccatcatattccctgcattggagagaaatgctagaagtcattggaaccaagctgtccatggtttgaccttgaatgtgcggaaggtttttaatgatgtcgatcccgacctatctaaagaatgtttacaaaagtttgaggaagatgagtcaaagaaaagtgaagtcatagcagggcgtgaagccacgtggaaacgcttggaggagcttgctgcaaagaaagctgcaagtggtgaagcagtgcttattggtaaggcaccaactcgcaactctgcaggttagatagaactggaatatatgtattctgctccaatagcttcatttttttaaacaaagattatagtattttgtttttgtttttgtatgtggtgggttggccaagaggggcaatttcttgaaatacttcttattcacttcttatagaaggctatgattagtagcaaatatctcatgcaacgcaacttccaaatcttaattagtatatactacatactatatagcttatacttttgtacccaagaagcacatttgggcacttccccttttaatgaatttccaatgaacatttcatttc

SEQ ID NO: 82160 - DNA, 696 bp, Glycine max
  unsure (1)..(696): unsure at all n locations
  Clone ID: PAT_MRT3847_45207C.1
ctgcagaacattcttcgtctcgctctcgcttttcaagcccaacaacggcgaagaagaagaagaagattgtgtctccgattaatatttgaattccgaagaattctgaaacactctgttttctgatcatcgttgacgctgatctctgtttcctccatcactgtttctgatcgcagaggtgaaaaggttttcggcatcaaaatcgaattttgtttgctccatcatcacaatgggtagaatcacgaaactgggttttcttcttctacccagataagtaaaagggtatcttctttctcatttattccgacaagtgcacaaacaacaacaacatcgtatcaatcatcggacaagtgcacaagacaacaacatttgtgtctgattagaagaaaaggggtaaagggttgttccgtgtttgtttgatgaattatgttcaaacagatattcagtaaactccctcgaaagtcatcgaaaggttccgaacacggtggaagtggaaggacacatcatggtgtcaccacttcttcgaagagcagtgagtctgttagtgttaccccaggtggcaccaaacccgggaattcttcctctgcgggaccgaatcatggtaacagagttccgttaccgttggctgtgaatgagaacaacattcacaacaaccccaataatgggaattttggttcctatgaggcattgnctgcgttc

SEQ ID NO: 82161 - DNA, 1435 bp, Glycine max
  Clone ID: PAT_MRT3847_45208C.1
cttttttttttttttcttgctcctaggctaacaaatattttacattcagggaagctgactcaaatgagagcatagaacactatgcatttttatgaattccaatttacaaacaaaatcgaatatttcctaatcgatacaagctatcctccgcctagatagaaaagcccttcaataaacgggacctaaatgcttgttattcaacattttcaaaccatttcctttcctaaaaaccaaaaccaatgtttatgccctttcattctagcttcttctatcacatttttcatgagtgccaagccaggggtaatactctgcaccaaaagctggaaaaaagcattgttgctaaacttaggctattgactgtttctaaaaaccaatttatcttgttaaactgatgcaacaataatgagatatatagaacccatcaattgatttctccttcttctacatcatttgtttctcttgtagtactctgaggcatttcttcttcttcttcctcctcatcagccttcatgtacaagcctagttgttctaacggattacaacttccctgtagtttgaaactacccagcccattttcaagatgatcaggacttctttcctctgtgaaatttggtaaatgttcatctagtaaaccactcagcatctctagatcttccaaaaattgactactctcactgataccaattgtcttctccatcttttgcaaagcctgacgagctgcttctctttccagttccctctttcttttggcttcagttgctgcttcggcttcagctttcctccgaacctcttctgcagcctttgcctctgcctgcaaccgagctttctcctccttctgccgcctttctagctcttttcgttccatcctaagtttttcaggatcccacttgtcacccttttcaagtgtcttttcctgagctttaagtatggtgtcagcaaatcggcttcttaataaagctgcacggtagagcttatcgggggatacttgcttcttagatggagcattctcccctaaaaggttacagcatgatgaatggtgagatcatgccccaaaattaacagcagacagatttcttcatttttgaagcttaccctcttggtggttttcaggttcatcactaactgaatcagtctgggaactctgctcaacatggccagctgcattcatggagtcgatttcagtttctgaattatcaagattcccctccttttgatcaatagacaagccagatccaaccttttccttcataggattaaaatggtctgatgctttagcaatgcctggttcactatctgactcactatctgaatcactggatgaagagccagattcactactagagctgcttgaactgtgttcacttgttttgttggtgccaccattctcaatctctgctggagggtaacttggaagaggaggatcatccccaccaac

SEQ ID NO: 82162 - DNA, 187 bp, Glycine max
  Clone ID: PAT_MRT3847_45209C.1
ggctcgagggtttttggttttcctttctgatactattggttaacgatctgtgtttgttgcaatgtaagataggtaggttttgatctaaaaacgagccagggaacttggaatggttagtttatgctgctgtattctatttatagagaaatattaacatttgatttatgaatgatgaatcaattgcatg

SEQ ID NO: 82163 - DNA, 227 bp, Glycine max
  Clone ID: PAT_MRT3847_4520C.1
atcagacctcacactttggctgcagaaggatgacttctacaattaaatacaaaatcctatagcggggtcatcaacatgcaagtcgaagggaatattagattacactccaaatgatttggtcttcaccgactttgtggaccattgctgatcaactataagcgatgcaaactctataatcacattaaatctgacctttacgaagcttgactcttggtatgacaaccaat

SEQ ID NO: 82164 - DNA, 510 bp, Glycine max
  Clone ID: PAT_MRT3847_45210C.1
tttttaataaatatcaataatttatgtgatttcaatgaatatttttagcaaaatgcaaaagataagaaaaaatctctgaagaagtccctggctttaataataagagtttcctccgtcctaaaatgtttgatgttcttggggcggaagagtaggaatataatgacaagatacatccggcatttgaatggataggctattaaagggtgtagtgttgctggatggtatcaatgtcaatacccttcaacttgacaacagattcaacatgtcccttgagtgtgtggagttccctcaacctggcagcctcagcacgtctcttagcctgctccgcgatttcagactgctcatgttgcttggccttgttggattctccaacttggagaccgcgaagtgtgcgctgagccacagcccattcagcttccctttcaccccttccatagtccttctttgttgtgaaagcagtcttgttgtcaagcatgttgtcccatgccttgcctgataaccccatgctga

SEQ ID NO: 82165 - DNA, 272 bp, Glycine max
  unsure (1)..(272): unsure at all n locations
  Clone ID: PAT_MRT3847_45211C.1
gttgtgtgtattcttttttttttnttttttnttttttttttttgggggaaaaacaagagaagttgagtctttatttttgaagagtaaattgagaattgatttggggtgcccaagacaaaaaaaggaaccctcagggaattcttccttgggatttttaaaaaagagggggaaaagggaaagccccccgggggttcccaaattccctcttggacccaagcatgcttttctacaatttgatgcgtgcccccatggttttggccttttttttcaaa

SEQ ID NO: 82166 - DNA, 355 bp, Glycine max
  Clone ID: PAT_MRT3847_45212C.1
aagggggtataataattttaagaattacgaatacaaaaaggaacctgaaagaaggagcacgggtccaagacaccgggtccccgaagggaagaaaagggaggcctcctgagaaacagagctcaaggaacggagggtgtgacaaagcaaaggttgctaagccaagcgtggatgcggactaccgctagaaaaaccccaacccccggaaaaaagcgggaaaaaggagtgaggggcctaaaccccggtaccccgaaatgtcatccctacccaaaagtctaaatccgggacggggaaaaggcgcacagcgaaaagctcgagggggccctaaaaaaaatccataagagcaaaaaggtgcccc

SEQ ID NO: 82167 - DNA, 145 bp, Glycine max
  unsure (1)..(145): unsure at all n locations
  Clone ID: PAT_MRT3847_45213C.1
cggcacgaggggagattcaaggtgccctatctcttttatttggnggcaaacagaaacgggaggctgcatgaaaactccactaccaggagcngggccccagaaacccaggacagcaactctccctttcttaggagcccagtcattg

SEQ ID NO: 82168 - DNA, 217 bp, Glycine max
  unsure (1)..(217): unsure at all n locations
  Clone ID: PAT_MRT3847_45214C.1
cacagacgacgacggaccggacattcccactctcgaacaggacaaatgaactctcatccgacggtcagtccgacctttccggctactgggacagcgagctccgactctgggacactagattttttttagcggggtgcgncgaaaagccggaacaccaaccacactactctgcgaggcgactaaacaaagcaacccaaacatcacgccagcccaaact

SEQ ID NO: 82169 - DNA, 257 bp, Glycine max
  Clone ID: PAT_MRT3847_45215C.1
acacgtctcttattacccatcctcccacatttcggtaattttgcaaataatgctcccatcgccctttgtttcattctctgttctaacattttgttctgtgtggccttctcttcatctgttatgtgtgcctcggtgccatttgtgcctaaaaacctgagctggaccttcaccaacctctggatctattgtgtcgggcctctcatccgttgttttctccctgtcttttatttaccatgttttctttatcttcttctctc

SEQ ID NO: 82170 - DNA, 579 bp, Glycine max
  Clone ID: PAT_MRT3847_45216C.1
aattcggcaccagatcttgcagtcttgcaccaatagtggatgttccagaatttcctactcctacttccaagtaactaactaccaaaccaaactgagcggaaactccaatgttcctgatgcagactcgttccaattcccattctcactttctcccattcttcactttcacattcaaattcccttcttctgttattcactatgatgaataggagcccctattctcattctcgtactcctatattgaccacaattgttattgccaatggaaattgcactttcccctcacaaatcccaaacctctcttctgggttcttcctttcccgggaatctttcctctttggggtgttgttttgcgtcaaagatgagatttttgtgcaacccattttcccggatttgttgttcctcctccatggatcaaaagctgaaacccaaaccaaagaaagttgagtacatggaaaggaatgttccagttttggaagacacccagatcaggaaaacgtccccttctggactctgtagtcagatagaaaagttggttgtgtgtaataggcaccgggaggcaatggagttgtttgaaat

SEQ ID NO: 82171 - DNA, 172 bp, Glycine max
  Clone ID: PAT_MRT3847_45217C.1
cccacgcgtccgctaccatgcttccttgcagtacaccctctcatgcttctgcgctttttatagcccctattttaaatatagcccttgactgtcttttttccatacttcctccacgaataatcatcattatttatatttgcatgtttcttgcatatatcattcaccataattt

SEQ ID NO: 82172 - DNA, 471 bp, Glycine max
  unsure (1)..(471): unsure at all n locations
  Clone ID: PAT_MRT3847_45218C.1
aattcggctcgagacggctgcgagaagacgacagaagggctgaccctttccctttcaataaaacactgttatttagtagccctgacgaatggattgacagcaagaaattgtttaatttttccctcctctttctttgcacattctctctctcgcttccacgcactgccattcatctccaccactttctttctttgttgataatcagatcacaagaatctagtttttcattttttttcagtaaaaagcttttttttatatatatatatttaaaccatgtaactaactcatagttctttattttttttcttcatctttgtttttttctaagggttagaggaagaagggcattttccttctgtggttagttctccagcggaattcagatgcgtgagggttagctgcgtggaggactctgatgatagatacgcataccanaccgctgtgagcattggaggacatgtgttcaaagga

SEQ ID NO: 82173 - DNA, 511 bp, Glycine max
  Clone ID: PAT_MRT3847_45219C.1
ggtgactcaaaatatgttagatgggggtgtgaacaacatacacgtacacagggaatgatgcacacatacacattttaattccaactccacctcacccttctgggtataaagaggcatcaccattctgcattttcttcattgcataacctcttcatagtcccttgacacacttcaatactagaaagtattgtgaattgtttgtaacagaaaaatgagctatccacattatcatatgggctctggtagtacaactgctaggagaagcttggagtttgggaagacacatgtggtgaggccaaaaggaaaacaccaagctactatagtttggctgcatggtcttggtgacaatggtttgagctcttatcagctgctggaatctcttacacttacaaatataaaatggatttgcccaactgctcctacccgtcctgtaaccatacttggtggtttttcttgcactgcatggtttgatatgggagaactttcagaagatggtccagatgattgggag

SEQ ID NO: 82174 - DNA, 614 bp, Glycine max
  Clone ID: PAT_MRT3847_4521C.1
gttatgctaaaatagtttttatccatagaaaattctagaagaatacggaaattggttatattccaaatatacccaacaagggagactatacaaggaatcctttgaaaaacgatggccctccttgagccatgaaagtagtcagataaattttgagacggaccagttgctaaagaaagtggatcaagctggcagccaggtgattgacaatttcagcagcaatgcagtttctaagtcatttgagcaagaagtacgggaaatggtgtggctggtttatctgcttcgctactgacatctgtgctgcaaaccaccttggacgatcttcttgctcttggcatttgttctgctggcgggtatctagctatatcaacttttccagctcgtaggcagaaggtgatagataaggtgaaaagaaaagcagataccttggcatatgaacttgaagaggccatgaagaaggatttgactgaagccatagaaaatttggatacctttgtgaaagtccttagcaaaccttaccaagatgaagcgcagaatagacttaacaggctagtagagattcaagaagcattgtcaaatgttgagaaaaaacttagaacgctacaaattgacattca

SEQ ID NO: 82175 - DNA, 261 bp, Glycine max
  Clone ID: PAT_MRT3847_45220C.1
gtcagactggcagacgcacttcgctgcgtacctaatgaacatgaagcaaagcttcaagtggtggaggttgagaagatctccctttatgcatccagttcatccatcactgaacttcagaaacttgtacttgacccaacacttgtcgcccagatcggttcttgagatcctaatgagactgcagtgtggtcctagaattactcgacgatggttaacctgaggcatattacttgcgctcgaacttacacactccgtcattgaatc

SEQ ID NO: 82176 - DNA, 246 bp, Glycine max
  Clone ID: PAT_MRT3847_45221C.1
gaaaaatatgcgaggggacccagaagaaagacaggccatcaataaccagatactgtgtgctacactttttcctacttggacttgttggaataacaatgaaagaaggattctacctcttgggtttggagaaaacatcacctacttttgctgctgctatgcagaattctgttccagcacttacctttctgatggctgctctactcagatatgagagtgtgcacttcaacaggattgatggtctggcta

SEQ ID NO: 82177 - DNA, 277 bp, Glycine max
  Clone ID: PAT_MRT3847_45222C.1
gtcctggttgcctacaggtccaattcataacccctcaatataacgtgcacgtgacgaacctaatatacttcggaggatcgaacaccaaatgcagtgaaaggagcgaaacctttcaggctacgtatgcggggaagatattgaacaagttggaagttgagaagttacactcggtggtgacaaagtatgggggcatggtggcttacaatttggtcaagatgttgggtgaagacaggatgcaaaaagaggatattgctagctccagtgtgaacatgatcaa

SEQ ID NO: 82178 - DNA, 396 bp, Glycine max
  Clone ID: PAT_MRT3847_45223C.1
ctgcgtgcgggtgcacgacgacaacagattggatagcatacaacgcctttgtctctattcatgctactctactcagggtcccaatttacgctctctcgcacgagatcccttaagggatccactagctgacggataaatggtgctggcattcaccaacctgtttacccggcttttaaaccagaatgaaatgccaattctgatggtgggtctcgatgcagctggtcagaccaccatgctatacaagctcaaactcgaagagatcgttactcacaatacctaccattgcgtgcaatgtggagactgtcgaatacaagaacattcatttcactgtctgagatgttggcggccacgacaagagaacggtactcgtggatgcactactatcaaaacacacat

SEQ ID NO: 82179 - DNA, 278 bp, Glycine max
  Clone ID: PAT_MRT3847_45224C.1
gcttgtcctagatcagcagcatgtgaatggctatcctgactttcctcaggtctgtgatcttctccaaatttcttccaagttctcattgatttagctccacctttatttcttttgtttattgtgtgggtggggtgtgggggtaggaaacctttagcagcagacactatatatgtaattatttatactttttctttttttgatcttgttgtctataaattgactcccccccggctccttgccaagtgggataagattattgtaattgttatttataaaaa

SEQ ID NO: 82180 - DNA, 1448 bp, Glycine max
  Clone ID: PAT_MRT3847_45225C.1
gtcgatgcgaaaatatctcgttcatgttaatgttatgataacgaggaatggactatgatgctgttctgttggtgacggtgtgattgattgagacgaaatctgacaatgaagcgtggagcattgttgtcagtgcttgcctgcgccttcgcggcggtgatctgggcagcgaacggcaacgacaacctcgtcccgcctcgccgggaagtgtacggcaatgggcgaatattcgacatcagtcatcggtaccaacccgagatgccggaatgggaatcgaatgacggcatagggcagttcctgtggcttcccaagagcatgaagaacggttccctcgccaacaactccgaaatgaaacttcccacacacaccggcacgcatgtcgacgcccccggtcacgtgttcgaccactacttcgatgccggcttcgatgtcgacaccctcgacttggacatcctcaacggacctgctctattagttgatgttccaagagatagtaatataactgctcaagttatgaagtcgttgaatattccaaggggtgttgtacgtgttctcttccgaacgttaaataccgacaggcggcttatgtttcagaaggaatgggacacaagctatgtaggattcacagttgatggagctaagtggctagtggataacacggatatcaaacttgttggaattgattacctatctgttgcttcttatgattacttgattccatctcaccttgtttttctaaaagacagggagatcattctcgtggaaggcttgaagcttgatgatgttccagcaggattatattcagtccattgcttacctcttaggttggctggtgctgagggatcaccaatacggtgcattctgattaaaaattagggaaacagtgctgtttcaaagtagtttttgcatttgcagagcaagagggatgcatcaatctttgcaatacttgaatttggttctcttttgtctgctaggctggaactgataaattggcatagtggtgtggtgtccttatggagcaagatagtttcaatgttgtgcatcaacttttgtggcttacgtttacacttgttaaaaacatgcataagcacttcaagaaatcattttgaaatggaaaataatgtatatatagataatttgcacgtagcattagcacttcgagaaagatgcaatggaataagttggcacaatggtgtgtctttgtggagcaagattagtaatgtttgttaactttagtggctcatgtgtacacttattcttgtttcctagtacagaattgcaactttcgttttgggcttgtttcaatagttagtccatcatagagcaccatgtacttgaaagttgatggattgaagatcaaggtgggattgttattactcgcagctatgaccatgtgataactggatactctctatctgttttgaattctatcagaagagtttaatttttct

SEQ ID NO: 82181 - DNA, 814 bp, Glycine max
  Clone ID: PAT_MRT3847_45226C.1
atagtaatattaccgctcaagttatgaagtcgttgaatattccaagggggtgtaatacgtgttctctcccgaactttaaataccgaccggcggctgatgtttcagaaggaatgggactcaagctatgtacggctgcgagaagacgacagaagggggctagtggagaacacagatatcaaacttgtaggaattgattacctatctgttgcttcttatgattacttgattccatctcaccttgtttttctaaaagacagggagatcattctcgtggaaggcttgaagcttgatgatgttccagcagggttatattcagtccattgcttacctcttaggttggctggtgctgagggatcaccaatacggtgcattctgattaaaaattagggtgtccacatgtctgtgttcggtgtccgcgtcggtgtcggtgcttcataggctggaactgataaattggcatgggggtgtggtgtccttatggagcaagatagtttcaatgttgtgcaacaacttttgtagcttatgtttacacttactaaaaacatgcataagcacttcaaaaaatcattttgaaaaggaaaataatgtatatatagataatttgcacatttcattagcacttcaagagagatgcaacgatattggcattgcgctgaatttggttttcttttgtctgctaggttggaaaggaataagttggcacaatggtgtctttatggagcaagatagtatcaataatgtttgttaactttagtggcttacgtgcacgcttataaccatatgcacaagcacatcaatttaataggtcgttttg

SEQ ID NO: 82182 - DNA, 357 bp, Glycine max
  Clone ID: PAT_MRT3847_45227C.1
gttacactgaaggtggtcaattgaccgaggcagttctgcgccttccttacactgttgtatgatttgatgagatggacaaagcccgtcctgttgtgttcaacatgatgcttcagatcctggaagagggaagactgacacacactttgggcacaacggtggattataagaccactcttcgtataccgacatctattgcagaaagccgtgtgattgagagaggaggcctcactattggatttgatctggtttctgatgcgaatgctaacatgtatgacagactccctagcctgcccaccgatgagctatatcaatactctctgccagaatcttagaatgggaaggttgaaatgaatgcct

SEQ ID NO: 82183 - DNA, 426 bp, Glycine max
  Clone ID: PAT_MRT3847_45228C.1
caaccgcgatcacaggatgccgcaccttaaaaccgggaacaaaagcaatacgtactacgatttcaagaatctctcagtttcttcgctacttctatgtgtacgatttcttaagggaaagaaaatcactctgtgagctggacacagacttggggtatcaacatactttccacatctatgttatttgcagaacactcttctatgtgatatacgactctatgtgagatataaacttcttgtggatctaaaccagttctctgtttaatctcaagttcatgctgatgaaaagttggattatgactaacactgtgctatctgctatagcgattctgatgggggactgatctattgctgtcctttctttcactctcttcttttcactgatccgcattgtcgaacagagcggtcttatctgaaaaacacttgttc

SEQ ID NO: 82184 - DNA, 327 bp, Glycine max
  Clone ID: PAT_MRT3847_45229C.1
cgcggttccaaaatgcatatagaggctaaatatgcactacgggtacattcgattatcctcattatgatgtaaatctcccaagccactatattcaggcgatagcgtaagcataggggtggaaccaaacgcttccaagagctacaacaatacctgctggttcaagaccgagtccgaatcactgactcactagttttgacgtacatttaggggttaacattctcgcggaggaagtgactattgacgattacgacatgtgcaacgagaccaccctagttaaaaagtttgaaaatcgggacagtgaatcaaagctttatcaagactgaccat

SEQ ID NO: 82185 - DNA, 418 bp, Glycine max
  Clone ID: PAT_MRT3847_4522C.1
tttttgagttgacaattgcaataacatttatattcagcataagaataacaaaacactcactttgaaagacggacttttttcattcccaatatcattctattatccattgacgacgttgtcctctgttgagattaaagttttctttaaatttatatgacatatcaaaacaatggaaaaccttaagctttggtaacttgtcaataccacgaggcacctctgtcagattggcaatactgactaacctgagcttttcgagagaaggcaatgctccatcttcaataacgatggatttcaatccaaaaagatccgccagtagtatttgctttaaggtcggaaaccccctgtttggaaactgcaaaactttactataatttgcataattgatactaaggggcgtcaaattttggagatctttaaa

SEQ ID NO: 82186 - DNA, 497 bp, Glycine max
  Clone ID: PAT_MRT3847_45230C.1
caaggaaaaaatatattttggattaggaaaaagaacctagatcccctttttggtatataggggggaaaaaaaatatataaaaccgccaaaatttttttaaattaacaaaattccgtttttaaaccctaattcctaaatttcaaatatatcaggaaaaaaatctatagggccatgttgggaaacccgggggttactttggaactaaaaaaagctgccacggccacgttggaaacaacgggttgctggggaataaacatagttgaggaagggggttaaaaaaacaggggtatgcaagttaacattggggggcgggccgggacaaaaaaaactttgccatccttgaggaccccttaaaggcccgggggggggccaaacaacttttaaatttaatttcctgcccggccaaggctgaacaaaatggacgggcaaaaactaccatcagggatcagttggtcggaggaaaaataaagcaccactttttgggtttaatccatggg

SEQ ID NO: 82187 - DNA, 1015 bp, Glycine max
  unsure (1)..(1015): unsure at all n locations
  Clone ID: PAT_MRT3847_45231C.1
gtacaggcagaaaaagatgctaagagaaaagctagagcaaaagaattaaagaaatgcgtaaagcaaaagaaaagaaggctcaggttgaagccaccttgcctaagaatgattcgaaaactatagagaagcaagtaactgcttcaacatcggttaagggacaatctcaactaaaaagtggtgtgcaattatccaaagaggaccaaataagaatggcacaggctgctgaaagagaaaagagagcagctgctgccgagaagagaatagctgccctcaaaattcaagctaatagtgcaaccactgcaccaaccatgtcagaacctaaaagtggattagccggtgacatttactgttcctgttgtaattcatcacttgctggtaaagttcccttccacctgtataattacaaatactgcagcacatcatgcatgcatgtacacagggagatcctagaagaccaatgacaatgtgtttagatatttaaaattttcttttgtgcaagtcaagcttgctccgaatatccattgttttttatttggtatcaagtaattttgggttgagaaagggaaagaaataaggaggcgtggggagcagccatggtagaaggactggaatggtaaataacatgagctgatgatgttcaaaggtacgagaaattgttttccaaacaacattgatacagctagagtcataacagctatcttaagagcgttcccacactttgtgccgtgccaaacatgcacatagcaaatggccaagtgcacttgacatttatcttgtatcatctgattttatttttccctgtgtgggtttctgtaggaagtctagtctctttgacgatattttactaggcatcgggcctcaaagtatcgtgaatcctctggtcttaggcagcatgtattgcctgttttaaaccagatcagggaggttgattcgttgaggacttgaggtgtatttcatacactagtaattaatggttaatatttagcaatgtatgtcactttaaatagannnacta

SEQ ID NO: 82188 - DNA, 337 bp, Glycine max
  unsure (1)..(337): unsure at all n locations
  Clone ID: PAT_MRT3847_45232C.1
aggcgcccacgcgtncgctttcatctccccagccaaaaactctctcaagaaggacaccttaggcccttctgtgtttgcaaccgctattattccttcttgtccatggtgctcatagagttattgcttggcgaataaaaaagaccccttcactgggggttttgagcccgaccgcaccancttcccaaaagaaagaccccccatgggggggggggacgggcaccctattgttataacttcagaaaaagaggagggacaagaggggaccccccccccccactgttgggaaagagggggggacaaacaagccctctggggacaaaaacatctagtcgggggg

SEQ ID NO: 82189 - DNA, 666 bp, Glycine max
  Clone ID: PAT_MRT3847_45233C.1
ccacgcgtccgcttgtactgctttcattaatatatatatctacttttgccgatcaaaacaaagaaaaaaaagaaaaagtctaacaacacatattaatctaacatcccccctcaagctggagcatataaattatatgctccaagcttggaacatataaactgaatccaaggcctcctcaatgatttggtttaaatatcagtaagttgatcatttgcattgacaaactctgtactaatctctttggtcagcagcttctctctgacaaaatgacagtcaatctctatatgtttagttctctcatgaaacactggattagaggcaatatggagagctgcctaattatcacaatacaactacattggctgaacttcgctcttaaataagttgtttgatccacactaatttacatgtgattgaagtgatagccctatattccgcttctgcactagatctagcaacattattttgcttcttgctcttccaagagataaaatttccttcaatagacacacaatatcctgtactagagtgtctaactatagggcacccataatcaagaccatatattttgggtgtagcctttggctaccaagtgaaccttaagatgatcaaactcaccattaggaccaaccttgatagcatatacccactgacaaccaactgcct

SEQ ID NO: 82190 - DNA, 774 bp, Glycine max
  unsure (1)..(774): unsure at all n locations
  Clone ID: PAT_MRT3847_45234C.1
tacggctgcgagaagacgacagaagggggggttgggagaggagagagagtgggagtcagagagcaaagtaaagcagccgattggactttgagtcctgttccttgaacagaagaaacacgttcgtttcgtttcgttcccatggcggtctccgtttccgcgtcctccgcgattgcttctttgaactccgaactctccacgcgcttgccaccctcactcgcctccgcatcttcttccgccaagcaatcctttctgcaattcccgtcgtgcgcgcgccttcttcggattagcactccacgcgctcccgctccatcgcgacctcgattccttcctctggttcaagcgaagaaacaaacctataactcgtttgacgatttgcttgccaattctgagaaacctgtgttggttgacttctatgcaacctggtgtggtccttgtcaatttatggttcccatactcaatgaagtaagcactcggcttaaggataagatacaggtggtgaagattgatactgagaagtatcctagcattgctgacaaatacagaattgaggccttgccgactttcatcatgtttaaggatggagaaccttatgatcgctttgagggagcattgactgcagatcagctcattgaacgcatagaagccggcctcagggtaacataccctccctatgagtctaagagctgctaggggtgtcatcattcgtatggatgctgacattgatgacatgattgactggantcacttgtttcaacatcattcagacatttttga

SEQ ID NO: 82191 - DNA, 1197 bp, Glycine max
  Clone ID: PAT_MRT3847_45235C.1
cggctgcgagaagacgacagaaggggggggttgggagaggagagagagtgggagtcagagagcaaagtaaagcagccgattggactttgagtccgtttgttccttggttttgttttcttcagatatttttctttttttcgttttttctgtcgtttcaccccaaacagatattttggtatccaaacagacctcatctctacattttttctttaccagcagaacagaagaaacacgttcgtttcgtttcgttcccatggcggtctccgtttccgcgtcctccgcgattgcttctttgaactccgaactctccacgcgcttgccaccctcactcgcctccgcatcttcttccgccaagcaatcctttctgcaattcccgtcgtgcacgcgccttcttcggattagcactccacgcgctcccgctccatcgcgacctcgattccttcctctggttcaagcgaagaaacaaacctataactcgtttgacgatttgcttgccaattctgagaaacctgtgttggttgacttctatgcaacctgacctggtttacaggtgtggtccttgtcaatttatggttcccatactcaatgaagtaagcactcggcttaaggataagatacaggtggtgaagattgatactgagaagtatcctagcattgctgacaaatacagaattgaggccttgccgactttcatcatgtttaaggatggagaaccttatgatcgctttgagggagcattgactgcagatcagctcattgaacgcatagaagccggcctcaaggttaagcaataaccctactataatgaagacacaaagaagcttgtctattggaatgttcgatcacatacatgatatgattgactggaatcacttgtttcaacatcattcagacatttttgaagtgattaatgtatctcaaaatgcaaagattcaaccctaaaatatttagtttaattagcagtggcatttttaaaaaaaagaaatcacgactaaacctggttgagtttgtgagttccttgaacgagctaattcttgtctcttctttagactcggtcctctttatgaggttaaaaaacagtgcaagtattcagagagattaaagttggttattgtttgctaagaactggctgaattgcatgggaaatgattagtgccatttgaaaaacacataatttctgccgccgtgacactaata

SEQ ID NO: 82192 - DNA, 430 bp, Glycine max
  Clone ID: PAT_MRT3847_45236C.1
taaaggggaagctgctgcgcgtgccggtcccgaaccggagttccgggctagacccacgcttacgtttatccacgagatccaccaacagaaactgacttgtaactactgttgtggatggataggtagaggggctgactgttgatgcaccgcgggggatcatacttatgatgctgctgccgttggtgctggtggcgcgggattgagagctgctattggactttcagaacatgggttcaatactgcttgttttaccaagctcttcccaactcgttcacacactggtgcagctcagggcggaataaatgctgctttgggaaatctgactgaagacgactggaggcggcacacgtctgacactggcaagggaaagtgatatgggtcaggagaaccaggtatgcccatcaaaattatgggacgggaagcacctaaa

SEQ ID NO: 82193 - DNA, 751 bp, Glycine max
  Clone ID: PAT_MRT3847_45237C.1
agccaagactagaaaatagttatatagttatttgcagcaatattaaacaaagtttgcatgcaaaaatttaactcaatctagaattgtgatatacattgtaggcctaaaagtacacgaagctaacattactggtcaaggggaagataaatcagctccacatacaaaccagattaatgaaaaggggcattcagatctttcttcagccaacaacatggtacatgcattgacagctagtggatactcataatcataacactagtatgtacttattctacagttatcatgatgaacttttcactaatctaatcaccaaagactaataatatttacccctcctcttcatcatagtcttcctcctcctcttctagtggcctaccaagttgtgcaagctgcagtgaatcaatggccatcttgtccacatcagaaagtgaccaccccggaatttcttcatgcttgctctctgttgggggttcaggcaatgaggcatcaggttcaggcaccgaggcggaggcatcagcttctgcactagcctttttgtcatcgttttcattcgtgatggcattcagatcaatgttccggagggaatccgtgcttacaacaggaacaacgggagctgcaatattctcctcctttggtatctcctttgactcagaaccattatccatacttcttttgtattttctggttgccggctgaactgtagtgcaaggctcagattcagcatcttgatgatatgtctctctatttaaag

SEQ ID NO: 82194 - DNA, 143 bp, Glycine max
  unsure (1)..(143): unsure at all n locations
  Clone ID: PAT_MRT3847_45238C.1
ggaaaattgatgttggattttctgtcatagcaaaggaccgcngatttttttatacncccataaacatcatcttcttgagataaatgccaaggtctggggcttaagcaacaccagacactggggaagtgcagcttttgtcccgg

SEQ ID NO: 82195 - DNA, 439 bp, Glycine max
  Clone ID: PAT_MRT3847_45239C.1
tcggaattaggatcgagggagcataactgcgatgacttttgtttgtcctgcaagagaaagaacgactggggggatgggtgctgtcaaagacaagtgccaaacgcaccaccagagaacccaaagcagagctcaggagagcagaagatgaggcgatgcaaaacactgaccttaccatgaggggcgatatcgaacacaccagcggtaacatgtaacaataactaggaggttggtgattcaacaaccgacagtcttataagcagtatcaaccatgccggaaatgccaacgccacacgtgggaaatgcatgggccacgccggtcacgctctcaaagatgcctcctcccagaccacgtaccaggattacttatcacagacaatgaacggaaggagggactaccaaatcatggggcaacgaataactacagtcctaattgctgaag

SEQ ID NO: 82196 - DNA, 367 bp, Glycine max
  Clone ID: PAT_MRT3847_4523C.1
gatccgtctgcagatacacaagtaggtgacaactacgaaaaaagaaatggcttcctcaatgatctcctccccagctgttatcaccgtggatcgtgcctgtgccggcatggttgctccattcaccggtctcaaatccatggctggattccccactaggaagaccagcaatgacattacctccattgctatcaaccgtggaaaagtccattgcatgcatgtgttgccaccaattggcaataagatgttcgagactctttcctacttgccatacctcgatgatgcccaattggcaaaggaagtcgaataccttctaatgaaatgatggattccttgcttggaattcgaattggagcaccgtttcgcgtac

SEQ ID NO: 82197 - DNA, 302 bp, Glycine max
  Clone ID: PAT_MRT3847_45240C.1
aaaccccccccgaaaggggggggtttttaaaaaaaaacccccgcccacccccccattttggaaagggccccccagaggggaaaacaaacaattttttggggaaggcaaaagggttaattggaggaaggctttataagccccaaaaaaatttttggaaaaaagggaaccgggaaaatagtacccgagggcttataaaaaaaaaaaccaactgggccccagggcccgaaaaaaatttatatagccccttaaaacgggatatcccgctccaaaacaaaagtccgaactcagggggccccgggggg

SEQ ID NO: 82198 - DNA, 1615 bp, Glycine max
  Clone ID: PAT_MRT3847_45241C.1
gaagaattcttcccacttcggctggagtattatgagagaagaaagaaacatatactgaacaaccttgaacaacttctgttgatattggacaacaaagttaggtttatattaggggttgtgaatggagaaattgtcgtgagcaacaggaaaaaggctgaattgttgattgagctgcagcagaaaggttttactcccatgccaaggaaaggtaaatctgcagaaccccaagttgctggggcaaatgatgaagaggagcaggaagatgacaacaacactagagagcaggaaactggaagtgttgaaggagtgaaacgaggtgactatgaatatctgttatccatgtcaattggaactttgaccctcgaagctgttcagaagctgctagcagagaaagctgaaaaagaaaaggagttcgagattttgaaggctacaccatcaaagtctctgtggttgaaggatcttgatgagcttgagaatagacttgatgacatagatagcatagaggctgaggaggaacggaaaagatcaagtcaagcaaatagaaagacatccaatcgtggtgttacaaaagcagctaagaagccaccacaaccacggaagtatactaagaaggccaaaaatgttgagccagagaatgataattcttcaatggaaattgagaatgttgccgaagtcgctaaaccaaaaggcagagcaggttctaagaatacccagaatactcagccggttgctgaggatgaaattgtatctcttcaagaacgactagctgcatataacttcggtgcatctagtgatatatcagcaggcatggaaactgaagaacctcctgcacctgctgagaagaaagaggcgccaaaaagacggggtgctgctaaaaagaagtcaagtgccatagtgttggacgactcagatagtgataatgaaattcatgatgttgaggacgacgatgacaactttgaaatcatgcagccggttgccctagaagcagggaaaaagaaaggagggagaaagcctgctgctcaaaatgccaagaaggcacctgctgctgcttctaccaaaaagagaaacgtaggtggcaagcaatctcagttattgggtcaaaaactcataactgatatgttggaaagtacagggatatcaccagagaagaaagtgaggaagatgagggcgtctccatttaacaagaaaagcagttctgtgttgggaagggttgctgctgctgacaaagatgacagtgtaagtgaagacttgtccggtgattctgctggctcttctccaaggatcacagaggaggtggttgagattgcaccaccaccagcaagagctagaccccagagggctaatcgtaggcaaacgacatatgtactgagtgaatctgaaagtgacaatgattctgatgttgatgaagattattctgatttcgaggaagatgaagactaggaaggaaggtgtgctttgtagaaacctgatcctgcgtcttgtatgcagtcttagtcttgtggattttaatttccaaatgatacttgtgaacgtgatgagtgagttgcactaatctgtatgatttcggatatgttttcatgatggaatgaaatgaaatagatttatcattatgtac

SEQ ID NO: 82199 - DNA, 193 bp, Glycine max
  Clone ID: PAT_MRT3847_45242C.1
gtgagaatgggtcttcggaatatggtgtgtctgctaataactactctacggcgcatttaaacgcgattagtgagcccaaagacaccctcattcgcccttacagttcttgaaattctattgcggcacgcactcagacgaggtcttcttgggcaatgagattgcggctactactgcactattcatgccggccctt

SEQ ID NO: 82200 - DNA, 477 bp, Glycine max
  unsure (1)..(477): unsure at all n locations
  Clone ID: PAT_MRT3847_45243C.1
ttggaatcataatggtaaattctatttatagttagtgcttggagggaatgagaaaggtcagaacaaatctggacgtacacgtgtcggtgtgtttgtggatatgcttaacgtctcgatccacttacggtgtcaaagcccaatatttcattagatgttatagattttgggcccatatatagaaaaaaccgtgttttccttattccgttgcttttctacaaaaatgaaaaatcaaacgaagcataattctttcacaacctaaaaattcttgcggntcacaattcttgggaaattagtttgacaatataaattacgcaggatctattactgtaaagtctcttaattttgtagcaaagcatttgtttatgtaggctttttagagtatcagaaaacacatcccattctctcaggagtgtgatgggagtatataatcaacgcaggagatcgaaaatttgaaatgtatataaatggagattattg

SEQ ID NO: 82201 - DNA, 196 bp, Glycine max
  unsure (1)..(196): unsure at all n locations
  Clone ID: PAT_MRT3847_45244C.1
gtattttcttgtgtgatcagatctagtgtggtggatgatagaagttgaacttgctttattgctatgtgttaaaatattttgtttgcattaaaatggcctattgaaatgcttttctgttcctataataaaataacctgatgaaaaagtncnnnnnnnnnnnnnnnnnnnnnnnnnnnnnnnnnnnnnnnnnnnnnnn

SEQ ID NO: 82202 - DNA, 382 bp, Glycine max
  Clone ID: PAT_MRT3847_45245C.1
ggctgattgttgctggttggtctcgagaaccgtgatgcgctggataagctcattgagcttggtagtgatgtgaagctgattggaagccaattcggcaattacttcctccatccgttccaggttcgttttcgagtgagtggattcagccatgagggtgaggtaagaaaggaacttgtctgtcaacgctctcaatgaaagcaccaagtgttatgaatctaattactgacactggtctcctagcattcgaggactaggctcctccagaattaaagatgagaaaagatagttttattccttcatagtttcgtattacatgattcattgttatatagcactaaggcttgataatgcaaacaaaaattgttaaccaaattctaacaat

SEQ ID NO: 82203 - DNA, 448 bp, Glycine max
  Clone ID: PAT_MRT3847_45246C.1
ggggaaaaaaaaaagggggataaaaaccccctccccccccgtatttagttttctatccccccaacaaaccagagaaggttcaaaaaccaactttttcctaaaaaagaaaggcacaagctggcacccccccagggggggcccaaaagggccccccaaaaatgggcggaaaaaaaaaaggctaaatataaaaaaacccctctttaaaaaaaaaaaataaaaactttgcccaaaaaaaaggggcttggaaaaaaaaagggacaaccccttttaaggcgcccaccaacacaaccggaaaaatttccctttttgaaccccgggggaaaaaaagccccccttaaatccggatgacctaaaccccgctttaggacttgctccccggcaaaacgggactcgggtccaaatccgagggggggaaaagccgcgtctgcggcgcaacaagaaaatatta

SEQ ID NO: 82204 - DNA, 226 bp, Glycine max
  Clone ID: PAT_MRT3847_45247C.1
cccacacgtcctcaaacaaaaaaatttttttttttgtcaaaaaaatttacacagactaacaggggaatatgatagactcgtggtgctaactacaaacaaaagtatattcaaataatcaatcattaaattcaaaccaaaaattacgttcattatcaactgttaaccattctatttatttaatgtgctcatttcaacattttttccttctctaacctttgctgtatat

SEQ ID NO: 82205 - DNA, 173 bp, Glycine max
  Clone ID: PAT_MRT3847_45248C.1
tttatataaaaattaataattatttacatatttgtgggtcaaaatagtggtagggtaggacatctttaatgaatcctctctatatctaatatgctaaacatccttactcttaaatatccttttaactgcaatacaaaaatttataataaaatcaaatcttctctcttgatacc

SEQ ID NO: 82206 - DNA, 220 bp, Glycine max
  Clone ID: PAT_MRT3847_45249C.1
tggttttctctatacggccgctcttgtgtttttttttttttttatttttttagatagcaggggagttgtttaaatatcccccgtcccaaacacatttcgaaactttggggaccgaaagctttcacccaatgacttagttccctcggaagaatttttgaatctccacagtcccttctttctggggggggggtacgaacagccgcttgggtcgacccgggat

SEQ ID NO: 82207 - DNA, 1533 bp, Glycine max
  Clone ID: PAT_MRT3847_4524C.1
tgtgaggcagcagcgtcttacagaggaatttgtaccccgtgcagatttacttctttttgtcatttctgctgatcgccctttaactggaagtgagattgcttttcttcgttattctcagcagtggaaaaagaaagcggtctttgtcttgaataaagctgacatatatcagaataatcatgagcttgaggaagcaatgtccttcattaaggacaatatacagagattgctgaatactgaagatgtcatgttatatcctgtatctgctcggtctgctcttgaagcaaaacttatggctacctctaatgctgggaggctaaatgaagaattatcaacctcttattctcattatggtgccagcagtttctctgaacttgaaaacttcttgtatagctttctagatgggtcaacaatcccaggaatggacagaatgaggctcaaacttgaaacacctgttgcaattgcagatagactaatttctgcatgtgaaactcttgtgacacaagactaccgatatgccaagcaggatttggctgcagtggaagacattgttaataatgtaaatgattttgctttgaatatggtaactgagagcctttcttggaggagacaaactctgtctttgattgaaactacaaaatcacgtgtcatagagcttgttgaagctaatctgcaattgtcaaattttgatattattgcttcatatgctttcaaaggagaaaaaaatgtaatgcctactacctcaaggattcagaatgacataattggtccagatgtctcgactgtccagaaaattctatgaagaatacggaaattggttatattccaaatatacccaacaagggagactatacaaggaatcctttgaaaaacgatggccctccttgagccatgaaagtagtcagataaattttgagacggaccagttgctaaagaaagtggatcaagctggcagccaggtgattgacaatttcagcagcaatgcagtttctaagtcatttgagcaagaagtacgggaaatgattttggggacttttggtcaactaggtgtggctggtttatctgcttcgctactgacatctgtgctgcaaaccaccttcgaagatcttcttgctcttggcatttgttcagactatacaaggaatccttgaaaaacgaggccctccttgagccagaaagtagtcagatagggtttgctggcgggtatctagctatatcaacttttccagctcgtaggcagaaggtgatagataaggtgaaaagaaaagcagataccttggcatatgaacttgaagaggccatgaagaaggatttgactgaagccatagaaaatttggatacctttgtgaaagtccttagcaaaccttaccaagatgaagcgcagaatagacttaacaggctagtagagattcaagaagaattgtcaaatgttgagaaaaaacttagaacgctacaaattgacattcaaaatcttaacgtgtcatgactttggactatccaattacgttattgaaacaaaggaaatccgtcctttct

SEQ ID NO: 82208 - DNA, 505 bp, Glycine max
  Clone ID: PAT_MRT3847_45250C.1
gaggagattgactggccaaagcacaatcagagttggtagagacaagatcatcatgatagaagcatatactctgcactactctctgaatatcccacttctcatcgtcaaaaatacaattattaccccactttcaaacccaccaaacaatagttgtaaaaaggaatactttactaccgttgagttgggattttaaaccactttacattaggggtagggaactaagatgaggagcaaagccaaatccgagccaaatttctttggcatgagggaagtctctcagacaatgaagagaatcctctctaggattggagcaatgagggaaggcagatgaattcactaaattcctatggaatctagtggaattttttgagagagaattgtgaagaatcagccaaaacatgatcctaattttctttgggattttgagcatccaaagccacttaaaggcggcaaagtggcaagtagaatcatgattgaattcaaaagggtttaggagaattgtgaa

SEQ ID NO: 82209 - DNA, 389 bp, Glycine max
  Clone ID: PAT_MRT3847_45251C.1
cccgaatctcccagagaaacaaagaaaagaagaaaatggctgtggccaacaatgtgctttgcattttcttcattatctccttaacatgtatggttcaagctcgaatcccaggggtttactctgctggtgcatggcaaagtgcccacgccaccttctacggaggctccgatgcttccggcaccatgggtttgaactaactcaccaacaccttcgtcattgtcactagaccaaacttatatctcatttggtgtcacctagaatgtagcatgtacttagtactcacaatgtgcctatttttaaggagattttattttgcagggggagcgtgtgggtatggaaacctgtacagccagggttatggtgtgaacacggcggcattgagcacggcg

SEQ ID NO: 82210 - DNA, 341 bp, Glycine max
  Clone ID: PAT_MRT3847_45252C.1
ggctctaggccgagtgttacattccttttgaaattgacaccaggcaagatggtgtaagggatgaagattgctgtctgcaaggtggcatctactactgtgttggtgacgagactattcacaatctgggcatcaggctgctcatgatgatcagagactcatctacttacacttgaaaacatgggtcaggaagctggcgttacttgccacaatatgctcgtcttacaacatgcggaatgagttgcgggctgagatggcttaactaccctcaacctgacattaagagagggtaatcatgccacgaagaagtgctgacagttatcaaacttccgccaggtcttgga

SEQ ID NO: 82211 - DNA, 539 bp, Glycine max
  Clone ID: PAT_MRT3847_45253C.1
ggttgttcggccagctcttgcctattaagaaatgaagcacgaaatcaagcgtgaaaacacaaccgggcaacgataacttaataaaaggccttgtttgtttttaaaatctacgggggtcacagccgaaatcaggggaaaggtacctccaaatggccctttttaatttctaggaaaaaggagaaggaatttttgtggcagacaagccctcctgaccacgaaaaactccgataacaaggaggctgaaagtggtatatgttcaaagggggatgccaaaaaacatttgccgcaaagcaaaacatgggggggaaggtcaaactcattagcagggttttcccgggcatccaaaattctgacatagaactggagccaaagatgtggccttgaccatattcgaaacccaaagttccacatgcgcctggttcaccaaaggcccctttatcctggtccaggatttggaatccacctggaaagggtgcctacgcagggcaaccactagatgataggtttaccggtggggcttcggccacggggcgaaacca

SEQ ID NO: 82212 - DNA, 120 bp, Glycine max
  Clone ID: PAT_MRT3847_45254C.1
ccggttccagggaggccaccctggggaaaatggtattttttttggccaaaaggaaagagggcctgattgtccacataactgccttgggcgatgccatcctggaaactgccctccatgcag

SEQ ID NO: 82213 - DNA, 386 bp, Glycine max
  Clone ID: PAT_MRT3847_45255C.1
gaccgaaaaggccagggaaaaaaataaaattccgggaaataaaaaacccccggccccgcggacggggggggggacccgggaattagggaccgggccctgggggggaacaaggtttccctaaaggggggggtataaaagcgtgggggaaccctgggcaaaaggggatccggggggaaaagggtagccgataaaaaagcccaaaaaaaaacaagggggaagcctaaaggggaaagcccggggggcctaaagggggggggaacccccaataaagggggggggccaaccggcccctttagagaggggaaacccggtgggccaggggtattaaagaatcggcccaccggggggaagggggggcttgggtattggggcccaggggggttttt

SEQ ID NO: 82214 - DNA, 1543 bp, Glycine max
  unsure (1)..(1543): unsure at all n locations
  Clone ID: PAT_MRT3847_45256C.1
gctcgatccgcagcggcgatacggctgcgagaagacgacagaagggggaaaaagggagtgcctgataacccataaccgaccgcaccaccgttttcctttgctttgcgttctacaatgtcgaaaacctcagagattattacatgcaaagctgctatttgctggggaataggaaaacctgtgactgtggaagagatacaagtagaccctcccaaagccaccgaagttcgagttaagatgctttgtgccagtatatgctccacagacatctctagcacaaaaggattcccacataccaattttcctatagcacttggacacgaaggagttggtattatagagagtgtcggtgatcaagtaacgaatctgaaagaaggggatgtggtaattccaacatacataggcgagtgccaagaatgtgagaattgtgtttcagaaaaaaccaatttgtgtatgacatacccaataagatagactgttctaatgcctgctacatggtcagaatacatggttagtgatgccaactacgttctcaaagttgatccaaccattgatcgagctcatgccagtttcatctcatgtggcttttcaactggatttggagctgcttggaaggaagccaaggttgaaagtggatccactgtagctgtttttggtcttggggctgttggattaggggctgtaattggatccaaaatgcagggagcaagtaggataattggaattgacacaaacgagaacaagagagcaaaaggagaagcttttggaataactgactttataaatccgggtgattctaataaatctgcttcagaattggtcaaggaactaagtggtggaatgggtgccgactattcttttgagtgtactggagtttccactttactctctgaatccttggaagccacaaaaattggaacaggtaaagcaatagtaataggtgtaggaattgaaattactttgccattgggtctttttgccattctgcttggtagaactttgaaaggttctgtttttggaggactcagggccatttcagacctttccattttagctgacaaaggccacaaaaaggaattccctcttcaagaactcttcacccatgaggtcacattagcagacataaacaaagcatttgagctactaaaacaacccaattgtgtcaaagttgtcatcaacatgccatagtcatattagcgcaattgtaggtaatcttcggcaaagtttgaaaaagattcacgtttcactctttatcaattaccattgtctctctctttgtccttctctatgcatgtgtgtatgtggaacccagatcctctgccacgatcctaccacctacaatagtattttgtccgtttcattgatcctacgactatccaagtaaatctttcagtagttggattaattcaatgtctgagactaattttactgtataatacgtactgcatatgataagtttaaaaaaaaaaaaaaaaagaaaaaaaaaaaaaaaaaaaaaaaaaaaaaaaaaaaaaaaaaaaaanaaaaaaaaaaaaaaaaaaaaaaa

SEQ ID NO: 82215 - DNA, 479 bp, Glycine max
  Clone ID: PAT_MRT3847_45257C.1
taaagctttttaagtcggttctctaggccattttacgacggttttgaaccgtcatagcacgcagtgtcgtaaaatgtgcctacctctacaacgacggttttgaaaccgtctttaaagattggtgattttaagatggcagttcctatcaactcaaattcagtaagtgtggtgtgaaattaataacgggtcctcttaagtaagcactggttgtgttattttacttttccactttagcttttctcaactctttcttgagttttagataagtctgaatcactgaataaagcaaatagtttgtggattttaccttcaaacttcatatcatgctatcagtgccccgttttgccaccaccaaactctgcctcgctagccaaggctccaaagtaattttcctctctaaactatcacaaagtaggcctttctttgttgctaaactgtgtgcttattatatagcccttctgtcgtcttctcgcagccgt

SEQ ID NO: 82216 - DNA, 730 bp, Glycine max
  unsure (1)..(730): unsure at all n locations
  Clone ID: PAT_MRT3847_45258C.1
nnnnnnnnnnnnnnnnngagattgagaggagcggccgcgagaagacgacagaagcctctgttgagtaggtacgcgagttgaggggctcgtggaggagcagactgaggccaacgacatgctcaacattcagcgttaggttggttggttcctacgcgcgccgctgccggatgagaaggagattgagaggagggtgctggagaagaagaagaaggatctgttgagtaggtacgcgagtgaggggctcgtggaggagcagactgaggccaaggacatgctcaacattcagcgttaggctgtagaagcagagagccgcgtgaaaaagtggggaggagcaattgcgtatgatcaatgatgactttttatcatagtggagaattaggcagagactctattaagttgtaccaatagtgaagaacttgaaaattttcaacatgtatttgaattttagactattgggtggacttcctgtgaagtctgaggttttatttctccataattttattctcttgtgtttgttctggactggctatatgctagcatgttggtcgaatttgacagattaaagtaatgggtagtgtcagagttattgtttatttttctaacaggaatgataagagtattggaggcactgaagtttttgtttgttgcatttgggtttggagaactctgcaactccttcaccattttctagataattttttttataaagatatatctaagtgttaaaacc

SEQ ID NO: 82217 - DNA, 659 bp, Glycine max
  Clone ID: PAT_MRT3847_45259C.1
tcaaggaactaagtggtggaatgggtgccgactattcttttgagtgtactggagtttccactttactctctgaatccttggaagccacaaaaattggaacaggtaaagcaatagtaataggtgtaggaattgaaattactttgccattgggtctttttgccattctgcttggtagaactttgaaaggttctgtttttggaggactcagggccatttcagacctttccattttagctgacaaaggccacaaaaaggttatgtatcctctagacatttaatttaaccataacgaattcactgtctacttttttcttggacatttcttataatggtattggactatttttccttcttttttttttacaggaattccctcttcaagaactcttcacccatgaggtcacattagcagacataaacaaagcatttgagctactaaaacaacccaattgtgtcaaagttgtcatcaacatgccatagtcatattagcgcaattgtaggtaatcttcggcaaagtttgaaaaagattcacgtttcactctttatcaattaccattgtctctctctttgtccttctctatgcatgtgtgtatgtggaacccagatcctctgccacgatcctaccacctacaatagtattttgtccgtttcattgatcc

SEQ ID NO: 82218 - DNA, 326 bp, Glycine max
  unsure (1)..(326): unsure at all n locations
  Clone ID: PAT_MRT3847_4525C.1
gtagctcnngattcgctcgagactgagctccttgggcttgagaccggacagacaaccaatagacgtgtgcacgacctcccggtcaagataatctcggagcatgggctcggacattgcgtctgaagcgaagaaggattggaagcactgatagatccatctctgggacatgatgtgcgctggtgatcgcgcgactaatgtcgcatcccttgcttcaatgtgcgtacgaccagaggtgcaggaccgttactttatggccgatgctgttctgactataaaacttgtgtgcaacgaatgcaatggtggcacgagacgcatgctctagctct

SEQ ID NO: 82219 - DNA, 530 bp, Glycine max
  Clone ID: PAT_MRT3847_45260C.1
tggatcctgtagagcggccgcttttttttttttttttttttttttttttttagcgagtcaaaatgctttttcattcaatcgcgcaatgtttaaaaagaaataattattttctggaaaaccactaatttctgttgatgctatattttttggcactgaattacaagattaactatatataatatcttggcctcttcttttctcaaactgtacttataggttcctacttggtggctgattcagtgacaaatgatagtcctttgcacgctgcgtttccatagcatggccatgggcaacctatcacatctcagattgatctcaccacttcagtactctgcctcattccatgtactaaaatattggcctagcccaccatagttctaaataatgggcaagacattccaatcatatatccattccattcggcttggccttctaacacattacactcctaccaacagcatgcagagagaagcacaaactcacaggcatatttgtaatttgtttgtgcacaaatctgtttaaaaatggca

SEQ ID NO: 82220 - DNA, 883 bp, Glycine max
  Clone ID: PAT_MRT3847_45261C.1
ttcggtttttttttttttatcacagacttttttgctgtcgttgttgatatgacttaattgtatcttcaatcaatgtgttaattacagcggaattccggatgcgacccaagtgcctgataacccataaccgaccgcaccaccgttttcctttgctttgcgttctacaatgtcgaaaacctcagagattattacatgcaaagctgctatttgctggggaataggaaaacctgtgactgtggaagagatacaagtagaccctcccaaagccaccgaagttcgagttaagatgctttgtgccagtatatgctccacagacatctctagcacaaaaggattcccacataccaattttcctatagcacttggacacgaaggagttggtattatagagagtgtcggtgatcaagtaacgaatctgaaagaaggggatgtggtaattccaacatacataggcgagtgccaagaatgtgagaattgtgtttcagaaaaaaccaatttgtgtatgacatacccagtaagatggactggtctaatgccagataacacttcaaggatgtccatccgaggagagaggatataccatattttcagttgtgctacatggtcagaatacatggttagtgatgccaactacgttctcaaagttgatccaaccattgatcgagctcatgccagtttcatctcatgtggcttttcaactggatttggagctgcttggaaggaagccaaggttgaaagtggatccactgtagctgtttttggtcttggggctgttggattaggggctgtaattggatccaaaatgcagggagcaagtaggataattggaattgacacaaacgagaaccaagagagcaaggagaagcttttggaataactgact

SEQ ID NO: 82221 - DNA, 221 bp, Glycine max
  Clone ID: PAT_MRT3847_45262C.1
gatccagatcgaggtatcatttatccatcaagatttaaccgatcaagttgccattgatcaactcttgcactttcttgatattcaatgacgataatggagcagtgtgaatgagagattaaattatgtcttctttgcatctagaggcttttccgggtggttatatcttggatttacattttgaatatcatagttatccatgtttgagagaacctattatcttt

SEQ ID NO: 82222 - DNA, 125 bp, Glycine max
  Clone ID: PAT_MRT3847_45263C.1
ctttggtatcagtgcaagccttcttcttcgccagcttacatatacatgtctacaccgcaggggcgaaggctcaagcctcagctagttttacgaccaccttatagaggactgactggtacacacgc

SEQ ID NO: 82223 - DNA, 988 bp, Glycine max
  Clone ID: PAT_MRT3847_45264C.1
attcggctcgagctagcattagtactactgttaatgcaactagggttagtgatcttgagtccccaacatctaccttgtctgagaataatgcaccaccaattaatattactagtgttattgagtttgtgggttcttcagagagagggacggtgaaggaagagggagagcaagagtggaacaaattaggttatcatgaaagcttcacccatttgggagaatacaaagatggcaaggagaattcaatgcctttcacgtctagtctgcatgagttgacaatgaccatggcaaccacgtggggttctagcactagtggtgcacatgcacatgcacatgttgctgaggagggttgtttcaccaatcttttgctgaatgctaactccggtgcccggagtttgtcgccacaggacggtggagagtctaataattgtcacgataatgctcgtaacagtggcagtggtagtagcaatgctgacttatatgaagaaaacaagaattattggaacaacattcttaatttgatgaattattcttccccttcggattcacccatgttttgattaaattgctttggaattggaaggtaaataaatcctttcacgtttgaatttgatcaaacatgtattgtcatgttaaattcttgtaccagccctctgttagatgctataaatatgtggggcttgtttaaaatttacatagagagaaataaatacaaaatttcaacgttacttacgaagaagaccggagggagggtcaattcttgtgttggaacttggaagtgtgtgaattgcggcatctctccatcaaacaaaatcaaaggccattgattttcttcagaatgttgccataagaagagagcatagtcacgggaaaatgttgattccgattagtatgtttttatttttgtcaatgctttcacatagaaaattaagtgtgtgtcgcttcgagcatcaatcaaatgttcatattaaaattttttggatttgacttg

SEQ ID NO: 82224 - DNA, 1586 bp, Glycine max
  Clone ID: PAT_MRT3847_45265C.1
gcccccccctcctccccctcaaacacttcaaacccaagagcaacagacagccacccagggaggggggggggcgagtcaaaaagcaatgaaaatcaattagaatcaattccaggatcagaaatagcagttcctaagaaagaaatgtctttaggaaacatctgtagtcctattttccatttgtctcactcacccttcttgaatcattctttccttcaatcacaccacacccccggtggttggagccataaattaaaaaaatataacatgaaaaggccattatggaaccaatttacatgttgcttgcagacattcattctattggaaaccccctaaaaataagattcacagtggggtacaagtatggacaaagaagactaaactttatacccgcaaagatgaaaaatacaaaagttggcaacgacctaccctataacaaaaactcccctactatacatcccaaccatcgtttctactgtcaaatccccatttacgaccagctaaacttccatacatctctgaaaatttcatcaggcaatggcttctcaactgataatgtactttcgtgtttcggctaatcgctgcaccagaaaactttgaagtgtcaattgcccaagctggtttcacataatcaacagtccttgacgatgagcttgcatttgcatacaaatagtttaagagcacgtcttcacagttaaatatcttgtccaccagttccctacctttctcggcttccttgctcccgtacctcttgaaagccacttgagaatcaataaaagctgcaccagtaagaatcatgttgtaccccttatgcgaccgggcgtatttttctcccctatattttaacgggctcccatcaatgagccgaggatagaatccaacaatccgatctgggtgctgacgccacacgttaaaacctcgctcaacatcatcgcatggcatcataatgtcatcgtcaagctcaaggactgctcgtgtctttatcaatggatcgttatcccctgtattttaacaggcttccatcaatgagccgaggatagaatccaacaatccgatctgggtgctgacgccacacattaaaacctcgctcgatatcatcgcatggcatcataatatcatcatcaagctcaaggactgctcgtgtctttatcaattggatcggcagtgaaccgattattcagagagttctttttctcttccctgatccttactggtactgcagaatctagatcactcaattttggagggactcccttgttccacaccaccactatctcccgcacagaagagcatcttgagtaatgtttcacatacattttcaaattccaaagtcgagcatcgtaggtcattgttagtaatgtgaactgggaatattgccctttcaatggataaggttcttcagagccattaccaccataaatatttttcactcctatgcacatcaatccaactcccacagcaaatattgagccgaatcggctcgagcgagcacaagcattatgctttattttaccacggagaaatgttggggctcggttcagacggctgcaaaaccgtcttactcttgaacagaacacatttacacaaac

SEQ ID NO: 82225 - DNA, 428 bp, Glycine max
  Clone ID: PAT_MRT3847_45266C.1
cccatgcttccgatcttgtggtccgacagaagtttttgaattttttgtggctcattatgaacaaaagggacaagcttagttgtcaagttggaatcaacccatactccatggactggactggtttggccaataggctactgagcacgggctacgatgttttgtgctgctattatgctagttttgatgggttgattaccaagcacgttatgagcaagatggtcgaaatgataaacagtctttgtggaggcgatgaaaaattgatgcgtgaaaggacacacctgctgttggcttgatgatcaaggatggcaacttgtaagaacgatgtttggacagttgaatgtggaatcccttttggtttccgctcacagaaatttgcaattacaactacaacgagaggctcattacaaatagcctatgaaaaataactg

SEQ ID NO: 82226 - DNA, 300 bp, Glycine max
  Clone ID: PAT_MRT3847_45267C.1
gagagtcagcctttgagttagatagagaaaagaaaagtgtgtgagagagagaattgtgaagcacgggaggatctaaaaacgtgttatctgaccaaactttggaacatcacgcttctcactcctcttaggtttcagttgtgacaacctctaagtgacaagagtggaacattcattcttttagtggcaatttggctatatatattaagttctgggctgtgagtatattagaacaaatgtccttccgcagcatagttcgtgatgtaagggatggctttggaagcctatcaaggagaagttttg

SEQ ID NO: 82227 - DNA, 289 bp, Glycine max
  Clone ID: PAT_MRT3847_45268C.1
cacgttggggtctataaacttcacaacaatattcttgttaagaaaaacactggacaaacacggcacaccaaagacacactctgataaagctggttaccgcacatgggaaaaataaattctaaatgatccacaggatccttacgctctagatgctgtttcatacaaaacagcagggagagataaactgataacgcagggatacaacattgcctggatcattgcacaccaatggagcgatctacttggacgccccaggcgcgaaaccttgacctgatatctaactaatccc

SEQ ID NO: 82228 - DNA, 450 bp, Glycine max
  Clone ID: PAT_MRT3847_45269C.1
cttgggtttgatcttgatcttttcattggcaatgccctgattccggcttttgcgaattctgggtttgtggaaagtgcacgccaagtgtttgatgaaagtcccttccaggacactgttgcttggaccgcattaatcaatgggtatgttaaaaacgattgtcctggcgaggcactcaagtgttttatgaagatgagattgagggacaggagtgttgatgcggtcactgttgctagcattttacgtgctgctgctttggtgggagatgctgatttcggaaggtgggttcatgggttttatgtggaagcggggagagtgcaattggatggttatgtttttactgctcttatggatatgtatttcaagtgtggtcattgtgaatatgcctgcaaggtgtttaatgagttgcctcacacagatgtagtgtgttggaccgtgcttgtagcttgttat

SEQ ID NO: 82229 - DNA, 321 bp, Glycine max
  Clone ID: PAT_MRT3847_4526C.1
tccagttcctgttttctcatccacgagaatgccaacggagattgtgatgaacaacagaatgtatgaagtgtttatgagcttcataggagaagatactctggcttgtctcacttaacatctttgtgccggtcttcataatggcggtatcattgttttcaaggatgacgagtgacttcttatgggagaacatatatcacgctcactccttatagtaaacgaacacgctcatatatggattgtggatcgcttaacaaaccacgcagattcaaggcggcgtctgcaagaacaggagataataatgtcttgtatctgtaccatatg

SEQ ID NO: 82230 - DNA, 570 bp, Glycine max
  unsure (1)..(570): unsure at all n locations
  Clone ID: PAT_MRT3847_45270C.1
ctgcggcatcgccttgcaagaaacaacgccgctctccatccactcgacacctcaccagcccacgctccaaatcatactcatcccaacccccaacgttccccaccctcacccccccgctctaccacaaagtnaaccaagccataccctcgccctcccaaaaccatggcctcgttcctcccacgcgccaacccccctcccccggagagaactacacgcgacaaaaagaaaaaaaaaaaaaaaaccacccccaacaccccccccccccccccccccccctcataccccgacgccactcaaaaaccccagaaacacccccggccaacccccccccaccccccccccccctccacccccccccgcccctccccccccccccaaccaaccacccccccccccccacctccgcgcccccccagccacccccactcccccccccccccactgctgccccccctgcaccgccgctgcaccccccgcctccagcctcccgtccccccctacccgccgcaatgaacggccctccgcccctctgccagagccacttcgaatcccagggccgcaaattccctt

SEQ ID NO: 82231 - DNA, 134 bp, Glycine max
  Clone ID: PAT_MRT3847_45271C.1
tagctcgagccgggagatcctcttcttttctcgtacgaacttcaacagtaactcttgagccttatctcttcataggcagagcctgcacccatgcacttagatcatacctcctctactagtcaatcaaactctaa

SEQ ID NO: 82232 - DNA, 187 bp, Glycine max
  Clone ID: PAT_MRT3847_45272C.1
gctcgtttggtctatctgtgtgtgtctgtttgctcatgcatacactttcatatgtaaacaaggttgtgcatgaaataaaatctgctgtcaaataggattcgtttgagcagaggccagtacttaatacctagctcagcttggatcaagttaaaatgtattgagtttcttttgtaagttaaaatcaatt

SEQ ID NO: 82233 - DNA, 464 bp, Glycine max
  Clone ID: PAT_MRT3847_45273C.1
aaaaaattagaaagtaaaagctttttccccctaggacatggaacttacaaacctcgggtctcatagcacatgattttatacccccccccccccccaaaaacacacacatttttaatttaaaaggttaaaaaaagaggttttttaagttaaaaaatcaatccctaaaatcaaagcttccactgggaaagctgctgccattgggactatgtaaggaaaggcctttcaaggggccagctaaagtacccccatcctttttatttttttgaaaaaatctctccctctcaatgggctttgaaggcggggggggaattgccatgtgaggaggcatcacagcgggcccaggataagttttagcttctcgaaatggctccaaaaatatcggtcttattaacggccagttgagtcttttttcaagcaaacccaagggaggaaactcaaatttttttttttaatttttaggcctt

SEQ ID NO: 82234 - DNA, 370 bp, Glycine max
  Clone ID: PAT_MRT3847_45274C.1
aaaccaaaaatacccatgcttttagcccttgctcatgggcttacagggtacaactcctgttaataaaaaaggccaaatttgttctcccccgcccaaaatggggggcttctgctttttctcaattgaaacagtttaccccacatcaacttggccgaaaaacgacccccttaattggggccctattttatgtataggggatatgttttcccccatcactttcctggattacagggggatttgaaaattcctttcccgatgtttcctttaatgggagaacctccccccaggaatcaccctcttccttagggagggccactttaagcccactccttgatccagttttttaagcaagcaataaccggcccttttt

SEQ ID NO: 82235 - DNA, 262 bp, Glycine max
  Clone ID: PAT_MRT3847_45275C.1
cactaacctcccttttgtgagttaattcttaaaggattactacttgagtgggtcttccttatctttgagttttggaccatttctttttttagcctaacgacaatggtacaatgttataagacagaatcttgaaaaatgcccttggaacatagatctaaatcactcgctacttaatgaggtttctaacatttgtgcgctatattgaccatgctatatacccaactttcttttcctcccgattataagattatactattctgtc

SEQ ID NO: 82236 - DNA, 495 bp, Glycine max
  Clone ID: PAT_MRT3847_45276C.1
aatcgattgtcttatgtacgctaagaaggagcgggacagacattggatgtcaactcaacatactccaacgcggacgactatgagatcacacggcctcggttatcggcacaaacgacgacctcacgttgtcgtcgtatgagacgcacacaacgtgtgacctagaccccgacgagctgaagaagacctcggcaacgacctgcggtgtctgatgatatgtccggttaacattaaccggacccttcgcaccctcctcttcgccggcttcctctgcaggactcattggccgtttctcataacacctggagccgggcaccgcggcgatcctggaaatcttgaccggtaccagctccgcctaaataccggcgttctgatatcggatgggcgtggttcaacaggggacaaagtgataacattgtctttggtttgggaccccggagggatgctagacggcgaaatcttcggaccctcctgctgctattaagggtctgatgggac

SEQ ID NO: 82237 - DNA, 434 bp, Glycine max
  Clone ID: PAT_MRT3847_45277C.1
acaaacttacttattttcttccaaattgatacatgccacaaagcacaaaagctacacacagagggaatcttttgtattggttcattgggacaccagattgatacacaattgacgtgtacggacaattaataaagtatggatttgcaccaatctctttctttgaggaacaatcattaattgatccattgaggattacctgtgaaatagatagagattaagtacatactagatattgatcgaattatcgattatgaatgatgatttccattatgtatatgaagagattgatgatcgcgtgttgcttttgtttggaacccaaatagaacgaagagatggcaagagaatcatacgaggaagccattaagagtctgaccaagcttctgagagagaaagctgagctcggaggcgttgacgccgtaaagataaaagagctg

SEQ ID NO: 82238 - DNA, 317 bp, Glycine max
  Clone ID: PAT_MRT3847_45278C.1
tccgaattctgctcaagttgctctagaaacctctccaatttgcctttacttcttaataataacaatacaatcaaatgttctctggtccagcaccaaaccaaatcgatctaattaactttatgcttatgaagacaacaaagctgtaactgcctcctggatatcgataaacccacctgctacgaactcatagcttcttacatcagctacgcaatcctcctcatacacatgcacctggatttatcgatgcgagagagtggatacactatagagtacgagccttgggaattgtcatatgaaccgaattaatagaaaatgac

SEQ ID NO: 82239 - DNA, 411 bp, Glycine max
  Clone ID: PAT_MRT3847_45279C.1
gcttatgagggtactagatggaagaagatcatgcaggctggacccaacgccatggcgccggcatgcgaaccgacagtacgcactataacaggcacaaccttacatgatgatgcctacttagcctcagaccccttatatgtgggccacatgcgcccagcctacagaccactcggcggctacttcgcaacccaccagctgccgaagaggtccgtacccatctgcatcgcgtgattgcaacactggatcgacgaatattatctctgcacctgcttggcacacaccggcgaggtgggtttacttaaagtcattcggagcgcacacactcgttaatcggagggatatcggtttattgagtttactagccgtgcttgtgctgagagagacctttaaacatacaatggcaccattatg

SEQ ID NO: 82240 - DNA, 422 bp, Glycine max
  Clone ID: PAT_MRT3847_4527C.1
aaaccataagggccccaacggtttcaacccaaaaaaggaaaaatttcccgcccttggcccttttccccttttaaaaaaaccccccttaaaaaagggggggccgtgggcccaaaactttgcccctagttcatttcacaggggggaaccttaaaaggggggggggaaaaccgggcccatttttctccccaaaaaatggaaaatttggccgctgggccttgccaaaaggtcccaaatttttaaattttgcaattcccaaaaaggggtttaaagggaaaccgggggggggtgtgaaaaaaaaaccccggaaatcccttaggaattttctgacccttagcaagggccctttcaaaaccgccaaccttggaaaaccactgccctgggggggcatccttttgggcctccaacacaccccggaaaccggg

SEQ ID NO: 82241 - DNA, 762 bp, Glycine max
  Clone ID: PAT_MRT3847_45280C.1
aaaattcattacattgataaaacacaattcaaaagatcaatgttccacttcatgcaaagacatttccaaaatatgtgtaggtagaggggttttacaggatcgtcctgagaccaaatgagcagctgaccacatgatgcagctatgtttgctattcagctgctcatctgttctcaggtcgcccttgttggactgtccaactcctactgattgcggatgcacttgccacaaatgaaaatcaaagcgaggggaaaagaatgtagagtgtgactacgattgcatgcatgtgatttaggtaattaagttacatgattgtctaattgtgtttatggaattgtatattttcagaccaggcacctgtgactaattataggtaccataccttaaaataagtccaactaagtccatgtctgttattttttagtgtcacaaatcacaatccattgccattggttttttaatttttcattgtctgttgtttaactaactctagctttttagctgcttcaagtacagattcctcaaagtggaaaatgttctttgaagtcaataaaaagagctttgatgatcatctgcattgtctaagttggataaactaattagagagaacttttgaactttgtctaccaaatatctgtcagtgtcatctgtcagttctgcaagctgaagtgttgaatccacgaggtgcttgttgcaaagttgtgatattaaaagacatctacgaagaagttcaagcaaaactctttttggcaaaaaaaaaaaaaa

SEQ ID NO: 82242 - DNA, 787 bp, Glycine max
  Clone ID: PAT_MRT3847_45281C.1
tccacaaatctcgcagatttcacgaacaaaaaaatggatcatgagcaagaagcaagtgaagaaaacaaattaagccaagattgtaaggagttaattctatctcttcctagagagaagggttggataacaccgtatctctatttattccaaggcttttggtactcatcaactgaaatccaagccataaacacttttcaaaaccaattccaagctaaggacaatgatgttgttattgctagtgttccaaaatcgggcaccacttggttgaaagcccttacctttgctattctccatcgccagtattttccttccttagagaaccacccattacttattttcaatccccatgaacttgtgcctccatttgaatttgtcatttatgatgaaattaatggccaaactcatgacctatccaaaatgcccgagccaagaatttttgggactcatgttccattcacttcattggccaaatcaattaaagagactgactgtaagatcatttatatttgtaggaatctatttgacacctttgtttctacttgggtttttgtcaacaaaattatgccaaagtttttgcctacattacctctagaggaagcttttgaaagatactgtgaagggataattggctttggtccatcttggaaccatatactagattattggaaagagagcattgctaggccgaagaaagttttgttcttgaagtatgaggaccttaaagaaaatgttcattttaatgtgaagaaaatagctgagttcttgggttgtcctttcactaaaagag

SEQ ID NO: 82243 - DNA, 343 bp, Glycine max
  unsure (1)..(343): unsure at all n locations
  Clone ID: PAT_MRT3847_45282C.1
ttgtttttttttttntggggcgaaacgataatgaagggatgatgttcagcccatanccaaaactgttgtacatctatttcnaagggaaaaagaataatcttaagagaaaaaacaaggtccttgattctcaaagcactccttttttctttttacgggggaatattggtctggaggtctctaccaacagaaattagactcccccgaatttaaaccagtttttattgctagcaaaaacaaaaagtcaaaggttttcccccttaaattaatggcgccggtaacaacattttttacggcccatcatatgggagatcaaggctgagcttttcagattgatgaaatgtca

SEQ ID NO: 82244 - DNA, 555 bp, Glycine max
  unsure (1)..(555): unsure at all n locations
  Clone ID: PAT_MRT3847_45283C.1
gccttcttttccttgtctagcctcttgtgtgatgaagtaggagaagctggcttctttgaagacccagatgagaaccctggcattttttactctcttgataacccatgtttcgttttggaggatgaagagctatatattgaatatttgttcaaacaagaaacgggatttggatcccagaatcatcacttgtttgcctctgatgatcattctaacagcagacactggttacgaagtgcccgtgttgatgccattgactggattttcgatacacaagcgaaatttgggttcaaagttgagacagcctatttatcagtgacttattttgatcggtttctatcagagcgttccatcgatgaatccaaaccttgggctattcggttattatccgtggcatgtttatctctagcagcaaagatggaagagcaaaatgtngctcctctatctgagtatccaatagaagattatcgctntgagaataaagtaattaagaacatggaactgatgattttgagtaccttggattggaaaatggatcagcaactccttgtgcctatg

SEQ ID NO: 82245 - DNA, 1430 bp, Glycine max
  Clone ID: PAT_MRT3847_45284C.1
cacacagtcaaactcctcgttgagttgacgagtaagactaacaacaaactaaacgacgactctcataccatacatgtaacgtgcttgatcttcatcttcgggttcatcttcatcctcttcttcttcttcttctgccaatttcgtataaataacatggcgacaattcctatcacctacaaccatgcttggaccttctctcatcctcatcatgcactttcccgcttcctttcaccctgcaatttctctaggatcacattttctcgcagaaaatatggtgttggtggccctgccccgtcttctccactctctcattttcgcgtattttgccaatccaagacagagatattggagataagaaagtgctccccttttcttgaaagttcattacttcttggtaatggtggtgtggcctcagatgagtggaaagcagttcctgatatttggagatcttctgcggagaagtatggtaataatgtagccttagtagatccatatcatgatcctcctacaactatgacgtatacacagttggagcaggcaattctggattttgcagaaggtttgagagttattggggtaagacctgatgagaagcttgcactttttgcagataattcatgtcgctggcttgtagcagatcaaggtatgatggcaagtggggcaatcaatgtggtaaggggttcaaggtcatcaattgaagaactattgcaaatatacaaccactctgaaagtgttgcactagttgtggataaccctgaaatgtttaaccgggttgcaaaaacattttattcaaggactagcatgagatttattattttgctttggggagaaaaagcagagctggttggtcaagaaaacaagcatgtgccagtgtttactttcatggaagtcatacatttgggacgacagagtcgcagggcattatctaatgctcatgatgctggtacttatatttatgaagcaataaacactgatagcattgctactcttgtatacactagtggaactactggaaatccgaaaggtgttatgctaacccatcagaatcttttgcatcagataaaaaacttaggggatattgtacctgctgaagttggggatagatttctaagcatgctgccttcctggcatgcatatgaaagagcttgtgagtatttcattttctcgtgcggtattgaacaagtatacacaactgtgagaaacttgaaggaggatttgggacattatcaaccacattacttgatttctgttcctttagtttatgaaactttatatagtgggatccagaagcagatatctacaagctcccttgttagaaagcttggtgcactcacattcataagggtcagcttaaggtacatggagtgtaagcgtatttatgagggtaaatgtctaacaaaggatcagaagccaccgtactacctccattc

SEQ ID NO: 82246 - DNA, 1933 bp, Glycine max
  unsure (1)..(1933): unsure at all n locations
  Clone ID: PAT_MRT3847_45285C.1
catttttcaataacaagagagagagagagaggcgtagttcacttcacttcaccactctcgcaacttcaattcttcattcttcttctctctctttgacaggtgtcaacaattctcctgtctcgttccgtctcccgaatccgtacgattttctttgagggtttgatcgcgccgatgtctgtttaccacgaaatcggaggctcttcatccatcatcggcttccgatcctgcttcaccaaccgcgccaggcttcgctgtcccgctaagatacgctttcgcttttgagggttttttttttcttttttttttttcctctcacacatgaaatagtaataatcgcacgaggtttcctttccactcaaattaacaaaaaaaaactgctagattctgaagcaagcgttgtgttgtgttttattttcgattccatggccaaagctgttggagttcggttccaccctactggtgttgaattagttgtgtactttctgaagaggaaagtgatggcaaaaaaaatctgtgatggtttcattgctgaacttgacatatacaagtatgctccttggggtctcccagataagtcttgtctgagaactggagaattggaatgggacattttctaaccacctagaaagaaatatgaattatgggtttagctgattctgtgcattgaaatttggcaactcaagttccgcgagtgattgtgtatatgtgtttttattttttaattcgtctcgaggataaagacactgatatttcacacgggtaaatcgcctcgtggcgaaagaactgattgggttatgcatgagcataggcttgaagataaggacctcgctgacaaagggattgctcaggattcctatgtagtctgcaaggtattccaaaaggaaggtcttggtcccgggaagggaacacactatgcgagaccatttaatgaggaagagtgggacgatgaagaaattggaataccttgtgctgctttgactgcacaagttcccaccttgcctattacatctgatggttctgttgcaaatgacaatcatctccctgctagtggatgtattgggtcagcatccacatcatgtctatcaggatcagtgccttctctgggcacagtaaatcctactggtccaaatgatcaagctgttaatgatgatattttaccaatgcttcatatttttaatgatgacaaatggtttgaggagatttataatcctggtcaggaaaatattgttgaaggtgcaccaccttcagatgatttttttgcgggcttggaagactactttgctggtttctcctctggccagaatacaggtgatgttgggaactctgatgacttggacttcttagagttgaatgacctagacaccccattattctatccgaccacacaaccttgaagttaataagagtcgcaataaaggggttgttttggttatgacttacgactgacctttggcaactagctagaggacaatttaaattattgttttttttttcttattctgtgctttgaacattgactctcaagtcccgtgagtgattgtgtgtatatgtgcttgtttttttcattttagaacttccttctcataacgaaaaaaaaaaaaaaaaaaaaaaaaaaaaaaaaaaaaaaaaaaaaaaaaaaaaaaaaaaaaaaaaaaaaaaaaaaaaggaccattcataaccctaatttagcatagtgtgactctttggataattttctctttaagcagttccaaaattaagcttctgtcctaaactctaattcttttatgaactatatttctcttttacgttcttttatttactttctccaaattggtgcctccgttaatggttagtctccgnagaatttttgttccttttctcttcgtcctttttgaaaaccggatctcttaacgtcctttggttgcttgccctttatgagggtttacttttt

SEQ ID NO: 82247 - DNA, 275 bp, Glycine max
  Clone ID: PAT_MRT3847_45286C.1
ttttacaagggacctgcacctcgaccttatgcgcatccatgtccaccaccgcctccgtatgtttacaagtgtgctgcacgtacacgatatgtttatgcatgcccaccaccgccacctaggtatgttgataagtaacctccacctgcgccttatgtgtatccatctccaccaccacctacgtgatgtatacaagaccccaccacctccgccatatgtttatgcatacccaccgacaccacctctatatgttgacaagaccgcaccaactgtggcac

SEQ ID NO: 82248 - DNA, 959 bp, Glycine max
  Clone ID: PAT_MRT3847_45287C.1
gatcatttgttaagaaagatgaaataaaagatatttcttcaaattatatggtttctcagacttacagcaatacgaaagacggactagatctggagaaaaacacagaacataaggatcaagtgcatgtcaacctgcatagctccttttatgatactgatccgaatgtttttgatgtccatgtcattaacgataacataaaactaagggaagagcaaaatgaaaagttaagtatctcttcattgagtactgttacaaatgaactcacaaatagatatcttgaatttggaggtcaaacagtacagagcagtgatgtattaagtaatcgccgaaggacagataagccagaaaatggtaatggtgttgatggccccaccagtcacttatctatgttctcaaactcaagatgcagaactttgtctttagattctggaagtgattcttcaagtgcagttgaaaatgaaaagttaaagattggcaatgagattgaaattcttggagaaaggttgaggatggtgaaacatgaaaaggaaaaattgtctttcttttcagagaacggagaaagtgaaaagggccagcttccttgcccccttcctcatctaagcttaaaatggttcactatgctgctgccatatgagacaaatgacaaagatttgcttaccattgacacggctctccaaatacaattttagattttggacagaacaaggtgagcttggggaagagacgctgccaaagtgtgacaatggagacatgtgaaagcagttaaatcatgttaagttactcgtttaagtgccacgaagtttgtgcctaggcaacttgtaaatggcaaccacctttggtagctactagaatttagcagtacttatttttttgttatgttttttagtatgtaaataaaccttatcataatcttctaggctaaatatgtagttaaaataaagtattattttgaagcgtaa

SEQ ID NO: 82249 - DNA, 518 bp, Glycine max
  Clone ID: PAT_MRT3847_45288C.1
agataaaattcactttcttcacaaccagagacggcgtacatagaaccctggaccgtactgattatgcactattgaccgtttaagtgggccgttaccacaattgaagattgaatctgacggtatgagctaactgtcaaacggagcactatacccaccgggcgcgtgttgagagagcaataccctcacttgctgcagggtccactttgattggaaccgtctgcaccgccagcagttataagaccccatgccgggggatggagcatgatgaagctccatacgggtggtgaccttcaagacgtcaccacggctaacattgaggtggtaggtcagacattgttgtggcttcgtgcctggatcggccgaagcactgtttggaggagcatcgtcaggaacaacaagcgaggccaccactcacccatcggatacggagatgtctctgtcgcagaccggccatgagggtctgacgtctgacacccttgggcgcgtactagaagggactgagacgcacctgcgccgca

SEQ ID NO: 82250 - DNA, 216 bp, Glycine max
  Clone ID: PAT_MRT3847_45289C.1
aagaacagcggctgttacggctttggctgctctaacgcaatcagcaaaagcagctacgtttactttacaagcacacggaccacaccatacccatgtacaaactgtgaccgacagtgccataccatccgcgatgaaagcattgcacaaggaacccgccacagatatctggactcgcatattcaagtacttaaaagaacgctaacttacctatgatat

SEQ ID NO: 82251 - DNA, 208 bp, Glycine max
  Clone ID: PAT_MRT3847_4528C.1
aatgacgtacaatctcggactgaaggccgctacgatgacctgcgatgcatgcgtccgtttgaagcactactgcctcagcccttgtgagaacaggccgggaggatctgaatgtctgatgaagggcccgacatatgttcgttgcccaataggcctattttggaacagcatggagattcgctctgtggggtggtagtgcctccactcaacc

SEQ ID NO: 82252 - DNA, 280 bp, Glycine max
  Clone ID: PAT_MRT3847_45290C.1
ttcaaacatctcaacttctatcttctgtaaatatcacgaatcacaatacatgttaataaataccagaacacaacactctcacttcaacactcaacaccttcactatctaccgtttccacatctcacatacaactcaataaatgaattgaaaaactcgattctacagcttacaacataggaactcaaagaacgaatcgatttctcgaagccgctctcaaaatgtcgtcgtgcactccttcactttctttccccttacgtcctcattatcacttctgtcaat

SEQ ID NO: 82253 - DNA, 1357 bp, Glycine max
  unsure (1)..(1357): unsure at all n locations
  Clone ID: PAT_MRT3847_45291C.1
aataatacacgttgttattgtttgaactccacccactcacgctcgttcctttcaaccctagaaattgcaataggagggatgcacagatggatggtggtggcgggtccccggcacaagatgagtcaatggatgcatttactagtgctcaacaaagaattgataattacttaacccaaatgaaggcgacagcagagagagaaggtactcctctaatggcagatggcaagcccgtggtgtgaatgagttgagaagttttacacgcttaagctcaattccattactctatggcgtccggtcgtttgttgcccctcttaaaccctagcaggttgggtttcgattcgtgaacgaacaaaagctctcattccagaccggtgaacgacacgctcttgaaaggagaaattgtatgaatggattctcaggcaacaacaagaaggatcaaaggtggccaccattgatgttgttacccatttgcaggtatggacttaaaagatgatgctgttaagggcatagtcccttgggatgggactctctcttcatttgatttttccctttctgctcatacattttctgacaagtggaaaaggttcaatccttcctttcctgcatggcagtggatcacatgtccaaaacaacatcatttggttgcttctcataaggtggaaggatacttatccctggagaacatgtgccatatcaaatcaagtcaggaacaagagagtgatagaagtctcacatggaaagaagagtccaacatctcacagagagaagagccctttgataaagcaactttagtatgtccagagcatgaagtaaaccactatgattttcatattgtctacagtgcttcatatagagttccagtcttgtacttccgttcgtaccgtagtgatgggcaacttttgccgtttaatgaaattgaaaaggaccttcctggtcactctgcaaagttacggtcagaatccaaatggacatttataactcacgaggaacatccatatttgaacaggccatggtacaaattacatccatgtgggacaagtgactggatgaagcttctctttcatagtgactcatctttgaacaaaaatggttttgttattgaacagtatttgatttcctggttctcggtcattggacaagttgttggtcttaaaattcctttggaaatgctggatactgtagtttctaatgattcttagacgcttattcatacttacagaaaaataaaataaagaaaaagaggacaaggaaaaagtttctgcacgccccattcaaaaaaaaaaaaaaaaaaaaaaaaaannnnnnnaannnnnnnaannnnnnannaaaaaaaaaaaaaaaaaaaaaaaggggcggc

SEQ ID NO: 82254 - DNA, 846 bp, Glycine max
  Clone ID: PAT_MRT3847_45292C.1
aataatacacgttgttattgtttgaactccacccactcacgctcgttcctttcaaccctagaaattgcaataggagaggtatggacttacaaggtgctgttaaggacataattgcttgggatggtactctctcttcaagtgatttttccctttctgctcatacattttctgagaagtggaaaaggttcaatccttcctttcctccatggcagtggatcccatgtttaaaacatcatttggttgcttctcataaggtggaaggatacttatccctggagaacatgtgccatatcaaatcaagtgaggaagaagagagtgatagaagtctgacatggaaagaagagagcaacatctcacagagagaagagccctttgataatgcagctttagtatgtccagagcatgaagtaaaccagtacgattttcatatcgtctacagtgctacatatagagttccagtcttgtacttccgttcatatcatggtgatgggcaacttttgccgtttgatgaaattgaaaaggaccttcctggtcactctgcgaagttacgatcagaatccagatggacatttatatctcatgaggaacatccatatttgaacaggccatggtacaaattacatccatgtgggacaagtgactggatgaagcttctcttcaatggtgattcatctttgaataaaaaggattttgttattgaacaatatctggtttcctggttctcggccattgggctagtcgtccgtcttaaaatgcctttggaaatgctggaaactgtagtttctaacaattcttagacgcttattcatacttacagaaaataaaataaaggaaaagaggacaggg

SEQ ID NO: 82255 - DNA, 460 bp, Glycine max
  Clone ID: PAT_MRT3847_45293C.1
ggttgtgcttgaccacacgaaagcatttcaggtcacaatcaatcaaatactagcaaaggaaacattcctagaaatagcaaatctgaataagactgtttttctcaacaaagattctggtcttgagacactacaatgtgctgatcttacaaaattgagaactgttcttgcatttcaaagccttaaaaatgtatttttgtatcttggatatactgttgagattaatggtcatagaaatggagattatatagcagaagatgtgaagaaatttcatatttgccataaatcaatgtgttctgagaagcagcctgactattgcctcattcaatgtggtgcggttcttgacaagacaactggcgctaaagccagtaatatctgtccggatgattactacaggaacaaaactgcctcttttgaaaagttggctgaaggaaggggaaactctgttaaaaataaccatcaa

SEQ ID NO: 82256 - DNA, 1565 bp, Glycine max
  Clone ID: PAT_MRT3847_45294C.1
tacgggtgcgagaagacgacagaaggggatagcaagctctgaaaagaagagagagagagagagaagtgcatagcgtgatagagttttttgttgtctatacatcttccttcgttgtttgggttcgttcgccttcactcttcgacattcatattattcatcgtagactggcgcgttcgaagaaaatctgaatttatcgagtaaggcgcaagaaagtggtttggaatgcccgaagactaatgatgggagggcggctcacgggaatgggtggaatacggaaattccttctatttgtaggagagtaacggcttcaggccctgggtgtaaattgctgttcgatgtctgaagtcctatccttcgttctcctcatctgatcaaaacttgctctggggaaatctgggaaagctgtttatttcaacaacccaatgtggccaggagaagcccattcaatcaaagtagaaaagatcttatacaaggaaaagtcggagtaccaagaggacttggatttatcgtcttcaatgtatgggagggggtttggactagatgggatatttcaatttcctcagatgggtgaatgtgtttactaggtgatgatagcccatcttctcctctggacgattcatttgcccaaaaatgttttactcgtcggtggcggagatggcggtgtacttattgaaatcgctaagtatgactttgtggagaatatggatatttacgagattgatatgattagtattgttgtgtctaggaagtttgttctaccaattgtgtgtgttgttgaggcttctcgagtgcatctgcatgttggtaatgctgttgattttcttaaatctgcttgtgaagggaagtatgatgccataattgttgattcctcagatcccgtgggtcctgcccaggaacttgttgagaaacctttttttgatacaatagctagggcactaaggcctggcggagttctttgtaatatggcagaaagtatgtggcttcatacacaccttattcaagatatgatctctatttgccgagaaacattcaaaggttctgtatgttatgcttgggccagtgtaccaacatatcctagtggtgtgataggctttcttctctgtgcaacggaagggccgcctgttgattttgtgaatcctatcaatcccattgaaaagttggaaggtgctaatgagcacaaaagagaacttcaattctacaattcagagatgcactcagctgcttttgcgttgcctgcgttcctgaagagagaagtgagcctgctgcgtgatctctcccttcagtagcattgcaatgatgattgctattgtaacctctaaataagctatattgactacattgtcattgacaagtgtgggagaaataggaatcttgtgtgattaattttaggttttcccattctgtgtgtggagtctgattagctatgttaatcttagtcgatttcggatggctttctcttgtaagacgcgtattgccaattattaaataatacatggaaataaattgcgatgcgaaagtaggtttttagaaatttgatttcataatgaaaacagctgtgtatgtcc

SEQ ID NO: 82257 - DNA, 253 bp, Glycine max
  unsure (1)..(253): unsure at all n locations
  Clone ID: PAT_MRT3847_45295C.1
gaggattcaagtganattccaaccatcaatcttaacatagnagngnncnctctgnatttacaagattacatgcaagaaaatatggaacttcaaggaggtgaaatgtcaaaggcattggttgctttgaatccacaagcngcttccatnccnatgcccaagctaaagaatgtgggccgattacgancanagcnttgtgtatacctngtcgaacagctatgcgggggagctttccnctgaatggcacctattncca

SEQ ID NO: 82258 - DNA, 242 bp, Glycine max
  Clone ID: PAT_MRT3847_45296C.1
catgcctgcaggtttagcctatcaactctgtttttttcccacagtaagtgatccttacagttactttttgtttggtagaaggacaagataagctggtttattattatttttttttcattgcttctgcaggagagaataccatgagttctcttggtcggttggtgatgctcatatggttatttgtggttttgatcctcacttccagctacactgcaagtttaacatccatactcacagtgcag

SEQ ID NO: 82259 - DNA, 577 bp, Glycine max
  Clone ID: PAT_MRT3847_45297C.1
atttgccgagaaacattcaaaggttctgtatgttaggcttgggccagtgtaccaacatatcctagtggtgtgataggctttcttctctgtgcaacagaagggccgcctgttgattttgtgaatcctatcaatcccattgaaaagttggaaggtgctaatgagcacaaaagagaacttcgattctacaattcagagatgcactcagctgcttttgcgttgcctgcgttcttgaagagagaagtgagtgtgctccgtgatctctcccttcagtagcaatgcatgatgattgcctattgtaacccctaaataagaaattttgacgacatggtcattgacaagtgtgggataaataggaatctggtgtgattaattttaggtttaccaattatgtgtgttgtggagtctgattagctaggttaatcttagtcgatttcagatggctttctcatatctagtttacaatgctatattatttaggttttttaagcacatactcctaagacgcgcattatcaattattaaataatacatggaaagaatttgcgatgggaatgtaggtttttagaaatgctataaa

SEQ ID NO: 82260 - DNA, 301 bp, Glycine max
  unsure (1)..(301): unsure at all n locations
  Clone ID: PAT_MRT3847_45298C.1
ctcgcaagcaaaaagaaagaatcccaggcgaggagaaagatggaggggaaggagcangatgtgtcnttnggaagngacaagnttcccnggaaancagcngnttgggacgncgncgcanagccaagangacggacaaggnntaccaggagccggcgcccggccgccgctggttgacccganggagtttacgtncatggncgttttacagagccagggntaccagantttgtggcnatttcctgtttctcctncnnaacngttttaacngtnatggaatncnccggggntattntanttnnat

SEQ ID NO: 82261 - DNA, 320 bp, Glycine max
  Clone ID: PAT_MRT3847_45299C.1
catcactgtatgacgtcctccttctttggggggggggggggggggggggggggggggggggggggggggggaaataaaagccggtaaaaaagttggaaccagtaaagatgtaagccgagatagataggagagattaaaagagaggtcaaggagacaacacaaaaccaaatagtaaaacttacaagagagcctaaacgaagagaagtgagatataaaggaataagcacgacccgttatgttaaatgtagggtatgtgtagggcacctttaaaggaggcaaaagagtgccatgatgccccatgggtgggaggaaaaaggggg

SEQ ID NO: 82262 - DNA, 518 bp, Glycine max
  Clone ID: PAT_MRT3847_4529C.1
gagccaagtgtttttaacttcaatattattatttttttggataaaatgcattttagattttccaatatttgatgaaaattgggtttgattccagtgttttgaaaataatgattttggtctttctactattagaatagggtggttttgtccttgacccttttagttcattttaacttaatgaggaacgaaatctgccacattttagaaatacaagaagaaaaatgtaagtactaaaatttatgtagtgttttaaattaaaagataagttgcattgaaaattaaatttttatcactgaggtttatgtggtttaaatgtaaagtaaaagattatattttattagatgaagattatttgaatagatgcattagaagttgtttttatttcaactttcaagagaacttatttgttataattggtgacaattttcactataaatagagaagaaaattattgaagaaataacacacatgtagagaaagtgcatgagaagaggagaaattgtgaaacaaagtcactt

SEQ ID NO: 82263 - DNA, 479 bp, Glycine max
  unsure (1)..(479): unsure at all n locations
  Clone ID: PAT_MRT3847_452C.1
aannnnaaactagtttataatcatattggtaggccgacacatattgggactgagatatgtgctgacgttatagaaccgaagtaggggcccttcccatactcagataatgtacacgttacagtaaagaagaaacgccaaaaatctataagtcgggagaaccacactaactgatcttnaatatcaccctaactggagcatgtctatccttgatgccaaccgtggtcatatcaagacgtcgcgaattatgtcatgaaaattcagcgnccngagcatttgatcttcggctatgagacaagattcgctgcagagtattctctatgatatacagacgacccaccacttgatacattggaaattgggttccacactgagtcaggaacgagcacatgacccctgaagacctgtgacagagaaagtgacccttgtggttcttgaggggattgatcaccctgaacctgatctgcaagacgttttaaaag

SEQ ID NO: 82264 - DNA, 433 bp, Glycine max
  unsure (1)..(433): unsure at all n locations
  Clone ID: PAT_MRT3847_45300C.1
acaagtcaaagcaacgaaatgnnaaaaaggcaaagggaattgactcaaaagcgccaaccagttttgtagaatcaccacttttgacttctggtggagacatctaatattggtgtcaatttatgagaaagaaacaatttacttttctatacaatacaagagaggattcaagaatctaaacatacaatgtgaagtttatcattatcttaagttcaagcaaggggagggctgagactgggaggtgatgtacaatgatgaggaaggaggatcaaatgtggcataagattgcttgccatgaagtgtattcctttttttttatcctttgaatttaatagttttatgttgcgtttcctgctctgtattattccatattagaattggttcaatgttttggtctttccgggttactttaacgagccaaaaaagtttgtaattc

SEQ ID NO: 82265 - DNA, 1943 bp, Glycine max
  Clone ID: PAT_MRT3847_45301C.1
gcaggagtccgttgagcgtccgcttatgagtacgaatttgaagtttaaaactgtttactgtttcaggcgttgataacatttctttatacattaacctcctattatttttgtttggttcaaagaaaaaaaataaaaactagaactgtctattctgtttgctgtttcaatgatttctgtattcgcaactgagtatgttcttttgtatttttttcgaagtggaaaatgattaaatttatgctccctttttggtagatagtaaagttaggatttttatttcagcaatgtacgttcagctgttcggttgtaatgacccgcagggtgtttgtttgttgatggcttttatctttttttttgctctcatgtcatttcttatgtgcgtgccctgagcatctattctgtattactttgattcccttgaaatctgatctggcttatctttttttttttcttcttttgggaccaattttcacccactatttccaccctccacttcaaatttacttgctttgtgtttgtgagtgcctgttatcaaatctccaaaagctcaaagaaactggtattgtgttcggcataaggaattaggattgatttcagggtgtattctgtacctttttcatttttatctttgttttttcatttgtgctttctgaagagctttggagatgtatgatatagaattgtaggtttgtgttgttagggttgagaaaaatgggatctcagggtggggcagtgcaagagccaaagactactacccctttggctaggcaagggtccttgtataatctgacccttgatgaggtgcataaccaacttgggaatttggggaagccacttggcagcatgaatcttgatgagttgctgaagagtgtgtggagtgctgaagctggtggtggtggtgaggcttctggctgggactttggtgttggtgatgctactaacatgccgcatggcaaggctgctgcttccggctcctctctgaatcctcaggggagcctaactttgtctagggatcttagcaggaaaactgttgatgaggtttggaaagatatgcaactgaagaaggtcactaatagggataaaaaaatccaggaaaggcaagctacactgggtgagatgactctggaggacttcttggtgaaggctggagtggttgctgaagctttgcctaccaagggtggggctatgtcaggggtcgattcaaatggggctttctcacaacatggccattggttgcaataccagccgctccctgctgcgacgcagctcccgaatgtgagggggggtgatggggcggcccccgccattcagcagcctttccaggttggagtgaatctggttttggatgcagcatactctccgctcgtgcgtacgataatggggacgttatcggatacacaaactccaggtcgaaaaaggggtgcctctggtgttgtggtggagaaaactgtggagaggaggcagaagaggatgattaaaaatagggaatctgctgctcggtcacgggcaagaagacaggcatacacacaagaactggagattaaagtttcacgattagaagaggagaatgaaaggcttagaagactaaatgaaatggagagggcattgccatctgtgccaccacctgagcctaagccaaagcaacagcttcgcagaactagttcagccatcttttgatatcttaattgcaatgaattcctaattcttgcccatgctatcacatcacatagctctcatgtgcattatactcccgcctcttcaagtttggttatagatgggaggctattgtttgtgatgctatcagttctccccagcttgctctattctactaatgtttacctcttatgtatattttgattacaacttaagctgctctataaatatacttactctaattttgggcccatttgtgggaattatgaaattataagtcttactttttattt

SEQ ID NO: 82266 - DNA, 304 bp, Glycine max
  unsure (1)..(304): unsure at all n locations
  Clone ID: PAT_MRT3847_45302C.1
tggctatcatcacagaagaaccagaagcagaagcagactcacactgcacagatcccaaaaccccgcaaacccaaantccaaaaccccttcttctntnccccccaacagcaancacaaccccttntcnttntggttntacttnaccntntccgtntncctcntnactctnttntttgtcttgactccagcctntngccccaagaccccaagactggtnctcacctcntncgctctncgccaccactatccaaggccgcaccatcaaggtccanacacattcnaacgaagcccccatccaagtctt

SEQ ID NO: 82267 - DNA, 648 bp, Glycine max
  Clone ID: PAT_MRT3847_45303C.1
aaaacagcgcatgtaccattaaactgtaaattttgtttaatacatataactaagagatcctcatcattatcaaacgaaattaaaccatcctcaaatcctattcctagtaccaaatgaaacaccttttgaaactcactatatcaactttaagccctacataggtcatgaacagtccaaatattcatcagggcagtctccaatccacaaggaggaatcaaacaaaaacggtgaccacaaaccaaacaccaccgtccaccagtgatgtgtaactaacgtagcacccattgttcaatccctctcacaaaaggtaaaaagaaagaagataaatgaaaggtcaatttttttagtaacttaataaaagattaaaaaatgcacatactacaactaataatttgattgacacatagtcacatacctagcccaactggtgactttcacttttaccacgtgaatttgtcacatcatctttcacatgccacatcaccaaaaatgttaatgaaagcggaagagacttaataataggattaaattgcctgaacatttacagaataatgaactaacttgatcatttcatggcatagggactaaattaagggcaagtgtaaagtaaaggatcgaaattggccatttatcctgatttaatggaaa

SEQ ID NO: 82268 - DNA, 448 bp, Glycine max
  Clone ID: PAT_MRT3847_45304C.1
gaagggaggatgcagattacaaacgcagaagggatgatggagattacagacatgagagagggaagagcgtggacacgacaggagatgattattggtgtcactatatcctaatgctaagcacagaacctttgaacggctatcttgtatgtcccttttgcttcaatttttctggtggagcaagatattgatatgttttagaacaaggtttttgaagtattctacatttactacttagaacatatttaattatttttacatagcttcagaaaacttgttttcatattccgtgcacaacagcacagttaagttttcatgttcagctaattgttaaaatggtgtttgacttaactaacgcatctatattcgcgttatatgggatgtgtagtagtgtagttcataagaagggaaactttatgtactaactactacagtagacaagtgggtaaac

SEQ ID NO: 82269 - DNA, 242 bp, Glycine max
  Clone ID: PAT_MRT3847_45305C.1
gatacctcaggtcatgcagggctacccgatgaggttaagcgtatcattcagctaaaaaaaaaataaaaacaccaattaatcaagcggcctctctaaacgatccaagcttaattacacgtgcatgcaacgtagttgctcttctataatggcaacgaaaatcaattcacttgacgccgaattacatcgtagaaactggctaaacattgacgttacccaacataatcggcttgcagcatatatac

SEQ ID NO: 82270 - DNA, 151 bp, Glycine max
  unsure (1)..(151): unsure at all n locations
  Clone ID: PAT_MRT3847_45306C.1
cgaactgtctgaaggtcctgtcacagccaagancggctgaatgttgagtaggattgaaagggtgtgacccagatcagcgagtgaagtggtccggactcctcaaactatatggcgaaacagctgcagcacatctacgagccatgccgaaaac

SEQ ID NO: 82271 - DNA, 498 bp, Glycine max
  Clone ID: PAT_MRT3847_45307C.1
tggagattgagggagagaatcatgtccctctttatttttacattataatattctcactgggtaccatatatttctatgatgccattaaggaaactagcgagatgtggagaacacaacgttcattttgctttcatcatgacatttcgtttttgttttgacccggcgaagttccaatgagtgaggtgcagttggaaaacaatttggagaaagttggaaagatgtgggcaaagaagaatcatatattacaaacaataccattatagtatgctcttttttctctccccccccccccccgtttgtcatcctgcaaaacagtgcaatttatggaaggaaatcaaggaattgaattgacccttccatgatatttacaatcattttagtttggtagataaattcattaaataaataagtttatgaactaaaatgttgattctttttttgatctttcattcttgtcttgttttggatctgctggttgcaacaagggcatcaacaaca

SEQ ID NO: 82272 - DNA, 482 bp, Glycine max
  Clone ID: PAT_MRT3847_45308C.1
cccgaaaaagttaaggtttttttattaaaataaaaccccatggccttttttaactgtgggggggggaaaaaaccccatttcctttatccccatccataccctattaaaaagaccaaaccttcccaggtttttttccccacccgggtattccgatcaaactgggccgggtcaactaaaatccgaccccgccccgaaaacaaccccggttcattttttcggggaactacttaaatcccccccgtccatcccggggggtccacccctgcccccaccaccaaaggcccttccttttcctaaaagggccatgggttgggctccccctatttttggggggggagctccccgttgccgccccaggaacttagggtccaacacccccggacaggggccggaaataaaacagggcccccccggaaaaaaggcgcctccggtggggggggatggatttaaccccccctttgcccttggggccgggatcgggg

SEQ ID NO: 82273 - DNA, 255 bp, Glycine max
  Clone ID: PAT_MRT3847_45309C.1
cttttattcttttcttcccctctcctcgcagtgtccttgttgctgacatcaatttccctttatatctttctggcctatgttctggcttctcattctatcctatctgccgctgtcgatgaccattagctagtgattaggttaatggttattgattagcttcttaatttcttcattgattgatcgtcctcaagctgttaataagagatcaagtttgcagcccttacatacagttctctccaaagtaccctttgtttc

SEQ ID NO: 82274 - DNA, 347 bp, Glycine max
  Clone ID: PAT_MRT3847_4530C.1
gaacctctctactagaagacgatggagtaagaggagagcacgggacagcataagcaagcgatgctcgtcactatggagctcgataacatgataaaggtaccggtgtgacttaaacgcctatcgtctacttaacgtgagcgtcaccctcttgcaaggcggttccaacgcccacctatccgtctacaagattcttctgcggatactacccggcgccgattgggccgtcgccgataacctccatgcggcactccgtatgcttgccagctacagtgtctttcgagagcacctatccacctgataacggtactacttgctcactgaggtgggcagaacgctcgtcaccgatg

SEQ ID NO: 82275 - DNA, 593 bp, Glycine max
  unsure (1)..(593): unsure at all n locations
  Clone ID: PAT_MRT3847_45310C.1
tgttgtatttctggttgtttatgccactgttcttccccatccatcttctgactatttgcaggatgcaggatccatagtgaggtgctctttgggcgaatgtcatcacaggacacgaaaacttcaaaatgaaagcggcattggatgaacctcaagcaaacccacagaggcaaaagaataagagtgcaaagaagatagaagtaccaagcttttttagcaagttaggggaaagaatgaagattggaatggtaaacatgaaagaaaacgatgtaagtaactggagcacgcatggggaaaggacaagcgtttattttgagagggtatcgcagtttttgaactggacggacttgtttcccgaatggatagacgaggaggaagagaatgatgtgccatcatgtccagagatacctatgccggagtatgcagaatacggaagcatggacgtgatcgtggctaagctgccatgcaggtatcccgaagaagggtggaagagggacgttttccggttgcaagttcatcttatagttgcgaatctagccgtgaagaaggngaagaaggattggagagggaagacaagagtagttttttggagcaag

SEQ ID NO: 82276 - DNA, 232 bp, Glycine max
  Clone ID: PAT_MRT3847_45311C.1
gtctagctgcggtggtaactgtggttgcgtaagcgcctgcaactacaacaacggctacaaagactgcaatatgtacccagacttgagctacaccaattcaaccaccacctagaccttggtcataacattaacaccatttaaagctcaattcgataattctgaaataaatattccgggtgagaacaataactacaaatataaagctaactacacctacgacccctacgcttgc

SEQ ID NO: 82277 - DNA, 383 bp, Glycine max
  Clone ID: PAT_MRT3847_45312C.1
ggggagcgaggtgtccagggaggccagcagaaggagaaaaggcaggaaacaagtagagaaaaggagatatgatcaggtcaagcaaggacattaggggaaaactaattcattcacgcatgcatgcatacatgcattgcttcaacaaaatctattgaattcctatgatgccccattctaggatctaaggatacaagcaagaagctattttactgggactgactaagcattaccaagagactctggatgatccctatggagcacaaggggtcacagatggctgccatggagggacctcactggaccagtccctttgctggacctgggcaagaagctgagtgggccccattacttgatgatggatgagctctgtctacgcaacagca

SEQ ID NO: 82278 - DNA, 520 bp, Glycine max
  Clone ID: PAT_MRT3847_45313C.1
cccaaaaaatttttttttaaaaccaaaaacccaaaccctttttggaaacccccaaacggttaaaaaaaaaaaacccccccttggaaaaagggcctaaactggttttttccccagcaaaaaaaggggttttaaaaaaaattaaagcccccttcccctttccggttttaaaaaaaacataaaaaggttggggaaaccgggtgcctaaaaaggggggggggggggcaaaaccccagaaagggggttccttttttaaaaaacccaaagggcccgaagtgggggtttaatcctccaaaacgggggggaccttttgggtttttttgaaaaacaaacaaaggggggggttttttttttaaaaaaaaaaaaaccgaaactgggggccctggcccttccggtcccttaaaaaaggcttcaaaataaaaacggccttttaaaaaaaagggaaaaaacccttggaattttaaggcccacccccggaacttttgaggatccaaaggtttttgttcccagaaacctttttacc

SEQ ID NO: 82279 - DNA, 1110 bp, Glycine max
  Clone ID: PAT_MRT3847_45314C.1
ccacgcgtccggtcccaattgcatccttttcttcaggccacaacaactccttctactgcctctctctagctagttccttcttcttcttcaaaggtcttgcatccatccactccatttctctgttttgttttaattcttcttcaaaggcttttgttatcttatgttatcttaacaccatttcagatcccatataagaaaatggggcttcataattggatcaggaacttaaccaactgttttttccttttattttctttgatgtttctgttctggctttgaagattggggtggaatggggggtcacaaggtcctgaactttttctttcttcccttttgttttcatccaattctataaaattttgaaaagggactaagatggtagttaaaatagttgctactactatagcctataggctttgtttagatatattcctcttgaaaagttttagttttcctcaggtcctatatgcacaatctcgtaatttattctgcaaataccaataaaataggtttcttttacatgagatgaaacatccaatccaatctgaggaaaaagcaagattctgtactatataaaatcaaaggaagaaaagaggcctaattaagtagctttcagttgtggaatcatcatattgcagcgttgatggggcatttttcatctgcgttcaataggttggcaaagtcttttgcaacgaagaaagggaggagttctgatgaatgtaatggaagagaagcggcggtagcaatggcaaaggaagccaaaagaaatcacttcatgttgcatagctccggcacagttaatgttgatggttctaacaactttgcctcagttttctccaaaaaaggccagaaaggagtcaatcaggattgctgcattgtgtgggaagaatttggatgccaagaggacatgatcttctgcgggatttttgatgggcatgggccatggggtcactttgtggccaaaagagtacgaaagtcaatgccgccatctttgctatgcaactggcaggagacactttcccaaactccacttcattcagatgttgattttgatatagagacagagaaaagcaacaccgggttaacttgtggaagcattcatacttgaag

SEQ ID NO: 82280 - DNA, 2417 bp, Glycine max
  Clone ID: PAT_MRT3847_45315C.1
cgaccgtcgaccattttcctgctttttgttatgacagcaaactgagctaaagcagaagttgcgccatcccaactgccatccattcttttgctttatgttattacagcaaactgaactgaagcaagttccatccatgtctcggcttcaaaagtcaacaggtcagcagcaaatgtttcattccctacaccaaattctgtccccatacatgtcaagtgttgttgtatctgtgttattgtggcatgtcattgctgtgcttttggtttcaaatttggcctttgcttcaagccttgaggaaacaaatggacacccaaaacacaaaggtgaggtgatctatgcccacaatggagctgttgccactgatgaccgtagatgctcaaggattgggaaggatgttcttagagaaggagggcatgcagtggatgcagcagtggcttcttccctttgtttgggggttgtgagtcctgcttcaagtggccttggtggtggagcctttttgcttctcaggttgaataatggggtggcaaaggcttttgatatgagagaaactgctcctgctcttgcctccaaggatatgtatgctggaaatactactttgaaggccaaaggtggcctatctgtagcagttcctggagaacttgctggccttcatgaggcgtggaaacaacatgggaagcttccatggaaaagacttgtaaagccagctgagattctagcacgtagagggtttaaagtatcaccatacctccacaagcagatggaagaaacagagtcagatatattggaagacaagggtcttcgtagcatatttgccccaaatggaaaactcttaaagataggtggcatttgctacaataagaaactagccaagactctcagaacaatatcagagtctggtccaaaagccttttatgaaggattgattggtcttaatttagttaaagatgtccagaatgctggagggatattgagcatgaaagacctcaaaagttacactgttaaacagaaggaacccatatctaatgatgttcttggtctaaagctccttggcatgcctcccccttcaggtgggcatccaatgatgctactgctgaacattctagatcaatataaactcccttctggcctttctggtgcccttggtttccatcgagaaattgaagctttgaagcatgtatttgccgtgagaatgaatcttggtgaccctgattttgtaaatataactggggttctttctgatatgctttctcataggtttgctaacgtgttgaaaaatgacataaatgataataaaacttttggccccagtcattacggcagcaggtggaatcagatccatgatcatggtacaagtcatttaagtataatagatcctgagagaaatgccatttccatgactagcactgtgaatgcatattttggttcaaagatcctttcaccaagtacaggaatagtactgaacaatgaaatggatgatttttccatgcctagaaatgttaccaaggatgttccaccaccagctcctgccaatttcatcatgccaggaaagcggccactatcatccatgtcacccactattgcccttaaggatgggaagctaaaagctgtagtaggtgcaagtggaggtgctttcatcattggtggaactgcagaagttcttttgaatcacttcgttaaaggaatggatcctttttcttctgtaacagctccaagggtctatcatcagctactacctaacgtggttaattatgagaattggaccactttaggtgaacactttgaacttcctgctgatatcagggaagcccttaaaagtaagggtcatgtcctaaagggccttgccggtgggactatttgccaatttattgttctagacaattctgtgccgtccagacaaaataaagggattggaaatggaaagcttgtggcagtgagtgacccaagaaagggtggttttcctgcaggcttttgagataattcattgatgttgtgatatcttcatctcatctatgcaagttttctcctttgcatgattcttatactgcttgctgtattttattaatggggataaaaaatctatacaatttggcttctggttatctcaagtctctacaagtacaactactaccctgcttgttctcgtctattcaatttttcctttacatgattctcgtactgctaaatgctaattgtatttaaattaaataatgggaatgaaaaatctacccaattttcttctggttaccaatcaaattacaagaaaaatgatgaaggtctgaattaatttatactggagtggatattacacaaatagaagtaataaatgataatttctataaactctatcaaaataaaaggggaatgcatagaattaatctctaattttcacttatgaagaggatgtatcacttgatgactca

SEQ ID NO: 82281 - DNA, 250 bp, Glycine max
  Clone ID: PAT_MRT3847_45316C.1
tctttcatggttttcttctcatccaggacgtcatccttgccggatttaacattggggatggagggcttagaaaatggtctccccacaaaggtcctaagtaccaggctcagaaaaaattcgccgcccaaaatggtgcatagaggaaagccttgcaacggaatggggacctttttagtaacaacgggtcccccccgtataaagtaggagggcggttctaatgactatcttcggagtcaaacgagcttggact

SEQ ID NO: 82282 - DNA, 193 bp, Glycine max
  unsure (1)..(193): unsure at all n locations
  Clone ID: PAT_MRT3847_45317C.1
acgacggaaggggcgccacaacttncagtctcatttctcatttctcacattattattcacatctccatctagagctctctctctctctctcccaagagattcatcaacagagttgtgagtaatttgcgattgtgcaagtgagctatcaagagattnagaattcaatgggagagtgccagaaagagcttaatct

SEQ ID NO: 82283 - DNA, 414 bp, Glycine max
  Clone ID: PAT_MRT3847_45318C.1
cttttcttattgcttgttgcgttctccctcgttttcgcggccgtgtcggcctcttcggacggcggcaacgaggaaccgctgatcatgcaggtggtcgatggcggtgacgtccggctgggagcagagcaccactttttggagttcaagcgcaggttcgggaaggcgtacgattccgaggacgagcacgattacaggtacaaggtgttcaaggctaacatgcgccgcgcccgccgccaccagagtctggacccttcggcggctcacggcgttacgcgcttctccgatcttacgccgtcggagttccggaacaaggtgttgggtctgagaggtgtgaggttgcctttggacgcgaacaaggctcccattctccccactgataatcttccgagtgattttgattggagagatcacgga

SEQ ID NO: 82284 - DNA, 1329 bp, Glycine max
  Clone ID: PAT_MRT3847_45319C.1
ccacgcgtccggcaaacttcatacaaagaagaacacaacatgtcaggtccattttcattccacactgattcaaccacttgggtggctgacgttaagcaagcgacatctgtcccagtagtaatcttcgacaagccactgttaaatattacattcgcagatctattggctgcaacttcaaattttgataggggtacccttttggctgaaggaaaatttgggcctgtttatagaggttttctacctggtggtattcaagtagcagttaaagttctggtagttggatctactctgacagataaagaagctgcaagagagcttgagtatcttggtagaatcaagcaccccaatcttgttcctctaactggatactgtgtagctggggatcagaggattgccatatatgactacatggagaatggaaacttgcaaaatttgctttatgacttgccacttggagtactacaaaggccagatgattggagcacagatacatgggaagaagaagatgacagtaacgggattcggaatgcaggatcggaaagagtgctcacaacttggagatttcgccataaaatcgcactctaaggccagcagtgtttaacatctctgtgaatgatcggcggggagcatctcagatgcagaaatgttaaggccagcagtgtttatttggattataacttggagccaagattgtcagattttggactggctaagattttcgggagtggcttggatgaggagattgcactttgttcacctggttatgctccaccagagttttctcaaccagaattcgatgcctcagttccaaaatccgatgtgtactgttttggggttgttctctttgagctactaaccgggaagaagccggttggagatgattatcctgatgagaaagaagcctctttggttagttgggtcagaggactagtgagaaagaacaaagcttcaagggctatcgatccaaaaattcgcgatactggagcagaagtgcagatggaggaggcccttaaaattggttatctttgcactgctgaccttccttccaagcgaccgagcatgcagcaaatagttggacttcttaaagatattaaaccttctgctaattagcatgatgataacgaaatgttgttgtttcttttatatttatcacctttttttcttgccactggatgaggctcccatgcaaccatgaagcaaatgtaaagcagttgaattactaaaagtctgtttttcatgttttatcatgatgtcttatcattctactctcaatctctagtaggtgatttttttttgttgaatatatattcaccagaatttgatcttttg

SEQ ID NO: 82285 - DNA, 324 bp, Glycine max
  Clone ID: PAT_MRT3847_4531C.1
ctatacgagttcttgcgaaaacctaccaaacctatggctcactctattacgctacactttaatgggatggacctgaaacttcctttgtaaaacagattgatacacagcatcactgattagatttcatgtcttgcaattgcagtggcacccttcaatgtgaaactcatgtttaacagtatctccaactttcagaaacagaaccttaggatattgtttgataccgtccataataacgttggcatatcccgttaagtatgtaactagctggctgactacatttttatttatttatctaataaaatgtaccacctggatttcttgatt

SEQ ID NO: 82286 - DNA, 303 bp, Glycine max
  Clone ID: PAT_MRT3847_45320C.1
tttcccccaagttttacactaaaatataaatatccacccaaataaagtttgaagtaaaattgcctttacataccttggacaagggtggccctttaagggtaacaaataccccaataaaattgcccagtttcgcttatacaaaaaaccactcctacaagaaatctcgggcattcaatctattaacccatccttacattacccatcaagttttattgagttgcaagttaatgaaacttaacttggtccaaaatccaaatttttccccctgaaggggggggacctacatattacttccggggagct

SEQ ID NO: 82287 - DNA, 502 bp, Glycine max
  Clone ID: PAT_MRT3847_45321C.1
aattcggctcgagtggggatcagaggattgccatatatgactacatggagaatggaaacttgcaaaatttgctttatgacttgccacttggagtactacaaaggccagatgattggagcacagatacatgggaagaagaagatgacagtaacgggattcggaatgcaggatcggaaagagtgctcacaacttggagatttcgccataaaatcgcactcgggactgcccgagcattggcatttctgcatcatggatgctccccaccgatcattcacagagatgttaaggccagcagtgtttatttggattataacttggagccaagattgtcagattttggactggctaagattttcgggagtggcttggatgaggagattgcactttgttcacctggttatgctccaccagagttttctcaaccagaattcgatgcctcagttccaaaatccgatgtgtactgttttggggttgttctctttgagctacctaaccggaagaa

SEQ ID NO: 82288 - DNA, 143 bp, Glycine max
  Clone ID: PAT_MRT3847_45322C.1
aagaaatgaagagtactatcttctttgcttctctgggcaggcaggagccttaaacatctcatacccgcctgtaaccaaccgtttagttacgcgctcgatactgatgaagatcctctcaaaagggggggcacacactatatgtt

SEQ ID NO: 82289 - DNA, 481 bp, Glycine max
  unsure (1)..(481): unsure at all n locations
  Clone ID: PAT_MRT3847_45323C.1
tggcttggaacctttgggctgatttatgtgcttgcatggtcgtgagaagatgatagaaggggagttatgcatgtaatcgaaaaggaaaatttcaagagacgaagggaatctccactccgcctttctctcctccctcctcccgcgttcctattctacactcattcctagttattgtcgacgacgactacgcgcatgatatcgatggtgacaagtcctaacatggcgctaaccaccctgcgccgttagcgacaagaggaaacggtggcggaacataagcagtaaaagtaggaaatgaaatccgtttctcgatcgcggcgtaactcggtaatgagtctctcgaggggccattgacaaagaccgtactctgactagtaggagctgtccctactatttaaggttagtcccctaagagtancctagcctgcgcgcccttacttatatctagattagggcgctttttaagcttaaccttcctcaagcg

SEQ ID NO: 82290 - DNA, 1094 bp, Glycine max
  Clone ID: PAT_MRT3847_45324C.1
gcagacctccaaccgtaacgtggtttctaaggttggcttccccctccactatcgctctctccctaatcgcatctccaattcgcgtccgggctgcgagaagacgccagaaggggaacgctagaaagaatgtaactaaaactattctaattgcgtctcagtttctctcaggttggcttcccctctcccctatcgctctctccctaatcgcatctcaacttgtcgtcgtcggtgattcattctccctaatcataaccctaatcgcatcttaaatcgaactcaatcagagacaaaacaaagttgttgattctgttacaaaacatagcacggtggacaaacgttaaacaaggctacagatctttgattcagttgaaagcagattgaaggggagtaaaacaggaacagagcaacctgcagaattactctatcaaggtgccataaacttgctatatccgtgtctccaatctctttgaaccgtgagagaacagccatggacagacgcacgaacaccaccaggccagtggcattgtcttccccttctatcactgccaccaccaccataacaattttgaactcggagctatcatcctcttcatctcagcaggaacaacagcaaccagaagtcctcttcctccccctcaatcgcaagaagaagaaggtctcttggaaagagggcactgtagacaacgagttcatgcagaagaagagttccaagaagtgctgtatcttccataaacagaagccctttgacgaagatgatagtgatgaggatgaacatcactctgatgaacaccctcacgatagtgggttttgctgtaagaatcatgatgaagctggcccaagcagttagggaactgattaagctgagaggttattaatgaaccaaaagaggcatatattttgtagagtaaatgattcaagaaacccttgaacttgagtttgtaagtcaggaaatatttaaaatcgcgacattggaactagaggaacattcagtttcagtttgagtgtcacaaataattggcctagtttactaccaaattggtttcactaacttatgtcatagatgcagttgttaaaagatctatgatgtaatcatg

SEQ ID NO: 82291 - DNA, 261 bp, Glycine max
  unsure (1)..(261): unsure at all n locations
  Clone ID: PAT_MRT3847_45325C.1
antttctgcatatttaattcatgaatgtttcagaaagangtgagtggcatgattccaaaaatgcgaaggagaattggagaaagaaagtntttttgacgaaaaaattaaaacaaaaatgataaattaaagctaaaacaaaatattaataagacggtgcttcaaaaacataaaataatggaaattttgnacgtaaagtaanatcatanacannatgtgagtagaggcagaggtgcagtttggaaagaccgggtgatttgaaaa

SEQ ID NO: 82292 - DNA, 475 bp, Glycine max
  unsure (1)..(475): unsure at all n locations
  Clone ID: PAT_MRT3847_45326C.1
cggaataaccccgntcgacccacgcgtccgggatcatggaggacaggaaagggcaggaaaattttcagctaattgtaatcactcatgatgagcgttttgctcaactgatagggcagcgccagcatgcagagagatattatcgtgtcgccaaagatgaccatcagcacagtataatcgaaagccaggagatatttgactgaaggaaggattttatattcgaaattgcttgttggtgttaccagtaccgactggcggaattgaaaaaccagacatccctcgagtcatttatgctaactgctgtcgatataggatatcgtaggtggggtcgtcctagtaaattaaaaggtttaaacacttgactgcaattttcacattttgataagcatttcatttatgacctgctgcagttgcaatgaaagatctgtacgtagaaaacaacggttttctgtttactggtagaagatttattgcatgt

SEQ ID NO: 82293 - DNA, 913 bp, Glycine max
  Clone ID: PAT_MRT3847_45327C.1
taaaacggttggcttccccctccactatcgctctctccctaatcgcatctccaattgttgtcgtcggtgattaattctccctaatcaaaaccctaaacgcgtcttaaattgaactcaatcagtgcagagacaaaacaaagctgttgattctgttgctaaacatagcacggtggacaaacgttaaaaaaggctacagatctttgattcagttgaaagcagattgaaggggagtaaaacaggaacagagcaacctgcagaattactcaatcgaggtgtcataaacttgatgtatttgtgtctccaatctctttgaactgtgagagaacagccatggacagacgcacgaacacctccaggccagtggcattgtcttccccttctatcactgccaccaccaccaccaccataacaattttgaactctgagccatcatcctcttcatcccagcaggaacaacagcaaccagaagtcctcttcctcccactcaatcgcaagaagaagaaggtttcttggaaagagggcactgtagacaacgagttcatgcagaaaaagagttccaagaagtgctgtatcttccataaacaaaagccctttgatgaagatgatagtgatgaagatgaacatcactctgatgaacaccctcacgatagtgggttttgctgtaagaattatgatgaagctggcccaagcagttagggatctgattgagctgagaggtgactaataaaccgaaaaatggcatatattttgtagggtaaatgattcaagaaaccattgaacttgagtttgtaagtcaggaaatatttaatttctgttgcaagtataaaatcacgacattggaaatagagggttcagttgtgactacttttacacttacctctaaatgagttacaaatataaaaccatgagttgc

SEQ ID NO: 82294 - DNA, 585 bp, Glycine max
  Clone ID: PAT_MRT3847_45328C.1
catgttccatatcccttcagaattcccccctttctaaatcaaaatttaagaacaaggaacttcctaatgttcgcactgctagtggaaccccttgacattttttcacaatttcttttccaatctccaccagacttggatattttttaccttcacctccctttttttttcatttgacaaacagagataaacacttctccaaaagaaaggccttctaaaacatacgagggagcattacccatcattgaagcaatagagttacttcgggtttactctaagattttgcttcccactgctccaacttttattaaatctttcaactctatccattttgctcggtcatcattccatatatcatccaaaacttttgacgagaaagcatatgtctaagacgactttgtagctactcaatatctaagttgttaacgttttcttggtgggtaaaagcaatagttagagctgaagaagaagcagagttgatgattttaataattatctggctaatgtcaacgtcatcagagatacacacccacatcttcaattggaaaagttcatccatcctcttatcagtgaacaccaactttgcaa

SEQ ID NO: 82295 - DNA, 214 bp, Glycine max
  Clone ID: PAT_MRT3847_45329C.1
gatcgtcaatgcctgcgcaattgtaagacatccacactattggactgaatcacataggttacatcctgacatgttcattgatggctctattgactacaaagggattgatattgagttcattgcttgtggtgctggaagaatgatctgcgcgagaagcacatttgctgagagagcttgctaacttgcccttgctatgtagatgtatgactttgat

SEQ ID NO: 82296 - DNA, 244 bp, Glycine max
  unsure (1)..(244): unsure at all n locations
  Clone ID: PAT_MRT3847_4532C.1
atggccactgatgttgatcatgtgcaaacaaactgccaacaattgcctagaatgaaggagttctgccacctgtgagngttctgacagaaatagcccggggagataaaatctcggatcaaattttttttttgactcacttaagatcgtgccctggaactgcgagtccaaaaaatatctttttccgcgaattttttttttttttgtcttgcgtttttgggcacggaaattaagatttcaataaaaa

SEQ ID NO: 82297 - DNA, 185 bp, Glycine max
  unsure (1)..(185): unsure at all n locations
  Clone ID: PAT_MRT3847_45330C.1
atgggagatgtttgacagttggcaaagaagcttagaatcttccatgctgcctgtagcttgtctcccttacccttcacatccattccctcacaataaaaaacactccatctccttttcctcattacatctttctagcaacccaaacactgcctncaatcccccatgtctcaatgaagtcgcttcct

SEQ ID NO: 82298 - DNA, 267 bp, Glycine max
  Clone ID: PAT_MRT3847_45331C.1
ttaaaggaatgtgtttccagaatggcaccagaaactactaattcagcaggtcacgcatgaagaggccttaccatgcccatcctctccctgattccaacgaacttaacccttataggactattaccactcaacatatgaaagacaataacgcgtatctcatctatgcattttattaaggagttgtgtgattcgggacctgaacgttatgaactttacgctgatatcctttgataaaaaccaccgtcctgctcctgggttatacacaaa

SEQ ID NO: 82299 - DNA, 329 bp, Glycine max
  Clone ID: PAT_MRT3847_45332C.1
cttgggacaccacaaaaaattttttttgtttttaaaatccaataaaaaacgggtccccggaacaaccttttatgggccaaccttcagaaaggccttttttttggaataaaagaccccagttaagaaactgtaaggaaaaactttttgggcagatttctttttttttttttttgtttccccctttttaagcactttaataaaggggttgggtcttttttttatttgagagttcttgtggtcgccattaaccccttttttatacccctgcgcgaggggcttttttttcaaaaaaacaaaatatttaaggggcttttaaaaaagggggattt

SEQ ID NO: 82300 - DNA, 321 bp, Glycine max
  Clone ID: PAT_MRT3847_45333C.1
ccctggccaaaaaggttccgaaacgacgcttcacgtaaagaaggagattggaccctgtcctaattgtgggaacttaaactctccttctagaactgaatgcaaccagggacgctgcggagccccaagaccacccctaactccacctgtcccaattataagcccgtttagaaacagacatcccttctactatggcggtgttggcactcctcctccatcatatggaatgccatgtcagttaggattctcaatacctcatcctggcatacagtatgattatggtctgtatgctagggctcgagcttcttaccagttcattgccca

SEQ ID NO: 82301 - DNA, 797 bp, Glycine max
  unsure (1)..(797): unsure at all n locations
  Clone ID: PAT_MRT3847_45334C.1
ggggaataatggcatcaactacgattacgcttattcgtccaccactcacattcctctcgtgtcggagtaacaataataattctagttctagtgttagcgctgcttctagaatctttcatttccgttcaatctccgctatgagcactccgcaaggctcatcggactcggcttccaccaaaacggagagggtggtgataaaggggagggtgcagggagtgttttacaggaactggacgattgagaacgcgacgcaattagggttgaaggggtgggtgaggaaccggagggacgggtcggtggaggctctgttctccgggagtgttgacgcggtgcaggaaatggagcagaggtgtcggcgtggccctcccgatgcggttgtcaccggccttcaggttttcccctccgacgatgaccctgccactactgggtttcaccgcaaacctactctttgatcgaggttaattcgttaattaatccccctcaaatgcttcgcgccattagttccttgtgagagtggagttattatactttgaatttattttgatgtttgctagttaatgactcgagagaattacaactgattttcaagttggacaatctatctttttagattattagattccggtgtctgttgcactgcagaatgtatgtgtgggggaagaaacaataaacatatggctaaatacgtcctgatttaaaaagtttaatgtatcatgggaccattntacttgggggccnctttaaatttttagggcccccaaaattggcccaaaaggtttaaggggggtttttaaacg

SEQ ID NO: 82302 - DNA, 1602 bp, Glycine max
  Clone ID: PAT_MRT3847_45335C.1
tacagctgcttgaagaggacagatggtgacgaatttttatttattcaacgatagagtggaagcagaagtgaatgggaaattgaatttccatgagcggtggggttgtggttagaagagaagagaacttgagaagataacattctcgggttttgttttgttgagaattctgagcgtttgatttgatgatcataacacaatgagggatatttgtaggaactttctgcgaggcggcggtcaatattaagaaaggtgcaaatatttacatgttcagcaacagcggtaacctaatgtaaatgggtttggaggacagagcagttctcatccacagcaaaatacaaatccctttggatttgggtctggctctggctcacaacaacagcagaagggtaatccttttggttttggcaagcataacagctcccagttgaatggggggcctcattctgagaacaaacccaaccaatacaagccttttgaaaacaaatggaatcgacagccatccaaaccccagcaaaacggcgtgaaatctgaaaacaaccccaaacaatcagaacatcatatatgcacagatcctgagaactgcaaacgacagattaccgtagtttttgatcaagagaaaccactttggatacttacatgctacagtcattgcaaaggtgctccttgtgacattgttggtgatattagctatgaagaattgcgggcatcagcttacgatgcaatcaatagttgagagagagagaaatatactaaagtccaagtgggtagagttttaaaaactactttctgaaccttacaaaataccaataagttcttctcttggcagtcaaacaccccaatctattggagccaatgcaaatccgttttcaacatctcaaagtaatggtccattgtcagtctcaagctttagccaattgagtactccattgaacatgggttttgaaaggccatctgcaccactaacaaacactccgacgaagcctggtttctttggaagtggaggaaactctttggcatccaacacagcaaacctaaacagcaatggtgtcttcggtgttcaaagcggcccatattctacaccattggatttgaaaatgtttccaggttcaactcaggaaacatcgactgctttcagtaactctggtcccacttcaatgtttcaaacaacaccagatgtccagttgttaagtcagtcccaagtggagaaagtgtcggtagatccgagtatttggttaaaagagaaatggaatccgggagagattccagaagaagctcctcctgatacatttgtacggtagacatttgtgtattggcatcatttgtgtattggcatctgaaacacggcactcaatactagtagtgttagcaagattttgggcccttcgtggttgaattatgatcaatagcatattttagatcacttcagtgcttatctggatagttttatatcaattactgaaacgcatgagctaaggaggcaaaagtaaatccatgttgtagttctttcatttgggcgaaatattgtaatgccttcttggagctattttgacaaaatagtcccatttccaaaattatttgactgctcgaattcatttgattgat

SEQ ID NO: 82303 - DNA, 574 bp, Glycine max
  Clone ID: PAT_MRT3847_45336C.1
aattcccgggtcgacgccacgcgttcgcccacgcgtccgcagtaagtaaagagaagcagtttccagtctccgtcagtaaaacgatgggcgacttcacggttgcgttaaaccctcccaaaaccttccgctccgacaatctcctatccaccaccaaccgcatttccccagcggcgcgtggctttcaaacctcactcgcgttcaaaccgcgcgtttttcgaggaatccgcgcttcggtgatgccaagagagggccagccacaacaacaacaacaacaagcgtcgtctctcggagacgctctcgtcaacagtccgcgccgaaacgacgtcgtcgaggccatcggaagaaccgcatcgctctccaactgcctctccgaaacgaacctccacgccaccgttcccggcctcgagtccaaaacccgcggcaaagttcgagatatatacgacgctggggattacctcgttttggtgaccactgatcggcagagtgcgtttgatcggattcttgcttccattcctttcaaaggccaggttctcaatcagacgagtttgcggtggtttgaaagaacttaacatat

SEQ ID NO: 82304 - DNA, 268 bp, Glycine max
  unsure (1)..(268): unsure at all n locations
  Clone ID: PAT_MRT3847_45337C.1
gtacgtattacgagttgtataatgagcccgtaaataaaattgaccagagcgtggtttctgaacgaaattactagggaaataacatgttcgatacacaatttaatcgcgtatagcataaagtgtaaatttctgggagtgtgtaatagatatgagctaaggtcacattaagttgngttgttgctcaactagttggctcatccatgtaatggaagaactggtgactgcgcaccttgtaagttagatgcaattcaagnccacacgccggcgt

SEQ ID NO: 82305 - DNA, 719 bp, Glycine max
  Clone ID: PAT_MRT3847_45338C.1
gatgagagttccactgttactgatgattctgatgaaccagaggaggcatctcccaagtcaactgacccgagaaagataagtcagcaacatgttgcaactgcagaatccatctcggggtcgaaagaccttctagtgagcagaaggggctgctacacctcaaaggtttcctctaattgcgccacgtggtcttatgttcttgcagtttctgcaactgtattggtctcagcaatactccttgttaatatatgggcatatgtcagatcttaaactgcttacatgcagtagaagatcattgacttgttaaggaggcgtgtaggattgactcgttagagacttgttgataacaatgttgtgtataatatatatgtgcatatgtatgtagtagtcattgcagaatatggtagcatagctgtctagtctgatagacatgtagtgttgccgcagttagattcacagtttgaccgtttccatttttgttttgaggttaaggttagttttctgtcttggttagtggtgttaacacgcagttaccctgggattttgactgtcactttaccacttgtgctttgttcccatgtggttttgttgtatcacttttttggctatgttaactaggggaggaggattctgtgtagcttttgttaaactgcagaccatctcaagtgctaaaagctaaaatttattttttgtagtgaaaaaagaaaagaaagagggcggcc

SEQ ID NO: 82306 - DNA, 486 bp, Glycine max
  Clone ID: PAT_MRT3847_45339C.1
gggaagaggaagagagcagaaactggaggagagaagccataaaaaaaatcacagatctaaccaaacttcaatttcgattccgattccggtttatgtttatcttcagcgatgacctctactatttattaactgtcatatcaaaggaaggattctgggagcaatggttataggcaaacttactggacctgtacaaggttcagtcttccagtcattgagcatatctacaatttcagagcttttgagtaaccaacactggtcagagctcaaaccccattttagaacaaccaaacctgcaatattccttgaccaattgttcaatgcgggggttgattcagagcttgttttaaggttctttcagtggtctcagaaagagttcaggatttcatatggtcttgaaacaactggcaaagttttacatcttctagcaaattcaaaaaagtactctaaagtcaggtcccttttggataaacttgtgaagaatgagaa

SEQ ID NO: 82307 - DNA, 392 bp, Glycine max
  Clone ID: PAT_MRT3847_4533C.1
ttggggtcatgtacaacacatatcaacatgagatgccaaaaatacaagcacacacggatagaaaatagccgaattggtttgtagtaactctggtagcttataagttatttgataaatttatgagctactttaactaggaattcatatacttattatgatacaaatttatcccgtgctttgcactatgtacaaacaaaatcaagtaaatattccaatacaaataacaataaatgaacagaaaaaagagagttgtaagcgggaaaataaattagactattagagacacctttcttattgttgaacaattcacaaacatcatgttttagaggccgtctttttctgttggcaaagacgctaaatcaaacgaaattatgtttgaagaactagcaatg

SEQ ID NO: 82308 - DNA, 459 bp, Glycine max
  Clone ID: PAT_MRT3847_45340C.1
acggctgcgagaagacgacagaagggcctaccatcttcataactgagtataaagactgcaatgatgcctgaatatttcttgcccttcctcttccccccaccctaagttttcttataacttcatattggcttgcaaaattaatattcactcctttcctttgggagcaacatctattccacaatacttcccaaaatctaatagtctactgccactttaatttgccactgtttctttgcaaatttttagaaatcatgctcttaatttccaacttgtatcttagttaccgtgatttaatcattctagttcctttttaagatcctccatccacaccagttctcatcaaccttcaactaccaggtacaattttgcaagtatcacacattgatgagtcagaaaaccgaccaaaaaaaacttctgaatgaatgtaaaaaacagcttccaaagtcatccacatgaaat

SEQ ID NO: 82309 - DNA, 260 bp, Glycine max
  unsure (1)..(260): unsure at all n locations
  Clone ID: PAT_MRT3847_45341C.1
agaacgagcatggcggagagtngnggcggacaccgccgcagggaaccgcctccggtgtctccggaggaagagggtgcaaatgcttcgtggagacttaatgtggaggagttttgtttgtctaaccaaacgcatgatcatcgtcaacatcaccgtttctacactttccgtagcgcactccgaaagctcagtaagcaacttaaagtagcagaatattccacncaacanacgaacnnaaannntggnatgaatganatgganac

SEQ ID NO: 82310 - DNA, 870 bp, Glycine max
  Clone ID: PAT_MRT3847_45342C.1
atcatttccattatttatatgctatattatctgcagccaaatataaattccattacccttttctcagtttcttcccctgaactccataaataactcactcttgtattatttttatgtttttcacttccatgatgccagtttcaaccatgtgaagttgttgtgtgtgtgctgtgtttgttgttgtgtactgttttggatcttcagaaccaaccatgaatctcagccacggcaagggatccacttcgagttctcctctgaaagccggagacaccgtctccgaccagttcccggcgggtctccgggtactggttgtggatgatgaccccacttgccttatgatccttgagaggatgctgcgtgcttgtctctatgaagtgacgaaatgcaagcgagcggaggttgcattgtcgcttctgagagagaacaaaaatgggtttgatatcgttttaagtgatgtgcatatgccagatatggatggatttaagcttttggagcatattgggttggagatggaccttccagttattatgatgtcagctgatgatggaaaacaagttgtgatgaaaggggtgacacatggtgcctgtgattacctgattaaacctgttcggattgaggctttgaagaatatatggcagcatgtggttcggatgagaaagaatggtttgagagatgtggagcaatctggtagcatggaagaaggagatcggcctccaaagggatcagatgacggaaattactcgtcttcggtgaatgaagcccaaagctcaaagaagaggagggatgaggaccaggaaggagatgagaaggatgattactccacgttgaaaaagcccgagttgttggtctgttggcttattaacagttatg

SEQ ID NO: 82311 - DNA, 266 bp, Glycine max
  Clone ID: PAT_MRT3847_45343C.1
tagaacgatccactcttatgcccctactttttaaatacaagatggctttctttttttttatttcgaagagctaccgtgctaccttgttcccactgatcaaatgtgagggcgtctctattttacttatttttttcccgcgtatagccaacatttctggggtcggtgcaaacaccattaaactttgttctttctaacggagaaccttattgagcacttggcagttgcccttgttgttctccgcactcctgggggcgcccctttaatgc

SEQ ID NO: 82312 - DNA, 609 bp, Glycine max
  unsure (1)..(609): unsure at all n locations
  Clone ID: PAT_MRT3847_45344C.1
gcacgagcacgctcggcggcggccaggagaccacggcctacacgaccgtcactttcttcacgcaccagggcatgaccttcgtgccgctcggctaccgctgcccgctcatcttcaacctggacgaggtccacggcggctcgccctggggcgccggcacgctcgccggcggcgacggctcgcgccagcccaccaagctcgagctcgacgtcgccaaggtccacggcganagcttcgcacaggtcgccaagaagctcgccgcctaaagctccgtgtctccctgcgtcttctaacccctgacgaataccattctactacccagtctaaaaaaaaaaaaaaaaaaaaactcgagggggggcccggtacccaattcgccctatagtgagtcgtattacaattcactggccgtcgttttacaactcntgactgggaaaaccctggcgttacccaacttaatcgcctttgcacacatcccccctttcnccagctngnntttatacnaaaaagccccncnccnattgccttccccaacanttncccccccttaaatgcaaatgncaattgtaacctttaatattttntnaaaattccccttttaanttttgtttattc

SEQ ID NO: 82313 - DNA, 491 bp, Glycine max
  Clone ID: PAT_MRT3847_45345C.1
attcggcaccagatttggaaaatcaacaaaattattcagaataattctgcttttattttttccccttgggattttgcttaattcatgagaggtttggcactgtgatttacgactggacaattgatatacggcaaagtcagttagctccattggttgtgtcaacttaacccagcaccaacattcaccaattggcactgcatttgtacttcattgagttcattcttgctcacctaattccctgtcatcctctgtttggcttatgttcctcttttatctctagtggaaatcccagcaagttttgctcataactttgtgggatgcatttaacctacctgtatgattcagggtctcaaatatttcacaaatctaatataaaaaacattaaaaatatctatctatctatatatatataataaacaatacggtatgggattctgttttcacccattaaaatatgctacaactcacagtatgctagtccataaaaaata

SEQ ID NO: 82314 - DNA, 214 bp, Glycine max
  Clone ID: PAT_MRT3847_45346C.1
gtctcatctacaacaattttttttcctcagaaaggaacccgaaccggagacttataattagattccacagaatataaagagggcccgaaggcccctttttcctttgaaaatagatagaccattaaagctaacaaaagaaagaatacacaaccccttgtttccgctaaatcttttaccctgtaaagtggaacgaatagatacctctatctattct

SEQ ID NO: 82315 - DNA, 1558 bp, Glycine max
  Clone ID: PAT_MRT3847_45347C.1
tcggggaacgctggcgggttgcttttgctacccaagtataattccctaacagaagctcgagggttgatatatttaatagccaaagatcagcatggctgtagattcctgcaaagaatatttgacgagggtacaccgaaggatgttcaagtgatatttaatgagataattgatcatgttgcggaacttatgatgaatccttttggcaattacctaatgcagaagttgttggatgtctgtgatgaaaaacagagaatgcagatcatactcatggtgaccgaggagccagggcagcttgtcagaatttcgttaaacattcacggcactcgtgtggtacagaagctgattgagactctcaaaactaggcagcaaatttcattagttgtagcagctcttgaaccaggattcttggccctcatcaaagatcttaatggaaatcatgtggttcagcactgtttacaatgcctaagcaatgaagataacaaattcatatttgttgctgctgcaaagtattgtgttgacattgcaactcatcaacatggatgttgtgttctgcaaagatgcattggtcattctagaggggagcacagagaaaaactggttgaagaaatatctgctaatgcacttctgctagctcaagatcaatttggaaattatgttgttcaatttatcttggacttgaggattccttcggccactgcaactttaagcttgcaatttgagcgtaaatatgtgcacctgtcaatgcagaagttcggcagccatgttgttgaaaaatgtcttgcagtattcaatgatgagaatcaatctagagtcattcatgaactgctctctgctcctcacttcgaacagttgcttcaagatccacatgcaaattatgttattcaatcagctcttcgacattctgagggccatgtgcataatttactagtcgaagccattgagtcccacaaagcaatttcacggaatagcccatattccaagaagattttctcgcagaagcttttgaagaaatgatgtataatattcgctccttagcaagaactgttattgttctgcattaaaaatcattttggagtttactactgaacaaatgcgttgcgtggttatttaactgtaagttgggatgctaataaccatacaaaggagtcaatctgtttagacttgtttatccttctgctcagctaatatttaaaaaaaaaaaaaaagaaaagtagggaaaaagaaagagcagacaattttgctcacatttaaaatttacttttgaatgtactattatgttgtcttgtatctcaacttcatgatattattatcatcctgttaattatggcattctcactggctgagaatgtacagtgtatattgtttaggacgatttggtgttactgtaaaatactacgaggaatctctcagaataagtttcctttgtcttgtgcaagggaatgaatgacgccagttgtttaattgtatttacaattattagatattacaacaaaaaaaaaaggtcgccccgccgaataagtgagattcttcgtacccgggtatattaatatccggtccc

SEQ ID NO: 82316 - DNA, 292 bp, Glycine max
  unsure (1)..(292): unsure at all n locations
  Clone ID: PAT_MRT3847_45348C.1
nngcacgcgtacgtaagctcgggaattcggntcgagggcccgcccttntcnttnntnnnnantnggagnaaaaatnaanttnctnncaaanggggnncncntcaccctttgcnnnnnanntttgttatgntaaaattcnaagngccnanggttntgggntttgcccccaaaccccgggntatatncaccanngaaangnntgggactngttncaanatngcaaatnaaccccntnactccttntgggtnncgnggccgaattctgncanttgnnggtgggggaccaacttct

SEQ ID NO: 82317 - DNA, 481 bp, Glycine max
  Clone ID: PAT_MRT3847_45349C.1
gtattactcttttttgttaacaggggagccacgataggggatcagaacagaaaaatcataaaaacggaaaccgacgcctacagcaaaaaggttaactacagaagggaacaaaggggaaaaaacaaaaccgaacaaaggtatattaaatttcttaaactctaaatcctaaagaaagaacctccttcctctagccctctcgaactttcttcccttagctcgcacatagggcctggcatggctgcgcggcacaccaggagcaggaccaaagggacacacagcttcccgagcattgggggggcctccaagaaggaccgcattgggtcccaaaggagccccaagggcaagggcatcaaaaggcgagcactcaccaccagccttaggtattcttgcacgggctctctcaggaaactagaatgccgcaccctccaatgctggaactgcatatactctgaaatcaacagggacaggccccactattaca

SEQ ID NO: 82318 - DNA, 540 bp, Glycine max
  unsure (1)..(540): unsure at all n locations
  Clone ID: PAT_MRT3847_4534C.1
atgtgtcatattcaatcaatttaattgatcccttgacaaaatatctttagcatatagaggatcgttcatggttggtaggagtatttttttccttattacagcaggagtattttattacactatgaatgagcaagtcctcattgataaggttgcaataagtctaatttattacacctactggcatcaacgaatatattgaatacgactgcaggcttccttttaataaagaaaattttataatagtagtataatttagcatacccactagaatccgtttagttttaggggtttagatagtctgtaaaggattctaaatcaaaatttcattgtcaccattataaaaaaaataaaaattctcacatgtttaaatacaaaatataaattattttacttttacgtcttaaataaattgaagtattaattaatatgaaaggtagtactttcattaataattatgattaatagaagttttaaagntgattataaattaaataaaaacaattaatcattaattttttttaataaaagattattgatcat

SEQ ID NO: 82319 - DNA, 346 bp, Glycine max
  Clone ID: PAT_MRT3847_45350C.1
gtttttattttttgaaaactattttcattttcaaaagattagaattctgaaaacatgtttggtttgacttcttgttttcttctgctttcaagaaataaaaacattatttttagatttgcttaaaattacattccttgtcactgcgttttcattttacccaaaataaggttcctgatttcaattgaaaacgagattttattgtttccagtttttggtttgtttgaaaaaatattttcactaaaaatgaaaacagaaatccaaccaagcacatttccatcatcattttttatttttagtgaaaatgaaaatagaaaacaaccaaacccaacatcccctttactcacta

SEQ ID NO: 82320 - DNA, 196 bp, Glycine max
  Clone ID: PAT_MRT3847_45351C.1
atattatctcattttatgggcataacaaaaaaccgtgtgattttgcaaattaaaccaaaatcacacaacatactagcccgaaacattttgtttcctgcctggggcgcctaattaaacaacaaactggcattcatcccgatgcgctcacaggccgctttttaaaatggagacctatcgtgactttttggtaaatgaa

SEQ ID NO: 82321 - DNA, 113 bp, Glycine max
  unsure (1)..(113): unsure at all n locations
  Clone ID: PAT_MRT3847_45352C.1
gtgatttcctcctgtgccacaangagggggaatagtatatgtatatagaggctcatttcatatacaattgacatattaattcgccacgtaaaagctccaacagagttctttac

SEQ ID NO: 82322 - DNA, 3159 bp, Glycine max
  Clone ID: PAT_MRT3847_45353C.1
cacacctccccttcccctcccaattcccatgacaggtgtctgtttgccttgttcctgatttaagccataatagccacacagagagagagagagagagaaagaaggcatgagaaaatgaatgatctccatcatcattcccttccccatgtgatgtgccacccctctctctagggttttcaattccaatttcaatccaacccaacacaaagctcccacctttcccattcattcgcacaattcccttcgcccttttccttttcagccaaaagggtctccggggcttcgcctctctttgaccgttccgggctcgcctccccaggcttcttgagagagagagagagagagagagagaaaactgcttttctagtgagagaaagtcaccatgggaatgtagagtggagcttcttcccttgttgtttttgttgttgttggtgaccgagcaatgttggaaatggagaaggattttgattccaagctgaagattcaggggaattcctcatcttccaatggtgctgggaatgtacagagatccaaaagctttgcttttagggctccccaggagaattacactatccaggactttgaattgggcaagatctacggtgttggctcttattctaaggttgtgagggcaaagaagaaggacactggaactgtgtatgcattgaagatcatggacaaaaaatttattaccaaagagaataaaacagcttatgtgaagttgggaaacgcattgtgctagatcaattggatcatccaggcattgtgcggttatatttcacatttcaagactcattttctctatacatggctcttgaatcctgtgaaggtggagaactttttgatcaaataaccaggaaaggtcgtctatcagaggatgaggcacgattctatgcagctgaagttgttgatgctctcgaatacatacataatttgggagtcatacatcgtgatattaagccagagaacttattacttacagctgaaggacatattaaaatagccgattttgggagtgtgaagcctatgcaggatagccaaataactgtccttccaaatgcagcatcagatgacaaagcctgcacttttgtgggaacagctgcttatgttcctccagaggttcttaattcctctccagcaacttttggaaatgacctttgggcacttggctgcacattataccaaatgctttctggaacttccccttttaaagacgcaagtgaatggcttatttttcaaagaattatagcaagagaacttagattgtcagattactttactgacgatgcaagagacctgattttacggcagcccaagtgaattaccatatgcaggactgttgatgggcgtgatagttatgctgttttaaaaagtccccaggttttcaagggggttgactgggataacttgagggcacaaattcctccaaaacttgctccagaacctgggactcagtcgcctgcgtctgatgatgttcatgactcatcgtggagtccttctcacattggggatggttctgcagcttcggttagacaacctgacggtgctacatcttctgaggggactggtcacataactaggctagcttcaattgattccttcgattcaaaatggcagcaatttttggaacctggggaatctgttcttatgatctctatggtgaagaaattacaaaaactaacaagcaagaaggtgcaactcatccttaccaacaaaccaaagctgatctatgtagacccatcaaagctaattgtgaagggaaatataatatggtctgataatccaaatgatttaagcatccaagtggctagtccatcaaatttcaagatttgcacacctaaaaaggtaatgtcgtttgaggacgcaaagcaaagagcatggcagtggaaaaaggctattgaaggacttcaaaaccggtgaatttattctggttttgtgaacatattcttttagatatcctctttattgttcagcaagagggataaaacagttgactgcccaacaatcaattattcattaaaagaaaacaaattcgcagattttgctgaagctggttctagctaattcctcaacacagcttaattttgtgatgagttcttccatcctctttcatgcttcgaagggacgataaaatgtggaagttctaattgtagctatgtctgaggatggacccaatactttgtaagaaaaaaaatggttttttaattatatattaaatattatgagttggaagatgatatcattctagttgtcataatgtatgaatcattgaattgctcaactttattggtttcttcagcccgtggttaaacagtgaaaccatcttgaaatttcaaatggatgcttcggttagacaacctgatggtgctacatcttccgaggggaccggtcacataactaggctagcttcaattgattccttcgattcaaaatggcaacaatttttggaacctggggaatctgttcttatgatctctatggtgaagaaattacaaaaactaacaagcaagaaggtgcagctcatccttaccaacaaaccaaagttgatctatgtggacccatcaaagctaattgtgaagggaaatataatatggtctgataatccaaatgatttaagcatccaagtggctagtccatcaaatttcaagatttgcacacctaaaaaggtaatgtcgtttgaggacgcaaagcaaagagcatgccagtggaaaaaggcaattgaaggactccaaaaccggtgaatttattctggttttgtgaacatattcttttagatatcctcttattgttcagcaagaagggataaaacagttgactgctcaacaatcaattattcattaaaagaaaacaaattggcagattttgctgaagctggttctagctaattcctcaacacaccttaattttgtgatgagttcttccgtcctctttcatgcttcgaagggatgataaaatgtggaagttctaattgtagctatgtcagaggatggagccaatactttgtaagaaaaaaaatttggttttttagttatatattaaatattatgagttggaagatgatatcattttggttgtcataatgtatgaatcgttgaattgttcaatttattgttttttcagcccgggtcaaaaaaaaaaaaaaaaaaaaaaaaagaaaaa

SEQ ID NO: 82323 - DNA, 733 bp, Glycine max
  Clone ID: PAT_MRT3847_45354C.1
ggctcgaggccataatagccacaaagagagagagaaagaaggcatgagaaaatgaatgaatgatctccatcatcattcccttccccatgtgatgtgccactcctctctctagggttttcaatcccccaatttcaatcgcagcccaacccaaagcttttccacctttcccattcattcgcacaattcccttcgcccttttccttttcggccaaaagggtctccggcgcttcgcctctctttgaccgttccgggctcgcctccccaggcctcttgagagagagagaaaactgcttttctagagagagaaagtcaccatgggaatgtagagtggagcttcttcccttgttgctgttgttgttgttgttggtgaccgagcaatgttggaaatggagaaggattttgattccaagctgaagattcaggggaattcctcatcttccaatggtgctgggaatgtacagagatccaaaagctttgcttttagggcaccccaggagaattacactatccaggactttgaattgggcaagatctatggtgttggctcttattctaagggtgtgagggcaaagaagaaggacactggaattgtgtacgcattgaagatcatggacaaaaaatttattaccaaagagaacaaaacagcttatgtgaagttggaacgcattgtgctagatcaattggatcatccaggcattgtgcggttatatttcacatttcaagactcattttc

SEQ ID NO: 82324 - DNA, 526 bp, Glycine max
  Clone ID: PAT_MRT3847_45355C.1
ggaaatttttgaaacgtaaaatgttgatggtgttaatgtaatactaacaaaaagtatgaaattggtttcttttaaaaaattaaaagactaaaataaatatttttaacactttcccttcaatctaagtggtgttgccaacttgtgacttgccttcaatctttagcgttaatttaattatactccctttgtcattcattcattcatatatatatatatatatatatgatactttcacaaaattaacattatcattattaattaatttatagatttggtggatcaaccgttaacatcataaagaatatatttcaaacacaacaattactaaaatgatgattatttagagatttttttttgacaaaataattataataggacgaaggagttattttattcaaatatatttaattttaaattctaacggttactatcattttttaattaagttttaattgtactaaataatatcatgggtattatataatttttaaattcaaattaaattctattttatcataatttctaa

SEQ ID NO: 82325 - DNA, 277 bp, Glycine max
  unsure (1)..(277): unsure at all n locations
  Clone ID: PAT_MRT3847_45356C.1
cagcagtacatattcctctctcacatccacgcctcanaagaaactgtagntccatcaccagaaccgtaanagcaatatcccgcgaccatgacccanatnaaagactcccccgaagtcaaggccatcaaagccctcatccaagccttcttcgacgccatnaatggcncgccgatatcgaaggtctcggtacnttagttcggctccagaagccaacntgaccnataanccnanaagnacctcctcgaggaacgtgcttccgaatcganttcntcttact

SEQ ID NO: 82326 - DNA, 493 bp, Glycine max
  Clone ID: PAT_MRT3847_45357C.1
tgattaataaattatggttatcctcaacttctttaagaaaccgaaatcaagaggaacaatcagttcagcaaaactcaatcatccttacaaaatttcactttcccgttattctcctcccagacatggccccccaaaacctctgtggtttcatttctcaatctcagcacatcatgaaagcacaccttcttcacttttacaccctctccctcctcttcctcttccccatatcctcctccttcatcctctctcccaccctcttccaccttcaccaacaaatcaccaccaacacaaaccctagctctctcatactatttcttctcctatattccctctttatttctctcttctccacctgtggagtcatcagcatcaccaacagcgtcttccacttcttcatcaacgaccaacctgccatgatgaacctccgatccgccatcaagtccatcccggcttccttctttcccttcctcacgaccacattcatctcccaagc

SEQ ID NO: 82327 - DNA, 392 bp, Glycine max
  Clone ID: PAT_MRT3847_45358C.1
gtttcacaacaggcccaaggcaaatggcggcgactcatgcaaggatctctgacgtagctcatagcgcgactcatcctcgagcgacagattcgtggtcgggaagtgcttcctctgcacttaaatctctctctagattggaaagagcctcctctaacctagcacaatgggctagtgggatcaccttgaattatgatatgcttgcggccgcgtcacatctcttggaacaatttcctgttcaggacgatcaaaaactacccaacccgatatgtgccttattgtcacatataatatatccctagtaccatgaggttcaggctgccatggagacaaataagttctagttgactatagatgatgttgcatctcctaaaagttccatgtgggatctaaaa

SEQ ID NO: 82328 - DNA, 375 bp, Glycine max
  Clone ID: PAT_MRT3847_45359C.1
gtccgtgcaaaagaaataagaaaatgagttaatgaccatcaccatgtgtaatcattttatgatgtagtttctgctttaagaaaaatgaaggaaacccaactattgtgggatgtaagaagacgatctccactcgccctagagggagaccaaacgaaacacaatgggaactacaaaataggatattgtttcagaggattaagttaaccatggggcttcatgagtggtgagcccgaagttataagctcccattggtgtttgacataagaatgtatacaatacaaaaagcacggatggaagcaagaatgttggtcatcaagtttggcaagggacaaagtcatgttaaaaatagacgagttgatttcatctacatataac

SEQ ID NO: 82329 - DNA, 1592 bp, Glycine max
  Clone ID: PAT_MRT3847_4535C.1
atagtaccagtggtgtgtcttctgtgctttgctttcttttctctcttagctaaaacagataggtcatatctcaattatgtaacattagcatacccttttttctttctttctttcttcaatttctctgcagtgtgcagtgtgtgtatgctctttctcttttgaggttcttcttgctttctttggattcttggttcttattttttctgtttccttttcttttataggctcgagcctttattattcctagctcccttccttggctctaaagataaattttcccttgattttgccaatttggtggatatctgcttcgttttgtcaactaaacttttttcccttgcttactgagagaacactgcttgtaattgaagttgcttttctggctgctttctgtgtcttcaagtcttacttggaagggtcagatttgctgcaaatctctccatttccccatcatcagaaggtttaatttcttggtttactctatagctacttgcagaaagaagtcaaaaaaagagataatggtgaggggaaagactcagatgaagcgtatagagaatgccacaagcaggcaagtaactttctcaaagcggcgaaatgggttgctgaagaaggcctttgagctatcagttctgtgtgatgctgaggttgctctaatcatcttctctccaagagggaagctctatgaatttgctagctccagcatacaggagtcaattgaacgataccgcaggcataccaagcatgttaatccaactacattcagatcagttgaacaaaatatgcagcatctgaagcaggaggcagaaaacatgatgaagaagattgaccttcttgaagctgcaaaacggaagttcttgggggaaggtttgggggcttgctccattgaggaactgcaacggatagaacaacagttggagaggagtttaagtaatgttagagcaagaaaggtttttaaggaacaaattgaacaactaaaagaaaaggaaaaagccctactagatgaaaatgccaagctcactgaaaatgccaggctctctgagaagcatgacatccatctacagccagcaacaaagaatcagaatgtgaatcaaccccaatgcaatgcagaaagtagttcaagttcagatgtggagaccgaattgttcattggacttcctgatacaagagcaagacacatctctcatcacgtctagtagaagattacttattccctggctatggaaaataaaataagggtaagcctaactgtatcatcaatgtatatgtatcctgatgctctagtaaagataataatagaataattttaaatcctcttacagtatcttcctaataatccttctaattattaatgaaatgaagaaaatattaaattttttctctgttttccaagtgttaaatgtttttacattttcatctaatattttctttatgaagtataagaaaattattgggaggatgttataggaggatataaattattctaaatagtagtggtaattggtgggagtgatttgttttgcttgattatatcctcaaacccatggtctaatgacccgttgtattgatacttatactttagactcagcagtatg

SEQ ID NO: 82330 - DNA, 254 bp, Glycine max
  Clone ID: PAT_MRT3847_45360C.1
tctagttttccgcggactcctggacggacacgtgggtggttaccgttcgccggaacttccttatcgttcgtcgtaccattcctattagtattgctatcataacaggcattcatcttcgatcttcacgacaaattaccactagcagagcgtgaatcactataaacaccatgaggagccttggaaataatagttccttcaaagctgcataataattttgtgctgatgttgaactctagaggactggtgcttctgac

SEQ ID NO: 82331 - DNA, 440 bp, Glycine max
  Clone ID: PAT_MRT3847_45361C.1
cgaagttcaaggtgccggatttcgataagtacaaggacactacttgccccaagaatcacctgaagatgtacaacaggaaaatgggggcatactcaaaaaatgaaaaattgttgatgcatttcttccaagaaagtcttattggggcagtcgtcacctggtatactaatctggaaccttcccgagtccattcttggaaggacctaatgattgccttcattaggcggtatcagtagaattctgatatggctccgaatagaatgcagctaaagaacatgtgtaagagggagcatgaatctttcaaagaacaatgatagtagatgcgttaccagtgttctactatgagaagatggtggattacactccttcaagctttgccgatttagttttcgttggtgaaaggatcaaagtaggcctaaaaagaggcaaatttgattatgctg

SEQ ID NO: 82332 - DNA, 908 bp, Glycine max
  Clone ID: PAT_MRT3847_45362C.1
aatgcggctcgaggagagatcgagagtttttcaaaaaataaaaaaaagcattcctttttttcccacactcacactcactccactccattgagaaagttggttgcagcagcatgatggaggaagaagaagaccagcagaagcttccagatctggtgaaggaactagtccaccgcctcctctcccaaaacctccccccaaattcccctcccctaaaccctaactcccccgaattccgcaactccctccgctacgccctccgcatcctctccagccgcctcaccccctccgtcgcccccgacgccgccgccatcgccgactccatcaagcgccgcctcgctacccacggccactcctccgaagccctctccttcgccgacctcttctccaaattctcctccaaagcccaaagcgtcaacaacaaattcgccgtcatctacctcctcaaaatcgtctccgaagatcgccacaccaccaccgcaaccaccacccctctcctccccaacctcagtttctccgaacctacctccaacaaaaaaccctggaacgacaacggcgccctcctcatctccaaggaccccgagaaccgccgcgacgtcgcgtttcgcgagttcgtcgatctagtcaaggaagaaaacgaggtgtcggaagaggttctcgtccaagacgtgctctatgcttgccaaggagtggatggtaagttcgtgaaatttgacggcgagagtaagcgttatgtgatacctgattcaattagggttccccgagccactaggagtatggtttacaatctctgtgaattgggggttttgtttagaaacgttagcggttacatttcgctgagtatggatcggtttcccaatgaagatgtgggaactgtgggccaggctttttgctccgctttgcaggacgag

SEQ ID NO: 82333 - DNA, 409 bp, Glycine max
  Clone ID: PAT_MRT3847_45363C.1
gccgattcttcaatcttatatagatttttatacagagacagagatagattcccttcgcatccttaaaagagtgcaaggggaatgccctatcctttcgttaactagatgtttgtgtaacccaaacactccttcaaattcaacctcgataacatctctacctcttccaatcataaagataatctcataacacacggaatcatgtatttacccaatatctcaatcgtctcatttgctaaaaatccagctatacacttcactacatttgatattcctacactatacatccatcttcaaaagtttaaccatcctatattttacttcatcatatccttctgtacatatctaacctctaatcccaaatgaccaacacataattcttttctcaatacacttattcaacatcttattt

SEQ ID NO: 82334 - DNA, 313 bp, Glycine max
  Clone ID: PAT_MRT3847_45364C.1
gcgggcacgcgtgcaaacacgcgtcctcccacgccatccgagaccctctaacttatatgtgactattcttagacgcttgtgacactgctactaatatgagtgtccccggcctaactattatgctatactctatggtgagccggaactccctgagcccctgcttaatgtacatcgctatctacaaaacgatgactgtacacgatatgctgaagttcaaatgcaacagcgctccgtgtgagattacggacaacgtggatatcagagcgggcggtctgatgattacctctcccagcgagtcacacaggatcgagat

SEQ ID NO: 82335 - DNA, 387 bp, Glycine max
  unsure (1)..(387): unsure at all n locations
  Clone ID: PAT_MRT3847_45365C.1
nncgccacgcgtncgcccacgccgtccgtggacactggttccagccttttcaattagttgggaatatgcaaataaatattaatgtctgacaagtttaggccttggtgaaacaggagattgaagcttttcttactgctatttcttatgtttctttgatttgcattaatttattctctatgtatactcccagtgtttttgaatgttggtgatgatgagataattgatgatgatgattatcaatcatgtgctgaaggaactaaccttgaaaatagtggatggtcttccaggaccaggtttgtttgtgcaaaactctagtaactaacctttctctgcatagaaagtaattgaactattttttccctaattgtggtttgtaatcattaattt

SEQ ID NO: 82336 - DNA, 314 bp, Glycine max
  Clone ID: PAT_MRT3847_45366C.1
gtgcttgaacagcacagttctttccgctgtagagatttcctgcaaaagggagacttaagtttttccaccagagaataattaggactccaatgaatcgatgccaagataataggggctcccattcaaaccacacgattccactacattatgatatgacccgcagtggagatattcgtggccatctattatatctgctgaggagtaacagatggttgtgccgtgaggacgataggccagctctaggaacattgttcttgcgacgcatagcccgcgaactcacagtcatgatacaaggaatggggtacacatcgtag

SEQ ID NO: 82337 - DNA, 451 bp, Glycine max
  Clone ID: PAT_MRT3847_45367C.1
gtggattgatgatagtcatagcattaatattgggaaggctgtaccagtgcaccctcaaaagccagaggaacccagaaagccatccaagaagagggctaggccgggggagagtactcgaccgcggccaaaagatcgtcagcagatccaagactgtatcaaagagttgagacgaattatccccaatgatggaaagtgtagcattgattctttgttagaccgcaccatcagatacatgcttttcttacaaagtgtcctcaagtattcagacaagctacaggaaccaaatgagccaaaggtaaactgatcaaactacttttctacaatattatctttgtaagaagaaaataaacatgtcagctccagatatgattggactggcttggatgttaagcttattgagcaggcaaaggaagttgtttttaaagacagtggtgcggcggataagcaaaac

SEQ ID NO: 82338 - DNA, 467 bp, Glycine max
  unsure (1)..(467): unsure at all n locations
  Clone ID: PAT_MRT3847_45368C.1
caagttaatagtgtctcaatgctgaatgagnnnnatttcaaagtctagaacgatgctatggagatcatctttaatcttatggatttaatactgcacttaggatggaacgagtcattcctattctgaaatacatagatgtacttaaaattgagaggtgggatccctcaaaccaaatgtacttgatgataatgaaaacagccattccgaaatcaattccaggttctattactaagagtaagagtgacaagaagtggagcaatatnnngctaagaatgaaaggacaaagannaacaaccttctggcaaaactcatctcattaaagtataaggacaaaggaaacataaagagtacattatgaacttgtctaatgtcgcattaaaaatcaaggcactaaagttagagttgtttgaaggcatgcttgtgcacttaattttgatcttgaccaacaaattttcaataattgaaag

SEQ ID NO: 82339 - DNA, 472 bp, Glycine max
  Clone ID: PAT_MRT3847_45369C.1
acgaggaaatttatgagttgttgatacattactattagattttgtaaatgaaacttgaacaatcatcattataaaagggctcagtataaaagatgtgttctgtacaataacgtggaccaatcattattcatgttcatgcttcaactttaccaactcaagtggtctcacaaactgatttgtctttttttatagggtaaactggcctgtgactcgtatttcaagcctaaagcaatttttcaagaaggagcgtcttggtgataaaaaaaaatcattgaacccaacaaattgagctgcaatcactctattaaaatggtatcattgatttctatcgcttttcaatcactctaaatgcccattttttgaccaaagatccttcaaaatttattataattattgtaattgtaaaccatttttcttcaatttctcatttcacatccttctcacagtttaacttgtgatcaattatttcttt

SEQ ID NO: 82340 - DNA, 317 bp, Glycine max
  Clone ID: PAT_MRT3847_4536C.1
ggctcgaggagaaagggagaaagggtgttagtttggagagcaaagaggaagacgttagggggggggcaacttatgtctcagataggcaaccaattgttacagcagcttagggtgacaaggacttcaaagaaccacccccaacacctctgtttgagcctggtgagctaaagttatgtaccttctacagagctggaattggtgagtgaggggccactttattggtcctctacattaccatcttaactgtcatgggagtcaacaggtcacccaccatagtgggctctgttggctttaaagggattgattggtcctttgtt

SEQ ID NO: 82341 - DNA, 156 bp, Glycine max
  Clone ID: PAT_MRT3847_45370C.1
gaacaaagacctcaattatcatcatattagtaataaagcgaaagggttcccgctcaggatagcatggttatttaaaaattaaacagaatagctcttagcatggtaattttttttcagctcttgttaaacttttcaggttgtagctagacctactga

SEQ ID NO: 82342 - DNA, 364 bp, Glycine max
  Clone ID: PAT_MRT3847_45371C.1
gcgatatcatgtacctattggcaattttattaggccacaaatattgctgaaactctgaacctataatttgacactgggttttggctatttgggagattattaattgtgccaactgcatggcaaggatttcattaggggattataaattgactgttttgcccctgaaggattcggactattaccagcgatgtcaactggtgatgattcagttcgcttgttttatcttgataaaccactacgggaaggagcatctagggcgggggtttgtgggtattatttatcttgagaaaaaatccacacagttgtattccattttgtttcacttaagataagataatgcgccaattaatttagcgatatgctt

SEQ ID NO: 82343 - DNA, 314 bp, Glycine max
  Clone ID: PAT_MRT3847_45372C.1
tctgtagctctgcctatttgaaaatttccacacctattttaattgtcgcaatgatgtgtgaagtgtgtgttattttaaaaaaaaaaaaaaaaaaaaaaaaaaaaaaacaacttaaaaaaaaatggatttgtccaaatataacattaaagccagctcatgagtaatgcaactctactttctctcaaaatcctaaacgataaaatccctactggtgacatgttgtttcatactaggcactcctttgaagcacacgtaattaacctaacacagagcgcaaaaaacgaacctaaacgggaaactaaaaggatgggaaa

SEQ ID NO: 82344 - DNA, 379 bp, Glycine max
  Clone ID: PAT_MRT3847_45373C.1
ttcctcttacgtacggttgcgagaagacgacagaagggggataaaatgatgagtcaattatttcgacctaaaccttaaccttaacctatgtttaaaaaactaactatttttgaaaccctaggttggagatggtggtgggaggaacagcatatttcttctacaaagaagctcaacggttagggtatgtggctcgctcccacttcaagctccttcagatacagaaccagcacaagattatcatccctggctccttcattctcgacctcggttgtgcccccggcgggtggctccaggtggtttgccagagcttgggtcccttccgcggcggcggttcctctctcttgctttcaccacaaaaaggtcaatggtcccccttctt

SEQ ID NO: 82345 - DNA, 684 bp, Glycine max
  Clone ID: PAT_MRT3847_45374C.1
ggctcggctgatcgatccatgggagaggaactcgaagaagcataacccatcaccaccacccaatccctcgcctcgattggattcggctttgtggcaaccacacgattgttgttgttgtcgttttgagatcgggagggaggaatgagaatgtgatggtgtgggcatgggggttgtcgttgtcgttttggcgtggtggtagggttgttgcggcggtggggctgcggcgtgaacgacgatgcagcttcacttctcgccgagcatgagaagcatcaccatatcaagcaacagcaacaacaacaacaatggctttattgacttgatgaagatcaaggtcgctgcgcgccacatttcctatcgaaccctcttccacaccatccttatcctcgcttttcttcttccctttgtattcattctcaccgccctcgtcaccctcgaaggtgtcaacaactgctcctccttcgattgtttaggtaggcggttgggaccgaggcttcttggtagggttgacgattcaaggagactggttagagatttttacaagatccttaacgagacgaaatctggggaaattcctcctgatctaaagctgtcggattcttttgatcaactgggttctgatatgaagaacaatcagtatgatgcaaaaacttttgcattcatgctaaagggaatgaatggaaaact

SEQ ID NO: 82346 - DNA, 609 bp, Glycine max
  Clone ID: PAT_MRT3847_45375C.1
ccacgcgtccgaataaaactataataggggacgcactgctatcgagtgtttttttcttagtgccatggcgtgctgtagcaatactggcactcgctgcgcaacgcgcatcctgacctctacgattgcgacaataaggtgccggatctataccataccatgcctctggcagccagacttaccctgaagtcttgaacaaaggagtggaccttgacggcttccaggccggtgctgccttattccaggcatgtcacactcgaatacactagactgtcgagaccctaagaaacctttgcaagcgcgcgcattgacaccgatatagaacactagtattcctgcacacgaagcattctgcagtggggaaccatgagagaggtgatgaaaatgcttgctgatactacaaaggcacacgtagacgagcctactctctacatccctatgctgatagcctaataaacgcttaggccttgcgaggaacctgaatgcccatccattgctactaatggtactaggacagcttacaggacgaattagattattgcatccgtattagcgagcacatagtgaatctgagctcaggttcatatgacacatcaccgaatttgctgatct

SEQ ID NO: 82347 - DNA, 219 bp, Glycine max
  Clone ID: PAT_MRT3847_45376C.1
acgagagcaagtgtggtgaacaaattcaattccccaagttttaagaaaatttagttcggtaaaattaacatgcatgttttccctttcgctactcatcttttgtctttcaaagtgtaataaaaataaatgttcacattaaaaaaaaaaaaaaaaaaaaaaaaaaaaaaaaaaaaaaaaaaaaaaaaaaaaaaaaaaaaaaaaaaaaaaaaaaaaaaaaaa

SEQ ID NO: 82348 - DNA, 322 bp, Glycine max
  Clone ID: PAT_MRT3847_45377C.1
atgttgccgtcgaaaataaaattgaaacgtttcatagctttgacttttaagcacatgatcatgattctgaaccctaattacgatggggcgctaacctaaccctggggggggaggacaaaataaaaatccagaacctgtttattgtaaggggttgggggtggggacccatcctatgaaattttaaacccaacacctgctgtgcaaaacattttttttttcccacatcctcctacgctatattttgaataaccattttccctgggggacataaagatcctcctcctcctaattttcccaaagggcattgacttcagactttgac

SEQ ID NO: 82349 - DNA, 355 bp, Glycine max
  unsure (1)..(355): unsure at all n locations
  Clone ID: PAT_MRT3847_45378C.1
gacagcataaacaattaataaagatgagnttgaagaacaacatggtggtgctaaaggtgtgttcgttgcttcttttccttgtgggggtacagctgcacgcatggactgacttttaaaagtgacagcataatatatatatagttcaaaatctggacttgattcacacctaagctctaagcctgaaatttagctgatcatgcatcaatgagactgattcaacctaaccgacaggtcgtgctgacacacatttgtcaactgagtcaaatgctgaactatgctttaatgcaacccttagctgtgtatgaggaacataacagataaactatgcatattgttacaattgcatttatatcta

SEQ ID NO: 82350 - DNA, 1500 bp, Glycine max
  Clone ID: PAT_MRT3847_45379C.1
tgatacatcacaccgcctaactgcatttgatatgccgaattcggctcgagttggaataaataattatggaatgccttgcttttttggctgcacgcttctacgggatgaaacagtgaggtcattttcctgggcactgaaggctttcttagggttcatgaatgggaaggctccacagactatattaaccgaccaaaatatatgtctcaaagaagcactatccacagaaatgccaacaacaaaacatgctttctgtatatggatgatagtagcaaagtttccatcttggtttaatgctgttttaggggaacgatacaatgattggaaggcagaattttatagactttataatcttgagtcagttgaggattttgaactaggctggagggaaatggcttgttcttttgggctgcattccaatcggcacatggttaatttatatagttcacgttctctttgggcgttgccatttttgagaagccattttcttgctgggatgactacaactggtcagtcaaagtcaattaatgcttttattcaacgatttctgagtgcacagacacgccttgcgcactttgttgaacaggttgctgttgctgtggattttaaagatcaaactggagaacaacaaaccatgcagcagaatctccaaaatgtttgcctcaaaacaggggcccccatggaatcacacgccgccacaatcctcactccttttgccttctcaaagcttcaagaacaacttgtgttggctgcacattatgcgtctttttcaattgaagatggttttcttgtgaggcaccacacaaaagctgagggaggccggaaagtttattgggcccctcaagaaggaattataagttgtagctgccatcagtttgagttcactggtattctctgtcggcattctcttagagttctttcaacaggaaattgctttcagattccagatagatatcttcctattcgatggcgtcggatcaacatgccgtcttctaagcttcttcaaagtgcaccaaatgatcatgctgaaagagttaagttgttacaaaatatggtttcatctctgatgacagaatctgctaaatctaaggaacggttagatattgcaacagaacaagtaaccctccttctgtctcgcataagagaacaaccaatttcgttacaagttggccgagatatttcatccatcaataggaatctttgactccaggatacaagaaatggttgagttggtagtctctggttgaatgaatgggagttacaccaaactgtttatgagaaagcttagttattggatttctcatgctagattgagacaatttgaagggtgatagaagctgtttgttagcatcaacttcggcagtgaaatttctgtagattggttaatgccatgttaagtgaatgacaagaaatgtatagtaaatttgttcatacgcatttttgtatttgcaatatatctgctatttttatacatatatggtcatcttaagaagagtattcttc

SEQ ID NO: 82351 - DNA, 201 bp, Glycine max
  unsure (1)..(201): unsure at all n locations
  Clone ID: PAT_MRT3847_4537C.1
cgaatgaagatggcgctgctcaaggtacangcatccacacncatacncanatgctgnctctgnntcaactgcaatggcgctgcagtgtaagtgtgggnanctcaccactnntgggcgtttcccaattcctanttcgatactgncncgaagnncgnagaagagaaggaattganagggtgnaatnncagcnggaggcnnatc

SEQ ID NO: 82352 - DNA, 482 bp, Glycine max
  Clone ID: PAT_MRT3847_45380C.1
atctatcatctatttttttttattctttttgcatgggaatttatttcttatatgtacctccatcctatgtgtttttgtcccttttttatgtatttatttgaaatacatctaatccccttttttgctttttttagattttttgttttgtatatttatatttgtatctttcattccctttttgttattgccatctttcttggtttggggtggaaaatattatggaacaagttctggcaccgcagagattttgggataggtgtgtgtgtaaggggcatattaagttagagcatggcatgagaggcgagaagagccactcttgatcatttgatcttacatatatagctaaggttatatttaagcaggatggaatgattgagattagcactactgacgccgtcacctaatacgctatatatatccaagacttactcctgaacgttatgggaaagggaagttactggcatacaggttatggaaaagaa

SEQ ID NO: 82353 - DNA, 762 bp, Glycine max
  Clone ID: PAT_MRT3847_45381C.1
atccttttgttgaattacttctaacaagactttcactcgagataactattctaatttatagacagaatataaaaaatttcataaaaaaattagctctggtaaaatataaaacaaaggatacattttatagaaaaatgaaattaaaattgttagttattcatcaattattaagattgtgacatataaatgtatgcctttgtttttctttttttctttttaaaaacgcacctgtgttacttcagagcaatcaaatccaacaaaaattatccaaattttaaatcaagttcacaccttttttatcatttagaattttccatccttaacgttatcccattgagagtactttattaatatgaatcaggtataataggagtgaggcatgatgcttgctatcttgtcatcgtccacatcacgatcaaattagtccttaaacacaaagatcaacattaggacctataagaggaagctattaagtatcttttggcaatactctgacaaaaacatagtcaataagtcgcatcttatgtgcatgtatgtctctttacattggtcggcttgaacatatatattctcaataagttaaggacaaacaagcccacttaatcctcaattgtgttatgtcacactcaaaagttttctcactaatcggtaaatatctcaatcatacatcgtgctaatgctaatgctaataccaatacaatgttgatagattaggccttgcaatgcctttatggttgaaatttgaagattaagtgaccagtt

SEQ ID NO: 82354 - DNA, 307 bp, Glycine max
  Clone ID: PAT_MRT3847_45382C.1
gtagcagaagcgaccctaggtgacgtgtaccaacgggtttacacacgagggagcatataagacctatgggtatcagctgggaactgcatcgtatgatgcacgtatccaggagcttggcatctcacgctagcggtaggagcttgatagagctcgagggggctaaagctatactgccttgaatccttgggaggcaaacttgcatggcattgacaatgattaagactccgctataaaggactgtcaacacaacatctaatggcatgaaggggaagcatggtgtgatcatggaccatgaaccttccggggg

SEQ ID NO: 82355 - DNA, 481 bp, Glycine max
  Clone ID: PAT_MRT3847_45383C.1
gcacgcaagcgcgaaatacggctggaggtgagtgacagacacaacacaacccacttcttctcactgtccccatggcatcgagcacgatccgcaaggcgattggcgtggtcaaggaccaaaccggcgtcagcattgccaaagtcgccggcaatttggcccccgacctcgaggtcttaatcgtcaaagccaccagccacgaacaagtccccgccgatgaaaaatacgtccgagaaatcctgacattgacgtcgctttccagaagctacatcaacgcttctctcgtcaccatttccaagaggctcaacaagactcgcgattggatcgtcgccatcaaagccctcttgctcgttcacaggctcttggtcgacgctcaccccgccttcgaggaggagatcgtgcacttcacgcgcctcggcaccttgaggattttcaacatgtgcgacttcagagacgacgcgcattccaactcatgggatcaagt

SEQ ID NO: 82356 - DNA, 259 bp, Glycine max
  unsure (1)..(259): unsure at all n locations
  Clone ID: PAT_MRT3847_45384C.1
agaaaagctncttgnaagaggatgaagggatgnaganactcaaagatagcncttttgttcaaagagctanaatcggcaaangnangcaatagttctgcctcnntttatgtctagagcnntgncgtncaagacctggtgtntgggagtatgttcgtgttgatgnatttggnctgcagngtnggatantctgagtggttncataagatctccgangcaaagnagancttgtagatggacagntggacnggacaatgatgtg

SEQ ID NO: 82357 - DNA, 144 bp, Glycine max
  unsure (1)..(144): unsure at all n locations
  Clone ID: PAT_MRT3847_45385C.1
ttctacacagccaacatgttcgtcaccacaacaaatccgcaccaagctgacagatctgcttaagatccagcacccggtcatgcntgcgggcatgaacgtggctgtggacctaaggttgccgagatgncataacggtggcggttt

SEQ ID NO: 82358 - DNA, 1857 bp, Glycine max
  Clone ID: PAT_MRT3847_45386C.1
aaacgtgcgagccggtgtttgtgagctgcccgaaagtgtgagcgggcaggtccaaactccaagaagagtccaatactgtcgattatcctatctatcaccctcggggtcggaccagacacacttccacgtcaccaccaccaccgtggaaggtggagcgtgaggctgtttccggtaacctctcccggcggcgctgagtggtgatcaaggaaatgggtcagacgctgagttgcgtgcaacagcacgaggaccatggtgtgctcttccctgcacttgcaagtggagaattggaggttgttgaggccatggtggaggaagaccccactgtgttggaacacaccattggctgtgacaggctttctcctctgcatgtcgctgctgccaatggtcggatcgaggttctttccatgttgttggataggtctttcaatgttgacgtattgaatcgacataaacagaccccgttgatgttggctgtgatgcatggaaagactggttgtgttgagaagcttattcatgccggagcaaatatattgatgtttgattctatacgtcgaagaacttgcttgcactacgctgcttattatgggcatatagactgccttaaggccattctttctgctgctcattccacacctgttgctgattcttggggatttgcaagatttgtcaacataagagatggaaacggtgccacccctctgcatcttgcagctcgccatagacggtcggaatgtcttcatgcccttctagacaatggtgctcttgtttgtgcttcaaccggtggatatggttaccctggaagcacgccacttcatatggctgcacgtggtggttctttggactgtgtccggatgctgcttgcttggggagcggatagacttcaattagattcttctgggaaaataccgttctcagttgctctgaagcacaagcattgcgcatgtgcttgtttggccatccccattaaagttcatcagcgagctcaatcaagaagcaaaggccttactggaaaaggccttgcaagaagctaacagagagagggagaagaccatactaaaggagactgacatgcctccatccccactgaattctgagagtgaagatgataacattgcctctgaggctagcgatatggagttatgttgcatatgctttgaccaagcatgcacaattgaggtaagaccctgtggccatcaaatgtgtgctcattgcaccctagcgctatgctgtcacaaaaagcttgatcctgctactaccggcctttctggaccatgatcttgctacttgcgtggatccattcttcagtttgtgcattttgagattaacacaatttcaagatacggttgctaagattaacaaaatcagtgatacagaagtggaatctggccctatgaagccaaggagatcacggaaatcaaatttcagtgaaggaagcagcagcttcaagagcttgtcggccatgggctcatttggaaggattgctggccgcaattccgggaagattacagatgaaaagcaatgggaggtttcttgaagcttgataactgttgatgattattttaattccaagtcggcaagaaattatatgaatgatggttttaatttctgtggaatagctgcctatattggtatcttatttgtattcattttgtcactattgtccaaagatcactaagatcatgagagacaacagtttgtgatcggtttgagttttttacttctgtaatctgattctcagttggaattggagaatcagaacagttatgtaatttttttcccccaaatatcaaatatagtatgcatgagttaaaggaaaaaaaaaaaaaaaaaaggccggcccctttaaaggacccccgc

SEQ ID NO: 82359 - DNA, 316 bp, Glycine max
  Clone ID: PAT_MRT3847_45387C.1
gaaaaggaggaagatgaaaaagaggattggagggtcgccacgtttagcaaggactaaatcctctctactctttcttcctctcttcgagagggttttatcttcttcctcttcacgtcgttcttctggcctctacaatgagcaacgagaaggacactttcaacgtcgctgatctcacttcagctctcaactaagacaatagaacagaccttgtcaatgctctcactagcaggatacagcatttggcttgacagcattctgatattctagagtctctgtcacacaatgtcaggaaccgtgtggaggttcttacagagat

SEQ ID NO: 82360 - DNA, 383 bp, Glycine max
  Clone ID: PAT_MRT3847_45388C.1
ggaccaacacctgtgcagcaattctctgtcaccaaatttgagcgttctatctttctgactttggcggcaatgacagaaacggtggtctctgataattccaagggcttaatactggcaatgggttctaatgcattcataggatccagattcatcttgaagaagaaaggtcttaagcgcgctgctgcacgccgtactagtgcaagagttggtggatatactcatctactagagccgctatggctggctctcatggcgacaatgataattggagagattgcatactatgatgcttatatctatgctacggcagttatgggtactgcccttggtgcacttactattattagcactgcatgattggctcactacttgttgaatgaacg

SEQ ID NO: 82361 - DNA, 1271 bp, Glycine max
  unsure (1)..(1271): unsure at all n locations
  Clone ID: PAT_MRT3847_45389C.1
agagatggaaacgggggcctcctagcatnttgccgctcgttatatctggccggaatgtcttcatgcccttctagacaatggtgctcttgtttgtgcttcaactggtggatatggttaccctggaagcacgccacttcatatggctgcccgtggtggttctttggactgtgtccggatgttgcttgcttggggagcagatagacttcaattagattcttctgggaaaataccattctcagttgccctgaagcacaagcataaggcatgtgctgccctgctggatccctcgtctgcagcaccgcttgtttggccatccccattaaagttcatcagcgagctcaatcaagaagcaaaggccttactggaaaaggccttgcaagaagctaacagagagagggagaagaccatactaaaggagactgacatgcctccatccccactgaattctgagagtgaagatgataacattgcctctgaggctagcgatatggagttatgttgcatatgctttgaccaagcatgcacaattgaggtaagaccctgtggccatcaaatgtgtgctcattgcaccctagcgctatgctgtcacaaaaagcttgatcctgctactaccggcctttctggaccagtttgtccattttgccgtggatccattcttcaattactggttgctaagattaacaaaatcagtgatacagaagtggaatctagccctatgaagccaaggagatcacggaaatcaaatttcagtgaagggagcagcagcttcaagagcttgtcggccatgggctcatttggaaggattgccggccgcaattcagggaaaattacagatgaaaagcaatgataaagtggtggtgattattttgattccaagccggcaggaaattatataaatggtggttttaatttctgtttgataactgcctatattggtatcttatttgtattcattttctcacaattgtccaaagatcactacggtcatgagagacagctgcttgtagtcggtttgagttttttacttctgtaatctgattctcagttggaattggagaatcagaacagttatgtattcccccccaaatatcaaacatagtatccatgagttaaaggtagttttcttcactgctttaactttggtaaacatatatggattcacacacacaggtattcgttcttaaccaaaaaaaaaaaaaaaaaaaaaaaagaaaaaaaagaaagaaaaaaaaaatagaaatagcaaaaaaaaaaaagtaaatgattntggg

SEQ ID NO: 82362 - DNA, 274 bp, Glycine max
  unsure (1)..(274): unsure at all n locations
  Clone ID: PAT_MRT3847_4538C.1
gatgctcttcttccctcaccgatttctcttttgccagattcgattttatttcatttggtttgcagaagattccggtaaacaagatatttatgcttttatttaatttttgttgttttcattgcanggggcaangggctggtttggtgtttctttcatttcactttatatgaatacatagaaaagtttgaagggttttagggatttgcatcatgttaggttcattaccaatattgccactccctgctccctcctctgatggaaatctaagtcctct

SEQ ID NO: 82363 - DNA, 450 bp, Glycine max
  Clone ID: PAT_MRT3847_45390C.1
acaaacgtgaaagccttatcatacagagttatcttgattccaacataaaatttcaacaactctagactgttattaataaacgcatacgttctaacatcacgctcgtgaaaaatatccctactaacaaacttaaaatcaatgaactttataaagtcaagaatcctttacaatctcctgtttgctttcacaccaatcaccacatctattgcttcactcatcaattatcccttacagaacttttactattcaactatccaagctacacctcttgtcattaacattcaacctcatatccacaagttcaaccacatactttcaacttatactacaatgcctgtactgaaactgtcacttatcacaactactaatcaccattaaactagagagcttaatccactctataaaaccatagatactatttccaaacaaaaccccctatttgaatatttt

SEQ ID NO: 82364 - DNA, 248 bp, Glycine max
  Clone ID: PAT_MRT3847_45391C.1
gaatccctaccctgtctctctccttcttcatcatctccttcattgacaatgttttgccatccccatgctgcatcattccactccagcatgtcttggattactacgttgcgtagaggatccattcattcatcgtcaagatgaagagctcaaggcaactacaactcagcaaccatagctttcactcctgcatgtccacctaattcttcgcacgctcatttgaaatactcagttaggctcacaatgacaca

SEQ ID NO: 82365 - DNA, 321 bp, Glycine max
  Clone ID: PAT_MRT3847_45392C.1
gagaaacacctcgcacaattatgttttaaaacaacaagaaacaattggctttgtttaaaaaaaaaaacaaaaattggctttccattataacccttagctttacccggggtcatgctaattattactttaaaaaaaactcatccttttttgggaaaaaattcccctccctcaaaaaaacataacactgtgatgtgttggtaatttccaaaattggtttattccacggtcaccaccaacgatctatggggggtttgggccctccatggccaccgggggggggggggtggcaatggccggatcctcaagaattttttttttttt

SEQ ID NO: 82366 - DNA, 672 bp, Glycine max
  Clone ID: PAT_MRT3847_45393C.1
gcaacaggggcttccccacaccatcctctcccaacaagagccccctgcttaaattgtgcactccttctttatcccattctttcctcagattcgcgccaccattggaaaaaaaaaggtttccggtgttggggagcctagggttagggtttctgagagatatgggatgttccatgcattcgtgagccttatcgcacgcggttggaagctgtttgggcacggtgatgacgtcggtaatgtcgccgccgccaccggaagagaatgcaaggaggacctcctctggttccgcgacatcggaaagttcgctgccggcgatttctccatggccgtcgtccaggccaaccaggtcttcgaggaccagagctagatcgagtccggcggcttcagcaccttcatcggcatctacgacggccacggcggccccgattgctcctgctatgtctgtgataacttgttccgcaatctccaagaactgtacaagatggtttgcgaacctgatgaaactgatttgaacatacgcatacctgctgtcatgcttccactagatgcaggtacaaggctcgaaaaaatgttggcaactacttcatctgtgtctgtgcagctgtactcgccacttcgaccagctgttgacgtagcagaagtatttctttggatgatggcagttcttaccatatt

SEQ ID NO: 82367 - DNA, 607 bp, Glycine max
  Clone ID: PAT_MRT3847_45394C.1
atgaatatatacttgattccttttaaaaaatatatatagtcttaaagtaattttacggtgttgtgaatgtttttaatttaaaaaaacattataaaaatttctttataaaataatataccaatgaactggtggctttaagttgtcaaatttttctacctttgttttagctagaaacgtttaaattggtgtaaggcgaaaaaagaattctacgtgtcattgaggcattaattgagaaattcataaaaatattctagtcaggagctcatttggaactctaattagtaaacagatcaaatattgcagttactcaattagtagttaaaaatatttaatgtaaatttatttttttactaattgttggatcaagtgacttcagaataattaagaaggggggttaaattaattattcctaaatctttcctaatttaaaaattactcttttttactatgttcttaagagaataaggagtagaagagaattttaaccaaaagttaaagcagaaattaaaatgcacagcgaaaaataaagagtggggaagagggagacaaacaccaagagttttaatactgggttcggaacaacccgtgcctacatctagtttccaag

SEQ ID NO: 82368 - DNA, 564 bp, Glycine max
  Clone ID: PAT_MRT3847_45395C.1
cccacgcgtccgacctcctgtacattcaactgacttaaatgcatgttatgcaactatagtgaggcaaagagttggcacataactaatcaaaatggcggctatattccacaaagcttacgctcatgcatctgacgagcttaacaggcctgcatctgacaatggggccacgatgcctaaggttcctgaggaaactcttaaagattccctctcccaccatcctgacgacacttgctccataagctatgctgaagctgatgaactcacttatgttcatcctgatcagtcctgctgtagtgataacagatagttttgtggcattgatgacatatactgtctgttcttgcggagcttgaacaatatgttcctactcaacactcaagatggattgtcagagagtactgacgatgccatgtttgcgagcggagcttataacactgtccatgacgggggtacataccctgcagatcaagtgggcaaggaacgtgatggcagttaggctgttggtgtctatgacagcatgggtgctagtgtattgagcaaaactgaattctgatggaggagtga

SEQ ID NO: 82369 - DNA, 270 bp, Glycine max
  Clone ID: PAT_MRT3847_45396C.1
ttgcggttgtgtgggaaaaaaaaaaaaaaagagaaatttaaaaattttgtgctggtttttcctattaccaaaatattagttatttaagaccccgtcttgtatgtaatcttatatggtgggggggggccgttctagtggttctaggttttctttcgggggctatggtaggtttatagtttttttattgggttactaaatataaatttagtggcggtagttttacatcgttttgattgggaaaacctgggggttcccttaacttatattgtt

SEQ ID NO: 82370 - DNA, 362 bp, Glycine max
  Clone ID: PAT_MRT3847_45397C.1
cctgataacaactgtatagttcacatcataaaaacacagctatagctaaacaacaagacaaaaaattacaattaaataaagcaacacaacaaaagcaaaaaaacaaaaaaaaggattaggaaacaaacaaaaaaaaaaaaacttttgaaataaaaaaaaacaacgtatatattacaaaatccagaccatcaaatgcacattacaagcaagccaataacaccatgagaggggcttggcggtaaatgaataactctacctctgaacctttaccaaacaaagccatcaaaaaatctctgtagctccctgaggtattcccaaaaacaggatcatcaagactgggcttgttcacattagcataataa

SEQ ID NO: 82371 - DNA, 639 bp, Glycine max
  unsure (1)..(639): unsure at all n locations
  Clone ID: PAT_MRT3847_45398C.1
ccttcaaaatttgnaggcttatgtaaagacaaagttggatgagatacagtcatctcttttggaaagggcaattgcttttcgagacagtaatattgtagatgtgaacacatatgatgtcttaaagctgcaatatcacaaggcaaatgggcaaggggcccttggtctgcaagtgatgaagatgagttaaaagtaaaggaggagactggagcaactattaggtgttttcctttcgaacagccacaaggggttaaaacatgcttgatgaccggcaatcctgctgaagaagtggctattttttccaaatcatactaactctgcaagcttgcttattctttaaactcccaaataatattatctgcaagtgggtatttgtactttgtttaaatttttacttgctttttgaaaagtcaatttcttgttgtaacttaggtaggttagtacaaaataacacataatatattgattcaggacttcaattcatactttcttagtttgttatcattgtttagaaaaacaattgagatgattctcttaggggtaaaagttgaaggatttatattactgtagtttgatgaaatctttgtaatctatgaatgcttctttatgttttatcttattcactagtgactttcatggctt

SEQ ID NO: 82372 - DNA, 262 bp, Glycine max
  Clone ID: PAT_MRT3847_45399C.1
cttaaaatgccatctagggacttctcacacacgtcactattatgtgtcagcaattcactatgctgcttgacctgtaatggatacctcatccgacgcacatggtgctacactaactgcctcattactatctccctgcaaagtaacaaggccaataactcctatttctagacatgcctcttccttgcagatgtatatgaggctcataacctcatgaccctcctgatgatgattcttcacatctacatcgagaggttgtaatatc

SEQ ID NO: 82373 - DNA, 336 bp, Glycine max
  Clone ID: PAT_MRT3847_4539C.1
aaaccacagccctttcctttttttcaagaaaaatttaaatcccccgggggggggaaggccccccccaaggggatttcaaagtttttcccccccccttattttcggggtttttccaacccaagaggggtcaaatccccccaattttccatacccattttttttaggcgtggggccaaaaaggtttgggttaaaaaatcctaggggggggcaaacaccactggctttgaaaggtttagggctaacttggggccaaacagtttttccccaatttgtaatgccaaccccagggggggtcccggacccctccttgtaaaaaaattgccccccccccccccc

SEQ ID NO: 82374 - DNA, 259 bp, Glycine max
  Clone ID: PAT_MRT3847_453C.1
tgcaacaacaccagcaaatgaatatcatccaacaatgaaatcgctagccgatcaaagggacagaaatatgaaggttatacaggagaaaatgaaccttgacaaaaaagaaatgaaacgctttaatcctgttgatgcatttccaggtgatattgtaatatttggaagggttcttaatcttctaagagggctttcttccaccatgaatgtacgaatagtatatatggacattatgaggccatttgctgaatcagttttgagt

SEQ ID NO: 82375 - DNA, 1725 bp, Glycine max
  Clone ID: PAT_MRT3847_45400C.1
cagggacatcaaaggatcaaatcttttggtgaacaatgaagggatattgaaggtagcggattttggattggcaaatttctccaattctgggaacaagcagcccctcactagtcgtgttgtcaccttatggtaccgtcctccggaacttttgctcggttcaacagcttatggtccatccgtggatctctggagtgttggctgtgtatttgcagaattactaattgggaagcctatacttcaggggagaactgaggttgagcaattgcacaaaattttcaagctttgtggctccccacctgaagaatactggaaaaagaccagacttcctcatgcaacattgttcaagccacaacaaccatatgatagttccctccgagagacatttaaggattttcatgcatccactgtaaatcttctacaaactcttctttctgtcgaaccaagcaaacgtggaactgcctcttctgctctctcattggagtatttcaaaataaaaccttatgcatgtgaaccatcaagtttaccaatatacccgcctagcaaggagattgatgcgaaacatgaggaggaatcaagaaggaaaaagataggtgggcgagcttgcaaaccagaatcaagaaaaccatcaagaaagccactagcactcagtaaattagccccagcagaggatttgacaagtcaaactcaaacttcacataagatgaatgatagatctgtccacatcattaaacaagaggacactaacacgtgtgaggaggcaccaaagcagtctagtggtaaaccagaagatgcttcttcttatatgaagaatgcatctcaagtagatattccctttcctggaccattgcaagtttcaaaatcaagtggctttgcatgggcaaaaaggcgtagagatgacacttcagttagatcccacagtcggtctatttctagaggatttatctttaattcattagaaacttctacactaaattcaagggataattctgaatccagaaaccatgaaaataaggaatttttcggggcacgcaccaactctaggggcaatcacctacttgaaatttctaagcttgccatgcaaaatcaatggagtaagtttgatcgtccagattcatttgatacttgtgatgagtaccattcacaagaactgtccctggcaatttataacaggcaagattcgctatccaagagaagtaacctgagttaccaggatcaagaagaaaaggtagagttttcagggcctctgctatctcaaatgcacacagttgatgaactcttagaaagacacgagcgtcatatccggcatactgtcagaagatcatggtttcagagaggtaagaagcaagggaagtaagtaactgcaactgtaacattcattcatggaaggatatagatcctcgtacatcaaatcaaatgtccttgtgaaagggccatctacattgtcgaagctcacttgctgctgtgactttgagcaacaatgaacattatcatgtacacatagacacagtaaccagcagcatgaattgttacctagaagcttggaaactaaccaatttgaggagtgtaattcaatttatagaaatcagaaggccgtggagaagagaagagaagcttttttttccttcttttcaccatggattttctatttttgatcaattataatatataaaagtttatttctgtatgatctaaaccttcctcaatcctattgccttttgctttgag

SEQ ID NO: 82376 - DNA, 473 bp, Glycine max
  Clone ID: PAT_MRT3847_45401C.1
ggtgggaacaagtgattggtgtaccaataagaagaggtgcccttttatttgacagttaaagtagaggattgttcagcaataaaaaaagggaagaatgttcccttcttacttgttcctcgatagtccagaataaagttagtgattgtgctgttaaaaaacattatagactttgtaccagactagaaaataaccaccgaaagcgttatgatacgaaatacacgtgaaaatttggtccaaattcagccttgtacactaaaatatttaacgcgttaaagtatataatgcggtatttagtattggatcattacataatgttattcctcgagtgtttagagaagccacctgagcttatagtttaaggtgaaatagttattgagtagaaaaaaaaattgtctatagttgttcagactaaatattttgacattttctgaaaacttaaaaaaatgtaacttttacatttacattttgaaaaa

SEQ ID NO: 82377 - DNA, 274 bp, Glycine max
  Clone ID: PAT_MRT3847_45402C.1
ggctcgagcatgcatcgaaagaatcaccatacatgcagcacaatgaagacgattaagcgtaggcgcataaataccacatgcattcttgatcactgctagatcaacgctattgcccctccggacgcgaccttcggcatatattacttcgcctatacatggtcccctaacgcctagaacgctatctgcaatgaagagattgaaattgatggctagaagggggattctgacagcctcaaagagtatggactacaaaaaaggggttggcctgagacat

SEQ ID NO: 82378 - DNA, 1198 bp, Glycine max
  Clone ID: PAT_MRT3847_45403C.1
cggattcgtgggctgagttcaattacaacctaggaactctcacatcttcttactcttaattttctcttcagaccactcagataatggcaagcactcctagcattccatcacacataaaagcttgggcttattctgaatatgggaacacagaagagattctcaaatttgaatctaacatacctataccagacatcaaggaagaccaagtgctcatcaaggttgtggctgcagcccttaacccaatagattataagagggctcatgggtttttgaagaacactgattctccctttcctactgttccggggtacgatgttgctggtgtggtggtcaaagtgggaagtcaagtgagtaaattcaaggttggggatggggtttatggtgacatcaatgaggatcctgtgaataatccaaaggccattgggtctttggcagagtacactgctgttgaagagaaagtgttggctcacaaaccctccaatttgagctttgttgaagctgctagccttcctttggccatcataactgcttatcaaggatttgaaaaggttgagttttctgctggcaaatctatacttgttcttgggggtgctggtggagttggatcccttgttattcagctcgcgaagcacgtttttggcgcatcaaaggttgcagccacagctagtactgcaaaactggatttgttaaggaacttgggagcagacttagctattgattatactaaggagaattttgaagaactggaagagaagtttgatgtagtgtacgacacagtaggagaaagtgagactgagaaggcattgaaggctgttaaagaaagtggcaaagttgtgacaatagtgagatttggacatcctgaagctatattcttcatacgaatttcagatggtactgtgttggagaaactaaaaccttacttagagagtgggaaggtgaagccaatattggaccctaagagtccctatccattttctcagaccgtggaggcatttgcacacttgaagactaatagagccattgggaaagtggtcatacatcccattccataatttatgtttgcgtgatcaaacgtgaatatctctttcagaattgtggtggtgaaaattagatacttggcttgtggtttggttgcaatataaataataagactcaattggtccaaaatttccaaaggatgaaaaaaaaaaacgaaggc

SEQ ID NO: 82379 - DNA, 283 bp, Glycine max
  Clone ID: PAT_MRT3847_45404C.1
gggacgggggtcaactggatttattaataatcgcagcgcgaattggaggaggagccctacaaaccggccggcagggcctaagagcattcaccgacacgtaaagggtttggctggttcattaaccttatattggttcgccgtcagctcggatgctaaaaggtacacacgcctgcccctgcggctattcgctcatcgcatgcttcgcctttcgcgcgctcgcgcccacattcgcggcatcaccccgcgcacttcgcccttcgcggcggaacataccttctcggga

SEQ ID NO: 82380 - DNA, 627 bp, Glycine max
  unsure (1)..(627): unsure at all n locations
  Clone ID: PAT_MRT3847_45405C.1
ccacgcgtccggcaaaacctctcttcttcttctgattggatccacctcgcgattttttcgatttttccggttggtttttctttcttttttcgggnttcctggatcctggacttccgaattcgaattcccttttggcccggaaaaaggaagtccctccggcaggggtccggggaataaccgcttcccctcaagaggtggtggaggttatcgtggtggtccttcaaaccaggtttccaaccggaggtttggcccctcttcattccgtttggaaccaccatcataatccccttacctggtccaaatcctgctaactttccccacaccggttttctaattacccgggttccgtttccgggcacccggaaaaaaagtaaagggaagggggttcccctggattccccttccctcggcaggggaagaaccgaagcaaggctaactggtcaccgcccggaatggacacccatcctccttccgcggaagaaggtgggttggtatagaacaagaaaacccttttccatcccttagccaagggaacgatgggccgaggaagaacctaataaggttctagaagctttgaaactacccgggcgaacatggcagcgcatagaagaacctataggaaccaag

SEQ ID NO: 82381 - DNA, 669 bp, Glycine max
  unsure (1)..(669): unsure at all n locations
  Clone ID: PAT_MRT3847_45406C.1
ccacgccgtccgcttctctcgcaacaataactcctctcttcagagtacctctccttgggcaactccaagagagtactccacgccgccgctgataatgcctcccaagcccgcttgccgtcaccgccgccgacgaccttcccttcttcgctcggccagctcgccgcctctctctccgattctgactttgcactaaccgcctacgagatcttcctcgccgcgtgccgcacctcctccggcaagcctctcagtttcgctgccaaccactcctccactatcgccagcaaggtcaagaaggcctttggccttaaatcgccaggtttggcctccagaaagaagccctggctctgcttcgggccaaggaaagccgaaacggcctctcatcgtcggcgagctgatgcgcaaccagatgaaggtttccgaagccatggattcgcacgtgcgacgcgtgctgctcaggatttccgctggccagggaataccatctgttagtaaaacactggaggattctgattaatgggttactgcactctgtaagaatctgactacttggtggccatgggtaagtcacactgagatattgcttttcgagtttgcctttttggttttttctccccattgctgattgaattactttcacttgcttgntgggatctgtgctatagtttgcct

SEQ ID NO: 82382 - DNA, 1196 bp, Glycine max
  unsure (1)..(1196): unsure at all n locations
  Clone ID: PAT_MRT3847_45407C.1
acatgatgcacacaanataattaatgcagatacagaaatggcaccaaacaaattcacaaaaacatcaattttaccaaagagaaaaaatattaaataaatccataaaaaaaatggcccgacagcatttttctgacctgcatgatatcacgctccctctcaccaggacgctggcatgtaactctcagcaaattagtgatttgcctctcattaagccttttcgagtacctttgaccctccactatcttgcaaacctccattggcaaatagtttggtctctgtgcattgccaacttgcagacaaggccactgagtatgttgaatgacaaacccatatgtctcatagaagtactccacaacagatttcatggttcccctttcatctaccgggaatgtcaattctctggttgcctgtgaagtcagaccagagatacgatattttcttctcatgtttccacgatgtgtcacttcaactttgataccccggagagctttcttgatcttcacacgatcagcatcagaaagtggccgggcggatacatctctgttcagcagttgagttacgaaatcaattactggcaatggctcaataaatgcagtggaagacatatcaatgttcagtgatagccccatctgtgtaggccgaatactctggtagaaaccacgccagctttccaatccctcacctaaaggctgtcttctacccaaatcaggtgaataaaatgatcttccgacaggacaataccttgtagtagggagttcacgcagaacaatgtcaaggacctgcaaagcctcttgaggagcatcagtttgccttccctgtaaaaagagtcctaaatggtgaagatctgcccgtgcagccaattttatcacaaccttgaattccctgtccctcctctggcctccagctccttcatcatcatcagcaagaacaattctgaactcctttgacataaaaggaagtggtccagcagtatagaggctcttgcgcccatcataagcaggaagtctcttacccaagtgagattcccgatacagcctcaccaactgctccataacagcacggttcactcctcttgatgtcacttcaggagtaattgttacatcatattgatgcagatctttgttgggtaactcagcaaagaaatgattagccttaacaacacacttggtgccatagctaccctttccaggtcgaag

SEQ ID NO: 82383 - DNA, 458 bp, Glycine max
  Clone ID: PAT_MRT3847_45408C.1
aaaaccctatccccccttcgcctaaaaacaaaaaaggggaaccaaaaaagggccccaggagcccctaaaaaaaaaaaccccaaaggacccccaaatgggtaaaatcggaaaaaaaaaacccccccaaacgggcggtttttccggattaaaaaaacaaaggcccccccaggcttgaccaatgaaccgactttgacgggggcctcttgaaaaatcttcaaaaaaagggcaaagagggctatggcaaccttttccccttgccaaaaaaaaggaccccggggaacccccacccccccaaaaagggggtttaaacctccctaaagggcccgccccccgcacaaaaacttaaaaatttacccccccccaaaaaccccccaaaaaaaacccccccccccccccccccaaaaaatctaaaccccggaacccttggcccccccccaaaaacggggacccccaccctt

SEQ ID NO: 82384 - DNA, 496 bp, Glycine max
  unsure (1)..(496): unsure at all n locations
  Clone ID: PAT_MRT3847_45409C.1
gcggacgcccttctttttttttttttttgaccactatttacaaaccccccaggcgccannaaaaaacaagaggcggatttattaaaaaganacataccccctcaacacatacactcacccactgacaaatggccaacccctacgcagctcacccaacacaaggcacaaagaagcgccacccaaaagctacctagcatgaccaggccaaacggtgggacaaccgaaccctgaacgcaacccgcacatacagtgaaacatgcgcacggagacccaaacaacaccgaagacagcaacagccaacagactacaaccacagctttgggggacgagaaaatgcgactctgataaacacacatcgaaaggagaagaagggccggaccggaaccgccctaattcatcgtacgcacacaatgccgaccttgtacgaaaccgaaacgaaactactacgcccgaaaacggagaaatcagagtaccccaaccgagaggagaaaccgga

SEQ ID NO: 82385 - DNA, 754 bp, Glycine max
  Clone ID: PAT_MRT3847_4540C.1
atttcaaaaatcaattagcattcacaaactaagcatcatatcccaaaccctaatcgttgtgatatcctttgttgtgtgaaatggcttccaagggcacagttgcatccacttatgttgctctattcctttgtctcaacatgctttcctacactatggtgagctccacctacatccctgtaatccctgacccatcagtgccttctcaaaagggtacctgccctatagatgcacttaagttgggtgtgtgtgccaacgtgttgaacttggtcaatgttaaattagggtctccaccaacgctcccatgctgcaacctcattaagggtcttgcggatcttgaagttgctgcatgcctttgcactgccctcaaagctaacgttcttggcatcaacctcaacgtcccaatttccttgagcgtaattctcaacaactgtggaaggaataacgctggcttccagtgcccttgaattctttattgctgatccatatccacatattccacatgttgttggtgatctttgtcatgcatatttcatatctctttatggttaattttctcttttcaattcatgttgtgttgcatgtattattgttattttttggcgcttgccatcctaatttctcactccttcaacatttgttctactgacggagggttactcatcatcctcgtcagcatctttgattgcatctgtaagagctgtggtatcaataaaattatgtgattcttattaaaaaaaaaaaaaaaaaaggcccc

SEQ ID NO: 82386 - DNA, 1665 bp, Glycine max
  Clone ID: PAT_MRT3847_45410C.1
ggctcgaggttctattcaatggtcctctactgctcaacttcaaagaaaacggaggcacatggttatgaggaacccaccattctatcatctgagacaccttttactgttagtgaagtagaggccttgcatgaactctacaagaagttgagcaattcaattgttgaagatggtcttattcacaaggtgagttaggcttttaagttttccggtttagattagatgtccttaaagttcgcacctaattaatcttttagataatttactttttggtcatctttcatttcaggaagaattccagctggcgctattcaggaataaaaacaagaaaaatctgcttgctgcagttgcttttaggttgtatgatctgaggcagacagggtttattgaacgagaggaggtatggttttctttttctttagttattataatattacgctatggttctttagtcttatccataattcatagatatatgtatgtgcttgttcaatatacatttagatcaaccctttactcccactaatggtttatctgatctgcagttgaaggagatggtattggcactttggcatgactctactagtgggctttcgattcatttgattgaaaccgtcgtagtcacggggatgagtgctggcgagatctattcaggaataaggataggacaagtctgtttgcagataagatttttgacttatttgatctcaagcgcaatggggtcattgagttcggggaatttgttcgatcattgggtgtttttcacccaaatgcagcattagaagacaagattacttttgcttttaggttgtatgatctgaggcagacagggtttattgaacgagaggagttgaaggagatggtattggcacttttgcatgagtcggatcttgagctttcagatgatatgattgaaaccattgtggataagacttttagtgatgctgatataaacggtgatggaaggatcgatcaagatgaatggaaagcatttgtgtccaagcatccatccttgataaagaatatgacacttccatatctgaaggatattaccttggcttttcccagttttgtcacaggaacggatattgaagagtcagagatgtgactctgggaggttttggcttcaccaataatgatgctatacactagcatagtagtatttgagtcattttgaatacaaggttagaagtactcttgagaatttttctattggaaaaagttctatatttttaatagaaaagctctaaaaaacacttctggtttgtatccaaacataccatatatatctttgatttcgtctcttgatatattattgctgttaagagatgaccttacctgcggtgccaatacaagaataaaatttcgtctatggttcccggggaaaacaatttctacacctggttttgcaaatgctcagacacaaactgaagttctttgtagtttgtagtttgtagtagctgaacctatgaatatgatgatagtaatatcgatctaaggttacgaattgttcacatgaactgttaattccaatgcaaggttagcttgtacattatgtatatgtatatacgagagatgtgagtgagtaggatgtagcaaccggcccatgttactcggccatttttgctgcttgtgagtttttaggtatatattgagaattttgccttt

SEQ ID NO: 82387 - DNA, 314 bp, Glycine max
  Clone ID: PAT_MRT3847_45411C.1
atgtataagaatttctaagattccgctcgcacttttataatgccaacaattatattgaattgatactggtatttaatatttacttatacttaataattgaataaaatgtcaaactcactacaatcaattactcgcgagtttcgtccatcgcagatatgaagtgtatatagtatgtataaaaaagaaatattaagattgtaaaatcattcgcacatgccttgtctcgaatgttccagtttgatactatttagaagattcagactaaaaataatgtttaagtttttacaagatcgaggtcatattaatttgtgaaa

SEQ ID NO: 82388 - DNA, 748 bp, Glycine max
  unsure (1)..(748): unsure at all n locations
  Clone ID: PAT_MRT3847_45412C.1
cccgcgtccgtttattttaccattcttcttccatttcatcaggtatgaaaaaaaaaacacaacaaaggattcagctttttgaagtgtagttgagttggtcaaatctcatgtgaacaaaggaaactattgctttctctttattccgttgctttcatatttgccactttttttctgttccatacttcttttccattatgtatgcagtcaaaatagaaaaattcagcttagaaagttccttttgccttttcaaactcatgttaaacttgtgtgattgtaaggattttattgttatggccttttccaatcctctcttctctcttgttaaagaattccatagtttctcgtttttttctttctttctacttcatgacatantaattgggtgnttgtggacgaaaaccatgggaagacagtggtctctcttcagtgccatggataccctcttgttgtgtatccttctttcttctgaagttgttttgactagttatcaaaacgttggcaaagtttatccgggaattgaaggttctcaaatgaattggattgacaggtatggaattttgcttgagtcatataatggagaatttggctttggtnttggtcaccactgcaaatgactccacattgtttctactagcaatagtccacatgcacacccccaagttggttttgggttgcaaatagggaacttcctgtttccaattctgataattttgtgtttgatgagaagggcaatgtcattttgcataaa

SEQ ID NO: 82389 - DNA, 814 bp, Glycine max
  unsure (1)..(814): unsure at all n locations
  Clone ID: PAT_MRT3847_45413C.1
cgtaaaagttttaccttatttttattactcttaaaaactcccttgaatttggcgttccttaattaagttgtgtaccttcttaccaacagacttttagtgatgctgatataaacggtgatggaaggatcgatcaagatgaatggaaagcatttgtgtccaagcatccatccttgataaagaatatgacacttccatatctgaagtcagtatattcactctccatgagccttatttttggaatttcagaaaacttttcttagttttgatgcttgtctcctccccgtgttgcagggatattaccttggcttttcccagttttgtcacaggaacggatattgaagagtcagagatgtgactctgggaggttttggcttcaccaataatgatgctatacactagcatagtagtatttgagtcattttgaatacaaggttagaagtactcttgagaatttttctattggaaaaagttctatatttttaatagaaaagctctaaaaaacacttctggtttgtatccaaacataccatatatatctttgatttcgtctcttgatatattattgctgttaagagatgaccttacctgcggtgccaatacaagaataaaatttcgtctatggttcccggagaaaacaatttctacacctggttntgcaaatgctcagacacaaactgaagttctttgtagtttgtagtttgtagtagctgaacctatgaatatgatgatagtnatatcgatctaaggttacgaattgttcacatgaactggtaaattccatgcaggtntagctgacattatgnatatgtatata

SEQ ID NO: 82390 - DNA, 534 bp, Glycine max
  unsure (1)..(534): unsure at all n locations
  Clone ID: PAT_MRT3847_45414C.1
tgtcgtccgcccacgcgtccgctttggtaaggaaggaatgagacattattgttatacctgtctttaaactgttacaattcaatcttaatacaataatgattgcacttattatcaagatgaggtaaactcccatagtcccatcatatcttcttttctccgtaaaacattactaacattttgtaacacttttttttgtatgttttctaaattttcaacactttgtatttttaagtttcttattttatactaaaaattattctttatccctcaaatttcaactgttccgcctctacaaattaaattgacatatattatcattaaaggaaaataaacttttagtttgctctttcttggaaactagcacgtgtcatttttaacttgctcttataaattctaattgattatgcacatatttttataaatttaaattttagttttaacatataatttttaattggacctgaattaattataaatacatctattatagntttaaatattttatttaatttatatacttcaaaattatcttaa

SEQ ID NO: 82391 - DNA, 303 bp, Glycine max
  Clone ID: PAT_MRT3847_45415C.1
gtttgatgttctaactctttcttctacttttattgttctgactatgtttgtgttttttgtctcacctaaaaatatcttgctacaactgtaactactgttgcagaagctcctgcaagttcggcaactgctacctaagctgcaagacatacccacacttgagctacactgagtcaaccaccacctataccttagtcatgtgagtgccacctgctaacgctcaatatgactgttcttaaattggagtgccctctaagaacgatggctgctaacttaaaccaaactgcatctacaacccctgcactt

SEQ ID NO: 82392 - DNA, 283 bp, Glycine max
  unsure (1)..(283): unsure at all n locations
  Clone ID: PAT_MRT3847_45416C.1
gcgagcagactcatccaccttcttctctagtcgcatcaagtgccccctattgggcgtattanngtctattaccacaatcacaactaatggctggcgtgcgatcatctgttcatgtggggctgggagtaatttacttaagttacccatcaaagtatttgcccggttgaattattgattagttncgattcactcnnatctgcaagcactggcccgtataagcacccggaagaaaagctgctgttagctgaccatactttggaatacttagtcggaagaattctgg

SEQ ID NO: 82393 - DNA, 356 bp, Glycine max
  Clone ID: PAT_MRT3847_45417C.1
gtgagctaagcatggcggtggttggtggtggtgcctgccgtaattgaatctttacagtgaatgaagagagatattgctccagggggtcctgcacatcgtatgtctccactctgaaaatggggcttgtgcgtagcataatggagaagctcgtctgaactggtagaactttctccatttgcttttgaagaaaatggagtcgagctctctgtaagaaatatggcgaaggttcctgaggaaatgagaccctactgtggtgcttcttgtgtaggaactcttgaattggtgggcattgatgacccaatttttaatgtgcgaatcacagatcctgctgcttgtgtcctgactgtacgtgtagc

SEQ ID NO: 82394 - DNA, 194 bp, Glycine max
  Clone ID: PAT_MRT3847_45418C.1
tggcatattagttgacaataccgtatccaacgtgtgatatacgtatatatctgcaactgcatttactgcttcaagattggcttaacttcagcacatcttcaagtttattttacaacacaatgttttttgaaataatcaagagatattctatattaattgtttgcgagtcaatcacgtaagatatacagaaagat

SEQ ID NO: 82395 - DNA, 444 bp, Glycine max
  unsure (1)..(444): unsure at all n locations
  Clone ID: PAT_MRT3847_45419C.1
gcggaatcgagtactgatacaaactctacgggaangaacgcgggcgcgagcagctaactaggctggggccgccctttatatttgtcacgaacaatatagacataggaggctggttaactgctgtaatatagaccaatgagtttaggttgaagccggggcttactcaacacaggagcctctgacgacttatccaaggccgtgattgtgcccacataaaatgtgcatgcacataacatagcgccggactgagctagcattatgcaagaactgaatcaaaatttgattggaaaaaagttggcctcgtatataaaaattttaagatgctaaaaagaaccacggtgggcggctactagagagctctaccaccctggaataaattacacttcggcttctgcaagagtacctaaatggcctatcgtgagtgcgaaaaaagcttggcgaagt

SEQ ID NO: 82396 - DNA, 290 bp, Glycine max
  Clone ID: PAT_MRT3847_4541C.1
ctcgagccgatctcaatcgtggattaacagttggacgaaggaaaggaatagcaaatgatatcaagatatagcatgagcgataagaaccagaaaatggctgaatcggaactgaaaaagacggtcagcacactatccacgacggaagcatgtcagctattgtaagctgagggaaaatggcgaatgaatgactactgaactgcctgagttggattgaagaaccaaaatcagctaaagcaacttagaggtttcgaaacattgaactgcacagtgtcttgcgggatttggacact

SEQ ID NO: 82397 - DNA, 120 bp, Glycine max
  Clone ID: PAT_MRT3847_45420C.1
tcggctcgagggtcaatgctcaagttcatcctttagcaaaatatcccacttttctgagtcatcagttgtaacggaggccaaataacagatttcagatcgatggccactagcttcccttct

SEQ ID NO: 82398 - DNA, 322 bp, Glycine max
  Clone ID: PAT_MRT3847_45421C.1
cctaagcaatttaaaaccgagtcttttggcaatcatgaactgtgaatgggttttggccagttaataatgcattaccatgcattgtgcctgaagatttaatgcatctaatcactagcatttccttgattaatacagttctatggcatttccaaattgaatttgatctattgtactgcattatcctttgaggaagacactgttatgggttatcctttggttgaaaccgttggattgggcacaaaacagacggttccttcagaatccaatcgattaaccagttgtctacaatttggcacttgccatttcatttacattggaatgc

SEQ ID NO: 82399 - DNA, 229 bp, Glycine max
  Clone ID: PAT_MRT3847_45422C.1
ttctacacgatcggcatggacacaggaacggtcacactgacactgctcatgactctagtggttattttaggaggcttttcaggaggctcagatcatgcggcagatgattccaagaaggagaacaacgtggataagcttgctgacatgcccaaaaacatggcctataatcttggatatgacgtcccaaaaggcaagcctatgaacatgggtatgtacatgaagaagtgga

SEQ ID NO: 82400 - DNA, 1385 bp, Glycine max
  Clone ID: PAT_MRT3847_45423C.1
tccgcgcttttcccggccggcggggccacgcactccgcccaaacacaacacaacacagcataccgtgtttcattttctctcacacacaaacctccttcgttttcatttacttctcaggaggtataactactatttttcgctttttttttaaaaaaaaaattgattaaatcttttgccatgggaacccagattttgcgacctcaggactgcttggtagaacgaatcagggctcctccggctgacttttcccggcggaggagttccggtaattactgtaattattattactacaacaacaacaacaaccatgtcgccacttccaggtcgtgccggaagcctgttagccgacccgaccaaaggaaacgggctgctcccggttctgcccagccggtggtggcggaggccgcggcggcggtgttgaagagaccgagccgtgatgattcaagggtggccaggagccaaagtttggagatgactacgattctacgtaggggccagtcgcttgattcggctgtgaagagcgaggtgtacgccggatctgcgttcgcggtgtctccgtcgccggaagcgcttcctctgccgtctttttcgacgaagaagcaggactcagtggcggttgatgactccgccacgcgagatctgaggcgtctgctccgcctcgaatgaaaacgagccgggttgcagtcccgggtttctgggtcgggttggacccgacaaattatccatattcccctctctctctcaccttattattactatctagaatcttctctttctcttatcctctccgtaaccgttaccgttacgcccgtcccggtttgaagttctgacccgactgtgatttttttaaacggaagggtggatgatctgatctaaactagggggtgaaatgtttaaaggtttggagtagcgtatgggccgtgaggctatgattatgtatcatgtaacttgtaacatatttcttgggttgtttattaaaacattaaaataaaatttagggtttatatacttgtaacactaataccaatcagttcaaaggggtgggaagaaatgaggaagaagcataagaaggaggaaatgtaagttagttttgtaaaatccagcaagtgtttgaatttggtgtaggttgggctttcagctatgaacagtttgatgtgatcaagtatagttcgtgctgtgttgtgaaacacggtgatcaacaagtgaatggttctggttcgtgctctgttgtgaatttgccagcttctctttgtacgctattttttgtaaagtggagcaaattattaacttgaggagatttgatcagatttagtttctgcaaaatttttattgttttgcaaagacatccccggataagaataaacaaatgcttttcgttatataat

SEQ ID NO: 82401 - DNA, 211 bp, Glycine max
  unsure (1)..(211): unsure at all n locations
  Clone ID: PAT_MRT3847_45424C.1
ccataggcnacngcggtnacgtnaagctcggnaattcggctcgagcatcaactttgtcatatctcaaatcttnttcttnnnnttctnantnccatntatnntcntgcnacatggnancntgaattttccnacggtgtctntgtgcagncagcagtgaactccagggtcagcgtgtgtacacaacagatggtnaanagnnaggaacaatgcn

SEQ ID NO: 82402 - DNA, 1418 bp, Glycine max
  unsure (1)..(1418): unsure at all n locations
  Clone ID: PAT_MRT3847_45425C.1
ggctcgagtctctctcctcctcgatcccaattccactagggttagggttccgttacccttatctccttctcaattcttgctttcctctttaataatccgctctcgtattcgtttattaattgatcattctttctcgttttgttctttttcgctgaatccaggattcaattccgatgcgattccgagcttgttagatccacgacaacgtttcgtttcccagattcttttgtaaaaaaaaataatcttcctttgcccaacaggtaagtcggaaaaaaatggaccatgacaagactgggtgccaagctcctcctgaaggtcctatattgcgcatcaacaactgtggattttttggaagtgcagctaccatgaatatgtgttctaaatgccacaaagacatgttgctgaaacatgagcaagccaagcttgcagcatcatccagttatgatattagggtggccaggagccaaagtttggagatgactactgttctacgtaggggccagtcgcttgattcggcccctgaagagcgaggtgtacgccggatctgcgttcgcggtgtctccgtcgccgcaccgcaccatctacgacgccgagcacgggcaggacctgccgggcaccaaggtccgcgaggagggctccgcgcccggctcggacgccactgtcaaccgcgcctacgcgggcctcggggccaccttcgagctggacctgaaggcgtacggccggtactacatcgacggcaacgggctgccgctggacgccaccgtgcatttctctaagggctacgacaaccgctaccgttacgccgagcccggtttctagttctaaccggactgtgatttttttctcgactaggccagatgatacgacgtaatcaagggggtgcaatgtttaaaggtttggagtagcgtatgggccgtgaggctatgattatgtatcatgaaacttgacacatatttcttgggttgtttattaaacctttaaaataaaatttagggtttataaacttgtaaccctaaaaccaatcagttcaaaggggtgggaagaaatgaggaagaagcataagaaggaggaaatgtaagttagttttgtaaaatccagcaagtgtttgaatttggtgtaggttgggctttcagctatgaacagtttgatgtgaccaagtaaagttcgtgctgtgttgtgaaacccggtgatcaacaagtgaagggttttggttcgggctctgttgtgaatttgccagcttctctttgtacgctattttttgtaaagtggagcaaattattaacttggggggatttggtcaaaaaaaaaaaaaaaaaaaaaaaaaaaaaaaaccaaaaaaaaaaaaaaaaaaaaaaaaaaaaaaaaaaaaaagggcgggccgtctctagagggatccaaggncttacggtagcgcggtg

SEQ ID NO: 82403 - DNA, 490 bp, Glycine max
  Clone ID: PAT_MRT3847_45426C.1
aaaaaaaacccggaatttttttattttggggtttcaaattcgggggcctaaaaaaatctaaaaaaattaatctctttcatccaagggggaaagaaaatttttccctttaaaaccccccctaaaagggaattgggggggggaacaagccttcaatttttttttgaaaaaaaaaaatgggggggttaaaaaaaaccctaatttattctatataaaatggggatagggaggggggcttgctcccttagcaaggaaaattatcaccggggggaaccccgaattggttacaggggtcaggggagtaattaacgcgagccctaactggggaagggggggccccctcacattcaaatggaccgttaaggggtttgaagggtgccccaaaaccttggttgataacaggggccccgttttgcatccaataccccaggggtgttttgaaaaaaatcaaaggatccttgccccctgtttcaggagcggtcaaaccataaaa

SEQ ID NO: 82404 - DNA, 708 bp, Glycine max
  Clone ID: PAT_MRT3847_45427C.1
aaagaagtgtgaggagcttaaatgtgattaagttttgaaccgaatgattacagctgtttttgttgttaataaaaaaaatgtgtttaaacctatcagcatagttcatccttcttgaatcacataggtattcagcccagccttcttgaatcacacatggccaacaaacataagtatcatatctcatatctatatcattccttcatatacctatatctcacccaaatgaattatcaatgctttgcaattgcatggttacttttcagccactcattgcaaagcaaagggatcctacatgcagattgaatctcgacattctcccttatatataacaattgcaagtcattttctgataggtagaaggaagcacaggggtagcaaacacacgggttccatgctcaactagcagaaaatgtggtgcaaacagcaagcctgcttcaaggttggtgcacgtatgaagaatagtgacgtgaaagggagcaaacctgaattgtgaaaatggaatacaaattgcagaattgttaatgatttctagaatattccctttacacaaaatgacaaattccgttattagggaactggtataaataaaagcatttgtaaaccattgaggggtatgaatgaatgaaatagcagatttcttcccttagctttcttcttctcttcttttcttggaggtgttgaccctcgagttcagctagcttttccctg

SEQ ID NO: 82405 - DNA, 306 bp, Glycine max
  Clone ID: PAT_MRT3847_45428C.1
gggtatagatatcacatatcacagagcacatcttatacttgactaaagaagcgggggcagcttctggcatggttctctcatccccatgcttggctgaccaggtcaggaaactgggcccatcaggcgcaccactgggacgggcgagcatgaggaagaccgtcacgaaacatgtctcctgacgaagcccacggtacggcccacacctagtgaagaactggggcccaatctttggctagccctcatactacctaaccggggagtggccaggcgactacggctgagacactgctgggctgtacgcagacc

SEQ ID NO: 82406 - DNA, 333 bp, Glycine max
  Clone ID: PAT_MRT3847_45429C.1
tttctctctctacaccttctataatcaaaatttccttgttgctcatcaattggtgttatgttagattattttaaaagatagggtcaaatcaacataagttcccctatttttatctgttctcagttggtatgtaatttcattttattttagcctgacacatatctttccctcttataagtattattgctagttcatcatatactatcattaaccacgttcacactctaattttcatcacacattatcttttttgttaataatactatataaccatcttcaattattcttaatttttttatttttttatctaaaatttctctccaaaccatattt

SEQ ID NO: 82407 - DNA, 382 bp, Glycine max
  Clone ID: PAT_MRT3847_4542C.1
ggacgctggcggaaagatcaagaagggcgccggaggtagaaagggcggcggcccaaagaagaagccggtttcaaggtccgtcaaagccggtctccaattccccgtcggaagaattggccgttatttgaagaaaggaaggtacgctcaacgtgtgtgtaccggagctcccggatacttgggtgcagatattgaatacctatctgcccgagtgctttgatttgcgtggaatgccgcacgcgacaacaataagaacaagattattccaaaacacgtgcttttggcagtgaggtaccatgatgaattgcggaaatagcttgctggagtgacaatcgcaccttgtggcgtgctgcgcaacatcaaccctgttgtgtgcctaaaaaga

SEQ ID NO: 82408 - DNA, 260 bp, Glycine max
  unsure (1)..(260): unsure at all n locations
  Clone ID: PAT_MRT3847_45430C.1
cgcgccgggcattcagcacgacgacatgcacacctgagagcgccagcagcagcagcgaggccagcaaccgccctacaccctccatcgagcttcactcgccatcgcacactctgcagnngcagcctctgccgtcctcgtccgataccgcacaatctttaccctcgtcttccacgctgggagcaccaccacgcttcccatccctggcccacctccgtcggacacgcacagcgccctcgccctncctccgctcacagccctcg

SEQ ID NO: 82409 - DNA, 365 bp, Glycine max
  Clone ID: PAT_MRT3847_45431C.1
ttttgggtttttttgttttttttatgacctgtcattggaatcgctgtgcatttttagtatcttcttcgtagaaatagcggttagggaaaagactcgtcaatgatggcccataggtcagagggtgggggcaaatgccccccattcgtagagctggagaaaccactcgcaaagtgcaaaatggaccatactagctggggaccttcccctgggaaagaaagaacgccagcctcagtctgaactattggtttctatgggtgcgtggaaccgaactggactatgaagatttgttagactgggagtaaccaccctttgtgcaaaaggagggtgggtttctgcgggcccaatattacactggaagaggggtt

SEQ ID NO: 82410 - DNA, 530 bp, Glycine max
  Clone ID: PAT_MRT3847_45432C.1
aagggaaaatcccttgcattattatttattggaaaaaaagaagggggggggacaggggggaaacaaatgttacttctgacaagtattcccccaaaaggattccacggggattcaacaatgggaaggggccgaaacccctctgaaaaaagggcccacccccttccaaatgggtttgtttatttttaccctaaagccccaaaaaaaaagggggaaaaatttgcccccccccccggttttggctttcccttggggggactttcgaaccccatcaaaaaaaacaaaaggaacttgaaatcacgggcaatttcaacactggggcaaaattgcaagcttttttttttttcaaaggccccaaaaataaaaaaaacccctttacaaggggaaccaaccaagccaacccaaaaaaaaaaaaacccttttatgttttccaacaaagttttttcctttttcaaaaaaccccctttttttaaccccaatggccaacaaaaaacctattttttttttaataaacctattcccctccgggaaaa

SEQ ID NO: 82411 - DNA, 281 bp, Glycine max
  Clone ID: PAT_MRT3847_45433C.1
gtttaaatagttctgttgtaacttttaatagttttgtgtatcattcaactttttttcttgcagcaccgaggcacatttgaaaagatggaattgaagtcgttttgtttaacgctgtgtgaatataaagagtagtttgcagctgtgtggtagtggtttaatttgcagccttagctctgtggtgtctggctctagagttacttctttttaccaagcattttcagcctccattttgaaggctgtctacacttaagaagtcttagctgtctaatttttagagaata

SEQ ID NO: 82412 - DNA, 234 bp, Glycine max
  Clone ID: PAT_MRT3847_45434C.1
cggctcgatctctagtcgattcggctcgaggggatcagttgagcactgtttaagagatgctaaactggacaacaggcctgtccatgacgttgtcctggatcgtggttcgatgagaattcccgcggtgcgactgctcctgcgagatctctcgactgggaccgtatctctgccacagcatctatcctgctgtggctgtcgcatatgagcgtgcagtgcaagctgctatccagaggg

SEQ ID NO: 82413 - DNA, 121 bp, Glycine max
  Clone ID: PAT_MRT3847_45435C.1
agatccatgtgaggaatctgctgatcttctgatcgcctattatcatcagaccagacagcatcaatacccctcttattatcacagaacagcgcacgacgatccaactagatgtgttatatgc

SEQ ID NO: 82414 - DNA, 294 bp, Glycine max
  Clone ID: PAT_MRT3847_45436C.1
gggaattaatatacatgctcttgtaacttataaaagccaaagacggggctaaacaaaagggaatattctcccctaccttggaattaaaaaatatttcgggcttattcaagagctttttttttttgcaggggacacgcaaccttttaattttaactctggtttaaacccaaaaatatttcctgtatcttacttggatttttgctcttgctccaaagagaggttaaaaaccattatttggttttagaaaaaaataccttggggtgggggggggattttgttttacttttttttttc

SEQ ID NO: 82415 - DNA, 467 bp, Glycine max
  Clone ID: PAT_MRT3847_45437C.1
ctgcgagaagacgacagaaggggatctctgtcatcatagtcatatgagaacactgaactactttaggagaacctggcaacagtgtaataacaccatgagatgacttacggcattgaacccatgtctgctgcaattctcctcttccaaaatccatgtgattcctcctgctctaccattgctgtatgatgatccaccaattacacacaatgtgtaaaattagcaagaatacaacaataattctaagatacacccaaattttcaaaattaaaaattagttaaatcttaacaccattgattaaacaaggctgctgctataattgccttcagagttcagagcctgacaacagtaaattgccttcatgcatcttaatggaccacaaaaaggctgcacctggagctgcgcctgagcaggtaaattcatcaaaagacgaggttaatcgattaaaatcgatttatttaccaatagt

SEQ ID NO: 82416 - DNA, 508 bp, Glycine max
  Clone ID: PAT_MRT3847_45438C.1
attaatcaaatgattgtatttttttattatttttaacataagtctaacttctttattttttattattattattaattttgacgcacaccatgttgctctattctatttagagagataaaaatgataatgagaatgagatacttctgtgcacatggtagagaagagagagtttcatagcttatattctatttcctagttctttggtttgatggcaacaccttcaatgacaagccctgtcttccacatgccaccttcatgttcatacatagatatctccatctcaccaacatctttctcagatgccacaaactcacctactagaatctctatccagctctccctagacttctccattaaattttccttgtgttgctgtttctttcctccaggaaggacaagtctaacatttattggaagttcccaccccttgaccgaatctttcaacattacaataaatgacacttgatatagaattccaggtgaaagcattccagggccaaattttcca

SEQ ID NO: 82417 - DNA, 1388 bp, Glycine max
  unsure (1)..(1388): unsure at all n locations
  Clone ID: PAT_MRT3847_45439C.1
agctatgacgtcgatgcaccgtactagctcgaatttcggtcgagttncacacatttttttctacaagaactcaaattacaaacgtatgttcccacgcgtcagtaccgagaagacgacagaaggggaacaacatttgttctagacaagatctccatatctgttcccaaaagcttgtttgtaagaatggcttccggtgaacagaaattccctcctcaacaacaacaaacacagcctgggaaggagcatgctatgactccagtaccccaattcactagccctgactacaagccttcaaataaacttcaagggaagattgcattagtcactgggggtgattctgggattggacgagcggtgtgtaacttgtttgccttagaaggtgctaccgtgggatagcattagtgactgggggtgactctgggattggacgagcggtgtgtaaatgatcaagagagcaaagacttcggatgccaaggatccaatggcaatagcatctgatttgggttacgatgagaactgcaagagggtggttgatgaggtcgtgagtgcttatggtagtattgacattctggtcaacaatgcagctgagcagtacgagtgtggaaccgtggaggacatagacgagcctaggcttgagagggtctttcgtacaaatatcttctcctatttcttcatggcgaggcatgccttgaagcacatgaaggaaggaagcagcattatcaacacgacatcagtgaatgcatacaagggacatgcgaaactattggactacacgtccaccaagggggcaattgtggcctatacaaggggtcttgcccttcagctggtgagtaagggaattcgggttaatggggtggctccagggcccatttggacccctttgataccagcctctttcaaggaggaagaaacggcccaatttggagcgcaggtcccaatgaagagagctggtcaacctattgaggttgctccttcctatgtttttcttgcttccaaccaatgctcctcttacataactggacaagtccttcaccccaatggtggaaccgttgtgaatggttaaaccgttggtgatgatgatattcgggatgaatatatgtggcgagagtagtaggccagtgttacgttttgtgtgaatgttttacgatgtgttttaatgcatggctaactcactcaggtcctctctgcactgttagaggtggggcttggaggattatccacttttgaatgtacgagttattagcctaagaaaatgtgtcttttgtagccaattatatgtaaacaagtaaaagtatataataaagatcggtatgtataaggtttaaactttaaaaacgtgtctattgtagccatagatatgtataagagttaaagtatagactgaagat

SEQ ID NO: 82418 - DNA, 873 bp, Glycine max
  Clone ID: PAT_MRT3847_4543C.1
tgctcgccgcctggtgcatctcgcggccgttcggtggttcttctttctttttttgcagagaagtatcaattattttattaaagcagctttaaataaagagcacagagcataaattatacatcccttatttgtagacataagggcataattttaaatttaaaaacagaatcagaactcctaatatctcctaatatttgaaatgtaaaattaaacttctaaaaactaggaaagaagttgcagctgttatgggcacatttgcaacaaaaacttctaaatgtttgctttttggtaactgttgtccttcttgccaattgcctgtgcacttgcttccagaaccttgcttcaatcatcacaaaggggagaggaggtggaacatgaaagctgattactcaaaataacacctggcatacaagaacgtttattcctcgatgatttcaaattcagcaccaattggtagatgatcacttggataaatgaagtttggcagtccaccaacaatatcagctgcatcggagtctggaagttcaagaaaactaattggtttaatgtgatcagaaggggaaaataatatatagtcgagtgttccagtgaagtcaggtgtgtagtttgtaaatggtggctctcctcttgtagaagcatagacactacataagggaataggagactcctctaaacagtccggcatcaggtttgatgaaggattccctgatacaaggtaccgataaacctgataaaaaaggggagatttgataaattagtaaaacatggctgggaatacacctcattttttgaaagcacaccgtgggttaaaagccgcagctcaagcatgactatatgcaacatggacagacatattgatatcgaaattccatt

SEQ ID NO: 82419 - DNA, 312 bp, Glycine max
  Clone ID: PAT_MRT3847_45440C.1
cggacgcgtgggttgaaattctgataaaccgagatcataggttgccggaccttaaaaccgggaccaaacgcaatcgttacttgattccaggaatctctcaattactttctactttcatggtgtgccgacttcttacgggaatgaaaatgactctcctgaggtggacacagacttcgagaatcattgctcttttccattcttagttcattcgctgaacactctgctatttgatgttggacattggagtcatgatttaaactgattctgatgatgtgacagcactctgacacattacaagttcaagctgctgaa

SEQ ID NO: 82420 - DNA, 799 bp, Glycine max
  unsure (1)..(799): unsure at all n locations
  Clone ID: PAT_MRT3847_45441C.1
gtttaaccgcacattttgcacttcgtctccaagttctataataagcagcatttccacacatttctttcctacacgtccgctcaaagttgaacaaaactcattttccaactacatttcttccaccaactcataaaatcctcatatctgttcccaaaagcttgtttgtgagaatggcttcgggtgaaaagaaattcccacctcaacaacaacaaacacagcctgggaaggagcatgctatgaatccagtaccccaattcactagccctgactacaagccttcaaataaacttcaaggaaagatagcattagtgactgggggtgactctgggattggacgagcggtgtgtaacttgtttgccttagaaggtgctaccgtgggcttcacatatgtgaaggggcatgaggacaaggacgcgagggacacgttggaaatgatcaagagggctaagacttcggatgctaaagatccaatggcggtaccagctgatttgggttacgacgagaattgcaagagagtggttgatgaggtcgtgaatgcttatggttgtattgacattctggtcaacaatgcagctgagcatacgagtgtggaacagtggaggacattgatgagcctaggcttgagagggtctttcgtacaaatatcttctcctatttcttcatgaccaggcatgccttgaagcacatgaaggaaggaagcagcattatcaacacgacatcgggtgaatgcatacaaggggaaatgncgaaactattgggactanncacgtccacgaaggggagcaattgtgggcctata

SEQ ID NO: 82421 - DNA, 270 bp, Glycine max
  Clone ID: PAT_MRT3847_45442C.1
aaaaaacttgtcctgaaccaataaaaaatatccttcttggggccctccaaggcgttccattcctgtttaacccggggcaaattttttttccccgcccaagcattgtgttgttttttgcccgttaaaaattataggggaaaaacccattcccttccaagactcaacattttggccttggggggaaatatcccgaaaaaccctcttttatcggggaacccataccattttccatacctccggggggggggggccataaacccccccgagggg

SEQ ID NO: 82422 - DNA, 406 bp, Glycine max
  Clone ID: PAT_MRT3847_45443C.1
actgtccaaggtcctgtcacaacaatccgacatcgattaaagggcgctaggcgacagcccacactatcgacaccccccctgagggcctatcggtgcacaagcaagcagagcccactagatgctaatccctgttcgggtgctctttataagtagcatatagtgtgggaatcaacagtttgttggtgctaactatgggtatcatgctccatagcctaagagctagtgtcaggcttggattgacaacaggtaggcatatgcgactaggttaggacctgtttcacgtcaaatagtgaccagggataaatagccgggagttaccgcttcagtaggttagaggacactaggctcggcatcgcgtttcttggcttacgaatgcgctccaaaactggaagtttgagtaaccttg

SEQ ID NO: 82423 - DNA, 309 bp, Glycine max
  Clone ID: PAT_MRT3847_45444C.1
gaaacggttaaaatttggacctttttggattggggggcaacatttcacgggtctaaattaacattggcaggacaaacaacaggaaaaacgtttggctccattaatcttcaacgggaggggcctttttaaaaacaacaattttttatacaggggctgagaggcctaaacactgggagtaaaaaggttcttcctcacacataccaaaggtcacttaacccatagtttttttgggggtccagcttggggcaagggacccgaacttgtttctgtctgccttgaacatgggggctattcgggggaccaaaggat

SEQ ID NO: 82424 - DNA, 557 bp, Glycine max
  Clone ID: PAT_MRT3847_45445C.1
ttcaaagaaattaccataaacagggattagccctgacatctttacctttagcatcctcacaaaggtttgctgccaccttactcagatcaaacggtgtttgttctatgctgggtagtatttttaagaggggttatcatcctatccattaggatcaccacacttgtgacgaatctcttttttcatgggaatgttgaagaagaattgtaagttcatgatagtgggttagctcaaagatctcacatgatccaggtggaattgatcaggtggaatccttggatcatgtgatatccttgagctaatacactatcatgaaggcttctttaacatttccaggaagaaagaagcccttcatgagtgtggtgatggtaatggtgatgacccctgttgagaatactgcccagaaaaaaacagcattgatctgagaagggtgaccgtaagcatttacgaggaagatatcagggctaatcccttgttgactgtaatggttgaaaaggggaatcacagtgggatagtgcttcatcttcacgcgaaaactgagaagactgttaaagtggatg

SEQ ID NO: 82425 - DNA, 394 bp, Glycine max
  Clone ID: PAT_MRT3847_45446C.1
agccgaatccggtcgagctcgagccgatccggttccatcgatcccaaaataccacttgtgacggaggatgccaggcccgaagatgcgaatgtactacgtgccaatgaataagaaaggcatggacaacttccccttctacgctctcctggcctcgcgcaagaaatacaacagtgtcatcgacgctttggacgcagaagacatcttatagctcacgtacatggtgcattccttccaataagatgccatacacctgcgcgtgagggcgcatgccttccacatgctccagatcaacatgatgctctcctgcgccaaggccgacaggatccacaccagcatgaagatcgcctttgtgctagcctaggtgacgtgcgctgatgctaacattgaccatgct

SEQ ID NO: 82426 - DNA, 680 bp, Glycine max
  Clone ID: PAT_MRT3847_45447C.1
ccacgcgtccgggaaaatcgatgttggaacaagtttcagatacttggggtctttcaagtggattgaagtttctttgttctcacaatccctcattgtatgcaattattttgggcctcaaacatgctatgaaactggtaatatttttagcaaatgttttcttgataataatgtggttggtgtccaccctttctttgtgtgtgtggggttgcgtgtgtttttgtgtaaaaggaaatttcattagagaactatgatttaggggaatgataaggatcctctgaaacagaagccaaatggctcaaaaaagaaacaatgccatctattctctttgcataccaaatcctaaactcccttaagataaccatgaatggtcccctagagagaaactgtaactcttgttgactgtagtgtttgttggggccaaatatatgcccttgaagggtgttctcctcctatgaagttgagactcctacacatacatgaacaatgtggccaacacccaaatatatgacactaagacactgtatatgtgtatgtgataaggaaatttcattagagaactatgatttaggggaatgataaggatcctctgaaacagaagccaaatggctcaaaaaagaaacaatgccatctattctctttgcataccaaatcctaaactcccttaagataccatgaatggt

SEQ ID NO: 82427 - DNA, 218 bp, Glycine max
  Clone ID: PAT_MRT3847_45448C.1
attctacaacaactctcgagaaagtacgtatggctgcctacacatcgattagtccttccggctcagtgtgatcatctatcctttcatcctcaaaatccatatttgccgcaactagatcctctatctagctttgttgtcatcaatgcctatccttatccattttccacacgttctttcttaatgccttgccatactataccattttaccttgatggttc

SEQ ID NO: 82428 - DNA, 256 bp, Glycine max
  Clone ID: PAT_MRT3847_45449C.1
catgtccttatgtgagtggcattgctgctttgctcaaggctaggcaatcacattggagtcccgttgccatatggtactcttttatgaccactgcttctgttcatgacaataccatcaagcctttcagatgtgcactcaattccagagccttaactccttatgaacatggaacttgacccatgatgcctagaatagctcttgatcactgattagtctatgatatttagccactcgactacattgaattcctgtactg

SEQ ID NO: 82429 - DNA, 469 bp, Glycine max
  Clone ID: PAT_MRT3847_4544C.1
gttaacactaacagcacccagcaacagccccaaaccagaatcaaaagccaaactaaccaaccaactaatctgcattcatttcatacaccctccctttctcattcctctgtgctagcataccaattaccacagacactacccaattctgttgtgtgcgccaaccatggagacgccaagtgcatgctgggacaagtgggtcggagaggcactcgcgacccttcactctctcaaagtccttcgatctgtcagacccatttgcctccgcaatagccagcctctccaattcggggtggacgatggtgcgttccaagtgttcgatgaaatgcagcaatgggaccggtcttctgtcgaagtggaaattgctgaaaccacgtttagtagatggatgcacgacaccccaagttctggtgatgagattgtttgtagtgcagctgttggtggtgatgaagcgggggcatgttatggagag

SEQ ID NO: 82430 - DNA, 366 bp, Glycine max
  unsure (1)..(366): unsure at all n locations
  Clone ID: PAT_MRT3847_45450C.1
gcacgaggcaagatgcaatgatattaggtgagaccatttgaaggaaaatgaattctaaaaccataactttacagtcaacttcaaatacaacctgagatatctacatatctaatgtccattttattgcttgcagcagccatgccttagctttgtgtgactctggaagaccttcgaataacatagttcaagccattgttattaataactttgaaaatagctatgtcaatgttgcattttaagaattctgccattggctttgtccacctttcattccgatgttgttcatgatgagttaaagtgtgccctgcttgatgtcgagcatggcaccatttgttgaaannnnaagagtgttgtgacggatatctg

SEQ ID NO: 82431 - DNA, 115 bp, Glycine max
  unsure (1)..(115): unsure at all n locations
  Clone ID: PAT_MRT3847_45451C.1
anctnctttggtgaacgancggcttcgcaaagagatttcgatcgcnttttganaactgagcttnaaagccgcngtgaataaggctattggagatgggaancaagttagtgtttaa

SEQ ID NO: 82432 - DNA, 187 bp, Glycine max
  Clone ID: PAT_MRT3847_45452C.1
agtctttgcattccaaatggccactgttctggttgcacaacaaacaccaacaactgtgctagtgattaagaaacgaggtaaccaagattgaggtaactatcccagaacaaccagcttcccaggttactaccaccgaagaaccaaaggtagaaaccagcatagaagcaaaagaggtagaagaagcccc

SEQ ID NO: 82433 - DNA, 553 bp, Glycine max
  Clone ID: PAT_MRT3847_45453C.1
tttccaactggtcattatcgcatcactccgatcctcaacagcagcaaagcaaattcgcagttggtaagagaaaatggccgacgatagcacagctacctgcatcgacatcctccttgccatcatccttcctcctcttggtgtcttcctcaagtatggctgcaaggtagaattctggatctgtttggtgcttaccctttttggctacattcctggaattatctatgctgtctatgctatcaccaagtgatagatcatattcatcattttaattttgggtggacaatgaataatttgtcaaattaaaggacgacggctatgcatgttcctcatcaactccaatattgatattcctgtataatcctttgatctcagatggacaaatgtgattcttttttgttttctgtctatcggtctcaatattcctttttcattgttgtgtttttaattattgttattatttatcttgtgtggaaacaaaatgtagacattgttttgtggcctctagtcttagtattggtatcaaattgaaatgtactacttggttggtattaac

SEQ ID NO: 82434 - DNA, 558 bp, Glycine max
  Clone ID: PAT_MRT3847_45454C.1
tgtattcagctgagggacggaacccaagagcagggcctggtcacagaccatctcattatttgtgggatgaatagtcattttcccttcatattaaagcagttaaataagtgtcaggaactcgctgctctctaaggcacagatacagctaggaggcagagaatactctttatgacggatcttccaggaaaacagattgatagagtaccagacaatattgcagaagattcacatcatattgatggacttacaaagagatgcagccttagtatgaccaaatcatttgaaagagcatcacataacagggcacgtgcaataaatatactgccaacataaggagatcgactgactgtatgctaggcatgaagatgacacagatgcatttctctgtgctttagcccttcaaccaatcacaaacatggattctgtccccaccatagttgacgcttcaagacccaagacatgtgagttgttgacgtcaatctcatcattgaaaagagagccagacgaaaatgagtgacccaaactatttgatcaatgctctcgggagaagggacttat

SEQ ID NO: 82435 - DNA, 957 bp, Glycine max
  Clone ID: PAT_MRT3847_45455C.1
gcacgccgtggccatcctgaacctagtgatagcaccatggctactgcggcttgggctcatgggcggggcgcgggcccggcccggcgcggtgggggcccggcccggccccgccctgctcggtcccttccccgcccagaccatagcctagccaaagaaaaaggacaagaagcccagaatcaccgcgaagcccaacaagcctgcggtggttctggtacacggcttcgcagccgaggggatcatgacatggcagttccaagtaggcgcacttacaaaaaagtacgctgtttatgttccagatcttctcttctttggaggctcggcgaccaataaacctaatcggtcgccgaggttccaagcggagtgtttggtggcggggttgaggaagctcggggtggagaagtgcgtggtggtagggttcagctatggggggatggtggcgtttaagatggctgagatgtacccagaattggttctagggttggtcatctcagggtccattttggccatgtcggagtcactcagcaccaccttgctgcaagagcttggggtctcttctttctcggagctcttgctgcctacttctgttaagggtcttaaggcactcttctcgatcgctgctcacaaaaaactcaggttccccaatcgtttgttaaaagattatcttgaggtatgtttgacacgtacccttgcttgggattcttattcctttattaatatttaattatttgattgttaatttttgtagaggtgtttgaattcacatgactacactgagacatgcattctgacatgcatgcgctcatgagttgatggcattaggtcccacaataattgagccaagttattgataaggttttaatagatttgaatcttcttgatctccattaaatatcatggtgtgtctccattaatggtggtataatgcatgctgtcagtgtggactcaaatgaactcaaa

SEQ ID NO: 82436 - DNA, 215 bp, Glycine max
  Clone ID: PAT_MRT3847_45456C.1
tacatttttaatcggcaagcaaggggatttaacaccacgaatattatgtgacgaccataatatcctacattgtatgatgaaacatgccacccgacatttttctttttagtcacgaggcgccacaattcttaaagtcctagaccgaagaacattaactgtggggactttacaaacacaaggtgtggagttacaaatttacatgcagtccagataca

SEQ ID NO: 82437 - DNA, 107 bp, Glycine max
  unsure (1)..(107): unsure at all n locations
  Clone ID: PAT_MRT3847_45457C.1
tttaattcaaataccataggtttggctggggtagnnnnaataggacggattcatggccatcattttcctcctacccaagaggattttatggcttaattaaccccttc

SEQ ID NO: 82438 - DNA, 371 bp, Glycine max
  Clone ID: PAT_MRT3847_45458C.1
ctctgtctcggtctttgattgatttgattcctccggtttctctttggggttaaaagaaaaaaaaaccaaaattccaaataagaaaattactagcaattgaaagttgaaactttttattttttatttttacgtcatgagactagtccatcttttctgcgggtgtgagaaataaacggttttcatttgaaaaacagacacttctgtgaagaggggtctcttcattcacgtgcctctccttttccttctccttgttctcttctcttcacttacgttttcttctcttctctcctctgttagtttcccgagataaacgtattttttttttctcattttgaggcctttttcaggcggtggttggtggtagttttgtg

SEQ ID NO: 82439 - DNA, 152 bp, Glycine max
  Clone ID: PAT_MRT3847_45459C.1
ggctcgagctcaaaggcaacccagaacgaagcttccgatacccaacaaagaccaccgcaccagacagggcggggcataatccagaaccacgccccagcagacgcggggacgacacacccgacacggctcaacaacagctacgaaggcacccc

SEQ ID NO: 82440 - DNA, 259 bp, Glycine max
  Clone ID: PAT_MRT3847_4545C.1
cgatcctggctcacgatgtacgatggcggcatgccttacacatgcaagtcgaacgggaagtggtgtatccaatggcggtcaggtgaataacgcataagaacctacccttgggacgggaacaacatctggaaacggctgctaataccccgtaggctgatgagcaaaaggaggaatccgcccgaggagggactcgcgtctgattagctagttggtgaggcaatagcttagcaaggcgatgatcagtagctggtccgagaag

SEQ ID NO: 82441 - DNA, 350 bp, Glycine max
  Clone ID: PAT_MRT3847_45460C.1
gtaaaaaaatagccttcaatttttaaaaaattgtcttctgcacacttactgatcaacttgatccgcaagtgtgcgaggaactaggggcatttttggcatattttaggaatgctgggtgcacctagcaactccccaaaattttgtggcactaaagctgccagttagaatttcaaaacggtccttggcaaattcttcggtatgagctacaggagaagaagataagtatctcgttgtgtcaattgagtgagagcctaactcgttgtacgagttattcaacactttaagtgacttgagcaatctgagaggccccaaagcagtaaaactaccaaaatttattatgactcaaattt

SEQ ID NO: 82442 - DNA, 360 bp, Glycine max
  Clone ID: PAT_MRT3847_45461C.1
tgctcgagcgattttagttcttgtctactgtactgttgggatctcacggggtcacattcacccagcggggacatttgggatcattttggctcgcaaggtgtctatgatccaagccatcatgtacatggaggctcagtgcttaggtgctatctgcagagttggattggctcacgcattttccaatttctgacttcaacatgaaacggagaggggctaattccctcgctgctaggtacagcacaatgtactcgtatgagactgctgacaccatcggaacctttgctgagatctacagtgctgtctgtggctcttgccacacgaggaacgccagatagtcccatgtgccggttttggctccac

SEQ ID NO: 82443 - DNA, 306 bp, Glycine max
  Clone ID: PAT_MRT3847_45462C.1
ccttcttatttgtaaattgaatacaccacattaaacaaacaaggatacctgcaattggaggtttccttgagtaatccccaggaatgctcataatcacatgatcattattcacaggtttaaattttgattggttgtcagtattattcacctagaaaactacaaaagaacacaagtgagaactttaaaaaagaaagggggatctgatagttagaaggcctattaattaaacattgcaaaatctgaccttcctaggactatatcccaagataaggcattcatatggcctatgatggaagagatctaaat

SEQ ID NO: 82444 - DNA, 285 bp, Glycine max
  Clone ID: PAT_MRT3847_45463C.1
ttttgctgctgaattacttataccacttttttttttactaaccgacagttcctaatgagtattaactcaaatatcggaaaggtcaacaactataacctaccattctcttttctagttataaatttaacaatttctcattattttcaaaacttctatccatccctattcatatttttattatcccatcacgttctaaacacattaatatttaatctgctataaattcttaactttataacattcttataacttatattttcttaatacctatttccaaacaaacca

SEQ ID NO: 82445 - DNA, 591 bp, Glycine max
  unsure (1)..(591): unsure at all n locations
  Clone ID: PAT_MRT3847_45464C.1
gtttagtaatattagtttaatatctcttacagatacatctttatggtacatcacttggtggtttcctagctcaactctttgctcagcatcgtcctagaagagttcgatcgttagttctatcaaacacatttttggagacacgaagtttctctgctgcaatgccatgggcgcccatgtacttttctcagattctattgtaaagagttttttttgatataggctagaaatgagcaaactgcttgtggtttttttctttttaatttatgaaagataaactgttttatgtgctgacctagtggaaattgtaacaaacaaaagcatcaatgattactttacctatacacgtaagtctatagcactgtcaagaaattacagtaggtattaaacacaaggaaactagagtaatatctttaaaattacagatttatttctgtaccattagacaaataattccttaatattccattaaactaagcatcatccataattactattgcgagcacttgctgacacatatggtatgcctgaccttagaatgatgcaatatcccctnctcttaaacttttttgtacaacaaaaatacatcatctt

SEQ ID NO: 82446 - DNA, 570 bp, Glycine max
  Clone ID: PAT_MRT3847_45465C.1
ggttcactcttcttctcttgcggctagggttttagcgcagcttcttctagatttaaggaagatgggtaaggaaaaggttcacatcagtattgtggtcattggccatgtcgactctgggaaatccactaccactggtcacctgatttacaagcttggaggcattgacaagcgtgttattgagaggtttgagaaggaagctgctgagatgaacaagaggtctttcaagtatgcctgggtgctggacaaacttaaggctgagcgtgaaagaggaatcaccattgatattgctttgtggaagtttgaaacaacagagtattattgcacagttattgatgcgcctggacataaggatttcattaaaaatatgattactgggacatcccaagctgactgggctggtcttatcattggttccaccactggggggtttgaaacttggattttcaagggtgggccaaattcggaacaagccctggttttattcacccttggggggaaacaaaataattggtggttgaccaaaagggtggttcttccccccaatttttccaaggccagttttgttaaaat

SEQ ID NO: 82447 - DNA, 2037 bp, Glycine max
  Clone ID: PAT_MRT3847_45466C.1
cacgcgtccgcggacgcgtggggccgccacgaaagcagagaaggccagaaacggaaccacggtaaaatggtaagggtattttcgtaaacagaagaaaagagttgtagctataaataaaccctctaacccacggcgcactatttctcttcactccttcgttcactcttcttctcttgcggctagggttttagcgcagcttcttctagtttctttgcagatttaaggaagatgggtaaggaaaaggttcacatcagtattgtggttattggccatgttgactctgggaagtccactaccactggccacctgatctacaagcttggaggcattgacaagcgtgttattgagagatttgagaaggaagctgctgagatgaacaagaggtctttcaagtatgcctgggtgcttgataagcttaaggctgagcgtgaaagaggaatcacaattgatattgccttgtggaagtttgaaaccaccaagtactattgcacagtcattgatgcccctggacacagggatttcatcaagaacatgatcactgggacatcctaagctgactgtgctgttcttatcattgattccactactggtggttttgaagctggaatttcaaaggatggacagactcgtgaacatgctctgctttcattcacccttggtgtgaaacagatgatttgttgctgtaacaagatggatgctactacaccaaagtactccaaggccaggtatgatgaaattgtgaaggaagtttcttcctatttgaagaaagtaggatacaaccctgacaagattccttttgttcctatatctggttttgagggagacaacatgattgagaggtccacaaaccttgactggtacaagggtcctactctgctagatgcacttgaccagatctctgagcccaagaggccttctgacaagcccctcaggctaccccttcaggatgtgtacaagattggaggaattggaactgtgcctgtgggacgggttgagactggtgtcttgaagcctggaatggtggtgacttttgcaccaactggactgacaaccgaagttaagtctgtggaaatgcaccatgaagctctcacagaggctcttcccggtgataatgttggattcaatgttaagaatgttgctgttaaggatctcaagcgtggttatgttgcctcgaactcaaaggatgatcctgccaaggaggctgctaacttcactgcccaggttatcatcatgaaccatcctggtcagattggaaatggctatgcccctgttcttgactgccacacttcccacattgctgtcaagtttgctgaactcatgaccaagattgacaggcgatctggcaaagagcttgagaaggaacccaagtttttgaagaatggtgatgctggttttgttaagatgattccgaccaaacccatggtggttgaaactttctctgagtaccccccacttggtcgctttgctgtcagggatatgcgtcaaactgttgctgtgggagtcatcaagaacgtggagaagaaggatcctactggagccaaggtcaccaaggctgcccagaagaagaagtgaatcgtgcggtttggttcatcaggggatgtcgtttcttatggttacaataaatgttggtttcttgcccttgtgtcttcgtttctaggtagcttgtttttcggacatagtttgaagtctccaccatcatctcgcaacttttgttcccagaattgggttcttgatcgacggtggcaagactccttttatcattctgttttaatgtgttgtgtttgtgagaacccctgattacatttttgttaagcgcagcgagttttagggctttgccgttgcgttgttggtttgctttttaaatgtcaactttatatttgtgttcaatttttgcttggtttgcttttaaaaaatcaaatttatgtgtcaaattttggctttggatattttaactatcggctgttgctttctttttccatgttatgatttgtctgaatgacgatgcaagaattttcttttaaaaaaaatattttaact

SEQ ID NO: 82448 - DNA, 1868 bp, Glycine max
  Clone ID: PAT_MRT3847_45467C.1
ggctcgagtcttcttctcttgcggctagggttttagcgcagcttcttctagatttaaggaagatgggtaaggaaaaggttcacatcagtattgtggtcattggccatgtcgactctgggaaatccactaccactggtcacctgatttacaagcttggaggcattgacaagcgtgttattgagaggtttgagaaggaagctgctgagatgaacaagaggtctttcaagtatgcctgggtgctggacaaacttaaggctgagcgtgaaagaggaatcaccattgatattgctttgtggaagtttgaaacaacaaagtattattgcacagttattgatgcgcctggacatagggatttcattaagaatatgattactgggacatcccaagctgactgtgctgttcttatcattgattcgaccactggtggttttgaagctggtatttccaaggatggacagactcgtgaacatgctctgctttcattcacccttggtgtgaaacagatgatttgctgctgtaacaaaatggatgctactacacccaagtattccaaggccaggtatgatgaaattgtgaaggaagtctcttcctacttgaagaaagtaggatacaaccctgacaagattccttttgttcctatctctggttttgagggagacaacatgattgagaggtccacaaaccttgactggtacaagggtccaactctgcttgatgcacttgaccagattagtgagcccaagaggccctctgacaagcccctcaggcttccccttcaggatgtgtacaagattggaggtattggaactgtgccagtgggacgtgttgagaccggtgtcttgaagcctggaatggtggtgacttttgcaccaactggactgacaactgaagtcaagtctgtggagatgcaccatgaatctcttacagaggcacatcctggtgacaatgtgggattcaatgttaagaatgttgctgttaaggatttgaagcgtggttatgttgcctcaaactcaaaggatgaccctgcaaaggaggctgctaacttcacagcccaagtcatcatcatgaaccaccctggtcagattggaaatggctatgcccctgtcctcgactgccacacttctcacattgctgtcaagtttgctgaactcatgaccaagattgacaggcgatccggcaaagagcttgagaaggagcccaagtttttgaagaacggtgatgctggttttgttaagatgattccaaccaaacccatggttgttgaaactttctccgagtatcctccacttggtaggtttgctgttagggacatgcgtcaaactgttgctgtgggagtcatcaagaacgttgagaagaaggatcctaccggagccaaggtcaccaaggctgcccagaagaagaagtgaatcgtgcgggctggttcatcaggggatgttggttacaataaatgttggtttcttttctgtactcttgtgtcttcttttctaggtagcttgtttttcggacaaagtttgaagtctccaccatcatctcgcaactgttgttcccagaactgggttcttgatcgacggtggcaaaattgcttttatttatctgtgttttaatgtgttgtgtttgtcggaacccctgattacatttttgttaagcgcagcgagtttcaggactttgctgcgttgtgttgctttggtttattaaatgtcaactttctatttgtagtgttcaatttttggcttggtttgctttttctttataatttgtgttcaaattttggcttggtttgcttttactataatttgtgttcaaattttgggttggattttttaacgatcggctgtttgctcttcttcctcaaaaaaaaaaaaaaaaaa

SEQ ID NO: 82449 - DNA, 396 bp, Glycine max
  Clone ID: PAT_MRT3847_45468C.1
ctcggtggaggaatcttagtggacacaactggcccattgtacggcactgatacaaaaatatccagggaccaactaaatgagagaggctgattggattgccggctatggaagctcatgatcgaactggatgggaagccagcggatactgacgagagagttccgactgattggtgcaagtagcaccaacaagcaccctgcatgacagagccttttgaagcatgtcagtggacaaaattagaaccacatttctgggaattgatctctccaatagaggaatgtggtcctaacaatgggttcgaaatgtggagttctgagtgggcaaatcaaacttcatggcatttgagttttcttattgacaattccaaacagtctacagtttttgatattctcttggga

SEQ ID NO: 82450 - DNA, 422 bp, Glycine max
  Clone ID: PAT_MRT3847_45469C.1
tttttttttttttttttttttttttttttttttttttttttttttttttttttttttttttttttaaaaaaaaaagaaagttctaattattaaaaaattatttctatttatatatataccccgagagattttctttttcttttatctaaaaaaaaattggccccccccttataagggggtaaaggtttcttttttttaaggaacctaccccttccttttttaaggggccccacaatccaaaaaaatttggggggggggggcatttcgtttttgacctaaaaaaaaaaaggcttccagaaagggggaaattaagaatccccccgggaaacccttttcccatccctaaggggggcccggaaaacaccacctttttggttttccaccaacccttaggggaaaccaatccccccgggccccttatc

SEQ ID NO: 82451 - DNA, 1664 bp, Glycine max
  Clone ID: PAT_MRT3847_4546C.1
tcccgggccgcagcggctcgtgacttgatcaccttttttgagaaaagatatatatcaatggcaactccgagtgtgttagaagtccgccctcctgctttaacttccatctctgaaccacttccattttttgatggaaccacaaggttatacatttgctatctgtgcccttttgcacaacgcgcatggataactaggaactgtaagggactgcaagacaagatcgaattggttcctattgatcttaaaaacaggcctgcttggtataaggaaaaagtttatcccacgaataaggtaccttcgttggagcacaatagcaaggttttaggagaaagtcttgatttgataagatatatagatgccaactttgaaggggcacctctattccccactgatcctgccaagagagaatttggtgagcagttgatatcccatgttgatacattcaccagtggcatataccctacatttaaaggagatcctatacaacaaaccagtgctgcttttgattacctggagaatgctcttggtaaatttgatgatggaccatttttccttggtcaatttactttggcggatattgcctatgtttcatttcttgaaaggttccaactcgtcttctctcaaatttttaatctcgttagatttttcttttccaaccaatgtacatgattttgtcaatggggaatgcaggaggggaagttgtaagctggtaaaaggcagacggaaggtgacagggaggaatttctagaaaaagttttgaaaaagtctttggtattatgaacttcattcatcaactcatgataaattttggatcattttgtttgactttttgtgtatgctgttttgtttatgcttattgctagttttctaatcgcttttcacttttacatgttgttggctcaacagagaacgtgaattgaagccccgctgcatggtgtttaaagttattgaaatgtggaatgcttttaagaaatagtagtcaataaagatttatttccatttgtggaatgtatcaaaaaagcagcccacaacaccaatccagcccactcatcaggcccaagctcaacattggggagaagtttgtagaataggcttgagctagttctagatcgcgagcggccgccctttttttttttttttcactatcattttgcataggtgtctttttaatagattccttcttatcctttgatatagcaatatatattttaatgtatgctgccaatgattaattcaaatgaagtaagcatttcatcatttttgtctaagttttcatccataaacagctcatagcatcaacaaatatactagaaactgctagaaacttctaggagcaatgttgagcttgggcctgatgagtggcagtgggctggcttgttgctgtgggctggcttgctgttgtgggctacttttctgatagaatgctttttcagtttaaaaatgatgtgttctatttgcttgttactttgacttctcattaatgcttttgtatgggaacatccaaatgtatagtcccgcaatctataataaataagttgaagacaagtttgacttggtttttataaaaaggggaaaaaaaaaaatataaaaattgcccggccgtcctccaccaaaattatcgggcggcccccgattaaagttttcctcccccccgaaataaattc

SEQ ID NO: 82452 - DNA, 310 bp, Glycine max
  Clone ID: PAT_MRT3847_45470C.1
ctagtcggaggccgttttttgaattctttacggggatattttatcacatgggggccgttttcaaactttaccaggcattatcccaactcgtctgatgatgcaaagaaaccgtgaaaaggccaatatagccttgaactccgaagacccgcttaaaaaaaaaatctatgttcgaaggaagaaagacaaatacctatactctagggagcgatccgcttagacaacctcctcaacggaggggcacgtaaaagccgccagcgccgggggcagtgtctttgggagcgccaccgggcataccggaggcatgccaccc

SEQ ID NO: 82453 - DNA, 353 bp, Glycine max
  Clone ID: PAT_MRT3847_45471C.1
ccctcgcgtccgcccacgcgtccggaaaaagttgagttgaaattttcacaagaggaatgacttacagcttgggcaactgaggcgcgtcctgcaacaactctgtcggctgatgggagtgcatattagggagctctggtacatgataggccagggctttcaattccaggcgaaactggcattggggtgcagtgggcaaccataaacaatatgggtgcatatgggctcaatcctggaattgcaggacctcgtgtactgggcaccacacgtcagtctatttaacagcagactgtttggaatcaaacggcaacagtgagagcaccagggactattgattctagcatgcacagcattcg

SEQ ID NO: 82454 - DNA, 824 bp, Glycine max
  Clone ID: PAT_MRT3847_45472C.1
agaaagtatagtgttgctaactcaaaagcttcagagacacgagatagtaactcggaattgtgtctcactgacaaatctcataaatcaaagaggaaaggggatattgaatttgagatgcagttggaaatggctctttctgctacaacagttgaatgtaaggacagtaaaactgaggcaagtgcaaatcctgattcatcgagtttttcttgtccatcaaaaagattgaaaagggttatcggtgaagactcttcaacctccccccaagtaatttctacagcaattggatcaatgaaagtaggatctcctctgtattgggcagaagtatattgcagtgaagaaaatttgactggaaagtgggtgcatgttgatgctttgaatttgattattgatggagaggacaaggttgaatccatggtagcagcatgcaaaacatctttgagatatgttgttgcttttgctgggcaaggggccaaagatgtgaccccaggtactgtatgaagtggtacaagatagcatcacatcgagttaattcaacatggtgggattcggtgttgaaaccattgagagacttagagtctggggcaactggaggtgtggctcatttaggaacaaaccaaatcatttctacagaatccaacatgaatgattctgttgtccctacaaggagctctattgaggatattgagttggaaaccagggcattaactgaacctcttccaaccaatcagcaggcctacaaaagtcatccactttatgccatagaaaaatggcttacaaagtatcaagtacttcatccaaagggtccagttctgggcttttgttca

SEQ ID NO: 82455 - DNA, 127 bp, Glycine max
  unsure (1)..(127): unsure at all n locations
  Clone ID: PAT_MRT3847_45473C.1
atcttancttgtaaacncaantcanggcttgggttgatggtctgttgntatgtccnagcccccaatttanatctggaancctggataagtatgccttcactggaaattgttccaaaattatgttgac

SEQ ID NO: 82456 - DNA, 537 bp, Glycine max
  Clone ID: PAT_MRT3847_45474C.1
ggaattcggcacgaggctcgttttttttcatctcttttttatataaggatagataaaaagctaaaataagctttgctgcaagcctgcaaattcttattttgacaacttgactcgtataacagagaaattaatgttgacttcagtttactttgctaacaacggagctacaaattcatgcaaccataaagcaaagtcctacttgactacaatgatagctggataagcttctccacaagtacttgcaggagaaaaagataagaagaaaaagtgaaatatgtttcttctacctaacacattggtaagtatgtttaagtcgtaaacaattgcaggcaatacatacattatgaaagaaaatcaatcaaatgaccaaactgcttggcaatgacacataaatgtatcacaaatctattgtgctgtagtcaagaaaaatcaagcattctaaggccataggatatcttataaactcttctatcactctactgatgatgatgatttgagaaagccttctagttctttgtagatgactgaaggggtaca

SEQ ID NO: 82457 - DNA, 299 bp, Glycine max
  Clone ID: PAT_MRT3847_45475C.1
atcatggacgtcgtcaacgcggaacacgcccgtattgtggaggaggacggtgtctgcgccgtcatggtccttgagcgtgtccccgccaacatctgcgaccacggccgcatgcgctccatgagctaccccgcagttcataaggacatcaagcggggcaggaccatgcccgttatgggcaaggtcaagaccggacacaaagtcgaggacgacactctcgagggcatcggcatcaactacgtgaactagagccaggaccttaccctcatcgacgacgccaaccacatgaacaaacacaactt

SEQ ID NO: 82458 - DNA, 237 bp, Glycine max
  Clone ID: PAT_MRT3847_45476C.1
gggtccagcacgcgtccgaacagaagagagaggggaattaagtttttagggtttacaccgagcagccatacggccggtctcaacgatggatcccaacatagacgtatatgcaatcactgatgtcatcatctatgcaacatagggcaacatcattggacgtcgtgatacacaggctttcctgtgagcaccctgacgttatacgacgtaatcccattgtagcatatcacccttacagca

SEQ ID NO: 82459 - DNA, 745 bp, Glycine max
  Clone ID: PAT_MRT3847_45477C.1
gttcaagactgataataaccattaaattattgtcattgtaacaatcggaaaacgagggaaaggaatagaagaaaacaatgaacaacccttgccagttagttgcaccaaccaacaaggcaccaaccatagtaccaatcaaaaggtaaaaagagagagagaccaaatcctactaagaaaagcataactgttcctttccatccaaagggagaaaacatgcaggttttgctcatggcttccacagaatggttgtgtctgcaatcatggaagtaaccacgtatgggtccataagcagcaatgtgctccttgtgcttcttccccaacttgtcaattgctgctttgatcacttcatagccaccatcttctctcatggacttggtgctgtagtttgtgtgagcaccagcaccattccaatcacccttaattggcttggggtcaaaggaaaccaccacaccagcaatctcagtgatcctctccaagatgtaacgagctgcccaaatctcatcaccagctgagattccaactgaaggtccaacttggaattcccactgaccgggcatcacttctccattaattccactgatgttgatgccagcataaatacaggctttgtagtgtgcgtcaacaatgtcacggccaaaagccttgtcagcgccaacaccacagtagtatggaccctgaggtccagggaaaccaccaacaggccacccaagaggccattggatatctttctgcaacaggtgtattt

SEQ ID NO: 82460 - DNA, 114 bp, Glycine max
  unsure (1)..(114): unsure at all n locations
  Clone ID: PAT_MRT3847_45478C.1
tttgggngncagctaaggcgnaacacaaggnactccctattcccattcagtgcataagaaganggaggcncaccccgacggcccacacgaggggcacttacttggctacgcgcc

SEQ ID NO: 82461 - DNA, 632 bp, Glycine max
  unsure (1)..(632): unsure at all n locations
  Clone ID: PAT_MRT3847_45479C.1
atgannntctcatatattattatacttcacaatcagcattacttttgtttgagactgaaaataaccatattacattattattattgtaacaatcggaaaacgagggaaaggaatagagaacaatgaacaagccttggcagttggttggaccaaccaaagtagccacaaatcggaatcctggagaaatcaaaaggtaaaaaataaaaaggaccaaaccctacttagaaaagcataactgttccttgttccttgttccttgttccttgttctcaaaatatcccttccctgctttctctgtgtccctcccaaccctaactgaagctccacggtttgcaactccccataagaaggtgttgatgtcagcggtttcgtggcgccctgtcaaacgacgctcgttgccttctccataagcagcaatgtgctccttgtgtctcttccccaacttctcaatggcggttttgatcacttcatagccaccatcatttctcatggacttagtgctgtnntttgtgtgagcaccagcaccattccaatcaccctgaattggcttgggatcaaaggaaaccaccacaccagnnatcnnnntgatcctcnnnnngnngtaacgagcnnnncacacctcgttannagct

SEQ ID NO: 82462 - DNA, 2913 bp, Glycine max
  Clone ID: PAT_MRT3847_4547C.1
ccacgcgtccgcagatttttctactgtatcttttaaatgctgtgcctgtactatctcttcaaaatgatgaggtattgtaaagagataagattgggataacatttgagaaaaaacagcagcagagaagtcaatttgataaagaagatgtagcaaattagcacacgtgatatggtggcatgaaaagctaacattaactggtaactgcacccaaagacagtggacacaacccaacatttctgttgtgtgcgccaatcatggagacgccaagtgcatgctgggacaactgggtcggagaggcgctcgagaccctttactctctcaaagtccttcgatctctcagacccatttgcctccgcagtagccagcctcgagaattcggggcggacgatgatgcgttccaagtgttcgacgaaatgcagcactgggaccggtcttctgtcgaagtggaaattgctgaaaccacgtttagtagatggatgcatgacacccctagttctggtgatgagattgtttgtagtgcaacaggtggtgatggtgaagcaggggcatcttatgagaagtttaaaaaattaattttgttttctggaaatgattatctaggcctgagttcccatccaactattggaaaggctgttgcaaaggctgcccaagaacatggtatgggaccaaggggttctgctcttatttgtggatataccaattatcataggttacttgagtcaagcctggcagatttgaaaaagaaagagggtttgctgccaatatggccttgatgacagcaataggaagtatcggtactctcttagctgggaatagcataccttcagaggatgaaaagattgctgtcttttctgatgcattaaatcatgcatcaataattgatggcattcgtctcactgagcggcagaaaagtgttaaggtgtatgtgtatagacattgtgacatgtcccacctcaatatgcttttatctaattgcagaatgaggaagaaagttgtggtgactgacagcctttttagcatggatggagattatgcaccaatggttgagctagcagaccttcgcaagaggcatggctttttgttagtcattgatgatgtaaaacctctttttctttatgaagacaatttatgacaatttattatatgctattatttacatggttctgaacttctgatccttggactaaggttagtacttacgaagagctgacgataataatcatagtacatgtatagcatagcattattgttcctagattgaaatcacctactccctctaccatatattataaaattttatgtcataaaagaaaaatgtggcttctccttgctacaaagtcttacacaactataaactatcaaaataaaaatcttgtgtatatccaggcccatggaacatttgtttgtggcaaaaatggtggtggtgttgctgaggaattcaactgtgagaaggatgtagacatatgcattggtacactaagtaaagctgctggttgtcatggaggatttatagcatgcagcaaaaagtggaaactattaatacagtcaagaggtcggtcatttatattttcaactgctgcactagttccagttgctgctgctggtcatgctgcgattaaagtggcaaaacttgagaaatggcgtagagaggctatttggaaccgggtgaaagactttcatttgcttacaggaatacccgttacaagtcacattatatccctagtagtaggcagtgaagacaaagcacttcaagcaagccggcatttattgcaatctggcttccacgtgactgcaatcagaccacctactgtgcctcctaactcatgcaggctgcgagtggccctaagtgcagtccatacaagggaagatctggaaaaccttgcagctgcactctcacgttgcatcaatttccaagatacccgcatatatgattccaatgcctatgcaagactgtagctagctcttgatttttcaggatgaattgcgtcatcaacgattttgtgactatacaggtaataagtacacctttagttcctcattagcaagttcaagtcaattacattccaattagagtggtagcttatattccctcatgttatatcaaaatgacaagctattttgtcaacatctagataaatattgttaaatattgatatttatattttatatgtatttaattttgattgctactggctgtcatggaggatttatagcatgcaccgtaaggtggtgactgctcttgcagtcaagaggtcgttcgtttatattttcaactgctgcactagttccagttgctgctgctgctcatgctgcggttaaagtggcaaaacatgagacatggcgtagagaggctatttggaaccgggtgaaagactttcatttgcttactggaatccctgttacaagtcccattatttccctaatagtaggcactgaagacaaagcacttcaagcaagccggcatttattgcaatctggcttccacgtgacagcgatcagaccacctactgtgcctcctaactcatgcaggctgcgagtggccctaagtgcagtccatactagggaagatctggaaaaccttgcagctgcactctcacgttgcatcaatttccaagatacccgcatatatgactccaatgcctatgcaagactgtagctagctcttgattctttctggatgaattgaatcatcaatgattttgtgactatacaggaaataagtacacccttagttcctcgttagcaagttcaagtcatttacattccgaatagagtggtagcttattccctcatgttatatcaaaatgacaagctattttgtcgacatctagataaatattgttaaattacttaaacattgatatgtgcatgtatttaattttgataaacttttagtgtaagctctctcttttt

SEQ ID NO: 82463 - DNA, 1719 bp, Glycine max
  unsure (1)..(1719): unsure at all n locations
  Clone ID: PAT_MRT3847_45480C.1
gaatctgaaggttctataaaagcccacacccctgcttcgctgttctcacattttctacgtattgaatctcaagattctaagagagattttgctgctctttgaagaagggtgtttgcttgattttggagatgtcgctgctctcagatctcatcaaccttaacctctcagacactactgagaaggtgatcgcagagtacatatggatcggtggatcaggaatggacctgaggagcaaagcaaggactctcccaggaccagttagcgacccttcaaagcttcccaagtggaactatgatggttccagcacaggccaagctcctggagaagacagtgaagtgattatatacccacaagccattttcagggatccattcagaaggggcaacaatatcttggttatctgtgatacttacactccagctggagaacccattcccactaacaagaggcacgatgctgccaaggttttcagccatcctgatgttgttgctgaagagacatggtatggtattgagcaggaatacaccttgttgcagaaagatatccaatggcctcttgggtggcctgttggtggtttccctggaccacagggtccatactactgtggtgttggcgctgacaaggcttttggccgtgacattgttgacgcacattacaaagcctgtctttatgctggcatcaacatcagtggaattaatggagaagtgatgcccggtcagtgggaattccaagttggaccttcagttggaatctcagctggtgacgaggtgtgggcagctcgttacatcttggagaggatcactgagattgctggtgtggtggtttcctttgatcccaagccaattcagggtgattggaatggtgctggtgctcacacaaactacagcactaagtccatgagaaatgatggtggctatgaagtgatcaaaaccgccattgagaagttggggaagagacacaaggagcacattgctgcttatggagaaggcaacgagcgtcgtttgacagggcgccacgaaaccgctgacatcaacaccttcttatggggagttgcaaaccgtggagcttcagttagggttgggagggacacagagaaagcagggaagggatattttgaggacagaaggccagcttctaacatggacccatatgtggttacttccatgattgcagacacaaccattctgtggaagccatgagcaaaacttgcatgttgtctccctttggatggaacaaggaacaaggaacaaggaacaaggaacagttatgcttttctaagtagggtttggtcctttttattttttaccttttgatttttctaggatttcgatttgtggctactttggttggtgcaaccaactgccaagggttgttcattgttttctattcctttccctcgttttccgattgttacaataataataataataatgtaatatggttattttcagtctcaaacaaaagtaatgctgattgtgaagtataataatatatgaaattgtcattattgtaacaatcggaaaacgagggaaaggaatagaaaacaatgaacaacccttggcagttggttgcaccaaccaaagtagccacaaatcgaaatcctagaaaaatcaaaaggtaaanaataaaaaggaccaaaccctacttagaaaagcataactgttccttgttccttgttccttgttccttgttccatccaaagggagacaacatgcaagt

SEQ ID NO: 82464 - DNA, 398 bp, Glycine max
  Clone ID: PAT_MRT3847_45481C.1
gaggccgggggggcaaaaaaattattacaaaacccaaaccttaaaaaaaatcgggacaaaaaaggattatggaacattaaatttcccttacaaaaaaaggccccacattttttttaaaaaaaaaatccccataaatccaaaaaccgggggggcagggggagtttttgaaaccccttggaactatttaaaaacagggaaaaccccgaaaaagcccagtttccattgccacaccaggaccaaaccctaaaaaaaacccccactttaacccttaaccgggggggctcttcccctaaggctgggaccgggtcctaatttaatccaaaaaaaaaatcacagggggaccccacatgttcccggggtggctaaaaacgggccatggcgaactaagtttttttttt

SEQ ID NO: 82465 - DNA, 257 bp, Glycine max
  Clone ID: PAT_MRT3847_45482C.1
ctcccaagggtgtaaccttcctggctgtgttaatatgcgtgtcagcactgtcactcagcccttctgttgcgtgggaagggcaaaataatggccttgttaggaacttctacaaggaatcatgccctcaggctgaagacatcatcacggcacaagtcacacttctctacaagcgccacaagaacactgctttctcctggctcaggaacatcttccatgactgcgctgttccgagttgtgatgctgagcagttgctggac

SEQ ID NO: 82466 - DNA, 466 bp, Glycine max
  Clone ID: PAT_MRT3847_45483C.1
ggagaggacatatacgtccctctaaaacatcattatttatttatttatttatttaaagccctaaacacatataattccctggatccaacttttttcctggtgtatcccccatattcaactttagaaaatatgatcctcctttaacattttcaaagatggctaaatccttaactgtttaatttttcccccaaccctggagggccctttctagggtaaataataaatttaagtttaatttatccccccaacctttgagtttttaccttcgttatccaaattttcaacaagaatttcctttattcccgcatcatgttaaaatgttgcaataaaggggggaaaccctattgaatgcttgtgtcaagatcctttgtaggatcaaagggtgtttaaattaaccgggaaatacatatatatatttcactctatatgctcataaaattacatacccaaaaccaaatcccccccc

SEQ ID NO: 82467 - DNA, 264 bp, Glycine max
  Clone ID: PAT_MRT3847_45484C.1
cccacgcgtgctgacagacgagagcactctatacataaccctgataacacgaaccacatgtgcaagcgagtgacattcaccacccatgattagcatgcactaggcctggtaacggtatatcctattctgctttgccctacataaggacacccgctagctagctcaagatctcttcaccagatgtggaagacaatatctgcaactttgctaataagggtttgaccccatctcagattgatgacattattcgagattctcacggca

SEQ ID NO: 82468 - DNA, 215 bp, Glycine max
  Clone ID: PAT_MRT3847_45485C.1
attcacagtttatcaaaactatcatacccacatggattggcgatgaatgtgagagagtccaattattcaaacgctttgtgatgcttgtgagagcgcccaggctatagttatttgcgcctctgataaggctgcactttgtctagcctgtgatgagaagattaatctttttgagcttacaggatcacatgtgcaacaagctatctcgtacgtatgtt

SEQ ID NO: 82469 - DNA, 248 bp, Glycine max
  unsure (1)..(248): unsure at all n locations
  Clone ID: PAT_MRT3847_45486C.1
tcctctttggcgtttcctcttcttcnttcttcccgtttcccttgcgctctggcggggngcgggtttttcttctccgctttccttcgtgctctggccttctcgggcctgtgcgtgtgccttgctgctcgccttcttttgctgtctcgtcctgctccctctttgccgggtcttccctgtttgccttcgcgctctttgcctcctttgccttctctttccgcgctgcctcnggcccctgttccgcctttgcc

SEQ ID NO: 82470 - DNA, 888 bp, Glycine max
  unsure (1)..(888): unsure at all n locations
  Clone ID: PAT_MRT3847_45487C.1
aaagaaatagattgtcggatgtttgaatattaagtaatgcctccattgaataggagtttacatgttaggcacgctctagaagtagcacagcccttcacagacaaagggagttagttgggaatgaaatcgatcccatgtgaagcataagaatgtacaaatgtatcactcctcactcaaataaaaaggcaactttattacacaaaacaacttaaaaagagcaaacatagtttgcatattacgcaagatagtataagtgtatcctaaacagctactgtacctcatccttgtccttcccattgactacatgaccctcagcttcagcttcttttatctgcctttctatatcagccttcttttcaaggagtggttgtatttttccgttaattttttcaagcttctgcttcagcgcactaagatccttggtcttgtcctttccagtaactttcttcttctccttcttgtctttgtcttcttttttcttcttctctttcacttccttcccatcatccttttctttatcttctttttcaccttcctttgtggtttcttctatatcaatatcccttacagaaacttcaaccttgcttttctctttctcaccctcttcttttccatcctccttcttttcttttttgtgatccttctctttctccttcttatcctttttcttatttttcttattttcttcatcatcctcgccttcgtcattttttcccttttcctttaatgtgtctgtttcttaatctttgtccttcttttcctttttcttctccttctctttcttttccttcttctcttcaccatcaccattttttccctttccctttaatgnngnctgtttcttcatctttgnccttcttttcctttttcttcttctccttcttccct

SEQ ID NO: 82471 - DNA, 228 bp, Glycine max
  unsure (1)..(228): unsure at all n locations
  Clone ID: PAT_MRT3847_45488C.1
attaataataacaaagggagccnagggtgccctttattcgggttaacaaactttttggattgcccaccaatccacgttttaattgaaccatttcacccgaacaatgcagacgtaatggccaaacctccttgtgcaagaagcttccttttcttagaaattcacacgacaggggnttctttttgggatgttgaggcgataaaacatccgcctaaaataactatattttat

SEQ ID NO: 82472 - DNA, 825 bp, Glycine max
  Clone ID: PAT_MRT3847_45489C.1
agttcgaattggtcaattgtttcgttctaagaatgatgggtcgatcacatcccgcagatttgtttgctctaaagaggggttccagcacccttcaagagttggttgtggggcttatttaaggattaagagacagccatcgggaaagtggatagtggaccgcctccgaaaagatcataaccatgatctggactctgaaaaggtgggcagggcaaaaagtcttcctgcttctaatattttggctgaagaggtagatactggattgttaaatggtgacttatttagaatagataactaccctgtccctagaggaggtaggcaaaatcacattagaagtgagtggtatggcattcttttagagtattttcaatcaagacaagcagaagatactggattcttttatgccatggaagttgacaatggaaattgcatgaacatattttgggcagatggaagatctagatattcatgtagtcactttggtgatgtccttgtcttagacacatcataccgaaaaactgtctatttggtaccatttgctacttttgttggagtcaaccatcacaagcaacctgtgcttcttggatgtgctctaattgctgatgaatctgaagaatctttcacttggttgtttcagacatggcttagggcaatgtctggccggctgcctctgacagttatcgcagatcaagacattgcaatccagagggcaatagcaaaagtctttcctgtaacccatcatcgcttttctttgtggcaaattaaggcaaaggaacaagagaacatgggtctgatgggtaatggctttacaaaagattatgaaaagtg

SEQ ID NO: 82473 - DNA, 423 bp, Glycine max
  Clone ID: PAT_MRT3847_4548C.1
aacgacagctaagatgtacttccggaccttatttgcaggctatgctggtcactcttcatgatctacccatgctatctggcttcgcgtgggcaaagctaatagccccttcatcttgacacgtgattttcaattgtgcacgcatggacagatattggttgtctactcaaccccccttacagctggcaccgagcaagatctgggacgtgccggtggtacaaactggtagacgcatactaaaatgcgagctgatcaaatgcgatgtacaacatggggataatattagcagactttccaccacttcgccaagtccaaagcgataaagctaccacagaaatcactagtagctacaaaggactaattgctaacatactctaaacgactggtgatattgtcaacgatgcagaaactctgttcaagatatta

SEQ ID NO: 82474 - DNA, 538 bp, Glycine max
  Clone ID: PAT_MRT3847_45490C.1
aaaaccttaatcctaatttttttttttaaaactggaaatcttaacaaagggaaaggataacagaggtggggcccccccacctggggggtattaatgcaaggagcacaaaacatttttttttttaaaacaaagggggagagagaaaaaaattgggggaaaaaaaaaactttgaattaacaggcctttttttaagccaaaaattttaaaaagggcaaaaaagcaggaggccaacccattggttttacaaggaaaggagaaaaaaaacccccgggaaaaaagcactttaaagggtggaacaaggaaggggggcgggttgaagggatgctttagtataaaacccacggcacaaaccatttaacttttccattccccaacccaaaactaatccccaaggaaaaactggaataggcccctaaaggaaaaaaggcctttaacacgctgggggccagtttccaaaaaaacaagccgccggaattggccaagcgttccatcattttatgcaaaggatcaaaacgcaaacacatcggacattttggac

SEQ ID NO: 82475 - DNA, 2337 bp, Glycine max
  Clone ID: PAT_MRT3847_45491C.1
ccggcggctcctggctcttgttttttttctctctttgcttttctttttgtcttcttcgtttcttttttttttggctttgtccttgtcgagtcacccgtgtttagttccaggcctttcaatgtgttagtccctatctgcccgtgtttcatggctgagaaatcattccatttccggcttatatatatacacataaatgcagcttcttttatttttaatattagacatcactaccaaagatctttctttcagcttcttgttctacaatgaaaagcctctgccttgggccgtttcttgctgctagtgccccagttggtagaagagcctatggaggccacttaagcagaaagtgctttcaaaagcaacttcacttccactcacgttgtgttgctttctcttcattcatatgttctgcaactatatcagtgatgccagaattagaagagaagcaagtgtttgatggagagaaggctaatttgctagttaaagatctcagaaagagctttgattcaggcatgactaagagctatggatggagggtttcccagttggaagccatagctaagatgttagaagagaaagagaaggaaattactgaagctctatataaggaccttggaaaacctcgacttgaagcatttataaccgagatttcccaggctaaatcctcatgtagtgaagcacttaaagagctgaaagaatggatgaagcctgagaaggtgaatacttcaatcacaacatatccatcatcagcagagattgtgccagaaccactgggggttgtgttggtcatctcaacatggaactttcctttctggttatcaatggatccagtcattggagccatttccgcaggcaatgctgtggtcctgaaaccatcagaaatttctccagcaacatcatcactgcttgcaaatttgatcgaacaatatctagacaactctaccataagagttgttgaaggggctattcccgaaacatctgcactcctggatcagaagtgggataagatactttatacaggtagtgctagagtaggtcgcattgtcatggctgctgctgcaaagcatcttactccagtgattctggaacttggaggaaagtgcccagctgttgttgaatcagatgtcaacttacaagttactgcaaggaggataatagctggcaagtgggcatgcaatagtggacaagcatgcatttctgttgattatatcatcacaagaaaagagtttgccccaaagctggtagatgccttaaaagaagaattggaacaattttttggtaaagatcctatggagtcaaaagacatgtcaagaattgtgtctccaaaccagtttgcgcggcttgtgaatctcttggatgaggataaggtatctgacaaaattgttttgggaggtcagagggatgagaagaaattaaaaattgccccaactatcatattgggtgttcctgaagatgctatgataatgcaagaggagatatttgggccaataatgccaatcgtcactgtagacaatatagaagattgctacagtataataaaatcaaagccaaaacctcttgctgcatatctcttcacaaacaatgagcagctgaagaaggattatgtggataagatatcttctggagggatgctcatcaatgacgccgtcatccatgttgcaactcgtgggttgccttttggaggagttgaagagagtggaatgggttgttaccatggaaaattctcttttgatagtttcagccacaggaagtcagttctctatagaagttttgatgcagattctaccattaggtaccctccgtatacacctcagaaggaaaaattattgaaggcccttattagtggcaatattgttcaaattattctttctcttttggggtggtcttaaggatgataaggtccctttaaaaaaaaaaaacgttcatgaattagaagtactgtactaaaacaatgtgcaagggcagtgactcgtggcttcccactttggttgaagtggcaaaagataattacaattttcccctcgagttttcaatctcatgaatcctaataaaaaaaaaaaactcatgaatctgttctttgattgctaccctccgtatacacctcagaaggaaaaattattgaaggcccttattagtggcaatattggtcaaattattctttctcttttggggtggtcttaaggatgataaggtccctttaaaaaaaaaaaacgttcatgaattagaagtactgtactaaaacaatgtgcaagggcagtgactcgtggcttcccactttgggtgaaggggcaaaaaataattacaattttcccctcgagtttcaatctcatgaatcct

SEQ ID NO: 82476 - DNA, 522 bp, Glycine max
  Clone ID: PAT_MRT3847_45492C.1
aggaggagaatgagaatgaagccgcccgatgttttggggttgtcgatggagatgagggttttcgcggagaggtttattgggatggagagtttgaagatggagatgataaaggagacggaccggtgtaggttggagatggagaaaaaggggatccagatgattctggaatcacaaaggaggatcgttgattccattggtaaggcgtttgggtctagcaagagggtcaagattactcaccaaaactgaaaaaggttgtgaaatataatgatcgaaataagctctgatggtttccataacagaagagtctacaaaaccagttgcagattgtgctgcaagttatttattctatttattgttgcatttgaagtctttactactcccctcaattagggtaagttaatttttttggccttagttgattataatgaaaatgatttctttacaatatttgttttttcttctatttattaattgagccctatgaaaaagttctttactataaaatagctgcttatctatgct

SEQ ID NO: 82477 - DNA, 462 bp, Glycine max
  unsure (1)..(462): unsure at all n locations
  Clone ID: PAT_MRT3847_45493C.1
accggcccggacggcccggcccgatcttgcggcggtgctccttacaggacaacaagacaaacccagaagatttaggccagattggacaaaaacacacccccaaacaaggaggggaaggacgagaaacaaacaaaggcgccaagacggaccgcagaagaagncgaaacacccaaaggcgccaagcaggaccacaaaagagaacaagccaaaagagcactccccaaaaacacaagcnggaggaaccacactgcgagaggaacgagggacaaacagcgcactcatcgtcttaaaggaatgatgaaaagatttgcaccgcactcattttattaaaggaatgattataaatggtggccacagctggaattactgagaatacaggtatagcattagcctgtgctatgaatagtttctttagggggcgtgccagttctgatatttacaccatctgctctcaagactgtg

SEQ ID NO: 82478 - DNA, 381 bp, Glycine max
  Clone ID: PAT_MRT3847_45494C.1
gtaaccattattggggggaacaattgaaactgaacatgttgtggaggtgaatagatacatccaaatggtctttgtactatacaacacccaccagtggcgtggagggagcttgaaaggatccccagacaggggcatcccatgctgaacactctttcgcataagttattttgggaccataatgctcgttagagactatgttcaagatccaatgcattacatgtaccacctatctacgaggagactatcataacattggcctgctattgttacaaagcggacatcactctgtccacatgctgtgccatatgcaggacattagcagcgccgattctatagattgctttgaatgcatggattggcaaacagatgatagcacttgac

SEQ ID NO: 82479 - DNA, 291 bp, Glycine max
  Clone ID: PAT_MRT3847_45495C.1
cccaagagggcttttttcctctgactttttttttttctggctatcctttgggttaggggaactgttgaaggggcaactccaggaagcccattgccaagccaccatgtttaaccattaaacagaggcctttttccttccattttccttttgggaatgggtttttttgtttaccaggcagaaggggcagcaggggaatatggggtgggcccaagcatatggaccacctacatttgacggatttctgaaaggatttgggatttttgcactcgtgccattggagcgttttttttt

SEQ ID NO: 82480 - DNA, 181 bp, Glycine max
  Clone ID: PAT_MRT3847_45496C.1
acccggggggacccaccgtccgaagggtttatggttcacggtctgttttgaaaaatgggttccaaggtttggcttgtggtaattatgttcataacggctatacttctgatccctgctgaggtggcacccaatgaataccaaaattttaacaaaaaagatgggaagcatgctccaaatgggt

SEQ ID NO: 82481 - DNA, 300 bp, Glycine max
  unsure (1)..(300): unsure at all n locations
  Clone ID: PAT_MRT3847_45497C.1
ngtcgcatncacgcgtacgaanagctcggaattcggctcgagcntctttgtgttatnctccanacaacatannattntaatgactnancgaggnggttnnnnggatanatnggccagnatntttaggatnatngttangattgcatanaactgaaaagggngttgantatgaatanaaggaaagnnaatcncaggaanaagatcatatgcatnnccaaaatgaaatccaattcacnagaaattccagtnatgatccatagtggcaaaccaatttgtgaatcgnantatagtgcagtacat

SEQ ID NO: 82482 - DNA, 1002 bp, Glycine max
  Clone ID: PAT_MRT3847_45498C.1
acggctgcgagaagacgacagaagggtggttgttgctgtgtttccttcttcataacattccctccataacagtaacattgtattaacaaagcaaatggttggcgtcaacatgctcaagattctttgcagcatgtatagacaaaggcattctttactttgtctcctaatgttgattcaccaattgtagttgaagggactcaagattttgtcttagctgagatagcagctcaatcacaagcacacagatgccctggaagacattgatccaactcctccttcatcttcatatggttcaacttttacttcataattattgggattagaaaaactatgcttgcttccgctgcattattcttcaattccttcacttgcctaataacttcagccagtaatgtggctttatccatctaaagtaacaattgacctaccaaatcaaagtaattacaaatgtttccttaaagaataaggaggattattgtaaataacatcaactttgttgtcagtaactatgaatatgtactttaagctgcttaaaatactgtaataatatctatactcaactaggaattattagcgttccaattaatgccccatttagctcacttagaacatttcaactaaaagcttgtcaggctgaattactgaatttgattagtacttcgagagtggtgtctaatcattgtataacttagacagcaaaaactatacttaacaattgagattaagttgttaaagaataccgaaaaattattaacacatctaactaatttagtagccgtaaattttccaattcaacacttaaagtataaatgcatcccgcctttcttgtcatcacttgaatcgttagcctacaaattgaagatgtttgtagataagaaacatttaagaaagtaatagatgtatcaaatgtgatgaaaaaaaatccaataaacggtgtaaggtgggtaaaaaaattagaataacatagaccctttttggttagcatacaaatcttccccttgc

SEQ ID NO: 82483 - DNA, 883 bp, Glycine max
  Clone ID: PAT_MRT3847_45499C.1
acggctgcgagaagacgacagaaggggaaacatttctgaccctcttcctccccactaatacaatcaacaatctgctaaaaacaaaatataataataataatgataaaccaaaacctctgtgccagctctaaccagattgatattgcacattcttaatttctcatgatacccccgaagaaaaaaaaaaatgacccttttcagttttctcttatctctctgtctttccttccattgagacagacacatttgtactagtttcatttttggagctttaagccattgttcatctcttctcatttgtgtccactgtaagagggtgttgtgttgggttaccctctctctccatctgcattgtttgtggctgtcagtgttatcatacaaggtgttgtatggtttcattttgtgaaactcaacaaattgattaagctttctgggacttcccttttcaccttgcagttttccttggcttttgcaagtgctgaggaggttgggggagaagctgtgacaaccaaaaaagaaaaaatgggactttaagtttctatgtgataaagttttcacctttcatgattgtgttgtgaggacccaaatctgtagaatttgaggaaattggctggagggtttttttttctgtaattttaccagaaagtgtttgcttgcaacttggaaagcataaatctttttgaatgcttccctccatttgagactacagaactgtgggaactgtttcattcttttttataatcatcagggttagtactgcactaaggtttgagggtgaaggaaaatagaggaggttgaggttcatttagtttctcttttgagcacaatggattttgttttaggatggtgatggtccctgtgcgattgtgaagttctggattct

SEQ ID NO: 82484 - DNA, 363 bp, Glycine max
  Clone ID: PAT_MRT3847_4549C.1
aaaaaaaaaaaaaaaaacttttcttaatttttaaggaaagaaattaataaaaagggcccttttaataaaaaatttttttttaaaaaaactaaccttaacaaagtttgcttaaacaacaacctttttaacaacctttaccttttgggtaccaaaatatttttaaaaaaaaaatttttggttccccctagaggcctgaattgcatacccttaaaagagatgcccttgaactttttttccccaaaaaagtttttttatttacaaaaaggacggtccccacctaagtgcccaatacccaccccccctaatatttatcttaaaccttttccttaactatttttaaaaaataaaattaaaaatatccaa

SEQ ID NO: 82485 - DNA, 558 bp, Glycine max
  Clone ID: PAT_MRT3847_454C.1
atgaaggtgagccaatatatgctcctggtggtcctagtttggcattcttcattatgtgcgaatgcacagtggaataacccaataaactactctccattcgacgagacaaacaaaggtggaaactactccaaggtcacatggagtgtgtcgctgtcatgtgtcttcgttagcatcctgctcgtggcagccacagaagctattgaaaagtgccccatctttgaatactcgacggcgaaggagcttaaagtggggaatggggcagaggagtgctcggtgtgcttggtcgagttcgaagactccgacaccataaagatgctcccaaaatgccaacacgttttccaccagaattgcatcgatacatggttaccctctcgcatgacctgtcccatttgtcgccagaaactcacgtctcaggataccgtaatcgacattgatgatgatgatgtcgtcccaatggaacaactagaacatgatattggtacagagattacagagtcagaggtggcagtaactgatgaaactgacactggcactgttgtggaacaggttttggtttga

SEQ ID NO: 82486 - DNA, 408 bp, Glycine max
  Clone ID: PAT_MRT3847_45500C.1
ctaattccttgccggttacagctgggaagatctgctgcaatcgacgtgtccagacgcgtggatgaaggaattaacgaggtatggactctgttatacaccataaaggaatcgtggtggaatttcttttataagtattcaactaattgtatgctcagcttgacaaaatatgttgacagtgacggtaatctctgcatggtaaagttgagcctggatgaaactgatgtgtattcaaactggggtgatttcagctttaccatacaaagaactggaacatccagttttcttcagatgcaccccaacatggtgtgggcggattttcaatccattatgtcgatgaagaccaacaactccgttgatgcatgtggcgtgtctacacaaacagtactttacttgtataggagaggaaag

SEQ ID NO: 82487 - DNA, 1954 bp, Glycine max
  Clone ID: PAT_MRT3847_45501C.1
ctcgagacggggtgggacccatgggcacaaatggggtcactcagggcctcttcccttgtgaaaaggttttcttgtttggtttttctttctctggaaggaacatggcaggaaagaacacacgttatattcaggttgacttttctttgagaggaacttggtaagaaagagcacatgatgtataaaatgagagaaaagcaagagcatgagcgttcgtgatcacacacagaagatcgatctggtagaaacgatgaaggaactatgggcacaaatggggtcactaatggccactattgtgttcatgtacacaatctttgagcgcttcttccctccacacttgcgtgaaaaacttcaagcctatactcaaaaactcaccaaccatttcaacccttacatccaaataagcttccctgagttctcaggggaacgactgaagaagagtgaagcatacacagccatccaaacctacctgagtgcaaactcatcccagagagccaaaaggctcaaagctgaagttgtgaatgatagccaaacccctcttgtcctcagcatggatgacaacgaagagataactgacgagtttcatggcatcaaactatggtggagtgcaaacaaagtaagcaacaatccacaaagatacaaccctttttcttattacggttcctcagacgagaaaaggttctacaagctaacattccataagcgccaccgtgatattgtcaccatgtcttacataaagcatgttttggatgagggaaaggatattgagatgagaaacagacagttgaagctttacaccaacaatcctagtagtggttggtatggttacaagcaatcaaagtggagccacattgtgtttgagcaccctgccacttttgaaacactcgctatggatcggagaaagaaggaggatatacttaaagaccttgtgaagtttaagaagggaaaggattattatgcaaagataggtaaagcttggaagcgtggctatcttttgtacggtcctccggggactggtaagtctaccatgattgctgctattgctaatttcatgaactatgatgtgtatgatcttgagttaaccgcggtgaaggacaacactgagctaaggaagctgttgattgagactccgagtaagtctatcacggtgattgaggacattgattgctcactcgatcttaccggccagaggaagaagaaaaaggaagagaatgaggatgaagaacaaaaagatcctatgaggagaaatgaggaggagagtagcaagagtagtaaggtgactctgtctgggttgttgaattttatagatgggatttggtctgcttgtggaggtgagaggatcattgttttcacgacgaattatgtggagaaacttgaccctgctttgattaggagagggaggatggataagcacatagagatgtcttattgttgctatgatgcattcaaggtgctggccaagaactacttggatgttgagtctcatcatttgtttggtgcaattgggggattgttggaagaaacagatatgtccccggctgatgttgctgagaatctgatgccaaagtctgtggatgaagatgtggagatttgcctgcacaaattgattaaggctcttgaagaggccaaggaggaaaaagcaaggaaaaaggcagaagaagaagaagaagcacggttgaaggaggagaaagtgaaggaagagtctactcagatggaggaaaaacacaaaggaaaaactggggaggatgtgaaggaaaatggttttcattgagggaaatggaaatgtttctaggaaaatagcaatctgttattgagccaaccagttagatttgctcttagttggttgttgctgcattatactatcactactaggatttggtcatttgcaatatgtaacaatttgcccaatgtagtttcttggctaaataaaagttaattaaccttgtagtcttgtgcc

SEQ ID NO: 82488 - DNA, 1558 bp, Glycine max
  Clone ID: PAT_MRT3847_45502C.1
cctgtgcgccgctcaggcggcgggctgcccactcatacttgctctctctctctctctctctctctccctatatctatctttctctttctcttttctggttgaagtttgaaagacaactacaccaccgcagatatcctgagtgaagaacagattgttgattttaaagaggcctttggcttgtttgacaaagatggggatggttgcattactgtggaagaacttgccactgttattcggtcgttggatcagaaccccaccgaagaagagctccaagatatgataagcgaagtggatgcagatggcaacggaaccattgaattcgatgagttcttgagcttgatggccaagaaagtgaaagacaccgatgcagaggaggagctcaaagaggctttcaaggtttttgacaaagatcaaaatggctacatatcagctagtgagttgagacacgtaatgatcaatctaggagaaaaactaaccgatgaggaggtggagcagatgattaaagaagcagatttggatggtgatggccaagttaactatgatgaattcgtcaagatgatgatgaccgttcgatgaaacacctctctttccctctctatctctatctctctttctctgtctcttttctggttgaagtttgaaagacaaatacaccatggcagatatcctgagtgaagaacagattgttgattttaaagaggcctttggcttgtttgacaaagatggagatggttgcattactgtggaagaacttgccactgtcattcggtcattggatcagaaccccactgaagaagagctccaagatatgataagcgaagtcgatgcagatggcaatggaaccattgaatttgacgagttcttgagcttgatggccaagaaagtcaaagacactgatgcagaggaggagctcaaagaagctttcaaggtttttgacaaagatcaaaatggctacatatcagctagtgagttgagacacgtaatgatcaatctaggggaaaaactaaccgatgaagaggtggagcagatgattaaagaagcagatttggacggtgatggccaagttaactatgaggaattcgtcaagatgatgatgaccgttcgatgaaacactctcacctaattaattggattggacacagatttgttattcaaaattcattggcttccaacctcccaagaaataagtgttctttctttattattgtttgttgtattgtactattattctacttgtacttagtaatgaccaagcagtagattggcacccccattccatttgatccattccaaaattaaattactattcttgtaattttagttcagtacattttctatcctccgagagtaagaaacccaaggagcatatctaccattaattatgcatgacttttaccaagtgccatagttctcatactttaatcaaatggtggctggtgggtgtgttccatggattaagaaaatttctgaatcacggacttggaaaatggacctgcacataaatttaatgctacattaaatttataataaaaagattgattcttgttttccatgatct

SEQ ID NO: 82489 - DNA, 354 bp, Glycine max
  Clone ID: PAT_MRT3847_45503C.1
gcgccagaacaaaaagcgacttgtttaaagagagactttccagggtttatgggggggttaacagttttttttttgcccaagggcccctataaatttattaactaaaccatttactcacccaatcgctttcgaccaaagaccaatttttaagaggggacatacaaaaggggggaaactttccccacgatttggacaaaattattaaaaaggaaacctccgaaatccagatgtccccaaacagtgccatctattaataaaaaataaattttttggccaaaaagaatagcctctaattcttggtactatggctcccagagttaaaccctatgggtttttcgccggccccctgttttg

SEQ ID NO: 82490 - DNA, 468 bp, Glycine max
  Clone ID: PAT_MRT3847_45504C.1
aaggtaatttacaatgatttgtagttgtagttttctccatgaggtttctttcatttcatcaatgctttttgcgagattttagttatttcaattaagggattatgtttttttttgtcatacttctgtgactaatgcttttttgttccttttctaattctgctcgagttttgcagttagagacattttttgtactcattacaatttattttttctttattctttcagtatatttgtcttataacattttttttcctgtttttcttatcctgttagaagtgttttgaaaagccaatgaaattatgattttatgtatattactgatagtgatctcactgttattttctttacttattctgggcatgcagatgctggcatatttctttctatattttttttttcattttgtaagaactgttccaaaagagttgaacgattgaaattatgattattttgttttttttttctaat

SEQ ID NO: 82491 - DNA, 352 bp, Glycine max
  Clone ID: PAT_MRT3847_45505C.1
gcccacgcatacgaccatgtgcccatcatacttaccgataacgatttatcaacactatatcctgctattatccgggatgatcttatgcataagttctactgaccacctacaatctacgatcatatattctatctaccatgaaatattacaccctgacaattttcctaaagactacattgtcaatcttgctgacaccttacccgatcaatctatttataactttgatacacttatgacttgcacatatgatgatgaacaattgtactaaatatattttgcataatgatacttcattgataataatcttataaacttcaaataaacacctccaatcttcgatcaacccaatatt

SEQ ID NO: 82492 - DNA, 309 bp, Glycine max
  Clone ID: PAT_MRT3847_45506C.1
gaacaatggtatctgttccatcccattccttcttgttccatcctctttttatatatccaaacaaaggaatttaatcccattccattcaatctcatttgaccaatccaaatgtgcacaaactcacatctaggatggttgaaattaacaataggcatttgtgtataccctttatctcgagagtttgggtgaatgtgaatgggacagttggtatgcctcaaaaatatttatggttataacattagcaatagcatgtcaacatgtacttgagatactgagaacacgaagtaaacaaagagcataacttcacta

SEQ ID NO: 82493 - DNA, 132 bp, Glycine max
  Clone ID: PAT_MRT3847_45507C.1
atcataaagagcacaattcaatagaagatttctaaataaaatggacagctagcacatcgaggcactcagttcaccaagcactttcgattcacataagaaacactagtgggactcatatatccggcaactcga

SEQ ID NO: 82494 - DNA, 494 bp, Glycine max
  Clone ID: PAT_MRT3847_45508C.1
tgaaatacagtggggaatgtcatgcaatattgagagtacgggatataaatgtgtgaaatgtgttcttgacactctctagaggatttgggcccaatgcctatgtgctgacccaatgccctcaacatacatctggagctgaaccttgctaaaatccatcattgaatgtaaccaatgaaattgaacattatctggaacctattctatggaccaggcacattttttaatttatctttcaggacttgtggtgcgtgtataaaatgcatatcatccttctcaacacgagaaccaaataccaaaaatttctctggcataattattagggatgtttccatgtatttttctaaaaacacttttaagagaaaaaaaaaagttcttcctcaagttaaaatgaactttctattagataatttgtaaaaactctctcatagtttctctaaaagatgagaagatatctacaaattaattaatgatgattagctaataaaaatttaatt

SEQ ID NO: 82495 - DNA, 256 bp, Glycine max
  unsure (1)..(256): unsure at all n locations
  Clone ID: PAT_MRT3847_45509C.1
ctttttttaagagaagtgcgaatnatattagtattagcgtgttgcnaatggtgatatactgatattaaaagcatccgaaagataatttgacttgctttatgtttttagttttaccatcaactctgacaaggacagtgaagttcttccctcgttaggggctttagaggaaaaaaataatgaacttacttgtattattctttttctgaaaatttcttacttttaattcactccctataataagcatgtagctcagttc

SEQ ID NO: 82496 - DNA, 241 bp, Glycine max
  unsure (1)..(241): unsure at all n locations
  Clone ID: PAT_MRT3847_4550C.1
gacccacgcgtgcgtacgactcctgaatataagccgcgtttggtgatgattcatgcatctgtctatcctgaaaagttcgagggtgataaagcttcaaaactaatgcagctggcacgaactatcacctgatgacatgaaagttatcagtgatgtgcaacanctggcgggatcgtcacgcaggaaatcgtttttttgctggggggttctcactcaagttcagcgaccagaagacaaggcaagc

SEQ ID NO: 82497 - DNA, 389 bp, Glycine max
  Clone ID: PAT_MRT3847_45511C.1
gtagcggcctggatagaacaaataaattacactaatggaacgtgcaaatcacaaaagggttccacaaccttgacataaatccttaacccaacaggaagggaaaatccaggacaaccctccaaagagggggtttgaaagaggagagggccttttgtttttgaaaacccaccctacaggggggccaaaaaaaaccaaacctttaattaggcattgagcagggggagtttgatctggcgctcaaaacaaaaacaccagaccctgagagggttcaagatttgaaaaaggaacagccaggtttgcaccaaaagccagttaaatctaagatagggtggtattggcctcccccgacaggggagggaaacacagatgggggggggagaccaccacag

SEQ ID NO: 82498 - DNA, 453 bp, Glycine max
  Clone ID: PAT_MRT3847_45512C.1
ctaaccaaacaatatctatatatgtatataataaaacagtaatgaatattacaaacaaatatcaactttaaaagactcaagtggcacgtgatagtagaattgatctctactaagtatcatacacatcttgaaccttcaccatttgaacagaattatatcatcaaggatttttcatctttattctcaactttcgagcaacttgtgctgctttaggatgaccaggccgcttgttactttggcactgttctacctccacccagttcataactttcagtatgagagactgaggaactttcctgacatcaccatctgatgcatcctttgttttcttcaaacctgtttccaatgccttctcaatgaattccataaaccaatttcctgcttcagtttctatctgctttcccagtttgattgtgttgcttaagctgcatgatcctcctggtttcttattct

SEQ ID NO: 82499 - DNA, 576 bp, Glycine max
  unsure (1)..(576): unsure at all n locations
  Clone ID: PAT_MRT3847_45513C.1
gggtggttgtagtttgagtgagaggagatgctactctatgggttcgtatcggtatgtggttcgtgatttgaatttgcaagtcgtgttatctcattctcaatctcaagatgatgatgatgatgttttggaaaatgggaatgtggaggggaagaggataggggactcaaccaaaggtgagagcttctctgtttccaagatatgtttttggtccaagaagaccagatttcatggttctaatgcacctttcccttgattaattcaattcttgctgtaagaattgcttaacaatcaagtgtgtgtttggttaagcggtgcgattgtttctcattgttcaattattcaccgtgaatttgagagctaaaattcactgtgattggtatccaaacatactgagaaggtggaaacatgtgaggaagctagattttccatcaagaattgcatggcaataatagtgtgcttttttaaaaaaaattcatataccattaatatatacaggtttatgttagatgtctagatgatactagggctcctttttgtctctcaccacttancactcgaattacattgatctaggtt

SEQ ID NO: 82500 - DNA, 514 bp, Glycine max
  Clone ID: PAT_MRT3847_45514C.1
aaaaaaaaaaaaaaaaaaaaaaaaaaaaaaaaaaaaaaaaaaaaaaaaaaaaaaaaaaacaaaaattaaataatggaggctgccgccaagaaaactagggttcccggctttaaatggaataacaattcgtgggggggtgcccgttttctctttggggggtcatcggggatttttttttattcttggtctttgtgggggcccccattttttttttagagggttcctttggactttgggttaaatcttgcactcttgttttgtttggggtaattttgttttttgagtgaagttgcgcccaaattttttgggtgggtgttttttggctttttgccgggggggctttatggggggcccccttctttttttaggggggcggcctcttcgccccttttaattggagaatattctgcaccggcgttttttttttttacttcccaaccggcgggggggggtttttctttttttgcgacccatggatgtttttttttttcccggggaaggggggtttcttttt

SEQ ID NO: 82501 - DNA, 799 bp, Glycine max
  Clone ID: PAT_MRT3847_45515C.1
ctcgcttccacatgcatcaccgcatcgcacgcttccctccctcccctctctctcctctcccccctttaccccatattcttatatttttttttatatagtacgacgctgagaaagttttttgctttttaatcgatatgggattctccgagaaggcgcaagtagaaggagcgtttgattcagataccagcaacaataacaataatcgaaaatgggtcatcgctggaatcgcgttgcgtgcaccattgaagccaatatacactactatgatccctatggagaaggaacaaaaggaagaggttgaaattgaaacgacagaggattgttcatcatgttcgagttcgacaacgacaccaacaagcgtggaatcgaagatcccaacaccgttgacgtgcccacctgctcctaggaagcgaaaacccgcgttgaagaagtgctataattattgcggtggcggtggtggtgttgttagagagttcttcacgccaccagacttggaaactgtgttcatacgccacgttgaaaaagctatttgatcgcacggaagaaggaaaaaaagtaagaaaaaaaaaaattaagtagctactttcttcttctagggatagctagcttttggttcggttcgtgtatcttagtgttttctttttctttccctagtgtaagtgttttctggtttcattgagtagctagagagcttcggtaggttttttttttttgttacatttattggtaggagtatttattgactattaatttatgttgaaaaatataattaatcactttagtgagatttttctcttct

SEQ ID NO: 82502 - DNA, 911 bp, Glycine max
  Clone ID: PAT_MRT3847_45516C.1
acggctgcgagaagacgacagaagggaaccgctacttacacctcctttttcaaaacatgcacattcttttgttttcggcctaccccatttttttatttttttatattaagtccaaaataaaatgaaactggcggttacacctctctcctttatatatgtacccctgccacttaggatggtgattagactgccatgtcaacactttgtcagtgttgactaagtccaagtcaacccttttgactctgacaaaaataaaagaaaaaaaattaaattaattataaatattagtggatatctctttattttattttagatctttattgtctctatcatttattttatccttcaatgtgattttctttttatcattgcctagttagttagtttaattaataatgtattgtaaatatctcactattcatcttatttttccatgttttaatcctgtatccttaattactaagtgtactccctacttatattttacccctttctattctcattatacttatttgattttgtagcattatgtcaattatttatttacttttgcaaatccgcattagtattctttagtacacgctcacgtttcgtacactccatgatgggtctctgacttgcttggtggtgctttaatagcgtgtgagtacattttgtaaaagtcattttgggtcttcgactttcttgacttcacaaagtttactacaaaactaaaatctttcctaaaaaggtaaaaattctcaaataaattatcactcaattctcttttttcacgtttcgcgcactccatgctaggtctctgacctgtctgactgtgtttcaataaagcgtgagtaaattttgtaaatgacattctgggtctccgacttacttgaattcccaaagtttaccccaaaaccaaaatctttttg

SEQ ID NO: 82503 - DNA, 235 bp, Glycine max
  unsure (1)..(235): unsure at all n locations
  Clone ID: PAT_MRT3847_45517C.1
ctctgncnctgnccaagncacagagaacaangcaaannncncnnatcattttatcctncaagaccccccaacttttcccaatacaccaccccaaggacccctccaaagcccccccggaaccaccaggttcaaccgccaaagccaggcaaccaaggcccggaaggggccggcggggaattggcccgaaacagccaaggggatggatcacgaaaaccagacccggggagccccggcc

SEQ ID NO: 82504 - DNA, 466 bp, Glycine max
  Clone ID: PAT_MRT3847_45518C.1
atcattatccgtgagctcaattcttctcttcgataaattttcctttgtttgaattctatcttggagcaagctccatgaaaaagctgccacattggatgggatagatgctttccatacttgtttaagaatgtttgcatgttcatctacaaggccatcatgaagaattagcatataagcatctcttacattgtaacctcctgactcattcgatttccaaacccaagagtcttcttcattctattttacctccaccaaatgtaactcttccagaaatttagccaccaattctctttcccattcaaacaaattcctcccccaattagttttctatctccatctactttactaaatgaagaggaaggacaggcatggtggaggaattttgcagtttgtttaggtacttctgtgatttgctatgggtgtggtcaaggttgtcaaatttgagagtctatgtaaactcgtggag

SEQ ID NO: 82505 - DNA, 504 bp, Glycine max
  Clone ID: PAT_MRT3847_45519C.1
aagaggatgcaaggccaaactgaaggccccagagctcaaaagatcccttaacaaagtcatagtatcctccttttagtgacaatgtcttgttcaccaagccatctctaacaaatgggtatgttagaaggtttccaagggaaacattcacagcttcctgcacattcataatccaattcaacttgtaagcatcacctacatggttttaatttgcttctaaatcgtcgcgcttaaacattatattatggacaaaacttagatgcagtttcttaggtgattttagtgttgtcttgtctctaatcagaattggaattttaacccagtaatctttgtaataagagtttgctttaaaagtcaacatagattatcaaagtagaattctaatttgattggagaatagtaacataagtacctatgaaattgtatgtaagttttgtccttatattatgtgttgaagtttattttgcctacttaaagaaaatgtgttaagttaagtctgagttttgt

SEQ ID NO: 82506 - DNA, 987 bp, Glycine max
  Clone ID: PAT_MRT3847_4551C.1
cccacgcgtccgcccacgcgtccggctgcgagaagacgacagaagggtacggctgcgagaagacgacagaaggatacggctgcgagaagacgacagaagggattcaagtttttgtcatcaagctaatgacgagttaacatagaaaatcctcgaaaagagaatcacataggtaatgaccaagttttggagaggttcttagaaaatggaatttgaaaagttgaaactaaaacataagtggtaaactaaacagttaaactttggtttgtagcccaacccggcaatacccaatgtttattgaaataaaggtaccttttcaagactttcttcttatcatgattgaaaagttcggtaactcaaataaatacagacacacttgaaagttgaaatgcatactgtggtgggccaatcaaagtaaggtcggattgactgatacattgaatgtacatcattttcatgtaaatactttcgtataattttaagtggaaaaaaatattcattaggtaggttgatgtacgttcgtccattatgattgtgagagtgaattgatactcttaccgacatattagcatatgattttaatatcgagtggcatcttagctgattataacttggacacgtagacttagaattcaaatttatttcgtcaagctcgatctgatctgatgacaacttagcttggaaaatcctcaatcgcaaagcttaaaacaaatttatagagcgtcttagcaaaataaaatttgaaaagatgaaactaaaatataagtggcccattgaacaataaaactttagtttatatcccaacatccagtgttcagtgaaataaaatccttcttaacacttggtttttttttagagagacgtgaaaagaaataaaagtgtgagaaataaaaaaaaaggaatgaaagagaatgaaaagtaagattagttgatatggtaagtgagaaaataaatttaatatttaatcaaatttacattttatcccaaccc

SEQ ID NO: 82507 - DNA, 253 bp, Glycine max
  Clone ID: PAT_MRT3847_45520C.1
gacacgctaactctcgtggttccttgatgtctacatttaagaggcgtagattccggaaatctgagaccggcaatgaccatcattctagatgaggtatcctacgacaccattaacatcgcagaagctaaaattgatgaccaggactggactcacctgaccacgatagacgaagcctcgcgaggaggcacctagaagatggacgctcccttgacgacgactacattcaaagggaataagccatccatctagagct

SEQ ID NO: 82508 - DNA, 259 bp, Glycine max
  Clone ID: PAT_MRT3847_45521C.1
ctctaatggagctttcactgctcttaatcaaacaaggtatcaaaataacctttgtgaacaccaaagacaaccatgagaggatcatgagtgcattgccaagtgggaatgatttatcatctcagattagtctagtgtggatatctgatggattagaatcctcagaagagaggaaaaagccgggtaaatcatcagaaacggttttgaaggttatgccatagaaagttgaggacctaattgaatccatcgatggatcagaaag

SEQ ID NO: 82509 - DNA, 1502 bp, Glycine max
  Clone ID: PAT_MRT3847_45522C.1
ggggttggttctggtggtgttggtggtggtggtggtggtgattgggctatgaggttaagagggtataagcttgtgcaggttagtctctttcagaagcctattgtgaagttgaagttgggggatttgatggctgctactagtaatttcagcgaggagaatgttcttttcacaaccaggacgggagcaacgtataaggctgatcttccggatgggtctgcactcgcggtgaagcggttgagtgtgtgcaggatcggggagaagcagtttgggatggagatgaatcggttggggcaggttaggcacccgaatttggcgccactgttggggtactgtgttgtggaggaggagaagctgttggtctacaagcacatgtcgaatgggacgctgtattcgttgttgcataggaacggtggtgatgcgttggattggttgatgaggtttaggattgggttgggtgcggcgagggggcttgcgtggctgcaccatggctgccaccctccgattatacagcagaacatttgctccagtgtgattcttgttgacgaggagttcgatgcccggttgatggactttgggctcgcaaggctcatggcttcagactcgaatggtagttttgtgaatggtgatttgggggagctcgggtacattgcgccagagtatcctagtacacttgttgcttcgttgaaaggggatgtgtatgggtttggtattttgcttttggagttggtgactgggcgaaaacctcttgatgtaagcaatggggaggtagagttcaagggtagcttggtggattgggtgaatatgcattctagttctggccgaatcaaggattgcattgataaagccatatccggaaggggacacgatgaggagattctgcagtttctgaaaactgcaatgaattgtgtggtttctcgccccaaggatagatggtctatgtaccaggtttatcattccataaagagcatatccaaagaacagagtttctttgaacatgatgatgaatttcccttgatctttggtaagccagaaaacgaggttgtgacatagttcttgaggaagcattattgcagtatgagacgctgatgagagattgttctcactgagattactattttatagtggagagttctcagaatcgtgctaatgtttatggtttgagcatgtccatgggtgaccctaatcaggtatagttgtattgtatgatatataataaactttctggtaggttagtttttatgagatcttattatttgtttcactgtttcttgaaagcaaaggcaatctctaatgatgtccaaaatgtttggaatatgcttaggatttgaatcctcaaactatatatatgtcctcaagtcaaaaaaattgggcatctacttgtgctctgtaaagacatctcctcatgatgttttattcatttagatctaattgttggaatgtctgaagcatttaatttctgtataaataaataaataaaaaaagctaggtaagcatttgaaaaa

SEQ ID NO: 82510 - DNA, 1488 bp, Glycine max
  Clone ID: PAT_MRT3847_45523C.1
cgcccaggtagagtgagagagacagatctctctcaaggcagagatcttgtgcgtgtctgagagagagagagagagacagatctctctcaaggggtttaattgcagagatcttttgcgtttctcaatataagtgaaagagtagacagagagaaagagaagatcaaaagagctaaccctggctccctgaatatcttctcgttttttatctgaatcacgctttagtttgtctcttagctttgttttcgtttgatcccatgcccctctagctaaactcgtttgtcttctatgccaccttcagactgatcaaaacaaaacaaaacttgtttttttcgctatcttcttctccctttgaggaaagcataaataaaaagcgatagaaagggatcgatagaaagagtcttgtggagtagctctcactgtaaagatgggtactggttggagaagagccttctgcacccgcgaccctgcatctaccatatcggataaacatcccggaagcccaagcccgagcccaagaacctgcactcgattgggttttctctctggtggtagcaacccttccaccccacgcttgcgttgcacaacaaaagcggaaactgcttctcaaacagttacattaagtgatagtcccagagttcaaagcaagaacacccccagagcaacgaaatcaccatcagtctcaaatccaacttctccacgctcccctctcaagctctccctcttcaagaacagcttcaaattcagggtatgtcatgcttctttcatctttttaagattcccatgtatggagtattcaatgattgtgatttgttatggttgagcagagtagctgtggaatttgcttgaacagcgtgaagacaggacagggtacggcgatatacacagcggaatgcggtcacgcgtttcatttcccgtgcatcgcagcgcatgtacgcaagcatggaagcttggtgtgccctgtttgcaaggccacgtggaaagacgtgcctctactcgcggcgcacaagaacctcgcgccagaatccgccgcaaaagacgacgtcgtcgccgtccagagggtcacagaaagtccttaccccaatggccaacgacaaaaagccaacagagaataataatgcctcccccgttttcaaaacctacaacaaccacgtggagcaaccatcgaagcattccgattcaaccaggtcctacaacgatgacgagccactcctctctcccacctccggcggccggattattccaattcccgaagccgacgagaatgccgaagacgacgaggatgaagaccccggcgagttccagggcttcttcgtcaatcccaaaaactcatcctcgtccaaatcctactccgattcgttgcaaaccagtgacggtgattccagaaccgttcaggtgaaactgatgccggagtgcgctgtcatctcagcttcccgaacacacgagacctacgcgttggtcttaaaagtgaaggctccaccgccgccacct

SEQ ID NO: 82511 - DNA, 585 bp, Glycine max
  unsure (1)..(585): unsure at all n locations
  Clone ID: PAT_MRT3847_45524C.1
gaaggtttcccgtcatcactgtatgacgtcctcgcttctttggggggggagggggcgggaagctgaatcacataaacgaccagaagtataaccaaacagggtcaagggggtgaccggcggggatagggtagggtggatacctcttatattaaccgaataaaagcgcttatagcgagagaccaaaccagacaaaccgacggcacggggcctaatcgaaacaagagcgaaaagaatagagaagataggtacgccaatggcacatgccgtaatagcggcagcgctatccccgtagttaaagcagtgaccaccggggccgagccgttaatattgcgcataacagtggcaataaacgaatttaacagcgttaatagacttaattggttaggtggtatggttgcgcntggtaaagttggtaaccatggtgtagttggattaaagttgacgccctgtcacttcaaggttcactggatcgatctcgctagctcatcgtagactgtggtgagacgcgtattgaaaggtaaggtatgccattcgtcggggataatcgtcgcatgcccaaaattcgcctcggatttaatggaagtc

SEQ ID NO: 82512 - DNA, 1217 bp, Glycine max
  unsure (1)..(1217): unsure at all n locations
  Clone ID: PAT_MRT3847_45525C.1
ggctcgaggaagcaagtaacttttttgcttcaatttcataattccatcagccatgagttttcaagacatccaaggtgggcccaaccctccctctcgccggaaccagtccccgtcgcaggccgttgccgccggaattttccagatcaacaccgccgtcgctactttccggcgactcgtcgatggcgttggaaccgttaaagacactcccgaacaccgtcagaaactgcacaatacgaggcagagaatattgctgctggtgaaagatagttctgctaagctcaaatccttgactgaatctgatcgtgatgctaatgccaatgctagtaagaaaattgaggatgctaagcttgcaagagatttccaaaccacattgcaagagttccagaaagtacaacagcttgcctctgagcgcgaatcagcttatacccctgctgccccttcttctttaccaacaagctctggctctggtgaagaatcggttgggatagacgtggaaagccaaccttttatcagagagcataagaggcaagagatacttctgttggacaatgaaatatccttcaatgaggccatgattgaagaaagagaacagggaattagagaggtagaagagcaattggacaagcaaatgaaatattcaaggacctagctgttctggttcatgatcagggtgttgttattgatgacattcattcaaatattgatgcttctgctggtgcaacaacccaagctagggtccagctagctaaggcttccaaaagtgtgaaatccaaaacctcatggtgttggtggttgcttgcaatttttgtggtcgtgcttgtcatcttacttgttgtactcattttttagtgtgcaagtgcctacaagctggacagatttttcatcccatatttcgtgagtgttttgttgtgtgaagagtgttttgaccaaaagaaatgtgttagaaagtactgcactgcagtttgatatgctgactgcgcatttgcaggtggaagttggaagaagttagtgaggtaaagcgattataagaagagttgtcctgtatttgtaatgtaaatttgcaacatagaatttgtactttctatttaaacatgaattcaaaagccattaccaatttgttgatgacttgatggctagtgccttccctgtgcttatcttaacgtccatgctgcattgtctgtgtaaaaannnnnnnnnnnnnnnnnannnnnnaaaaa

SEQ ID NO: 82513 - DNA, 328 bp, Glycine max
  Clone ID: PAT_MRT3847_45526C.1
atttgagattattaaaaaaattaaccaaggaacttatggggttgtctaccagggttgggattaaaaaactggagaacttattgccttgaagaaggggaaaatgaaccttgagagggatgggtttcccatgtcatccttgaaaaaaataaaccttctcttggcttttaatcattcctcccttgggaatggtaaagaagtagttggtgatgattttgatgggacttttatgggaatggaacccattgagttttacctgaaggggctgatggaaggtaaaaaaccttccttttacctgaatgaaattaaatccttggtaccgccacttctt

SEQ ID NO: 82514 - DNA, 432 bp, Glycine max
  Clone ID: PAT_MRT3847_45527C.1
tgctaagtacaagagccaattttctcccacctagctccaacattccgggagtgcgtagcaaactacatacggacgcaaggaatctaaccaataatatgtaaagaatgtgaacacctggttagaacaaatcatcagataggcttatatacgggcccatgagacgcaagcacgtttaagtaactggggtagccacacccacaatgaatgcatttgttgttgagacttaaatggctccaaatggacccaataaacagcagatattctttgatcctgcctcacaacccatcattacaagctatggcaacaaccaaccatgtcatacacatatattctttgccccacgaacttcattgtttaagttgggacataaattgcccctatttatgatacaacaataaacatcaattgcttcaactggcatgattaatgccc

SEQ ID NO: 82515 - DNA, 432 bp, Glycine max
  Clone ID: PAT_MRT3847_45528C.1
gtttaccaaaagcatgttcttaagctcttttgacacatcgatgcatacagggaggctgcagcacaccctatcggattgcgtggagcagcaaagcaagagcagggcattcgggaaaagttgagactgtgatactgtgtcccgaacagcacttaccgaggcaggtacttaaatttgtcgttcaatttcgtccccagctttgttgaactggctcaggcctggcccctctgaaccacgctattcaaaggcgggttccgatattcaatgtagaagaagttggtgggacggtggccactgatcttgatggcaaaagggttgagaatatggctccacctgtgtatgatccagtggctgctgagagaatgattcttttagtagctgattggcttacgaagagattcgaatatctaataggatagacttttcacatgcacc

SEQ ID NO: 82516 - DNA, 812 bp, Glycine max
  Clone ID: PAT_MRT3847_45529C.1
aataaatgtagtaatgcccctgatgtggggtttctagtgttctagggcttgttcatcttctctcaagacattgaaattgttagattgctatacaattggggatgaaaccatattatccctcgccgaattctgtggtaatctggagactttaatcattggtggttgccgggatgtctctgctgatgcgataaggtcgctggctgctgcatgtggaagcagccttaaaaacttgaggatggattggtgtttaaacatttctgattcttcattgagctgtgttttaagtcaatgcagaaaccttgaggcactggacattggttgctgtgaagagttgactgatgctgcttttcagctattaagcaatgaggagcctggattgagtttgaagattttgaagattagtaattgtccaaagatcacagtggcaggtataggcatcattgtgggtaaatgcacgtctctgcaatacttggatgtgaggtcatgcccgcatattacaaaggctggcctagatgaggctggtttccattttcctgaatgctgcaagattaattttaatggtagcgttaatgagcctgttgtgcttctttgatactctaattattttaaaagattggcttcatagttaaatgttcctatataaactttattgataaggcgtgcctttgtatatttgatgagaatgtggtctgttctggtgatgttagttttcttgtgcaactcacgtatcatgtatgtcagtaaatgacattggatgtatcatattttattgatcagttcagctgtaaatttgaagagaacatttcccccct

SEQ ID NO: 82517 - DNA, 133 bp, Glycine max
  Clone ID: PAT_MRT3847_4552C.1
cccacgcgtccggtgaagactgtccaaagattgctcgcattgaacacttgttgctataaggtggctgatgcaaataaactacttggtattctgggagatgcatgcttattctaaattggtatagacattagtt

SEQ ID NO: 82518 - DNA, 1050 bp, Glycine max
  Clone ID: PAT_MRT3847_45530C.1
agagagagagagagagagagagagagagagagagagagagagagagagagagagagagagagagagagagagagagagagagctagtctcgagtttttttttttttttttttttttgaccaaaataactactccatcaatcgttccatctatatattatttggaaaagataaagttgagtaataaatagttggctaccattgaggcattaagcatatagtagtactgtcatatccagatcatcgaggccatacagatagggccaattattattgaagactacatagacaaaacgggttgttaacccaaacccgatgccaattcaagtactatggcgatctgtttctcaatattaataaatataaatacacgaagcacacataaaacaccagcgactcaaaaaccttcctcaggctcgtgcattcaaaatagagaacgcagatccggatccggatccggggcgctccgaaacgggctgggcccggtccaaactgtagcggcagtggttcctaacggcccaaagctggtaaggcgaagtgtcgagagcgagccactgctccacctcgtactgatcctgagcgcaggaaaggtggggcccagtggaggtgacctggacgtagttaaggtaccagccgtggtgagaacccgatccgtcagaagtaacgttaacggcacagacgggtccgtcaagacagggtccccttccgctgaagatgtcgaggttgccgcgctcgaagtagtcgtagcccttgcccatcaagccgccccatgcttcgaggtttttaatgtagatgtagtagccgtacttgtcgtacagcttcagcccgatcttagagtccgttccgcccttcaacaccgaaccggttctaacgtatgcagtgtacacacaatcgtagtcgtagtcgctcgatctaacggttacggcgatgctgagtgagaacaggaggaggagagacagagacagtgttgcaggtgccatttttgcgtcgagggggtgttcgttgtcggtgccattgttgcagccgtacttaggttgttggtactggcgggg

SEQ ID NO: 82519 - DNA, 140 bp, Glycine max
  Clone ID: PAT_MRT3847_45531C.1
catctgtacccccgtcaagttatcgattgtgtgtgaaggcagcaaacctccatcaactatttcccattcatgtaactgaagctttgaaacattcacttggaacatttgacaggaggtccaagattatctgcaatgatgct

SEQ ID NO: 82520 - DNA, 794 bp, Glycine max
  Clone ID: PAT_MRT3847_45532C.1
ttcccaggctcctcaatctcgcgcttgtcgccgtcgattggatggaaattatgtagtcgggcataagtgtaaataattagacatccctgtgcactgcgtcgcaagctgctgccaactagtagtacccagaaacctcaatccagtttttttttcttctataaaaaaaaatcaagcataaaaaattagacatctatgtacacaaaagtcataaaaaaataaaagaaagggttttttctccgatcatctcaatagagggattctactactggtactacctatcctttcaatatcttcaacctttctagaatcttcttcttcttcttcctcgccacactcgtacatggatccaacgagaagaagctgatcttcgaggtagcgatgcaacagccccttctcctcctcccgctcctcttcgcagcacccttcctcgcagcggcggaggcgatcggcggcgtcaccgcgacggaggagcttcccccagaggctgccgcggcgacggaggcagagctcggcggcgcagaggaagggcaacgcggcacagacgacgaggaggaggagtggcgagcagaggacgaggaaaaagtaccggatccggcggtggcgcagccacgaggaggcggcggcggcggcgcgggtcaccatgcacgaagggggctcatggccgcggcggtggaggtggtagggttcgagggtcggggggaaaacgacgtcgtttttggggttggatagtatctgcggctgtggcggtggtggatgtgatgatgtgtctgtgcccccacatgggagggtagttt

SEQ ID NO: 82521 - DNA, 410 bp, Glycine max
  unsure (1)..(410): unsure at all n locations
  Clone ID: PAT_MRT3847_45533C.1
ccttanataactcttcctttttttcttattatgtttgcgtgtttttttatttttttctcttttcggacccaaatttaaaacttaattaattcgcggtaagagcatcttttttgcggttagccaactgttcgagaaccccattaaactgtttcgtaacatttggaaacaaaaacctcgcttggaataaaccaaaacttgcagcaatagttgctggggaaacaagcccactactttgatctttgcctcatttttgggcgcttccttttaaacctccttatacccttttttttccacttaggtctcatggggaacaaaaactgaaacgaatctaaaaattcaaaccttttaatccctaacagagacttggttgtgttttgaacacggggggtccccttttgtggttttttcaa

SEQ ID NO: 82522 - DNA, 247 bp, Glycine max
  unsure (1)..(247): unsure at all n locations
  Clone ID: PAT_MRT3847_45534C.1
gaggtgctcccggtggtggcaacacttctaaaatcctaaaaccctttccctaacaaatattttccccaatcttcncaggactctatttgcgtatatcacgatcagccttcgtctactacataaacccattcactacataccctaactgctattcctctatctacttctttagctaaactctcttcttactctctgttcataccttcctacatagacttccacttttacctcatcttttatgatttca

SEQ ID NO: 82523 - DNA, 482 bp, Glycine max
  Clone ID: PAT_MRT3847_45535C.1
cctccttggggggaaacctttgcaccggccccgtggggggcggattttttttgccccccccaaaaaaaaccccgggggcgacccccctgacaaggccaaaaaaaaaaaaaaggcggcccccaaaaaaaccccccccccccaggggcaatttttgaaaaaaaccccttaatttaccctttacccggaaggggggaaaaaaaaacccccccccccccaaaacctaaagggggggcccacccccagaggaaccaaaagggggacctcccagggggggttttttggccccggagcaaaccaaaaaaaacccccccgggcaaggggtgccccccccaaggggtcagggggccccctgggaggggggggggccttttttttcaaaaacaaaaaatacattggaaggggctttggccgcggagggcaaacaaaaccgcggatttccagtcttttttggatcccaaacaccccccccccccccccctggg

SEQ ID NO: 82524 - DNA, 216 bp, Glycine max
  unsure (1)..(216): unsure at all n locations
  Clone ID: PAT_MRT3847_45536C.1
gctgacgcgacttcttgagaactgtaagagtctcaaatatctggttgatgagtgtcctattacatactagttcacaaatgganaaggacnatcatcaaccagatatgtgagactcttacagttctggttgatgagtgtccttttgcatttgctgaatagtatgtaatatgttattcacttaaataaagcgcattactatctgcaatgcgtgtgttt

SEQ ID NO: 82525 - DNA, 523 bp, Glycine max
  Clone ID: PAT_MRT3847_45537C.1
ggtttcctgtcatcactgtatgacgtcctccttctttgggggggggggggtattgttgtacggctacctggtatatagttgttttggttggtggcctaccaactgctgctatgtggtggtggctccttaattgtaatcttagaagctgctacagattatgctggcaacccagctgctagtcattgcaataagcctatgtggcattaagcgtgcacgttcaatacgtgtaggcggccacgtaggcgatattatagtaacaagttggcgtggctcccggctaattgtatgtttttaacacgacggtttaggagtaagttgtaaactgtgttatggtatcggtttattgccaatttgaagttgttgaattcgtggcggctggcagaatggcacgagcatccatgcgttgtttacctgtagatgggtgtggtggttgttacgtgggtggtggcttcttcacctctgttgtgcacgtagcaagtatacacagatttagggcgcaatgtcacttaaggttactggatga

SEQ ID NO: 82526 - DNA, 528 bp, Glycine max
  Clone ID: PAT_MRT3847_45538C.1
gcaggacttatcagtcactggcagtcacttggaaaagcctgagatgtcttacctcaaaacagaatatgtaggagcagtaaaggaaagcaagggccaagatgatgataccccaaatggttctgactcttctaatcagggcaaaggtcccacaagccctaacattattgacaagaattctgacatggaacttgagtatggtattgttgatgctttagaagttgctcgactagttgcccaggaagttgagagggaatgtgtcagccctataaagcaagggcatggccaagtttcttataaagtcaacagtaccacaaatggttctgattcttttaaatggggaaatggccccaaaagccctaatgttattgacaagagttctgatattgaacttgagtatggtattgttgatgctttagaagttgcccgacaagttgctcaggaggttgagagagaagtttgcagctcttcttcagagaaaatctcagaaggtggaatcaggcaggcagccagccctgattttgtagggag

SEQ ID NO: 82527 - DNA, 403 bp, Glycine max
  Clone ID: PAT_MRT3847_45539C.1
agcgatcgactcatgtctgttgctcttgatccttgtgtcacatgtttccacgacatattgttcttgtttggttttggtaccttttctgttgttgacaagattctgaatccgcgaagcgagaggggaatcaagggacacacgtgtgatgaagttggtgcgagtgttggatccacgaaggaggcatgcagcttcatcataagcccttgctgcttcctctgctgtctcatatgtgccaagccacattcttatcttttgtgttgtgtctttgatctcagcaacccatttccctgatgctctttgcctcaccccaacatacttgcttgtggttgtgttgttgttgtatctccctgtgcctccttttgatgtgcttgctctcaagtgcttctttggatgctggaattga

SEQ ID NO: 82528 - DNA, 435 bp, Glycine max
  Clone ID: PAT_MRT3847_4553C.1
aaaaaaaaagggggggggccttttttaaacatgatttttttaaattgggggaaaataagggtttaagggaaattcaggaaaaaccaccccacagggggggcccaatcccctggggggggtccttcctcccttggggaactaggggggcccccctttttggcggggtcggaatttgtttcaaatgcctcaggggaccgaacaaaaggggcgggccctggtgcaaaatttgaagtttgggaaggaggtgaatctgggacttttggcccaaccggaaattttgaaaagaatccttgggcccccatagcttcacgggcgggggtttcctttggtttttggggtctttccaacactttttcctaaaaggcccggacttgcttttggtgttcagcttgcaatcttccaacggggctcaaaatttcccaacggggggttcaa

SEQ ID NO: 82529 - DNA, 160 bp, Glycine max
  Clone ID: PAT_MRT3847_45540C.1
ggctcgagctaaaattcttttttatctgatcaagtgactaactatattttattatttgctaccaggaacggaaccattagtaaaaacagttttaagctttactaaccaaaacaactaagatgacacattacacaaaacgctcttgggtttttgtgatcaa

SEQ ID NO: 82530 - DNA, 287 bp, Glycine max
  unsure (1)..(287): unsure at all n locations
  Clone ID: PAT_MRT3847_45541C.1
cccaaagtgcttctctcctctgtctttttctttctcttgctatccttttggctagtggcagtgctgcaagtgcaactgcaagaagcncantgccaagccaccatgtttcaacattcaacagaagcctttttccttccactttcctctttggaattggttcttcttcttaccaggcagaaggagcagcaagtgtagattgtagaggaccaagcatatgttacacctacactagacagcatactgaaaagatttgggatcatagcaccggtgacattggagcttatttt

SEQ ID NO: 82531 - DNA, 643 bp, Glycine max
  Clone ID: PAT_MRT3847_45542C.1
gtacgcaacaaatgctctcagtaactacgtagagctaggataagataagaacgcattagtactaacacagaataagagcaagatacgaaattcacaatgtcgtctcggtctttcacgagaagatcgaaggtaaatctacgcttttggataatttgacacagtacgcattgagtaagacatcctcagggtattaccagttgagcgtatgaacatctgttcaatgtatctctgccatgaattgcacaccaggctcaacctagtgactccaacacatatagttgccctaagggaatcaacatgtacatcaaggcaccatatattgttggatacgacactaataaaacaacactagagactgtggtatataatgaaggcaattaacactatatatgagcaagaatggcgaaaccttttactattctaataaaactctgtaactggttcaaacaaaactagatgactgtatatgaagtgaatagacattctgtagtggatcaaactacatgataaagcataagaaaatgcgtaagcgactcatcttgaggatgcttcataacgatgggataacattgtggttgacgtgccggagaagactctggactagatcaaacagcgttatgagctctagcttgaagatattaac

SEQ ID NO: 82532 - DNA, 255 bp, Glycine max
  Clone ID: PAT_MRT3847_45543C.1
acaaacataaactaggaggggtggagcgaacaataatttttttttttttttttttatttttttggaaaaaaaccaaacctaaatcggggtgggcataaagtggataaataggaccaaaaaaaaaataataaacaagtagactaaatgaaaaaattaacactctaagaaagctacatttttagacaaattaaatatctttaactatcaaattcctatactttatatatactatttcaaaaattctcttaacctaat

SEQ ID NO: 82533 - DNA, 454 bp, Glycine max
  Clone ID: PAT_MRT3847_45544C.1
ttttgcttttccttctctctctgtgtctgtctctttcaagttcaaacctcaaaccctagccgtagccttttcaatctttcatgctccttctcggtgagtcactttgcatatgttacggtttttggggtctttcaattctccttcacgccgcgctttctgggcttctggggctatttcaggtttggtgttataatcattaaagagattcaaggcaaccaattgatttggtggagaactatgactgaagagaaatctggaggatgccctttgcggttttttacttctgtgcagtcctctgtggctcgtctttaaaattgggctaaagctgagtttcctgttttttgttcatcaatttttaaaatacatctatcaaatatggatacctctggtaatacatgtgagatagtggaatcaacggaagggataatttctgaattcaaaatggatgaaaagc

SEQ ID NO: 82534 - DNA, 543 bp, Glycine max
  Clone ID: PAT_MRT3847_45545C.1
attaattggtaagtcttttgcttgaaattaccttctttccatttatgttcagctttctgcctacttctcgggccctcattgttaactcctcatggcccatggtttccaaaagacatttgatcttagcgtgcgcgctgtgtagccaactatgcgcgacctagaatttggtatagcaattcatagtttttaagtattataattataaaataaaataaaggcacaaagctgcttagcccttttacagttaattcatgttgagatccttagttttgcttataattgttgcaaatttttctgccagcatggttacatttttaaagaaattatcatcacgaagttacagagtacaggctattgtcaacatagtttgcccgtaatttttggtcatcctaatattttaaatctatagttttagtctttttaatttttaattgtaacatttaattctttaattttataaatttataattttagttctcctataaattattaactaataattatgattatcagagatattaaattaattataattctttgtta

SEQ ID NO: 82535 - DNA, 1835 bp, Glycine max
  unsure (1)..(1835): unsure at all n locations
  Clone ID: PAT_MRT3847_45546C.1
ctctctctctctctctctctctctctctctcgatctctctctctctctctccacgcgtccgacctaatcagttgttatgtgatgtcagtgtagttcccaatcctcaccaaatttgttgtccttttattgttagaaagaactttccccttatctgcaaaaacacatacagaacagaatctgagaaccagaccctctcaaaccggaaccgcaaatgaagcccaagagcattcgcatccgtaacttaccaacgcacctgctgctaatcgctgtttgtctgttcacctcttcgtccgcttccaagatcggagaaaattgtgggtcagacaacaaatgcgacgctggactcagctgccaaacatgtcctgccaatggaaatacccgaccaagatgttcgcggacacaacctttgagccccacctccaaggtgaaaggcttagcgtttaaccggtattcatggctgacgactcataactcttatgctctggcgggggcgagatcggccaccgggtctgtcattgtggcccctatgaaccaagaagacaaagttgatgaacaactcaaaaacggagttagaggatttatgttggatatgtatgattttcaaaacgacatctggttgtgccactccttccaaagcaaatgtttcaacttcactgcatttcaacctgccataaacgtgcttaaagacatgcggacatttctagatggaaatccatcagaaattatcacgatcttcattgaggactatgtcacagctcctcagggcctaacaaaggtcttgagagattcagggctgagcaagtacatgttcccagtgtctcgcatgcccaagaatggtgaagattggccaaccgtcgatgacatggttcagaagaatcagcgcctagtcgtcttcacttccaaatcagccaaggaagcttctgagggcattgcctatcagtggacatacgtagtagaaaaccaatatggagatgatggcatgaaagctggttcttgtccaagccgtgcagaatcacccgcaatgaacacaaagtctagatcattggttctggtcaactactttcattctgctccaaatcgatctcaggcctgcgctgacaattcggctccactacttgacatgatgaagacttgtcacgaagcagccggcaaccgttgggccaatttcattgctgttgattattaccagaggagtgatggcggaggagcaccactagccgttgatgaagcaaatggtcatctcacttgcgggtgtgacaacattgcctattgcaaggaaaacgctaagtctggcacatgtgatgtccctcccatttctccacctccacctgctacagaaaccccctccaccggaaaccagcagacccaaaataacaatcacacaaacaatgcttatattggtagaacggccaagttgatgcaatcggttgttggaattttggctacgacgactttcttggcatggttatagagtgtcattagtttgggggagtttataatcattgaaaatatgtatgcatgtatgttgtaaacatagagtttagatggttgggccaatttgattccgtgtattgtatggaatccgagtcatttttcataaaacggcgcactttatggctgtattgtgaattggtttgtttaatgattgaaagaacttatcataaagttgactcatttaagaacttacatggttcaaccaatttgattccgtgaattgtatggaatctgagtcatttttcatcccccggccccctttatggctgtattgtgacttagtttgtttaatgattgaaaggacttatgaaatacttatctcgttgtnnnggcttttcttc

SEQ ID NO: 82536 - DNA, 663 bp, Glycine max
  Clone ID: PAT_MRT3847_45547C.1
agcagccggcaatcgttgggccaatttcattgctgttgattattaccaaagtagttacttgctaaatttttatcaaaccatttcatgatgctaattattcattactctcaacttagcaaacaaaaaaaaaaaatcataatctataaatattgatgataataatgatgttttatagaggagtgatggcggaggagcaccactaagccgttgatgaagccaacggtcatctcacttgtgggtgcgacaacatagcctattgcaaggaaaacgctaagtttggcacttgtgatgtccctcccatttctccacctccacctgctacagaaaccctctccaccggaaaccagcagacccaaaatgataatcacacaaacaatgcttatattggtagaacggccaagctgatgcaatcggttgttggaattttggctacgacaactttcttggcatggttatagaatgtcattagtttgggggagtttataatcattgaaaatatgtatgcatgtatgttgtaaacatagagtttactcagtttagaatttagatggttcagccaatttgattccgtgaattgtatggaatctgagtcatttttcatcccacggcacactttatggctgtattgtgacttagtttgtttaatgattgaaagaacttatc

SEQ ID NO: 82537 - DNA, 403 bp, Glycine max
  Clone ID: PAT_MRT3847_45548C.1
aaaccccaaccaaacaaatttaaaacaaaaatccctacacacttacaaaactcaagggtttttttgtattcaaaaaactctaagtcactgaccacacacaactagagcttttagcatacaaggaaaaaaaaaagaaatttttaatttgaagccgggagcaaagaaagatttatttttaatttggagctgaaaacgggggttcaagttcaaaacgggggcactggtaacaaaccgcccttggggaggggtatttttttttgggcaaccccccaatggggggtggaacttgcaagcaactcgccaatggcaggtggaactcccttttttgaaaagcaagctcctggacccctggaaaaaggcctggccgcctggcccatggaactcgccagtttgacgggggggt

SEQ ID NO: 82538 - DNA, 1698 bp, Glycine max
  Clone ID: PAT_MRT3847_45549C.1
ctgaaaacatgttcaggaaaaagatttctcggccttctcatatttattaccataaatcaaatgccgaggccgaatcaaaaactttcgaaagtgctagttctctatctgtaacaacatttacatcgcttctaattgaatttgtagcaaggcttcaaaacctggtggattcattcgaggaattaagtgaagtagcaagctttgttgacccccttgagcaacaagcaccagtagcatctcattggttgtttaactgctccaaattcaaggactgaaatatgtggtcttcttccttacgtcaacttgaaattaaggattgaaacatggacttcaccatcttgcagagtcggagctactaaatgagaatctgcattgctgattctaaataattactttggaaagttgctggttttatctggttcataattatatatgtttatcctcatttttgactcagtcgtatgcttgtgattaaagatgggatttgctgtctgggaaccaccacatggtcattacaaaatgcttaagtatccatggaagaattatgtgaaattaagtggggctctaaggcactgtgcgtttatggtcatggctatgcatgggtgcatactttctgaaatacaggccccagctgagaagagacaagttttccgcagtgagcttcagagggtaggttctgaaggagcaaaagtgttgcgtgaacttggaaacaaagttaaaaagatggagaaactaggtcgtggagacttgctgtatgaagtgcacgaggcagcagaggaattgcaacagaagatcgataaaaaatcttaccttcttgtcaattcagagagctgggaaattggaaaccgcccaagagaggatcaggagactgctcttcaacaacaaggcctctttaacatggatgaagaaagaaaaattctcgagtataagtctctcagtgaagcagtacttgatctcagaacagttcaagttccaaatacttgggaaggaaatgtaactctaggcaataaccctggtgtgcctgcaaccgatgcctctgaaaacatgttcaggaaaaagatatattggccttctcatatttattacaataaatcgaaatcggaggccgaagagggacaagagtcaaaaacttacgaaagtgctagtgcactatctctaacaacatttacatcgcttttaattgagtttgtagcaaggcttcaaaacctggtggattcatttgaggaattaagtgaagtagcaaactttgttgacccccttgagcaacaagcaccagtagcaatagcatctcatgggttttggacccggttgtttaactgctgcaaatttaaggactgaaatatatggtctactcttccttatgtcaacttgaaatttaaggattgaaacatggacttgctcatgtcaagagcaccatcttgcagtgtccgatcgactaaatgagaatctgcatggttgattctaaattactttggaaggatgctaacttatgtggaatatagattgtttgtattgcgtcctacaaaaattcaagatactctccaccgagatatgatggtgcattagattggaacggttggaggtgatacttataaaaatactgtgatgctcaagtcaagaggtgacctacccagtgtttattgtaatctattaccaacaagttatttgaatttctagataatactaagatcgtgttctccc

SEQ ID NO: 82539 - DNA, 915 bp, Glycine max
  Clone ID: PAT_MRT3847_4554C.1
aatcgataaatgtgtgagtaatagacagtcttgcttgaaatacatatgattttcatttacagttagaaataggcctgtgagtaactttatgctttatctcctgcacaagaaacttgatattagatattaatgtgaaagcactgatttcaggctagctatgctttttttttccctttcttatttactaatgccttgtattgatgtttccattctactatgactcagattgcagatgtgtggtcttgtggggtgaccttatatgtcatgttggttggtgcatatccttttgaggatccagaggaacctaaaaatttccgcaagacaatacataggattttgaatgttcagtactcaattcctgactatgttcatatatcttccgagtgccgtcatctgatatcaaggatttttgttgctgatcctgcaaagagaatctctattcctgagatcagaaaccatgagtggtttttgaagaaccttcaaagtgatctcatggatgggaatactaacaacaaccagtttgaggagcctgatcaaccaatgcaaagcatagaagaaatcatgcagataattaaggaggctacaattcctgcagctggatctcagtctctcaaccatgatcttactggtagcttggatattgatgatgacatggattcggatcctgaccttgacttagatagcagtggagaaattgtgtatgctatgtaagctggtggaagaccattgagctgaatttggggggtcaatattaatgttatgccctggattctagtgtgtggaattttccatatgctgggagagaattcatccaacatgtatttaagttgtatttgtgatcttacatgattacgtgcttctttgtataattgtattgatagttatgttatttttatataccatatgcattggttt

SEQ ID NO: 82540 - DNA, 813 bp, Glycine max
  Clone ID: PAT_MRT3847_45550C.1
gtgtagttcccaatcctcaccttccctggcttggcttgctcaccaaatttgttgtccttttattgttagaactttcctcttatctgaaaaagagaagtgtcagtgcacaaagacatacagaacagaacctgagaaacagaccctctcaaaccggaaagcgcaaatgaagcccattccatgcctagttagctatcttacattaaatgttcatcatgtcacgtcttttttaatttttatttttattttaaacatcaacactccttgcatatgattcatgtttcattttctgcagagcattcgcatacttctgctaatcgctatctgtctcttcacctcttcctccgcttccaagatcggagaaacttgcgggtcagacaacaaatgcgacgctggactcagctgccaaacatgtcctgccaatgggaatacccgaaccagatgttcgcggatacaaccattgagccccacctctagggtgaaaggcttaccgtttaaccgctattcatggctcacgactcacaactcttatgctctggccggagccagatccgccaccggatctgtccttgtagcccctataaaccaggaagacacagttgctgaacaactcaagaacggagttagaggatttatgttggatatgtatgattttcaaaaggacatctggttgtgccactccttccaaagcaaatgtttcaacttcactgcatttcaacccgccataaacgtgcttaaagacatgcggacatttctagatgggaatccatcagaaattatcacgatcttcattgaggactatgtcacagctcctca

SEQ ID NO: 82541 - DNA, 2214 bp, Glycine max
  Clone ID: PAT_MRT3847_45551C.1
ctccaaccttccacgtccgggaagtctgctccattttgcccccacatgcatcccctcctaccactcctcccttctccctcttcgtcctccttgggctccgcatcccccctgcggtgcgtctcttcgtcggtgccttcccatacccaacaaccacttttgtattttcataaccaaatttaatctcaaaagaatacaaaatgccgcgcccgtcttaagggctaaggcttctcagtcctctaaaaatttctagagtctctttcttcactttcttcctccacatggcagagacaccaaccctcagaatccacgaagtctgccccatctcgccgccacaagaaaccccatcaaccactattcccttcaccttcttcgacgtcctatggctacgcctccccccagtggagcgtctgttcttctattccttcccaaacccaacaacaacctcttcattcttcgacaccaccattctcccaaatctcaaacactccctctccctcactctccaccacttccctcctctcgccggcaccatcacatggccacttcacacacccctccccctcatcacctacacccccggaaactcaatccccttcagaatcgccgaatccaacgcagacttcaacaccctctcttcaaacctctcagaagttaacaaccaccgccgaaacctaataccccacttacccacttcccacgaagaagcttcggtgttagcccttcaactcacccacttcccaaaccaaggctattcgataggaataacaagccaccacgcagcacttgatggaaagtcttcaactttgttcatgaaatcgtgggcgcatatttgttcttacctcaatacctcaccggaagaaccgttgctgttttcactaccgaagcatctaacaccttcgtttgatagatctgtcataagagaccctttggggatcggtgagatttacgcgaagtcgtggacgagcttcggtggagccaccaatgaccgaagcttgaacgtgtgggataccctcggtggaaatcaaaccgatttggttaaaggattgtttgagttgacaccgttggatatcaagaagctgaagaagttagcggagtccaagtttgttgtcggagacaacaagaagaaagttagggtgacatcatttacggtcacgtgcgcttacctgttgtcatgcgcggtgaaagcggagcaacccaactgcgaaagagtgccttttgtcttcaacgtggactgtagggcgcgtttggaccccccaattccggaaacgtacttcgggaacagcgtcgtgtctttgttggcttcggccaagcgagaagagcttttgggggaagaagcgtttttcaaaagcgttatagggataagcgaggagttgaacgggttagagggtgacgtgttgaacggcgcggacaaatggattccgaagattcaatcggtggtatcggagactcctaggttgttctccgtcgccgggtccccgaggtttgaggtttacggcattgactttgggtggggaaggcctgagaaagtggatgtcacatccgttgataaaacgggtgcgttttcgctctcggagagtagggatcatagtggagggattcaaattgggttggcgttgaccaagaatcaaatggaggcgttttctagggtttttgctcaaggacttgagtccttggaatcatgatgatgaggaatctttggtgagagaaagaggttagtggctcaattaaataagtttcaataatttaaggggttattgttagtatctgagtatttatatatcatgagataagatacttgagttcactactccaaaaaataagagtccatctacctttttgtttcaagtagtttactccagtaaatcagattatatcaaatctccttttaatatagtgtgtcacgagaggaactaattttatggtaaacgaatacttaagattagttcttttcatttttcaatagtacttcctcccattataagaaaagctattattggtagtcattagacataatttttatttagcaaacatattgcaagtgtatgttaataatataatgaactgatacatcttaatttcttataaaaaaaaaaaaatatttttttatgcatcacgtgagtaaaaacaaaaaaaacaataatactaatatttttattatatatatatatatatatatatataaaaaaaaaaaaaaaaaaaaaaaaaaaaaaaaaa

SEQ ID NO: 82542 - DNA, 480 bp, Glycine max
  Clone ID: PAT_MRT3847_45552C.1
aaaaggaaaaggtttcccatcccttacaggttaaaaacccctggattttggaaaaaaaatcgtttttttttaaaaagttctctaaagcctgggggggcggccaaaaaaaaacgatttttttttcgaaggaccaacctaaccccggggttcatacccctagagggggtccaaataaaccccataatccccccatgttttggccacttttttaaggccccctggaaacccctattaggtaattaacccccacctttctggggggggccggaatggataaggggggcaaacccaggcccctttatggaaccccccccaccaaaaaacccataaatttttttttgcttcgggagcccaacactggggcccgcatttacagcccccccataaaaaatccgggttttaaaggaaacttcagccgaaacattttttttaagccagtcccaaacaggggcagggccttccggggcttgctcggggggg

SEQ ID NO: 82543 - DNA, 335 bp, Glycine max
  Clone ID: PAT_MRT3847_45553C.1
gtagaaaatggcattcctacgtctacaccttcaagtgatggagatccaaatgttaatggggaaaatgttcaagcagcatctacgggcaatccagcaccagcaccagctccaccggaggcccccttatcaccagcaggggtttcagagactactgctccaagtccacctacagttcctatgagtgatccctttatatgattggtatacctaccacattgttgacataagcacttggaaaatgaattcatttataattcatgttttattacaggtgtaaagaaatcattttaagagatgaaagaaatctagtgtattagtttgtgacaaggttaaac

SEQ ID NO: 82544 - DNA, 438 bp, Glycine max
  Clone ID: PAT_MRT3847_45554C.1
ctcggaattcggctcgaggtttatgaaaatatttatttatatttgtttggaaatgtcatgtagagttttagagggtgggacgactaatgtatttatggtttttacatccaactactgataatcgcttgacatttcaacctattttgatatggatttgatctggcagcttcctgttttattaatgttataaattgatacaattttcacttgatctaagcagatttttgcttgtcatttccagtttgaaaacctatttaattattttctgattgtcctaaagcactatggttttgctcttccctgggaaagttctgtcaatataaacttctgagtactaatttatgtaatgttaagattatattttattctcttatatgcgagtagatagccgctatgcatatgcaagggtaaggctgcgtacaacatcccttccccata

SEQ ID NO: 82545 - DNA, 3270 bp, Glycine max
  unsure (1)..(3270): unsure at all n locations
  Clone ID: PAT_MRT3847_45555C.1
cttcttcctctctttctctacacaaacaaacttattattctctctctcttaagcagccaatacatactcacacacacacagtaacatgcaactgtgcaaatcattgggtttctctgcacaaaaccaccccaccccaattcatttcacatcataaattcacctcctttctccactctccatactcaatttgaaagttcgcgtctttctggattttcgctgcgttttaccatctggggttgccgcccgatcatgcctccggcgctgtcggatccgctgtcggcgtccgcggcaagctccgacgctgttctgcagcgatcggcgccgccggagaatcggcgattcggtgatcttagagggttgcagtggcggataaatcttggggtgctgccgtcttcgtcttcgacttcaattgatgatcttcgtcgagtcaccgcgaattgtagaagaaggtatgctagtttgagagggcgcctcctggttgatcctcatatgccaaaggatggaagtagttcacccaatcttgtcatggacaacccactttcacaaaatccagacagtacatggagtcgcttttttcgcaatgcagagatggagaggatggttgatcaggatttatcacgtttataccccgaacatggcaactatttccagacaccaggatgccaaggcatattgagaagaattttattactatggtgtctcagacacccagagtgtggttatagacaaggaatgcatgaattacttgctccggtgctttatgttctccaatttgatgtggggtgtctttcggaagttcgaaagctttatgaagatcacttcacagacagatttgatgacctcttttgtcaagagaatgatctttcttacagctttgattttagaaaatcttcagacttgatggaggatgaaatcaactccaatggaaatgcaacgaaaatcaagagtcttgatgagcttgatcctaagatacagaacattgtattgctaagtgacgcttatggggctgaaggtgaactgggtgtggttttatctgacaagttcattgaacatgatgcttactgtatgtttgatgctttaatgaatggggcacgtggttcaattgcaatggctgatttcttctcttattctcctttgcactgggtcccatactggcttgcctnctgtaattgaagcttcagctcagactgttatgggcagtatgaggaatattgggcagtcagtgcttgaccatatccaggtgattgagtgtgctttccaacaagacaggggcccagtggcttctttagtcaacatgtctaaaatgcttgtggctggtaatgcgcagcttaatgccatgtcagctcccgaggagctccgcaaaatttgcatcatctgttgtctcagtgtggattcatctttgcaggccagctctgacgttgatctcggggttgaaccccagtactttgctctccgctggttgcgagttttatttggacgggaattttcactcagcaacctcttgataatctgggatgaaatcttttcatcagataatagtaaattggaaaaacatgcagaggacaatgcagactctggttttaggatcttcaattcgtctcgcggagcatttatctcagctatggctgtagcaatgatgcttcatataagatcttcgttacttgcagctgaaaatcctacaacctgtctccagagattattaaacttccctgagaacattaacgttgaaaaactaatagagaaagctaaatccttgctggctcttgcattaagtactgagatttcatcctcaatgcctttattggtcgagtatcataaccagggtaaatcagctattgcaagatctcgcaccctttcatctgaatcaatttcaccaaaaactcctctgaatttggtacctgatagctactgggaagaaaagtggagagtggtccacaaggctgaagaactcaaacaagatggagtagaaaaacaggttcctactcggaagaagggatggacagaaaaggtaaagctcagtttgaaaagaacagaatctgacccctcttcatcaaggactaagagtggtaaaaaggaatccaagttgccggttaggcgatgtttgttagtagatctttctaaggaacttggctttgaggaagatactgaaaaactctgttgtcatgataatctgtctgcaacggttgaagaggagcaacgggaagatggctccgaaggcagcaacaactattctcctgaagatagatgtctaagtcaaaacacaagtagtgaggaaaactcacctgttatttcttgcccagctagtcctcctaatgaggccaatgatcacaaagatgactcccagaaaagtagtgttgggtctaatttatcccttgatataataaatgaaacttcacttagtagtagtcccattgattcacctcttccaatctctgatcatcctgagaacggacctcagacaccagggagaaataatattaataattccgctggaaattcaaccacaaattctgagagaaaattgaacaaattccagtggctatggaagtttggccggaataatggcgagtttatgtcagagaaaggaggtgatacttctgaggctgcaaaacctgccaacaattgtaacaatcaaagtaacacaacaccctcttctacagccaacaattgtaataatcatagtaacacaataccctcttctacagccaaaaattgtaataatcaaagtaacataataccctcttctacagccaacggacaccgtagatctgttagttgccaaggggaatctactgaccagaatgtgatgggcactatcaggaatattggacagtcaatgcttgagcatatccgggtgattgagtgtgctttccaacaagaccggggccaaggagcatcattagataacatgtctaaaaatgctgtggttggtaaagggcaggttaatgccgtgtcagctctcaaggagctccgcaaaattagcaatcttttgtctgagatgtgagccaaatcttacattgacgtgtcctgtatatatattttgtgattacaattctttagtggcaataaaatgagtttcttttgcgtcacttccatacatcatgaataccatagttttgcagagatgaatgtgtaaatacaaatattcgatttatcatgaaataaactatgatgattcatttctgtttaaaaaaaaaaaaaaaaaaaaaaaaaaaaaaaggcgggcccaagtagtaaaaaagtcgagtcagggaattaaggggttttcgg

SEQ ID NO: 82546 - DNA, 464 bp, Glycine max
  Clone ID: PAT_MRT3847_45556C.1
ggctcaaaagaagcaattatattatatcataagaaattttcatatgtccagacatatttttatgcaactgcatcattgcaaaagtatcaaatacatatttggaagcagtttcctggtttgaaattcctatacactacctgccagaataaaaataataaaaaaaacaccaccaatcacataaaatataatctcagagaaattccaaatttggaagtggcagacaatcaacatggcatcagttcagtccgcccgtctgcatttcttcatcatagagaagttgaacaattatgccaaatcagatacatttttttcaaaccccaaaataaacacacacaatcactcagagatagaacaaccaaaagacaaaaaagtaagttaagacttggaaggcatcagataataagcggagtttttaatcttcactgtataaattcagtgtgtaggataagaaattttaacatcat

SEQ ID NO: 82547 - DNA, 656 bp, Glycine max
  Clone ID: PAT_MRT3847_45557C.1
caaattccagtggctatggaagtttgggcggaataatggcgagtttatgtcagagaaaggaggtgatgcttatgaggctgtaaaacctgccaacaattgtagcaaccaaagtaacacaacaccctcttctacagccaacaattgtaatagtcaaagtaacacagtacccccggccgcagcccacaattgtaataatcaaagtaacacaataccctcttctacagccaactgttgtaataaccaaagtaacataataccctcttctacagccaacaattgtaataatcaaagaaacataataccctcttctacagccaatggacattgtagttctgttagttgcaaaggggaatctacagatcagactgtgatgggcagtatgaggaatattgggcagtcaatgcttgagcatatccaggtgattgagtgtgctttccaacaagacaggggccaagaagcatcattagataacatgtctaaaattgttgtggttggtaaagcgcaggttaatgccatgtcagctctcaaggagctccgcaaaattagcaatcttttgtctgagatgtgagccaaatcttacattgatgtgtcctgtatatattttgtaattacaattctttagtggcaataaaatgagtttctttggcttcacttcc

SEQ ID NO: 82548 - DNA, 356 bp, Glycine max
  Clone ID: PAT_MRT3847_45558C.1
gccgccctttttttttgtgcatttttatatgactttagatccgacgtacgaacaatccacggccggtgcctctcttaagaaaaccagacaggcgcttaaaacctgtactgcggactcctcaacatggccttggcgctgaactctgtgcatcagtcattgaagaaagttttggttttatcactccacccttttacagaactgtcgtggcgcgcattcttaagctatcctcaacagaccacaaaagagcggctgtctcacaggttgaagatattggttgtgctgcaaagagagcatgctacagaccattgcctaggcatacacacgctcgaatgaactggaaaatttacatgatctgg

SEQ ID NO: 82549 - DNA, 325 bp, Glycine max
  Clone ID: PAT_MRT3847_45559C.1
ggctggtaatgttttacaatttacttgtaaatatacaagggacaaaaaaggaaaagggaaaaagggaaaaaaaaagacaaaacagaagaacaaaaaggcccaaaacccacaaaggccatgataaaagatcgagagagaaaaaggaaagcgaaaaaaaaagagatactaaggatggggggatagcaagggtttaaaataataaaaaaaatccggcaaagccgaaataatccctgggccaaactcaaaattagactccgggcaaaaaaataatgccccaaagacccaattcagataggggcccatatgattttgcgggaagggcgaa

SEQ ID NO: 82550 - DNA, 618 bp, Glycine max
  Clone ID: PAT_MRT3847_4555C.1
cttttttttttttttttttttttttttttttttttttttttttttttttttttttttttttttttttttttttaaggggggaacaacaattctttttttttttttttttcatttcttaaaagggcttcctaaaaaaggggccaaacgggaaaaaccaaaccaaagcaacaaatctttgaactgggcccttaggggcaaaaaaaacacaatcttttttatttggccgcccaaaaacaaaaggggcaaaaattttaaccggacaaactggaccctggggggcaagggctgccccccatttggggggaaaccttctaaaaagacccaacccagggggggggttgggctctccatcccaaaaaggagcgagcttccattcctttggaaccttatcaacagccaaaggataaacttcaaaaaccccctccgaattggggggaaaccgggggaaggatttggaattagcttttcaaaaaaacaaaaagggttcatcaaaggggaagggaaccccgttgatgcaaatgtataagtggcccccaaaccccaaggaaacaacagggggcgagaagacccaaaaataaaggaggacggaggcctaatttattaccgccccccctcggg

SEQ ID NO: 82551 - DNA, 335 bp, Glycine max
  Clone ID: PAT_MRT3847_45560C.1
gaagtttcgttttcgaataggagtacttcttttttttctgtacgctagggtcgttcggccggaaaaccgagttgcgtactgggtgaagcttagtcctttggacctttcgatctcgcaacttttttagattagctagggccgcccgcacgctttaagggttgttgaaggtattgcgctaagaaagactcctgcggttgctatgctaaaggtaagattttcttttaaagccgctcaggcaatttcttttaaaaaaaggaagagcaagcaagacaagaaagataaggctttgaaagctgcgaagaaagaaagtagagctgctctaatcgagctgtgaa

SEQ ID NO: 82552 - DNA, 431 bp, Glycine max
  Clone ID: PAT_MRT3847_45561C.1
aaatcaacaccaacaacacctgatgatgaagttccaacaaggttctggtgatgaaaacaacgatggtggatcaatggtggattacatgcctcaaacaacaacaacactacccccacatggtttttatggtactgctaccagtgctgccacaacatcctatgacaaactcagttttgcagatgtgatgcagtttgcagattttggaccgaagttggctttgaaccaagcaaaaagctgtgaagaatctgcaatagacccggtttattttcttaagtttcccgtgttgaacgacaagatggaggaggatcatcagcagaacatgatggtgaataatgatgaccctgatggtgatgaagcagaaaatcatcatcatcttgatgagaggttcaatttggtgagtgtggaaggcaaagatcaaggaatgatgatga

SEQ ID NO: 82553 - DNA, 702 bp, Glycine max
  Clone ID: PAT_MRT3847_45562C.1
agaaagaaccgcatcactcactcccttcagagactctgttgtgatctccaaaatgcagagcacagttttctctctctccccttccctctctctcccaaaacaacctctcaaacgctctgtctctgtttccacttccaaactcaacgtcattctcactccctcttcattcccatgtcaaccatgttctcttgcttattctccatctttcaaactcgctccctcacactttcaccccttccatgccagagcaacctccgtgccggagagcagcgccggcaacactctgctcaatactctggaacttggagccctgtttgggctctggatcctcttcaacatctacttcaacatctacaacaaacaggtcttaaaggtctaccatttccctttaaccgtaagcacccttcagttcgctgtggggtctctcttcgtagcattcatgtggagtttcaatctctataagagacctaaagttagtggcgcccagcttgcagcgatattgccactggctctagtacatactttagggaaccttttcaccaacatgagtctcggacaggttgctgtgtctttcactcacactataaaagcgatggagccttttttttcagtgctcctttctgctgtgttccttgggagaggcgcctactggatggggtggtggggtcccttgggcctattggtgggggggggggcggtagc

SEQ ID NO: 82554 - DNA, 296 bp, Glycine max
  unsure (1)..(296): unsure at all n locations
  Clone ID: PAT_MRT3847_45563C.1
cctttttcccggggggggggggtgggtaaaggggggatttttagtacccggggggcgcngggggggggtgggaggcggttggggatggctactgattctacttatttacagaagttagctcctaacaaggtttactcctctaaggttttggggttttttagggttttctgcctaagatgcttatatcttttggtttttgttcgggtttatccttctctaancctttttttttctctctttttattttacttgtttggtcgtttcctgtcttgtaaattcagatctactttgttgca

SEQ ID NO: 82555 - DNA, 507 bp, Glycine max
  Clone ID: PAT_MRT3847_45564C.1
tcggcttcgagggacgacagaagggttggtaggaagggatggaaaaggatttagctgaatttgtacataaatgtctagtatgtcaacaaattaaagcaaagcatcaaaatcccccaggcttatttcaatgaattgatatacctgaatggaaatgggagaggattactatggattttgtgacgaggttacgtaaaacctcaaagggttatgactcggtttgggtgattgtagatcgattgactaagttagcacacttttttcctgtgaaaactacctactcaacaactcaatatgccaagatttatttagagaggatagtatccttgcatggagtgccattgtctatcatatgagatcggggccctcagttcatgacaattcaattttggagatcttttcagcaggccttagggactatattagatttgagtactgcttttcaccctgagactgatggtccattagaaagaatgatacaaatcctaaaagttatgttgtgtgcttgcc

SEQ ID NO: 82556 - DNA, 310 bp, Glycine max
  Clone ID: PAT_MRT3847_45565C.1
attttcccatattttgtcactggggaaaggaaatcaaggccggtaatcagagtaatagtcaaaactccggcttatttcacgacggcagattcaaatcctggacaaaacacgacgaaaaaatttgctttgacagaagaagaaaagatggtagagaccagaaaaaagaggcattcatggcgatgttcaagcaaagcgagctcaagaatttgaaaagacaaggtgcataatgaacagtcactaagggatcaaagttactgaaagtaggcaagatggattctactaacggaaagaaacctgcaaaaatgcatga

SEQ ID NO: 82557 - DNA, 611 bp, Glycine max
  Clone ID: PAT_MRT3847_45566C.1
gcttaagagctagtccttgatttataacagatagtttataaggggagttattcggggtgatgcaatgatacccagtaaaccgagtcagcatccttgccttgggttacgatggtgacttatggaatatatttgatgggtgtcctgtgggaaaggaaatccttagtttattgacaatatatcattactctatacgcgatgtttgtgtcaacaagtgtatggattaggcataggtcccttttatgctttttatttggtctagtcattttaattcggctcgagatctatttggttaggtgccccgcggctattcaacaatctgtaaggcaaaaatccagattgatttgtctaagtttgtgctactgttcaatagtttgattcagatattggaaaagctggtgaattatattgaggcatggagggtgtgaagttggggggttctatcgcctgttatctattattttattgctttcaaagtgaagcattggaatttggctgttttgtttatttatatagtgtagtttccattttagcaaagttgaatcttgtatgtaatggacgatgtcatggtctccagccaaaataaagtaggtgattcatcacctttaagaatt

SEQ ID NO: 82558 - DNA, 462 bp, Glycine max
  Clone ID: PAT_MRT3847_45567C.1
gcccccctacctaagcctggatacccttaaaaccggccgcctttttttttttttttaaagccaaaaaatccggattcctttaaaattagtaggtttctttccttaataaaggtcctaagtccatggccttttaaaattgggccgggggggggggtttattttaccccaacctccttccaggccccacttcggaattttttttcctaattaaggtcccctttggctaacctatttaattagccattaaagaaaaccccttttaaccacccaatttttccttatcatccttaggtcaaccaggggttccattaatccacttcttcaccatctttaaggcacccttggcctggtccatggaacccatgtaacccgcattatgacccttaaggaacctaaaaggtccatacctcttaagtattccggtttctgatccatcaccaccaaaaggaccttcaagggagg

SEQ ID NO: 82559 - DNA, 451 bp, Glycine max
  Clone ID: PAT_MRT3847_45568C.1
cccacgtgtccgatggcgataggaccagttacatcctaagccttttcttaacttggatcctcggactctatgtcttgcgttgatctactggcatggatgggaccatcgttgatctcacacactatggtgtaacatatgactgctgtcactgaaagaaaggaacgccgttcgctgaggaccaagggacctacaatagatttgacttggcgggagcaggtagacaacggaaagcagcttactcgccacaggaagtttgtcacagttgctacttcggtgctgcacttgatagcctcacacacaacaaagtatcagaatccgatgctctcattcaacactgatgcagtgattgagctggatgttgcaaagctcccccacatgcacaaagtcaggatatttagaatcaattgctgtaagagaaatgctgctgtggccatgacacttgggtaccact

SEQ ID NO: 82560 - DNA, 655 bp, Glycine max
  Clone ID: PAT_MRT3847_45569C.1
cttcttcttcttttcaagataacatctctgaagtgatctttcatggagagagagattgaacattgtgacaaggtgatgagccaaagcagcatggatgcttgtcccaaatcagggcctggttatgcttcaccactagcagccatttgctggtcccagagagactctcctttatgtcactgctatctactcaggaacaggaagggataagcctgactttctggccacagtggatgtggatccaagctctccaacgtattcaaaagttatccataggctacctgtaccttatttaggtgatgaactgcaccattttgggtggaattcatgcagctcttgctatggagatccaacagcagttcggcgatatctgattttgccttcactggtatcaggccgcatttatgtggttgacacaaaagcaaatccaaggtctccatctgtgcacaaagttgttgagccagaagacattataagtaagactggattagcttatgcacacacatctcattgccttgcttctggtgacgtgttgatctcatttcttggagacgaagatggaaatgcagaaggaagtagatgtctgcttcttgatcatgtacttaatttgtaatgaatgtggcagaaacctgcgcacagtgcatcatgtgggtatgac

SEQ ID NO: 82561 - DNA, 512 bp, Glycine max
  Clone ID: PAT_MRT3847_4556C.1
cccacccgtgcagagacgcctgagggggtgctagaagtactacttgagggggagcaggactgaatagcgaacagaatggcgtcccaggggttgaatctgtttggctgtgaccgcttaatgagcactgtgcactgagtcactgtcttgcgggggactacggcacttgctatgaactgctgcagaggctgatgcactcacgctgactacatcttcactgaacaagccaccctcgtctcctagcgcctcaaaaacactcctgtctacggtctcataaacatctctcatgactgtgctccccatagtaacgatgcttgactgtggctaccactactgatgatggagcccgtgtgctaacgaaacaggtgtaagctgagcattcttaaatcacaggtacatcgaaaccatcaaagaagctaaactatgggagtgcccatgagaacttatctgtgctgatatcctcggtctctctgccatatatggcattgtgtcactcagacgtcctcatattcctc

SEQ ID NO: 82562 - DNA, 1786 bp, Glycine max
  Clone ID: PAT_MRT3847_45571C.1
cttcatcatctgcttcttcttttgatcataatatctgttaagtgatctttcatagagagagagagagagagatggagaggtgtgacaaggtgatgaaccaacgcaacatgcatgattgtcctaaaacaggtcctggctatccttcacccctggcagccatgtctggtcccaaagagactctcctttatgtcactgctatctactcaggaacaggaagggataagcctgactttctggccacagtggatgtggatccaagctctccaacgtattcaaaagttatccataggttacctgtaccttatttaggtgatgaactgcaccattttgggtggaattcatgcagctcttgctatggagatccatcagcagttcggcgatatctgattctaccttcactggtatcaggccgcatttatgtggttgacacaagatcaaatccaaggtctccatctttgcacaaagttgttgagccagaagacatcataagtaagactggattagcttatgcacacacatctcattgtcttgcttctggtgacgtcatgatctcttttcttggagataaagatggaaatgcagcaggaagtggatttcttctccttgatcatgaatttaatttgaaaggaaggtgggagaaacctgggcacagtccatcatttgggtatgacttctggtaccaaccacagcataagactatgattagctcatcatggggtgctcctgctgctttcaccaaaggttttaacttacagcatgtctctgatggtctttatgggaggcatctacatgtatacagctggcctgggggtgaactgagacaaacattggaccttggtgagtcaggggttctacccttggaggtaaggtttctgcatgatccttctaaagatacaggtttcgtggggtgtgcattgtcaagtaacatggtacggtttttcaagaccgaggatgaatcatggagtcatgaggttgcaatatcagtgaaaccattgaaagtgcaaaactggattcttccagaaatgcctgggcttataactgattttctgatatctcttgatgatcggtttctgtactttgtgaattggcttcatggtgatattagacaatataacattgaggaccctaaaaatcctgtactgactggccaagtatgggttgggggactacttcagaaaggaagccctatagtagcaataaccgaagatggtaatacttggcaatctgatgttccagacatccagggaaataagttgagagctggccctcagatgattcagttgagtctggatggtaagcgggtatatgttacaaactcactcttcagtgcatgggataaacaattttatccagagcttgtagagaaaggatcccacatgttacagattgatgttgatactgaaaatggtggtctgaaaattaaccctaatttctttgttgactttggagctgagcctgggggtccctgcccttgcccatgagatgagatatcctggtggtgactgcacttcagatatatggatttaatagctatgctacttgaggctaccaggctacaagcaatatccatgtgaataaaatccttagtcctagaatgaatcgaggagggctaatgttataaataaataatagttgcatatgtatgatggttgcattgtaataaagttatattgtcatgtagttttcaatacttttctcatttacatcatctaaatgtgttctctatgaataaatagttttcaatacttttctcatttacatcatctaaatgtgttctctatgaata

SEQ ID NO: 82563 - DNA, 581 bp, Glycine max
  Clone ID: PAT_MRT3847_45572C.1
gcacgagattcaatattcatgggaataaaaagagcccgactaggtactggccgggctctttggctgtagaaaaataaaaaaggaaactaaaaaatagaagaatatagaatataataatgaatcgaaatcaaatagaaaaaaaagagataagataaaaaataagataaaaagaagtctttttttttcaagctccattttttgctcttcttgtttatgtgatataacataaacaaagtaattctatttttcaattggggagagatggctgagtggactaaagcgtcggattgctaatccgttgtacaaatttttgtaccgagggttcgaatccctctctttccgttgataatttgatattttttgttgaacttctttgttttccttgtttgtttgatttttttttatttactagttaaagatgttaaaataaagaaaatcctaaaaatattttaaaatccagcacaagcaagaaaaacacagaatccacctttttcttattcttcacgccctggattacgtgctggatcgttagataggaatccgaagatgaaaagagaaacgaagaatatcactaccgtgta

SEQ ID NO: 82564 - DNA, 173 bp, Glycine max
  Clone ID: PAT_MRT3847_45573C.1
ccgggccgacccacgcgcccgcacgcgcggcggagcccgccgaagggggaaagagagcgaccgacgcagcaagagaccaggggcaccggaaagcaaagagcgacaaagcaaaccagagagccgagaaggcaccaacaacggccgcggggccaggacagacaagaagacaagcg

SEQ ID NO: 82565 - DNA, 357 bp, Glycine max
  Clone ID: PAT_MRT3847_45574C.1
gctcttcttgtttatgtgatataacagaaacaaagtaattctatttttcaatgggggagagatggctgagtggcctaaaccgtcggttggctattccgtggtccaaattttggacccgggggtccaattcccttttttcccgttgataatttgatatttttggttgaacttctttgttttccttgtttgtttgatttttttttatttactagttaaagatgttaaaataaagaaaatcctaaaaatattttaaaatccagcacaagcaagaaaaacacagaatccacctttttcttattcttcacgccctgaattacgtcctggatcgttagataggaatccgaagatgaaaagaga

SEQ ID NO: 82566 - DNA, 569 bp, Glycine max
  Clone ID: PAT_MRT3847_45575C.1
cctcgtgccgaattcggcacgagggaataataacgggcaaaatcgaaggcttattacctatgacgatgacaacaatgatgatttgaagactatagctccatgttcatcaaaggagaaatataaggttcaacgggcaatggattcttgtgatgtggaggaactcccttccaagaagttaaagattgacaagaagttagcgaaactcactagtgacaagttgcgcaaagaatcttcaatgatttcaccgaatgtggaacacaagctagattttcgtccaatggaagttactcgaagaccaaatgatgaggatagaagcaaatggtttaaggaaattccttgggaagaaaaaatgaaaactgcttatgagcaaggaaggcttgtgctacttcaaaacttagatccatctttatcttcatccgaggtacagaatattatttggactggatttaaagaaagttgcacagcaaggatgatccagaaaactgcctactccagccctcattctggtcaagcttttgttatatttaaaaaaagtgaagcagcagagtcggttgttagaaagttagatg

SEQ ID NO: 82567 - DNA, 724 bp, Glycine max
  unsure (1)..(724): unsure at all n locations
  Clone ID: PAT_MRT3847_45576C.1
gtttcgaaatgctcgaacagaaacagagtgacagtgtgccacagtacaccgcctccggcggaaccgcaacctctctctctctctcctcctggtcttgcgcgatgccatgaggaaacggtcacaattcacaacgagattgcgaacaagttagagagggagacagaaggggcacggaatttggaattcagacacaatggcgaatcacggaacccaacaacatcaacgtccccgccaacactgccggtccaaggctcgacatggagcggctcgaccggcccaggctagggttccgctgaggctgctgcttcgggtagcgtcggctgtcggtggcattcagttcgggtgggccctgcagctctctcttctcatgccgtacgtgcagcagctcgggatcccgcacgtgtgggccgctctccgggctcctggtccagcccctggtgggccacttgagcgaccgctgcaccagccgcttcggccgccgaagaccgtttataatgggcggagcattgccgatcgtcgtcgctgttctcatcatcggtcactccgccgacatcgggtgggtggttcggcgacacccatgaacatcgcccctgggctgtcgnagnttttttgtttttcggggttttggaattttggaaatttttggatgtggctaattaaacgtcacttcagggcccccatgtagagctttgctttgggtgaatctcactggccaaggatcaat

SEQ ID NO: 82568 - DNA, 634 bp, Glycine max
  Clone ID: PAT_MRT3847_45577C.1
gaaagactttagagagagagattgcgcgtttttgcgttacaaacagagcatcgatcggaaacgaacacggagaagacaatggccacacagacgcaagatccaccttcaaaccctaaccctaatcccaatgccacgtcggcaacgccatcttcctccttcttcttccgcgccggcggcgccaacggcgcctccgtcgctccagtctctgtttccggcgagtcacactcgcaccaccgtagagcgcagtcggaggtcagtttccggctgccggaagacatgatggacctctcgccgtccgatccgttcaacggcggatcctctacggcgagcttcgaggagatcggatccgaggacgacctgttctccacctacattgacgtcgaaaagctcagcggcggcgccaacggcgccggccgaggcggaaacggatcggatcagagcggttacggaaacggcgccggcaccagcggccacaacgacggcgagaagagttcgagcgccgccgcagcgcggccgagacaccggcacagtagctccgtcgacggttccacgtcgacgtgcatgttcggagagatcatggatgcgaagaaagccatgcctcctgataagctcgcggagctttggaacattgatc

SEQ ID NO: 82569 - DNA, 768 bp, Glycine max
  unsure (1)..(768): unsure at all n locations
  Clone ID: PAT_MRT3847_45578C.1
ccggtnccggaattcccgggtcgacccacgcgtccggggatagaaagattgcgcgtttttgttttacaaacagagcatcgatcggaaagaacacacagaagacaatggccacacagacgcaagatccacgttcaaaccctaaccctaatcccaatgcaatgtcggcaacgccatcttcctccttcttcatccgcgccgccggcggcaacggtccctccgccgctcccgtcgccggctccggcgagtcgcactcgcaccaccggagggcgcactcggaggtcagcttccggctgccggatgacatgattgacttgtcgccgtcggatccgttcaacggcggatcctcgacggcgagcttcgaggagatcggatccgaggacgacctgttctccacctacattgacgtcgagaagctcggggctggacgcggcggaaacggatcggatcagagcggttatggaaatggcgccggcagcagctgctacaacgacggcgagaagagtccgagcaccgccgctgcgcggccgagacaccggcacagtagctccgtcgacggttccacgtcgacgagcatgttcggagagatcatggatgcgaagaaagccatgcctcctgataagctcgcagagctttggaacattgatccaaagcgtgccaaaagaatactggctaatcggcaatctgccgcacgttcaaaagaaagaaaggcacgctatatacaagaacttgagcgcaaagtccagacccttcagactgaagcaacaacac

SEQ ID NO: 82570 - DNA, 131 bp, Glycine max
  unsure (1)..(131): unsure at all n locations
  Clone ID: PAT_MRT3847_45579C.1
caaatattggttgtngagtattgcttttntaaataacaatgtccaattaaattcaaggatccgatcctatccaacataattggacattgttatttaaaaaagcaatactctacaaccaatattttntnttg

SEQ ID NO: 82571 - DNA, 453 bp, Glycine max
  Clone ID: PAT_MRT3847_4557C.1
caagagacctatactagttatcttaaagaaccaaataaaacatttgaggttttatggcacagccaaattccaacatgaaggtttggttcttttgctttcttcttcttagcatgactgcaatcaaccatggcaaactagacgataaaaacatacaaaaagaaatgcatgggccgagcgagcgtaaactttccgatcagaataatgacaaacctgttgctgccaacccctacaatcgtggctgctccataatacatagatgccgaaatgattaaataaaaatattatttatataaaagtatttccagatgatgttatgacatttatcatattgtatatcacaaaatagagttgtaatgctatttgcattactatatacaactcttgcgtatattctatccattgtactgttttttttataatatataaaaaatattattagtaaggattgatctc

SEQ ID NO: 82572 - DNA, 486 bp, Glycine max
  Clone ID: PAT_MRT3847_45580C.1
aattcggctcgagcggctcgagccaagatttaaaatgtcaagttagtagatatgtaactgaaaaagtttcaaaaacatttcaactttcttcctctcgagtccgactttcttcttgacacttcctgtttatttgatgtgcatcctctttcttcccctcgggtctgacccatattctgtgtcgacacctgagttgtgtcgtgtcaacacgggtatggtggggggaataggcaagtctgagagcatcacagctggtagcagtgtatggctcacatggccaacccaactttctcgctttcctctttcactgccaaaggatccacaactggtcttctacagaacactttaaacataattattccaattgaatacacattagatttttcagtcagttttcttctcctatagtactcaggatctaaatatcctaaagtaccttcaacctcagtgctaacatgtgagtgggtaagtgaggtaactgttctacac

SEQ ID NO: 82573 - DNA, 201 bp, Glycine max
  unsure (1)..(201): unsure at all n locations
  Clone ID: PAT_MRT3847_45581C.1
gaataccatagtgtagagagtctctgccaggaaaaataagaggcagggaaggagtgatgaggtggcagagagagataggggtgagcaaattgtagtgatggtgataacttcagagattgacacatagatgattgcaggatgtattgatgctgttgcanagtgtgtgagcatcctttgcatgtgaccgataactcagaatat

SEQ ID NO: 82574 - DNA, 403 bp, Glycine max
  Clone ID: PAT_MRT3847_45582C.1
gtaaagaaatcaccatataaccaaaatttcccagtattccaacaaaatcatgagaactacggaaaggaccccataaaccacacaacttccaattctaaacggcttcattttacccatctttcctttaagaacaaaagaaaagcaaaagtatagtacaatcagagttaattaaaggctaaaaatacactaatcacaagaaaaaaaaagttggatgacttttggaacattggtttgccattttatttttaacagcagacagcattttttccaaatgagaacgataaccttggcttcttagttgaaccaaagttaaactttatgtctccagcttcattctgaatagcagtattacttgtagaagggaaggaaaaaactactgctggactgggacttttcagaccaa

SEQ ID NO: 82575 - DNA, 1916 bp, Glycine max
  Clone ID: PAT_MRT3847_45583C.1
tcctctagagcggccgcttttttttttttttttttttttttttttttggaagcaacaaaattctggaattagggaaagaggggcaaaagggaagaaaagtccttttctatagtaccatagagaagagtctttattacacttgaatcaaaacttaacaagaaaatcaccatcagtatcagttgcaccaattaaaatcattctggtctccctaagagaaccaaatcaaatataaatgactgaagttattcagttccatctcatcttcatcctagaaataactgagataaaaagtttaaatattgttaaaacccaatcaactggtctttggatcaggcattggaaagaggccagcaccagcaccagcacctcttggcggtgcaaaacccaagaacttctgcaaatttgttctgatgctaatggaacacaagaagtacagaaatgccatggaacaatcagttgggtcattaccctgcaagcctcgatggctcatcttcataataagcccaaaaggtttgaagggcaatttggcaacaaccttgccttcgaagagtgaattcagcaacccaaagaccacaaagagaaccagagccaccacacccccagacttgaacttgaagagagacaagtcgcgactcgattctttgaggcttgtctcaacacggtcaatttttttggtcttggacttcttgatgttgattttattgctgtctgtcttcatggtctcaagtttcttggaggctttgtcaatggaggacctaaggtttttgtaagaattggtccgatagataagaacccatgagatagcctcacagacaatagctgtgcagaaggagatacccactacagtgaggccatctgagtacttgaaatctgagaagggatacgccatgggaagaccgttacaaaaaaacgacgagaaaatgggaaggcaaaattggatcttgatcggaattgtttaagcgtccaaagccagaccaattataaccgcttcccttcaagtctcagttttcaatataaaagcctatctaacagccttctcggactcaattcgaagtcgaacacggtggctgggctcgccggtcgcggtggtgcttctgggtcttgtggactgtggtctcgtcgctgccgaacgcgtgggcgaacgcgtgggcggacgcgtgggtgcagaatcccgtgaaccatcgagtctttgaacgcaagttgcgcccgaagccattaggccgagggcacgcctgcctgggtgtcacacatcgtttaaaaaaagaaaaaaaaaaaaaaaaaaaatacaatgactctcggcaacggatatctcggctcttgcatcgatgaagaacgtagcgaaatgcgatacttggtgtgaattgcagaatcccgtgaaccatcgagtctttgaacgcaagttgcgcccgaagccattaggccgagggcacgcctgcctgggtgtcacacaaaacatcattaaaacccaacaaccttgatttgtcacacacacactagttaaaaatccaaatgaaattaattgtactcttcttcctcgtagcatcatcatcatcatattcatacgctcaatcccctgcagcaccagcagtggctcatgtcccttccaccagagcaacgcttcccatgttactcgtgatcttcctcttcgccctcctcttcaccgcattctgctccatcttcattcgctactgctcccacgaagaacaaccccacgcgcttccacaagccacgcgcgccacgccgcgcggagtcgacccgcgcgtgctcgccacgtgtcccgtcacgtcctactacgcagtcaaaatgaagacgccgcaaaaggctgcgtttcagtgtgcggtgtgtttggcggagtttgacgacgccgacgcgctccgcttgctacccaagtgcggtcacgtgttccacgcgcactt

SEQ ID NO: 82576 - DNA, 307 bp, Glycine max
  Clone ID: PAT_MRT3847_45584C.1
gcttggaacctttgggctgatttatgtgcttgcatggtcgtgagaagatgatagaagggggaatggcacaatatcggtgtactcatttcgaggtgctgtcctctcctctcgctgcgagctattacggcgagggccagcgcgtcgaatgacgtctcgaagagtacgcataacgtcgagaaaaggggaaagtgttaagctacgaccaggttacttcttaaagctaccactaaaccttccccggcgacgtaaaagtatggacatactggagagcccgagcacgccgacgattatagggtcggcaaaactg

SEQ ID NO: 82577 - DNA, 188 bp, Glycine max
  Clone ID: PAT_MRT3847_45585C.1
gggccttactttaaacaaaacaataaatcaggtccaataatagggaaaaaacagattttcggaactaaaagggttttagcccccaagcaaaatcgctaatggggccttctctgattaaattcaaaccccatcacaggggaacccttatcacttacattacaaagtttggggcgtttgagctcaaacca

SEQ ID NO: 82578 - DNA, 169 bp, Glycine max
  Clone ID: PAT_MRT3847_45586C.1
ctaagctatttggtgaagctcttgagcgaggaaccggcttcttcaagttaatatcatactaccagacacagtcaggaccttcatactgtggtctccacactcctttcgttcgttgtcctcaatgcccttgctattgaacatggaaggaatttgaaaggtatgtttctat

SEQ ID NO: 82579 - DNA, 453 bp, Glycine max
  Clone ID: PAT_MRT3847_45587C.1
cgttctttttttttttttttggttttattttttactgcgaggttaatttttaaacaaaaagagggaagtgcaccttctttgaatggattacacagtccttccattaactatttatttaacgccctagaagttttattcaagggggaacaagctcaagggtacagggccgggagaccccaacaacataaattaggaggacacggcccccccccaagtgagccctcaaaacaaaaaaaagaattaccacagtagatcatcttttaaaaaacaaagaagcgagccctccccccccgtgggaaaaaaatatgaccaatgggatctagcggggccacaccctgggcccaagggggggaaacgccccaaatccccaaagaagggaacccccctctgggggtggaactcccacgggggggacctccggcctaagataaagaaccacagccacccccccca

SEQ ID NO: 82580 - DNA, 194 bp, Glycine max
  unsure (1)..(194): unsure at all n locations
  Clone ID: PAT_MRT3847_45588C.1
cttcaaacnnnnccnncncagagacacnacncggggannnncaaccgnnggcaagncacaaagacagcancncagngaacaagaagcangcagcaaggaaccaggancancancaaagngcaaaacannngagaccggagaccangancagcaaccgaggannccnccaaagcgccccccngagaagagacaac

SEQ ID NO: 82581 - DNA, 540 bp, Glycine max
  Clone ID: PAT_MRT3847_45589C.1
ttctcgtcttattttgatatcgatgtgatttatttaatcattggaattgtgttatcaaggttgtctattttcttttgttttgtttgcttttttgtatgggctttgatttctatacaactatacatgtaatttttgtatgtgactgtttcctcagtatgttgattgtttgagaagactaagactttgatgaacacgttttttaatttgtgttgctgtgaatagaattgattttatgtgctagtattgcttttagtcctttgttttgtgacgtctttcctttctctatattcattcactttagttttcataatgaagaattggtgattaattttatcgtatcttgttttatagatgcaaatcttcgttaagaccctcactggtaagaccatcactctcgaagtcgagagttcagataccatagacaatgtaaagggcaaaattcaagacaaggaagggatcccaccagatcagcaacggctcatttttgctggcaagcagcttgaagatggacgtacccttgctgattataacttcaaaagg

SEQ ID NO: 82582 - DNA, 571 bp, Glycine max
  Clone ID: PAT_MRT3847_4558C.1
ttaccgtactacatgtgtagtacgtcctccttcttgggggggggggggggtataagatggggttagagacaatcaaaggatcagaggaaggacatatgatttgcatacctggtgaggtacaaacaaaacaaaaaaaaatttgcataactggtgaagaagcattatatgacggcaagttggcactttgattatagtctgaattagacaagacaagacaagaagagtaggaagtcggaaggggttattagctagtagaatagagaatatcaagaagcggaaacatcgacggtacggccggcaacaaccagcgcttatggaggcgaaagggggcatatgagggggcaggtggacccagtaaagaatatctagcagtctaagtaaggaaatttattatatgcccagcagcagcacaaagaacaaattttagtacagcgacaactgcgtttaggtcaagtacataatagggctgcagcaccaataaacctattattattattattatgagatttgcaacaagaaggtatagtatgtcgacaatttattagtagtagtctagtagcagtagcagtag

SEQ ID NO: 82583 - DNA, 347 bp, Glycine max
  Clone ID: PAT_MRT3847_45590C.1
tcggttttgataaaccgagatcacaggttggcgcactttaaaaccggaaacacaagccctcgctacttgatttcaagaatcttttagtgtcttcttacttctatgtggacgatgccttaagggaaagaaaatcactctctgttctggccacacgacttcgtgaatcattttcttttccactcttagtttatttgctgtacactctgctatttgatataggacttcgagtgagaggtaaactttctgtgaatctttctgagttctgtgatgaatattaagttcaagctggagaaaatctggaagagcggcttcactctactagatggtataggactacgtgggtagac

SEQ ID NO: 82584 - DNA, 985 bp, Glycine max
  Clone ID: PAT_MRT3847_45591C.1
ccacgcgtccgcgaaaacgtgagaaacaacttggctcgcaattccgaatatacaaaacgaacacacaaactcggctcgcgcgcttctccggcttcagcattcaccaaacttcttcactggtgcaattctctgtttgatgagaactgaggttcatccgcaatgccacttttaaggagaaaacctttttccttggccgagcctcctgaggatttgaagccagatgagcctgtttaccaaattcgatttacaaaagaaatctttcaagattatcatgattatttgaagcgattgaatctataccgccagagggtttggatgtgtaaagtcactggaaaaactggcttgacatatgaagaggctttggtgtctgaacaacttgctaccgagaaagttcaacagtttcctaaagaattaatgactattgctttaaggattattcaatacagtatgctccctttgaaggatcttgctgattctattggtgagaaattgcaggaacagttgtttgtgggtgctgaactacattggaaaaaggatgatggagttcatccatgcaaaatattaaaagtcattcagaaaggagttgacacagtctcttatgaggtagcttggcttgacaaaaacaagaatataagagaacaagcagaagtcagtgcagaagatttggtgcataagaagccgctttttagtagaaatattttgaagtcttttattcgtgagtctacatatcggaatgccccttgggttttacatgatgaactggctaaaaatcatggaatatcaactgacattcctgaagagttaagaggaagggttttttacaaagatggacttttagtttgctccaagaaaaggaaacacgaggaatcacgggaggaccccgatacctgtaaaaagaagttggatggtgcacaagtcgatgattctgtcccaaaaaaaaaaaaagtttagagattgaaatcattttgggccacatgttaatttg

SEQ ID NO: 82585 - DNA, 223 bp, Glycine max
  Clone ID: PAT_MRT3847_45592C.1
ttccagcttccctgctaaggccatacaatgacataccccaccctataatgtgattcagactatcgacgggaaccctttcatactaaacctggaacccccacttacatccagccctttgatcgcataggacttgtccaacctgcccgcatacataaccgcactgagcccactactaacagagatcgaggtgagccttggccacggataccttcttgtgggcccc

SEQ ID NO: 82586 - DNA, 303 bp, Glycine max
  Clone ID: PAT_MRT3847_45593C.1
gcgccctttttttttttttttcacggaaatattgtattacacacacttggcatgaacgatctaaaagcactcatgaggcacttgactagcaacactaccggctacctgaaaagggaggacaaaacacatgccaaagcgctataattctcagcttaatttgaatcaaaaatcatgaggtaacaatcatatgttaccagatctagaactactacagtcttgcccccattctagaggttacaaatattgatcgggcgttagattggtaatctatcattaatcacaatggccacatacttacgacca

SEQ ID NO: 82587 - DNA, 598 bp, Glycine max
  Clone ID: PAT_MRT3847_45594C.1
ccccttttcttctatttattttgttgttccttattttaccttgccttcttttcttttcattttccatgcaaaaacccaacaccaacggggattattacacacccatcttcacctttcaggacaagatccaaaaacctcttgcataagcactctgaaatccacaggtaccaggggtcttaaattaggagcagggttcactatcccgtggcggatgctacaggaccacccataggcggaactagaatctcgaagctaaggtctccccaccggacctaggggaaaaacccgccccctctggtaaaagttcccacccttgcggaccaaattaccacccacccctccaaattgaacagatgaccctgggctgcccaccactggttttgctgagcgcgcgtaaaacctaattggaaatgcaatctgcccaaaaaaagacccaaacaaaattggtacaccaacccgctacttatcacataacaccagtgaatgcctaagaagaccccctctaagaagcccaaactcgacaccttggggcaaaaaaatatgaccgatgagggggcacgccacaaaaaagatttcccttggaagacggcccccaaaa

SEQ ID NO: 82588 - DNA, 349 bp, Glycine max
  Clone ID: PAT_MRT3847_45595C.1
ggctcgagcccaacccaatgttcaccatctcctacgtcaaattcgattcctggatctcctgattgaggatgagaagatacctttactttacattcatgagctttctgccatagagaaaaatgggaagagctgaatagaggcctggctctggcatgatgactgatagctaaagtttgtgtggctcaacgcgaaggggacgtaccgacttatattctttattatagaagagaagcagaaccgtttcattgtctagaaactaggctagcctgcagatgattatcatgatttctctgcaagtatttctgacgacgagtgtaaagctgctgttcatgattctgagtaattgact

SEQ ID NO: 82589 - DNA, 332 bp, Glycine max
  Clone ID: PAT_MRT3847_45596C.1
tttcttttctttcaacacccgtaactttacacaccctttcttcttcacacattgagcaaattctcacaaacataacctatctattcacatttcaatctcctaactattctcacccctgactagctgtgctaccacatctataattcattgctcaatccatacctagaacaagaccctgacatcaaggtagcctgtaacacatacacccaaaccaacatgttcaaaatctttagagagatcacaaacaaacccaacctagactattagaaaattgtccctcacacataccgcgaaattttattcatctataataatgtttgtctttatgctca

SEQ ID NO: 82590 - DNA, 463 bp, Glycine max
  unsure (1)..(463): unsure at all n locations
  Clone ID: PAT_MRT3847_45597C.1
attatgtggtgtgcatccaggagcggtcatatttggcggaagaatactggaacacgccgaggcgcgaagcgaatgcccggccacgtgagaagctcagaatttgtgctcttgccagtactagggctataacagcaaccactttgagaggaagcacttctgcttaaaccctcgttctattgtcgctgcatatccatgcttttgggtggtcatgatcgctgcgactcatattactgtctgccgcacaaatggatacgtttgtctatcatcgaagcttacttaggggactactaatttatattgtacatacgccacttcctctattataggattataagccatgtgtgcaataacaagctgcttctatatacgtgaatgagaatgcancatgtggagcttgaagatggatcatctggaagatcctcatttggataagctgcgacagacgtctttaaaactaacgtat

SEQ ID NO: 82591 - DNA, 306 bp, Glycine max
  Clone ID: PAT_MRT3847_45598C.1
tttagcctcacgcgcgcgaaattgttgagaagagctcggaagggaatgtataattctcacttgtggggacacgtgaccgggactgcagcatgggatggatacataagagtgtaccagaataaaggatgaccagaatgtggatgaaaccaaagttcaggctcattcggtggggcatgataagggtgtttgatatgctcacataggaatagagggacttgggatacaacagaattcgcttgagtggaaaactcaagtggtttgaagcataagacgataatatccagtgtaaagcttgagaagcgtgat

SEQ ID NO: 82592 - DNA, 1279 bp, Glycine max
  Clone ID: PAT_MRT3847_45599C.1
aattcggctcgagcttgaaaaaccaattttggctctctctatttctctttcttctctttcttctctttcatttcccctctcttgttggggcaaattactctctctctgtctgtctctctctccgcacgcagcgagtgttgagttgtgtgacatgtaacaccaaactcactcaaacctacctttgtttttctccttctttttcttctcagtttcattctcttgctcatggacatggatgtttgccgaaatatatcagtttcttcaagtgagtgtcagcaagagcttcccacccttgatgaccttttctgtcatcagaacacggaagtggattttggcatggaatggttatcagtgtttgtggaagactgtttctctagtaggccaagttgcctcttgccaccctctggtggtggtgttcaaaccacaagcactagcaccaagccttcttcaggcacaataatgcaaagaccccaacaaagtcatcactgtcctttgcagaattttgctgtgccagggaaggcaaggagcaaaaggaagaggctttcagccccaagaaccaacaaagaccctctaagcatatggtcacaccatttgaatcctcaaaatgagtccttgtgttctgaccctcctcttctcaaacaggcttattggttggctgacagtgagctcatcatgccaaagccaaaggatgaggagcaagaagaggtggtgaccaaagaggatgaaaaagtgattaatgaggtgagcaaggaaatagctttggggactctgagcttgatgagggtagcaatggtcaacaacaaccaatgccaagaaggtgcacacattgcttggctcagaggaccccacagtggagggcaggaccattaggtccaaagacactatgcaatgcatgtggagtgaggtacaagtctggtaggttgctaccagagtataggccagccaagagtcctacttttgtgagctacttgcactccaattcccacaagaaagtcatggagatgaggatgtctgtttactccatttctagtgagcagtagtagtggtggttgttagaggtatatttttatgtaaaaaaaaaaaatcaaacttcaaattttaggaaaaaaactatttggcaaacagagagatactgttaaggggagtgattagtgctatgattgattataggcacatttatttacatgacttgttatccactttcattttgttcttctcttccttcgagctatttgctttgcactttcacttagtaaagtactaaagagcctatttggat

SEQ ID NO: 82593 - DNA, 159 bp, Glycine max
  unsure (1)..(159): unsure at all n locations
  Clone ID: PAT_MRT3847_4559C.1
aaagccaagagaagccgaacggacgcagagaacgaaaacaagagacgcggaccctnccttccaagcaagagagagaaagngctgccgacaaggcaaaatacaacaatgttattgtgaagaatctatcagaatcaaccaccgatgacgagttgaagaaca

SEQ ID NO: 82594 - DNA, 636 bp, Glycine max
  Clone ID: PAT_MRT3847_455C.1
atgaaggtgagccaatatatgctcctggtggtcctagtttggcattcttcattatgtgcgaatgcacagtggaataacccaataaactactctccattcgacgagacaaacaaaggtggaaactactccaaggtcacatggagtgtgtcgctgtcatgtgtcttcgttagcatcctggtgtttattttgtttaagctccgcgcgtgttgttgttgttgttattcttcttcttcttcccaacgccataacacaaagctcgtggcagccacagaagctattgaaaagtgccccatctttgaatactcgacggcgaaggagcttaaagtggggaatggggcagaggagtgctcggtgtgcttggtcgagttcgaagactccgacaccataaagatgctcccaaaatgccaacacgttttccaccagaattgcatcgatacatggttaccctctcgcatgacctgtcccatttgtcgccagaaactcacgtctcaggataccgtaatcgacattgatgatgatgatgtcgtcccaatggaacaactagaacatgatattggtacagagattacagagtcagaggtggcagtaactgatgaaactgacactggcactgttgtggaacaggttttggtttga

SEQ ID NO: 82595 - DNA, 353 bp, Glycine max
  unsure (1)..(353): unsure at all n locations
  Clone ID: PAT_MRT3847_45600C.1
acactnccaaaagcgaaacctcaaaaaaaaaaaaaccgaaccaacggggggccgagggccacactctttaggactccgattgataatgccggcggcgacgggaagcagctttatccgtctgcttgttagggggggggaaangccnnnacggagggggaggaaggaaaaggcngacgngcgggggggacaggaggcgacacacgcggggcccagcaggaggaggcncaccgngcgcgccacgcaccggaaccacccgaggggcaagaagcccccggggaaggccgaagaggaagacgggggccgcaaccacgggccccgagccagacccggagacgaggcacgcggcgaagagc

SEQ ID NO: 82596 - DNA, 1475 bp, Glycine max
  Clone ID: PAT_MRT3847_45601C.1
ctcacagatggaaccggaagaaaccgccgccgccgccgacggaagcttcgacgaggggctgctcgggctagacgacggcggcggcggcggcagggacagagtaaagggtccgtggtcgccggaggaggacgccattctaagccgtctggtgggcaagttcggcgcgagaaattggagcctcattgcgcgcggaatcagcggaagatccggcaagtcatgccggctccggtggtgcaaccagcttgaccccgccgtcaagcgcaaacccttcaccgatgaggaggaccggatgatagttgctgctcatgcaatccatgggaacaaatgggcagccattgccaggcttctaccaggaagaacagataatgccattaagaaccactggaattccactctgaggcgtcgtggagttggtcatgatacgattaaattagaatctgtcagcttcatggaagatgttagcttggagaaagcaaaagcatcatcggaagacactctatcatgtggggatgtttctttgaaatcctcagaagggagagatgtcagttctatggagatcatggatgataaatctgatgacaaagcacaaactgagggccaaatacaccatgaagtcaaggacctacctaccctttttcggccagtagcacgcgtgagtgcttttaatgtataccactcatttgatggtacacagccttcaacatcaattaaaagacctgttccgatgcaaggagctgttttacaatcatcaaaaccagacatggaattttgtagaatgcttgaaggaatttgtggtgatcagtcagtgcctcaccagtgtggccatggttgctgtgctgctccagatggtagaaagtccgaaagctctttgttgggacccgaatttgttgaattttcggaacccccatctttcccaaattttgagttggctgcaatagctacagacattagtaaccttgcttggcttaaaagtggattggagagtagtagtgccaaaatgatgggcaacacctctggaagggtagtatctaatggatctcaagtacatattggccattaaaatgccaaatagatcatcattcctattctgagtgaggactggataatgggtatgataaaagctatagtgatggcaatctattttccttgcaaatctaattaggaaatcaaagttatgtgtgaatcactgctataatgtaaatggattcactaggtaaaaggaggttcataagttcaaggaacaattattttgttttttggggtgttgactgattaggacttgatttgggaccctgtaattgctaaaatgttcgtcgtaaaataggccaatagggtaaaattacttgcatatcagtcagttcgagttgctgctgtgatgctgttcactttctaagagtaaaactcatttatgttaaaaggcaattgcagcttagagaaatcaaatcagttattgttttttgttgtgatctgttgtg

SEQ ID NO: 82597 - DNA, 2053 bp, Glycine max
  Clone ID: PAT_MRT3847_45602C.1
cggacttttgggttcagctctgttgcaattccctcttccccattttgctagcaaactcacatttttatactcaatccaattcagaaaaaaactcttacaaaagttatatagcttttcatggagccttcaagttattaaggaaattgtaccaaacaaaattctattgtgttcgcctagaagtggaggcttgaattaacatttgtttggaaattgttgcttgtttaaccacaacaatggcattggctcttactccaacagttgtctttggttcaatagcctttgcagttttctgggttctagcagttttcccatgtgtgccttttctacccattgggagaactgcagggtccctgctaggtgcaatgtttatggtaatattcaaagttcttaatccagaccaagcttttgctgcaattgatctcccaattcttggtcttctttttgggactatggctgtcactacttttcttgaaagagcaaacatgttcaagtacttggggaaattgctttcttggaaaagtaaaggaccaaaggacttactttgtagaatttgcctcatttctgctatctcaagtgcttttttcaccaatgacacatcttgcattgtgttgactgaatttgtgttgaaaattgcaaggcaacataacctcccaccataccctttccttcttgcacttgctacaagtgctaatattggatcctcagcaaccccaattgggaacccccagaatttggttatagctattcaaggtaaaatatcatttgggaggtttctgatgggtattcttccagctatgcttgtaggagttgtggtgaatgttgtatttcttatagccatgtattggaaggtgttatcttgtcctaaggatgaagaggatccaatctcagaaattgtagtagaagaggaggttgtttctcatcagttttctccagccagaatgtctcattttacatcctttaattctcaagaatgtaatggcagtgtagaccaatcaactccaagtgaaagcgaagttcagatgattcataggagcacaaaggattccacaaaaaactcaaatgcatccaaggaggggacaaatgacacaaaggaggaaattaataatccttcaaaaaatgttgcaatagtagtagataaacctattgaagcacatgttatactctcttcagaagaaaaggactacatgaacaacaaatggaagagggtactgtggaaatcttgtgtttatgcaatcacattagtgatgttgatcgcaatgcttataggtttgaatatggcatggacagcaattgcagctgcaataactttggtggttcttgatttcaaagatgcagggccaagcttagagaaggtctcatatgcacttttggtattcttctgtggaatgtttatcacagtagatggatttaagtcaactggaattccaagtgctatgtgggacttaatggagccctattctcgaatagatcatgctagtggaacagctatacttgccgtggttatacttgtcctatcaaatttggcttcaaatgtaccaactgttctattgcttggagcaagagttgcagcctcagcggctgcaatttccaaaggagatgaggagaaggcatggctaatcttagcttgggttagcaccatagcagggaacctttcactattaggatcagctgccaacttgatagtttgtgaacaagctcgtcgagctccaaaccttggatacacattaactttttggacccatctaaaaattggccttccttctactcttatagtcactgctattgggttgacactaataaaatgacaagagtttacttgagtcctaattgaagaatcttatcgtagatgtttacacaagcaaattaaagtcagtttttattgtaatgtattttaaggttgttagaaaatatagttagatgaacagggaattttctctgtttttgttgttaatgtcatcaaataagtatatgattgtgattgtcctagctaaaagtttgattggaatgctttgaaatttcaacttgtaatgaattttagtttgggagttatgtg

SEQ ID NO: 82598 - DNA, 2238 bp, Glycine max
  unsure (1)..(2238): unsure at all n locations
  Clone ID: PAT_MRT3847_45603C.1
caaaagtcgtccttgattcaatcagaggatgtgcaattctcttccaccattttccaaacaattaaatttctgaatccaatttggaaaccaaaaagttcgtagcttttcatagagctttcaagtaattagccccgtgaaatatttttctttttacgcaagatgacaccacgggccttctaactgaaacaagcaataataataacaggccaaggaaaaactcagcagcattctgttagaaggaaaacacttatctctattagcatatttgtctccattaatctcttacttcagtcctctatcaggaaattcctaccaaacaaaattcatttgtgttggcctagctgtgaagtttatagcatttgctttgaagtttggaaattgttgcttgttcaatcacaacaatggctttagctcctacttcaaaagttgtccttggttcaatagcctttgctatcttctgggtactagcagttttcccagctgtgccttttctacccattgggagaactgcagggtccctgcttggtgccatgcttatggtcatattcaaagttcttagtccagatcaagcttatgctgcaattgatctcccaattcttggtcttctttttgggactatggctgtcactatttttcttgaaagagcaaacatgttcaagtacttggggaaattgctctcttggaaaagtagaggacaggacttactttggcttgggccagcaccatatcagggaatctctcatttctgctatctcaagtgcttttttcaccaatgacacttcttgcattgtgttgactgaatttgtgctgaaaattgcacgtaaacattaaccttctggagtcacctgaaatttggccttccttccacttgttacaagtgctaatattggatctcagcaaccccaattgggaacccccagaatttggttatagctattcaaggtaaaatatcatttgggaggttctgataggtattcttccagctatgcttgtaggagttgtggtgaatgttgtatttcttatagccatgtattggaaggtactatcttgtcctaaggatgaagaggatccagtttcagaagttgtagtggatgaggaggttgtttctcatcagttttctccagccagaatgtctcattttacatcctttaattctcaagaatgcaatggcagtgtagaacttgctaatagtattcaaaactcttcccaagttcatgttatgagaaaccaatcaactccaagtgaaagtgaagttcagatggttcatagtggcacaaaggatttcacaacaaactcaaatgcatccaaggaagggacaaatgatacaaaggaggaaactaatccttcaaaaaatgttgcaatagtagtggataaacctattgaagcacttgttatactctcttcaggagaaaaggactatatgaacaaaaaatggaagagggtactgtggaaatcttgtgtttatgcaatcacactagtaatgttgattgcaatgctcattggtttgaatatggcatggactgcaattgcagctgcaataactttggtggttcttgatttcaaagatgcagggccaagcttagacaaggtctcatattcacttttggtattcttctgtggaatgtttatcacagtagatggctttaagtcaactggaattccaagtgctatgtgggacttaatggagccctattctcgaatagatcatgctagtggaacagctatacttgctatagttatacttgtcctatcaaatttggcttcaaatgtaccaactgttctattgcttggagcaagagttgcagcctcagctgctgcaatttccaaaggagatgaggagagggcatggctaatcttagcttgggttagcaccatagcagggaacttttcactattaggatcagctgccaacttgatagtgtgtgaacaagctcgtcgagctccaaaccttggatacacattaaccttttggacccatctaaaagttggccttccttcaactcttatagtcactgctattgggttgacactcataaaatgataagagtttactaaaaatccaaagaatcttatcgtagaagtttacacaagcaaagtcagttaattgtaatgtattttaacgttgtgttagaaaatataggtagatgaacaaggaattttctctaaaaagtttttgtggtgaaggccaccaaataagtatatgattgtgattgtcctcnnnnnnggggggaggggggg

SEQ ID NO: 82599 - DNA, 393 bp, Glycine max
  Clone ID: PAT_MRT3847_45604C.1
acggctgcgagaagacgacagaagggatactggatcaaatcataccaattactgattcactagttggatcattgattcactgtctcaaccaaatcaatgattggactaagtttcataactttaggtggtatccccttgcagcataacaaaaatatcttttcactaccttctttttacttggtttttttgtttgaaatcctaaaactaaagctcctaaacatgagttatttaatttccagagtgcctatactttcttgacttccgggcaagcccaattctcaattctctaaaatcactcatataaccattttttagcataacccattaacctcccctttctaatgccaccttaacaaacaattatgcatttatgcccattccatccctcccttg

SEQ ID NO: 82600 - DNA, 363 bp, Glycine max
  Clone ID: PAT_MRT3847_45605C.1
aattggaacctgcctctgttaaagtttgtatttttctgagtgggtgggttgattgagagtgctgtgcaagctttggaactttttcccaacctgctacttcaatggccactgaagaggttaacaaacctcaatcacttcctccataccctgaggtaattcacatcataattcagattccctttttctaaattttttttctccaaaattaaaccttgggaactatttacctggtaaagttggtagatttcacactgatctaattgatctgtacattttcactgacttgggtttcttgtttaggtcacccaatttaaaattttatcacttttggtaacaaaaataggaaaaattaggggttttcag

SEQ ID NO: 82601 - DNA, 356 bp, Glycine max
  Clone ID: PAT_MRT3847_45606C.1
tcaacattcaagagccactcttgttctccccggataaaagggaaaaacaaaaggaagttggagacggtaagtttttgtttttttacatcattaccttctatctcgaatcatatttctagtctagtagtgagactagcatagcatagcatcatgccgtgatagcccggtgaggtaatttcgttttcaagctttctgtataaacttaatttgtcttctcaaggtgggctctcttccccacttgttcttcgatctcatggggatatgtttaataataatcctcctcgttcttctggtagttgatagttgctgctgctcctatgtttcattgtcttgtgaataaaaaaaaaaaaaaaaaa

SEQ ID NO: 82602 - DNA, 612 bp, Glycine max
  unsure (1)..(612): unsure at all n locations
  Clone ID: PAT_MRT3847_45607C.1
agttcgacgagtcggacaagggagagaagaagcagatgctgaaattcttcaactggttcgtgttcttcataagcttggggacactaactgcagtgacggttctcgtgtacattcaggatcatatagggaggtactggggctacgggataagtgtgtgtgctatgctggtggctcttctggtgttgttgtcgggcaccaggaggtaccgctacaagagactggtgggaagtcccttggcgcagatcgcgatggtgtttgtggcggcttggaggaagaggcacttggaatttccctctgattcttcattgttgttcaacttggatgatgtggctgatgaaactctcaggaagaacaagcagatgttgccccatagcaagcagttccgcttcttggacaaggcagcgatcaaggacccaaaaacggacggcgaataaatcacgatggagaggaagtggtacctctcaaccctaaccgacgtggaagatgtcaaaatggtgcaaataatgctccccgtgtgggccaccaccatcatgttctggacagtctacgcccaaatgaccacattctcagtccaacaagccaccaccatggaccgncgcataatcggaaact

SEQ ID NO: 82603 - DNA, 1199 bp, Glycine max
  Clone ID: PAT_MRT3847_45608C.1
aaagtttaaaattatagtatattactaataccacaacaaaaaccacatattacaaatcttacaaaaaagaaatacataataattgaaaccatcaaaagtttaaaattatagtacaccaaaacatacattaagtaaaatccatatataatgttcggttcaatttgattgggttcagtttttggaagatccaaaaattgaaccgaactaaaaaaaaatatgcggctgttttagtttttagtttaattttaatttatttttttatatcggatataggatttacagcaatttagttcggtttaacacccccaattttccaattccaactggttactgcagagaccaggtagccacaaaagcaatccaattgacactgttgcacaaatcccaaaacgcaattaacccaccaaaaaaattgcaacatctactgcaatagttgtcatgagtaagagtgggtcttcctccctgtgccttcatcagaaaaatgaagagaatgccacccaccaccaccacttcgtccccaacccattctgctggtatagccacttccatcccttccaccaaactgatgaccaccaccaccacctctgccaccacctataccctggttttcacgtcgaggctttgctttttcgactctcaagtggaaacctcctagctcattttgatcaagatgtagagctttcctcacactgacaacatccttgaaccccaagtgagcaaaccccttacagcaccagaatcaggaaatgtcggaattgatatcctttgaatctctccacaagaaccaaaatgttcttctaggctagctttcagcttttctgccggaagggaactatcaaaacccgtcacaaatacagttggagactgagctctttcacacttctggaatgagttgctccagttgcttctactgtaggtatattcacctttttcttcagccaaatcaactccgatgggacgtctcaacaattctgtattatgcaactcaagagcttttttcgcagcttctgctgttgcaaactcaacttgtccaaagccatttaacctaccattgtgattccgatgtagacgaacatcaacaatttttccacattctttgaaaagattttccatatcagcctgttccactctgtatgacaagtttctgacatatattgtctttggtggagcattttgttctttcagagcgaacgcgtggg

SEQ ID NO: 82604 - DNA, 315 bp, Glycine max
  Clone ID: PAT_MRT3847_45609C.1
gctgggagggtggactgcaccactccctaggagtgctgcacaaagctgaaggcttggaacatttcagtctggagaccaactctcaaaggctggcggaaaaatacaaaaagatgccgcccatatcatccttcggtggggaatgcaaaggaacactgcgggcattcctaaatcctccaaactggaaaggttgaaagacaactttcagaggccccattatgagaggtctaaaaaggacatggagctgattggaagtatacatagaaaatatcgaaccaatcaaccacctgtgtctaggggcatagatttgtatgcgtg

SEQ ID NO: 82605 - DNA, 206 bp, Glycine max
  Clone ID: PAT_MRT3847_4560C.1
ggctcgagtcgcgagcggccgcccttttttttttttttttttgaagaaaaacaaaaactatttataaaaggtttcatacattacatagaacaaagaatgccgggatatacaatccaacaaaacctatgacaagttttcacctacaattgataaagaatctattgatatacaaccgtgaaaaaaaaaaataagaatacaatataaga

SEQ ID NO: 82606 - DNA, 373 bp, Glycine max
  Clone ID: PAT_MRT3847_45610C.1
cccccgaaaaaaaggctttttacaaaaggggacccattaggattcatgtttttcccggggggcctttttttccccgtccccaaaacttggtaaaaacaagcagcccccatgctagcttttaggggcttaatgaacacagtatcgctaaaacctgcagctttagctttataaaattcatcattaccggtgtgggccgaaaaaagtatcatcgggggtattttaatatatgccgattttgttcccagcccagtggccccacattgaaaaacccatcctttaaaaaaacccatgaatttttttcaaaaaaaataatatcgggctaaaaaaatcccgagggcaaacaacctttttccccacataaaaaaccaccctt

SEQ ID NO: 82607 - DNA, 315 bp, Glycine max
  Clone ID: PAT_MRT3847_45611C.1
agtgaattcaacacagatttaatcactgagcggcctgatcagtggctgcttctatgtgcatgaggcctcaccactattgtgctggatccagtgcttccacaagggggcgtgctgtacggcacatttgtagcggttgctgaacacaatgaacttgctaccaatatcaaggagaaaatgtatcacactcatgatctagaagcacatatgacccttttaaattcaccaactgagtgtcaagatgagtcattctcatacctaatgcataattggtggggaaattggcatgactcatcatctcttgctcaaagagtatat

SEQ ID NO: 82608 - DNA, 1964 bp, Glycine max
  Clone ID: PAT_MRT3847_45612C.1
gctcccacgcgtccgtcccgagaaacgggtcaaggacgggagagaaaaacgaagagtgagtcaccgttccgtgttcccgccgagtcggtataaacgagtgagcgagtcacaactcaccgcgctgcatggaccctctagaagctttggtcgcccaaatccaagggctttcgagcactcccggcgacctcactcgcctccacagtgttctgaagcaagccgatgactcgctccgatccgagtcaactcgcctcgctccgattctcacccagctcgacccctccattcattccctcgggtttctctacatcctagaagcttcaatgaccgatccggtaaccaaaacgcaggctgagaccgtcgttccgatcgttactaggtttattggcgcttgcagcccggagcagattcgcttagcgcctgataaatttttatctgtctgtaagaggttaaaggatcaagtgatgctgctggaagctccgatacggggtgtggctcctttgttcactgctcttcggaaacttcaggtctccacagaacacttgactccactacactcagagtttcttctgctgtgcttgttggcaaagtgctacaaaactggtctatccattttggatgatgatgtttttgaagtagaccaaccacgagacctttttctctactgttattatggaggtatgatatgcattggacagaagcactttcagaaggcattggacctcctgcataatgttgtaactgctcccatgtctaccataaatgctatagctgttgaagcttacaaaaagtatatattggtttctctcattcgtcatggacagttctcaaccagtcttcctaagtattcttcttcgactgctcaaaggaacctgaagaacttttgtcagccttacgtcgaattggctaatagttatggcactggacaaattgaagaactagaggcatatgccagggcaaatgcagagaagtttgaatctgacaacaaccttggactggttaatcaggttgtatcatccatgtataagcggaatattcagagattgacccagacatacttgaccctttctctccatgatatagccagcacagtgcagttaaatagccccaaagaagctgaaatgcatgtgctacaaatgattcaggatggcgaaatatatgcaactatcaaccagaaggatggaatggtgagattcttggaggatcctgaacagtataaaacctgtgaaatgattgaacatattgattcatcaatccaaagaataatggcactctcaaggaaacttactgcgacagacgaacaaatttcatgcgatcagttgtatttgtctaaggctggaagagagagacaaagatatgactttgatgactttgacgttccacaaaagttcaacatttaaggggctaggaatgatggaagtagatctggttatggtccatcacccgtttcctttatcttttgttattcctggttctgagagtgggggagtgttttatttcagtcccaaatggaagagtgcttgttctgaggatgttgaattgtctcaacttattaactatataaaatctataactgattctttgcacatttaattatgtatgctctattgaccaagcatagtgcagtaatgttgaggtctcaaggaaaatatcctctgttctcgttttacgttgaaacgatcggagtttacttatcccatgtttggtttaatgtttcaccatagtggatccgcttcactttaaaagcagcacagtatgctcgacttggacgtccatccatacacgtacttaaatcccgtggcatgaagctagcagctttggcgattgatggagcatttctgaagtaaataatgaacgttcataagttttttatttttttgaaaataaagttatcgtgtaacattaaattttagttcttatacttgaggttaattttcaatttaattcttataaaaaattattagtgt

SEQ ID NO: 82609 - DNA, 295 bp, Glycine max
  unsure (1)..(295): unsure at all n locations
  Clone ID: PAT_MRT3847_45613C.1
ttcanaatgccgttcctcagcgtcttngcgttccgcggggctcgctggctncttcgcactcctttgtactgggcccggctactacgaaagccacgagcatcaacttgccttcatanccactcgcggtcaaacatccatacctctcgacatgggtgccagaaaaccagctgggcgatatcgcaactgcgaggccacaattctgggctggccaaaacttgtcatggccggtggtggctcgtatcgatggctctgcttatgctctctttggagtgccgaatcccattaatggnctcga

SEQ ID NO: 82610 - DNA, 284 bp, Glycine max
  Clone ID: PAT_MRT3847_45614C.1
caaaataataaaataatcaatgaattgctagatcatgttatgcatattgatgataaagagttgcgcaaatccatgcatgcattgcatgacttaaagccatttactgttcatcatatgatatgaatcggtggctggctgaattgtatctaattgtgtgattagagttgcaaatagtgtgactctaacaactaggaatttggggtaaactgcatgacagcaacctgtaatttccatttgataatattaaccaagtacagaacaagcatttgatttcttcgacaatc

SEQ ID NO: 82611 - DNA, 264 bp, Glycine max
  Clone ID: PAT_MRT3847_45615C.1
tcttcccccaggcgtgagaaggctacggaagggcggcacacagtgatacaaagcccaacgcaaatccctactttagtcttgcaggcgaagagatggccaccgatcagggcatctcgtgtgggagatcttcaagaaaaacaattccttcttggtcaagcggtttgctaggggcacccatagcagccaattcaccgaaagagcaacaatccatacaacctcaattcgctcaaagactctggcttggcaaacaagaaaactgctact

SEQ ID NO: 82612 - DNA, 885 bp, Glycine max
  Clone ID: PAT_MRT3847_45616C.1
ccacgcgtccggaacttttgtcagccttatgtcgaattggcaaatagttatggcactggcaaaattgcagaactagaggcatatgtcaaggcaaacgcagaaaagtttgaatctgacaacaaccttggactggttaagcaggttgtatcatccatgtataagcggaacattcagagattgacccagacatacttgaccctttctctccaagatatagccaacacagtgcagttaaatagccccaaagaagctgaaatgcatgtgctacaaatgattcaggatggcgagatatacgcaactatcaaccagaaggacggaatggttagattcttggaggatcctgaacagtataaaacctgtgaaatgattgaacatattgattcatcaattcaaagaataatggctctctcaaggaaacttactgcaacggatgaacaaatttcatgtgatcagttgtatttgtctaaggctggaagagagagacaaagatatgactttgatgatttcgatgttccacaaaagttcaacgtttaaggggctatgaatgatggaagtaaatctggttagggtccattacccgattcctttatcttttgttatccctggttctgagagggggagtattttatttcactcccaaatggaagagtgcttgttctgtcgtgaactagctcagagaatgttgaattgtctctactttattaactacataaaatctatagcacattctttgcacatgtaatcatgtatgctctattgaccaagcataatgcagtaatgttgaggtctcaaggaaaatatcctctgttctcgttatacgttgaaacgtcggagtttacttatattgtatgtttggtttaacatgtcccccccaaacccaaagaa

SEQ ID NO: 82613 - DNA, 614 bp, Glycine max
  unsure (1)..(614): unsure at all n locations
  Clone ID: PAT_MRT3847_45617C.1
cgtccgcgggaataaaaacgaagaagagcgagtcactgttccgtgttcccactgagtcggtatcaacgagtgaccgagtcgaaaagcgagtcaccactccccgcgctgcatggaccctctcgaagctttggtcgcccaaatccaagggctatcgagctctcccggcgacctcactcgcctccacactgttctaaagcaagccgatgactcgcttcgatccgagtcaactcgcctcgctccgattctcacacagctcgacccctccattcactccctcgggtttctctacatcctagaagcttccatgaccggtccggttaccaaaacgcaggctgaggtcgtcgttccgatcgttactaggtttatcggcgcttgcagcacggagcagattcgtttggcgcctgataaatttttatctgtctgtaagaggttgaaggatcaagtgatgctgttggaagctccaatacggggcgtggctcccttgttcaatgctcttcggaaacttcaggcctccgcagaacacttgactccgctacactcagagtttcttcttctgtgcttgttagcanagtgctacaaaactggtctatccatattggatgatgatgtttttg

SEQ ID NO: 82614 - DNA, 568 bp, Glycine max
  Clone ID: PAT_MRT3847_45618C.1
accccgcgcttaccttcacgcgtgacggcaacggctccgcaaggggtttagggggctttttccgccctacgagggatactccaccctcctcacctattggtgggccaaggccacctactgataatgggcacccggacgcctagagcgcgcgcaaatgctaacgcaagctctaacccatacgcggccatgaattatttaccactcggctattcaggcccaatcactatccctccggtcgctatcacccaaggcgcgagccaccgtgtcctcgcgtgctatggccacgctctatggccacactgccattatcctggtgccactatcctggataggaacggtctactcgcaactacattcccagattggaggctgatcattacaccagctgttgaagggcccttgactgagcaaagatgatactacgctggatggtcactaacctacgccacctgatcatgttcactgacgcacatgcttccacccttgacttctgtgatggcaccgctacccccgatggccaagagactaatcgagcaagtggcctccctggcacagatcgtgtgcacac

SEQ ID NO: 82615 - DNA, 305 bp, Glycine max
  Clone ID: PAT_MRT3847_45619C.1
tgtatgaatgaaacttgattacattttaattttcatgtacagacaagacatctgatcgaaatgatgaatacaaattttgccagcataaaaagtcgttgctaaatcttatatgtataattacatgcaccttaatccaacgccttcttaactttggtcttgaacagtagtatatataaattttccatagaaaaataaagaaaacaccccgttgagtgtgtcacgaatgaaccaaaatttgagcctacaatgcaatgccagaccggaccatacgctttgtcaaattccttctttatggtatgagcgat

SEQ ID NO: 82616 - DNA, 627 bp, Glycine max
  unsure (1)..(627): unsure at all n locations
  Clone ID: PAT_MRT3847_4561C.1
attgttgatttatgaacagtcaaggtcgaagtgacaatatgcacatcttggcaattatttgacatccactagtatgctaaggagggagagagtttctctcaagttgtcttaacagaaaaataaaataaaataacaaaagcaatcagttagacatgttgaaagcactattccatagtgattgcacagttccatgatacataggcaatggactctcttctgatgactccaagttaggtaatctgctgatattagaagagcaaaagtaagagttattggtgttttcattatcataaatccctccaactccatcattgccctcatgtggatatttcaattcaacttcttcagcttcttcactagaagagttcagatttatctgcatcagttctctaaacactgaggattttaggagaagtcctaatgctgttggggaagatggcttgttgcatggactcaaagggttcatgtacttggaaaagtctcgcttcttggtactgtccaatttacctgnnnggaatgaattcttnntggagttggatacctcaatnntccctcttgcttgcatggagttagnnnnngcaaannnnngagcatcagtnctnnncntttgatcatgannngcagtag

SEQ ID NO: 82617 - DNA, 612 bp, Glycine max
  Clone ID: PAT_MRT3847_45620C.1
aaaaaccaaaacttttcttgaataaatgaaaattctcatttacacacacaccttgacaatataacacaaacaaacgatggttatttgtattgcaggaagtacgaaccgtacccggggaaggcattcaaaaaattcatgacgagctccgatggcaaaactagtcctcgtatcagcacatgggggtacttgtctatcaaggacaacaatacattttgttcattaacgtccactaattgacctaattccagctccagttcctgatcttcatcatcccccttttcaatagctgaaccattttccaatgcctcagcagctttagcatacctattaaaaaattcttcttctgtttcttcgtattcatcacttccagaatcctcatcataatcatcgttggcactggcctcatcctcggcctcatcatcttcattttcatcattatcagatccttgttcatcttctttcccatcatgggcttctttcaattgaacggatacctccaacagtgaagtaaagcagttttgaatttcattgcctgagttcccttgtttgagaagttgctcaatcaatcgggccaatgtcatcacaattaacttcatctcagcctctgccgtc

SEQ ID NO: 82618 - DNA, 308 bp, Glycine max
  Clone ID: PAT_MRT3847_45621C.1
accacgcgtccggcttctatttctcacgcaaccgtatgctttcatcaatggctacactcgacctatctgcgttgcaagctctaacctgccatcgcttatcctttgcttttccccaaagcggatgaaccacacagagaaactctaacccaaacttggaaaacttggatggaagaatacataataaggagtgaacaagttccacctggcactgaatccggaaatgccacttgggtcatgcagccacctacacagaagcctgatcttcgattaacgcccgatcaccacatgctattgaccgtgcctcttga

SEQ ID NO: 82619 - DNA, 216 bp, Glycine max
  unsure (1)..(216): unsure at all n locations
  Clone ID: PAT_MRT3847_45622C.1
atcngtacggctgcgagaagacgacagaagggggggctaatggggatgtttttttgttcaatacgaacaacaagacacaaggtagatgtgcggtcaggtcatacggtggcagcaacgacaaacccaagcggataagcacagacattcgcggttctgcggtccaggaggatgacaaggaccatgcgcctagggacagagatgcacaagcccctaccc

SEQ ID NO: 82620 - DNA, 426 bp, Glycine max
  Clone ID: PAT_MRT3847_45623C.1
cctgtattgtttttttttgcaaatcacgctctcatttttcttgtctttactaattgtccattttttgaataaaccacaccagatttgcacgccacccctgcgcaagtaaaattctcaaaactggccaaagtcacaagagaacaatcaaaaaccaaaagggccacacttacaaacacctgcttcacaaaccaaaatgtatttgaaaaagaaaaggcaattgaaggaaccaacattcaagattttgaaacagaggcaactgatgttgctgctgctgaggctgcggctgcccgtttgactgaggcagactcagccagatgaatatagccccctttctccttaaaaagctgggagaagtgctgcttgaaatacaaaaagccctcgggctctgaataaaacgagggcgaggggggacatccaccatgtgaa

SEQ ID NO: 82621 - DNA, 108 bp, Glycine max
  Clone ID: PAT_MRT3847_45624C.1
cacaaacgtaaacaaaaaccctttagctgtttatctacagtgttatccataggctggcttctcttgggcgatggctgttgtctctggccattgcttgctgcggaaaca

SEQ ID NO: 82622 - DNA, 629 bp, Glycine max
  Clone ID: PAT_MRT3847_45625C.1
gaacaaaattctctttgtaatttccacatctctatacagtttgcatattaaatctatattcttcccagcatgccactgaatgatcgaatgaggttttttcaatattttaaaaacactatataaaacaaaaaccatcacaaacttcttggaggccagtaaccttaagttcaccctcagaccatgttttcgcatgcaacccagagaagcagcacccaagaagagaaaccaagaaccaatggtacataagaagaccttcagggctttgtaaggtccccatatgtgggcagcaacatcagccgatacctccacataagagactgtagagcttacttgattgctttctgcctgattcagtccaagactctcattcaaccaatcagacaaccgaatgagaatttttgcaagccatgcaatttcatcattggaaatgggacgtctcatccagtcgcctttgtatttaacatctgcaaatgcataattgccagctcctcttctaggcttgaatatctcatcacgggattgttgatgtggcattggttcagtacaggttgataatgactgtataatagcgtgtccatcaaataaacaccctaattttgccctcaatgaatctatacatcgaaggctgg

SEQ ID NO: 82623 - DNA, 1049 bp, Glycine max
  Clone ID: PAT_MRT3847_45626C.1
gaaaaaaaaattcatatataggaaacatatatatcaagtgagaattctttctattttgaaaaatgagaactatacatgtatttgtgtttaatacatttgacaaatgcgctctctacacatacatcttaattcagatcattcaaggaaacaatggagtggacgacagaaggggtttatttaatttgttgcaatttaagaaacaatgcaggaatatttggaacccctttcaagctttctgaggacaatattgaactgcaatttgccacaaatcacatgggtcattttcttttaacaaatctgttgttggatactataaagagaacaacgcatgaaagtaagaaagaaggaagaattgttaatatctcctctagtggtcatcaatggctcaactatcgtggaggaatcctttttgataaaattaacgatgaatccagttatcagaaattctgcgcgcatggacaatcaaagcttgctaacattttacatgcgaatgaactagcaagacgtcttaaggaagaaggggtaaatattactgctaattctcttcatccaggagccattgccaccaatattcatcgttacaacagaatattgactggaattccaggtgtagttaagaggttgttgaatcttgtaattaaaaatgtccagcagggagcggcaacgacatgttatgtagcattgcacccagaagtgagaggaattagtggtgagtattttgcagataataaaattgccaaagcaaactcactaggaagggacattgatttggctaagaaactatgggatttcagcatgaatctgatcaaagtagaatacttggtgccaattgtcgatgctgatggcatacttagagaatgagaaacatcaatgatattatgacagttaaaattgcattattttactacttttagttaaataattcctatctttctaggatttcaagtttacaatgtggtgttccggcatttatatgttatgtgtacatgtacttacatgaaacactatttttattttttaaaggcagtgaaagacttattttagtttgc

SEQ ID NO: 82624 - DNA, 781 bp, Glycine max
  Clone ID: PAT_MRT3847_45627C.1
cccgcgtccggttcgcgtcttcttcatacccttctcaaaatccaaaccccaattcatgtacgatgtgttcatcaatttcaggggagaagacacccgtaagaagttcgtttgtcatatctataaggccctctcaaatgctggaatcaacactttcattgacgaggagaacatacaaaagggaatgacgctggatgaactaatgacagcaatagaagggtctcagatagcaatagttgttttctccaaaacctatactgaatctacctggtgtcttcgtgagcttcaaaaaatcattgaatgccacgaaaattatgggcaaagagtcgtgcccgtattttaccatattgacccatcccatatacgtcatcaggagggtgattttggaagtgcgttgaatgcagttgcagaaagaagacattcaggagaagatctgaaatctgccttgtccaattggaagcgcgtactaaaaaaagctacagatttctctggttggaatgagagggatttcaggaatgatgctgaactagtgaaggaaattgttaacgatgttcttactaaactggagtacgaagtcttgcctattactcgattccctgttggattagagtcccaggtgcaagaagtgattagatttattgaaacaaccacatattcttgtatcatagggatatggggaatgggaggatcgggtaaaactaccacagccaaagccatctacaatcaaattcatcgttcattcatggataaaagtttcattgaggatattagagaagcttgtaaa

SEQ ID NO: 82625 - DNA, 172 bp, Glycine max
  Clone ID: PAT_MRT3847_45628C.1
attggttgaagattgcgatgttctattcccagcatctcttggcggtgtcatcaatacggaaaatgcacatgaaatcaacgccaaatttattgtggaagcacctcatcacccaactgacccacatgctgatgagattttgaagaataaaggggaagagatcctcccagactta

SEQ ID NO: 82626 - DNA, 300 bp, Glycine max
  Clone ID: PAT_MRT3847_45629C.1
tagaacagaaggtggacgatcttactagtttatgcttcataatttagtaacgaacaagcaaaactaaactactactaactagcaaggaagatgttgaccgtaaatgtgcgagctgtaccacataaaaccgggggcacagtgtgtaaatgaggactaactacaaacaaacacaagaagtggcgggaattaaaccccaaacgacccaaacgcgagtgtactccacgcttcaaatgcttcacttgacaatttacaatgcacattactctctgtgtatctcttcaaagggttggaacaaaaacc

SEQ ID NO: 82627 - DNA, 350 bp, Glycine max
  Clone ID: PAT_MRT3847_4562C.1
aaaaaacaaacaaacctcaaacctttttactttttggaagttaaaatcatataggggattgaaaaccggggccttttttatacaaacataaacaacttttggcttggcccaaatataggaaccttggtccctttggggggggggggcatttaatgggacaactttttttccccacccggggggcccccccttttttttaggttaaaaatggtcgggcttttttgaccaggatttactccctaaccttggcggggggaaaatacccctgatgtaacaagattgggggaaacaatcctctgataagtttttatttcccccccaattggtcccccgggtacaaaaccgggggg

SEQ ID NO: 82628 - DNA, 197 bp, Glycine max
  Clone ID: PAT_MRT3847_45630C.1
ccacgcgttctaacagctgctagaagtctactatatggtactgctacaatattacgacgcagggtttctgttgaaagatgacaacatattgtgaatcacataccttatttaacactcatatccatatcctctttccttcaaaggaaaccatttctccttctatcttgtattccaactcttctatatttatctcactt

SEQ ID NO: 82629 - DNA, 296 bp, Glycine max
  Clone ID: PAT_MRT3847_45631C.1
gctcggatatcggatcgaggatattttagtcataaaatgaattgaattgcgatcgttaaacatggaaaccactttataattggatggaaattatccttagcagataattgtataattttgaatttgtagagaaagagaaaaaatggaaaagtatagaaggtgacagacgcagaagagagatctgggagaagcagaagtgaagatgatgtccggaaaatatacgtcgattgacacgcgcagcttcagggatctgttcctgcagttcaagattcacgtcccgacaccgtcaatttcgc

SEQ ID NO: 82630 - DNA, 422 bp, Glycine max
  Clone ID: PAT_MRT3847_45632C.1
tattttttttttttttttttttttttttttttttttttttttttttttttttggggaccacaacccttccaccttttaaaaacaaagggaccagttccacccttgaaaggggatttggaaaaaaaccccagggagggaaacccttttttttaaaaaatttccaaaaaatttaattattccccatttttttttttttttttatttttcccccttttagtattcagggggggaaagtttatttacagtttaaatattttttgggggggttgacccttttggccagtcaaatttaccctttgggacatatttttttgattgtgggaaaattttttttaacatttgctggggtataggaccaagcaccttttcaataatagccagatgctttaaattttaatgagtcggaaacaaagcttcaccag

SEQ ID NO: 82631 - DNA, 280 bp, Glycine max
  Clone ID: PAT_MRT3847_45633C.1
agccccatctcggcgctatcattctaacctacaaaatgttctgccaccatcgacgctctcaacctgcatgcggcatactttccggtcgcagtgacagccgtggcagcagtggtggcaacaccgctcagccagatgcagcttacgtagtcggtcacggaccacttcctgacgcagctactctctgcgcacagtcttctcagcagcagtaacagcaaaccgctgccgtttaggaagaagaacaggggtcaggacgatcgggggaatggtcaggaaagaacac

SEQ ID NO: 82632 - DNA, 507 bp, Glycine max
  Clone ID: PAT_MRT3847_45634C.1
caacttctaaatcatgaccgtcctttgtgcatgtctcaagatgaggatgtcgtgttgctgacaagttatgcaggtgcaagatttgttctgtataatcggagatataatagatcagaacgtatggaacatttcaaaaacaaattttccttttactgttatgattatgttcaaagcttggtttcaccacatcgaaattaagctaactatcctgaatttctgctatcgaatttacgtaaatcatgtgagtggtttcagaactttgccattgaatgtaatgacatgacatggcgcgaataatatctgtggttacttaatttgattaatttgttggataattctattagcaattgctaatggttgatttttttttttgaattttacagtatatggattggagattatttatcgttctgaagaatcatctccaattctaactctacttattgcttaccgtcatcatcatacttggaatttatagttataatataattgaatgtttgtttaaaa

SEQ ID NO: 82633 - DNA, 230 bp, Glycine max
  Clone ID: PAT_MRT3847_45635C.1
tgttttttcccacggcacaagaagctgagatggtaaacgctataataacatgttcgcactttacccggaatttgattatcacacagaccccaacggtaggaatttttcattcgatctcctggaggtttatttggtcatctaatacaagggctatcttaggtatatcttcatagcaaggcctccccaaagctacggctggcagtaggcattagttcacggatttgtttacc

SEQ ID NO: 82634 - DNA, 922 bp, Glycine max
  Clone ID: PAT_MRT3847_45636C.1
ttttcccttctctctcctctctgcctagagagtagcatagcatattgagagaaacttcttttttctctatttcgtttctgcctcctccaaaccataacttagctgttatcataagaggatcaataaaccccccaccataagagaaatcaaacccaaaagtaaatcaaccagagtcatggggggtggaggaggtgcaattggggtgagaggcctcgatgaagatgatgatgatgatgttggaaagaatgaagaagaaaacaagtggccaccatggcttgggccacttctccaaacaagcttctttgttcaatgcaaagtccatgcagattcccacaaaagtgaatgcaacatgtattgcttggactgtatgaatggagccctttgctctacctgtcttgcttctcacagagaacacagagctattcagattaggagatcttcataccatgatgtaataagagtgtcggagatacagaaatttctggacataacaggggtccaaacttacattataaacagtgccaagattgtgttcttgaatgaaaggcctcaacctaggcctggcaaaggagttaccaacacctgccaagtctgtgagcgcagccttctcgattcattcagcttctgttcccttggttgtaagatagtaggaacctccaagaagttccggaagaagaaaatgttagctgagacagatgggtccgatggtgaagaatcaataaatggcattagcaatgaaagtggaagaaacaaaatccatagcttcacgccgtcaacaccaccaccaacaggtaaagcttagttactaataattaattaattctctttgggggatctaatgcataactcaatttgatgcaattctgtgggcattcgaaccctcaaaaagccatacttaatgatttggatgcctgtaatctga

SEQ ID NO: 82635 - DNA, 268 bp, Glycine max
  unsure (1)..(268): unsure at all n locations
  Clone ID: PAT_MRT3847_45637C.1
ctgtccaaacagcagggtgtatgggtcggggactccatacatttgtattttctttaggaaaacgngagacttccttgtggcactggaaggagacacaatacatttaatctcaagcgtaggcttatcgaaaatgaaagtggcgaatgactagcctgatgcgaacgtttgtgaaacttatgacaggacgacaacgtcctctattatgtacatatgcgacaaagccatgggctttgcgcattctggaacgatatccagaaggatagaagac

SEQ ID NO: 82636 - DNA, 1247 bp, Glycine max
  Clone ID: PAT_MRT3847_45638C.1
cttccaagagagtagcatatcatagcatattgagaaaattttctttttctcttttttgtttctgcctgttatcataaagaggatcaataaccccctaccataagagaaatcaaacccaaaagtacatcaacaagaatcatggggggtggaggaggtgcaattggggtgagaggtctcaatgaagatgatgatgatattggaaagattgaagaagaaaacaagtggccaccatggcttaggccacttctccaaacaagcttttttgttcaatgcaaagtccatgcagattcccacaaaagtgaatgcaatatgtattgcttagattgtatgaatggagccctttgctctgcctgtcttgcttcccacagagaacacagagctattcagataagaagatcttcataccatgatgtgataagggtgtcagagatacaaaagtttctggacatagcaggggtccaaacttacattataaacagtgccaagattgtgttcttgaatgaaaggcctcaacctaggcctggcaaaggagtcaccaacacctgccaagtttgtgagcgcaaccttcttgattcattcagcttctgttcccttggttgtaagatagttggaacctccaagaagttccggaagaagaaaatgttagctgagacagaggggtccaatggtgaagaatcaataaatggcattagcaatgaaagtggaagaaacaaaatccagagcttcacaccctcaacaccaccgccaacagtggtaaattacaggactgctaagaggagaaagggagtcccacatagagctccaatggggggtgcccttattatagaatactaatgttacaaaattaagtattaatggtagttttatgggtttaggtgacttaccaaaccataattataccctgaaagatacaacagttgtttccagtgccacttccctaagtggcaatatatgccttgtaaaagttacaatacctgagccactgttcactgaggccggtgtagggaaatggttcactatcttgtatagtaggtgtaagaatagcagtaaaatcatacgtattggtatcagatgcgcaatgtacaaagtggcttgtagaaagttgttgtattttacacaataaaagtctttatcatgattattaaaatattccacttggtttggtatatgtccaaaagcacaaaaaacaattgataaaatgtcagattcaaatgggatcaaggagggaacagtcctgccggaggctg

SEQ ID NO: 82637 - DNA, 331 bp, Glycine max
  Clone ID: PAT_MRT3847_45639C.1
ccacgcgtccgttgttctagagacatgatgcgatctccatcttcactcaacttcttttttttctttcccttccttctatttatctattcggcctatggttctttaaaggctaaggatgatctataccacgttatgtgcccgacctatgggcgattcttcttagattctggccaagattagccggttccattatctggaacttacacgtactaggttgatagtgactcgtgatgcagaactgacttgtgactatgatgcaggctatggaggttctctatacttcccaagatgctatcaatgcttcggatgctccacaccagaggataccagt

SEQ ID NO: 82638 - DNA, 522 bp, Glycine max
  Clone ID: PAT_MRT3847_4563C.1
tttggtttcccttgacagcgtaggagtttggaatctcagaacagaaaaccttgattcatggtatcttggtcaagaaacatatgtcagggttgtcaacccagaggtcaataacaagactgagttgcccattccagacaatgcccttttctgtggtgcccttagcaaattgcagaagcctcaaaaggtttcttcagatgcaccatcaatcagtcggaacaaactgaagctgttcttcacttggctcattgtattcgcctggatccacattttccagtaaaaaagagcacattttgggtcatccactctttagttgcttcaaggttatgcttgtggttccatgtttaatttattgggacttgtgattcttttaatgcctataattgatgtagtaatcacaatttaatcatactctcgatacatgtaactttacctgccacgactaccttcctcctgccatctttatatttgttgtgtaatatttgtagcctatcatgcaaggtcaaagatgcgtggaccccgccg

SEQ ID NO: 82639 - DNA, 141 bp, Glycine max
  Clone ID: PAT_MRT3847_45640C.1
gggaaacaatttggttcatttccccccaatttttttacatttaatcggaaatatatggtcggatttcgcttggccagacgtttgtttttaaagcccacatgaactggcaagggtgcttgaacaaaataaggaaaggggccc

SEQ ID NO: 82640 - DNA, 120 bp, Glycine max
  Clone ID: PAT_MRT3847_45641C.1
aagattcaatccctgaatgcctgcatgatcaatttcttgtgatagcatacaatcttgaatattcttataacaagagggtcggggcatctaatttctataatccttacagttttttttata

SEQ ID NO: 82641 - DNA, 247 bp, Glycine max
  Clone ID: PAT_MRT3847_45642C.1
attaaatcagctgggagtggtcgaggtcagttggaaattacttatttgaatgaagatttacggtaagtcagtgattacagaatttaccgtccctgtctcacatgccaaccaggcaaccacaacatataagtatacacaaaatcaaaataataattgttcatgcacttacaaggcaggggttaataattccatattacctctatttcctcttgatattctgtcaggctcaggcagttctagatcgcga

SEQ ID NO: 82642 - DNA, 419 bp, Glycine max
  Clone ID: PAT_MRT3847_45643C.1
ctgattcatcacaatcttatccacatacccatccagatctctctatccttgtccaccaaaaaattcctcaaccggctcatgatcaagtcgcgcttggacaagcgatctatcaagatatcagctgatccacatgggcaaggatcgcaatacatgcgtcactctctagtgctactcacgtggcagattgcgtgtgacactgcttagcgatgaagcctgacgaaacagtgctcatcgttagacagcattcgagagagctctcctctgcaggctcctaatagaagagctcatacgcaaggtcaacatgccttctaatggttctgatatcacatgtgatgaccaaaacaaccttgggccacctgcataagctcagattgcacgaatggcaccggttctatcatataggaagaacactctacaac

SEQ ID NO: 82643 - DNA, 407 bp, Glycine max
  Clone ID: PAT_MRT3847_45644C.1
caccggatttttattcacagcataggcctaaccacactccgaaggctctccttcctgacccggatagccttacactgataaactatcttattaacctggaggcaccgatgcactatattctccggccctttcaccttaggactgtttcatgtggatggatccggaccaaactcactagatgagcaaaatggtcatcgctaatggacatggcgcaacataaccatacgtggatggagggatcgcctatgatgaaaaccccattcatcccaaagaggattctagcagggttatccaaatgggacatgatgctaatcatctaacttgtgatgtggttgaagatcgcatactgaataacccagaggccttcttttgcacaccacaatgaataaatgatcccaaggccatag

SEQ ID NO: 82644 - DNA, 706 bp, Glycine max
  Clone ID: PAT_MRT3847_45645C.1
ttctcttttttttttttttttttttttttttttttttttttttttttttttttttttttttttttttcccccataaaggctgaaaaaacttaatttggcagaacaaaaacagtcccacaggaattttttggaagataaactaaaaatcaaaatcctacaattttttgaaagggaaaaaaataaaaaaaagtggggcggaaaaacaaaaccccattgggaaataaaaatattctgatcatgggagaaagaaacatttaattataaacaccccaatggcatcagctccttaaacttaaaaactaaaaaaaatcaccggcccagaaaaaaaatacggaggcccttatggggaatctagggccccatgtggggcgcaaatccaccaccattttgcccttttccggacccaccctgccctatcggcggattctgattctgattcggataccccacctgaaaccccacctgattcccatttcctccaacaacaccgggacttatattcggtggagcactgaaaccaccctgcaccgaagcccctgaaaaaggcacaccagggttaactgcagcactcgttccaatactccccaacaaattggtaagccccaacgtcccctgggatgccagcagcgcggtcaacgcctgcgccattgccggattaagtgcggcctgcgcagcagcagcagactgattaaacccattccccggc

SEQ ID NO: 82645 - DNA, 464 bp, Glycine max
  Clone ID: PAT_MRT3847_45646C.1
ataccttataatataattatcggaaaaaaatacttaattaggattttacaaaaaagaaatacttctaaacctttatacagttatttggcatctaaacaaaaacatgttactctctctatccaacaagaaaaatgtctcaagcaagaatcacgtgcttgcaaatcgtattccctattattccatcatctcctaaacgatgatgtttgtagtcatgggcgcctctgacggcacaaacgccaacaacataagcaccgccattatgccaacagggaagaagaggagaacaagcggcggcggagggagtgatggcaacattagtggtagcactaccatcaatgctgtcacggaaaccaaaattagaatggacaccactctaaagaatcgaaccatgttttccccagcaggtcggataccgttacattccgaaaatgtgaaaaaagagtgaagacaatcggacgcgtggg

SEQ ID NO: 82646 - DNA, 836 bp, Glycine max
  unsure (1)..(836): unsure at all n locations
  Clone ID: PAT_MRT3847_45647C.1
tcgagcanannatgctaagaaagggttccctttttatggatcttttatnaaagatattgtattcgnnaagttgtggttttttggcgcattatgtggtatcgatcaagcgtcggtggggcggtggtggaaccgccgtcgtttttatcnnggaatggtcggcgttacccggttccaaccagccaggagaagcagaaacaagtggtgtctcgaattgcctttggatcatgctccaaccagagcgctcctcagcccatttgggatgcagtggttgacttccatccccaagtttttatatggctgggagataacatttatggagacttcaaacgccctttcaaaatatttggacaggaaaggactgttgggccgtggaagaatgttccacgatttgttccttcctctgagcaggaaatgaaggctggatatgaaaaagctaagtctaatcctggctatgctcgactccaacagaatgctaaggttattggtacatgggatgatcacgattatggattaaatgatgcagggaaagaatttcatggaaaaataaccaaccaaaagttgcttcttgatttcttggatgaacctcaagatagcccacggcggaaacaggctggtgtatatgcctcatatacgtatggtcctgtaggtagagatatcaagattgtcctcttagataccagatatcacagagaccctgtaggaagtgatggaaccattttggggaattcacaatggttgtggttggagacagagctcaagggtccaccaacagctcttaccataattggatcttctattcaggttatatcaaatctttcagctaccattcatccatt

SEQ ID NO: 82647 - DNA, 495 bp, Glycine max
  Clone ID: PAT_MRT3847_45648C.1
agctcactaggccgccgtttttttttttttttttttttttttttttttttttttttttttttttttttttttttttcgtcataagcatgcttaaaaactacagtttccccttgacctttgggccggcctttaccacttttcgcatatctttaaaagcttggacttttcgatgcttgaatctcgccgggtgggtcttttaacaggtccatttactttaaataccaaacttgatcatataagggccagcaggggaattcgttccgtatccgtcaggccagaccgtaccaaatcctgttcccgggaatttcgctccggcagggagaccactcgtcgaaagcttccattcttgggatttggaatacaagccatcctcaaataattgatgcgggtaatttccccgaagcatcacctttaggcccatcatgggtcgatcccagccgtgacccgttgagcaccgcttggtcaaagcggtgtgagcggtacatgactcgacta

SEQ ID NO: 82648 - DNA, 393 bp, Glycine max
  Clone ID: PAT_MRT3847_45649C.1
gggggagtcatcaagaacgtggagaagaaggatcctactggagcctaggtcatctatggctgcccagaagaagttttgaatcgtgcggtttggttcatcaggggatgtcgtttcttatggttacaatataatgttggtttcttgcccttgcgtcttcgtttctagggagcctgtttttcggacatagtttggagtctccaccatcatcttgcaacttttggtcccagaattggggtcttgatcgacggcggccagacttcctttatcattctggttttaatggggtgtgtttgcgagaacccctgattacattttgttaagcgcaccgagttttatggctttgcccctgcgtagatggtttgctttttaaatgtcaaccttatatatgtgttc

SEQ ID NO: 82649 - DNA, 704 bp, Glycine max
  Clone ID: PAT_MRT3847_4564C.1
atgagtggatatgcattttttgttgtcgggatggatttttggtgatttggtcttgagaaatagcaggggtacatataacaagtgggatggaatagctcgcactacagcacaggtctatcccggagcatggacagcaattttggtttcccttgacaacgtaggagtttggaatctcagaacagaaaaccttgattcatggtatcttggtcaagaaacatatgtcagggttgtcaacccagaggtcaataacaagactgagttgcccattccagacaatgcccttttctgtggtgcccttagcaaattgcagaagcctcaaaaggtttcttcagatgcaccatcaatcagtcggaacaaactgaagctgttcttcacttggctcattgtattcgcctggatccacattttccagtaaaaaagagcacattttgggtcatccactctttagttgcttcaaggtgaactcttgtggcttgttggtgaggttttgtggttttgtaagtcttgtttatagtattattgatcttttgcagtgattttgacttgtattcttcttcctattaggttatgcttgtggttccatgtttaatttattgggacttgtgattcttttaatgcctataattgatgtagtaatcacaatttaatcatactctcgatacatgtaactttacctgccaaaggaaaaaggtggtgtggcggcc

SEQ ID NO: 82650 - DNA, 679 bp, Glycine max
  Clone ID: PAT_MRT3847_45650C.1
cgaacatagcaacgtttcgcttccttctgctgtggatgctcttcctctgctttgcctgtactgcgcgtgcagctcaacgagggccatttgccatgcggattagctgtggagctcgtcagaatgttcaaacaaaaccaaccactaccctttggtataaagactttggatatacaggaggcattcccactaatgcaaagactttttttattgcccctcctctcaagactcttcgttatttccccttgtctgaaggtccttcaaattgctacaacattaatagagtgccaaaggggcactactcaataaggatattttttggacttgttgcacaggctagagctaccgatgaacctctatttgacatctcaattcaaggaactcaaatatattctttgaaatcaggttggaccactcaggatgatcaagcatttactgaagcccaggtatttcttatggatgggttcagtctcaatctgttttcatggcacgggtcacggagatccagcaattctttcaatcgagattcttcaaatcgataataaagcttattatttttggatcgcagtggagtcaagggataatactcagaacagtcaaaagactgaagttggggggtttgggcagccaaagtatggtgtggattatgtgggcagatccccggggaaggcgacagattttg

SEQ ID NO: 82651 - DNA, 198 bp, Glycine max
  unsure (1)..(198): unsure at all n locations
  Clone ID: PAT_MRT3847_45651C.1
cccatggnggccgtcancatcatcgacgtcctccgcngctccggcgccgatgtcaacgtcgcttcttcttcggcaaactcgcgtcaagtctcacgngtcagnnatgccnagctcggntcgagtgcgcacgcttnactgtgttccgagttaaggtataattaggatgaagtctgaggtttagagcagtgagagacgtta

SEQ ID NO: 82652 - DNA, 133 bp, Glycine max
  unsure (1)..(133): unsure at all n locations
  Clone ID: PAT_MRT3847_45652C.1
tgtcgcangcncgcngacggaagctcggaantcggctcgagngcaggttctgntngtaanangnagtcaaaanagcnggaacgactgcaggtactgncttaggnggctctggnnagctcaantnngnggtntg

SEQ ID NO: 82653 - DNA, 263 bp, Glycine max
  Clone ID: PAT_MRT3847_45653C.1
gacgcattaaaaaaaggggtataggcgaaattggctggggaactatccataaccaacaaaaccttaaaatcctacaagattatgtccgtctttcataaaaatgatggtaaatccttcccaccaaacttgaactttccaacttggaaaacccttgaataatccttaaattaaaattcatttaggcagtttgaagcctaaattaatcttgggtttgggtcgccttggcctcaatacccttttaaggccccctaaaccaatcaaaa

SEQ ID NO: 82654 - DNA, 355 bp, Glycine max
  Clone ID: PAT_MRT3847_45654C.1
tttcccgtcatcactgtatgacgtcctccttctttgggggggggggggggaaaacaagtcacgagcgagtagggaaaggtgttttaaatgggcaataacgactgttgttcgtgatgcacaaacttgtggaaaaatcaaggaagtaaggcataacggataagaccaataaacaagggaaataactagagagtgggcggttagcgtaacaagatagttagcgaggaataagcatgaagaagtaaagatatacagtggtacataggaagagtgcagtctgggcggtgtcttatacgatgcagggtgcaccacttgcataaccaaaagtgacccaaatgagacggggttcatattgaaa

SEQ ID NO: 82655 - DNA, 500 bp, Glycine max
  unsure (1)..(500): unsure at all n locations
  Clone ID: PAT_MRT3847_45655C.1
gtctcttccaagtactcatggtcatttgaaagcaggcaaaatagatgaaaagctgtgcgtacacacatgtaatatacaaagcaaaatatagtgccttggttactactaaaatgaaaaaagaaaagaaaagaaaattcgaatgagtcttatttgaagtttatccattctttgtgttttattagcctatgatcacatgaaaggatatgatcgattgattcaccagtaatccccacaagaacagcttccattcttaaaatgatgaaacctacgtaaatcacgaactataatttctctccctgtcacaagtgaaatgtacttagtggtatcatggcaatcaccacaaactctaagattttttctaatgtgtaatgttgtgccagggcttgtattcaaaagtccaaatgcaatagcaagcctttcactatggctactgagcaattgtttcttcacgtcttcttccacatcatgaattgaatcggngtcaggtacataacctgcag

SEQ ID NO: 82656 - DNA, 297 bp, Glycine max
  Clone ID: PAT_MRT3847_45656C.1
aaaaggggagtcgctggcaccgtccattacattagtatgatcgagccacaaacggtcacgccgcaaacttctttgtacatatggcatgaactacatatcatacactacagtgcacgagaggagcccaaaattcatgtgcatacacgagcgacatgttcttataaggggatgataatatggaaccgagtggtgtgtagaatgagaaccagcttgatactataatggaggtgggattggctggctatttgacagtggagatagcattggcctcatggagggggtgtgatcaggctgctg

SEQ ID NO: 82657 - DNA, 463 bp, Glycine max
  Clone ID: PAT_MRT3847_45657C.1
tcggaagcccaaacagggaagagcaaagtggtggagtttgggaacatgcaaacgagggcagtggctatcttggtccacacaatcatcttctttggtctcattaccatctttcttgttgctattggctaaatgcttggaaactggcgagccagtggccattaagaaggttttactggacaaaagatataagaatcgtgagctacagttaatgcacttgatggatcatccaaatgtgatctctctgaagcatcgtttcttttccactacaagtgcagatgaactttttcttaatttgattttcagggggctggcttatatccacactgttcctggaggttgccacaaagatttgaagcctcaaaatatactggttgaccctcttacacaccaggttaagatatgtgattttggaagtgcaaaagtgctggtcaaaggtgaagctaatatatcacatatatgttca

SEQ ID NO: 82658 - DNA, 1128 bp, Glycine max
  Clone ID: PAT_MRT3847_45658C.1
gttcatctgcacttgtagtggaaaagaactttttcttaatttggtgatggaatatgttccagactcgatacatagactctggaacatattccatcaccaaattaagaaaaagttccagagtctatgtatcgagtctcaaagttctatagtaatactaatcagagcatgccacttatttatgtaaaactttacatgcaccagattttcagggggctggcttatatccacactgttcctggaggttgccacaaagatttgaagcctcaaaatatactggttgaccctcttacacaccaggttaagatatgtgattttggaagtgcaaaagtgctggtcaaaggtgaagctaatatatcacatatatgttcacttttctaccgggcaccagaacttatgtttggtgccactgagtatactacttcaattgatatttggtcagctggctgtgtccttgctgagctgcttttgggccaggttactcaaatgaagcaggagcatgacaagaggcaagcaagcctcatagctgaacacaacgaacagctaaagcgtacccaactgcaagctgaaaatgaattgagagagaaaacaatgtttatgaggaatgatcatgaagctcagatcaaagcattgaggtgtgaacttgaagatgagtgtcggaagctggaagaggagttgcatcttcaaaaaatccaaagaagacaggcaaagggctttgttgcagttgcagtggaaagtgatgagtgacaagcctaaagaggaccaagaagtgaattcaaaacaggttgacttgtgtttgaatctatttgtctgtgtctgtcttcaaatggatgccatatttgctcattttcatgttgggttacctttggtagtttggtttgacatattacatttatcatttggtaggcacagttggggaaatgagaagacatttgttgtatacctaaatgtgcttctttaatattctttcaacacaagcctgagaattgtgaacttaaatacatagaagggtgatgcaaataaaggcccactggttcacatatgcatagtcttcatgctaaaattgtcacttatgaaacaggcataatcttgttactgaaggcataactatttactagcatgatattagat

SEQ ID NO: 82659 - DNA, 127 bp, Glycine max
  Clone ID: PAT_MRT3847_45659C.1
ttcgacgaggcttcatgccccaaagtattgcatgcttgaccaactgtctagttcatgttatcctaagacctcctcttaaccacacaaaaccacggattgcctgccactcatacatatttcgcgcaaa

SEQ ID NO: 82660 - DNA, 384 bp, Glycine max
  Clone ID: PAT_MRT3847_4565C.1
atgacaagtaagtttgttggattgttcatgctgcttttgatcaatgtggtcgttgctgaatacgaccatgacctcgatccaacatatccttctgagcatgacaaagatagtctcatgtatcctcttgaacacaagaatgatagttccacatatcctcctaaacacgatgatcataatcccacgtatcctcctgaacacgacgatgatagtcctacatatcctctcaaacacgatgatgataatcctagttgcaaggctctcacaaaggtctgcatcccttgtttgcatgctatcttctcttcatatgccttcgaggaagttgatgttgatccccaaattgctagctatttcgcctaccctcccgagatttctcctattccatga

SEQ ID NO: 82661 - DNA, 689 bp, Glycine max
  Clone ID: PAT_MRT3847_45660C.1
ctcttacacaccatgttaagatatgtgattttggaagtgcaaaagtgctggtcaaaggtgaagctaatatatcacatatatgttcacttttctaccgggcaccagaacttatgtttggtgccactgagtatactacttcaattgatatttggtcagctggctgtgtccttgctgagctgcttttggcccttattacctggcgaaaatgcactggaccagcttgtagagattatcaaggttactcaaatgaagcaggagcatgacaagaggcaagcaagcctcatagctgaacacaacgaacagctaaagcgtacccaactgcaagctgaaaatgaattgagagagaaaacaatgtttatgaggaatgatcatgaagctcagatcaaagcattgaggtgtgaacttgaagatgagtgtcggaagctggaagaggagttgcatcttcaaaaaatccaaagaagacaggcaaagggctttgttgcagttgcagtggaaagtgatgagtgacaagcctaaagaggaccaagaagtgaattcaaaacaggccacgaggttgtaacatatgaaagtccgcgaccgatgatggggattcatcgtttagtgtttgtgttatttcgtcaactgggtagggaaacagtgtatgcaccaggatggcgccagaatttcaacactagagaatttgctgaact

SEQ ID NO: 82662 - DNA, 275 bp, Glycine max
  Clone ID: PAT_MRT3847_45661C.1
aaagatttggcgcgcggacccaccggcccgatccgttccggcctgaccacgtcgcctttcacagttttttacacggtcccactctgtgcaagaatgtgcattttgtttgccccaaactgcaaaccctgttgcgtgtagatcccaagtccaattgggttactggccatggctttccagagccctgcaccgcaaaatgagacctttaaggatgactgcgccagacgagcctatgcgattcgcgctctcacttaccacgttgatcaactttaccgact

SEQ ID NO: 82663 - DNA, 754 bp, Glycine max
  Clone ID: PAT_MRT3847_45662C.1
atttaatttccattcacttggattttttttattctaagatcgatcatcttcaatttccctatattacttgcaatattgattgaacactactagatcatgtgtataacgttgtatagctagctagctagctttctattgtctaatatacctttgtctgtgttgtaaattaaggtgcaagaagcaagtaatccctcataatacacacacacacacacacatatatatatatatatatatatatatatatataatggcggattggggtccagtggtgatagcagtggtgctgtttgtgttgctaagccctggtcttgtgtttcaattgccagggaagagcagagtggtggagtttgggaacatgcaaaccagtgcagtgtctatcttggtccacacaatcatcttctttggtctcattaccatctttcttgttgctattggtgtgcatatctacactggctagccttatcgccctcactcctttaaatctttaattattctattctttttggttaaagttttagtaatttttatcttgttattcttttctgatttggtgactgtattctcccatttctcatgtcctcgtcgaataataactctacttctctttagtctttgagattccaagattaggacaactttggtttgtatagaatcatagaatggaataacttgcacgtactgcacacactgatatcacatcatatggcttaatgttttatgctttgatgaattcattttcttttcatacttg

SEQ ID NO: 82664 - DNA, 2044 bp, Glycine max
  Clone ID: PAT_MRT3847_45663C.1
gtaaaattgaaaagcagttagatacttcgttcatcacggcggtggacaggtacattaccaccagtagctataaaggccaagtcttcaaaatctcatctttttctccacttttttatccaatcccatcccattaacgtcctcttacctcatgtcagatcacaaccacgagatatccacttccgctgatgatggtaatgattctctgaatggtcacatcatatctactacagttggaggaaaaaatgggaagcccaaacagactaaaagttatatagcagaacgcattgtggggactgggtcatttggaattgtcttcctggctaaatgcttggaaactggcgagccagtggccattaagaaggttttacaggacaaaagatataaaaatcgtgagctacagttaatgcgcttgatggaccatccaaatgtgatctctctgaagcatcgtttcttttccactacaagtgcagatgaactttttcttaatttggtgatggaatatgttccagagtctatgtatcgagtctcaaagttctatagtaatactaatcagagcatgccacttatctatgtaaaactttacatgcaccagattttcagtgggctggcttatatccacactgttcctggagtttgccacagagatttgaagcctcaaaatatactggttgaccctcttacacaccaggttaagatatgtgattttgggagtgcaaaagtgctggtcaaaggaaaagctaatatatcacacatatgttcacttttctatcgggcaccggaacttatgtttggtgccactgagtatactacttcaattgatatttggtcagctggctgtgtccttgctgagctgcttttgggccagtggaccagcttgtagagattatcaaggttcttggcacacccgctcaggaggaagtttcctgtacgaatccaaactacaatgatttcaagtttccacagatattccatgaaaaaatgcctccagaagcaatagatcttgcttcccggcttctgcagtattccccaagtcttcgatgtactgcgctagaagcatgtgctcacccattctttgatgaactccgtgaacccaatgctcacttgccagatggtcgtccatttccccctctattcaacttaaaacaagagttatctggagcatctccagaacttattgataagttgatacctgaccatgtgaagcggcagatagggctacaacatgcccatttggctggatttctggaacatgatgttaagctcggcaaattgtagtctaatggagatgagttaaaagaggggtaccatcttattgtctaaattacaagtcattataccatggcagtgtaattctgtgcttgactaggaccaagacttgggttctggattgctgcagttgatccatcactccagcaagcatctatatagcttgggtactacaaaattaaagccatagacatactgggtatgtactcgtaactgggtacatacctgtacctagtacatgttgggtatccatgggtgcataccatacttatttttcaaaaataaattaagtactgaatatgggtacaccttggtactctttgggtatgtacgtcctgtatttatggtggatcatgtatggtgctacaattcccaaacatcttctatccattccatgaaaaggaaataggctcaaccctaagagtgtgatttgctttttatacttacaaatccttcgtctcctctcaggaattaagaattataatgaagatggaagcaaaaatgtaagaagggctcgatgttcttgaagttgttactttttctgtcttgatgaaaccaggtttagaggttgctctatgaacaaaaaaataataagtttaacattgttaaagtgagatattcatagttacgtttaagttttatcatgttgattgttgaacaatataatcctattacgagttgtctcattgaacattttattctccttttatgttatatattatactctcttctttttttgtcctgaaaaaaaaaaaaaaaaaactcgagactagttctc

SEQ ID NO: 82665 - DNA, 2440 bp, Glycine max
  Clone ID: PAT_MRT3847_45664C.1
gaaggtagtacttgatgcactactatttgccagtacaagctctcacaggcttgacatgtttgctctttgtttatttctgcatgtattaaacaactcttgttgactttggtatcagtatttggtatcagtattttaaaaatagaacacagtcctatcatataactaattaacatggtctaaacagtctcaatatatttaacatgctttccatctcacaattgtgtagttatttaacgagttgttgttgatgcaattttactctgtgtgaccatggtttcaaaggacccagatatgaactgtatcagtgtattcattgatatgattgtcactgagttccttcccaatgtttgaattagtttctcaacgattttaataaaaaaaagttgctttatgacattaaatcttttggatatatacttttagtcaaaatcaatatagtttctccctccattcctataaatatatattttatgaacatgcttgaatcatagacaatagaaattgccattgcactcaccaagtatgcagttggcttcatatttgaattttcagtctgtgcattttctaattttgccccatttactagtttcagaccatgtttacaaagcttcacgagaacatggtattataattttattttcaatcacatgagttacaaatgtatctgcgtgcaaaaaagattgaatgttccttgaagatactaaataatacaattttatcaagcagaaccaagttatatttttaagtgtatcgttacctatcattgcattctattacaaatattctatcattgcattctattacatgggattataagtgttctgatttgtctttagttatatttttaattacttaatgttctaattaattgaaaaaaccattttttaaataaagttgctttctgattagtatttgttagagatgcaatataaagtcattcatgtatcgttacctagcagcttgagctttttggatagtttgttaatgacatggtatgaaattctctgactatgtggtctagagttcaatcctttatactcttattcttctaataaaacgttaaatttcaaccaaggtagatcatatgtggacttgtgcattatccacacttaatgtccaaaaggctcttgcatgagaggcatgttaaagatgtaaaataaaatcattcatgtatcttcacctatgaacttaagctttttggataatttgttcttgatagtaataattagtaaaatcaaatctgttatttaaatgtatcaaaatttacatgtgaaaatttaaattggtctaagttcattatagtttgtctttgactattatagtcctttatacctttctttaaatgggtatgtactaagttgtggggatgttatcgcatcatcactttccttttttatgaaatttcattaacattaagtttaaaaacttccagccactaggtcacttgatttttcctgctcaatttataggttactcaaatgaagcaggagcatgacaagaggcaagcaagcctcatagctgaacacaacgaacagctaaagcgtacccaactgcaagctgaaaatgaattgagagaggtgccacacacgtatgtttgtcaaagccaaaatttttatagaaatttattcacctgttcatatcttaattgtatgtagaaaacaatgtttatgaggaatgatcatgaagctcagatcaaagcattgaggtgtgaacttgaagatgagtgtcggaagctggaagaggagttgcatcttcaaaaaatccaaagaagacaggcaaagggctttgttgcagttgcagtggaaagtgatgagtgacaagcctaaagaggaccaagaagtgaattcaaaacaggccacgaggttgtaacatatgaaagtccgcgaccgatgatggggattcatcgtttagtgtttgtgttatttcgtcaactgggtagggaaacagtgtatgcaccaggatggcgccagaatttcaacactagagaatttgctgaactctacaaccttggattgccagttgctgctgtctatttcaacattcagagggaatctggctctggtggaagaaggttataccattgagggttctagaaatatttctcccacactctttagtagtaaatgagtgcttttcaacttaatattaaactgagcatatagtgaaataaattgcttgctagatcagttggtagcaacaagtcctctacatatacacataaatgaaatcgaagcatctcggttcatttttcttatttctattatcagctgcagaatgttatagatatattatatatgtaaagtggaaaacaacttgagcacaagttaaattatggggtacttatacttttgcttattactatccgttttttatacgactagggttctactatatatgtaattgtggtattaacaaatatgatgaaaactttctttaaaaa

SEQ ID NO: 82666 - DNA, 475 bp, Glycine max
  Clone ID: PAT_MRT3847_45665C.1
attggctgtcccacgcgttcttctggctgcgagaggactacagatgggggtgaggattttgacgactttcttcgaagatgacacggaagacgaagcttaaggtggtgctgcgggtacaaagtagagcagaattgagaagaagagccgtatagctatcgggaagctgggactgaaacctgctactggggtaagtagggccacaatcaagagaacaaacaatattatttacttcatctcaaaacccgatgattttaagagtccaagttctgagacctatgtaatatttggggaggcgaacatagaggacttgagctctgagctgcagacacaagttgctaaacagttcaggatgccagatatgggatctgcaacggcaaaacaagaagatgctgttgctgcagatcgcaacctgaagaagaggaggaggttgatgaaactggtgtcgagccccatgacaatgatgtggcgatgacac

SEQ ID NO: 82667 - DNA, 277 bp, Glycine max
  Clone ID: PAT_MRT3847_45666C.1
atacaaaggttcgtcgttccctactcttttccaaataccccaaaccctctaccgcgatttcatcctttacaccataaagatccatcctgtgcgtgggggtgcgacacaccaaaccacatgtacctgtctaatccaacgcagatgatcaccacacccaccacattgagcgtactatagactatgctccttcatgcaccaacttcctcagattcagacacgcataactctatccgctcttattatccacacctccctcctaaaactaatcatccttgta

SEQ ID NO: 82668 - DNA, 172 bp, Glycine max
  Clone ID: PAT_MRT3847_45667C.1
aatcaccaaaaattatgttgatgctgaaagaaaacttgtaacaagttaacactatcactgtaatatttgacattcacaaaatccagcattcttccccttttttttaaacaattgtcctgaaaaaaaaaaaaaagggcggccgctcgcgatctaaaactagtcggacgcgggg

SEQ ID NO: 82669 - DNA, 290 bp, Glycine max
  Clone ID: PAT_MRT3847_45668C.1
cacgcttacgtaagctcggaattctgatccagctcgacccgcatgacttatcccacatcatggatattaagtatttgaatgatcctgttcaggagcatgcacacgttttgtgcatatgttgaatatgatgttcgcctactgctggacaccgctctcacctcagtacactactgggaacaagcatcagcatgtttgcgcacatctgcgaaataaaatggtcccatttccagagctgtataaagctgtagtagacggtggtatcatcaggtttcccgtactgttaacgggtg

SEQ ID NO: 82670 - DNA, 449 bp, Glycine max
  Clone ID: PAT_MRT3847_45669C.1
tgtgtagaaagaagcccacaaggtgaatcaaaactgaccctaagggtgtatttggagatcacatgtctgtcttatcatgaccagaagttccttcccaagaagccaaggttccaagctgttagggccatgtaaaaaaagcgacttgctttctggaaaaaagtgatttccccccccccccccccccacactttttttatttttgaaaaaaaataacttcatctttaagggtcttgctactataagacatgcttgatagtagcaaaggatataccatttggttatcattctctgtatggatttctccagaatcgaaaacccccatgggtattagtcttcctttctttacaattttgctttatttttcagtgttatggggggagctagtgtgcatccatgcttgtattgtgcaatagttcttttaaatatattctactctaaagttgtccacc

SEQ ID NO: 82671 - DNA, 2464 bp, Glycine max
  Clone ID: PAT_MRT3847_4566C.1
tccccggtaatctgagtggaaattcggcttttggtgtgaactggctactggctgtcatcccttcattcatcttcttccagtgtctgtctacactacggatagagcttttttcacaccacagctaaaagtgctggaatagagcccttccccttcttcttcttctcctccaaatcctccttctttttctcttctctctaccacacaaaaacccttaccaagttctttctttctaattcccttgataatgtaaaatcacagaaaaagaaaaagctactaaaaacttggctctaaacctttctttttttgaggaaaacctgaaaagttccacacaatgtcttcttcttcttcttctagagctttcttcttcttcttcttctttcttatcaacgtctccttgctcctcacactctcttctgcagcggatccattcgtttcctacgaatttgaggtctcttacatcactgcctcccctcttggagttcctcagcagggtcattgccatcaacaacaagttcccaggtcctactatcaattttaccacaaacaacaacgttgctgtcaatgttcggaacaagttggacgagagcctcctcattcattggtctgggattcagcaaaggaggacttcgtggcaagatggtgttcttggcacaaactgtcctattcctgcaaagtggaactggacttaccagtttcaggtgaaggatcaaattggaagctttttctacttcccttcccttcatcttcagagagctgctggtggatttgggggtttcatcataaacaacagacccatcattccggattccttttgataccccacatggggacattgttgttttcattggagattggtacacccgcaatcatacggatttgaggaaggcccttgatgatggaaaagatcttggcatgccggatggtgttctcatcaacgggaaaggtccttaccgatataatgacacccttgttcctgatggcattgattatgaaacaattgaagttcatcctggaaaaacttaccgacttcgtgtacataatgttggagtatcaacaagtctgaatttcaggatccagagtcacaacttacttctagcagagacagaagggtcttacacagtgcaacagaactacactagcttagatattcatgttggacaatcttattcttttctgttaagcacagatcaaaatgcaagtacagattactacattgtagcaagtgccaggtttgtgaatgaatcacgttggcaaagagttactggagttgctatcttgcgctatacaaattccaaggggaaggcccgtggtcctctcccaccgggtcctgatgatcaatttgacaaaacttactcaatgaaccaagcaagatccatcagatggaatgtatcagcaagtggtgctcgtcctaacccacaagggtctttcagatatggttccatcaatgtgactgatatttatgtattaaaaaataagccactggagaaaattaatgggaagcggcgagcaacactctacgaaactcttttgtcaatccttctactccaatcaggcttgctgaccagtacaaattaaagggagtatacaagcttgatttccctaccaagcctcttacaggatcacctcgcacagaaacatcaatcattaatggaacttataggggatttatggaagttatactgcagaacaatgatactaagatgcatacctatcacatgagtggatatgcattttttgtagtcgggatggattttggtgattggtctgagaatagcaggggtacatataacaagtgggatggaatagctcgcactacagcacaggtctatcccggagcatggacagcaattttggtttcccttgacaacgtaggagtttggaatctcagaacagaaaaccttgattcatggtatcttggtcaagaaacatatgtcagggttgtcaacccagaggtcaataacaaaactgagcttcccattccagacaatgcccttttctgtggtgcccttagcaaattgcaaaagcctcaaaaggtttcgtcagatgcaccatcaatcactgggaacaaactgaagctgctcttcacttggctcgttgtatgggcatggatccacattttccagtaaaaagcacattttgggtcatctactcttagttgcttcaagtggacttgtggcttgttggtgaggttttgtgattgagttattagttttgtaagtcttgtttataaattattgatcttttgcagtgattttgacttgtattcttcttcctattagctttatgcttgtggttccatgtttaatttattgggacttgtgattcttttaatgcctataattgatgtagtaatcacaatttaatcatactcttgatacatgtaactttacctgccgactcctactttcatctttaaatttacgtagtttgtggcctctcatgcaaggtcaagatgcatggaccc

SEQ ID NO: 82672 - DNA, 225 bp, Glycine max
  Clone ID: PAT_MRT3847_45670C.1
acaaaaaatagggtttttaaaatcgggtattcatgtaaaatactatttttaggccaaattgatttacatactaaatctagtaaaatatatttatagaacttttatgaaatttaaaaggttaaaataacccctattgtgcacccaagacttttttgctaaaggctagacttcaataatttctttgtaatttttttttgacgcataaaagatggcttaactatataa

SEQ ID NO: 82673 - DNA, 714 bp, Glycine max
  unsure (1)..(714): unsure at all n locations
  Clone ID: PAT_MRT3847_45671C.1
gcgtgacattacctccacgaagtgtgcagttaaagccggcaaagatgtcctcgcttatgctgatcactcttgaggctttgctgatgccaccacctctagttatgaaccaaaacctgtcaaacacatcagggtggccataatgcatttgaactttgagagggtttgccaaaaccctctgccccaatgtgacaaaactcgtttcttgacctgacatgaaccatacaagagaggaaacagaaccggtaaaaatgtgttccctcactccaagcccaattgtctccacggaaaccaacctgctatgatccacagatgcagtatattatcacataccatgaccaattattctaaaaatatataagaacatacaaaatataattaaaattaagaacatattttttgggcattactgtaaagatgtggcaatgtattaaaattaagaacagtatcaaactcattcatttactgggatcatatataaagatgtgcaaatgtccctttttttgtttcattaaggacaatgattccataaagatgttggtctacactacatggtttgtcttgcctggtgggaagtgtaacggttatagcgcggaaagaacaaatcaacaaaaggcgggttagttagttaccagttaccacgtnnngagtctcttttcttttcttnttctctctcttcttttctatacctatgaagctatgccttgacagccttgc

SEQ ID NO: 82674 - DNA, 757 bp, Glycine max
  unsure (1)..(757): unsure at all n locations
  Clone ID: PAT_MRT3847_45672C.1
cggaattcccgggtcgacccacgcgtccgtgcttttttgtntactaataatcccgaaaggcaatgagaacatcacaaattctgttggttttgctttggttcttctgcatttatgccccttcttcgtttggagcaaatgtcacgtatgaccacagagcattggtcattgatggcaagcgccgagtcttggtatctggttctattcattaccctcgtagcactccagagatgtggccagacctcattcagaaatccaaagatggaggacttgatgtgattgagacttatgttttttggaacttacacgaaccagttagaggccagtataactttgaaggtaggggcgatttggtcaaatttgtgaaggtagtagcagcagcaggtctatatgtgcatctccggattggtccatacgcatgtgctgaatggaactacggtggtttccctctttggctacattttattccgggaattcagttccgaactgataacaaaccatttgagttcaccgctaagattgtggatttgatgaagcaagagaacctctatgcatcacagggaggacctattattttgtctcagattgaaaatgagtatgggaacattgaagcggattatggtcctgctgctaaatcctacatcaaatgggcagcatcaatggcaacatctcttggtacaggggttccttgggtaatgtgccaacagcaaaatgctcctgatccaattataacgcgtgcaatggattttactgcgatcaa

SEQ ID NO: 82675 - DNA, 310 bp, Glycine max
  Clone ID: PAT_MRT3847_45673C.1
actatagccattctctttgggagggatgcttcctttcaacaaacggtcgatgatgattacagggaatgggaaagagaattaaaaagacacacactaggatgatgatcagcttttgagggaagggggttgtttacctagctgataagggctccgtcttttcgtttacgggcaggtgttgaagctccggctctgttgatggtcatgctcatgggattcatgtgcatgtggaattcctctgtcagccctggattaggagtcagcctggctgttccctaggaagtgccaggagaccagcttcaagagactcacc

SEQ ID NO: 82676 - DNA, 162 bp, Glycine max
  unsure (1)..(162): unsure at all n locations
  Clone ID: PAT_MRT3847_45674C.1
canatttggagatgagacanataaaanaatcccatnccctngangtcacgagtgtaaggngggcaaagacggcngggctcttncccaatgccatnnagattcnngctggaaacaagaagnacntcnttgcatcctncctancccgtgatgaagcnttcagga

SEQ ID NO: 82677 - DNA, 292 bp, Glycine max
  Clone ID: PAT_MRT3847_45675C.1
ccacgcgtccgatttctatgtatcttgcaggtgaaaaaaatgccaccttctatacactattccaatcgtgaacgctgtgaatgacatttggccacatcctgcctctcatgaccactcttagccttcgatataaatatgaatgttctaggtcctagtatatcttctcctttgggaggatgctacccttgttacctcccaagcagcatatcttgcgtgcactatactatctacctgacgccgccctttcgatagatgagtattcacacttctggaatgagcttatttaacacac

SEQ ID NO: 82678 - DNA, 1158 bp, Glycine max
  Clone ID: PAT_MRT3847_45676C.1
cggtttcgtgggcggacgcgtgggagtaaataaggatactaccaattcaaaggcaccgccaatgccattggcaacattacctcttctcttggtagatgataacaatgcttgcattgatctttcaatgggagaggagaaagtagttaaactgtctccattgtcaccaaagattttagtgtatattgattggtctcagaagcttctggagaagtatgatactcatacacttgagactttgcctgaagttttaaaatatggacctgtaaccaagaaagctcgtactgaacctctctccttgtacacctgcttggaagcttttctgcgtgaagaacctctggtgcccgaagatatgtggtactgtcctaaatgcaaagagagacgacaagcaagcaagaagcttgatttgtggagactcccagaggttttggtcattcatttgaagaggttctcatacagcaggtcaatgaagcataaactggagacttttgttaactttcccattcatgattttgatttaactaattacatagccaacaaaaacaactctcggcgtcaactgtacgaactgtatgcccttacaaatcattatggcagtatgggtagcggacattacactgcacatattaagcttttagatgagaacaggtggtacaattttgatgacagccacatatcactcataagtgaagatgaggttaacactgctgctgcctatgtactattttaccgcagggtgaagactgacgatgccgctgttagcaatggggcttaggctttcattttggcagttttatgtataaagtaaatgtcaagaacgtacctggttattccataaaagttttagaaaaaggtaggtgaacaatttcaaatgcatgccttaatttagggattttttttccttttttttactgtatggaaaggcccaagcctgttgatgccagagtgtagtcaatgaaaaggtaggtgaggagttgaatttgacacctatatggtttctgatgccttcctggtatttcagtattacagatccaaattgtttaagcaggatgtaattgtcatgaattttcaacttattcggaatttgaacttacgtgcagattgcaaagagctaggtaaatctttcttagaatttgttttttattttattttaattatgat

SEQ ID NO: 82679 - DNA, 109 bp, Glycine max
  Clone ID: PAT_MRT3847_45677C.1
agttcaaagacactgcgaaagctagactttcataatcacaaactgcacctaacataacaacattaagagatgtgttaaatataagttcaataacaagtatatacaacaa

SEQ ID NO: 82680 - DNA, 389 bp, Glycine max
  Clone ID: PAT_MRT3847_45678C.1
agcgatcttaaaactggagaggggatcacacttagacaaaaagcttcaataagtaacagagtagagagatgcagcagggaagaaaggctgctaaatgaggaagaatgagatgtctgggaaagcagcagtcaaaaggagagatagggcctaattggtacaagagagtttaacaaacagcaacaggacagagcattttgatgcatgtaagtggacaaaaacggaaccacagtcctgggaaaagaacatcccaatagaggagagaggacctaacaaaggtttagaaaagtggaggaccgagagggcaaatcaaactacaagggactagagataactgattgacaatgccaaaaaggctacagatgtagacagtctcttgggaaattaccaag

SEQ ID NO: 82681 - DNA, 921 bp, Glycine max
  Clone ID: PAT_MRT3847_45679C.1
attttgactgtgcaaccatgcccaacttcaaacttgttttttgctgaagtgtcaaaagttcaggtggagttgacacatgcggccttcagccaggatcctttccttagcagtttgtttttgcctttgcacaagaactttgaccaatattggagagaaagctgcctcatcttggcaattgctgtagctatggacccaaggcataaaatgaaacttgtcgaattcacctttgctaagatatttggtgagaatgctgaggaatggataaaaatagttgaggatggtcttcgtgaactttttattgaatatagcatgcaaatgttccttacaacaacaaatggcgatgaaggggatgacattatgataaaaaaaacatttctagaagggtcaattgactgctcactttttgttgacggggatgaattttcggattatgaattctacatatctgattttacgggtaacccacaatttaagtcagaattggatgagtacttggacgagcctctgctgaccagagtggaagaatttgatattctgagctggtggagagtaaatggattgaagtacccgacattgtctagaatcgcatctgatatcttgtctttaccagtttccactctgtctgcagattccatttttgacatgcaaattagaaaaatggatagctaccggagttctttaagctccctgacccttgaggcccttatttgtgccaaagattggttccagtctgaatgactagaattttcaaatgtaaatgcgaaaatggaatttcaggtataggtttctccatgtaggatagattattgaggagattttaattcgtgtcatttaattcgcgtgactgtcagatttttttgttacattatagattatagtataaagaccaattctattcaaattccatctttttttgtccaa

SEQ ID NO: 82682 - DNA, 462 bp, Glycine max
  Clone ID: PAT_MRT3847_4567C.1
gccgcctgcttgggggggggggggggggggggggggggggggggggggtgggggggggggggggggggggggggttcggcaatttaaccaaccgagaggggaaaagaataaaagcctttagaatcaatagggggtttacgggtaaaggggctataatgggccggaggtatacgcatgcaatagctgccggaatattgaataaaaccggggggagcaagttttatagggttatcttgggaaaaaggaggccagattaaggcggctacaattttgggggaaggggaaagggaaaacccaggccgctagtaagggctgagctgcttcaagggaatcggaaaagcaatagctagcggcccaaaaacccagcaaaccaatttcttgaacttagcggtccgggtaagccccttataatccggtgacgctaaaattgggaccccgaacaaaagttgcccaagcccaaaa

SEQ ID NO: 82683 - DNA, 208 bp, Glycine max
  Clone ID: PAT_MRT3847_45680C.1
aaagactcgaatgcaggttattggccaagtggttttattttattattactgctatgtccctttttttgccaggaatacttaaggtctcatatacactcaggtgccttcacttggctaccacgaaaagactggtttggccaaacattctttgtttctccttattaaaaagaaccccaagatctaataaaagggactggaaattctgccc

SEQ ID NO: 82684 - DNA, 405 bp, Glycine max
  Clone ID: PAT_MRT3847_45681C.1
cacaacgggaattggtgcaatgtatctgaacagttggttgaacattggtggaccgaacaataggagcatgaaggtgtgggatcttggaggtgcaaatgcagtgacaaacgaagccattagagggtcgtttgaattaaccccgtctaatatccaaaagcttaagcaacatgcaaaatccaagctcaaagagaataatgctcatgtgtcaacatattctgttacgtgtgcttatgtgttgcaatgtttggtcaaaacagaacaaccaaaggccaatggagtggcctttttgttcagtgtggattgcagggctcgcttggagccaccaattccttccacatattttggaaactgcattattggccgtagggttatggatgagacaatgaagttgttgagagatgatgc

SEQ ID NO: 82685 - DNA, 426 bp, Glycine max
  Clone ID: PAT_MRT3847_45682C.1
gggtttgtttttttttggtggactaaagaaattctaaatagaatttttttgatgagtggggatgaaaaaacaaaacagcccaggaaaagggaacatcttccttaaaaaagagacactctgaagctgtcaaaaaacaagtggatgcctaatttgcaagtgggaccagatctaaggcctaaaatgggatctacaagttgcctggggtactaaaaatatatctacggcttaaataaaacagtcataaaggggaaaggaatttctttatttaaaaaacatccggaaaatttcgaatccctatgcaaaaattgtataaggggtcgctaatcctgtcaatggacctctgaatctttgtccaaaggagcaccagtattatgatttcaagcttcccaacccctaagtacagtggcccttgccacacggttaact

SEQ ID NO: 82686 - DNA, 493 bp, Glycine max
  Clone ID: PAT_MRT3847_45683C.1
tccgattcccggtcgcccacctccggccccgctccccgttccccttactcagatccccacagacaaaacctcgggaattctggcacgtaaataacggagatcagtggaggtcggacttgggtttccggattaccatataagtaactgtccgggtcctcagctcgccggcgaccgggacgacccatcgatttgccggtccgccggaagtttagctcttcaactgcattgtgtgtctatttagtatatattctcatataccaacaactgaaagttaagtcagagacagactaagaaattcacatgctgaagccatgaacaggattcttgtgtaaaccaatattgcttgcattgtatagtgtatagtttacttttttctttattatttaaccacctcttatcaaatgctctttttttttttttgtttttaatttttttttcggaagtttttggataagtcgatatccttcagttttatatatgaaaatgttttgtt

SEQ ID NO: 82687 - DNA, 482 bp, Glycine max
  Clone ID: PAT_MRT3847_45684C.1
ataatttggttctaatctccaccggggccctaggcatggttatgggtttgaaactgacactccctttgctctcgcatttcctcctcaaccaagcccctcacgtgtggaccttcctcctcacgtgcttcactcccccttacctctacatccttctcaacttcatcgtgctcctcccctccgaccccgtcatctacgccctaccacccgccgcagtccagatcctcgctccggaaaccgccaacatttctgccgttgtacaaacggactacaacgccgccgcctctgagaaatacctctacgaaacgaaaccgactctcagctacgacaccgctactgaaggtaacggctctgttggctacgtttacgacgagaacacgccggtgaaagcgacggctaacaacgacgactaagccgatggcgttgtctctccatgcctgcagaggaaagactccttggacttcgcgttcgcatatgaaaacttg

SEQ ID NO: 82688 - DNA, 1542 bp, Glycine max
  Clone ID: PAT_MRT3847_45685C.1
gcaatcacacacacacccaagcgaagaaggtaagttcccgttacagagatagaaaaaacagaacaaaacaaaagaaaaagaagaaaagaatgggttatgtttctatgaaagtggttctaatctccaccggggttttatccatggcaatgggtttgaaactcacactccctttgctctcgcatttcctcctcaaccaagcccctcacgtgtggaccttcctcctcacgtgcttcactcccccttacctctacatccttctcaacttcatcatcctcaccatcgtcgcttcctccaaactcaacaaccaccaccactctccgccggataccaccgtcctcctcccctccgaccccgtcatctacgccctaccacccgccgcagtccagatcctcgctccggaaaccgtcaacatctctgccgctgtacaaacggactacaacgccgtcgcctctgagaaatacctctacgaaacgaaaccgactctcagctacgacaccgttacggaaggtaacggctctgtcggctacgtttacgacgagaacacgccggtgaaagcgacggttaacaacaacgacgacgacgacgacgaagccgttggcgttgtctctccaagcctgcagaggaaagactcctcggacttcgcgttcgcaaatgaaaacttgaaaccgccggtttccgccagattcagccaccggaaatccgttagagccagtcccgaaggagggaaggtggtggcgttgggagtggcgaaggcgaagaagcaggagacgttggagagcacgtggaggacgataacggaggggagagcgatgccgttaacgcggcatctgaagaaggcggagacgtgggagagggagacgccgttacgggacttgaacggagggggcaaattgatgaagaagtcggagacgttcgcggggagggagaagaacgcgtcggcgaggctactgaggaaggagccgtcgctgagtcaggacgagttgaaccgccgagtggaagcgttcatcaacaagttcaacgcggatatgaggctgcagaggcaggagtcgctgagacagtacaaggagatgatgatgaatcgaggagctcactgagagacacgcgcacgcacacacacacaacacatttgctttcttgcttcttcactccaataatcaaattgggcggaaaagaaagaaaacgatgccatttgggtgaaaacaaacacagtgtgattaaaaaaaaggttttgttgtgctgcattgatttttttgtttcaggcaaaggatgaacgaaacacagtttgggatatagggaaagttttagtttagtcattagtgtatggagaaaatgtgtagggggatatttttatttccatgaattggtttttttttttcttcttttggttgtttattttgttaatagtgttaatgcagtcttcctattgtcggaggaaatgttttttgtttgctggaatgttcaatcttcgtgtggttctttatagcatagtatgttagtacttgcctatgctttttaatgcttttttctgatttccggaggggc

SEQ ID NO: 82689 - DNA, 271 bp, Glycine max
  unsure (1)..(271): unsure at all n locations
  Clone ID: PAT_MRT3847_45686C.1
gngttcacaactttnccttttcctnttgcttgngaatctgaatcaaataatcaatcatccattcatnatncatcatgncgtcggcgaagaaaatcacgctgaanagttcggacggcgaggctttcgaggtnnagnaggcggtggngctgggagtcnccagncgatnanagcacatgatcgaggacgactgngccgantagcggcatccctctgnccgaacgtgangagcatgatcctggcgaaggttatcgantatgcaagaagcacgtcg

SEQ ID NO: 82690 - DNA, 239 bp, Glycine max
  unsure (1)..(239): unsure at all n locations
  Clone ID: PAT_MRT3847_45687C.1
cnacaacactgcctcaaggananagactttncnccctaattctcagttccatnggcttgcancactcangacnaatgcctgacanaggagccacccatagattcatacataggntgtancccaacaaattatatggtnatatgggaacactgtgcagatctggnatnggtnatggnaaacatggntanggtnccnggctanangggcnngcntggttcgctntagacagcanataccca

SEQ ID NO: 82691 - DNA, 467 bp, Glycine max
  Clone ID: PAT_MRT3847_45688C.1
ccctttcgtccgcccacgcgtccgcaactacggagcgacgtcgccgacaaagagtgtccaggaggtgaaacccgtggcattgtcttggcacggtctcaccgctgtccatgccaaatcgggacggaaaattcttgacgacgcgtccggcatggccgacgcgggccaactcgtggcactgacgggcgacggcggagtggacaaaacagcgcttttgaacacgttgctggaccacaacctgaagactttgagcgtggagggtcaagtgctgatcaacgcgcactccttgggccggttcatcacttacgtcatcgggtacgtgcaacaggacgacttgttcatgggcacgccaacggtgaaggagcatctgatggcgccggcacagctttggatggtcggacacacccaacggacgatgcgtagacgcgtcaatgagttggaagagccatttcggaggtgaggcgcgtcgt

SEQ ID NO: 82692 - DNA, 252 bp, Glycine max
  Clone ID: PAT_MRT3847_45689C.1
gggtggagctactgtgtaaatttcacccattaatattttgtttgtctaattgaatgttttgctggctggttatttacagaaaagggaggatcataaatggatgaaacatactttttggtaagtcatgtttcatttaaattgttatttacattagtagacattttgatttatccggttctcttcattttttagtgaaatcctgtcccttttagtgtatacaaactttttttttttcttattagcatcaaagtt

SEQ ID NO: 82693 - DNA, 552 bp, Glycine max
  Clone ID: PAT_MRT3847_4568C.1
aaagaaacgacaatggagggaagcaacgagcaagataaggcaaagaaagggttagaaggcactgccatagatttacctactaaccgccgtgtcaacctgaaaagcgctaccagcgacgacgacttcaccaacattcttgcacacatcaaatcctccaaaacccccgctgtcatcaaatatggcgctccttggtgtcccgtttgtatccaaattctcccagcattctgtagactgagcaataattttccaaagcttacctttgtatacacagacatcgatgaatgcccagaaacaactcaacacattcggtacactcccaccttccaattttaccggaatggtgaaaaggtagatgagatgtatggtgctggtggggaagagaggctccatgatcgtctgtggttgcactcttaagtccatggaagagaaacattatgtttgcaatttctctatgtaagtagcatagtctatcatgaacggtttcctggatggttggcctaggccttgtttgtccatctccctggtagggattgtcgtctctgtgttatatct

SEQ ID NO: 82694 - DNA, 251 bp, Glycine max
  Clone ID: PAT_MRT3847_45690C.1
cgagaatctctctgctgacgctggaatggctttactggtctgcatggctctgcctaagattgaggggaactctgtgccattgctgctgtcgtctacagtccgctatgacactccatcgtgtggctactgcacccttgcttgtttgtcagtcctcccaggatgtcatttggtgcagagtcaacgccatcaccttttagtcacggtttttggagtgtgcctccatcttcttctactatactggtgaaaattat

SEQ ID NO: 82695 - DNA, 365 bp, Glycine max
  unsure (1)..(365): unsure at all n locations
  Clone ID: PAT_MRT3847_45691C.1
aaaaaaaaggggcccccccccccccacagcgagngnnaggagggaancaaggaaaccttgaaagggcgggaggggcgcaaggataaaggaacatgaaccgcgctgaagggagcgaacgagggcaaacacctgtacagaaagggaccggaacaagaatgcctactgcaccaaagacggaaccaggacaaaaagttatgcaaccactggagaacaaggcccaagctaaaacgccgaggacacagcagaaaccgagaggcatgcaagcggcacaaaccaaataagtgaaggtccgggagggaagcctggacggacaaagacaaggacaggcaaaactgataaccaaactagaaggggacaggaaaagg

SEQ ID NO: 82696 - DNA, 438 bp, Glycine max
  Clone ID: PAT_MRT3847_45692C.1
agctacaacacagactagtgaggctcgtacacaattacactagcaatgaatggttattataaatactagtctaagtctttcggaatttactattccgcttatgaacatcatagtaagggttgggcagcttctattatcgaaaacccagacataagtgttctactttctaattaactccatagtcatgagcacttgcaacacactgcaagaatgcagccctgcaaagaggttaaaaatatattaatgatagttttatctaaattttaataaagagtgttagtatatgtcatcaattattatatataataattattatatgttaatatatatggaaggattactatcttcacacataagttatattatttaaatttataaaaatatattttatatccacacatgcttttatttgatattaatcttttaagaaaaataaaa

SEQ ID NO: 82697 - DNA, 554 bp, Glycine max
  unsure (1)..(554): unsure at all n locations
  Clone ID: PAT_MRT3847_45693C.1
tatgacgtacgcatggcacgaccngtacgtaagtctatggnatncctnctagaagacggcgcnngccctttgtgtttttttttttttntttttttttttattttttttttttttttttttttttttttttttttttttttttttttttttttttttttttttttttttttttaaaaaaaaaaaaggccccaaaaacataaaaagggggggagagggggggggaacagtttttatttggtaaaaaaaaaggggaaaaaaggggggggattttttattttaagggggatttttaaattttaattggggggaaaaaaaaaagaaacattggccacgcaaggtaaagaaaaaaattagcaccagttttaaggggggtaaaaaccctttcttgggattaaaattaaagggtttgaggcaaaatcgagggtttggactaaaaagggtcctggggaggaaaaaaacaggaacttttttggacccatggggggctccaaaaagggggggaaacttaaaaagcacaaagaggttgggaaacctgaaatccaccactgaatttt

SEQ ID NO: 82698 - DNA, 1224 bp, Glycine max
  unsure (1)..(1224): unsure at all n locations
  Clone ID: PAT_MRT3847_45694C.1
aataaggatttttttttttcggttttaaattttcttctttttaatggaagntagtaaatctaaccaacccaccccaagaaaaagaaaaagtagcagaaaaaaagaaaccaaaacctaagcttgaaggaccaaaagatgcaccttaattaaacgagggagagagtactttcttcttcatatatagctttttgaaaaagatgcttcatctttttttctagatcagagaagtgactgaaggaccaatgttaggttgatcactccaagcacccaaacccgttgcagtgttccaataaagcgaattaggatcagacaaacccacatgctccatctggttttgaccaccaccaccattgttgttgttgttgttattattattgctccactcaaacctgttttgtccttcacctttcacttcttttgagccaatattattattactatccccttccactcgcaacccttgtagcggtgccaagccatggaaagtattgtcaccttgatcatgatcacgacccttcaccccaccaccaccaccacccattaaattttgttgcagaagagttgaactcagcaaggaagccataacaggagttgaaggtgcacaagttgaggaagaagaagaaccaaacatagagttataagcagaaaaaaagctgttgttatttgaagtactaaacccattctcactaaccccagttgaaaaacctaacccaagagcattcaattgagaatgaagattaaaccttgggaaaggaacactactcatcacatcaccaccataaaagaaagggctgatattatttatatggttcgtggtggagctagaggcaataatattatcgaggtggggctgtgaaggagggtttgaattggacgaagaaggagagttagcagcagaagaagaagaatcaccgtgatttgttggacgcttcacacgcttgttttttctgcagccaccaccaacgggaacgtttctgagagtgccacctcttgtccagtaacgcttgcaggctttgcaaaagtgcctaggctgtgacaagctgtagttgttgtagtagcagaacttggtgtttgaagactcgcagcgagggcactttagggcttgttgttgctgctgaagaagatcttggcttggtttttccatgactcttcccatcattggggccttgtgatcatctatctgagataataaacaagagaaagaagaagataactgatgagcta

SEQ ID NO: 82699 - DNA, 1968 bp, Glycine max
  Clone ID: PAT_MRT3847_45695C.1
ctcgagccgcacccatttattaccaacacttcaccatcatactcctctgcctcactctcttctaaacaagtaaattctgtcttcctttttcttctttctttccatacaaaacagaagcatgagttctgctaccacagtattgtaggtagagaacagaaaccaccttgtttcggaattctgttgcaaaattaagaaggaagaaacatactccattaatgggtggtgttagatggggtcggccagagtcatcttcatccatgaaactcttcctgctcatggtgcctctggtactggttgcagggcttgtttctgtattgggtcctaacccctctagttggctttttagtgcaaacgcacctgtgttatatttggagggctctgttacttcctcttcctcaactagtagtggtgctgtgactgtgaccaatccttccgaggtgaagcagagagaagggttagtggtggtggccgtggagaatcgtggtggagagaaagttatctccgatgacactgacttcaatcactcttctacacctccattttctgttcaggccatacaaacacctcaacaacctaacaaggatgagcaaaatgtttcgcaactttggcccaacgtgactcgtgtgaatgagtcttatgttccaccagagaggccgaagctacaaagaaaattcagcatcttagatagaaccgaagctggtctaagacaagctagagctgcaattagagaagcaagaaacggaaatcaaacacaagatatagactatgttccagttggaccaatgtacaacaatgctaatgcatttcacaggagttacttagaaatggagaaacagttcaaagtatttgtctacgaagaaggggaacctccagttttccacaatggaccttgcaaaagcatatactccatggagggaaatttcatccatgctattgagatgaatgaccaattccgaacaagggatcctgagaaagcacatgtgtttttcttaccttttagtgtagcaatgctggtgcaatttgtctatgtacgtgactctcatgattttggccccataaaaaaaactgtcacggactatgtcaatgtcattggcggaagatatccctattggaaccgaagccttggagctgatcacttttatcttgcttgccatgattgggggccagagacatcacgttctattcctaacttgaacgagaattcgatccgtgtgttgtgcaatgctaacacctcagagggattcaagccttcaaaggatgtctctttcccagaaattaatctccaaaccggttcaataaacggtttcattggtgggccatctgcatctggacgtccacttttggccttctttgctggtgggcttcacggcccaattaggcccgttcttcttgaacactgggaaaacagggacgaagacattcaggttcacaagtaccttccgaagggtgtgtcatactatgagatgctgaggaagagcaggttctgtctttgtcctagtgggtacgaggtagcaagtccgagagtggtggaggcaatctacacagggtgtgtgccagtgctcatttcagatcattatgtccctccatttaatgatgttttgaattggaaatccttttccgttgaggtttcggttaaggatattcccagattgaaggagattctgttgagtatttctccaaggcactatataagaatgcagaggagagtaggactcgttaggaggcactttgaggtacactctcctcccaaaagatacgatgtcttccatatgatccttcattctgtgtggcttagaaggttgaactttagagtccaccatgatcaataataactcgtagattattaccgcgattaacgtatttatttctgatttgtttggcaatgtaagatggtgtgaatgtgtgattctttttccgtcctgtaaaaaaaaattgtcagaagtaaaaataaaattatgtttttccaaa

SEQ ID NO: 82700 - DNA, 369 bp, Glycine max
  Clone ID: PAT_MRT3847_45696C.1
ggctcgagattaagtgccgtgtcatacagttgacggcctgattcggaatgacgacgacagttagggccatgatcatagcgaggccagtagatgacgaagagctctaacttgcggaagaggacgatacggttgtctgaaactacaagcttctcatcaaagaccacgctactagcgttgacagagccgctaccttgaagaggaaaggctgctaccctgatcctaaaggcgccagcccttacctagatctcgaatgttccggaactggactgtccctgggtaaaagcgttttcagctagaaaatcggtgatcaggtctgtgctcttgtcgccggatgcagatgtgccgataaagttgcatttccggaaggac

SEQ ID NO: 82701 - DNA, 631 bp, Glycine max
  Clone ID: PAT_MRT3847_45697C.1
cacgcgtccgcagctattggaggacttggagctttcaaaacaaagttttaaggaagaaatgcaacagattatggaagaaaacaggactttgcatgaacttaacttctcttccaccaggtcattgaaaaatcagcaaatggaaatttctgagctgaagaagatcaaagagaaacttgaacgagagtttgctgtaaaagttgaagaaagtaatgtcctccaatgggaatctcatcaaataaaggatgaaatcctgggcttgaataatagataccaggctatactggaagaactaggctctgtgggtttgaatcctaaatcttttgcagcatctgtgaaggatttacagaaggagaatacaatgataaaggaggcttgcaaaatggagcgagatgagaaagaagctctgcatgaaaagtcaaaggatatggataagcttttgagtgaaaatgcctatatgggatcttccctgtcaaatttgaaggatgagctgcatggattaagggatacagtgaagaaatttcaagaatcctggggagttctgcggagagagaaatgcattcttggctgtgaaaagacatctttactttgacaggtacagattatgactgagaaggtgcagaatctattggga

SEQ ID NO: 82702 - DNA, 610 bp, Glycine max
  Clone ID: PAT_MRT3847_45698C.1
tccacttttggccttctttgctggtgggcttcacggcccaattaggcccgttcttcttgaacactgggaaaacaaggacgaagacattcaggttcacaagtaccttccaaagggtgtgtcatactatgagatgttgaggaagagcaagttctgtctttgtcctagtgggtacgaggtagcaagtcccagagtggtggaggcaatctacacagggtgtgtgccagtgctcatttcagaccattatgtgcctccattcaatgatgttttgaattggaagtccttttccgttgaggtttcggttaaggatattcccagattgaaggagattttgttgagtatttctccaaggcagtatataagaatgcagaggagagttggacaagttaggaggcactttgaggtacactctccacccaaaaaatacgatgtgttccatatgatccttcattctgtgtggcttagaagattgaactttagagtccacgatgaccaatagtaactcgctcattaacgtattaagtttctgattagtttggcaatgtaagattgtgtgaatgtgtgattcttttcctgtcctgtataaattttaaatttgtcagaagtaaccaat

SEQ ID NO: 82703 - DNA, 312 bp, Glycine max
  Clone ID: PAT_MRT3847_45699C.1
cgtacgtatgctcggaattcggctcgaggtaggctagaggcgatcagatacgacagcgctcaagtctcagagactgcttagcctagaaggtccatagtgcaggtccctcgcagcatttggcacgcctaacccccaaacgcttcttcgatcttcatcaggttggaaataaggaagcaactgagaaggagcgcgctggacttgcagatgaaatgactaggggatacttggttgatatggctgagttcaaaaagcatgctggtaagatggctgcagctaataaattgaaaataccagtaatgcgagccacaaagc

SEQ ID NO: 82704 - DNA, 334 bp, Glycine max
  unsure (1)..(334): unsure at all n locations
  Clone ID: PAT_MRT3847_4569C.1
tagtaattgtgttgtgttgtgttgagcagagagaaggatcaagaaaggataagaagaaagagggaatagggttagggttagggttagggttaggttgacgatnccncccaaccccgcnnccncacctaccaacacgaacacgggaccgaccgaggcgcacgacaagaatcgagagcttgtgttctcggtggaccgtcactactactcgcgtgcgctccggatgctgggtaacgggcggtgcgaggcgatgcgctatcactagactaagatgctctgccacatccgctgcgagagtcacaagtggttgtggatcgccaccggtaacgtcctcctg

SEQ ID NO: 82705 - DNA, 906 bp, Glycine max
  Clone ID: PAT_MRT3847_456C.1
tagtatttcactatactactatactatataacttggaaaatttataatgcaaagccactacccatcttaattttcaaatagaatcttaaaaggcttcagcaaaaacccttcttaattttcaatttggtattctaatgagaaaagagaatggatttagcagcttgattcaatagaaaggaaagaggggagaaagggattctatagtatgtatacaaaatcatggtaatcaatataaatcatcaatataataaaagaacaagcaagcacaacaacaagctcatatctaacccaatggtatgaatctgaaactgaatccaaaagcaaggccctagtgtaccatgtattctgaaaaagcatcataatcagtagtgccaacctgatcagcatgtattaactccatccttgcaatctttagtcaaattgtagaacgtttccacgcgtgtctttccacggtaaaagacctcagtatccactgcaactctcatgtacccatcaaactcaacaggctttccattgttgagaagtgtggtctcgttataccactcacttgtatttccccacagctccttatagtcatcaagcagatgcaccttgtaatttgacctcaacttatcaaagtaattataataaggctcattggtggcaatgtacaaatgtctccaaggctgaaccatccatttaagcttctcgacaagaacatccggcgacgtatcataatccaaatgaggccacaactccttgttctgagctttctctccccgaaccacatgaacggcgtcaaaatcccagtccaaccttccactaatctcagtaacaatattcatcaacctcttggatttccacacagcatgccaaggcctctgaatattcttagcggcctcaccttcacaaacccggacgcgtggg

SEQ ID NO: 82706 - DNA, 193 bp, Glycine max
  Clone ID: PAT_MRT3847_45700C.1
tttttgctcaaaactgcttatattgagtatcaatggggattgtggtaaagccggtgaaaaaagaaaaaattcttgaacacacccgttttaaaattcaagccatagttatttttgaaccattattttgaccagttgcctgcatatttttttttacctactaggctgggacaaaggaatatcaggggggggggga

SEQ ID NO: 82707 - DNA, 312 bp, Glycine max
  unsure (1)..(312): unsure at all n locations
  Clone ID: PAT_MRT3847_45701C.1
agaccaaanaagcaaggcaaagggaaaaggaaagcnncnggannnggncnnggagacaancnaggaacacagaagagaannngangggggnganaacngacangcaaaaggaacanggcaaaggagaaagnggancaaccanagaagaaaacggcaggggngcnggagaagccaagcgaaaggaggccgcggggggagaggcgcaaaagaacgaagagcagaaaccaagcgccccaagcgncgccaacaggcacgngcaagnggcaagacaaaagaagcaggggcacgaccaagcgagcaaagacaaggggg

SEQ ID NO: 82708 - DNA, 248 bp, Glycine max
  Clone ID: PAT_MRT3847_45702C.1
acgtttacgcgttcgcgctggttcacactcgttagaaagaatggatttaaaaagcacaactaaccgtagtcacttttgtattgaaagggaagtaaaaacaaagggaggaaatatagggtcctcacgcttttcggcaacaaatgggtaaaacatttgatgcatttaagacctatgctacacactaggttgaattactggttgactgcgtaaggaacccagcctttttggagagggaagacaatgaacag

SEQ ID NO: 82709 - DNA, 154 bp, Glycine max
  unsure (1)..(154): unsure at all n locations
  Clone ID: PAT_MRT3847_45703C.1
ggggaaggcccnaaaataacgcgctgttaaaaatggggtctaaaaatgattagaacctatttttttggggagaacattataagggcatgtcgacttccatccccacaaactgttaaaaaacaaaagtccttatttttcattaaaagcctttttt

SEQ ID NO: 82710 - DNA, 252 bp, Glycine max
  Clone ID: PAT_MRT3847_45704C.1
tatttttcaattcaacaacacatcacaatccttaaactctctctctctctctctctcttttcaatttcgttgatggcgtcacaagcaagccttcttctttagaaagcagctcaataatctttgcaagaaccccgtcgatggctttttccgcccggtttgggtcgacgaaaaccaaacatttttgaaaaggaggtgggacttataaattgggacacttcccgatacctcttttatgaaggggggggatttttt

SEQ ID NO: 82711 - DNA, 281 bp, Glycine max
  Clone ID: PAT_MRT3847_45705C.1
tcccggctggacccactcgtccgtcagaacttcccaacacccatttttcctaccccagacctactcatcacttatgccattagacttacttttcattaccttagatttcatctcgccattaccattcacattcactcacatgaaccaatcttcatcaatacacctctcattgccgaataactgattaaatatcatcctaccattttaatcaaggtccatacgtccaaagccttctctaactcaacatcaaatccagattatcccataactactgccgaact

SEQ ID NO: 82712 - DNA, 571 bp, Glycine max
  unsure (1)..(571): unsure at all n locations
  Clone ID: PAT_MRT3847_45706C.1
ctaacatcacaatttcaattgtctttctttaacataatcatggccatgaaacgtgctgttcaatccctgcttgcctcatcttccaccctcaccaggaaccttcatgcctcaggagaaaaaaagaagattgtaggggtgttctacaaagggaatgagtatgcttcgaatcccaattttgtgggatgtgttgaaagagcattgggtatacgtgagtggttggaatcacagggtcaccagtacatagtcactgatgacaaagaaggacccgattcaggttatatatatatcttgctaacttaattcaactttatataacatcatctatcttgagagtagcttaatgaattagtttattcagtttagcacatgttgttcttgatttatttttttaattttgaattcaatttttctaaactaatgcttttcacacctacttaggctctgtttagataaagttttctacaagtatttgtagaaggaaataaaaataaagtcttcaaattaatatatgaacttcaacttttgggaaaattagatgagagagttctctataaaagttnttcttttttga

SEQ ID NO: 82713 - DNA, 255 bp, Glycine max
  unsure (1)..(255): unsure at all n locations
  Clone ID: PAT_MRT3847_45707C.1
agganatancctgtttgttcattattttangtngattnntnnnccgttnggtcatagatngcattgtaggatntnatatantatgatatgntnttcccctttgcttcaaggntgtngcntcattcattanttgggttctctatanganaaagtatggggtcatgnaagtcttttgtagtnttttagttgngntgtnttcacatntttatctttcgtgccaaagtggtggtgatgttggtgatggntgatnaaata

SEQ ID NO: 82714 - DNA, 250 bp, Glycine max
  unsure (1)..(250): unsure at all n locations
  Clone ID: PAT_MRT3847_45708C.1
tgagaaacttcctcgtcgcaaaatttttgacaaacctaagtcgctctgcttcactattctccctatggagtttattcttgtggttcgtcagaagtttttaaattttcgtgaggttcattattctctaaaagggcacttgncttagttgtcaagtttggaatcaacccatgactccatggtaatgtgactggtttggcccaattagatantactgagtatagggcaacgactattctagtgtatgcgattt

SEQ ID NO: 82715 - DNA, 289 bp, Glycine max
  unsure (1)..(289): unsure at all n locations
  Clone ID: PAT_MRT3847_45709C.1
gaattcggcacgaggcgtgaactcgatcaagtccgtcaaaacggcataaatttagntgtccaatggacaagcggcggngattctcggtacctataatgccaccacgagcctattggttgctgctatggtccatccttcaaagaaaacatgtttcatcctctctgccacaaggaacttgaagagtaatcttacccaatgggtgagcgcttgcttctctgacatcactgaggtgaatgaaggatcctttgaaaccaatgaagaaatacttggcgataatgctaccaagttg

SEQ ID NO: 82716 - DNA, 714 bp, Glycine max
  unsure (1)..(714): unsure at all n locations
  Clone ID: PAT_MRT3847_4570C.1
gttgagagagaagaagaaaggggattgaatggaaggggaatgggggcgatggttgcattttacgaacaagagagatatataatagaacaatcgcagcgatcacagtttccatctgataccatccacagaaccattgacactgctttttaattataatcactagtctacagaagaatacctgatctaacaactatggatctattattggacacgctggtgattggtcaagaaaaagaacatcttatggctcaatcacttgatcgtccacataaagagtttgatatggcttacaaagatttctatttaaacttaaaagctgcaacagaagatgatgactgggcaaaaagctttcatctattggaacatgccagaagcattgcaaagaaattaattggcagatcaatgcagtatgtgtaagtgaggattacatgcagaagcagggttcgggtcttctccagcgttgtaggatgtagataaatattttgcttaaaaattttgctgattagtttaagttaaaccttccaattttttgctttacctgcttcctgcctcgtttatatttttttaatttcggttacgcttgggaatagattttaatttccgccatgtatgttgatgtcctaatttgagccaacggatgtaaaatcaatgttgacaccataaattctatgttacatcctttggggtgttttaacaaaaaaaaaaaatttttng

SEQ ID NO: 82717 - DNA, 295 bp, Glycine max
  Clone ID: PAT_MRT3847_45710C.1
ggaacaaggcaaggcttttttaaagcaacgggaagctcgcccataatttccagggcattatttttttggcggtcactttttagaataagccctttttagaataatagaatttggacgggggggtccatttttggctttaaaaaaaaatcctgggggtcccccaaaattttggggggcctcaaacaaaggggggttttttttaaaagcaaggggccgcagcctccaaaatcgggggttggttgtcccgaaaattaatttaatttcatcccttccactttttgaaccggacgcgggg

SEQ ID NO: 82718 - DNA, 379 bp, Glycine max
  unsure (1)..(379): unsure at all n locations
  Clone ID: PAT_MRT3847_45711C.1
aggatatggaggcgcgggaagactttgtgtatgtagtgacggaggagcagcggttggcggatacgggggaggcggtggtggagctacaaatcgtagcattggcgctggaggtgttgataggggtggatatggaggaggagcaggtaaaggaggtgtattgctgattctgtggatgtggaactaatggcggtggctatgctggcggtggcgcccaaccttttgggagaggcgtgtgttgttgtgcangatccgtatgtgctaagcaatgcagtgcgacaaatgaatgatgtgtcttttgttgggtattttgtgatttttattgggtgcaaaaacaaaattatacttgtttgtaaaaaaatttggttttttttttttggtt

SEQ ID NO: 82719 - DNA, 538 bp, Glycine max
  unsure (1)..(538): unsure at all n locations
  Clone ID: PAT_MRT3847_45712C.1
tcgagggaggaggnagatgngaggtgtagtgggagaagagaggtagtgtcgagggagtcatannntcagagcgacgcatagtgttgtgaggacgatgtgatgttgattatgtgtcgtgtgggagagggagcaaagagaatgaagcattgaggtagttgagttggagaaggaggaacgagcacggctgagagttagcaatatgtatgtcctacccaaagaatgctacttttgattgatggagggtgcagatactgatcacggtcaacaatggcgtgctttaggctaacacggtgtttggagaatctccgtgttcacaacagacaaggtgtgcaagaagaacaagcaagatgatgacagaagaaagtggagatgagtgaggaagagcaatgaggatgacaaatgagcaacacgcacaaacatggaaagatgaacaacaatgaagaagctactagagcatagttgaaatgagaagccgatagaagatagcatgntgtgagagagaaacagaaactgctgttgtagccactgaaaatgatga

SEQ ID NO: 82720 - DNA, 582 bp, Glycine max
  Clone ID: PAT_MRT3847_45713C.1
cgatctgtcgctagcgaatgtgccagagtcccgtacacgataagcgtgtggggtggttgacggaaatgctgaaataaccggatgtgaagtgaagtttgaaatgagaggttgggggtaatggtggtggtggggtacatctaagtaatctaagccaggccctgggggcgctagaaaattgcgcagaacgccctggcgatcaataggccggaggtgccgtagttcggaaaactgctgggctggaggaaggagcatttcatgccattagtgtcaggaggagtgattaggctgcactaacaacccagcacacttaagtttaggcaaggcacgtatgggcgccatggtagtaaataaaagaaatgttacatacactgtggtaggaggcccgttaagtacgatggcagtatcgtaaggtagcacaatgccgggacgctaaccgcgagaaatatagtaaacttgctgccgcaaccgctgaggcggagataaatactactggagagtggccagctgagcgatcaagcggttaggccgttactagtgaacctgagcctactgctgcagtacggaatggcctaaggatcctca

SEQ ID NO: 82721 - DNA, 343 bp, Glycine max
  Clone ID: PAT_MRT3847_45714C.1
tggctctggaacctttgggtctgatttatgtgcattgcatggttcgatagaatattcatagaccggtgtcctcatagtaacacataacaaacaaacggcgaggggcgaatacataatacgtgctaaggcgcacgtcgccaccgtactccatctgcttccatcatcagtcatatatgctatatacgaaatccgactattattgactgtcaacctctacttcgcgacgacgtccacctacaattacgactatatccttactctcgtatatgtctatcgctaatctaacgtcatcgttaagacgcagtctcacactcacgctctcgacacctacactgtcacactc

SEQ ID NO: 82722 - DNA, 418 bp, Glycine max
  Clone ID: PAT_MRT3847_45715C.1
gtgcaaccatttcctaaaacacaagcctagaagcataaatttcacacaaaaaaaattcaaagcatggaggatcatcaaaaggtggagatgcaaaacaaggcaagagttgaagtgctctacaaggcactattagggcaaggaacaatggacaatgtggccaaattgctagcaagtgaccttgagtggtggttccatggccctcctcattgccaccacatgatgaaggtgctcacaggggaaacagatcacaccaagggcttccggtttgagccgaggcgagtcacagccgtcggagactgcacgatcgctgagggctgggagggcaaggcgtattgggtgcacgtttggaccctaaaaaatggcctcataactcagtttaaagagtacttcaacacatggcttgtggtgagggatttga

SEQ ID NO: 82723 - DNA, 766 bp, Glycine max
  Clone ID: PAT_MRT3847_45716C.1
ccacgcgtccgaaaaatccattctgatccattctgcatcaaactttggcttctcctcctttctctctcttcacacttcaatggatattctttcttgaattctcatctgggttcattccctttttcatgctttgactgaatcttcacactttcaagtagttggttgtgtggtggtacctgataaaacttaaaaaatctcttccctttttgtgtcagaaccatgggttgttgtctgagtaaaaaagggtcagagccagaagaacacattggttacagacatgttgctggtgctggaggtgctggtgtgtacaacaatcacaagagccatgaaccctttgccacccaaaccaaaccccctcctcaccaaccttaccaattacctgagaaacatgctcctcctcaggcaccttggaggcctccaccaagcccaaaacatgtccacaaccatgacacaatcactgggaagccatttgaggatgttaagcagcactacacacttgggaaggaattggggagaggccaatttggggtgacttatctctgcactgagaattcaactggcctgcagtatgcctgcaagtccatttcaaggaggaagcttgtgagcagagctgacaaggaggacatgaagagggagattcaaatcatgcagcatttgagtggacagtccaacattgtggagttcaaaggcgcttttgaggataaacaatcagttcatgtggttatggagctgtgtgctggtggtgaactttttgacaggattattg

SEQ ID NO: 82724 - DNA, 182 bp, Glycine max
  Clone ID: PAT_MRT3847_45717C.1
ctcacgcgtacacttacgcgtgggcagacgcgttggatgactcgaacattccgtgactggttcgtactgtcgacccagcttctcttttcaccattttcttggcaaccaaacaccctaatcaatcaataaattcattttttttaattcgcagtatgaattccttttctctgatcgggatctgg

SEQ ID NO: 82725 - DNA, 754 bp, Glycine max
  unsure (1)..(754): unsure at all n locations
  Clone ID: PAT_MRT3847_45718C.1
gagccattctgcatcaaactttggcctctcctcctcctctgtctctctctctctcttcacacttgaatgaatattctttcttgaattctcatctgggttcattccttttctcatgcgttgacaaaatcttcacactttcaaagttggtacctgataaaacttgaaaataaatcttccctttttgtgtcacaaccatgggttgttgtatgagtaaaaaagggtcagagccagaagaacacattgtttacagacatgttgcgggtgctgggggtgctggtgtgtacaataatcacaagagccatgaacccccttctcatcaaccttacccattacctgagaagcatgccccttggaggcctccaccaagcccaaaacatgttcacaagcatgacacaatcactgggaagccatttgaggatgttaaacagcactacacacttgggaaggaattggggagaggccaattcggggtgacttatctctgcactgagaattcaactggttttcagtatgcctgcaagtccatttcaaagaggaagcttgtgagcagagacgacaaggaggacatgaagagggagattcaaatcatgcagcantttgagtggacaatccaacattngtggagttcaaagggtgcttttgaggataagcaatcagttcatgtggttatggaggctgtgtgcttggtggtgaaactttttgacnaggatattgccaagggccactacagtgaaagggctgctgcttcatatgt

SEQ ID NO: 82726 - DNA, 436 bp, Glycine max
  unsure (1)..(436): unsure at all n locations
  Clone ID: PAT_MRT3847_45719C.1
tccgcaattgcggtgacatgaagtttttattttttatttaccgcaattacggccgcatcagttgcattttctgcaatgtcaaggatggccgagtaacaacaaccgtgattgcaactgcaatttagaatcatgttgcaaagtcgcattttcctttgaatgcatttctattgtacattgagtgatctgaagaaataacttgacttataataactgtaggatctttctgtgattcaagatcttgatttgtttttatggaacattactactgaactcgtatcttattgtgaagaaggatttaatgtctctagattggcttgtacacgttgtgaattctatcctgattataaattaatatataaaatgtatgaaccnctgccttatatcatctttgatatggctatgtgactttggttgggaaccaatcttgttactatac

SEQ ID NO: 82727 - DNA, 735 bp, Glycine max
  unsure (1)..(735): unsure at all n locations
  Clone ID: PAT_MRT3847_4571C.1
acccttagttaactccggaatccgctccaacgaactatcatggaggcccaagcttccgtagcactaatagtcggtgtgactgggttgactgggctgagcctagccgaaacattgaagaaacccaattgtctcggaggcccatggaaagtttacggcgcagcccgcaggcccccgcctagttggttctctccttccatggtcgaccacttcatcacctttgacgctgaggactcttccgacacacgcgccaagctttcccccatcgcccacgaggtcacgcacctcttctgggtcacctttcagattcacgcagacgaagaatacaatgcaactgtcaacaaaaccatgctactcaaccttctaactgccctgaaatcttccacgacatcccggttggcccatgtaacggtccaaaccggaaccaaacactacatgggcccagttttcgacccggttcactccacgcaactcatcggccaccagccaccctttgacgagaacatgccacggctcccttatccaaacttctactacgcgctcgaggacctggttgcttcttacgcgccctcgctgacgtactcagtgcatcgctcatccatcataataggcgcgtcgtccaggagtgtatacaacgcgctgctgactctggcgacctacgccgtaatttgtcgccacgtangattggcgttttcggtaccctggaacgaggtacacgtgggagcatttctgtgacat

SEQ ID NO: 82728 - DNA, 257 bp, Glycine max
  Clone ID: PAT_MRT3847_45720C.1
gggtagtgtatgtcttaagacggggacataggtatactttacgcccgatatcatgtacattgaccaactcctacccacatacaatctaccttacgatgtatctcagagagacctctctcgtctcaaatcatgttaaaactcctttcatgacatacatatactcgtatttctctgcgcggactatatgcgaatttgctctgttcccacttgttgatgcaacaaccaatctacttacatatattatgattacgatgact

SEQ ID NO: 82729 - DNA, 153 bp, Glycine max
  Clone ID: PAT_MRT3847_45721C.1
ggtgtgcggcctgagctccttcagctgaagaaaagagcctaattttcaattatgaaaatctggtaacaattcccttcacatagaacattttggttgctctatgactatttatgtatcagatacagacatcgctataaatgcttattctgatat

SEQ ID NO: 82730 - DNA, 456 bp, Glycine max
  Clone ID: PAT_MRT3847_45722C.1
cagttaaagaataatcaagtgtgaaattacttggattatatcataatagatgtacatagtaaaataatgaaaagcataaacatgattaatattcaagttatttataaaaatccaaagccatatagatacattggttatgattggagaggaattcagaagtcaaagtcatcttgattaggcttgggggaggttaacatagccgtatataaacgaagcctatcctcttccatggaagtagacctagagagaggcctgcggggccttataaaggacaaagaagtcaaagtcaaacgatgctggtacctcctccaagccaactgaatggccaccgcagcccaagttctccaagctggcgagtaatacctcgcactcctcttcaccgtgtcattcacgaatgggtacctgaaatgtttgggcacgtacttcacgtcctgtgccttatgcccaaacgcctct

SEQ ID NO: 82731 - DNA, 269 bp, Glycine max
  Clone ID: PAT_MRT3847_45723C.1
cggcgtgatcatcagtgttcatgccagggtcaccgacgttaacggcctccgcggacagctgtgtgcgagacttcctgcacttgaatctcgattttcagctcacttctgacgaattcggtgaaagaccgctgaaaatcgacgcgatgtttggttccctgaaatcatccgccactattcgcaccgccttgagccaggtggcgaatctgatcacaggcgtcacgagaggctagcgctcacaaaatgacgttcgtttatgccaattttcccat

SEQ ID NO: 82732 - DNA, 345 bp, Glycine max
  Clone ID: PAT_MRT3847_45724C.1
gcacgagctcctaatcatgctgtgttgcatagagtaaattgcttgggttgttgatgaacacagatggtattgtgaggtttatgcaactttctgatgcattttgctggagagtgaccatgttttctgtttttttatcattacttttactacgggatacaacttttgaatgcttctcattcctgctctacccatggttatggtaagggaacttttgttactgttatgtaacaaaagtggaaagctctgctggaatttttgacccactttagctagcttcttttttgctactttgatattatttttataactttcagtgatttaacaacagttgatgttatctttttt

SEQ ID NO: 82733 - DNA, 293 bp, Glycine max
  Clone ID: PAT_MRT3847_45725C.1
tgcgtgctttgataaaccgcgatcacaggttgccgaaccttaaaaccggaaacaaaagcaagttgtttcttgatatcaagaagtcgtcaggatcttcctactcctgtgtgtacgagctcttaagggaaagaaaatcactctctgtgctggtgacagactcagtgaatcattctgtttaccactgttaggctatgtgctgaacactctactatttgatataggacttcgcgtgagatgtaaactacacctgctgctttctcaactgtgtgttcaataacaaggccaagccggag

SEQ ID NO: 82734 - DNA, 211 bp, Glycine max
  Clone ID: PAT_MRT3847_45726C.1
ggagacattagtaagctgcaaaagactttaaagctggcgatcacacaaagacccacgttcactcctaactgtgcatctacacacgtatacacccgtgaagctgacaactgtaggtggaacggctcccatgctgagggcaactacaccacaaagaccatgggggttcatattttcgacaaacgagttcctaacactgccattgaatacgact

SEQ ID NO: 82735 - DNA, 380 bp, Glycine max
  Clone ID: PAT_MRT3847_45727C.1
ggggttggttttttttttttttcctttttttgttactttttgtggggggccaaaaacggggtttacgtccgcggggatgcaaaaaaaaaactttttttgggggcaccctaaagacaaataacgggcgggggtttaaaaacggggggacggggaaaaccggggggtcccccaaattaaggggctggaaaaaaaaccccctttccccaggggggataaaaaaaaaaaggccccgaaaaatggcccttacaaaacctggccccgattaatagggaatggggccccgccctcttaggccaaaaaaacaggggggggggggggggcactgcagaggggcccgaacacccccaccaccgaatggcccccctcctcgggtttacccc

SEQ ID NO: 82736 - DNA, 694 bp, Glycine max
  Clone ID: PAT_MRT3847_45728C.1
ccacgcgtccgggaagtgaagaggagacaacaaagaagagcaaccaaccgtggagaggccgtcgaagaggagaaaatgaggcagattttggaagaaaaagaagtggaggaaaaataagaagaagtcttcttgagggaggaagtatcggaaatgtacagtgactcgtatgtgctacttttatattaaagggtgaaggacattttcaccctttcatcgacattgctgggtgccccaacaaaaatgttgtgtgctccaaacaactgtcaaaacttaacccaaacaacattattatagtactattgattaccaattattcatttgcttcatctgacacaatttaaagtattaagtcttgttataaaaattatgagctttagtctttctatacatacaaaagttaagttttggtgccatacatacgtatttttgtaataaaaaacaataaggaaattctcaaattccttccaaatatatagatcacgactagagctgtcaaaatgggccagcccagcccacgcgggttggcccgcaacggattaagctaaaagtgggctagcccagctcggcccacttttgtgtgggctaacaaaatgtcaacccagcccggcccatcacagattggtgggttatgcgggttgacccccttttctgcctttttttttgtaaaaaaaaataaaattattcccccccccct

SEQ ID NO: 82737 - DNA, 405 bp, Glycine max
  Clone ID: PAT_MRT3847_45729C.1
ggctcgagggaataatagtgtgttttatttgtgttttataaaaaaaaaaaaaaaaaaaaaaaaagagagatgagggcctgcctgctcataatgaacgtgaccacccggcattcaattgctgtcctggtcctgacggaagcgcgggggctcctatgctgagacttatctcagctcgacgtgaggatggtcctgcctgttgtctgtgacaaaatgatcctggatcacttgctacacatggttcgatcctggggggtaccaagtacatgcctgtggcgcctagatgactggtgctactcttcttagtaggaatgggcctactggcctttttgcaatcaggaaccctgccggcccggctgttgtcatgaatgatgcaccacccgctgcgaggcagtgttgcatttgggc

SEQ ID NO: 82738 - DNA, 527 bp, Glycine max
  Clone ID: PAT_MRT3847_4572C.1
gtggtattcggctggcgcaaaaggcgtgactatgtcatttaatctatacccgcgttctgatgcatggagttgggaatttctgatgcgtactggatttcattgcgatctcatttgtgtcactggatggactgccaccccatttcaggatgttcaggttacaattgttggggggatttcctctcaggaatgtgttcccaggacctatggcgttctaaatccacaaagtccttctgcgttctataggtggatgggaaaatggactatcccccaaggcacttcccgctctgtttagataatgcctttttttataaggggaggagctggtgcaaacaatgctcttctcatgattatgccaaatgctgctctttcactgtgcacatatttagctggaaatctcgtctttgatgggtctaagatgacttcttcttacatcaaatgcacagctctctttgttaaaaccctttgcaaactaggctgatgataccatcaattgtgaggccttttccccccaagctggagcagcttgt

SEQ ID NO: 82739 - DNA, 289 bp, Glycine max
  Clone ID: PAT_MRT3847_45730C.1
caccggcttcggaactaccggttcggcaccaccggccactccttttacgacgacaacgccttcgccgacgggaagatctacaccggcggcctcgaattctacggtggggacgggcccggcgggaacacccgagagggcacgcgtttttttgcccacacccgggtgaagctcaaacttcaaaagattgcgttccggacccaaaggacccacggggaccgggaccggaaaccacactctcggggagggaaccagccaggctttattaaaaaatatatttatatttaaggcc

SEQ ID NO: 82740 - DNA, 444 bp, Glycine max
  unsure (1)..(444): unsure at all n locations
  Clone ID: PAT_MRT3847_45731C.1
caaagaagtaatctccagtaggtgaccacttcagcatagatatgcctcctaatccacgtcgaatgggtgttcccacaccttgagcanaatcccatacagtgaacgaggagctttcatatgaagcagatgctaagtatcttccatctggactccaacttagagcactaacatgctcatcatatggactacgaagaaaatcgaccaggatataccgattccctgagcttctagacaaacctcctaaaaaggaagcagctccagatctaacagatgcagcatttccaggataagaagcagcccacatgcaaattccacccttgcaacccacagcaagcattttcccaccattgggcctccactccagcactctagcatctctctgcgactcatttgtcaaaatacttggatcctttccctcagactcttcggctcgagcggctcgag

SEQ ID NO: 82741 - DNA, 672 bp, Glycine max
  Clone ID: PAT_MRT3847_45732C.1
accagtatccctcccatctctatatttttctattccccttcttctctctttttattcacttcctccaccatgcaagctattattatttctttccttctcatcatcacatccctgcttttcagttctttctttcttcttcttttccctttcctccactgctggcaattcggctcgcacaaaaaattgcctcctggttccatgggttggccttatctaggagagaccctcaagctctacactcaaaacccaaattccttcttctctaaccgacaaaaacggtatggagatatattcaagacaaacatattggggtgtccttgtgtgatgatatcaagccctgaggccgctagaattgtgcttgtgactcaagcacatctcttcaagccaacataccctccaagcaaagagaagttgatagggccagaggctgtgttctttcaacaaggtgcctatcactccatgctcaagaggttggttcaagcctcttttttaccctccacaattaagcactcagtctctgaggtcgagcgaattgtcatcaaaatggtgccaacttggacctacaaaactatcaacaccttgcaagagatgaaaaagtatgcatttgaagtagctgcaatctcagcttttggggaaataaaggagcttgaaatggaagaaatcagggagctc

SEQ ID NO: 82742 - DNA, 350 bp, Glycine max
  Clone ID: PAT_MRT3847_45733C.1
aacgtcttgatacttgctcaattttcttgtggaattgcctctttgccagtctaaaatgtgtgggcgggctacaatgcattgctctgctttcacaaacacggtccaaaagagaaaattgtcaatcttcttctacagctgatcttacccatccgggctgtgccctacctagagtgagcagtaaccttctggcttgaagaaaaatccaaccttgcaactcattcgtctcgccgaaccggtaataaactcctggtgaatggggaaatcgtggtcaccattgggcctgacttcgagacgttcctgagtcacttctcatctgctgtggttttagttccatatggccccaaactact

SEQ ID NO: 82743 - DNA, 363 bp, Glycine max
  Clone ID: PAT_MRT3847_45734C.1
aaaccaagaaacgactcctcccccctctaaaagaaaacggacagaggacccctcacaacgccgcgggcagcgaaccgcacacgccgccgcaaaccgaacaacacaccggaccatacaaccggcagaagccacgggcggcgcgcacaaaaggcagggacgcacccaacgcaagcatgaaacccgcgcccaccaagaaaaccccgccgaagaccaacaaacgcaacgaactacccccaccacgaagaaaacacaaagaataccccgacccgaccgccaaggccaaagaccccgcgaaaacaacagcgaaacgcgcgggcggcccaaaacaactaaaggcaccacacacccgttattgccacaaac

SEQ ID NO: 82744 - DNA, 394 bp, Glycine max
  Clone ID: PAT_MRT3847_45735C.1
tccacgcgtccggatagatctaatgaagatcactaggtacaaactacctagcgactattggaaacttcctaaacctaaccatctaccatatcttgctcatgctcaaaattatatcactcaatccgattactcatacttctaacccatgatgatagcagaacctgtagtcaatgcgacgagatctctatgaaccatcaacttgagtaagtcagtaattcaatgaaagacgctaacgactcataatcgttgctcactgtagaacccgattgtatatgatacaccgataaacaagatagttgctacaacctgtaccgagagccgagctcttatatacaacaccagccaatgtgtaccatggacacacgtaatctgcaatacattcacatcgcgctct

SEQ ID NO: 82745 - DNA, 433 bp, Glycine max
  Clone ID: PAT_MRT3847_45736C.1
gttcatacctcaccaatggaactctcttcttccttcacacactcccacaacttgttctctttctcatcatccctcactcccactcttcgacgtcaaaccctccgcgtctccgcagtaaccatagacccaccgcaagagcttcccaagaacagcccccagcgtctccttaaggagctcgccgagcgcaagcgcccctccccgcgaaccccacgcgctcccccgcgaagattcatcctcacgcgcccgctagacgacaaaagagtcgcggacaggttcctcaacagcccccagctggcgctcaacacgtttcccttgctaagctcctgcctccccttctcccctctggatcacctggacaagtcatggatggagaatcacttgatggaagccaagcaggcgcttgggtaccctctggagccctccctcaccctcg

SEQ ID NO: 82746 - DNA, 266 bp, Glycine max
  unsure (1)..(266): unsure at all n locations
  Clone ID: PAT_MRT3847_45737C.1
tggatcgtgcgggcgggcggatttttttnnttttttttttttttttggagcactaaaaatactatttatcgttcgggccgtcggctgatttatgatcttccgaaaaacaaacgcccttttgttcttatactagaacttccgcgtacttagtgagggccgtaacttcaacttactttcttttttacggcacttcccctgccgtataggggggtttaacggcggactccttcttcggttctgggacttcaaaacccttcttttttttc

SEQ ID NO: 82747 - DNA, 483 bp, Glycine max
  Clone ID: PAT_MRT3847_45738C.1
aaaaaaatctattaaaatatctttaatttatttaataaaggttatagcatacattctatatataataaaattttaacaaataagcacttaattaaattatacactcaattatatttttgcttttaattttcattcttgtctcaattgcttttcgtattattggttatcttacaataaaattacttttagtaaagggggtagttttatcatttttaatcattattttttaatttcagtgatttgataattttaaaaatgaaagatatagtacaataacatattaatacaaatttaatgtctaaattttttgtatttaaatgtaaaaattgttctctcaacctattttcataaaattaaaaattcatttctaaatataagttttttaaagagatttctgaatataagttgaatatagtattttcttattaatagatttcaccgtaaaactgtgcatagagtatttttttttcttctaattttgaa

SEQ ID NO: 82748 - DNA, 762 bp, Glycine max
  Clone ID: PAT_MRT3847_45739C.1
tgcgctttttgttcctcggtctttgaattctctctcacacactcacacagtagtaggactagttagtgtcaaaactctctctttcgtctcatcaatcattcaattcaccgatcgttagagaccaagcgtattcgccgcttgatccgacgcaatggacgcgcgcgagccgctccgcccaccgccgcccactatcatggcgggccccacatcctacggttccgccaacatcggccctaattcctccgccaccgtctccgccatgctggcccccgccaccgcgcaattccccttcgccgccgtgccgcaacagcaccagcctcctccctcgtcggagccgttccccgcctccgcatacgacggctcctcctcgccgatgaaggcctgctccctcgccaagaagaagcgcggccggccccggaaatactcgccggacggtaacattgccctccgcctcgctccaacccatgcctcgccgcccgctgctgcctccggaggcggcggcggcggcgattctgccggcatggcgtctgccgatgctccggcgaagaagcaccgcggaaggccacccgggtctgggaagaaacagcttgatgccctcggtgctggtggggtttggggtttacgccccacgtgatcttggtggagtctggcgaggacatcacagcaaaaattatggccttttctcagcaagggcctcggacagtttgtattctttctgctattggcgcattgggtatgtcacccttcacagtctgcatggac

SEQ ID NO: 82749 - DNA, 1044 bp, Glycine max
  Clone ID: PAT_MRT3847_4573C.1
cccgcgtccggtcaactttttttttatgctttctttggagacaaaaccaccaatgcagatgcaggatctgcatgttctgtttctctgcctgaattcactttgtttaaatttaactgagataaaagttcccttagactcgttgtcttctgaatgttcctaagttacttcaagtttctgaaaaaattagtctttttccctacattgttttgtttttctacacaaaaatcatttttcttcttcttctttttttttttactttactttatgtatttctgagctggcctattcaattcagagttcgcttgatctttctgctatgttattgcagatattagttacaatttctattattttgggttgatttgatccttgttgaattgttcactcatttctcggtcttctattgcgacatttgttgttttcttttgcttgttattatgataataataacgtaagttttagttggttgatctctgtgtgattcttggttgacgagatcatgtcatacctttctttcgtccttttctgcttttgcgttattcactttatcacttgcatgtatttctctgctgcgggaaaccagagtttgtttgtactactttactctctttctctctctcatgtgtcatttaccaagttttctgttctacctggttgtagaggtaaagtcagagtttgtaactatatatgcttttggtcatggacggttattttcattccgattttgatctcatttaggttagttaattcaagtatgttgtgactagttttatacttggtattttttttttctttctaatttcttcattttacaattagatgttctttactgctgtgaggaaaattgaataaaatatcaaaagtttgtttttggctttcaattggggattccatggtcttgatatgtatctgatcttcgattctataaagatctcaagattctgtgaaaaggaaagacataattttttgtgattaacccgtttgaaatttctagatagataggagtagtataagctctgccgtgttctctgtctttgttttctt

SEQ ID NO: 82750 - DNA, 449 bp, Glycine max
  Clone ID: PAT_MRT3847_45740C.1
aatgatgtcatgtgattcgtgtagtccatctcaggtagtgggataaggctttgttgatgtagtaatttttttttaaaacaaatgtgcaaagtgtaacacggtcttggagagatgctttgtgtggaatttttcttcttggtctaaataaatttcaaaatgtcaaaagtaattgtataaagtataaactgttttggttggcagtttgcttatgtatagttgctacgttatatttggtaatccatgaaattgttatatatctattgtaggggcaggaacactgaatatttctctaatgtattgatttttgaagatgcatttggaggaatggtgattcttctgtgaagggaaccattgcattttttatggtgtcaaacttcagtacctaagtttctttttcttatgttattatgtcagacatctatactgattatggacccctttcatatctt

SEQ ID NO: 82751 - DNA, 2334 bp, Glycine max
  Clone ID: PAT_MRT3847_45741C.1
gaaggacacgattcggctcggcagaatacgacagaagggcggactaaatggtgtcatgcgttgttggcatgaaaatgtgttcgcagcaaatgcagatgcaaatacaaagcaaacggtggcagcagcagtatcagcagcaacatcccagtgagcgaggttttctggactctcgtcgacaaagccgacaagaagttctccaaaatcaaagaccttcccttataccaacgcagcaggcatgatacttacttttataaggtgttcaaggtctacacacaattatggaagtttcagcaggagaatcggcagaagctgattgaagctgggctcaggagatgggagattggtgagattgcatctcgcattgggcaactgtattttgggcagtacatgcgcacaagtgatgcaaattatctatcagagtcgtatatattctacgaggccatattgactcgggagtattttaagggggggttgtttcaagatgttaatattgcaaacaaacaattgaggttcctagctagattcataatggtgtgtttggtgttgaaccgaagggaaatggtgcagcaattggttaatcagcttaaagtattagttgatgaatgcaagagaacattccaggaaagtgactttaaagaatggaagctggtggttcaggaaattgtcagatttttaaaagcggaaactgcttttatgaatatcaggcccttgagatacagtctagttttggactctcatcctgatactttaccccatgtagctgcagccatcacgaagagacatttgaaactacgagatgctgtattaagtagcttccatccaaatgaggtaaagtattcagagctcaccattgacacttttaggatgcttcaatgtctggagtgggaacctagtggctcgtttttccagtcaagtggttcaaaacttagtcaaaatggggctactggaactagtcgtatcagttacatccaagacattgctgatcctaccttacctgcaaacccacggaaagctgtgctatatcgtccttcactgacacattttatagctgttcttgccacaatatgtgaggagcttccttccgatggtattctccttgtgtatttgtcggcttcaggatattgtggttctgcccagaatgaatctggttgcatacactttggtccacgtggagatagaggatcaaactgcatatatccatctgactttctaccgtttactagaagaccacttcttttagtcattgataacgacaacagcaaagcttttaaggacatagcagaagcggaaaagggagaatcagttgctatgctcctttctccaagctgttcgcctgctttgtctgattgctcacataattcaaatgggagcctattcaccatgtttcttacagctccgctgcaagctttctgtatgctgttaggactttcaggcactgatattgatttggacccattcaacaaagcggaaatgctgctctcatcttcattaaataactggggactagcattggcaacatcagacacacttaatcctgtttggggacagattttcggtgatcccttcataaggaggcttcttttgagattcatattttgccaggctgtgttgaccctatatgcaccagtttacaatgacaacaaattccttccaacatgtgtcccttctcttccaacgcctgtcctgcccccaagttactcatatcagagtgtcattctgaatctagccagcatgtttggtgcaactaagaattttatcttctcagaggatgttcttcctgaaaatatacaaaccaacatcatgaatcagttaactctatgaagataaccaaaagcttcacttcagtagaatgataatgtatacagcttgtttgtatagcaagaaaacatgaattctatcaacatttctgtttgttcctggtggatttcctagaatttaagttcagcctttagtgtgaacatggttttttgttatcgaactttttttttggatcttaggttttgtgcctttgacaagagaacttctaacgtggattgaatttcaatatgttcgttacataacaagtttcatggtcgagaagaatggaatagagcaaggggaaggaagttttgcatagaaaccttattttttttcttacgctacgaccattgtcgtcatgctttaatgtttcttcacttaaatgcttcgttaatgttttgtaatgaatgcaatcatggcattttctctgcatcttgatcaatctttttgtttatttattaattaccttggaaactaaaatcacatttgtattttaaatatttttatttgtggttctgctcaagaactttggacatt

SEQ ID NO: 82752 - DNA, 303 bp, Glycine max
  Clone ID: PAT_MRT3847_45742C.1
gcggaagggaattacacaatgacaggcgttcattacacatgagttgggcctcttccaacttaaaagcagaggattacatttgcccatgacgcgacacatgcaccaccttataatcattattttacatcttttcatacaaaattcaaagactttaaatttttaaaagaagaaaaggggttaacaggtcatctttatgaaatggaaccaaaacccacaaacattggcttgatttttggtggtgttgttgttcccaacttgattaaacatgaaccgtttgattgaattacttggacttggagggaa

SEQ ID NO: 82753 - DNA, 858 bp, Glycine max
  unsure (1)..(858): unsure at all n locations
  Clone ID: PAT_MRT3847_45743C.1
aattcggctcgagcacaatcatcagttgttgcggactgagtggtgtgtcgcgttgttgacattagaatttgatcgatttggggttggggcggaagaaagtggaaacgacgccgttggaaggtgggaagaagatgagttcgcagcaaatgcaaatgcaaattcaaatccaaaacagtggtggtggcagtggcaacaacaacagcagcaacatcccagtgagcgaggttttctggactctcgtcgacaaagccgacaaaaaactctccaaaatcagagaccttcccttttaccaacgcagcaggcatgatacttacttttataaggtgttcaaggtctacacacaattatggaagtttcagcaggagaatcggcagaagctgattgaagctgggcttaagagatgggagattggtgagattgcatctcgcattgggcaactgtattttgggcagtacatgcgcacaagtgatgcaaattatctctcagagtcatatatattctatgaggccatattgactcgggagtattttaaggaggggttgtttcaagatgtgaatattgcaaacaaacaattgaggttcctagctagattcataatggtgtgtttggtgttgaaccgaagggaaatggtgcagcaattggttaatcagcttaaagtattagttgatgaatgcaagagaacattccaggaaagtgactttaaagaatggaagctggtggttcaggaaattctcagatttttaaaagctgaaactgcttttatgaatatcaggcccttgagatacagtctagttttggactctcatnctgatactttaccccatgtggctgcagccatcacgaagcgacatttgaaac

SEQ ID NO: 82754 - DNA, 717 bp, Glycine max
  Clone ID: PAT_MRT3847_45744C.1
tggagatagagttcaacgagctgattatcgaatcaagtttctaattattttcaagttggtttgattcattgttacccctaattggaaggaacaaaacagcagaagggagtgaaaatgcaacagatgtgaaaagcttgatttggcaatgatgaccaacaccaaagaagaaacaaggatcaaactgcatatatccatctgactttctaccgtttactagaagaccacttcttttagtcattgataacgacaacagcaaagcttttaaggtcatagcagaagcagaaaagggagaatcagttgctatgctcctttctccaagctgttcgcctgctttgtctgattgctcacataattcaaatggtagcctattcaccatgtttcttacagctccactgcaagctttctgtatgctgttaggactttcaggcactgatattgatttggtctgttataaacacccattcctttttttgagcaagttccttaagaaaaaaaaagaaattattttcattttctgaaagtggaagtttctgttgctattcctgatccctcagcaacttaaatttgatttcaggacacattcaacaaagctgaaatgctgctctcatcttcattaaataactggggactagcattggcaacatcagacacacttaatcctgtttggggacagattttaggtgatcccttcataaggaggcttcttttgagattcat

SEQ ID NO: 82755 - DNA, 365 bp, Glycine max
  Clone ID: PAT_MRT3847_45745C.1
gtcaaatctcatgttattagattgattgaagaccttcacaggtatgcttatttcaaatgatctttatgttttttgtgtgaagtgatgtgtgtatgtatatataggtggaacttggagatgtcaagtatgttagagggatctatacagatcatgtcaaaggccgagaccgggactaccatgtttttagtatgggtacttatcttggactgattggaaagaggatttctactccctcagatgtaatatatgctggccttggaacgcattatgtgccatctggaaagttaggtttattcatggatgccctctatgtcagaatgtaatatcccaatttttcgtaaataaatctaaaaaagttttttagt

SEQ ID NO: 82756 - DNA, 139 bp, Glycine max
  Clone ID: PAT_MRT3847_45746C.1
ttattgaaaaaggctttggtattttaaagggcaattaaaaggcactggtagtgtgaaatatctctcactataatgcatcctttcttaaaacgagccagaggggcaatgaccgcccccttgttttttttttggtgaactg

SEQ ID NO: 82757 - DNA, 2349 bp, Glycine max
  Clone ID: PAT_MRT3847_45747C.1
atgtatccttcaaacttgggtggttcaggtcgtggtaatcgtctcaatcatgctacggtatctaaactcgaagcaatcttcagggaatgcccatatccgaatgaaaatcgacgccgtcaaataagtgaggagctagagcttagtctaaatcaagtcaaattttggtttcaaaataggaagactaaactaaaggtagtctattattttctttatgatgcttcatttttaaggacaattatttatacactagttttgtgtaattttcaggctataagtgagcgaatagataacaatgctcttcggcgtgagaatgaaaacatacaatcagaaaacctattaatgagagagtctctgcagaatgcattctgcttatcttgtgggggtctacccgtgggatcagtagagcgaaaacttcaattgcaatcattaaaggcaaaaaatattcaattagctaaagaggcaagaggaagattgctaaacccaatagttggacttccttctccttatcaacatagtcatgttcttagtactcctggtttcaatcaagatattcctgctccagctcctgctcttgattgctatattcctgatcctcctagtgatgatgttgcacttgattattgtattcctactcctgctagtgttcttgcggttgatcactctattccagctcttgctagtgatccttggcttggtcaagatattcctcatcttcccactcttgccacattggatcaagatattccacctcttggtcaagatacttctacccttcctcaggatcatatgcccaaggatcttgatcaagaattggatgcattgcgcggaattttgaacaatgatttgatattccaatctatcattaaccaaaggatagacctggacaatgcaatgatgtcacaaattgcaaataatgcaatcgaagagttaattaagcttttggatatgaaccaacccttctggtctatacatgactggaagttagttcttaaacgtgataattaccaaagcatacttggtaggagacattgcttacctggacctcatgcacggatagaatcctcaaaagattcacgaatagtggacatgaatgcggaacaacttgttcaaatgtttatgaatttggaaaaatgggttgatctgttcccaacaattgttacaaaagcccaaacaattcaagtactcgaaaacggtttggtaggaaatcgaagtggagctttgttgttgattaatgcagaaatgcacattctttcacatttggttccaactcgacaattctacttccttcgttattgtaaacaaattaaagaaggtgtgtgggtgataggggatgtgtcaattgattccttagaatacaaaaccattgttcctcgcatttggaggcgtccatctggatgcctcattcaagaaatgaatcacggattgtgcaaggtttcttgggtggagcacgtggaagtggatgataagatgcaaactcaccagcttttcactgatgttatttgttgcaataatgcatatggagcagaaagatggctttcgacacttaaaagaatgtgtgagagatttgcatgcgcttcagctgaaactatacccagttgtgacgagtctggagaagccattttatcacttgaaggaaagaagagtgtgatgcacttggctcatcgaatggttaagactttttgccgcactttagacgtgtcagattgtgagaacttcccatatttaacgaggatgatgaataatggtgaggttacaataattgttcgcaagaataactcagaacaagatgtgccacaaggcttgattctcagtgctgctacctcttttctacttccgcactctccagaaaatgtttttgacttcttgatagacaacaagaaacgagctaagtgggaacctttttggtatggaaagccagggcacgagattcaacgcatctcaactggaaataatccaggaaatttcatttcaattacgaaggctcttggccccagtgataacaatatgatagttcttcaagaaagttatgcagatggtttgggatctatgatggtatactcagcttttgatacggagacaatgaattttgccatgaggggagaagacacgtcacagttgttggttcttccctctggctttaccatatctggggatggtcattcaaatgcttttgaaggacaatctagacaagtggtgtcaaaaggttcattggttactctaatgttacaagttctagcttctagtactcctagcatggacatgatagacatggaatttgtaggttctgtcactacacttgtgtcctcaacagtggagaaaattaaagctgctttgaattgttccaattaa

SEQ ID NO: 82758 - DNA, 329 bp, Glycine max
  unsure (1)..(329): unsure at all n locations
  Clone ID: PAT_MRT3847_45748C.1
gttgttgggtgttttagcccaaaggctgcagcgcgttggtagtcacagccgctcaacgtaaatgtgtggcatttggttcgggcaaaggactggctacgccctgcctggcggtcgtagctgtgccttcagttcggtgtgttttccgtaagacttagcggctttgggggggggggccccccanaagagccaagtcccctcgtcctgtgatagcagaggctaaggtgaaaaatcccggcttccctctctccttgtgtcccagggcgggtttcttgtttattgctcgctcccctntcctctcgtgtgccgccctctttcttgcccctgctcgc

SEQ ID NO: 82759 - DNA, 372 bp, Glycine max
  Clone ID: PAT_MRT3847_45749C.1
caatactcacaaactaaatatggatttaaacagggccgctttttcttccagggggataatcaaatctatcatttattcttaaacatcttttaactcaacctaaaaaaaaaacataatacccaattttaatcatcttaacacaataaaatccacataaattaaacttaaacattattacaattacaaccttattaaacaaatcaataaaatcaattttcttttcttatctcctaaaatatactttaaggactcctctaatatttttccttataaaaactccatcaattgtataaatcataccaacctaaacaatacccaaactagatataatctctttataacaactcaaatcataataattacaaaatcccc

SEQ ID NO: 82760 - DNA, 890 bp, Glycine max
  Clone ID: PAT_MRT3847_4574C.1
gtctaataaatttgcttctcggctttggggagattattattttcatccggataccagagccttcaaaaagaaaccccctgccagtggaggggaacgatcttttgtggagtttgtgctggagccactttacaagatatatagccaggtgatcggggaacataaaaagagtgtagagacaacacttgctgaacttggagtttctctaagtaatgcagcctacagattaaatgttaggcctttgctaaggttggcatgtagctcagtttttggtccagcttcaggtttcaccgatatgcttgttcagcatataccttctccgagggatgctgcaattaagaaagttgatcatatatatgctggtcctaaagactcatccatttacaaagccatggcacagtgtgattcttatgggcccctaatggttaatgtgaccaaattgtatccaaaatccgattgcagtgtgtttgatgcctttggtagagtttatagtggtaagatacagacaggacaggctgtacgtgttctaggagaaggatactcgccggatgatgaggaggacatgactgtaaaagaagtaactaagttgtgggtgtatcaagctcgtgataggatgccagtagctgaggctcctcccggttcttgggttctaattgaaggtgtggatgcttcaatcatgaaaacttctactctttgtaatgtggattatgatgaagatgtatatatattccggcctcttcagttcaatacactgtcagtggtaaaaacagctactgagccattaaatccaagtgagttgccaaagatggtggagggcctgaggaagataagcaagagttatcctcttgcagttactaaggttgatgaatctagggagcacactattttaggga

SEQ ID NO: 82761 - DNA, 308 bp, Glycine max
  Clone ID: PAT_MRT3847_45750C.1
caaaaatagggggtgaggggggagatgacaggggaagagaataacccaaaagaaaaaaaggacacactaaagggaagaacaccacaggggaaagggcaaaggggtcccccggggaggaaagagactttaatctacaggggatccacaatctggaagacaaaaacgggggggtcaaagaaacgctgcaaaacacaagccaaaggcaatcccgaggaggaggaaactggccatagcaacccggagcgctccagagagctgctttccactagagccatcagaaggaagagaaagacaactcaattaggggg

SEQ ID NO: 82762 - DNA, 459 bp, Glycine max
  unsure (1)..(459): unsure at all n locations
  Clone ID: PAT_MRT3847_45751C.1
gcagattttgtgtttttgtttctgatatctattaatcatttgttaagtaaccttggctggagaaataatggcaaattacatgtgatgagcatgaaaaagtggaaagactaagtcatctggatggngccaataataaatacttacatatgttctttgctctgcctaccaaattctagcccatttagttagtaaggatgtccttgaaattttcctttttttgtggatggttgtggcatgataagatagcatatagctattgtattcattttagcttctccaactaactgattttggcttatgcataagttaatagaaaagcttcattcagtttatctcattttctctgcctatcagtgtgtttaatgagaaatttatccagacaaaacttgtatcatttactgacatatgtggtccattgcttttctgctatgatttggaattagttgtctatgtatttaa

SEQ ID NO: 82763 - DNA, 668 bp, Glycine max
  Clone ID: PAT_MRT3847_45752C.1
cccggctcgacccacgcgtccggtacagtccaaaagtagttgaagatataacaatccacaaggaacatagagttcagcaaactcttctttggtaatcctggtgaatctgatgaaataaaagaaattcaaagaaggattttttgtccaagatggagacatgcagatcagcatgcaagttcggaggaaaaactctccggataataaaaagcttacagaatgagctgcctcacttagacttggagatggaagaagccggtctgtggatttcagtctcaaccgtacttagtgttatgacttttacaacctaaggcctctgtagtaatccatcccctggcaatatggtgagggtttggactctgagtctacaaatggttttatagtggggatttggacatgtttggaacttttcaatatttgtttttttttttttttacgtgcccgtattgttacaatatttggttttgatttttaactaaatcaggattaaaaggttttacatttgattacagttttggaagagtctactacgtctggtaaatagaaaactatgtttaattgcgaagattctttttaattgtaaaaattaaaaggttttacatttgattatagtttgaaaaattgcttgactatttctttgtttgatcctatttattactcttgattcatgt

SEQ ID NO: 82764 - DNA, 357 bp, Glycine max
  Clone ID: PAT_MRT3847_45753C.1
acgacgctcggaattcggctcgagatggatccaagagccgtattagatggaccgtcactctccgatctctctgccactgggccaagaatatggcctcacaggtatgcaaatctgcttacagagccacaaggttccttctatactctccatttcactctcaaggacgtgcgctcggggctgctgcggctgtttcattgcgcagcaaagtgcctctttttttactgaaagaacggttctggaaatggatccgcttcttcatcatcattactatcatggatttcaggagctcttgctcttactgacgcagcttacatgttccaagatcaagatgtgcaagcagcttagctggagcgcact

SEQ ID NO: 82765 - DNA, 302 bp, Glycine max
  Clone ID: PAT_MRT3847_45754C.1
aaaaaaaaaaaatttggggcccaaattaaattaaaaaaaaacctcgttttttttttttcccaccggtttttaaaaaaaaacaaaagggtaaaaccccctccttttttttaaaaattaagctaaaccccccctgccccaggggagataaaaacccccaacctcaaggggggggggccttagggggggccttaagggtaatggggggcccaaaccccgcctgggttttctaaaactaaaacgttttataacgcaaaagggggtcccccaaaaacaacctggcgggaggccccccagttttttcc

SEQ ID NO: 82766 - DNA, 251 bp, Glycine max
  Clone ID: PAT_MRT3847_45755C.1
ttgggagcccctgcttgttattgttttctgtaatgaatgccacgctgcaaaacttcttctcattcacggtgagtccaccccaaaaacctatgtctttgtctgacaacctagcagcagcttattctaaaaagagcaccacatttgataaattagacttaactagctatctatcccagtctaaaacatcggagcttaacaaaactaaagaccatattacctatccagctttcaaataaacattatgtatttta

SEQ ID NO: 82767 - DNA, 1266 bp, Glycine max
  Clone ID: PAT_MRT3847_45756C.1
attttctgctccaatggtttgataacgtaagtgaaagtttgcattatgaggatcagaagcaatcagaaacagttatggaagatgacttctttgaagagtgtgaatatcctatccctactaatgaatctgagaatttgcattcatgtaaatcatccagtaaacctgctgttaccgcagcagttgttgataacaagaaagaattcggctcgagtgttaacaaagttgttaaagagcaaataacaacaacaacaacaacaagctcggttgatgaaatgaaaaggatcctcaagagtctgaatcattatgatgcccttggatttagccgccacaagaagattgatgccgctgttttgaaaaaggaatacaggaaaaaggctatgcttgttcatcctgataaaaatatgggcagttctttggcaagtgagtcatttaagaagcttcagtgcgcatacgaggttctttctgactccgtaaagaagcgagactatgatgagcaattaagaaaagaagaatccatggctaagagtgtctgccagagatcccatagtagttcacatcaggataatgctgattatcgttctgaagaatccagacgaatacagtgcaccaagtgtgggaattcacatatttgggtatgcaccaacaggagtaaggccaaagcaagatggtgtcaggactgttgtcagtttcatcaagccaaggatggagatggatgggttgaatataaagggtctttggtttttgacaggcctcagaaggtggagattccacgcgcttttgtttgtgctgagagcaaaatttttgatgtgtcagaatgggcgatatgtcagggaatggcttgcaggccaaatacccatcgaccaagtttccatgtaaacatggttggcttggagaaaagccaacgttgcaactcgagtagattcccgtgggattttgatgcagaaatgatggatgaagacgaagaggcgtttgacctgtggcttgagcaggctctggcatctggtctcttctgtgagacctccaaacgcaggaagagttggagtccattcaagttgcatcaaaagaaagggaagaagcaatggcgaagaacatcgtgctgaagccgaagtctgtagggaaaattcatggttcattgcatgtccctaagggattgatgttctaaacattttttagaaggaaagtgatgcattgctgatatcaaaacaagaaggaaggaaggattagctaacactccaaaaggtgccttatcaaagatagaagttcaag

SEQ ID NO: 82768 - DNA, 451 bp, Glycine max
  Clone ID: PAT_MRT3847_45757C.1
caaggacacaatagcgttcagtatagatggcaccgaacgctctatttttccatactacaaaacacatggatatggggtggagaaatttaactcgaccttgtatgatgaatgggttaacaagggctatgcaccgacactgccctacactcttaagaattacaacaagctggggtctcatggcttcaagattatattcttgtcatgaagaacactggacaaacatgccgtaacataagcatacttaaagaaggatggctaccacacatgggaaaaattcatattcaaggattcacaatatccttacactccaaatgcagtttcattcataacagcggcgagagagaaactgatcaggcagggattcaacatagtaggaatcattgtagaccgatggagcgagctcctaggaggccacgtacgcgaaagctagagctttaagctttctgatccc

SEQ ID NO: 82769 - DNA, 253 bp, Glycine max
  Clone ID: PAT_MRT3847_45758C.1
tggctttcagacctatgcaggtggaagcaatggaggatacaataatgatgtgacataaccaaaactgaacgttgccataaaccgttttggaaggattggaatgaacttattgaggtgctggcacagtcgcaaagacttccgtcttgatgtcattgccatcaacgacgaccagcggcgtgaaacaagcctctcaccttatcaaatacgattccattccttataagcttatgttgctgatgtcatgcctgatggt

SEQ ID NO: 82770 - DNA, 108 bp, Glycine max
  Clone ID: PAT_MRT3847_45759C.1
ataaaaatggagtgtctgcatcatattttgactagtctgtgctttgtattggcctgggttgctgtgcctccacttaacatagatgcacaactagatctctcacaatac

SEQ ID NO: 82771 - DNA, 438 bp, Glycine max
  Clone ID: PAT_MRT3847_4575C.1
gattgtaagaattaatacattaactttgcttgattagacgatatctaccaaggaacatcacagaggtagtctacgtgatgctactagaaggatttgctaataagtctctcttgctcctgaagggtcgatggtatattggtcatacacatcattaaataactctctgcagtggaggcttgacgagctttcctctgccacctgaatacgagagcatcatctcgcttcctgacacatggtcataagcttcaattcatcctttgttacttcaccaaccatacctttatacccatattttgaacctatacactggcactcttgtccttctaacaatactaatctcattaagtgccacagccttaattgaatcaccagatgctcagtgaagtccacctccataagtgagaacctcaatgaacaccgggcttttttcttttatag

SEQ ID NO: 82772 - DNA, 333 bp, Glycine max
  Clone ID: PAT_MRT3847_45760C.1
gggggccagagaaaataaagagatgccttttttttactctggggttatttttgattttgcaaattaaattacacaattacagccgtacattacacattaattgggccttttccaacttaaaagcataggattacatttgcccatgtcgcgacacattccccacctaataatcattattttacatttttacatacaaaattcaaagacttttaatttttaaaagaagaaaaggggtttaccggtcatttttattaaattaaaccaaatcccacaaacattggcttgatttttgtcagatttgtttgccccaacctagttaaatttttacccttg

SEQ ID NO: 82773 - DNA, 1208 bp, Glycine max
  Clone ID: PAT_MRT3847_45761C.1
ccgatttctaagaaggaaccaccttttgttcccactttcctaagtttccttctcgctcccgtctctgaaatctcgagggtttcatcgttgctgaatcaacaattcggaaccagttagcaatgttcagattctggggatcacaagagcaacaatcgcaggatggttcttcgcagtcacagtcgtggtatccgccatcggtggtgagttcacctacttcatcgaggcctgttacaccgactgcatcttcttcttcattatcgcagaggccttcgtctcatgttccaccttccgaagctgctgcagttattgccgttttgaaggacaagagtgttgatgagttgcggaagcttttatctgacaaagatgcgtatcaacagtttttgcattcgcttgatcaggtcaagattcaaaataatctgaaagatgaactttgcaaggagaatttacagcttgcagaggaaaatcttcaaaaggaacctcgcatcatggaacttaggaatcaatgtagaataattcgaacaactgagttagctgctgctaaggagaaattaaatgagcttgagaagcagaaagaagacatgttgaaattgaattccgcagcatcccttctccaaaggattcaagagtctgtgaataagaccgacgaggaatctgaaaacttgcaccagcatctccttgacagagagatagaccttggtgcttttttgcaaaagtacaagaagctacgtaccacttaccacaggaaaactcttgtacatcttgctgccaaaacatcaacagtatgagcactgacatgaaatattaagaaattaaaactggttttggcaagtatgtatttgatttttggttcattattgtcaatagttatcattggtcaaagatacttgccaccaaattacatagagtcacagtcgttgggatagaaccatctactatcaattagattgttcatatatgtagagcctgagattgttcattgtggtgacattgtcaagtggtttcatgccacttgggatgaggtatggacttgcatttacttttctagtttgccatcggctatcttcaactttatttgtatgaactctgaagtgtgctgtagcttatgagatcatcatcgccgatataggatttactgttgtgttgtaaaatgtaaaaaatgctgactttcttttctttgggagcaactacaagtttttcagaacccattt

SEQ ID NO: 82774 - DNA, 123 bp, Glycine max
  Clone ID: PAT_MRT3847_45762C.1
agatccattagttagattaacgcggtgatcttgcaagtgtggcgggggaagagggaattcccataacaccttttcgtggcctgcaggtgtctcaagatctgagggccttgatgacatttgcga

SEQ ID NO: 82775 - DNA, 307 bp, Glycine max
  Clone ID: PAT_MRT3847_45763C.1
ggcagcaattttgcttttgtaattagaatttgtaaagttaatttttacactcacgataaccaaagattaacatattagttgtgtaatgataaaaaaaaaaaaaaaaaaaaaaaaaaaaaaaaaaaaaaaaaaaaaaaaaaaaaaaaaaaaaggggcgcacacaaaaatagtaaacctcgataacccgaaaataaattccggaccgttacgtgggggcggccaaactttccctatggggaacctgataacactttgccgaaatacatggcacaagctcattcttgagttaaaatggtgtaccgaaata

SEQ ID NO: 82776 - DNA, 349 bp, Glycine max
  Clone ID: PAT_MRT3847_45764C.1
cttatgcttattcttttgtcatttttgttttttttaaaaaccctccaaaacccaaatctcgagatatccataaaagctaaatagaccaaaaaaaagggtagaaaagatgccccaaaggttattgaaaaaaaacccaaagacaaaaaagaaaaaagggaaaaagaaagaaaacaaaacttttttgcaccaaaagggggggcccctagaacggcaccgggaaacgtccaggaagagatcattagggcccctcaatgtaaggggaggccaccctggaacccaattctcacaaagttgtctaagggggccgatcgggcgtttgcctaagggccgagggcataaagcctcggga

SEQ ID NO: 82777 - DNA, 677 bp, Glycine max
  Clone ID: PAT_MRT3847_45765C.1
cccacgcgtccgcccacgcgtccgagatctatactaataaagatattgttgacagataacatgggttttgtatctcgaggcttgttattttcattggcaatacttgtggttactttgaagattttgggaagacagaaagtaatatgaaagtgaaatcaactgtttttctgtcccccaagtttgaacttggaccaggatcagctaccataaggcattattatgacattgagtttccaagaggtcacgttgcactcaagagtttcagtggtgaagtagttgatgaagcagggaaccctgtgcctctccatgaaacttatctgcaccactggattgttgtgagatatactatcaacaacgtaaagatgtgacacacacaaggtatgatgatggccttggacacttaaccactctgattatattttggtgaggaacagtggcacatgccagagagatattcttccacaatactatggccttggatccgaaacacgacgaacagacacggatgttccggatccttttgggatagttgttggtaatcctgcacgaattgcacaaggggtatgtggagaagtggatgatcaaggtgcatgccattgatacacgcggtattgatggataaaatggggtgcactgagtgagagtgtgatctttatgatggggcaaaggatgaaaat

SEQ ID NO: 82778 - DNA, 335 bp, Glycine max
  Clone ID: PAT_MRT3847_45766C.1
gtcacaatgtccagaatatgaaacacttaaattgagagcgcctaaagttgaaagcgggagacaacggtgttacagcatgctggacatcattgtgatgaagattgtgacaataattaatacaataataactatactataaagcttatattaaaatagctttaaatcatcctcattccagaaataattttgcttcaaacaattataaacatctgtattaacgatactaatacactaacttctgtgaccataacatcatatgcttcacatcatgaccaacgagaatcgctgatataaacggagctttgccgaatatggtttatgatggttacttcatt

SEQ ID NO: 82779 - DNA, 434 bp, Glycine max
  unsure (1)..(434): unsure at all n locations
  Clone ID: PAT_MRT3847_45767C.1
cacgcgtccggaccaagcacgcatcaagaagatctcgctcgcgtacacctgaccgcggccgctccctnccgcgcgctctccctcttgagtgagcgctcccaccgccggggggatcaccggacgccgggccccgacccgccggggaagacgccaccggctgagactcggcaggacgcaggaatcaccatggtagatcgaaagaaagcagggattgcgactttagtgggacagcctaggagaacgagcatctggcagaaggtagaacggcgacggacgagaaggagaagctgaagggagcgaggatgaggtggagataatgaacatgttggtgattcccacctgattctacttcaccaaggggaaaccgggtcccggagctgacgtcagcggacttagaaccgtaaccaagcgccagccgtgccatgacatgaacc

SEQ ID NO: 82780 - DNA, 1561 bp, Glycine max
  Clone ID: PAT_MRT3847_45768C.1
caaaagttcagacaatttaaacactaatagatatttactttacaattgatcttgtcacacacaaacacatacatatgcacagttaggatatgatttaaatgatgtcacttctggtgaagctggcccgcctgcacgtaccggccccgcccaccgttcaagcgcgtgctccactgctcccgatctaatgacccattcgcacactcaaacacagacacatacctacgcactgatgggatattacttgccggatgtagcgtcacttgcagcttacaatgtctcagccaccaaggatcacgtgctatatgcattctgtcatcaactgggacaaagttaaattttactcttcgtcaaccggtttggtgtgagggtactttaacgtatgagggactgttcgagattctttccttgtatggttcctttatgccaactgagaatggagttacaagaagtagatctggtgggatgagtgtctctttggctcggctggatgaagaagtcaggagggcaagaagacttttaagttttatgaagctggaggtgatggaattgcatactcggttggtgccaatttcacacctcacatccttacagtaaatgatggcgaggacgttactatggagattatgtccttctctcaacaaggatatcgagcaatttgcattctgtctgcaaatggcacaatttcaaatgttacactacgccaaccaacttcttctggtggtactttaacatatgaggggcggtttgaaattctttccttgtctggttcatatataacaactgagaatggattaacaaaaagcagatctggtggtatgagtgtctctttggctggtccagatggtcgagtaatggggggcggacttgctggtttgctggtagctgctggtcctgtgcaggttgttgtggctagttttcttcctggtcaccagttggagcataaaaccaaaaagcaaagggtggagcatgtatcaactgctgcccctatgcatgtcaaccctacttcagctgctgaagaaataagaattggtcttggtggagtaaagccaatcatgacaccagctgcttttcaagtggaccacatttttggcaatggccaaagctctgggaactcagcttctgatgattcagcctctttccctgaaaatgagtccaaccccagccatgcagatgctggagttgcatgctaaacatgctccctgccaagtatttggtgttctacagtgtcaaaccccttttgggctcatgcttgactgatgctgacaattaacatgacacttatagtgggatggatgagtgtcaggttggttttgacttgagaaattgttcgctttgtgttaggtgttattagtgttaggaaatctactttttaggctttccttgtttctctttggtgttatctaatattgtttactgagttgtagcagttagatgtaggatatatgtttgaaatgagtgcatgtgggtgctttctaaactgtaacctaacgatattatttgttgtgaaggaggaaattacatttcagcatttatttgttttctcaaaaaaaaaaaaaaaaaa

SEQ ID NO: 82781 - DNA, 499 bp, Glycine max
  Clone ID: PAT_MRT3847_45769C.1
cttgggggggggggggggggggggggggcgaccgaaacaggctaatacagagaagaaggaaggaaggccagagtttaggagatacgagttgggttaaaagagtagcacatagaaaaagaaaaaataaacaacttgccgtgtgcggtagataataggagagtatacaggcttaagtaggggagaaatgaccctcaggtggaagggactataaacaaagcataggtaaactttattgttagcacaccaacaagattatttagtaaattgagaagccagagtaccctgtagtgactgccgttgccatagtacaacgttaaacccgcacccggcgtgtggaaaactgctaggagcactcgctgcgtgggcgaccaggtggtgtttaaccgcgttactgtactaaggctggttgtaaaacttgcgggacttagcctatatctgggcgtacatgccagcaacagggtagacgacaacatccacaacggcacactcacatttaagt

SEQ ID NO: 82782 - DNA, 379 bp, Glycine max
  Clone ID: PAT_MRT3847_4576C.1
gcttttaaatttgaacggtgtctgtttccaggtaaaatcctgaatatgtgaattcttaacatgcaatgcatgccgcgaaacgggggtccagaatatgatgcttaagctaaggacccgaagaaggaataggaggagactattaatgctactaaaaacacacttatcaaccttacaattatggaaaatctataaaagtacgcttatgatgaatgctatcgagaccacatagattgatgcgactacgtggactcatgatgctaagaacaataatggcctgtaataggcttggaaagcatctctaatatattgagatcatgctcatgctgactaacactattgtgacattgctaaaccgatgcagggcgcataaaatgcttta

SEQ ID NO: 82783 - DNA, 445 bp, Glycine max
  Clone ID: PAT_MRT3847_45770C.1
cgttccaaggaaggtttcccgtcatcactgtatgacgtcctccttctttgggggggggggggggagaagaaggaaggaaggccagagtttaggagataccgagtgtggcgttaaaacgagtagcaccatagaaaaagaaaaaataaacaacttccgtgtgcggtagataataggagagtatacaggcttaagtaggggagaaatgacccgtcaggtggaagggactataaacaaagcataggtaacgtttattgttagcacaccaacaagattatttagtaaattgagaagccagagtaccatgtagtgagtgccgttgccatagtacaacgttaaacccgcaccggcgtgtggaaaagtcgtaggagcacgtgcatgcgtgggcgacccaggtggtgtttaacggcggttagtgtactaaggcgtggttgtaaaacgttgcggg

SEQ ID NO: 82784 - DNA, 186 bp, Glycine max
  Clone ID: PAT_MRT3847_45771C.1
aattattttttttttttttttttttttttttttggaacaaacactcttatattaataaggccgggaactataaaactccattttcaaatttcttacatatcattcacacacacttttaattcaacccaaattgagcccatcgcccctatttacacctctatactcttacaaaacacatggttttat

SEQ ID NO: 82785 - DNA, 509 bp, Glycine max
  Clone ID: PAT_MRT3847_45772C.1
ttgccgtgttgcatgtgtggacgtcctccttcttggggggggggggggggggggggggggggggggggggggggggggggggggggacgaaaaaaatgtataggaggaagtgtactgcggtggacgatgaacataacagggccccccaaaaacttgcaggtacctcggtaaaatgcatcaggggttgaaacgtgatagggaagctttgttaaagatggccaaaagcaactaattgattagaatgctaataaaagtaatcccgcttattaacccaaaaacccggccggtggggttatcggctttgctcccagccattagggggcccccaaaaagcgttgggcctttcggaattttgcggatggggtttacttaaacgcaccttatctacggtttgcgcgggagccattcccggctaaaatttcggcaggtggccagtagggggaatactctgccccctaatagttattacaagcattgttaaagagggcgaaccgtcacgttgtaggtat

SEQ ID NO: 82786 - DNA, 285 bp, Glycine max
  Clone ID: PAT_MRT3847_45773C.1
gattcgggtcgaggtacgaaagtctacacctgattgttatttttgtcatagactggaacatgttgctgcatgatctactaaaccagcggcgtaaaacacttcagatgcaattggcgatgaatcaggcggcatcattacttcctgtacaaattggacaaggccagcgactgctgagctaatcaaacacggtgatgttgttaacaaatatctgaacagcaggggtctagatctgcgtttctatgttagatttgcaggagaagattggcggggacattggctattttt

SEQ ID NO: 82787 - DNA, 250 bp, Glycine max
  unsure (1)..(250): unsure at all n locations
  Clone ID: PAT_MRT3847_45774C.1
ctcttggttctcactttcctctttgcccttntgtgctcttttctcttcctttgttctttgcgggttgggcgtgctgggtggggtggggcttntttgtctgngngtgaccctaggtgctttctttttcctgggatngctcttgttaacaggtctcttataaatagatgggtgtttttcatacaaaagcttaggcttgctatttccagtacttgctacgagatcaagtgcataaactttattcttctcaagc

SEQ ID NO: 82788 - DNA, 741 bp, Glycine max
  Clone ID: PAT_MRT3847_45775C.1
ggctcgagctcgagccgaatcggagcaattccacattctgagtgattcaggacgcagagagacctaaagagaaagagagagagagcaatcccacattctgagtgattcaggaagcagagagccctaagaaggagaacttgaaggcaaagcagactcaatcagctactgttaagaggagcagatggaggaagtgattggacccagattgtactgttgctctaattgtagaaaccatgttgcccttcatgacgatgtgatttcaaaggcctttcaggggaaaagtggacgggcttttctgtttactcgtgcaatgaacgttacaataggaccaaaagaagacagggagctcatgacgggtctccacactgttgctgatgtctactgttctgactgccatgaggtgcttggttggaagtatcagagagcctatgaggaatcacagaagtacaaggagggcaaatatgtacttgaaaaggctaaatttgtcagggaaaacttctagtgcgtatttatcaatcttataaatataatcattccaaagtgcttcttattgtgtgttggtgcatgtattctattctacatgttcatttgacgtgtattcatattattgtcattcgctgtgtattctcttatcaatttatgtgtggatatttgaagaccattcacttgtttttatataaattgtatttgtgggtgggcaacattgaaattttcgatcaatgaaataaaacttttaagaat

SEQ ID NO: 82789 - DNA, 1367 bp, Glycine max
  Clone ID: PAT_MRT3847_45776C.1
ctcgagcttggcttctcaattgtttgggcttctgcggttccatgaacattactcatacaagctcatctcagagaaagtatctaacggtaatagtagagttgcaacatcaattttctctggccgatcttaggaaatccaacaacaatgttagataaaaacagagtacttggacgtggattatttagtgaagtatataaagactctgtacaacaaaagggtccttctgattatactgtgggagtatagcgattcaataaacgaggattgtaagcgttcaagaaggaaatagaattgcgctgctagatttttcaccctaatagtgtcacaataataggattctgaaaccacataaaagtgaataatatttttcacgaatacatgtccaatgattctctagctgattacctacaaagtggagatgaagcagcattagagtgggagaaaagactcgagatctaaataggattagctcgtgaactacactaccttaacactggcgcccatcgatgtgtcttcaacgatcaaaagagtaggattatcgtttacgtgtacaagtgctttagaccacaacatcaacgtttccgagttcatgtactgtcatcacgttttatgacaaagaaaaaaaaagtcaaaccacaccgtatcacggatactcttgctggcaccgctaggaactatacccaccatggtaccgtgacagatcaaagtgatgtttattcatttgggatggcaatactagaagttgtgtgtggaaggcaatatttaatacacccaagagaaacagaatttctggagaagcctgttgaagagaaaattgatgcaaatatcaaaggggaaattgcacctgagtgttggcaagtctttattgatatcgcccacagatgtgtgaagcatgaaccagatgagcgaccaataataggagaagtagaggtggaacttgagcatgccctcttgttgcaggaacaagcagatatcactaacaccaatggtgaatattctttattgtccaaaaccgttattgacctaaaactggtgcgggaatattttgagcaggctctatttcaccaagaagatatcacataagacagtgacttgacttagaagatatgtttccttagttatttggtgagctcaaatcagtacacgagggcaaacattcagaagatcactattaaagggccacaagcaacaaatacaaataaactagacatcacttccaatctcttgcttttctagtgatcctttctttcagcatattgaatctgattgtatctgaagttgtcattgtaattatcttgaactggtataaagaagtgaagagattcttgcttgagcctcagaagcccaaacaattgagaagcccggct

SEQ ID NO: 82790 - DNA, 278 bp, Glycine max
  Clone ID: PAT_MRT3847_45777C.1
ttcccggctcgaccgcacgcgtccgaacgtattgccaaccacaagattatcacttcctcttttcttcttcactcactatataatccatgcatggctatcttctctattttgagcggctcaacccgcctatacaaacatcatgactaacccttatgactcagtctattaaagtccctgctctattgactgatcatacgcctgatcaacaaacggaatcaacaacattaataagatcgacccaaatgatcactgctttactaacaaatggattaagaatg

SEQ ID NO: 82791 - DNA, 282 bp, Glycine max
  unsure (1)..(282): unsure at all n locations
  Clone ID: PAT_MRT3847_45778C.1
ggagatgtggcacagcactagatcatgggtcgggctgttgggtatggaacagctaaaggtcatgattattggatcgtaaggaattcatggggttctagctggggagaggatggctacatcagattagttttcaaggttctgtagattatgtgacaatgcagcagcaatatttggatttgtcccatattcacatgctattttaatttgcttaaaaaaaaaaaaaaaaaaaaaaaannnaaaaaaaaaaaaaaaaaaaaaaaaaaaaaaaaaaaaaaaaaaaaa

SEQ ID NO: 82792 - DNA, 1062 bp, Glycine max
  unsure (1)..(1062): unsure at all n locations
  Clone ID: PAT_MRT3847_45779C.1
agagctatgtcgnnnccacgagctccactagtcagctcggaattcggctcgagaaacaactcagtttattgttaatataatttgtccctgagtcagctagtgtctgcccgacttttcttttgtgtgtgtttttctttttctcaacacaattttagagaagttctgtaaaataaagtaacttttctttttgttctcttacaattaattatatcaataattttaacatattaataatattcatgaaatttcagtgactgtggtatgtaaagtcagtcatattatgagtactttgtatcagaattattactattattatactttaacccttcctaaatggaagtgttaatcttttattaacctttcttttttgttgtatcattgaagggtttttatcttccatgggctttgctagctctggatttaatatttggaaatcctataaagccagacattgtgggtatgattgcaggacatctatactacttcttaacagtgcttcaccctcttgctggaggaaagttcaagttcaagactcctctctgggttcacaaaatagtggcatattggggagagggtacacaaataaatgccccagtgcaatctaatccatcagctggaatagtattcaaaggaagaagccaccgtcttggtgggacacaagcaacaacaaaaagcactgcagaacaaaatgaaggaaatgcttctgcttcctcccctcaaccgcaaagtcaaagtaaaggaattgctttccaaggaaaaagttatcgtttaaatggatgagttcagtaacatgatttgtctatatatgttgtgccatcaaaaccgcaaaaaagttatgatgtaatgaattgtttaacagaagttgaggttctttccactgcctcatgtatcatcattatcactctttatcttattatcattgttgatgttgttaccatcataaatggttgatcattttaggttattttcaaaataatttatatatatatatatatatatatatatatatatatatatatatatatatatatatatatatatttcattgtagttgttaaaaaa

SEQ ID NO: 82793 - DNA, 363 bp, Glycine max
  Clone ID: PAT_MRT3847_4577C.1
aaattaacaaaatcctcatccaattggctgctggcccagatggaataaaaaaaaaggatttgggattttctgagagaaatccccagagcagaaaagaaaatgaagaattggtcgtggaagataattaaatccttcgcttattaaacattacgagagaggaaagaatgggaaatggaaactgttgatgaatataggcattaaacaagattaatttcaccaatttcgatcctctaacttcattttccctcccacttttatttccaacacaaaagaaaaagggaagccattgttccaaaggaaatccattcagacttcaaataactgcagaaaccaccaacagagttttgtttttaagacaacagc

SEQ ID NO: 82794 - DNA, 1177 bp, Glycine max
  Clone ID: PAT_MRT3847_45780C.1
gtttgagggggttttcaccacttaaacgtgagttcagagcagcagctaaattggattgtgcaaatgcatcaactcaaaatcaagttttgttctacaagcaagtttgatttgaaggtgtattcactgggagatgtggcacagcactagatcatggtgtcgtggctgttgggtatggtacagctaatggtcatgattattggatcgtaaggaattcatggggtcctagctggggagaagatggctacatcaggttagaaagaaatcttgctaacagcagatcaggcaagtgtggaattgcaattgagccatcttatccccttaagaatggtccaaatccacctaatcctggaccatcacccccttcacctgtgaagccaccaaatgtctgtgacaactactacagctgtgctgatagtgctacttgttgctgtattttcgagttcggaaatgcttgctttgagtggggttgctgtcctcttgagggtgctacctgctgtgatgaccactacagttgctgccctaacgactatcccatctgcaacacttatgctggaacttgtctcaagagcaagaacaacccattcggagtgaaggcattgaggcgtactccggctaaaccccattggacctttgggcgtaagaacaaggtcagcagtgcttaagcagataaaggaaatgtgaacgtgcaggaaggagccaatgatgaagtaaatgaaagacgaagaattaaaacaccagctgatacacttcccctttaccttcacataaatttctctgtgccattttattatgatacaaattgatactattctgtatcaaatttcagtcagatattggctgtgtacatagggttatattattgatgcactgtatttgtattcaaattccaattccaaatggcgaacatatttgattgctgttagtttcccaggttatgtagactatgtgacaatgcagcattatttggatttgcccgatattctggctatttcatttgcttataatgtggaattcactggacccctcttctttaaaaaaaaaaaaaaaaaaaaaatataaaaaaaaaaaaaaaatctgaaaaaattgggtgtccttttactggcgggtctagaagacccggaaattaaatggggactggttcctgaaagcgcacccagctttccttaaggggggcccc

SEQ ID NO: 82795 - DNA, 559 bp, Glycine max
  Clone ID: PAT_MRT3847_45781C.1
ggaaaaatttggcaagaccttaaggggtgttggtataatttactcttgattgtaaaagttgttttcacttatctgaattttctgtgtatgacagagcaagaacaacccattcggagtgaaggcattgaggcgtactccggctaaaccccattggacctttgggcgtaagaacaaggtcagcagtgcttaagcagataaaggaaatgtgaacgtgcaggaaggagccaatgatgaagtaaatgaaagacgaagaattaaaacaccagctgatacacttcccctttaccttcacataaatttctctgtgccattttattatgatacaaattgatactattctgtatcaaatttcagtcagatattggctgtgtacatagggttatattattgatgcactgtatttgtattcaaattccaattccaaatggcgaacatatttgattgctgttagtttcccaggttatgtagactatgtgacaatgcagcattatttggatttgcccgatattctggctatttcatttgcttataatgtggaattcactggacccctcttctt

SEQ ID NO: 82796 - DNA, 2523 bp, Glycine max
  Clone ID: PAT_MRT3847_45782C.1
ctcgagccgaatcggctcgagcacctttctcctaaaacatctccagtgggttcttcttcttctattacaacaacgtcgtccaagaccatgaccatggccatggccacgatcctgctcctgttcacggtcttcgcggtttcatcggccctagacatgtcgataatctcgtacgacaacgcccacgccgccacgtcgcgcagcgacgaggagctgatgtccatgtacgagcagtggctagtaaagcacggcaaggtgtacaacgcgctcggagagaaggagaagaggttccagatcttcaaggacaacctgcgattcatcgacgaccacaactcccaagagtccgaactcccaagaggaccgaacctacaagctcggactgaaccggttcgcggatctcaccaacgaggagtacagggccaagtacttgggaaccaagatcgatcccaaccggaggctcggcaagaccccgagcaaccgatacgcgccacgtgtcggcgacaaactacctgaatcggttgattggaggaaggaaggtgctgttcctccagtcaaagaccaaggaggctgtgggagctgttgggcattctcagcaatcggtgcagtggaaggaataaataagatagtgacaggtgaactgatttcgttatcagaacaaggatttggtggattgtgatactggatataacgaaggatgcaatggaggacttatggactatgcatttgagttcattatcaacaatggcggcattgattctgaagaggattacccttaccgtggtgttgatggtagatgtgacacatataggaaaaatgctaaggttgtttctattgatgactacgaagatgttcctgcctatgatgagttagctttgaaaaaggctgttgcaaatcagcccgtcagtgtagctattgaaggagggggcagggaatttcaattatatgtatctggtgtattcactgggagatgtggcacagcactagatcatggtgtcgtggctgttgggtatggtacagctaatggtcatgattattggatcgtaaggaattcatggggtcctagctggggagaagatggctacatcaggttagaaagaaatcttgctaacagcagatcaggcaagtgtggaattgcaattgagccatcttatccccttaagaatggtccaaatccacctaatcctggaccatcacccccttcacctgtgaagccaccaaatgtctgtgacaactactacagctgtgctgatagtgctacttgttgctgtattttcgagttcggaaatgcttgctttgagtggggttgctgtcctcttgagggtgctacctgctgtgatgaccactacagttgctgccctaacgactatcccatctgcaacacttatgctggaacttgtctcaagagcaagaacaacccattcggagtgaaggcattgaggcgtactccggctaaaccccattggacctttgggcgtaagaacaaggtcagcagtgcttaagcagataaaggaaatgtgaacgtgcaggaaggagccaatgatgaagtaaatgaagacgaagaattaaaacaccagctgatacacttcccctttaccttcacataaatttctctgtgccattttattatgatacaaattgatactattctgtatcaaaattcagtcagatattggctgtgtacatagggttatataattgatgcactgtatttgtattcaaattccaattccaaatggcgaacatatttgattgctgttagtttcccaggttatgtagactatgtgacaatgcagcattatttggatttgcccgatattctggctacttcaaataatgctgcattgtcacatagtctacataacctgggaaactaacagcaatcaaatatgttcgccatttggaattggaatttgaatacaaatacagtgcatcaataatataaccctatgtacacagccaatatctgactgaaatttgatacagaatagtatcaatttgtatcataataaaatggcacagagaaatttatgtgaaggtaaaggggaagtgtatcagctggtgttttaattcttcgtctttcatttacttcatcattggctccttcctgcacgttcacatttcctttatctgcttaagcactgctgaccttgttcttacgcccaaaggtccaatggggtttagccggagtacgcctcaatgccttcactccgaatgggttgttcttgctcttgagacaagttccagcataagtgttgcagatgggatagtcgttagggcagcaactgtagtggtcatcacagcaggtagcaccctcaagaggacagcaaccccactcaaagcaagcatttccgaactcgaaaatacagcaacaagtagcactatcagcacagctgtagtagttgtcacagacatttggtggcttcacaggtgaagggggtgatggtccaggattaggtgcaattgagccatcttatccccttaagaatgggatagtcgttagggcagcaactgtagtggtcatcacag

SEQ ID NO: 82797 - DNA, 470 bp, Glycine max
  unsure (1)..(470): unsure at all n locations
  Clone ID: PAT_MRT3847_45783C.1
ggtgtgcttctctaccagccactgcccccgttctctgttggcccttccctctcaacaaaattatgtgccgcccctgtagccactggccatcgaatgtcaccactccatactcccaaagtgtaaccattggcaaaaactccatctctctcactctccaaactcaaacttttaccaaatctctcaccttcgtgagcaaagtaagaagcttcgtgcaaattggagaatgaatccccaatcaaagactagagagatcaatgttttgaaaggcaaaatgagaaatccttaaatcgggtcttatttttattatttcattttctgcattcatcacttgttcttgcaggttccgaggacttcattttttatttacaaatctgagaagcaaaaaaaaaaaaaaaagttgagattacactcgaatttgggggttccttctctcagatatggggctctntatgatttcatgttccctactc

SEQ ID NO: 82798 - DNA, 188 bp, Glycine max
  Clone ID: PAT_MRT3847_45784C.1
attccagctctgtacccggggatcctctagagtcgacctgcagaacaggttatctgatggaattgatgccagcaacctcactgcaattatcacaggtcagttttaatttacaatttcaatatccctcttacatatatatgcatcagtttcgtaccacaagtgtaacaaaatctttcgtattcatgaaa

SEQ ID NO: 82799 - DNA, 342 bp, Glycine max
  unsure (1)..(342): unsure at all n locations
  Clone ID: PAT_MRT3847_45785C.1
cgcggcanccttcaactgatcctgaatctgttgctgtgctttcatggttttcactaacgactgcagctctgtctctcaggctttttgagattgattcatccatcagctatgtgatgcttgatagacttgagccttgtgaggagaaagaagcatgagaatacataaagctttcattaagatatactcacatgaaatctatcagggaggctgaaccagacgaatttgcccatgatgaatttattaaagataaatgtggtactaagaaatttgtactaactggctataaacgtgttcgtgggactattgaacacggacggggttataagctggcttaaagagtgt

SEQ ID NO: 82800 - DNA, 1974 bp, Glycine max
  Clone ID: PAT_MRT3847_45786C.1
gctgttgggtatggtacagctaatggtcatgattattggatcgtaaggaattcatggggtcctagctggggagaagatggctacatcaggttagaaagaaatcttgctaacagcagatcaggcaagtgtggaattgcaattgagttcattatcaacaatggcggcattgattctgaagaggattacccttaccgtggtgttgatggtagatgtgacacatataggaaaaatgctaaggttgtttctattgatgactacgaagatgttcctgcctatgatgagttagctttgaaaaaggctgttgcaaatcagcccgtcagtgtagctattgaaggagggggcagggaatttcaattatatgtatctgtaagtttcttaattaatttctttcataaactaggaagtgtgcctattgcatagaagaagtagaatgggaagattcaaaattactgaagcataattatctaacaacgaacaattcattgtgaatttttcatatttcatgtttgagggggttttcaccacttaaacgtgagttcagagcagcagctaaattggattgtgcaaatgcatcaactcaaaatcaagttttgttctacaagcaagtttgatttgaagttagtaaataaattctctgtttaattttatcacaaacttgcttttgatcaaagcttctaaacatgaatcactttcttttataacccaattttaacaaaatcaatttgaaaaaattaatatatcactcatcccaaatgtgctggtattattcttttcttctcttatccatttattctcattgttacctatacacctgatagaaaacgaatttatcatatgttcattaatcatgtgtggtaagtggttttgctctagctaatcggcttatcctccaagtcattctccacatcatatttactctatattgataaaattttctcattagtatatttcattttttgtcagggtgtattcacggggagatgtggcacagcactagatcatggtgtcgtggctgttgggtatggaacagctaaaggtcatgattattggatcgtaaggaattcatggggttctagctggggagaggatggctacatcagattagaaagaaatcttgctaacagcagatcaggcaagtgtggaattgcaattgagccatcttatccccttaagaatggtccaaatccccctaatcctggaccatcacccccttcacctgtgaagccgccaaatgtctgtgacaactactacagctgtgctgatagtgctacttgttgctgtatttttgagttcggaaatgcttgcttcgagtggggttgctgtcctcttgagggtgcttcctgctgtgatgaccactacagttgctgccctgcagactatcccatctgcaacacttacgctggaacttgtctcagggtatgactaagaccatctaatattttctagctgctttcattttaaactgaattttcatagggaactaaccattgtctattattttagatattggtggatgataagttcatttgcatagttctttctaaatgattatagagcttattgcatttacacacctcttgaggtttattgaacgtattatctaatgtttgaaacaactctcgtacaagaacactctgtgtaatatgattcttggatattagaaggtatcaatgtaatgtataaggagtgtcaatataatatatttcaaacaaacaaggagagttaatatagggataagaaaatggagggatgacaaggagaaaattggtaaaaccttaaggggtgttaggtataatttactcttgattgtaaaaattgctttctcttttacttatctgaattttctgtgtatggcagagcaagaacaacccctttggagtgaaggcattaaggcgtactccagcgaaaccccattggaccttcggacgtaagaacaaggtcagcagtgcttaagcagtttaaggaaatgtgaac

SEQ ID NO: 82801 - DNA, 609 bp, Glycine max
  unsure (1)..(609): unsure at all n locations
  Clone ID: PAT_MRT3847_45787C.1
ggctcgaggctcattttcacaaacttggtttttgttcttccaacaacccaaatctcaaacctctccctctctctctcttgtgattctctttctttctctctcttcaaacttggacagtttatggcagcagctagattgtcggggcatgaattgtccgatctgtgtcttgggaaaccgccgctcaggtccctctccgtccgcgacaccgtagccgacgccctcgccgccttgaagaggatcgacgacacctacgtcagcgtctggaactgtaaccactctttcattcgaaaacaacaacctcaaattaaatcccaggaacagctccaatgctgctgcacctgcatcggtaaggtttgcatggtcgacatcatctgcttcctctccaaaccccaaaacctctcttcaccttccgccgcctttctttccccaatctccgctctcctccacgacaactccgccgtnctcgtccgccaccttccacccaccgncagtttactggaggctatagatgttatgcacgatggggtgcagaacctggtgataccaatacanatccagtttggatcttttgacctcaacancgtgcaccacaatgacaacaccacctac

SEQ ID NO: 82802 - DNA, 290 bp, Glycine max
  Clone ID: PAT_MRT3847_45788C.1
gcgtacgatttacggctggtgagtaccacttctattcaatgaacggtttacaaaacattcaacggtggcctttggacacttggtagggcttctgataaaaggtccgctggagtatctacatatgactctacttatgctcaaagctctgctactgcacacaccaatggatgctacccacagcccacatatttatgccaacgaatcccaattggtcgaaaacactttgggttgggaggcactaagtgtcttacaagccattgtacatagacacaactgatcgactggttctg

SEQ ID NO: 82803 - DNA, 226 bp, Glycine max
  unsure (1)..(226): unsure at all n locations
  Clone ID: PAT_MRT3847_45789C.1
gtctgnagagnaangngntangtaaagntcgggaattnggctcgagaatnnntttnnttccntntttttncgaatntgaatngaaatggntcggagactgagacgttgntttcaggnngagataanagtctagtnaatataananntcaagantagaananaagggtatagatgtnngntgaantgtnanttaagaggagnagnagagggtataaatagagnaaan

SEQ ID NO: 82804 - DNA, 506 bp, Glycine max
  Clone ID: PAT_MRT3847_4578C.1
actgtacccaggtgcctgtgcactgctgacgtctcacacgggtttaggttgccgggttgtatttgtcgcgtcagtcggtgacccggacccggaccgtttgaggtaaggtctggtaagggtgctaacacatctgttgtttcacacatcttagcccaccgcatacgcttcggcaccaagttcaaccccgtaatcgtaatagtaatcggtctgctgttaatccggttaacggggttcggtacaggcttcgtcaggttattcgtacggttggtaaacagcttcttctggctactgctcatagtttgcttcactaataatcttgtagagataacccgtctagtggcaaacagcagtaaatttgttcaactgatccgggccacctacagtatatgcgttagggccggtcgcctgtgctgtggcttaagttaatgccgcccatgaagatgacgactattcagattaagattaagattaagagtttaatacagaagctgacacggctgccgctc

SEQ ID NO: 82805 - DNA, 208 bp, Glycine max
  Clone ID: PAT_MRT3847_45790C.1
gggggggtatgcctttttggtacatacttacaaatgcgaccaatatttttgtaaagaacaaaaattggtattattccatataaaaagtagctcccgaacttcactctccggattaaaaacagcaaagttaataagggagatacataataaaaacaagccggatcgggccgggcccaaaagctaacaacccaagagcctacaacacttg

SEQ ID NO: 82806 - DNA, 298 bp, Glycine max
  Clone ID: PAT_MRT3847_45791C.1
gcaccagaagatcattttctggatctgtagaggtattgtggtgtttaactttcaacaataaatgaggatgctactttcctagcagtagcacaatctaccaaaaaggactattcctcagactcagaggcccctggttgctgtgaatgaagttactttctgtaaattctttgatgttcttttatcctattttggtgttcaagtttatctgcactttttggcatgtgtgataagcatgtaagatcaaacatataatatttaggtggatgtatcggtggtttgaagctgtaaaaaaaaaaaa

SEQ ID NO: 82807 - DNA, 452 bp, Glycine max
  Clone ID: PAT_MRT3847_45792C.1
ggctaatgatgcttgggtgggtgcttttcttcggtagcctaacggtgggagtgggagcgatgtctgagtccccaaagtggcttgtgatgaggggtcgtttgggaaaagcaaaaaaagggctttacaaaaccttaaaccgtaaggaagaggcccaaatatggctagtcgaaatcaaacaagccgcagggatccccgagagttgcaaccacaaccgttttcctggaacccacacaaacacatgttatagcgtatggaaagaactttttctttatacaacgcccccaaattgtcacattgtaatcgctgtccttgggattcacttttttcaacaagcgttcggcgttcactcccgttttttgttccgccccatgatctttaagaaggctgggatcaaagaccacacgcattaactttttgcaaccccgggcggttgatttcttaaaaccggtttt

SEQ ID NO: 82808 - DNA, 174 bp, Glycine max
  Clone ID: PAT_MRT3847_45793C.1
cactgcttccaataacgacatatatttaatatatggcaccttgacttgttcccaacggtgtgaaattcagtggtgggttcaaggaaaccgggaacctttcaaagcgttgctaagtgaaaattctcggcggaaaaggtgactaagtgaaaagggttgttgggcttggcaaaaggg

SEQ ID NO: 82809 - DNA, 754 bp, Glycine max
  Clone ID: PAT_MRT3847_45794C.1
gaaattccttgcttatcaataattataatcatgctttccatttcctcggtaaagaaataacagtttctacttcttaatcctaatccaaacaaggatattacaacgattttaaaccaaaaaaaaacctattacactaaaaaaagcataatccatcaagggataagggctcattgcatcgatagattcttaactatggctgcaggttttgcatagtcttcagtgcaaaagaagaataatgagattcaagttcttttaggctagcagcagcttcctcccctactctggataatgtgtgatctgttttttctgccagctgattaaattcaatccttctttgttctacatgatcattaagagaggcaaatcctgaaaatattgcagtttgcttaagctctgacaccaacttcaatagagaatcagctgcctggaccatccttcctgtgaatttctaactagtggatcatttacccttgcaacgttgacaaggtggctgaaattgtcgacgatgttggcgatatcgccttcgactctttgcaccagagtcttccgcttttgcgccgccgccgccgccgcagccgcagtgggcccgcttccggcgccagcgccgccccctaatcctccggctgcacctttgttcattctcaattgttactcactgctaattctcagatgctggaaaaaaaaaatgaagtaaggtgtctctagtatttggaattcgtgggattcagaagatggaaaaccggcggacgcgtgg

SEQ ID NO: 82810 - DNA, 247 bp, Glycine max
  Clone ID: PAT_MRT3847_45796C.1
tttttggcataaaatattcatttttattagtggatatgtattcattaaggggacggctaagtataataacattgtatatacaaccaacaaacagtttctaagatgttaaactacaatacataaggaattgtatcccctatgttgaataaagctcgtaggtgctttatagccttcattttctagagagaacaataatctatttcttcatgatctttttaatcttatagtactcaccctactatttttg

SEQ ID NO: 82811 - DNA, 510 bp, Glycine max
  Clone ID: PAT_MRT3847_45797C.1
gtaagtcaacatgagttagttcgtagtatgatgaccaattctaccgaggagtcattggcgaataggaagttctgcccttatcgtgaagttatcccttgaatcttaaatagtggctatcgtctgctatgggtgcagtccatggaatcccagacaggttcctataccccacagccttgcccgcggtggaggcgtgatcatccgttgacagccgtcctcgatactcctcagctcgattttgctctggcagcgaattcagagtccacatgctgccagactgatcccttgaattgccctgcggaagctaggccgcgcaaatgctgatggattttgcttggtccctgttgcagcgagctggcacggcattccacctgctcccgtaggggtttagcttgagagtgagttcgtgcattaccggccagttgtgcaccttcgtcagcctttaggtccagggatacgacactccgggatgcgggcatctgaacttcaagcaccgtcacatggcggcgtcgt

SEQ ID NO: 82812 - DNA, 1306 bp, Glycine max
  Clone ID: PAT_MRT3847_45798C.1
agatccacacaatgttacgtatcatcatgtcatgtcatgcatgcttaaaaaaaacattatgccacaggttcattgatgaaggttctatttttctacatataggaaatttcaatccatgacaaattattcttgctagggagaaactttaatgtttctatgatacaagactaggcataaaattaataattgttcttgatgacaaatggataacttttggtacaaggctggttttgaacaaatgaagtcagtacagggagatatgccagaagccagtgatatatatgaaacagttcgttctgaagtgaggcgtgctatttctgagattcagattgaccttgaaagtgctatccaaaggagtaatgttacttccattgctgttactaatgtgtctgatgttcctcctgacttggtaaaccctggtgcagtagaattagttttagagattagaagagagtatgccagaaagcttgaagagtcccaggagcgagcgagaaatcttcgagcagatctggctgttgaagaacatcgtggacgagaacttgatagaatattgaaagaagttcttccatatcccaagacccctattatacaaaagcctcgtccagcaagaaaatctagcattgaaagaaggaggatgtcaaaacgtcttgcagaagatgccaaggcttattttgatgagtgtgtctcgctatcaacttttgatagttctgacttttcatctccagaggatcccccactcaatttcgttggtcctcctactccatctggcagccctgtatgtttaactgaggaatccggcacacgaggacaatccatgaatatccattatgacatttcacaaccacctgctaacattgatactgtgggagattttcacggtcaagtcagttcaatcactgacagcacagaaactggtagcaaaccctgcttctcctttgcacagaaaccatctgaaacctctgcacttcaacaagacatccaacagtacataaaaaagttcgaaaaaaatgttttgaagtcttcaactatgagatcaaactattgtgaccctcgtgagtatagttttcaatcatcagcggagagcttgttgattgatagagtactgctaaaaagtagaattgagtctggtagtttgttactctgtggtggtggtggtaataatttgttatctaaattttctgggatagggatttgacttgggagacatagattaagcaactcttttatttatttatatatgccttgtaattttgaccttatcatttacacatgtaatataaattatgtacatctgtttgcctattca

SEQ ID NO: 82813 - DNA, 454 bp, Glycine max
  Clone ID: PAT_MRT3847_45799C.1
gcctgatgttgtcacttataatacattgattgaagttcacagtaaggcagggcgattgaaggatgcttataagttcttaaaaatgatgctggatgctggatgcagccctaaccatgttacagacaccactttagattatctagggagggaaattgataaattgaggtaccaaagggcatcgattttgagtgaaaaagatgatccttcttgagaagtcaaagttgcatgtaactcaagtgctggcctgctggggatgggatgaaattctagcagactatgaaattggaatttgtaattcagtttttgcattgtctgaattgtgtttgtggtcttctcaattctcatgttcctgtgatctcaggcagtgtacttcatgatcaattttgcagtgttgtctctgcttcttagctggtaaatgtctagtcaacgttatgtatcttctactatcttctgg

SEQ ID NO: 82814 - DNA, 363 bp, Glycine max
  Clone ID: PAT_MRT3847_4579C.1
cccaaagggggcaaaattttaaaataaaaaagagaaaccattcaggagtggtttttacacccgaaggaagctttccctccttattttaaacccttcccaatgattttatggccctttttttttcctttttttttcggactttcggccataagggaagaagaaaaatttaaaaaaggctaaaatttcaaattttttcaaataaaaaaaaaaaaaagggagggccaaacctgacaatagttaaaagtttaaacttaaacctgcccctttaattaaaattaaaaaatttaaactgggtcctttaaataacgggtttaaagtctggcccacaatgctggtaatgatgatggatcaaaaactcatccc

SEQ ID NO: 82815 - DNA, 433 bp, Glycine max
  Clone ID: PAT_MRT3847_457C.1
aaccccaaggaacatgacaatttcatattttattattatccctcacaatcagcatttttttgttcaaaactggtaataccccttaaatttttggccttggaaccatcggaaaacggggggaggggataaaaaaaaaccttggaccccccttgccagttggtggcccccccccacaggggcccaccctttggccccatcaaagggggaaaaagagagagacacccactcctcctaaaaaaagcataactgttcctttccctccaaagggaaaaaacatgcgggttttgctcatggcttccacaaaagggggggggctgcaatcatggaagaaacccccttggggcccctgtgggaagcgggccttttggcccaaaaaaaaccctcccctgctttttttggggctcccccaaccctaacaaaaaccccacgggtg

SEQ ID NO: 82816 - DNA, 141 bp, Glycine max
  unsure (1)..(141): unsure at all n locations
  Clone ID: PAT_MRT3847_45800C.1
cgacccacgcgnncgcnnntttccagatatcatcttctgtgtgcacccgcggtgccagttccaacgcccaatttgattgtgctgctgaagacccagaggctcaggttctgaaactcatccagtgggtctaggatgctgaac

SEQ ID NO: 82817 - DNA, 406 bp, Glycine max
  Clone ID: PAT_MRT3847_45801C.1
gctccacctttattatgtttcgtgtcttgatctggaaatgcaagaagcttatgcttgtcaatcctccttaatgtgttacaagaattgcttttgcacagtccatacgatgctcgcctattgcttaatgaaagctctctctcgtgattgaatggctgctaaaagctgatgtgcctaccatacctcagattgaagagttccatttgatgcataggatgatgaatgctcctcattcaaatgatcatattgatttactgttgagccttgatttgttgggtttacaaggagcaggtgctgcttttacaaacaaaattgcttttgatgagaagcttgtgttggctaacacacaagaattctttgatggaaaatttacctggattcttggctaccaatttttgtgaaatgggtt

SEQ ID NO: 82818 - DNA, 350 bp, Glycine max
  unsure (1)..(350): unsure at all n locations
  Clone ID: PAT_MRT3847_45802C.1
ntnatacgtcatancaacnccgttacgtanngcttngagangtnangnantacnncacttngaagacantntcanccacnctctttntanctntncnnganacacgcgnnagnctcgcncncaacntancgcnnaagcanacagcacagaatnctangacgaggncatcacacttacgacnaannaggtntcatnnncnnagagcagcaacttntagacncatacactcctgctancgccaaanagntgtntagcacgatacnncgnnactgnagntcagntatncaagncgacctcnaanctagcanttactactaggtgantaaacnacacngaangcacgtngctct

SEQ ID NO: 82819 - DNA, 788 bp, Glycine max
  Clone ID: PAT_MRT3847_45803C.1
catttgaagttacaagctcattggcactttttgttttaattatgatagtcacccatcttagtgattggttgatacttgggcaagttttatactgtgataaatgatggtcaatgctatgatggcacctgacattacctctatttgatcgcatatttgttcattccttatatttaatttttaaattatcgtcaaatatatgtatttaatagtactgtgcttgtgcagctgatgcatgcaattgtttattttttcagctagatggcccaattttctttgtgtctgttctgtgttctcatcgggttcagttcaacttcactggtcccagtggcctcctactcagaatggcacaacaccgaagtggttttgcactagtaaaggacttttgggttgtgggccaagtggcattatggccggtgatgctatcataacagacagtggtgccatgcatgtagcaggtgtaccaattgttaatccgtccaccattgtcgtttgggaggttgcacctgggcctggaaatggtttccaggtaactccaaagacaagtaccacttgtggtgtcccacctcttagccctcccaactgggatggttttgcggctttagctgcatatttatttacttggcaagattatctattatctgaagcaaagcaagggagaaaacagacagaccaaaaccttgttgatgctgtacctctatattgctcaccagtttcgaatttttcagcatatgtgagtcctgaagctgcaggtcgactctagaggatccccgggtggggcgctcgaattc

SEQ ID NO: 82820 - DNA, 155 bp, Glycine max
  Clone ID: PAT_MRT3847_45804C.1
taactttatcctttttctttttttttcttttaaatttcaaacctgtacctgtacgtgtaggagttctacctataccgagagggagaccaatagacccaggcggaatcatagccatagcctcgtgccaatgggaaaccgctcacaattcacacaca

SEQ ID NO: 82821 - DNA, 136 bp, Glycine max
  Clone ID: PAT_MRT3847_45805C.1
tacggctgtattacgactacatatggctacataccctagtggtgcatatgagtcatatacgtagcggcctagcaaattgcacagacttcgctagagccacatcgacttactttgcgcccacacctaatacctacct

SEQ ID NO: 82822 - DNA, 326 bp, Glycine max
  unsure (1)..(326): unsure at all n locations
  Clone ID: PAT_MRT3847_45806C.1
aaaagctcaaaagctttgccattgtagtattctcggggggtcatcacaatcaatcaaagttgataaatcaaatataattgccctatattagggcaactgtattagggacttacgatttttttttcagggggggtaattcataaccctcttttgaaagaggatacaaaacttgctagagctttacaagggagaatttataaacttttggtggtcngaaaaaggacaagaaacccatgtttaaaaaaaaggccaccaaccccctaattccattcccgaagaaaaaaaaaccataacccccctcctttttctattccccantctaaaaa

SEQ ID NO: 82823 - DNA, 4329 bp, Glycine max
  Clone ID: PAT_MRT3847_45807C.1
tgcaacatcgagtacaaaatgtactccctgtagtaaaaattaaataataatttacaacaaatatcaccacgcatacattttattcctgaggtatacatattgcccacgcgtccgcccacgcgtccgcccacgcgtccgacggctgcgaagaagacgacagaagggtctgcccaaaacataagctcccatcactatctacttcatcaacagactacatatatgtgataggattctaaaaacaaaacacttataaacagccagttcagttaaatccaagcaatacttttccaagtctgccaacccttaaaatatgggttagaaaattaagctcgcccgccaatcacatcaaaaaggaaaattaaaacacgtccacaaaaatatttaaatcaaaagaaactcacgctgatacattagtttgtggaaaaattctgtcttcactttttccatactagggtccgttgactgatacatcagctaatcgctatcaagtttccaatatatcaaccaaatattgagataaatgccacaaaataaaaaataaaaaagaaccccgtgcatttacattatctgaaattctttgaatggtatctggtccaagagaaaattccaaaagcaaagaactcttagagcttcaatagtcattttcatgaggttaatcgttactgcaatagtctttcaatagtctttctctcattttgtgtttctcccacatgttagcctttccctcaagcggaagtcattttcaatccaagaatatttcatggtgacccttagagcttaatcgttactgcccccggcttgtctagccattgccacaatatgttctagtatcttgtactattgcaacacctgcaactctgctacctgacattcatgcatgaattcacccgtcagaaagacttttgatgcaaagaactctatatccatgaatccatcaacgccatcttactcgtctaagctagtcactaagtcaaatcattgactctgatatcaaatttttttgaaaaatccaagagagtaaataatagagaaatttttcacaataggtcaccaaacaaattacataagtaaacttgatatcatatcttagagttccaacacttatttttgaataaaaaaactgtaggtggattctagaataattttaatagcataagagataggcaaaaccaaaacatagttttagttcacatgtctatcctgagactgctcagcaccagatacccacttatgaaggcatatggcagcagagtaatttgaaccacatgcaatatatttcacatgtctatcctttaatgcttcaaccaaagccggtgttttacgatcttcaatatctccatgacccagtctcccatttgcacctttcccccaagtataaacttcatttttggatgttaatacagctacatgatatgctccacaagcaatttcttcaatcgattccctggcaatcttgtctccgaccaagcatggaacctttccgtcagattgaggattcccaagctgaccataaacagtacttcccatagtgaaaacacgtccagattttgtcaggcctgctgtcaaactgtgcccacaagcaattttatgaaaattggaatcaataagtgcagccacacaagttggtttaaggcgtgcctccttgtccccatgtccaaggcgatttttgtctccatcaccccaagtaaacaatttacctgatgatatgcttgtactggagtgtgttgcgataacctctacaacagctgcagtatgccacactccacaagcaacagctattgttctcaaccccaataaggattctacttctctaggatatgaaacattttgcctatctccatggcccaagacaccgaatgttccatcaccaaatgtaaacagctgccctgttgaagttaccaaggctgtgtgccatggaccacaagcaacaaatgcaatttgaagtccctctaatggaccagcaattctctttggtatccaatgactgacatcactgccatgaccaagaagcccagcattatgggtaccatcaccccatgtatatagttcaactacaatatgtaaagggcatatgtggaactcaccacaggcaacaaaatcaacagttgtagaagtcaatgcttcaactagacgaggttgaaccacattcttcccaacaccatgaccaaggcatcctcctgattcttcgccccatgtaaaaacttcaccttgcctagtgactagagaagcatgtctaacaccacatgctatatgatgtacatctaaaactacgctggattccagtggtctggggagaagtacatctgccctggggctgacataatttacatttttatcagcaccaactttaacattttcacaggtaacctctccccatatgtatacatcccccaaagcatcacagtcatcaggtgcagatccatgactagatgtacttggggcactggaaacactgacacgaaatacatctgaagcagatcctttcacttgcatgtttgttgggtctggtggcgcatgtgacctttcagaaattgtattgtcagaccgaaaggactttggtgaagtatttggaagagtcacagaaatgtcaggagaacaaatgcctcgtgacgtgctagccaaacttacacttggattatttgatgttaagtctctgctatcattaagaatgagacccccatcactccatccatcaattttggaccgaccaccttgaccagaagctatcagtgctttgaggccagcaatccacacttctgcctcaactttatctctgcaaatcaaatcaagcgatcgctttccgttactgtaaataagtgaaaaagacaaatagtccttctcaggacgcaagtaacgttggaaaacagcagttctttgtccaggaataattctagagacagaagatagcttcagatttctttctccactacttgtaatccagattaaggatgattcatcatgggaaagtctaaatggacaaaacttgggctttcctttacgaccatatttaagaagttgagcaaccgtcctaaaaccatacatagttgagtagtcgatgccaaccttggcactactcctgctttcagtatccatcttaccctgtgactgtggaactaaccgtgcaccttttggaagacttgtccgtggtgtttacgtactttctttaaactaccagctcatgcttctctcaccgccaggtctctctttggtgcactccgcatcttcactttctctctctgactcgcttaacacaacccacttcttattcccgctcaaaaaaacttcgcggatccgttcctcttcacagaacccccatgaaaccccaccagccccattcgcaattccaagtcaaagatcaagcaagtttttccgactccggaaaaaacccggactttcgagcttgttggagagagctgtgaagagggtagtggtgtctcgcgccggaggagaagcttcagaatggaaacaccggcgaagaatgcgggttccggcggggtgacaggggacagagagagaaaaaaaacagtgaaaggttaagagagagagagcatcggggcctgtaaaagccaagtttttaggaaggtttctcaaccggtgattttatatacactacaatacaacatatatgtaaagggcacctgcccaaataaaatggaagacatttaacttaagaggaagacaaaaaaaaggtgagggaacaaaaagattggagagacaataaaactcaaaaagggtgcctggttccttcatattgattgttgatttcctacaaagctcactgcaacaaaaagtgtgttaacggagaactttcctccatctacttccctaagattataaaacaggtgaaccagcaccctctgccctatgtgccgattggccgcgcttcaaacattgtacctttggtataccctatcacgggtctgcgaccaccaagtatctgcttggtgctctccaaatgttgaacggctgaaccgtactcgctacagatctctcgttccatcacgcaaggcaaccagtgtaatgtagacaccaggttcatattgttcaatccattctgcctcaacttgattactattagcaggcactatggcgttccttgatctcaaaccactctcatcatcttggaaatctccagaatccctaccaccatcaaccgtatctgacacagtactgctgcttggatgaatcatgccgctgccatttggcaatttaacgttcgggtaatcatctgtcccattagaggtcacagatccccggttttgctggtaatgattagctccatagcttccaggcaaagtgccatcggttccccttctgtcgtcttctcgc

SEQ ID NO: 82824 - DNA, 917 bp, Glycine max
  Clone ID: PAT_MRT3847_45808C.1
gcgtggtcggtgcttccaaaatgatgtcttcatttggtgctcttttggcaatacttttactactcatgtcctctattatgctggcaactgcagccaaaccaatcacacgtcaataaatactacaagctccctcctatggcgggcctgttcccgtcagctcttttttttgttatggatttccagcacacacatataggttttgatagaaattaaattaatggccttcgtcggtgcttccaaaatgatgtcttcatttggtgctcttttggcaatacttttactactcatgtcctctattatgctggcaactgcagccaaaccactcgggcgaaaattactacaacaaggttatggcgggccagttcccgactatggccatcgagatccagttcccgtccgcccaacaggtcgttatcgccggccagatccatttcccgcctatggccatcgagatccagttcccgtccgcccaatacattatggaccaccatgaaaccaataccatcgatccaacggggtgataatggtgtgatttcataggtgtggtaaaaactactagtacttaataaaaatgcatgcgtgtcactactagagtaataatatatatgtcaattgtcatgtattactgttattaattagtcacaaccacttagtggccagacctgtattaattgcagccaataaaattcccattatcgcttgtccctttaatttcttcagcgatatatagcaaaatattgtaaaccgccttacttgcatgcacgaatataagagtacctttacacaccaaaaaaacaaaaattacttttactattaaggagtactttatcttatagttaattacgtacatcattcgagatgatttattaggagttcaaatatatataagcgacagtttcttagataaaaaaaaaaaa

SEQ ID NO: 82825 - DNA, 182 bp, Glycine max
  Clone ID: PAT_MRT3847_45809C.1
ggacgaagctcccgtgaatctgaccgcgaacggggacgcgcacatttactattgggtcagggagtgcatgacttctggtcaaggtgctatggatgagggcgcacacgaggattgcaccgtgaactacatttcactgcgaggaacaaaaccttccatggtccatggatatgcgatcaccattt

SEQ ID NO: 82826 - DNA, 146 bp, Glycine max
  Clone ID: PAT_MRT3847_4580C.1
tttattttttttaacccgacacaagatcaagaattgcataaccgttaaaatgggttaaatataacaaaacgtttactaccacaactacattctaaccttgcatgagcaactcacacgagtcttaattctttcatccacacgggggg

SEQ ID NO: 82827 - DNA, 492 bp, Glycine max
  Clone ID: PAT_MRT3847_45810C.1
ccaaggaatttttcaccttacccaaacaaaattggggccaaaaaaatgtggaagtcatacaaaacccgtttaactgacaaatttcaggggaagttttttgagggccccggcaaaaggggaaagggggcaccaaaggcttacaatacggggggacccccttaagcccgatggggaccccgggccttgatttttggaccgccgttttcatcatccaactttgaaaactccgaaaaggatgcaaatttaacaaaacccttggtttgggcttaaaaaaatgggccgtttccaaaacgacggggaataaaaaccccaaacttaaacccggggggggaaaaaaaacgggctgggaacattccccttgcctttttttgggaccggtttttataaaaagaaaatgcggccccccttattgcaagtgtaagggcaggggactcaaaacaaaaccttccaaaggtcaacccccaatcttaacccaaaacccccaaggggatt

SEQ ID NO: 82828 - DNA, 308 bp, Glycine max
  Clone ID: PAT_MRT3847_45811C.1
aaaaaaaaaaaattaatttaaaaaaaaaaaaaaaaaaaaaggggaaaaaaaaataaaaaaaataaaaaaaaaaaaaaattataaaaaaaaaaggacctccaaaaattttttggtttccctctccctgtttttttttccggcccggtttcttcatgcggaccatcttttcccttttgtggggtcgcctttcagtttgggtttcctcgctccattgtttctttctcttggatattttattccgctcatattttctctgttagctttctcccgttgcttttggtgtaatgcctgtccggttttcttttggg

SEQ ID NO: 82829 - DNA, 339 bp, Glycine max
  Clone ID: PAT_MRT3847_45812C.1
gaagatggcggaggtgcaggtcctggtgcttgatggtcgaggccatctcctgggccgcctggcggccatcgtggctaaacaggtactgctgggccggaaggtggtggtcgtacgctgtgaaggcatcaacatttctggcaatttctacagaaacaagttgaagtacctggctttcctccgcaagcggatgaacaccaacccttcccgaggcccctaccacttccgggcccccagccgcatcttctggcggaccgtgcgaggtatgctgccccacaaaaccaagcgaggccaggccgctctggaccgtctcaaggtgtttgacggcatcccaccgcccta

SEQ ID NO: 82830 - DNA, 278 bp, Glycine max
  Clone ID: PAT_MRT3847_45813C.1
cccacgcgtccgcccacgcgtccgaaatttgatcaatgtataattcgattctttaaaaaagaaaaaagaaaaaaaaaaaaaaaaaaaaaaaaaaaaaaaaaaaaaaaaaaaaaaaaaaaaaaaaaaaaaaaaaaaaaaaaaaggaaaaccaaactaaaagaaccaaggcttacttcctctatgcataccaagttataattctcttatagggtaaccaaaatttaattcattggccaaccttttacaaaatcccaactggtaaaaccacagcgataccc

SEQ ID NO: 82831 - DNA, 419 bp, Glycine max
  Clone ID: PAT_MRT3847_45814C.1
tacagctgtgagaagacgacagaagggtacggctgcgagaagacgactgaagggtaccgttgcgataagacgacagaagggagaatatgaataataaaaaaaatgattctaaagatatataactaatattctttagaataatcaaaaagaatattaaattcaaataaattttagatagaacaaagacttaaaaaggaggatttgaaatactagatctaaagacatatctgttcgtggcaccattagtaagtactctatgggtcggcgctttggagggtctcttgatagagatcaatctgtttttttcacaagcattgatattgccttttttttcattctagctatggaccccgaaaggggcgaagaagattataaaacccatatagcattacatatatgtgagtaataagtaattaatc

SEQ ID NO: 82832 - DNA, 479 bp, Glycine max
  Clone ID: PAT_MRT3847_45815C.1
cgagaagacgacagaaggggaagacctgaatactaaggctgttgtcttcaatttgttccttaatgatttctcttttaaggtggataattctggattcttttagataatttctagctgaaattctgaataacaaagctttaagcccatttatgcatatttttgtagtactatggcgattaatgaactgatacatgaacctgttgcataagtacttgcattaatgcatgaaataattaagctctaacgctattaattaatttcatctggtttgtcaattggtttcagcaatttctggtttgccaattcattgcatggtcttgcccttcggtataagtatttttgtcactataaccatttgcaagtatttatcaattttgttaattattaatttatgtcaaacaatttaattgatcatctttaataatatctctcattctaataaagacttaaattgagattttactttaagagaatggatc

SEQ ID NO: 82833 - DNA, 425 bp, Glycine max
  unsure (1)..(425): unsure at all n locations
  Clone ID: PAT_MRT3847_45816C.1
gagcgcgcgcccacgcgtccgaaaatagcacacagtcacagcactcttaaaccctaaaccttggcttgcggcgtgggaggttgcaaaaatggaggaagcaagagttctgaagaatttcccggtgaagccaaagctgaaatcgaaagccagaacccctaagcaaacccctgaatccaagtactggtcctccttcaagacccaacaaattcccaatctcatctccgttccttccatcacgttctctccgacaccccctcactctttcgccgccgcacattccgcctccctcactctcttcagctcccaaacgctatgcccccccgcaaccatctcctgattaggcgacgccgacgcctgcgcttccttccgctgcgacgcccgcctactcgccggctgcgacctattcggnctcgtccaggtcttcg

SEQ ID NO: 82834 - DNA, 174 bp, Glycine max
  Clone ID: PAT_MRT3847_45817C.1
gcctgaagctgtcttcaatttcaatggcggcgccaaaaaatcgaggccttgaacggactcctttccaactggtttaagaagcaaatcggagccatgcccaaaggttttcagcaccttccgctggccatttggtggaaggtggcacttcctgcattatgttcctgggggctttaa

SEQ ID NO: 82835 - DNA, 377 bp, Glycine max
  Clone ID: PAT_MRT3847_45818C.1
atatatagaaactaagaatgaaaatgaatttttttattatactaaaatatagttatgatgtttctttttttactcctttttttctcattttacaataaatacatgtgtaaaataattaaatattaaaatataagtaagagtgtaattgataaaaaaaagtaatgaaattttaaactttacaaatgatagataaatgctaacaaaaatttgcgaaagaattcaacacctaatgcggagggggtgtacaaataaataaataacgaaatcctcttaagccgtatagactttagctagggtgaatttagtttaacttttgtaaaaaaattattattatttaaaaatatcaaatgcaatttttaaagatgcatgccttgttt

SEQ ID NO: 82836 - DNA, 245 bp, Glycine max
  unsure (1)..(245): unsure at all n locations
  Clone ID: PAT_MRT3847_45819C.1
caactagcataatggtgtctatgcaactttatcctaaataaaattataagtgtgtaaacacttgtttctctttcctgctatttttgaaattggaaatctcatggacttcattaatttgctactgtttgagctttcatatatgctatttacgagcctttgacaactttttntgacaaaagaaaagttgtcaaacagctaggtaaaagtcttaccgagctgtcaaatattgggaattcgatgaatat

SEQ ID NO: 82837 - DNA, 427 bp, Glycine max
  Clone ID: PAT_MRT3847_4581C.1
tttttgcacgatggctcgggatatactgtctgtaccggttacaagtcttcctcctgaatctgtctgtgatacggaagttacatagatggatcaatatttaagatccttgcggccacagacagagcaggcccttgtatgtgcgactgactgcatgcgatatggcatcatccgaacctggctttgcactcataaagatggtgtgctagatatgattcctgatacttcttctatgtgagcgaacttgttatgggggtagcatgttgtattttactcgtagctgccagttgtctgattagctactgctaccgacatctgattggcttgcaaaggacctgaatgtcttaatcatagttgactcgactacaccagaggctgctaagaactcgctccttcccgtgagacgcatatgtgatgattaatattcgtg

SEQ ID NO: 82838 - DNA, 435 bp, Glycine max
  Clone ID: PAT_MRT3847_45820C.1
gtatccttgatgtgataaaagacttgttggagactagactttgaagtgatttatttaggcatgacactctaatttatgtgtaaattagccttaatagtatgacactttgtagtatttttaatttattttcctctgttgcttagtatagaaattaaaatctgggattgctgtatgtagctttttactggaatccatggaaaaggtgcctttttgaatgggaatcccataaaaggtgtgtcatctgttctttatgttttgattgattgttgttaatttaaatgttatgcttattgcattaaaaaaaatgttatgcttatgccttgaaatttcacagtatcgtcacaaactgaactaatcagctctcttcttgcaactgaagtaagtcaaacctgttatagtttactatgtgaaatctattttttttccatatatttt

SEQ ID NO: 82839 - DNA, 303 bp, Glycine max
  Clone ID: PAT_MRT3847_45821C.1
cccaattccacctggacccacgcatcctctgactcataagctcacaaataaactatcatacatccaaagaccatcactgactcgtcatcttacaaaccctgaatctaaccataatatccatgaaccttacgaatctaatcataacattcctcatcctaaatacaaaactaaccctactacttccaaaacaaccatactgaatcatcccaaagcctcacaatctgctctccaaagcaaggattttctttatcataccaatagtgtcaaacattcatcatctactactacttccaataattcttc

SEQ ID NO: 82840 - DNA, 293 bp, Glycine max
  Clone ID: PAT_MRT3847_45822C.1
cttagtgttggtggggttaggggtaagtggtcactttccaggtcttcagtagattatgtcatggagtaggggtaaggggttctggtgggtgggtcctgtgatctgagagcataggccctaagtagcattgtgggacccagtactaagagtattcctggtagatttgactcacattcattctaatagtgaactcttttgtgttttgcctcttgtagtctgatatccttttgggcattctggacaagttggaccctgtcatgtttttcaaatgtccttccccagagtctgctaat

SEQ ID NO: 82841 - DNA, 370 bp, Glycine max
  Clone ID: PAT_MRT3847_45823C.1
aaccggtggattcttcacggttcttcgtctgaggtcttgagactgttagagcatttaatgcttgcattaaatgtacatcccttttttcatgcaaattccatgcttgataggttggcatgtcttgtacttcagtaagaaagtcacttcttccatcataataggtctgcactagcaaatcatgccttttgatgaagatcataactttcagactgtagacttcatttattcttcatagaactttgacaaatcccaggagaatgttttatgcaagagagaatcttagacacagattattaatatgacgatcttaaatgcactccttaatgttatgctagattgtcttattggacgtatgtttgaaaactcagac

SEQ ID NO: 82842 - DNA, 246 bp, Glycine max
  Clone ID: PAT_MRT3847_45824C.1
ggctgaggaagggaaacccgttgaacagctctttcagcttctctccactcttctccaccaggtggaatctctgtcgaatcaagaagaagttgtgcggcgggctgaaattgaaactcttgggtttattggttccccccgttccttgggggggggcgcagccccttctcgcgttgggggtggctggggagttggcttacccgtcgggggggtgggcccctcctgccgggggggtttccttttccatgg

SEQ ID NO: 82843 - DNA, 426 bp, Glycine max
  Clone ID: PAT_MRT3847_45825C.1
gtccactgagagaaactctctctctctctctctctctctctctctagaaaccctattgcacgttttgcaatcgaactcgacaatggccaacagcaacctccctcgaagaatcatcaaggaaacgcagcgtttgctcagtgagccagcacctggtattagtgcctccccctctgaagagaatatgcgatatttcaatgtgatgatccttgggcctacccggtcgccttatgaaggaggcgttttcaagttagaactatttttgccagaagaatatccaatggctgctccaaaggttaggtttctaacaaaaatatatcatccgaacattgataatcttttttttatatgccccgacatcctgaaagataagtggagccctgcacttcagatacgcactgctctaataagcattcaagctctattgag

SEQ ID NO: 82844 - DNA, 1017 bp, Glycine max
  Clone ID: PAT_MRT3847_45826C.1
ttttaaaaagtataattatttcttctctcataagtactaatagagaaatttccaacatgccctaaccaatcaaatctttgactgattcattgagataaagagaacagaaactaaatcacaaattttggcctttgatgttgagaataccaaattacttcagtcaacgactgaagcacgttctaaattgttagataggtaaatgatcaacacatatattcatacaaattccaacataaggcagctttcaagagaagaaattaaaaggtaactggaaactgcgaggaatattaattccaatagttcatacataaattcctctagatttccaatataaaatggttacaattgttattttggagccatgagtttgaaccctatcatcagacgccactagcatataatcgggtccattccttcgctgtttcgacagcctcagcctcattagatttccaatgcttggcaatgttctcagaaagtggatcatctgggtttggtgcacttaatagagcttgaatgcttaatagaacagtgcgtatctgaagtgcaggactccacttatctttcagaatatcaagacatatcctgccaagcttatcaatgttcggatgatatatttttgttagaaacctaacctttggagcagccattggatattcttctggcaaaaatagttctaacttgaaaactcctccttcataaggcgactgggttggcccaaggatcatcacattgaaatatcgcatattctcttcagaaggggaggcactaattcctggtgctgcatcagcagatcatcataatatcagagactggctcactgagcaaacgctgcgtttccttgatgattcttcgagggaggttgctgttggccattgtcgagttcgattgcaaaacgtgcaatagggtttctagagagagagagagagagagagagagagagtttctctcagtgagacagaaatgaacaacgtccgagagaatcagcaaacactctactcgagccgaatcggctcgaga

SEQ ID NO: 82845 - DNA, 538 bp, Glycine max
  unsure (1)..(538): unsure at all n locations
  Clone ID: PAT_MRT3847_45827C.1
accggtccgaatgcccggtcgacccacgcgtccggtctgctgttagatctctacccgggtggcgtgggggggaaaaatccaacttcaagggtgagtaagcttcagagtgatgctctaagagaagctatctcaggagtcatgggggattccaagggaaagaacaggaaatttgtggggaccattgaactccaaattgggttnaaaaattagggggggcagaaggacaagcgtttcagtggctctgttaaggtgcctcatattcctcgccccaagaggaagatttgtgtgcttggagatgcccancacgtgnaggaggctnagaanataggagttggctacatgggtggggagggcttnaanaancttaacaggggcaaaaagtgggtgaaaaaactagccaaaaaatatcatgcctttttagcctctgaagcagtcatcaagcagattcctcgtgtcttgggacctgggctcaacaagggagggaagttccctacacttgggactcaccaagaatctctcgagtcaaagggtaatgaga

SEQ ID NO: 82846 - DNA, 368 bp, Glycine max
  Clone ID: PAT_MRT3847_45828C.1
aaaccggaaaaaaaaaaaccggaacccgcttttttacctgaatggggcgggcgggccaataaaaggctttctttttatccccatttttttttaattttgaccaaagggaaaaatccccccaattgtttttcaggaaagttcaatccccccccgttccctttttaaactttaagaaaacttttcctcaattcccggtttgcaaatgcctgatctggccccaatttttttggggggctaaaaattgcggggggggcctcaagggggagcgaaggggtgaacttctttttggttttaacaaaacatttcaatttcttccccgcttaagggggctggggggcaataaatttctttggaaagggattggtctt

SEQ ID NO: 82847 - DNA, 1675 bp, Glycine max
  Clone ID: PAT_MRT3847_45829C.1
ccacgcgtccggtcggcataagcagtggaggtggcgtggtcggcagagtcggaatgagcaacgaagtcaacatgagcggtggagtcggcatgggtgtgtgtgcgaggagtgccttcgcagaggaagaagatggggtggtagtggaagaggaaggtggcggaaagaggtggactggtgggtgatgtggtctagcatggtcagagtaaagggagaggcagccatgggaggcgatgatggcggaagaagaagggaagtggctgggtggtgcgggttgcagcagatgatgaatgagcgcatcgattttgtgcgtgagttgttgaatagtgtgagtgagataaagttggtgagtggtgagcttggtaagagcatcctccagccgatccgaagtagctgtggatctcgtggattccgtcattgaaggaagaagaagtaagggtgtttgttggtttcattggtgggagtggaagctccaatccaatggcaatttttgtctgtgactgtgatgcacagtgaaataatcaaccctattcatcaatctccagtgttgcactgccatcaatgtccaccaccatttcttcccttcccttctctctcccccttcgccaaaactctagggttacccttttcaatccaccctcttctcctaatccatcccaatcatcagtcacctttcctaaaaaaaaatggagacttttgtggtttaggcatggaaacacttcatcaaaaactgatggttctgagctcaatgaagataaattgtcagaagatttggtgaagctcgaaggtgtccagtccaaagacctgaagaaagactggcttgcaaccatccttacgcactccctaaactactggcttcgaggcaccagcaacctcctaaggagaagaagacacagagaagaagaggtcataactgtcattcgtggtgtggaaccctggacagttccttggacagcaaagaccattgttcaggtaatgctcctgtggattgcctcattttggtttgtaggatcttggatagttccatttttagcatacacagcagggtttagaaaggaatctcttacatacagagggcaagcattgtgcagcctcttgactgatgttgctgaaggcgtggttggaatagcaattcttcgccattgtcttgcaaagtttcaacctctttcatctgattggttcaaatttgaagtcaaggggaagtggcagtttgatgttggtttaggctgcctcatgttcccccttatcaatcagctatcacaaatgaacctaaatttgctgcctgttcttcaatatactccagttaccatctcaagtgtagagcaatccattgttgcgcgagaccctgtggcaatggccctctatgcagtggtagtctcggtttgtgccccaatatgggaggagattgttttccgtggtttccttcttccatctttaaccaagtacatgcctgtatggagtgcaatattagttagctcaatagcttttgccttggcacattttaacattcagagaatgctaccacttgtatttcttggcatggtgatgggtactgtctttgtacggtctaggaacctctttccatcaatgttgttgcatagtttgtggaatgcttttgtatttctggatctcatgaaataaattaaaagtttttgataaaaataaaaaaaaaaaaaat

SEQ ID NO: 82848 - DNA, 321 bp, Glycine max
  Clone ID: PAT_MRT3847_4582C.1
atcgttataatactcacttgtaacatattaatttattaggtgtgtcaatagatatgcacatccccatggcatgggcacacttactcatgattctgtacacactatatgacgtttcactacaagacatgtgcacagagccacatagtgcacataactccataagcggagtgatgaaagagctcacggagctttcatgatgggaaataccaggagctgctgactaatgtaaaaacgatgccgcatgccgatctgtccgtctgggaagaccacaacgagctgctaaaggtgtagacttggcagctgatacttgagcagtaggtg

SEQ ID NO: 82849 - DNA, 241 bp, Glycine max
  Clone ID: PAT_MRT3847_45830C.1
gaatgaaattcacaacgaacgcctctttaatgtcataaaaacttgttccattatcagtgaatgatttgaggtaaacaagaacattacatcataaggtaactttcttcctcccactaatgaactcatcacccaactttattttaacaacatgttttgcttccaaaaacattgaaaatgtgcctatttaaaaacaaatttcaaataaaaacactaaaacttcttagcattctattaaagaaca

SEQ ID NO: 82850 - DNA, 384 bp, Glycine max
  Clone ID: PAT_MRT3847_45831C.1
cctacttgcagcaaatattctcaatatgatgtaaaagtcaagactatgcagaaaatgaatacatgtcctcacgacacagaagcacaaaaaggattgtatggtttctatcaggcatttacaagttcaatgatgtatccttatttatactacttgcagtatttatcatcaagcatgactcttacactaaattagatagatggaatagtcttatcatacttgaaatatataatatctttagtaaattcggtatctactaactatatgaatcaaaattatgcagattatcttaattcacggttcaatggcatccaactagtcagaaattgattccatagttttctagtagctactcatgaatccagtgatacaatcctaatatgcctt

SEQ ID NO: 82851 - DNA, 1106 bp, Glycine max
  Clone ID: PAT_MRT3847_45832C.1
ggccgcagtataaggctggggcttctgtgtttcaaatgaagaagaataagatatcaacagatgaatctggagatagtgtgcagagacaaggaagaagtggaaggaatttatcattagtaaggcctggcctcccttgtgggagggagaagtcagagaatgtaccaacaatgaagccagtacaggacatgaagcctaatgataagagtagaaccaaatatgggcgccctccttcaaaaaagcagaaagagcgcaaaattttgtctcgtgtagggaagcaactgaacattagttctcctgattttggaggtgaacctgatgatgatcacgaagaattatataaagctgcaaatgctgctcataatgctagcaaccttgcttgttcgggtccattttggaagaaaatggagtctatttttgcttctatcagcttggatgatgcatcttacttgaagcaacagctcaatatttctgaggaatttgataaaagtttatctaatatgtttggcattgatcatgatttgttgagtgttgttataaataacaagcccactcaaggttcagaggaaagaaagagaagtcactgtgatgaagaatcaactaagtttgatgctttagatgtaaagaaggacatggaaagactggacaaggttaccccagtattccaaagacttctttgtgctctaattgaagaagatgaaaatgaagaatcatatcaccaaagtgatgcaaagaatatatctcgacaatgtgctagtgatgattctcactgtggttcttgtaatcaaattgattttgaacccaaagatcgggatagaatggactctgaagttgagtcagaggtggatcttcaaattcagaagaactgcatgttggatagactatcttgtgataagagcaccacatccaacacatttagatacccaaacacatccagctctttacaaagcactggagtttggcagggagatgaagaattttctctttcagatatcacacataccggcgaaatatgttcaaatgatcttgatcaactgcagcctgctgaattaagtgttcctagctttccttctcctgatggccagtatcagcagatgtcactggatgat

SEQ ID NO: 82852 - DNA, 395 bp, Glycine max
  Clone ID: PAT_MRT3847_45833C.1
cggtgcgagaagacgacagaagggatctcatttatttaatatatgttctagcataaccttctaacggtgatgctcttttgagagttcttccgaatgatggtgaaaggaactagtgaaatgtaccttcaaaagtactttgacagcatataagaatacaggttgaattaatagttggttttacttgaccttaaagaccttttttataatagttggattgtcaatttcatactgctagttaatattttttaagtatgtatgtaggtattatcttgtatatgattgtgtatatcaatatttttatctttgaataaaaaatatgtattaaaatgatttttattgaaattttccttattacattttgataaaggtagaaattttttaccgctaaaaacata

SEQ ID NO: 82853 - DNA, 524 bp, Glycine max
  unsure (1)..(524): unsure at all n locations
  Clone ID: PAT_MRT3847_45834C.1
ggaatgcccaagcgaggacgttccagctctactattgcttccagtgcaaccgcacggtccgcgccgcacccgataacaacaaccccacccaaatcacgtgcccgcgctgcttcggccaattcatctgcgaaatcaacatgccgcgtccaaggctcgtcgtggacttcaccacaccggacccctccccagaagcgcgtttgctcgaagcactttccctcatgatggacccacccatccgccgcttccccggtttaatccaaccccaacccgaagagctccccgtctaccaccgccaccgccgccctcgtcgccgccaccccgaacccgaacccgaaccccaacaccgcccccgcacctggatcgttttccagcccatggacccatccaaccccttcgagcccattaacatcccaaaccgacgcggnccaggcccaatccacgggccgggcccaatcccgcgcggactggacgcgcgagattatntcttcggggccaggcttaacgaactcatcgaacagataaca

SEQ ID NO: 82854 - DNA, 439 bp, Glycine max
  Clone ID: PAT_MRT3847_45835C.1
tgttgcacaactagaggtgcaaaaataaagtacaatgattccattgtgcaatgttttttgcaattctacttatgcaacaaaagtgtattttcattgtgcattgggggaaagatatttttgaaattttgaaatgatggtaaggaccaatagcaacccccacatataaatgttctacttgaattttaaatctttaacattatgtatttttttggaaagtccaatatgtaggacagtttcagacgcagttcatgtgcttgatgtcattgttgggttcgacccaagagaccatgaagcgacaaagtcagcggctaagcttatacctcctaatggatataagcagttcctaaaaatagatgggctcaaaggaaagaagttaggaaatttctagggacacctagcgttttgctggtacatccagcagaagatgaaaaagtctaat

SEQ ID NO: 82855 - DNA, 579 bp, Glycine max
  Clone ID: PAT_MRT3847_45836C.1
ccagcgtccggagaagggggcagtgggcagtgacacattcttttgttcgagcgagagagaatacgcagccatccaacgtggaaggaagcgaagaaacctaaatcaattcaaagccttgaactctccaattttttccccataaaatagcaaaaaacactttccattctctctcacctcgctttgcttcaacgccaccaggcctccttttttcctcattaccctatttttttctccattttcttcactccaatccttcccaattgaacggtttctctccctctactcgatcccatatgtgttgaggagatagtgaaaggcatcatcaccatcaatcatggcatggtttagagctggaactagcatagcaaagcatgcaattaggagaaccctttccaagggtggatccacataccttgtgtcaagggcaaggttccttccatcgataccatcatcatcgtcatcaccatatagcagaagcttccacagcacggttttcaaggaacaagctgcacctgttccacgtgcggttcctctttcaaagttaacagatagtttcttagatggcacaagcagtgtgta

SEQ ID NO: 82856 - DNA, 402 bp, Glycine max
  Clone ID: PAT_MRT3847_45837C.1
tttttttttttttttttttttttttattttatctttttttatttttggttggggttattttttttcatttcttctttttttatttttttaatttttttttatcaccaaccgggccccgacacaaggaaaaactttgaagggttttaaaaataaaggcaaccaaggttttaaaacaaaaaaaaaaaaatgccccccctctggcccttttccctttttaaaaaaacacaacttaaaaaaaaggggggaaatttgccaacaaatttgcccgtttgtcttttccaagcgggccttttttaaagggggggggggaacaccctcttctttttttttaaaaaaaaaaaaaaaaaaattttgatttggtcttcccaaaagccccttaattttaaattcttccaactctcc

SEQ ID NO: 82857 - DNA, 374 bp, Glycine max
  Clone ID: PAT_MRT3847_45838C.1
gttctgatgcaggcctctccgaaccgagcaactaggacatttatggattttgaatcaattactcaggccatgggtgtgactaccatggctgtttggtttctacttgcagttatgatcattcaagtcatgcttacgtgccacatgatcgacagtggattaagcaacgaacatttcaacatttgaagaaactggcacgttgattgagatgtggtatccttcaataatccaattgcaagcgatttattgtaaagataatcaataagtgtagaacatgtttatatgatgttattatgcgggatatgctctagtctctatgttgttttagcatgacaattgtacttgctcttgaattggacaaatggaagatatgcctt

SEQ ID NO: 82858 - DNA, 214 bp, Glycine max
  Clone ID: PAT_MRT3847_45839C.1
cgactttctaaattgcaaagtcgcactagttttgtcaataccatcaacaatggagacattggcaaaactagtgcgactttgctacttgccatgacagaagaggattatatggtcgtgattattaattgaggtatttcctggtgatgcttttgcaaagcgagctcataaattttaaaaacatgttgctcatcaaaacctttacggttcaataatc

SEQ ID NO: 82859 - DNA, 1064 bp, Glycine max
  Clone ID: PAT_MRT3847_4583C.1
aattcggctttcgaattgaggctgctatacatgtatggaggctgaaggaccataagaaacatctaagttcagcaaaatccagacggtcttggggtggaaaggtgaagggacttgttgctgatggtgagaagaacaagaacaactttcttgcccaacgggctgagacgcttctagaaagcttgaaacacagatttccagggctccctcagactgcactagatatggccaaaattcaatataataaggatgttggacagtctattcttgaaagttattcaagagtgatggagagcttggcctttaacataatggccaggatagatgatgtcctatatgtagatgatagcataaagcggtgtgcagctgcagattctctctcgttgttcagcaggggaggttttggaggcatgcccattcagaagcgattctctcctagtcccttctcaattcagcacaccccatatgcctccccatttgcaacgccaacattttgttcctccactcctgttactgggagcccttgcagtcctgcaaggatacatgatgtgaaaaggaatgctccaaaggagggtgcagattcgaagactgaaaagttggccacatctgagtttgagagggtttggtcatatgccggaaacctcagtgcaagaagagcatctggcgatgctccagaaagagactgagttctacagttagtatgacttgcatccataagatggtcatctcttgtctttttaatgtggatctggctaaagtccttggtcctgctccctgtatatgtgggtctaatttttgtatattcttaggcagaactagtaggattatgttgaatgatcatgctaatggatcattagttaaaaatgtttcctccccagtataaatttctagagataggccatgatattgttttttctacagatgccaaattttctaagttgagttctggactacataacccattcgagattcagcattaatcatttgctgatgtacccctgctctcctcactgccgtaacattaaatgaaatttagccacgccgaaacagcaatgccgacgaatccc

SEQ ID NO: 82860 - DNA, 511 bp, Glycine max
  Clone ID: PAT_MRT3847_45840C.1
gtttcggtctcttctaatcattttctctctcaaggctcatcctcttcttctgttataatcatttcattgatgcttcttctcaagaatgaatcttgaataccgaacaaccccaaattagttcaaaaagaagtaatcatggggtcaaagtttccgatgacccagttgtacatatcgccctcatatgtgatttatccccacagtgcatacaactacaagtattccaatgaaatattctcagagcaaaagttcccgttcaagttcgtggagcaggccttaggggataaatggaagctaaatgacataagtactagttctatccaagaaagatcgaatgtattgatgtcgaggacccaaaatttttggaatgaagttgacctttccacacaacaaacgtgaaaacagtggggagcctgatcctgaaaacgattgtggatttcaagttatggaagacattttaatgatagagaagacaattgaccgcagaacaccatgtggggttctttctctagct

SEQ ID NO: 82861 - DNA, 162 bp, Glycine max
  Clone ID: PAT_MRT3847_45841C.1
ataattattcaaaaatctcttatatataacttcatatctcactgtacgatttatatctcttactacacctaattcactaaaaacttccctaccattacaactcattatcctcataaacttccatttttcaacatcaaattcacttacaacatcgaccaccac

SEQ ID NO: 82862 - DNA, 294 bp, Glycine max
  Clone ID: PAT_MRT3847_45842C.1
caaaatttgagccaccagtgtcactgagagaaagctaaacctttacgttttcacattgaataacatggaagaagtctctgatttgtcttgtaattgtgctgctacacaggttgtgaatctctagtttagtattggaggattatcagatgttttgcctgtgtctgtcattgacaattgacttaatgtacatcctctgttcatatgtagtgcaacctactctaaccaacacgacattgccactgaatcaacgttattttaggcttaacattgtttatcagcatgcaccttttgttg

SEQ ID NO: 82863 - DNA, 160 bp, Glycine max
  Clone ID: PAT_MRT3847_45843C.1
ggggcaaaagtctctgatctacgctttcgtgtcgcgaggaacactgattctcgcagagtacacccaattcagcgtaaacttcaactccatcgccttccagtgccttgagacgctccatgctaccaacaacaagttcacatacaattgcgacgcacacacc

SEQ ID NO: 82864 - DNA, 295 bp, Glycine max
  Clone ID: PAT_MRT3847_45844C.1
aatcacgcattctctcacattattttttcattctatttcaaccttcaccacctattaactcttgccctaatacacatttctgttgtttactataatcaccaacattatatcattctatatactttccctaattcaaaaattattatattcttcaaatatctatacatctattctcataatcccatatctttcacatttttttaactccttatattacttccaatacatatctttttttttacattttatttccttacttaccaaattaatctttacctctatcttcttccaccct

SEQ ID NO: 82865 - DNA, 1148 bp, Glycine max
  unsure (1)..(1148): unsure at all n locations
  Clone ID: PAT_MRT3847_45845C.1
ccacgcgtccgcgttgacgtcggccaaggaagagagtaagcgatgaccccttaaacgttaaaccctttactttccaaacactgcaaaaccctaacctctgggggttccaaaatttccacgacgaggcaccgcaatggacgaaccgaacgaagcacaagacaacagagaactctacgcgctcttgaatttgtctccagaagcttccgatgaagaaattcgcagagcgtatcgtcaatgggcgcaagcctatcatcccgataaataccaagctcctcacatgaaggatattgctacggagaactttcagcgaatatgcgaagcgtatgagattctttcagatccaaataaaaggcaaatatatgatatctacggcatggaggggttgacctctggtttggaacttggtccaaagcttaatggagctgaagagatcaaggcagaactcgagagattgaagaggatgaaggaacgcgagaaaatggcggcgcattttcaaccctccggtacaattgtggccaatatgtctttgccacgctatctagacggaaatggcatgctcagaggaatggctatgacaagtgaaatccagtctcagttatcaaagcgtaatgctgttacgattggtggtaatttagcagtgaatggagaggaaggcggtggagctgctactgctgtatttaggcatcatctttcagaagtttcgtcagtagaggttgtggcctcagctggtctgcgtgcactaattggggtgcaaacaactcgtaatctatcatcacactcagctgcaacaatgggcatagcactgtctctgaaagacggttcattgaatctttcaaatttatggacccgccaactgtcagaaacagcaagtggacatatagagcttgctttggagccacattcatctgtaactgttgggtggcaaaagaaagatcagagaacgtctgcctctggagaagtgaagtttggcacaggttcttttgagacatcagttcattatactcatcgtttttctcctaaatctcttggctgcattgtgagaagagttgggagctcttaccttgaggttgaagtcggtggtgggaagaagctatccaaattcagctacgtacgctggttgtatataataggaattcanggtatttcct

SEQ ID NO: 82866 - DNA, 135 bp, Glycine max
  Clone ID: PAT_MRT3847_45846C.1
gtggattgtattagaggtggactggacccataactgcatcctacttctcccacgcgcaccagtttcgatggtgtgtaagctcctacccttaaatctatcaagagcagtttccctcacactattattgccacagat

SEQ ID NO: 82867 - DNA, 167 bp, Glycine max
  Clone ID: PAT_MRT3847_45847C.1
cgagttgagtggttaattagttgtgaactactaagattcgtttagttggttgagagtgctgttgttagttgtgaattacttcatagattcgtttggttggctgcgagtgtctgttctgtataggcaagtgtaggagtgtccgtgttagttgtgaactagtactaaga

SEQ ID NO: 82868 - DNA, 1204 bp, Glycine max
  Clone ID: PAT_MRT3847_45848C.1
caagaacaaagtgcggtctgactttgtgagggaccgcaggcgagtaaagcgtgagtatgatgagttcaaggttcggattaatggccttcctgattcgattcggcgccgatctgatgcttataatgccagagaagaaatgaatgcaatgaagaagtggagagagaatggaaatgaagaaccaatggagagtttgaagattcctaaagccacatggatggctgataaagaacccagctgctggcctggtacctggacaactgctgcaccggaacattccaggggtgatcatgccagtatcatacaggtaatgttacaacccccaagtgatgaaccactgactggcaaaacatcagattcaaatgccttggatttcagtgaagttgatattcgtcttcctatgcttgtgtatgtttctcgtgaaaaaagacccggctatgatcacaacaaaaaggccggggccatgaatgcccttgttcgagcctcagccataatgtccaatggccctttcatacttaatcttgaccgcgtccactacatatataactctcaagcactgagagaaggaatgtgcttcatgatggaccgcggtggggacaggctctgctatgttcaatttccgcaaaggtttgaaggaatcgaccccaatgatcgctatgcgaaccataatactgtcttttttgatgtcaatatgcgtgctctagatggaattcaaggtcctgtatatgttggcacaggatgcctatttcgaagaactgctctctatggctttgatccaccccggattaaagaagagtctggttggtttggtcggaagaataagaaatcctcaacggtggcctctgtctctgaagccagtgctgaggaacagtcattgaggaatggacgcatagaggatgaagaaatgaccagtgctcttgttccaaagaaatttggaaactcaagtcttcttgctgattcagtcagggtggctgagttccaaggccttccccttgctgatcattcatctatcaaatatggccgtccacccggtgctctaactctccctggggatcctcttgatgctgctactgatgctgaggccatcaatgtcatctcatgtcggtctgaagacaagactgaatggggccttagagctggatggatttatgggtcagtcactgaggatgttgcgacaggccatggaatgcacaatataggatggaag

SEQ ID NO: 82869 - DNA, 265 bp, Glycine max
  Clone ID: PAT_MRT3847_45849C.1
ttctcattatactattttccatcattcttgtattaaatttcaaccatgatgctgtaaggggcaaactaaaataaaatatcagttgatctgactctgatttataattgcaacatgtggtagttcttaatatagcattgcccatgtatccaagatatcatttttactgtcaagtcaaggcagcatagagaaattctattccacaaactgttatgatgaccatattacatacaataatatttataagactgagaaaactaaacaacat

SEQ ID NO: 82870 - DNA, 640 bp, Glycine max
  Clone ID: PAT_MRT3847_4584C.1
cattcttacgcccacgcgtacgcgagtgtttgttttttctggctaggcatcatgtctttttgtctttgtttcaatgattttaagaccctgaactttggctacatccataccataatcacgaactatgaagtctgtaattttttttccccacacaccctggatagagtaaaaaagaatatgtaaaaaaaaaaatcccccccactcctctttttggacaaaaatttcaaaaaaaaatttgtttaaaaaaaaagcaccggggttatccccaccgatgtaagaagacgccacccccggccccatgggggggccccggggttccccataaaaaataggcccgggctgtttaggggtcaatgttttcttttgggggggttattaataaaaaaggggaaccagggggccccctcttttcccccggaaaaactttttgctgcccccctaccccacaaatattctacccggaatcctaaatttaataccgggggggccgttttgcaccccccccacccaaaaaaccctggcgccccccaacccccttttctagcagaaaaaccccggtgccccatctttttaaaaaaagaacacgcccccgcggaagggccttcccaacattggcccccccggggtgtttttttttccc

SEQ ID NO: 82871 - DNA, 270 bp, Glycine max
  Clone ID: PAT_MRT3847_45850C.1
gaaaacaaaaaagccgcttaattggaccttattgacacaaactcccggaaccaaaattgaagtcctatgcaccaatagttttgaccattttaacttgataaaaaaaaaacaagtcacgcttttctaaattgggaaaaggcaaccaaattgcacgtggccaggggagacctttgggccgggaagtttagaccgggccccctttttgaggccaacacaaagcccaaatggggttccccaaaccctgtcgaaccaattaccatcatcaagggt

SEQ ID NO: 82872 - DNA, 480 bp, Glycine max
  Clone ID: PAT_MRT3847_45851C.1
atgttctttgcttgttatttattaaggatagttgcgtgggtgactgaaaaagataacgcaaagttgtgtttagttgtgatgatacaaaagaggacaaaggtagaggcagagccaaagaaggataagatcgacatatagaagaaaagggtgcagtgatggaagaaagttcgacaggaaagtggggatggatgaaaatgagggaagagctgaagaaggtgggtactatagcagctccaatggcggtttcaagtgtgttacaataccttttgccagtggtgtccttagtaatggttggccatcttaaccagctctctctttcaagtgttgctattgcaacctctctcaccaatgtttctgggtttagtgttttgtcagggatgactggtggaatggaaactttatgtggccaagctttcggtgccagctcaatatgaaaactttgcactatactcttcacctgccctaatatcccttctcttt

SEQ ID NO: 82873 - DNA, 280 bp, Glycine max
  Clone ID: PAT_MRT3847_45852C.1
aatatcatggatcaattctcacacaaactatgatccttcttaccttaagagttgttattttcccaaaattctcaatagtttttaggtattaattggagtgtctttctcgagaaacacttccttcactcattacatctctagaaagaagaaccaccaaatcaacatggaggattttcataaagaatttcaagagaagaattcagatgtaaagtcaaggtttgatattggcaatgcatctggaaagaagtggatatcaatgattaatgaggttatggaatat

SEQ ID NO: 82874 - DNA, 258 bp, Glycine max
  Clone ID: PAT_MRT3847_45853C.1
cctccttctcctcctttacctccttcaagccttaacatgttcaatggaggtccatattccactgatggcaataatcgaaggacgataaagcccattggggtcgacatactgaagagacagcaaaaagttggacttagcagaggcataatttccactattgctgtttctctttctttagcagttgttttatgtgctgctgctgcctgggtcatgttcaagttcagagatcatgttagtcagtcagcatcaaccccacgg

SEQ ID NO: 82875 - DNA, 2622 bp, Glycine max
  Clone ID: PAT_MRT3847_45854C.1
cggtccggattcccgggtcgacccacgcgtccgctctctctcttcattcttcgttaccatacataacaaactctctgcattctcacttattatttctctcttctattcgtctttcaatgctcagagctattcaaattcaaacttttctttgctccgtcaccgtgtcttcccattactgcttcaagatctgtctttcgccaaccaaatcaaatgggaagcaaatggagaaaagtgaagctcgctattgggatcaacatgtgcgttcaagtccctaaaaccgtcgaacattcctcttcctctatcagctccgccacccccttctccgaccgcctttcgccgtccggcgatgcctccggccactgctccgtctcttcgataacctcctccgcctccgggctccgcctctccagatccaaatccaactgctccaaggggacatgtgcaatttgcctgaactcaatgaaagcagggcaggggcatgccatttttactgcagagtgttctcactctttccattttcaatgcattacatctaatgtaaaacacgggaaccggatttgccccgtctgcagagcaaaatggaaagaggttccttttcagagtcgttcttctaaggtctcccatggcatcaaccgagtaaattcaccgcgaaatgattcctggacaactctactagggagggttcctacccaacaagctagtacagctccacaacttgcatctcctaataatgttgctgaaccagctatctatgatgatgatgatgaagtcttggatcaacaaacttcagttaccgaagatatggatgaagctgttcacaatctagtaaacacaatggagatcagaacatatcctgaagtttcagcaattgcaaagtcagcctctcatgataacttcgctgtattgattcatctcaaagctccccctcattcagggagactcagtaacaacactgaatcatcagctcaaaattctcgtgctccaatcgatcttgtcacggttcttgatgtgagtggcagcatgtcaggcacaaagattgcactactgaaacgagctatgggttttgtcatacagaatctgagttcatcagaccggctttctgtcattaccttctcttgcacagcccgccgcatctttcctcttcggaggatgactgatgctggaaaacaggaggcactgcaggctgttaattctttggttccaaatggtgttacaaacattgttgaaggcttgaggaaaggtgccaaagtgtttgttgaccgcaagtggaagaacccagttggcagtatcatattactatctgatggacaggattcatccataaacagtagcagaatcaatgttgtaaatgattaccggtcacttgtcccgtgctccattcatcggaacaatggaatgggtctgcatataccagtgcatgcatttggctttggtgttgatcatgatgctactgccatgcactcaatctctgagatatctgggggtactttttccttcattgaagatgaggatgtgattcaggatgcatttgcacagtgtattgggggactattgagtgtggtggttcagcaattacacgtagaagttcagtgtgttcaccgttgtctgcaacttggttcggtaaaagcaggaagttaccaaactagcttgattgacagtggaaaaatggcatctatcaaggtaggagatctgtatgctgaagaagaaaaagactttttggtgacagtcaatgttccggtggataagtctagtgatgagatgtcgttgatgattgttagaggtatttatagggaccccatcacaaaagaaatggtggggttgggagtaaatagtgaagtaaagattcaaagacctaatgtagctagagatgtagttatgtcaatagaagtagacaagcagagaaacaggcttcgagctactgaggcaatggccgaggctagagttaaggctgaacgtggtgatttgtctgctgcagtttctgttctagaaagatgtcagcaggcattgtctgaaactatctctgccaaagctggtgatgaactatgcatctctcttgctgctgaaatgaaggagatgcaggacaggatggtgaaccaacgtgtttatgagcagtctggaagggcttatgttctctcaggattgtgtgctcattcatggcaaagggcaactgcacgaggagattctacagacagcactagttttgtgaatgcatacagaaccccttccatggtagacatggtttcacgttcccaaaccatgcttttgaggcctccacaatctgcaaatgccgtcaaacctgctagatcctattctgaccggcagcgaagaaaatagtaatgcaaactgtttgaaaatttctcctcagaaaagtctaatgcatacacttttctgtggagacctttaagtttcttttcttttacttatctttcccttatggttttagaaagatgggggggtataatggaaagtggtaaggaatgagttctaagtgtctttcgttgaattgtacgtcttctggagaagagagtataaagtaacgtagtagtggagatatttgagagaatttcttcattgaattacatccatggtatattctacatacttctgattcttttaaaaccc

SEQ ID NO: 82876 - DNA, 480 bp, Glycine max
  Clone ID: PAT_MRT3847_45855C.1
gctacgattccgttccaaggaaggtttcccgtcatcactgtatgacgtcctcctgtctttgggggggggggggggaatgacgaatgatctaaggggaagaattaagagagagaccaatgctaatataactgcctaatgcatattaaaaaagagacaaatgacgagcgtgtaggtagaataaacaaaaacgaaaattattaggaaacgagagttaagggataggactacacagatctgaagcgccacatgataggagtagcaccagaagaaacagtaaatatggcggtgtgagggaagcgatggacacagttatgcaacgttggtattagattttagtgcgtccataagatgcgtatagccaaaattgttaacccatcaataggccacgtaattaaaggaattggcttgggcttcgccgcaacggacgcacctttaggcagaatcgacggtagttgtgcaagtactagaacgagagtaagt

SEQ ID NO: 82877 - DNA, 1828 bp, Glycine max
  unsure (1)..(1828): unsure at all n locations
  Clone ID: PAT_MRT3847_45856C.1
gcaacttggtcagctcatcaaaggcactattctatttttaattattttttggttgaacataaaattgagtaattgacgactctgtctcttctgctaactgtggcattgccgtggacattttcttcttagctaaataagataaacacttccaattttgagacttttccttcgcacccttttgcatcttttagtgttttttctttatgagttttgctggttttggtccaacaacatagtgttttcatcatgggaaacgcttgtgcaaaaggaaaaccagttgctcatgtctcttcctccaatttttctggaggtaagaagcatgcaagtaagccaaagcagtattcaaattcttctgaacaactatctgctccaacaacttcagaattaaatgttcccaaatccatctccagtaaccttaagtccttcagcttgaatgatctaaaagaggcaactaagaacttccggcgagaaaaaggaaacggagttgctcaagtcgcgtcctccaatttttgatggattgatgagaacacatatggtcctacaaaacattcaacttcttctgaacaactatctaaaaatattacttcagaaagctatgttccccacaacgtatccagtaacctaaaatccttcagcttgaatgatcttaaagagaatttgaagaacttccggcaagaaaacttggaaggtaaaaaccggcttctggtttatgagttcatgcaaaaaggaagtttggagaatcatttattcagaaaaggtgttcaacctatggcctgggttacaagggtcaacattgcaattggtgttgcaagaggattaacattcttacattccctggatcaaaatgttatctttcgtgatttaaaggcttccaatatcctacttgattcggacttcaatgcaaagctttcggatttcggcttggcaagagatggtcctactggagataatactcacgtttcaactagagttataggaactcaagggtatgctgcaccagagtatgttgctacaggtcatttgaccccaaggagtgatgtatacagctatggtgtagtcttgttagagttactaactggaaggcgcgcggtggaagacgatagacctggattttcagaggaaaccctggtggattgggcaaagccattcttgagtgataacagaagagttttgagaataatggatacaaagttggggggtcaatactccaagaaaggagcacaagctgcagctgcacttgcattgcagtgcctcaacatagacccaaaatttagaccacctatggtggaagttctagcagcattggaagcacttaattcctcaaattcatttacaaggacaccaaaacatgagagtcatgcaaccaaacaatctggtggtccttcacaaaagtaaaatggaaatgcaaagtatatatgagctacttacttggcttgttctcattcactttttgggtgaatacttctatattcatccgtaaagaaaagaacataagaatactatgttatacccacaaatgatttgtcctttcatttctttgcatatgcgaagaattgccatctttgcgggttattgagtgtagagtatacattgtggtagcagctatagatccttattacattgtatgaaattttttagcttttaggatggctatatacaaattttgaaaaaaaataatattaaaagttaataatggatatgtttaagcgggtatttctcttcttcttcgtaagatgtctgctttggatatataannnaacgcttcaatgtttggactaattgtattatatcaatctgttggaataccacttgttgcgtatggaagagt

SEQ ID NO: 82878 - DNA, 163 bp, Glycine max
  Clone ID: PAT_MRT3847_45857C.1
aaggataatcacagttaacaaagttaagcgctctcttatttccatgccattcaacgcttgacaccaaaaaggtcaggagaaaccaaatcaaagagtctaccggcttcatcaaaggcttggttttgaaccagagccaaccatttccttgcatggttcttaaatg

SEQ ID NO: 82879 - DNA, 534 bp, Glycine max
  unsure (1)..(534): unsure at all n locations
  Clone ID: PAT_MRT3847_45858C.1
ntggtgggtaccatcactantggtaaatctnaagtgaaagttgttatgccgcacatcccccaggttactgaattcgtgtccgggctcactaccatcataactggttttttttgaaaggctacagctgaaatcggtcaaggggggatcttaaacagagggagctctaacacatacttaaacttacaatcctataaaacttttgatgacttaaaaagattaaaactagagagaggctcacttttcaacatcgaatctccatgtctgagctgacctaagatatttaattggccatcttaaaataattatttcttgatccatacttcaaggaacttaagatttaaaggtaaaacagttgaaaagagcaactgaagacccatcacttacaatttgatggaagggggcaaaaaccttccaatcgttaagggatgtcaagaaatattagcagccccttagcattgtaccttaaaaaaaatatgaattttgcaatgccccccaccaccagaatcttacctttttatcactgggagcaccttt

SEQ ID NO: 82880 - DNA, 255 bp, Glycine max
  Clone ID: PAT_MRT3847_45859C.1
cacaatctcccaacactggttctttctcgctcgctgcttcaacctggacacttcatagtgcttaagggactccgttctaggtcttctattcaccacaggcggttgctcttgccaaggcgctgaatccacgtctaaggagggaatccattacgcagaaaatgcacagccaggctctgtgaagaatcaacgcgaacaccctggccgtgagctgatatatatccgcggacgagctatgctacttgtttatcgtatctc

SEQ ID NO: 82881 - DNA, 350 bp, Glycine max
  Clone ID: PAT_MRT3847_4585C.1
ggcccgcatgtctgtactatccaatggtggtgggctccaccggttgaaggcgggcatattttgggaacggatagatgaccaacttgggcatgcatagaatacaaatcctatctatggacatggatggttatcgtaccctaggaggaggacactgtgcgcgcaggttctataactacctcatcgtcaatgattaacgcagacaatggcttttaagagatcccgaagtaatgacatactaccgggaactctgacaacaggctaagaaagcaatcaacttatcgcggcacttaagtggcttgctcggaaatcaaaatcacatgcggatgtacaatcaaacgcaaggcatattg

SEQ ID NO: 82882 - DNA, 335 bp, Glycine max
  Clone ID: PAT_MRT3847_45860C.1
cggacacgtgtcgtccactgatttctccccaaagagtttagagaagcactgccgtccgattgaaaacattatgatggagaccgaagccaaaggaacatgatagagaggctcaatcaggtggaggatcgaatgctaaagctggaagaagagttggtagcaaagaagaaagaggaaggtgagaaaatgaatagcccaaagaaaggttttaaacagcttgtgaagcaaagtatgaaacctaggggaaaacatagtaataaagaagcatgaatgaattatgaccattgtagctgctcccatcccaactgtgccaacgttttaattttaatgtacattta

SEQ ID NO: 82883 - DNA, 1422 bp, Glycine max
  Clone ID: PAT_MRT3847_45861C.1
gaagtgttcaagctcgaaaaatcgtagaagactacaccaaggtgagtgacgaaaactgatggctaccactgaggaaaaaattctctctacgattgaccgtttggataatgtgttgcggcatttggaggaaattagagggtgcaatccatctccggacgagctctggtgcatctactccaacaagtggaagtgacggacacctggtcgtccactgctttctccccaaagaggttacggaagcactgccgtccgattgaaaacattatgatggagaccgaagccgaaggaacgatgatagagaggctcaatcaggtggaggatcgaatgctaaaggtatctccacgtggaaatctattgaccgtttgatcttggcttgtatggatgtggtgataatatgacttaattttttacacttcaatttctatacttgttttccaatttttatatttttctctctttttcatttggggtcttatgcatttaagaggtatcacatgattattaccctagtctaagaggggactctaatgtgttgtatgaaagctttgcttgcagctggaagaagagttggtagcaaagaagaaagaggaagggaagaaaatgaatagcccaaagaaaggttttaaacagcttgtgaagcaaagtatgaaacctaggggaaaacatagtaataaagaagcatgaatgaattatgaccattgtagctgctcccatcccaactgtgccaacgttttcaattttaatgtacatttaattgttccttttgtggaatgcccaagtaacgatggttttcatttttctagttatggtttccattttattgtttatagcaagatggctaacggggtgataatatagtttttctttttattattatttttataggagttaccaatattcagtttccaggtacgatttttttttcctgaatttacataattattattctttaagaaaatagctgttaaatcaaatgtatactgttttaaagaaaattagccaaagggtctaagttgtgatgctgaaaggttaaaagggcacatttattgtgtcttcttaccaatttatttgtacagtgtaaatttttatcttcgttttttttttactaatggaaaaaaaaaaaagaaacaaaacagcaccacactaaggactattgtgggtaaaacccattacatcagttaaatacagattaaaaagagagcatggacaagtattcataatctcaaaatcttggaaattgaggagccaacttttgccaagccatcggctgtacacatgtttccttgcctgtaaaaatgttgaaaagagaattggcagtctagagattgaaaatgacgaatctgttgaaaaagaggatgataaggatgtaacctcttatggctaagaagaatgagatcaatagccattttctttttttttttt

SEQ ID NO: 82884 - DNA, 292 bp, Glycine max
  unsure (1)..(292): unsure at all n locations
  Clone ID: PAT_MRT3847_45862C.1
tccacgcgtncgctcacacgtacggccacgcgtacggataaagcccgtggaacagatgacgtagaagctgacgcgagccctgcttttgagctccttacttcagtaaaaagtctggtgcgccctgatttccacgtctaggccctaaattggggggctcgcgaagggggtgcttatactgcagaagctattgctgaaatgcttggtaattcgggaacaccgtgcgttatgagaggtcactctgaactgatgcagctgttgaatgtatcaaatgagcctgtgggagataaacatg

SEQ ID NO: 82885 - DNA, 374 bp, Glycine max
  unsure (1)..(374): unsure at all n locations
  Clone ID: PAT_MRT3847_45863C.1
acgaatangcccgacgattgaaaacccgggggtacaatctcgaaccggcgcgnagagaaaccaggaaacagacagcaccgaagccgcagccggccgacccagaagagaacgaggccgaacaacaggcgaaaacaaggacccacaggggccaaagccacccagaggaggagaccangacgaaagacgaaccgaacgcccgccaccgaacgcagggagaacaaccgaaccgagaagccagcccgacggggacgaaagaaaaacaggcgcaccgcgaggcagagaccgaaagaggagcaagaagacacgaggcccaagcacggcacaggccgacgaaaacaacgaaacacagggaaaaaccagaccgaacccaacac

SEQ ID NO: 82886 - DNA, 130 bp, Glycine max
  Clone ID: PAT_MRT3847_45864C.1
acgagcgaacaagtgctcttccaacccgcttatttgttggtcccttgatgtccattccatggctcccagcatagtacagttctgccaatcttacaaagttatacaccttgtctaggcaccttccactcac

SEQ ID NO: 82887 - DNA, 542 bp, Glycine max
  Clone ID: PAT_MRT3847_45865C.1
acactttgtagattgttagccaaccatagtaagaactaaagatattgctgatatatcctatggtccgagagtgccctggttctgcgccaaccctacattccacattttgcgtgtgaacctcttactgtctagagtcctgtcataatcacataccgttcttgttcaacctccaccaaattcaaccccaccataacacatttcctcccatcccatttttcagcaccaaagttcgaaactgttctcaatcgggtttgatagagtacgactcaacagatcctatgcctttatatttattttctctaaccaactagaactgccacaattcaatgtccaacatctttttgttgtcgatgtctgagattcatggatacgattctgagtgaaatctttcttgccagccgtatcatcaataccactgttaggcgcaagacccacttagttcaacccttatcaggtgccttgctctattgcgttgtctaccctacatgaatgatatcccttgcttagcttaaagatcatctatctaaataactcataatatc

SEQ ID NO: 82888 - DNA, 816 bp, Glycine max
  unsure (1)..(816): unsure at all n locations
  Clone ID: PAT_MRT3847_45866C.1
atccgacttactgaacaaatagctgaggcagaggttgaaagtcatgaaataagttgtacttcacaggtttcagagtcccaatttctgaaaatgacactgctatatttgctaaaccatcgattcaaagtgttccatctatattgttttctgaagctcaacgcctcatttctttgttttttgctttatgcacaaagaaacccagtcttcttcagatagtatttaatgtgtatggacaagccccgaaaattgtaaaacaggcttttcatcgccacgttcctgttgttgtgagggcgttagggcaatcttattctgaattgctccatatcatatctgatccaccacaaggaagtgaaaatcttctgacactggtactgcaaatattgactcaagacacgacgccatcttctgatttgatatctaccgttaaacatttgtatgaaactaaatttagggatgttacgattcttgtcccgttactgtcttcgctttccaaacaagaggttttaccaatattccctcggcttgttgatcttccattggaaaagtttcaaagagcacttgctcacatactacagggttcagctcatacgggtccagctttaacacctgtagaagtgttggttgcaatccatggaattgttcctgagaaggatggccttgcacttaagaagataacagatgcttgctcagcttgttttgagcaacgtacagtgttcacgcaacaggttctggcanaggcattgaaccagatggttgatcaaactccgctgcctctacttttcatgagaacagttattcaggcaatngatgcttttc

SEQ ID NO: 82889 - DNA, 249 bp, Glycine max
  Clone ID: PAT_MRT3847_45867C.1
cccacgcgttctgccacgcgtccgtgcgggtgcgagaagacgacagaagggggtggtggtgtgcgtgagagtgatgcgagacgcgtgaagcgacatggctccagacgcgtcggcaaaggcattcgaggagcactactactacacctttgacactctacccaagcattgttgggctatcttgtaccaggagggttacatgctattattggagggcataaaggaggagggcttacacatctttaccgtcaa

SEQ ID NO: 82890 - DNA, 256 bp, Glycine max
  Clone ID: PAT_MRT3847_45868C.1
caaaacaaaacttgatttgtaactttcaccgtatttccactcatatcccacaagcaccaccatgactccacctaaagaaatttcgaccgtcatttatcacaatggtcacataccagacaacccagttcagggatcggtgtacacatgtgcaaacctaatatttatttacgttagtcgttctattacgttaacataattgattcggaaaattaacaactgtctccctactcgagcaactgaaaaagtttctcaatta

SEQ ID NO: 82891 - DNA, 1754 bp, Glycine max
  Clone ID: PAT_MRT3847_45869C.1
cgctgtccttcccggccgtactcggcatggaatgttgggcatgaggcatcgctggctacccgaacgacgctgacttgagccaggagctagggcagtactctcggggttgtgtgcgacgcgttgcttttttgtccataaacgtgttttagtaggcatcgttaccgcggtggcataagcgaacaaggccactggagcaacattactggttgcgccaacaaacctcacaatggaaatgttccttggtggaaggctatccttgccaccgggttaggggttgggattttggacattattcatttgatgttactcatacgtctaggccgcggcgatctgggaaacatttctcagagtatgctgcacgcttttatgctgcagaggtcctgttggcacttgaatatcttcacatgcttggagttgtgtatcgagaccttaaacctgaaaacgtactggtccgagatgatggtcacataatgctctcagacttcgatctttctctccgatgtgctgtttcacctacccttattagaaattttgacagtgacccctcaaaacgaggtggtggtgcattctgtgtccagccagcatgtatcgagccttcatcagtatgcatccagccttcatgtttcatgccccggctctttgctcagaaaaataagaaatcacgaacgcctaaagcagaacctggcatgctttccagcacgcttcctgagcttgttgccgaaccaacaacagctcggtcaatgtctttcgttggcactcacgcataccttgcccctgaaagaaggtgacccttcaaaactggaagtgcagttgattggtggacattcggaattttcttgcacgagttactatatggtaaaacccctttcaaaggttcagggaaccgtgccacactgttcaacgtagtaggccagcagctcagctttcccgaatctccggccacgagttatgccaggccgggatctgatccggggcttgctggtgaaggagccgcagcaccgacttggggtgaagaggggcgcaaccgagatcaagcaacaccccttctttgaaggcgtgaactgggcgttgattaggtgcagcacaccacctgaagttccaagaccagttgaatatgatgtaccagcaaagtttgaaccagttgatactgttggggttggcaacatcaacaatagcaacaatagtagtaagaggatggtgggtaataataatactgacatgaagtctgggggtaaatatctggactttgagttcttttaagtttgggttcctcaatctactttgtattgtattttccatcttcagttaattttacaagagatgaaagctacattatcacgttatatgtcagtttagtctcacttagcagaattccatttcagttggaaatgatacacctcatattcagagggtaggctcttgtctaatagaagcattattaattatagataatccatgatctagtgtctcaatacaaaatctagatatttctaatccctcaatctgttttttattattgtattcgccattctcagtcagtttcatgggtgctgcccatcattacaatgttatttcagcttacctgtgccttttagtaaaagtccatttcagttggaaatatgatacctcaactttagattaggtttttctccttgtcggatccggtatttcatttggataatccataatgtagtgtttctatacagaatttaaatacttctcttgaaaattataatctttctacatttttgggc

SEQ ID NO: 82892 - DNA, 2989 bp, Glycine max
  Clone ID: PAT_MRT3847_4586C.1
tggagctgaccagcaaccttgtccatgattgtagggtgttggacctgatcaaccatgtttgctttcctttcacaaatcataagggtattgagaagcgggtcgacccacgcgcagccccacgcgtccggaagggggttcaaagcacgccgtgtttcgctgtctctcccatcctttcgcattctcaatacccttttgatttgtgaaaggaaagcaaacatgcttgatcaggtccaacaccctacaatcatggacaaggttgctggtcagctccatctccgttctggtgtttctggtattagaagttatgaaggagcctactgccaccccacaatgtaccaaagaccctcttttgggaattactcgaatgctgcattgcagtatcctgtgatgcccacatgcaaagctaccatggatttgtctgctactgcaacatctgcctcacccgtctttgttgctgctccagcagagaaaggccattttcttttagactttctcatgggaggtgtttcagcagctgtctccaaaactgctgctgctcccattgaacgtgttaagcttttgatccagaaccaggatgagatgatcaaaactggtaggctttctgagccctacaaaggtattggtgattgtttcaagagaacaatggcagatgagggtgctatttctctatggagaggaaacactgcaaatgttatccgttatttccccacccaggctttgaactttgcatttaaggattacttcaagaggcttttcaactttaagaaggatagagatggctactggaaatggtttgctggcaacttggcctctggtggtgctgctggtgcatcatcccttttgtttgtttactctcttgactatgcccgtacccgtcttgccaatgatgcaaaggctgcaaaaaagggtggagagagacaattcaatggtctcgttgatgtctacaggaagacattggcatctgatggtgttgccgggctctaccgtggtttcaacatctcatgtgttggaatcatcgtgtatcgtggtctgtactttggattgtatgattctgttaaaccagttgtcctcacagggtcattgcaggatagcttttttgccagctttgcccttggatggctcatcaccaatggtgcaggtcttgcatcatacccaatagacactgttagaagaagaatgatgatgacctctggtgaagctgtcaagtacaagagctccttggatgcattcacacagatcctcaagaatgagggtgccaagtccttgttcaagggtgccggtgccaacatcctccgtgccgttgccggtgctggtgtgcttgctggttatgacaagttgcaggttcttgtgttcggcaagaagtacggctctggtggggcttaagttctaatgctgagtcagtactattatttgtttttagatggcgatgaaaaaaaccattgagttccaagagtcttagactaattgctgccgcaaattttgtttaataaatttactagatgggatattgtcccaaaaaccgtttttaaatttcatcatgatggaaattttacatttgagaatatgatttatttgagtggcaggggaaagctgtcacttggaattccaattttatgatttcaaaattttatacattattgtctcaagattgtcttatttttagaataaagtgctgatgaatgttttgctttcctatgattaaatatgccctcatgcgcagctactatggatttgtgatccgctgcaacaactgctttgtgaaggtttgcagctgctgttgaacaggtccaacaccctacaatcatggacaagtcctggtccgcgccatctccgtggtggtcttgagctggtattagaggtgctgagggagcctaccgcgacccagctatgtgccagagaccctcttttgggaattactcgaatgcggcattgcagtttcctgtgatgcccacataaaaattgtgggaaaaaaagcaaccggcacacaggttgcgttgagcgtagtaattactacatttggagtgatttgtgggattctaggaacatattcatctgtgcagaatattgtgaacagttactgagacctctctagtcttccgcattggatggttaagattgagtacggttaactcgttacaaatgtttactcatggcaagtgcagctatttcaattatgtgaaaattacacctttatttatgaccaagcacactttattttaagattcaaaatttttctattgaaatatgtaagttttgagtaatgtgttagaaaatgctcacggcacctgtagtcggccatttgttgctttgatttttgatcaatcaatctcaagagacagatcatataattttttttagcaaaatccatggcagatcttcaagaaaaactggatgctctgaagggtcttgttggtgtgctaaataacatggatgagggtgaaactcacaacaacaatgcaacctcctcacccaataattcccatagtcctgctcctatgcctggaaggaatcgctctgttggaaaatataacaacagtggcactcagaagattaaaggtctgagtaaccaaaccggcttcaccgaaggcaacgctaacggagccatcaactttggcaatttacatgcctaaataaatcaatgtaccaagatcttgaaatccataaataataatgtgacgtacaaattaaaataagagcttcacagtttgagtgtggatccaatattttcagctttttattatatataaatatatgacttcttagattaacgtgcagcaacaacaacaaaaagaaaaaaaaaaaaaaaaaagaaaaaaaaaaaaaaaaaatataaagataaaaaaaaaacacaaaaaaaattataaaaaaaaagaaaaaaatatatggggcggccgccgcttatggatcttctcaacccggaattaaattcgggccgggtccttggagggggaccattttttcttatagagagtcgtttaaaacttggggg

SEQ ID NO: 82893 - DNA, 474 bp, Glycine max
  Clone ID: PAT_MRT3847_45870C.1
ggctcgaggtcatcacaaggatgaaggactgggaagatgattctacacaccacaacatggatgtagctggcaatctgcttgaaacatatggacgttctctgtatcagtatacaaaaactactgtacgtatggttaacatggtgcagatactgatgcgagggaaacatgtctaagacttgactccgagacataacactatgatggagaatgcatactacctttacacgccaccagatggatctgcacgagtacctgaaggtgatgcttcattgcatcaccatcataggaagatacttgcctctgatcttgaggaggataccatggctcatgctctgtagcaccttcagaaggaacctagtaatgaacgtgaaccatatcttttgaaatgcttcatgaatggctacagaggaaaatgtgcgtagatccacctgactgatctctggctgctggataagtcgctatcatgatgagtat

SEQ ID NO: 82894 - DNA, 384 bp, Glycine max
  Clone ID: PAT_MRT3847_45871C.1
actcacaagagacaggctcaactaccagactaattttccaattccggcatgtgctccaaacctacggaccgcagataccctaaatgcggttcatacacataacacaacacaacctcgttcctttgctgaccaactcggatgtggctttgttctttcactttaacctatggttatggcttcgttgattcagtatgaccgaagtgccctctcctatgtgaccatcactacccgcttcagacggacccacaagcctcgacttcgttgctccttagatgctaaagtatgcgacatgagcgataacgcgcctaagggggggttttcttctgatccagaacattatcgaggacctgaactgaaagtggcaattattggagctggacttgc

SEQ ID NO: 82895 - DNA, 291 bp, Glycine max
  Clone ID: PAT_MRT3847_45872C.1
ctttatttccttttttttatttaaactctaaaaaaaccgctagaaaacaaggggggtgtgctttttgcttggagccaaaattaagctggaagcaccgatcccctcccttaaaaaacccttattgaggtccttcagcgaccgaaggaaacaaactgtagcctcccgtggtaacctaaacgcaggcactacggtgttaaagtgtctttttcaccttttatgagcaccccacagcatgtcggtgttgccggaaggaataccacgcctccaagtttatgaagggcctgtccttga

SEQ ID NO: 82896 - DNA, 288 bp, Glycine max
  Clone ID: PAT_MRT3847_45873C.1
gggttcatctgcccccattttatttcaaacacttgctgagaagttccaaataaataatcaaacaattactaccaactaatgcctcaaggctctgctaagctctattggagttgcggatgcaattgtaattaccacaatgaaggcacattaactgggtctttgagattttgttgtgcccttggagttgggaaacctgtgactgcgccgattggggcgtggggatttaattttctgcttttcatcttagtgtttcttttttttgctaaacatgttgtttgggaaaccttt

SEQ ID NO: 82897 - DNA, 422 bp, Glycine max
  Clone ID: PAT_MRT3847_45874C.1
ccgagaaaaaaatagaaggttttttgatggtaaactaatatttctagtatcagagttctaaagaaggaaagaagaatgggaggttcatcggatacgaagcttatgcaagacctgttgttgtacgctgatagccgcggcgcttagttgcttggtgttgtttgtctgactgagacacctgaaccctaattgctactggttcaagatcgttcttgatcataagagatactatgatgtgcaccgggtacaatatcctatttagactatcctttacaaggttgtaactggcggagaagtgagatatggcttctactgggtttcaagctgatgtcaaagtctttgcacaggttacgtccgctatggctttgatttatcagcatctacacaccatacaaatgagctacttgtttatgcactgtaagctt

SEQ ID NO: 82898 - DNA, 211 bp, Glycine max
  Clone ID: PAT_MRT3847_45875C.1
gcccggggccggcatggttgttccattcaccggcctaaaatccatggttggtttcccacaaggaaaaccaccattgactttacctccattgttaccaccggggaaaaattccaatgcatgccaggtgtggccaccatttggcaaaaaaaatttcaaaactttttcttacttgccaaacctcgatgatccccaatgggcaaaggaagtcgaa

SEQ ID NO: 82899 - DNA, 746 bp, Glycine max
  unsure (1)..(746): unsure at all n locations
  Clone ID: PAT_MRT3847_45876C.1
taagctcggaattcgtctcgagggcatatatagagaagtagtactacactcacaacacataacccacttaagcataggagatagagaagagctagagagaaagcttagctagatagcagaaaattttaaaatggaatggaggtcatattatctggatatggtgcttgtaccattagcatatatggtaactgttgcttatcatgtttggttgtggcataaaactcgtacagagcctttttccaccaccatcggaatcaatgctcatgcacgacgcttctgggtgcctgccatgttgaaggtaaataactaatcatatctccatgaaaaccttaacaattatgtatattgtaattttgtttttgattcctctagttcatcctagcttatcactcttaatgaaaacatgcatatgatagagctagcactaatttaaaattctgaacatagatacatccaacttttcaattccataccaatagacttagtttttcatatatattatatcaatttccatccctttttttgctacttccaatatttcaacaaagtagacactttgttaagctctctcatttgttacataactatgcgttagtcgatctaattaaccagctagngcgtgtgttaaatttggtgaataaatctaatggctgattatgaaacgattttgatttgtttgccggccctctttaatttttctatgcatgctccaaatttgatgttatctcgctaccgtgatgcttgga

SEQ ID NO: 82900 - DNA, 277 bp, Glycine max
  unsure (1)..(277): unsure at all n locations
  Clone ID: PAT_MRT3847_45877C.1
gggannagagggagacaacangagagagaggcccacaaaccgggacgggaacaagggaccaacccagacagaagcacaagaccagagaagagagcccaagaggcccacagacaagccccgcaagcagccccaacaggaggcgcacaagagcggagggaagggaacggagccagcgggacgcgcagagaccggagagaggaagcccggaacgggggcgacaagagcaaaaacaggactgacaaccgaccccaagcgcgcggaaaagcaccaagcaaac

SEQ ID NO: 82901 - DNA, 146 bp, Glycine max
  unsure (1)..(146): unsure at all n locations
  Clone ID: PAT_MRT3847_45878C.1
gagggaggcatcatagactatgggtcgcctagattttagcttctgttgctagaacacaatgaactcgagaccaccttggagatactgtacgtgggggcgggacacaaacaaacacggnctaatatacagtcagctcttcaaacact

SEQ ID NO: 82902 - DNA, 551 bp, Glycine max
  Clone ID: PAT_MRT3847_45879C.1
attcattataattggacggttccaacttcctttgtttattcaaggataatatattggttcccctgtgccagaaacagagacacgcacaaaaatggtttcttggaactcatttccattagaagtgatctaccaagtacttggttggttagcttttctttcatggtcagttgctggctacccacaactcatcttgaattttcgtaggaaaagtgtggtgggattaagcttggattatgagattctgaacttcaccaagcagtggtcatatctgatatacaatgcttccctcttctttagtcctgcaattcagaagcagtattttgagaagtaaggttatggacagatgattcctgtagccgctaatgatgttgctttctccattcattcagtcatattaaatttaattatactgtcccaaatttcaatgtttgaagtaagttttatcaaaagtttttcataagagttatatttgcctatcatgaccgtaattttcagatcttggtcttgctaattcaaagtcagtaaatgatctgcttgtttgcagcgaggaa

SEQ ID NO: 82903 - DNA, 475 bp, Glycine max
  Clone ID: PAT_MRT3847_4587C.1
atcgcaccgaattcggctcgaggagagcatcgcgcagcttcaagcgagtgatagccacagccatgggtcatatgcgcagtcgcaagtttgtattcattctttcatctctatcatcaaattccttctcaaacgagctctttcatgtccaaagcacgaactgcgttccattccgcagccgcgaaagcgaagcatgttctcatggacttcaaaatcgatctagtttcttgatgaactgaagcatataaagtggagacctccacatataggaacaaagcagggttggcaagatagaacaaacaacatgcgaagagggagaaaggaagtcgaagtaatagataaagttggcgatgtaagcatggcctctactccattttatgatgaaaatatgtacatcctcaatcaatgtgaaaaatgatcttgatgccaagctaagaagatctggaacattttaattcaatgattttatcttcccatt

SEQ ID NO: 82904 - DNA, 493 bp, Glycine max
  Clone ID: PAT_MRT3847_45880C.1
ggctcgaggacgactctcataccatacatgtaacgtgcttcatcttcatcttcatcttcatcttcatcctcttcttcttcttcttctgccaatttcgatgtcggcaattcctatcagttccagctatgcttccaccttctcttattctgctgctcatgctcttcctttcttctttgctcgcaacaactactccaccaggatcaatcttcatccacctgtcttttgccaacttcaatccgagaaagttcattactctctggtaatggtggtgtggcctcaaacgagtggaaagctgttcctgatatttggagatcttctgctgagaagtatggtgataaaatagcattagtagatccgtatcatgatcctccttcaactatgacatataaacagttggaggatgcaatattggactttgctgaaggattgagagttattggagtaagacccaatgagaagctggcgctttttgctgataattcatgtcgctggc

SEQ ID NO: 82905 - DNA, 903 bp, Glycine max
  unsure (1)..(903): unsure at all n locations
  Clone ID: PAT_MRT3847_45881C.1
caaggtcttccaaaaggaaggtcttggtcccaggaagggggcacactgtgcgagaccatttaatgaggaagagtgggacgatgaggaaattggaataccttgtgctgctttgactgcaccagttcccatcttgcctatgacatctgatggttctgttccaaatgacaatctccctgctagtggatgtactgtgtcagcatccatatcatgtctatcaggatcactgccttctcctggaggtctataatcctggtcaggaaaacattgttgaaggtgcatcaccttcagatgatttttttgagggcttggaagactacttggctggtttctcctctggccagaatactgaattcaacacaaacggaatgcggctactacaggtgatgttggtaactctgatgaattttttgagggcttgaaagactactgggctgctctggctggtttctccgctggccagaatacaggtgatattgggaactctgataacttggacttcatagagttgaatgacctagataccccattgttctatccgatcacacaaccttgaagttaagaagagtcgcaataaaggggctgttttggtgatgacttactactgacctttggcaactagctagagggctatttaaattatgggtttatcttattctgtgctttgaactttggcactcaagttccgcgagtgattgtgtatatgtgtttttattttttttttcattttagaacttccttctcttgacgagaaaattgtgtatttcaacatattcatttggggaatatcttaaacattatatcaagagattcactaaaaaaaaaaaaaaaaaaaaaancaaccnnnnnnnnnnnnagggcggccgccgtgagtgagctcgtcgaaacaagaattaataccggacc

SEQ ID NO: 82906 - DNA, 306 bp, Glycine max
  Clone ID: PAT_MRT3847_45882C.1
atggatcttgatacatcatcggtgccactgataaactccgatcggcatggtctgcagcgattcgatgccaagacgcttgtccttgtgtctgttgggaagttgcagacatacttgcaggccttcgctctgcagccacggccacaggaggcctgcgcaaatctggcggagaagacacaggtgatgatctccctatcacatctagtgccatctccatggaagttcaacgaggccaacctgttggccgtgaacgaggaaaaggcggtggccgtccatccatctcgccaatgcttctcgacaggcagaggg

SEQ ID NO: 82907 - DNA, 673 bp, Glycine max
  Clone ID: PAT_MRT3847_45883C.1
caacaaactaaacgacgactctcataccatacatgtaacgtgcttcatcttcatcttcatcttcatcttcatcctcttcttcttctgcttccgtgggtttcgatgtcggcaattcctatcagttccagctatgcttccaccttctcttattctgctgctcatgctcttcctttcttctttgctcgcaacaactactccaccaggatcaatcttcatccacctgtcttttgccaacttcaatccgagacagagaaaccgctgacaagaaggtgttccccctttctagaaagttcattactctctggtaatggtggtgtggcctcaaacgagtggaaagctgttcctgatatttggagatcttctgctgagaagtatggtgataaaatagcattagtagatccgtatcatgatcctccttcaactatgacatataaacagttggaggatgcaatattggactttgctgaaggattgagagttattggagtaagacccaatgagaagcttgcgctttttgctgataattcatgtcgctggcttgtagcagatcaaggtatgatggcatgtggggcaatcaatgtggtaaggggttcgaggtcatcaattgaagaactgctgcaaatatacaaccactctgaaagtgttgcactagctgtggacaatcctgaaatgc

SEQ ID NO: 82908 - DNA, 499 bp, Glycine max
  Clone ID: PAT_MRT3847_45884C.1
tcatacttgaggaagttttgccatttacacactattattttgcttacaattagtatctcattcaacccgaattataaactaagcaatataatgtaccaaatagtgctgatgaggtttttgtaaaagccagtggggatgatgttattgctggtgaaaatgaagagttagctgacactgcaacatctacagaagcaggactaaaattagaacatgggggggccgattttaaaggttcaatgtttagaacgcgggcaagcaacatatacctttttcttttgtgacgttaattccaacggagtgcccgagatttaacctgggagcaatgggaaaaaccgtggctgaaccataatatacatcatgcagagaaacacccttttaggatgaggggataaatactaatgagccatcaccatctctctttgacaaaagtttcgaaacctaaatgggaaagggggccccccctgaaccggctcattaagccgggggtgtggggggattt

SEQ ID NO: 82909 - DNA, 307 bp, Glycine max
  Clone ID: PAT_MRT3847_45885C.1
gggggacagaagcggtttaaaattgtgacaaaacagaacccggtttttcatacatatgacgggaagggcttcccgggaaaaaaatttgtcaaaagaatccccgaggctgggggaaagtttactcccaaaacatttaaaccaatcctccacattttcattctagtttggatgtgtttcgacattcccgtccactattggagttctgacccagaaatttcccccgaagcttcaggcccctctggtctatagccggcacccttccttggctgttccaacagcctgagccttgttaagttttcaaagcttg

SEQ ID NO: 82910 - DNA, 254 bp, Glycine max
  Clone ID: PAT_MRT3847_45886C.1
acgaggttcacgtgtagcatgttcttgtgatcaaatcctcaaattagtatttatcaaatgaaattgctactgcatatttgtgtaaagaggaaaaagattactacatagtacatacatggattgcttgagatatgctgttctttctgtgtatctcatctgctatgatttttatattctcaattttccaagttcttcattatcttgaaactctacaaccacatgaattgcttgagcaaatggtgtgtgctgccttc

SEQ ID NO: 82911 - DNA, 756 bp, Glycine max
  Clone ID: PAT_MRT3847_45887C.1
ggctcgagctaaaactgtgtcctccgccgttcacatcatcgtcgacgttcagttgctcacactctcaacaggtgagaagagagatgagaggaaggagctatagtccatcgcctcctccacgccacagcagaagaggaggaggagggaggagtcccagccccaggggccgctatcctccccgtcccagacaacaagatctccctaccagccttcttgtccgtaaccttcgtcatgactgtaggcctgaggatctacgccgaccttttggtcaatttggtcctctcaaggacatttaccttcctaaggattactacactggagaaccccgtggctttggttttgtccaatttgtggatcctgcggatgctgctgatgccaaatatcatatggatggtcaagttcttcttggtcgggagctcactgttgtttttgctgaagagaatagaaagaagccaactgagatgaggacaagagagagaaggggtcgattttctgatcgtaggaggtctcctcctcgttactctcgttcacctcgctactctcgttcacctcgctactctcggtctccaccaccacgtcatagatctcgttctcacagtcgtgactattattctcctaaacgaagggagtattcaagatctgtctcccctgagggtagaaggtacagtcgagaaagatcatattcacagcataatagagagaggtcattctcacgttccccaccttataatgggggctcaaggagccgtagtcaga

SEQ ID NO: 82912 - DNA, 1422 bp, Glycine max
  Clone ID: PAT_MRT3847_45888C.1
gctcgacccgcgaaacgacggagactaaatctctaaaacgcttgaaaccctaaaactctgtgtcctccgccgttcacatcattgtcgacgttcgttcagttgctcacactctcaacagagaagagaagagaatgagaggaaggagctatagtccatcgcctcctcctccacgttacagcagaagaggaggagggaggagtcccagccctaggggccgctatcctccccgtccccgacaacaagatctccctaccagccttcttgttcgtaaccttcgtcatgactgtaggcctgaggatcttcgcagaccttttggtcaatttggtcctctcaaggacatttaccttcctaaggattactacactttcattacattatgaagatgtcccaagtcttgaagattttccactcatctttaaactgacacaaaggtcagcagcctagtgcttgcttgctttattatccacataattggggcatgtaaactgcacacgcttctcattaccaatttcctctctaattaaccctaccactccctattctcattctgcttttgcattttccttctcttcacagagaaccccgtggctttggttttgtccaatatgtggatcctgcggatgctgctgatgctaaatatcatatggatggtcaagttcttcttggtcgggagctcactgttgtctttgctgaggagaatagaaagaagccaactgagatgaggacacgagagagaaggggtcgcttttatgatcgaaggaggtctcctcctcgttactctcggtcaccccgctactctcgatctccaccaccacgccatagatctcgttctcgcagtcgtgattattattctcctcctgccaaacgaagggagtattcaagatctgtctcccctgaggatagaaggtacagtcgagaaagatcattttcacagcatagtagagagaggtcatactcacgatctcctccttataatgggggctcaaggagtcgtagtcagagtccagcaaagggcccaggtcagagcaggagtccaagtccgaatcgagatgaaagggaaccagcccggggtaggtcccccagtcagtgagcatgggataagacttgtcctggactattatatgctggattttgtcttcatattgggcaaattacttctgtttaatgttgtctgaactctgatacaatggaattggattttggtttgttgtttcatataccagttatctttgttgcttgaattaaacatggtgggtaagtctagacctagttatattttgattttgaaattgattactatttttttatctaattttagttggatattgagactttgctagtattttctatttgtatgttttggtatttttaaatgtggctgatggtaagaaatttgttctatatatgccaccagcttgatcc

SEQ ID NO: 82913 - DNA, 204 bp, Glycine max
  Clone ID: PAT_MRT3847_45889C.1
ggctcgagctcggactaaatggccatgatacacgctgtgccaagtgctatgattctggggcccgtatggtccccttgttgccagagctgatgatagtgcccatcgaactatctgagactgttatggctgagaactcctcttgtttgtctggatactcttgcctatgccatgagaatggcctgcgatcgatagacgagcccgaga

SEQ ID NO: 82914 - DNA, 393 bp, Glycine max
  unsure (1)..(393): unsure at all n locations
  Clone ID: PAT_MRT3847_4588C.1
aagttgaggatgccgaacggtgctatggacgccaaggaccctaacttctaggatccaggaggagatcgccaccgtgtgatcgtggtggctttcggagggcacacttgttaatagtgacaattcgtcgaaacgtgattttctcgtgttcaatagtgtgatgcgaatcggaaaagaagcgttttctgtgatagattgttatagaactgatctatctgcgctatttggtacatagcatggcactctgttgaacatatatctgncttgcagttggaagtgcacttgaattcaatactatatatacatttttttatatcttaaatatgatttttttcaaagtatttatagggctggttcttgattaatatctccttactacaaaaaaaaatgagtgtg

SEQ ID NO: 82915 - DNA, 1240 bp, Glycine max
  Clone ID: PAT_MRT3847_45890C.1
attcggctcgagcccagatagttttctcaccatttccgtattttacttcacctttagtgggtagtggttacatgatatcagcacactttcactcactgtgctttcccgtgacacgcatctatacttgtccagaagaagtaagatccatgaactaacattcccacacgctcgcttcaccatatttgccacccttttaacctcacttcttagggttattttgctcccttttccttgtttgggaattgggtttggtttggtttttcttggttgtaaaaggaaacaaagaaagaactaagatgggaagaggtagggtacagctgaagaggatagagaacaagatcaatcgccaggtaactttctccaaaaggagaggtgggttgctcaagaaagctcatgaaatatctgtactctgtgatgctgaggtagctttgattatcttctctcacaaaggaaagctctttgagtatgctactgattcatgcatggagaagatactggaacgccatgaaaggtatgcctatgcagagaggcagctagtagcaaatgattctgagacacaggaaaactggaccattgaatacactagactgaaggcaaaaattgaccttttacagagaaaccacaggcactatatgggagaagatttggcttcaatgagcctcaaagagcttcagagtttggagcagcagttggttactggtatcaaaaacatccgcacaaggaggaatgatctcatgtccgagtccatttctgagcttcagaaaaaggagaaaaggatacaagaggagaataacacccttgcaaagaagatcaaggagaaagagcaggctgtagcacagcaagctgcacaatgggagcagccaaactacagggttgatacatctttcatgccacagcagcaaccccttcccaccagtttgaacatatgtggcaataattactgccaggaagctgcaccagaactaggaaggaacggtctagacctgaccctggaaccactctattcttgcaaccttggatgcttctgaaaagttgtttcttctgagttggattatattatataagtgctggcatatatgaactactataagtagtctgtttgaatgttttatatgtattttggtctatggcttttccctctactttgaagacattattttgaattgcttctgttgtaaacaaattgaatttgaaatctaattgtgtatttttgaaatatgttaattatacggttttcctt

SEQ ID NO: 82916 - DNA, 259 bp, Glycine max
  Clone ID: PAT_MRT3847_45891C.1
ggttctagtgtgtgattgtttgttgttgtaactcgttcttcttcttttgttgttctgtgtttgtgtttgttttttctctcacctgaacatgtcttgctgccgtggtaactgtggttgcggaagctcctgcaagtgccgtaacggctgccgacgctgcaagatgtacccacacttgagctacaatgagtcaaccatttacctagaccctggtcatgggagtggcacctgttaatgctcaatttcatggtgacgaaatggg

SEQ ID NO: 82917 - DNA, 337 bp, Glycine max
  Clone ID: PAT_MRT3847_45892C.1
ctttcgtcccatcacgttccctgcagatctgggtcacagtgctctcatcagccttcacatggtgatccagatttcagagccgctcaatgctgagttgcctatcatgagtcttcgctctatcacctacgagttggctgacgttgatgcgggggaagtccgtggtagatatgatactgcatgccaccctatgagacacgactatcctcagccaatgacctaggcgcacgtggccggtgccattatggggacggtccgtgatggagattggtatggccgcacgaggagccgcatggcacaacagacgcatactatagatgatggtcacactggtggagct

SEQ ID NO: 82918 - DNA, 748 bp, Glycine max
  Clone ID: PAT_MRT3847_45893C.1
ggtggcacacatctatacttgtgcagaagaagaaagatcctgaactaacattcccacacgctcgcttcaccatatttgccacccttttaaccctcacttcttgggtttattttgctccttttttttttccttgtttggggtttgcatttttcctggttgaaaaagggaagaacttgaactaattggttaagttacctatctatctatctatctagggtataatattttatatcagttattaaaggaaagaaagaaagaaacgaagatgggaaggggtaaggtacagctgaagaggatagagaacaagatcaatcgccaggtaactttctccaaaaggagaagtgggttgctcaagaaagctcatgagatctctgtactctgtgatgctgaggtagctttgattgtcttctctcacaaaggaaagctctttgagtatgctactgattcatgcatggagaagatactggaacgccacgaaaggtatgcctatgcagagaggcagctagtagcaaatgattctgaaacacagggaaactggaccattgaatacactagactgaaggcaaagattgaccttttacagagaaaccacaggcactatatgggagaagatttggcttcaatgagcctcaaagagcttcagagtttggagcagcagttggatactgctatcaaaaacatccgcacaaggaggaatgatctcatgtacgcttccatttctgagcttcaaaaaaggagaaaatgatac

SEQ ID NO: 82919 - DNA, 796 bp, Glycine max
  Clone ID: PAT_MRT3847_45894C.1
atgtaaagcagcagaaagaggaggttgttaatggaaatgggctatcccaatcccatgcaaatggtgatgctaccactgtgcctgacattttcaacagcccgaatgtagttaacttgagcaggactggaattgagaatttggcaaaattggaggaccgaaaggaaccatggcttgttgtgctttatgcaccatggtgcccctactgccaggctatggaggaatcttatgttgacttagcagacaagttagcagggtcaacagggatgaaggttggaaaatttagagcagatggagaacagaaagaatttgcaaagagtgaactgcaattgggaagcttccctacgatattatttttcccaaagcattcgtttcggccaacaataaagtatccctcagaaaagagagatgttgattccttgatggcatttgtaaatgccttaagatgaggatatcaggaaattttcttcgtttttgggttgcaattccactgtgactatacgtacagcgggttccttctttatgctattacgtgtatataccattcgtttacagattcttctgtgaactcgttggaagtgggaatggaggtttatacaaataagatactcagttttgaatggttttatactaccatcttgcgtggttgtattgtagtagtcattctgtaggggagtaattgattttcttcttttctagatgagtgttttatttataattttcttcttttccttttatcgccgctgactgtcctattaaatttcatactaagtgaccaatcagttaattttgcatagca

SEQ ID NO: 82920 - DNA, 300 bp, Glycine max
  Clone ID: PAT_MRT3847_45895C.1
cggggcaaaggccagaacattgttaatatatattataaaaatgtttcaaagcatatgttttccttcagaaaagagcgccacaggcagtgacgcttctgggactgtcagatacacaatggttaacaacatttaccccaattgaggtggataggacccacattggagttgttttctatagccccatcaaaatctcacctttcaaagctttggtagtgttagtgggtgcaaccatttggaccttataacttataggaagctaaaggagctggggaaggtgctattattaatccagggaacctt

SEQ ID NO: 82921 - DNA, 1490 bp, Glycine max
  Clone ID: PAT_MRT3847_45896C.1
tatagagacttgcgcctgcccgtcgtgctggaacaacaacaacaacacaaacctatgcttaaaacttaaaattatccatcttcaacttcacaatggtgcgtgtcaaagaagctctcgttgtcaccccttccgagcccacaccgaataccgttctctcactctcagctcttgactcccaactcttcttgcgcttcaccatcgagtatctttttatttacaggcccggcccgggcctggacccaacttccaccgcggctcgtttaaaagctgcattagccaaagcgcttgttccttattatccattcgccggaagggttcgctccaggcccgacggcccgggcctcgaggtcgtttgtcgggcccagggcgctgtcttcatcgaagcctcttctgaacgttacactgcccatgatttccaaaaggcccccaagacagtggcacaatggaggaaactattatctctctacgtcaccgacgttctcaaaggctctccaattcttgttattcagttgacgtggcttgccgacggcgctgcagctgtcggcgtcggtataaaccactgcatctgcgatggcatcggcagtgccgagtttctcaattatttctcggacttagcatcccataataataacgtgagtgtcgatcccaaacctaaacccgtctgggatcgacagctcatgaacccggacggcagaactcgggcgaacctggctatgcacgccgagtttgtccgggttccggatttgtgcgggttcatgaaccgtgtcacgagcgggctgagaccaacttgcattgtgttcgacgagaggcggatcaacgcgctgaagggcgcgtgcggaatgtcgtcgtacacgtcgttcgaggttctggcggcgcacgtgtggaggagttgggcgagggcgatggggtttcctaaaaaccagacgctgaagcttttgtttagcgtgaacgtgcggaagcgcgtgaagccgggactgccggaggggtattatgggaatgcgtttgtgttgggatgcgcgcagacaagcgcgtgggagttgggggagagaggggtcaggtacgggtcgggtctggtgaagcgtgcgaaggagagggtggacagcgagcacgtgcggagggtggttgagttggtctccgagtcgagggcgagtcctgactcggtgggggtgctgattctgtcgcagtggtcgaggctggggcttgagagggttgaactcgggatggggaagcctctgcatgtggggcccatatgctgtgataggtactgtttgtttcttccggtgaccggtgaacgggcgagtgtgaaggtcatggtggctgtccccaccaccgccgttgacaactttcaccgtttcctccgggaatcgaatttatgacccaaccacaccctactaggttacgtcacgttgacctctgtaattattcttcactagttcctgtgctttttgtttaacaaaaataaaataaaaaacaaacaaattattcctaaa

SEQ ID NO: 82922 - DNA, 463 bp, Glycine max
  Clone ID: PAT_MRT3847_45897C.1
ggaaaaacagggggcccttccaacaattcatgtatcaagttcgaattttaatttacataatttttgcaggcgggggataataaataaagtagattttaaaatgcaagaagccaagaggtttatgacatgaaacggggaacaaaaatgaaacttgggggaacacccaagtgaagttgaagctcaagggttgttttcaaaggctgcacaggggcttacctttccataaatcaagcatcaatggcccaccccattacatccagttagccgccaagtctccactgcccacagctgggccgaatgaccgagctggttttattgaaccgccccaaagaaggccccacccaacaaaatgttagccccgacaatgaaaccattggcgatgggcgcagtatttcccaaattaccctttttggggtcaatgcagttgcatacacagtgtaaaccaacccaaatgtgataacaa

SEQ ID NO: 82923 - DNA, 460 bp, Glycine max
  Clone ID: PAT_MRT3847_45898C.1
acggctgcgagaagacgacagaagggtctggtttatgaagtgcttcttaaaagccattgtgaatccgtgtatagtcatttttgcacttcaatagttacatgccatttttttctgcacattaaaatgatagagaaagtgtttgatagattgaggagaatggaaaaatagacaaataggagttgtagtcttccaccatgacttttgttcttcagtacgtatctgcctctttttttcatttcttttctctacaacataacaacaacaaaaaaaacaaagtacatttagcgattcatattctaggataattcataacgaattatcttagaatgaatatttttttataagaaatatccaacataaataaacatgcaaccgttattttttaataaataaacatgcaaccgttatttttttaataattaaaagtagatatatacatttcatcatttatataatctct

SEQ ID NO: 82924 - DNA, 172 bp, Glycine max
  Clone ID: PAT_MRT3847_45899C.1
cagtatgaggttttttcattgttctctgtttgtgtttaaccttaacaagcgatcgattatattcttacaatttattgttcggtagtctgatgctggatttcttttaactttttgaaggtgatgcacaggatgcattctaataagacaagaggctagagattgatcattggaa

SEQ ID NO: 82925 - DNA, 466 bp, Glycine max
  Clone ID: PAT_MRT3847_4589C.1
ttatctagaacactctgtttttgagattgatattaagaaacgcattgccctggcatacatacaatcagagagtacctggctttggttgagcacgtaaaaaatgtcgaaccacatacttttattataatacgaggaagaggacagactcacacccagtaggagacgcggaaagttatgcgatattaccacatattatgaggtcaacgctcaaaaaactttcaccatatagcaatggaatgaatcacttatgccttctcccacttgaggggtttgaccactttcgatgggaagacccggtcttgtctgggaaagcgaccataggcacaagtggtgggaaacactgttctttactcccctcttgacattaaggaagatggatatcataccctgtctgacaactaagtttttcttcacaatgttgagaatcttcttttcaaggatcttcccacacgccattggtgtcaac

SEQ ID NO: 82926 - DNA, 572 bp, Glycine max
  Clone ID: PAT_MRT3847_458C.1
aattcggctcgagacggctgcgagaagacgacagaagggacaagcacatattatgcatgaaatgacttagttcacagatccatgattagtaatattcagaatttctgtttgatctattcaaatttccccatcctatataattaacacattagttcaggttcctagtttctaaatgacgcaccttcatctatgattaggtcaaggttacatctatcacaacatcaaatgagtagtcagaatattaacttttcataattatacttgttcagacatctccccgctcttaacactttaaaattatcataaggagtcatgtcatgagtttgttagaaatcctgcattctatcctcaggctatgtaacttcaacattttctttggcttatatttttattgatgaaaaggagtcaaatacaatacttagttccaactttttaatcgctaagttccatagttagactgatgaatgggccatatttggattgcatcaaaatgtttttaacttggttattaatagtgcactaaaaattctgaacattaaaaggggtcccttctgtcgtcttctcgcagccgt

SEQ ID NO: 82927 - DNA, 576 bp, Glycine max
  Clone ID: PAT_MRT3847_45900C.1
gattattcaaaatgtcacggatacactctttgcctaatggaaatagtttgtgatgcaaggtctgtttttgaaagtatagaacggcgctatctctccagtttgctaaaggattggctatcatactcagtgattcatttgctccattttgcgattatccatgtacttactcgtcatcattctctatgctcctacaccgctcggtggatatcgagaagcctcttctcctcctacgacgtttccgctgcctacgaattggccccagacaccaacaacttaaccctaacaaacaagccccccctagccgcaacctcctgaaagctaaacagacactgaaagaattttcctctcttgcgcctgtcactatccctctaaaccagcccccctctcacagaatcccatgccatctgcgtggtggcggcagtccatgccaacttcatgcgcgtcgtcgtccccgaaacgacgagccttctggaagctaacgcggggtttagatactttgcgtgctgagtgctctgctgaagaagataacccgacggtgatggcctgagacaggttcttgagggcttcatcgactgg

SEQ ID NO: 82928 - DNA, 1499 bp, Glycine max
  Clone ID: PAT_MRT3847_45901C.1
agaagacgacagaaggggggttatggtctcgtgtaagcgaattagcgaagaagcataagagcgtcgatggatagtctcaagttcgcatctttgacgctgcctccttgttctcgacgctctgggatgctaggaaagaggttgaattcccctttacttattattgattcttcagcacagttttgctattgcaagactgatcttgctgccgcatcatcaagtattccactgccaaatatgagattttcttgtagattttcaccaagtgtagcagcagaaacatggacctcgaatctttcttccaaacaatggatattgcactcaactgcacagatagaaaatataatcacaagtaatgaggatcaaagcatgtgggaagcatgtaaacaagctctttctgcatttaactttagtgatgaagaaaaggacaagatacttggaaaagcatttggtcttattcattccccttactggggagaagaacgtagtaaggaagttccaaaattaaagacagtaaatggagtattagactatctgaggagtttaaatctttctgacgatgatctgtccattttgcttaaaaagtttccagaagttcttggatgtaatttagaggaagagttgaaaggcaatgtaaagatcctggaggagcagtggagtattaagggaaattctcttaggaaacttctccttagaaatccaaaagttttgggttataatgttgattgtaagggagactgtattgcacaatgcactagatgctgggctcgcttctaggtgattggatgagagatgtatctttttgcaacattagttgactgctgcataattgctttgttcattcatccaccctctccaacaatagaaggcagagttgtatgtgaagaaagtttctcactttctatgatgcaaagtggcaagaagtaattcattctcaagttgaagaggatgattttgaaattatgattattgctgtagtgtccagaccatggaatgaagtaaatcacaataagtttgtttgtaaattatgttccttttgtctgaagaggttttattgttgatggactcttacataatatttgatcctatgttgatataattgtaactctaatgcagatctcctctccctatgaaatggaatagactagaatgaaagagagcgggtttgttaaaagtggggagtgggtgtgaatcagtgaaaggggggttgtgattaggaattggggagtctcttggtctgtcatcagtgatgatggaaatagggatgatgtaggcgagtgtagaaaacaggttctttgagattttggccaggacaaaacttagatgctggtctatagggacttttggtgctggccttcaatcaaaattatccgtgagataaaggtgtgcgttaaaggtgaacaaagattactgaggcgaaactccaattctgattggaaaacatcaccaaaagcacctaaggaactgtgtgtaaggtttggccgggtgggtattggggattt

SEQ ID NO: 82929 - DNA, 231 bp, Glycine max
  Clone ID: PAT_MRT3847_45902C.1
ggctcgaggaaaaatttccaaaggtgtaatattttgggaggatgctaaataggtaattctagcagggcgcattttccaaagagggtcaccacaaccttgatttaatccattcccctttcttttccaacaaattagggtttcccttttcccaacattgccactcattccctaattactctttctttattttcttttccactcaaatttaatcctttgatattcaatgctctc

SEQ ID NO: 82930 - DNA, 496 bp, Glycine max
  Clone ID: PAT_MRT3847_45903C.1
ggaattcggcacgaggcaaaaccctttttcacagatgagaacgtgattatgaagtccaaccaaacatgtacataaaaggttccttctctcttctttcatgtatgatctatatagtcattaacgaggcagatatctaatataagagctacaaaatcagtttgtattttcatttaaatgtgatgcacacatgttttcctgctattcttgaagaaaaatgaaatatagaaataagataaaatgaatagaattattttaaatcttcttgaagactaggaattcagtttgcttttcagctatctactttagccaaatcattgcaggacttctgtaaggatagattgatgattagacaatttaattaagtgcactggaaaactgttcaacttgatcacacgaggagcttacctatgttggttcttcatcacatacagtcacccttagttggatactatgcattttcattgatgtgtgtctactttgaatgtcccttgattgc

SEQ ID NO: 82931 - DNA, 751 bp, Glycine max
  unsure (1)..(751): unsure at all n locations
  Clone ID: PAT_MRT3847_45904C.1
gtctgctttggggagctagctactaattattatgcaagaaggtgtggcatgtgaaggaatttagaatgttctacttttactttgtttaaacttgtgtggttgataatttcagagtcttatatttagtatttctagccccttttattgttttccattgatattatgtatattaagatataagatgggcactgtcttctgttaaatactttcttttatttaaattctgcagcttgctggtgtacatctctctacactgatcccatccagaagcgatgatgcaatcagccttgtgacggtaagtagttttacttttattactttacagtttactcctgttccccatttttccactaatagattgttgtgtgttcatttttccgtttgaattctatttttgcagtcactttgttcatgggatccctgcaagagaccaactgcagcagaggttcttcaacatcctttttttcaggttgtcttttaactaatccatacttaggatcaggtttttaaatttttctctatcatttaatcacaactatattttgctttatacaagtaggtttttaatgtttgtgatttttaatttgttcagagttgcttttacatccctccatcccttcgcaccagagctgtaaccagaactccaccatctggtttgtaacttaatttatttatattggntttttttataagaaatgacctacggttcaattggaagtgatcctaaactagttgtctttctggttgcagc

SEQ ID NO: 82932 - DNA, 373 bp, Glycine max
  Clone ID: PAT_MRT3847_45905C.1
ccattcaaaaaaatattttaaaaaatcaattttgaacttaaccctttttttgttcccgggggttgaaattaaaaactgcccaaacgaaacttgtttttaaaaaatgggaaagggaaaacaaattccctttggagggaggctgctttttttttaactggggaatgttcttttaaaaaatagcttttaaattcaccgaccaaggccttaaattttgttttccacttttaaatacaacggcctgggtttttaaatattattttttgaagtttccaaatacccacttccattggtttccaaaaatgtctgcactattttcctgaaggagttgggattagggttcataaccttgttcaacatttgctcatcctgaaag

SEQ ID NO: 82933 - DNA, 166 bp, Glycine max
  unsure (1)..(166): unsure at all n locations
  Clone ID: PAT_MRT3847_45906C.1
ctcnagaagcaanccatggttgcctctctgnaagatgacaaaagccancatcaagaactgctgggggnagttggtggccntggtggtgaaatatggcgaggaggccctacagnggatgttcgctgccttcacccaccaccnanacctnnttctctcgnnattgatg

SEQ ID NO: 82934 - DNA, 294 bp, Glycine max
  unsure (1)..(294): unsure at all n locations
  Clone ID: PAT_MRT3847_45907C.1
agacgctgcaataatatgcataggtggaattgaaggatgggcttggcagcttgcacagcatatgcagttacacggcacatcacanccgcccttggaattaaccattaaatgcnttttttctgcgcccggtgattacgtccactttaagttccaagtccctctttacaaaattcctattggcactaatcagtggcgggattactatttcggtccaaatgccgcgcctccggttatatgtcttcctggaacccgcggttcccgcgatgtattctattaacagatcatgtgtttatt

SEQ ID NO: 82935 - DNA, 680 bp, Glycine max
  Clone ID: PAT_MRT3847_45908C.1
tagcttgtgtatagcaaattttgttaagtagacactttttttttactttgggaataataaagatgtgtttgttttgtacttggtgtgtgaaatgagagaaaacattgagaatagtttatgaagtcgagcactagagtcttgtactgctagactgaaagagcttccttgttcaatggctccatttggctccttggtcattctcccctttttgttgatagcaacagtgacttgttctacttcagagaaggaaaatagtaaaactttcatagtccaagtccaccaccaaaccaagccttccatattccctacccacaaacactggtacgactcctccctctcttccatttccaccaccgcttctgttatacacacctacgacaccgtttttcatggcttctccgcaaagctctcaccttcagaggcacagaagctgcaatcactcggccacgtcatcactctcattcccgaacagcttcgttcccttcacaccacgcgctcccctgagtttctcggcttaactaccgccgacaggaccggcttgctccacgagaccgatttcggctcggatctcgtcatcggagttatcgacaccggaatctggccggagcgccagagcttcaacgaccgcgacctctgccccgttcccgccaaatggaaggaaagtgcgtcgccggacaaaa

SEQ ID NO: 82936 - DNA, 1590 bp, Glycine max
  Clone ID: PAT_MRT3847_45909C.1
aacttaaaagttagagcgataatatttctcacatcatctttaaaagaataaacttgccttcaacaaaacccttgtctattgtgcaccaaagaagcaacccatttaagtaatctgcactctcaataaaagacagacataatgcaatgtgcacattggactaggagtattattacaatgtccttgttagacacaggaatcggagacagtcatccacacaatcacctttttgcccttaactttctttttctccacgcttcacttggtggagacagaagagtaataatggttgttgaacaactttggttagcatcagttgaaaagggttatgtacacgactacctgcaattaaagaatctgagtaagcatgttgtgaaattttttgaaggagtcgagtcacttctggctccttgttctttgtttcaatgctgcctatgacataaccacatgcaaatattcaattagaatcaaattagcaacctggcttctcattctcatatccgggttttagcagtctgaacctttaagatgcatattgcaaatcaattttgttaactgtgaactgtgattctccaaacctgagggaaaatcagaagaaaataaattccctcgccgagcattaagcttgttttcaatggctacagaaaacacacattataatccacttgtactcactttacaatataatcctcttttctagcaacatccagcaataggaagaaataggtctcttccaggggaatttggcacgtgactcaggtcttcatttgctttattgtgcagagttttttgcacataaaaaatcatgtaacactgtgaagctctgactgtagcctcatcaaccacagttatccaagcatcattgcatctgtaccattgattccttacacgcacaaaagaaacataatggccagactcgagtgtccccgaatgtgtcaccactgcaaaaatctcgaactcagaaaacatatctgatcttgatgccacctccaaaattaaaaattctatttccatatctggctctgaggattgaggaggacagatatggggacatatctaaggaaaatgggaagtgtaggtagcgatctatttttcttgaagactttttaacaaaggagtgttcaaatcgttttacatgcaaactaagtactaatggaagctttctaatagacatttgcttcaacgagtcctgcctttcccgacaattccggcagtaaagtttctggtctgaccccaacttctctggccttgtgaataaatctaaacaaccaaaaagtgtagacatactgccatcctcattttgtttggtaagttttttacccttttctgttgaagagacattggtatccaagttaagtgaaatgtccacacaagggtcataggttgttgaggtgaatccacaggccatgcaggtaacatctgatctcaataacccatagaacaccttatgagcaatgcattgacagtctccattacctttgcttccattccttgttttgctctctttctcatggatagcatctaacatcgaaatgaaaaactcgtgagcatcctggtgctcataacatgctaaatttgctgaatgctgccacc

SEQ ID NO: 82937 - DNA, 411 bp, Glycine max
  unsure (1)..(411): unsure at all n locations
  Clone ID: PAT_MRT3847_4590C.1
actgttccattttccattgttttagatagaccaatattccgcacgcgtcatccttgaatagaaccacattgatagccactacttgagacctagctcgactaaaagctagatttgcctcaattgattgcgcctagcctccctccttagacgagttaactngcagctattgcaagagttagctgtgcttcttgcggatcaatggcactacccttctccccatcatttactaaaacagcgatctgatgactgtttattgtagcagaaccgagcatcgtagccatcgttatccattgcgctttaagaagacgtatggtaaacagacctatatttacggctgcggcaataggcgcatgatttggcaatactccaatgcgcccgctattagcatatagaatgattcccttgacttgc

SEQ ID NO: 82938 - DNA, 398 bp, Glycine max
  Clone ID: PAT_MRT3847_45910C.1
ctacctagctttcggtcgagagatggagaacgatgcctcgaactctaagttcatggaccgcttgcgtcctaggattgcagcgggctagaaagaagttacaaaagccgaatgagtagtcactggtattttgcgaaggttatggataaggttttaaattgcgggtatggtcgctgattcatcgcattccttgatattgctggaaattgcggacaaatgccactgaggtggccataattgcagttgcgttacagtcatagacatccccataacggattgagaaaatggagaaattgttaagggaacctacagggggatcattgggcagggaattttaccaaaaactggctcgaagttcaactattccttctgtcgtgctgggaagcctatcataaaatgac

SEQ ID NO: 82939 - DNA, 498 bp, Glycine max
  Clone ID: PAT_MRT3847_45911C.1
atcgccttcgcccagcaactcctcctcttccacctccactcggccgaccaccacggccccgaaggacagtaccacttgctacttcagctccttatcttaatctccctctcaactaccctcttgggaatccccttccccaaaagcttcttagttagcttcgttcgttctctaagcattttctttcagggtttatggcttgtgcttatggggtacatgctttggacgccggggcttatccctaaaggctgcttcatcaacgaagaagaaggccaccaagttgttagatgctccgaccatgattctctccaccgcgccatatcgctggttaacattctcttcagctggttcatcattggtgtcaccgtttttggtgttgcttgttatttgggtttggttaagttttacggtgaaaaagttgactatgttgcgttgagggacgaggaaattagtgacgatgttgagtcgcaaaagagaagcatacttggcaaccccacgagt

SEQ ID NO: 82940 - DNA, 306 bp, Glycine max
  Clone ID: PAT_MRT3847_45912C.1
ccacgcgtccggccaagacggacgtgaccgagagctggagaatggatcatgacgacatacactacaatgcgacttgacttggaccctctcttaccattcctcttgaatccttatccaccggagctctgtgagggcgcctcacccgagctctcttccgaactctccagcccacccttcagcgaggactccagtccaacggggcgggggtgcaccgttccaagggtctgccggggcaatgacgtacgcctcgacgaagttgaggagattgccactcacgatttccaagctttctctctctcctcctgg

SEQ ID NO: 82941 - DNA, 376 bp, Glycine max
  Clone ID: PAT_MRT3847_45913C.1
tttttacctattaccattcctttctggcacctttaattctccaattgaacttttgtttcactttgccaaatgacagacaggatgaggcagcccgatttctccacagtttcatgttggaggacaacaattcttgcgcccaaaagcctattgcgttcacactcataatcccccttgataatccataaaccctttataggtgcaaatgatactctgctgaaagcaccattgtgtcggttggcatctgggagaagcgcccatgcaagtcattctctctgctcagcaactgacttgctgagatcatctgacatcagatatgtgaactcactagatcaattgaaggtgggagacacggtcaggaattggaaagagaacaatg

SEQ ID NO: 82942 - DNA, 178 bp, Glycine max
  Clone ID: PAT_MRT3847_45914C.1
ctcaaccttttctaccaaaatccctttatagatatatctagacccaccttcacattactgcgttatctggttttttcttaacccaccaccactctacaaccctgagagaaatactacatactctcattttataactttcactcttacgactcttttaaaccagaaataaataatcata

SEQ ID NO: 82943 - DNA, 1225 bp, Glycine max
  unsure (1)..(1225): unsure at all n locations
  Clone ID: PAT_MRT3847_45915C.1
gtgcagcacgaccgggccggctacttcgcctcctacttccctgtccctctctcgtcaacccctcccaacgtccgcccccgcaaaacaacacttccagcctgatcgattcttcgatcctctttcaccggttttatgtagctagagtttaatcaatattaagtgatagtagaaatggataaagtgtctgctccttcgtcaagggagcgtgcacaacgcctttatgaaaagaaccttgagttggagaataagcgaaggagatcagctcaggcgcgtgtcccatcagatcctaatgcttggcaacagattcgggagaattatgaagcaataattcttgaggatcatgctttttctgagcagcataatattgagtatgctctgtggcaattgcattataagcggattgaggaattgagggcatactttaatgctgctctttcttctgtaagctcaaaatcatctcagggagggaaaggccctgtgcgacctgaccggataagtaaaataaggctacaatttaagactttcctttcagaagcaactggattttaccatgatcttattacgaaaatcagagctaagtatgggcttcctcttggttactttgacgattcagagaaccggattgtgatggagaaagatggaaagaaatctgctgcgatgaagaaaggcttagtatcttgtcatcgttgtctgatatacttgggtgatcttgctcgttataaaggaatgtatggtgaaggtgactcaataaaccgggagttcactgcagcttctagttattacttgcaagctgcatctctttggccttctagtgggaacccccatcatcagcttgctttgttggcttcatattctggggatgagctggtggctatctatcgatattttcgtagtctggctgtagatagtccatttacaactgcaagagaaaacttgatagttgcatttgagaagaatcgtcaaagtttttctcagctttctggtgatgttaaagctcttgcagtcaaggaatcttctgtgcgatcaactggcaaaggaagaggaaaaggggaagcaaaacttgcaacaaggggtacttggtgttgatgccagtcctagaacaggagcatccagtatacaggaaacatataaatacttctgcacgcgctttgtccgtctaatggaatcttgnttacccgcacaagcattgagacttttgctgaagttcttggctgttgtaagcact

SEQ ID NO: 82944 - DNA, 672 bp, Glycine max
  Clone ID: PAT_MRT3847_45916C.1
catcccccactgtctctctctcttctttctatctctaacgaaaccctaacgaagacctcttttcttcattctctccccgatttcaatcccatgctccgatctcttccagcatcggtttcatgtgatttgagtttggttactcaagaaataattgatggatgatgatagtagaaatggataaaatgtctgctccttcatcaagggagcgtgcacaacgcctctatgaaaagaacctggagttggagagtaagcgtcggaggtcggctcaggtgcgtgtcccatcagatcctaatgcttggcaacagatgcgtgagaattatgaagcaataattcttgaggatcaagctttctctgagcagcacaatattgaatatgctctttggcagttgcattataagcagattgaggagtttagggcatacttcagtgctgctctttcttctacaaatgcaaactcatctcagggagtgaaaggccctgcgcgacctgatcgcataagtaaaataaggctacaatttaagactttcctttcagaagcaactggattttaccatgatcttattacgaaaatcagagctaagtatggtcttcctcttgggtactttgacgattcagagaaaccggattgtgatggagaaagatggaaagaaatctgctgcgatgaagaaaggc

SEQ ID NO: 82945 - DNA, 266 bp, Glycine max
  unsure (1)..(266): unsure at all n locations
  Clone ID: PAT_MRT3847_45917C.1
tgcctaacaaacgcccacaantaaannaaaagggggggtaatttttaaaagaatagcccgttaaaaaaccaaaaagggcaaaagaaaactacgaataactaaaagccataggcaaatagcaaagaagcataagaaaatatagaaaaattaaaaacaagagacaaattaaacatgacatcaaaaacaaatatgaaggtaaaacaccaaaaaattggaaaaagaaatctacctaacagaaaaaaatccccaaagtattaaaagtaaca

SEQ ID NO: 82946 - DNA, 266 bp, Glycine max
  Clone ID: PAT_MRT3847_45918C.1
tttttgaacaaatacaaaacacattgattttcagcattaaagtcggaaaatttcttatatatactagatgtaatgcattttttgttcgggctacctaggactaacccatttattgcaagaaaaatggtcgaatacacaaatttatgggttaggtagaatcagcagcccaaaaaatgcctctacttccacacagaaaaaacactaatcttagctgactcttattacacaattttaaccgaaaaacttgacattttttttacttggga

SEQ ID NO: 82947 - DNA, 1411 bp, Glycine max
  Clone ID: PAT_MRT3847_45919C.1
acgagggtgggtttgcaatatctaactggagatatagctggtggcaatgctcgttgtattgcaatgcttcaagcattccaagaggccatcaaagactacaaggttccacatgagaagactctcgtcaaactctcaaccgccaatatgaggcggtaccttccatttagaatgaagtgtctccctctgtcaatcagcatgggaaatgcaattagattttctcaaaagtcggatagccaagctacctttgaccttgtctgaatcagaagcaaaagcttctctcgagtcagatattgagtgttttataagtgaaaagattatacttgccaacaaggtgatagtgaagcatgctgtcaccaaaataagagatggtgatgttcttctaacttttgggtcttcatctgctgttgaaatgatactattgcatgcacatgagttgggaagacagtttcgtgttgtggtagttgactctcgtccgaagcttagagggcaacttttgcttcgccggcttgtggagaacggtcttagctgtacatacactcatataaatgctgtttcctacataatgaatgaagttactcgagtctttctgggtgcttcatcagttttgtctaatggaacagtatattcaggagtgggtactgcatgtgttgcaatggttgcccatgcattccatgtccctgttttagtatgttgtgaggcttataaatttcatgaaagggtacagcatgattccatatgctcaaatgaacttggtgatccagacgtcatttctacggtactgagtagagaggatgtcaaacacttggatggttgggccaatattgaaaatctgcaacttttaaatctggtttatgatgcaacaccttcagattatgtttcaatgattgtcacagattatggcatggttccacccacaagtgtgcctgtgattgtaagagaatatgggagagaacaggtctggatataatgaattaggcaaatgtgtaccatctcaattttgagggcatgaaaaatccctatttagcagccatatgcgttggcgtgcttgtttctgtattatttccccaccttggaagaataatgtaatgagccttcctgttctgaaattttggacatttctgtattcacctgtcctagcgaagagtgccaattttcgcctctccaggaagatttagccatgcattctcatcatctgtaacagttcattttagaccattattcaatttttggataattattcggtcacaaatttggtttagctttctttttcttttttgttctagtggtcttcaaattttggatagttgttcggtcagttttggtggttattattctatacccagttttttatatctttgattataaaaaccatcaccatcaccacgagttactggtgaaattgtcactgaat

SEQ ID NO: 82948 - DNA, 1523 bp, Glycine max
  Clone ID: PAT_MRT3847_4591C.1
gtctcagccatattagcagcggttaggactgtacaagtggatggaacagaagtagtggagcatggtagactcatgattgagatgggatgccacaaaggatttagcttaagagatgttctctcttattggaactgtacgagtagctggaacagaagaagaagaacatggaaggtataagtggtggctggagaaattagctgacataagcttgcgacaaagtgctgcatatggagtttggaattttagctttaacattctttatcattcaactcaagttatcgctgtgctatttgaaggaatgtatattctagcaggtcatatcacagctgagaaacttaccaagtttatattattcagtgaatggttaatttattctacctggtgggtgggagacaatatattcaatttgatgcaatcagattgggcttgtgaaaaagtattcgacttaatggatctctaacctagcagccaattcctagaaagaggggtaaaattgcagaggttattttgatagatgatatccctcttaaagacttggacatcatgtggtggagagagagaattggatttgtgggccaggaaccgaaactcttccggatggatattagttcaaacatcagatatggatgcacccaagatgtaaagcagaaggatattgaatgggctgcaaagcaggcctatgcccacaattttatctcagcacttcccaatggttatgaaacacttgttgatgatgatctttcaagtggaggacaaaagcagcgaattgctattgctagggaggttcttaaatggccaaaaatattgacctatgcccaagccactagtgcactagatgctgaaagtgagcataatcttgagggtgatgttcgatctgtttgaagtgattctgcagcgagtaggtgtcatagtcattgcacataggctttctaccatacaagcagctgacaggattgtggtgatggatggtggggaaattgttgagatgggaagtcacagggaacttctcttaaaagatggtttgtatgcacggttaaccagaaaacaggctgatgccatggcatgatttgggtttctgtagcagatattctatttttcctctggcttctttttaaaggctgtaaagtgaggcagcaatttttttttcttgttgctgaccaatgtatttatagtgttatacaagaaaattggtgaagttctcagcaaagaaggaagctgcagaagttttggtttaaaatgcatagcggcttcagaaagatttcaccctacaggttctaaagcagatgcaaaagcatgtaactaggtcgttaggggtattcaatattcacagtcaagatgctgataagcatcagatgtactgtcatactgtagtcccagtgaccgtatagactgttcattttatacatgtaatttaaatatttagctcttggaagacattctcgttgaagaatacctcctgcccatgtttgatggcactttatactcatgttaaagtctattaatataaattgagttttcaaata

SEQ ID NO: 82949 - DNA, 317 bp, Glycine max
  Clone ID: PAT_MRT3847_45920C.1
tggggtaaatgccttcctaagatgtcatggatctggctgtattattatgcgtctcaacacggtcactgcggggttcggttgcgggacaatggaattataatcgactagttatgaacttccacagggcatcatgcactcatgttgaggatatcatcataaaagtagtcatacttcactagattcgccatatgaccactgctttctcctgcctcacgaacatcttccatgactgtgctgttcatacttgtgatgcttcactgttgctggactccacaataaggagcttgtctgacaagcgaacaaattcaaacctttgg

SEQ ID NO: 82950 - DNA, 434 bp, Glycine max
  unsure (1)..(434): unsure at all n locations
  Clone ID: PAT_MRT3847_45921C.1
ggggggccattgggggaggaataaaaaaagggacaaacctacttcccttttttggaccaaaaaccccatttttaaacttttcaccctcaaaaacatttttaaatttatcatggggaaaaaatggtcccccccaaacaaaagtctttgacccaagaggagtatctccttgaaatgactttacaaactcagcaaacaggggagcaggctcaactttgggtctcttcttctttggttccccctcttttctatgcttcgggaacggggtttttttccgggggagggaaaaagaactcatccttgcattagaaaaaaaaaaaaggggggtgggctgggattggtnttaaaaactttctttctttttttcttctccggaggcggggggagaaaccgaggggtgcgcaaaaacaccggacccggggggggacgcgggaatt

SEQ ID NO: 82951 - DNA, 831 bp, Glycine max
  Clone ID: PAT_MRT3847_45922C.1
acatacactcatataaatgctgtttcctacataatgcacgaagttactcgagtttttctgggtgcatcagcagttttgtctaatggaacagtatattcaagagtggggactgcatgtgttgcaatggttgctcatgcattccgtgtacctgtcatagtatgttgtgaggcctataaatttcatgaacgggtacagttggattcaatatgctcaaatgaacttggcaatccagatgtcatttcaaatgtactgggtagagaggatgtcaaacacttggatggctgggccaatattgaaaatctgcaacttttaaatctggtttatgatgcaacaccttcagattatgtttcaatgattgtcacagattatggcatggttccccccacaagtgtgcctgtaattgtaagagaatatgggagagaacaggtctggatataataaattaggcaaatgtgtaccatctcaattttgtgggcatgcaaaatccctatttagcagccaaatggcctgcttgtttctgtattattttccccccttggaagaataatgtaatgagccttcctgttttgaaatttttggacatttctgtattcacctgtcctagtgaagagtgccatttttcgcctctccaggaagatttagccatgcattttcatcgtctgtaacggttcattttagactattattcaatttttggataatcattcggtcacaattttggtttagcaagtttttagttgtggttagttagcagttagccccatctctgcttactgtactgtaattacgaaaaccatcgtcacatagattgaagttgtattgtcactgaaa

SEQ ID NO: 82952 - DNA, 351 bp, Glycine max
  Clone ID: PAT_MRT3847_45923C.1
ggataataaaagctgaaagatatattttgaaaagagtggaaatggcaaagattgaaactggagacagctgcgtgttaatggacgagacagccaaactgggcgggcggtctggatctcgggcgctgggcagggacatattttgtcttttgcaaattgccctttttctcccccaaagcgggccccaccacttattatattcattgggcctaatccttattgggttccttacttaattataacaataacccaactccatcaacaactcaaccactcttgatccttcactaatgtagtacaactacctgtccaccccgtttgaaaaaacccttggaattctttttttctttttgc

SEQ ID NO: 82953 - DNA, 421 bp, Glycine max
  Clone ID: PAT_MRT3847_45924C.1
gttcttcttattattttttacccattagtgcccattgaagaccgaaggcggaatccttaatatcaggaggaggaaatttcaaaaagcaaaaacaaaggggaatggaggtcacgtacatacaaacaaaggggggtggcggctacaaatgctttgcaaatttttcacacttagaagcctgggggcttgttggcgatgaagctgatgctctgcactcggcgaacgttgtgtaatccgatgatacggctgaagccattggggtatacagccttagcctctagaagctccttcaccacctgataagcttcatggcatccgaacatatgcagcttgcacataggccaggagacgccatcgaagaatcctggtgacctgttgtgctaacggaacacgataccattgctgatctgaaatcccaagctgg

SEQ ID NO: 82954 - DNA, 281 bp, Glycine max
  Clone ID: PAT_MRT3847_45925C.1
ggtgactgtctcagtggagctgggtcatctcaggccttggctccttgaacttttgagcgccatgtgcttacccgaagtcctctctgaggacatgaagaagctgaaggcccgaatgcaccaggccatagaaagattttatgataaaatgcaaaatgcagaatcaggacgtggacaggtgatgtcgagcctggcagagctggaggacgacttcaaagagggctacctggagacagtggcggcttattatgaggagcagcacccagagctcactcctctacttg

SEQ ID NO: 82955 - DNA, 271 bp, Glycine max
  Clone ID: PAT_MRT3847_45926C.1
cggcgctttttttaaactacgctatcttaatgtcggaaactatttgaggtcggaaatcagatgaactattcatcacagtcagaaggggtttaaactgttgagggtcgttgatcacacccaagatatcatcttttatggtacctatgcagaaccggagaaaaaatatatttttagttaatgggaaccgagaaaccttggaattttaaagccatttgatttttcattttccaagggcaaagggctttggatttttggaccgggcaatttaaaa

SEQ ID NO: 82956 - DNA, 207 bp, Glycine max
  Clone ID: PAT_MRT3847_45927C.1
gctcatcgtcgatgtatttgggcatctgggggtataacattcgacgacttaaaaattatctttttaacagaacccaggttaaacactgccccttataaaaaatacggcaaaaacttgaacaaaaaaatgcaaattgcccgtttcccttttaaacttaagggaagcccaacacccacaatacaatgggatactaccctggcacctggg

SEQ ID NO: 82957 - DNA, 754 bp, Glycine max
  unsure (1)..(754): unsure at all n locations
  Clone ID: PAT_MRT3847_45928C.1
ttccttgnnnnntagaaaggataggaaacttgttcaacaaaatacaaaaaaatacgaatcaaagaagctacatgttatcccatatttatgagtgggcaatgggcatacgagcatgcctggactgtccctcctcactataaaataatatatgcactaacatagctaattttagtgttgtaacatccaactcgttacataataatgcaggttcaatcgttcaaaagttattagagcttggttatcaccctttaaaatatctcatattattggcttccaattaatatcagaagttcagaactgtgttcctgagcatgcaagcttctctcttcctatcgacaagtgttgttcacattgccacgcaaggcagttaggattatggaaatcccataagcaacagagcaccgcatctgcaataggattttcaactaccaaacgtaacagttcaataatccttttcgcacaataagggaaagggggtaacagtacgactacgaggttgcgtaataagttatttacttaggcccgctcaagataccgaaccacacccgcaggcacacacagtcacacacaatcacaaacattggaaaaatatgaaggaacaaaatggcaaaacccaaaatctgaatttgccttaaaacaaacatgtagcagtctttgctttgacgagagagaagaagcaattgcattttagagaagaattatacctttgggacgccggacgacggacgacggagcgtggacgacggcgccggga

SEQ ID NO: 82958 - DNA, 252 bp, Glycine max
  Clone ID: PAT_MRT3847_45929C.1
ctgttcacaccctttttttacaggtctaagaacaaaaacgtagcagctttaaagaaggaaagcttcgaattctatatcaacaaagaaaatgatcaggtgaagatggtgccattgtaatagaataagctgatgggattgttgtcattctaagcgagagaatgcttaaaaggactgccaaacaacttgtgctccgaacaaaattgaatcatggtggttagtcgcgtggtctttaatatgaagccaaaatgattg

SEQ ID NO: 82959 - DNA, 561 bp, Glycine max
  Clone ID: PAT_MRT3847_4592C.1
tcggaagatggtgagaaaaccagctttgatcattgctgttactggtggcattcatagttgtttctgctaatgcagacaacacaaaggttcaccccccaacttctaagaatatggtgtattatcctcaaggttgtaggtgctgctggttcatatggaagccaatgatcaaatgtgggaaagtttgttgtgaagatggatgttgctcttaaacttatgcaacacaaggttgaagcagacctcctataatttctacagttctatatatgtttctcttcatccagatgcttatataatgtagtgctaaataatcatccaggaatccagaatttgattatgtgccctgcgagtagtttgaagggtaattgatgagttaatgtgatcaaagtttttatttctatatattcccgaggaatttcaattcaaaaatcatatgtagatccctccatcaactatccaaggaattttcgaagagcacaaaaaaaaaaaaaaaaaaaaaaaaaaaaaaaaaaaaaaaaaaaaaaaaaaaaaaaaaaaaaaaaaaaaaaaaaaaaaaaaaaaaaa

SEQ ID NO: 82960 - DNA, 300 bp, Glycine max
  Clone ID: PAT_MRT3847_45930C.1
ggctcgagagaaccctgatcccaccccacattctgaccgttacagactttcatgttaatcgttgggcaccgagctttctgtgctctccccacgctcatcgctacagaagtacatgacaaaacacctcgttctgccgaaaccgagacactggccgagcctaataccgaagaagccagcaaggatgccgtttagatcctgagcgctccggccccaaacaaagcatgagatcaggcttcccatgctgaggcctagattgctcatgccgataccgctcttgctcttacacacggtgcttgactg

SEQ ID NO: 82961 - DNA, 569 bp, Glycine max
  Clone ID: PAT_MRT3847_45931C.1
gaccacgaatcccctcaagcttttttcctacttactgattccaaccatatactactaaaatggcttccttccgtgtgcatctcttatcattcttcttcattgctttgtcacttttatccattagcaatgtccaagccagtagaaaacttctggcacccacaatgcccaatatgggaaattatcctcctcgcgtgatatatcctccattccccccagtaacagactggccagagtataggttgccagcacccttaattcgcacacttccacccttctcaccacctcctaaccctaccaatccttgagtagtagcattatttgctacactccacagtagattaatgtagcgtaatcaatgttgctatatatgtgcagtcaaataaaggttcatcacgaacaagctttcaattcccatcatgtttatttactttgtttgctatcctttgattgagtggatatgccatgcaatggagcatcatatatatgtttcacttttgcctttgagcaaatatgcatgtatgttgcattgaagcataatgtatttttcctctaaaaacaaaaaaaaaaaa

SEQ ID NO: 82962 - DNA, 249 bp, Glycine max
  Clone ID: PAT_MRT3847_45932C.1
aacgggttctctgggtttttggtattgatagataggggttcttttgaaggaaattcatgcccccgctttaatcttttgcttatttttgcacggaaaacctacttgtaacccccccaattgcgaaataggggggagaagacttgagcttctctttcattgaaaaggcaaggtatgggacccccctcatgcctccgggaacgctaaagagtctcccggaaaattgcattgggcggacttacaaatgcttta

SEQ ID NO: 82963 - DNA, 243 bp, Glycine max
  Clone ID: PAT_MRT3847_45933C.1
gttttctttctccttttcacgggctttctcttcttttcgtctggcttcatcatcatctctctatctgcaccccttttgagaacttcaacttgttacttagttatgcgactctcccctttctagcttctgtgttcttcttcttcggttctctcttcatggcgtgctgcttaagtgccaggatcaaatctgagagacctccacgcaatggtttgagttcagatgatggtaacatggaagaagatg

SEQ ID NO: 82964 - DNA, 233 bp, Glycine max
  Clone ID: PAT_MRT3847_45934C.1
ttattatcctgcaaagtgatattgctagtaggcctatgacttgcgtttgatgcttactctattatgtcagtgactgaactgtcccccaggtggcaattttggtgtcattttcataaatgaaaagaaattatgtgttattattgttctttgatctgttgaagttacattgcctacttgttttgattttgtgattgttgtgtgtctttgttgggggacattgtgcttaaaaaaca

SEQ ID NO: 82965 - DNA, 363 bp, Glycine max
  Clone ID: PAT_MRT3847_45935C.1
gaataaaggggatggtgacaccaccagagtcaactgagagttacccaccaggtctaccgaatgggtaatatggcaccactaagccaagagatggtaacaccaccacctcatggtcaagaaaaggagggttagtataccaccaccaagtcaagagatgataacaccaccacctcatattcaagaagaagaaaaagggtgacatacctgcttagctctaattgaaataatttatgaaaagtcatcatcacaagaacgaaattgatatattaaaggattaatatgttgccccgtttgaatagttgtcattgtaaatctctagccccccgctagctttttaatgttaatcaagtttgacgccaaaaa

SEQ ID NO: 82966 - DNA, 104 bp, Glycine max
  Clone ID: PAT_MRT3847_45936C.1
ggctcgagctcgcaggaagcatgtgcttttgaccgacttgctccagacttggcagctgcgaggtaccacgtcaatcacgatcccactcgaccggcacactgtct

SEQ ID NO: 82967 - DNA, 315 bp, Glycine max
  Clone ID: PAT_MRT3847_45937C.1
tccgtccactcgtccgctggaagcaaaggaagacgggtatatgcttcattgggacgatatgttgagccagttgtgcaagctcaaagggctgaagtgtactttgacttcttccctggggagggtgataggcaagagggagttgctcatattggtgaattgaaatctggggtctatgtaccactgtctacaaaaactaatttggggggaactcccaagggatgggaactgggtctaccttggggcaaaattcctagggggtaggcttcaactgatgtgagattggtggggtctgaacattatggggatggttgcttt

SEQ ID NO: 82968 - DNA, 345 bp, Glycine max
  Clone ID: PAT_MRT3847_45938C.1
atactattattattgaatttttaatttataacatgatcaatgcttattaaagaagcaaaagaacccccactggaaaaaaaaaaaaaaagaactttcacctccaccggcagctaaaacagctaaagttttccactgaaaggaaaaggataacatataaaagaaactatccaggagaaaagaaaacaaagttaaaaagaaaatcgccgcacaaaaaaaaaataatcaactggagaaagaaaacctattttccaaacaaaggcaaaaagcctggcgattgttctctgatctgaccaacaagggatgggaaacgcggggactcccaagcacaaggtaactaatgtggaa

SEQ ID NO: 82969 - DNA, 195 bp, Glycine max
  Clone ID: PAT_MRT3847_45939C.1
gaaagggaaattgaatatctcttagaaaaatgctcctttaacaaacagaaaagtgttgcaactggacaacagtagttgtcaacggaggattatttcccattgactttaacatatttgcagaagaaagtaaaacaaaaaagagactacgcttgttcggatgagattatttctgaggaaataatctgttaagattct

SEQ ID NO: 82970 - DNA, 396 bp, Glycine max
  Clone ID: PAT_MRT3847_4593C.1
tggccattatagtgattgtactttttgcttttaaaacaatactccccatttgtttcctttttcggcattgatttttcttttccttctttttttgaggtgggaggggtgaaagtaaagagagtatttcttttttatttagcaagaatggtaaaatgtgtcctgagctaaacatgttaagtgttccaatcaaaggctgtttgtgcatggtctgatatatttcgtctgatgaaatgttcctgtcaacgggaatttgtgtggatttggtatagttcttgtggattccttattctcttgcaataagtcgctttatattcttaataaattctttgtttcttattgaagtcgatcagtctaaacggaagatcagccaccaaattgttcaaccctgcccagcct

SEQ ID NO: 82971 - DNA, 430 bp, Glycine max
  Clone ID: PAT_MRT3847_45940C.1
ctcgctgttgttgaaggaggatcaacatgacgagattcctaaagcgaaagggtctcgacaaccacgcccactgtcaatttttcatactcaccagtctcaaggctacagataggggtcaaaaaaacactcttgtttgaaagaccattggctcgtcacacacttgtttgagcaacattaactaatggactcaccgtgtctacatccacctaaaacattaggtgtatcaccaattatcatctccttaaataaccatgctgagaatacaaaaatgcttttttttccaacccagttctacatccaatttggttgtgcaataaaacccataatagatgctctgcccacatgcgggaaataaatatgtgaacacaaacttggaacatttatggggggctgaattggtgactgtaagaagaaacacgcgcctttgcca

SEQ ID NO: 82972 - DNA, 272 bp, Glycine max
  unsure (1)..(272): unsure at all n locations
  Clone ID: PAT_MRT3847_45941C.1
tnttnttcgccttcagttacgatgnttcntgaacaagctgctgcctgcagttgcctgcatggtcttctagttntgcagctcagcattttcctanttcggttctnttacangancagcgtgangagtataagccctttctggcacgtgcntggtgangagacaancactcnnntncaagggcagtggatangacctcagttcatgaccaaacgtaacacaagcaangcngatccagttagtgnannacttngtccagcagntgcattncggnc

SEQ ID NO: 82973 - DNA, 929 bp, Glycine max
  Clone ID: PAT_MRT3847_45942C.1
taggctgccacgtcagcaaataatgcacatggtacttgatacttcgtcctcagaatttctacagaaaattgagaagatttgggagcaagatgcagatttgcatgccttaatgtctcatttaacttggaagggaggtaatttgggacactacacttgggatggtcaacttttgaggaagaaaggaaagttagtagtgggcaatgatgctgagttaaggcaacaattactggaatcggtccggattcccgggtcgacccacgcgtccgagcatcatcagcatttgttttctcattttctaaatgatatttgtgttgaacttgttgtggatccaatgccaatacataattgttgatacttaaattagtaaggctatactaagtgattcgttttattatcttggaaattatttgtatactgcagataatccatttcatttaaatgattattgattaaatcacacacaaagaaaaaagttttatcgtgttaaaatctaaatctattagaaagatggtttatatacttgccaagagttttgcacgcttttttcttggtcttttgggactatatgcagtatgctcatattaggtggtagagaaaaggtacaaagtactttatatcataattacaattattttctaaaagttagtgagaaactatagacaagttttgatactttatcattttgatttgtattctaaccttccaagctcaacaggttgagacattcacaaaagttggacaattggaaaaggccagtgatgctgaacagagtattcaagttgacggttcaaatagaggcaccggtctgagttctcctattcctcttccagcacgtcctcaaagaatttctactggaagagaattattctaccagtcagcaagatatttgtcaaagagtcatactccaacagcgggatccatcttagcac

SEQ ID NO: 82974 - DNA, 330 bp, Glycine max
  Clone ID: PAT_MRT3847_45943C.1
aagttccgggcggttcagtttgccagaactgctccttcctcaccttacagaaattagcttaagatcctggatcacgcagttagcagacgaattggacaaagttcctcgggttatctttttggcaatgcataggcccctgccgcaaaaccggcaactaacaattcccaaatccaacctgaatcgctagctgtaaataattctcctacttcaaaagcatcttctcctacttaaacaatatactctaacaaggctgctggtataaacagtcattctactgatgtccataacaccggcaactatatcactgaccgaacctgaaccaatgtccat

SEQ ID NO: 82975 - DNA, 529 bp, Glycine max
  Clone ID: PAT_MRT3847_45944C.1
ttagtgaaagagtttttcttgcatcctactaacaagttcttattcagataagacaattaacttaaatacgagacagtattgatattctaaatactgccatatataagatttgtgtagtttttattgaagatattgtgaattgtctagcatttgtctgcacttgcttaatttttgggtcacctgcttggacactaagcttcatgctcccttgacatttttttttctcattttgtttttgcaaatagtaacttgtcaaatgagaagacaaagagtagtatcaataaagaagtgattggcaggactgcatccggtgaaactcatcttcttgcagagttaaaaggaacaatgtggtctatgatgaactctgactggatgctacagataaaaaagaccagcgctgaagatcataaacgtgtatttgaactcacaggcactcggaaggtaaccttgttattcttgtctttagattcttaaatctatacctagtgtagactgtagagttcttgtgctagacatgcattcatctaag

SEQ ID NO: 82976 - DNA, 258 bp, Glycine max
  Clone ID: PAT_MRT3847_45945C.1
aagaacaaattttttaacaaagccacacacggctttttgtggtgtcttttcaaccaaaagcgggatggtatcattaacctctgtcgttattaaaaattttttcgccctggcgaatctgaaggctaaatctccactgccacccctataggaccacgtacaactcctccaaaaaaaacttttttaacaccaaaaaaatttccccccacgcgttgcgccaacgtactttttccacctaaatcacaatggtattggttttac

SEQ ID NO: 82977 - DNA, 374 bp, Glycine max
  Clone ID: PAT_MRT3847_45946C.1
agacgacagatggggattcacacaactaactaagaaagtcttctatagccattcaaaaatgaagagcaccatcttctatgctctctttctcttttgtgccttcatcacctcatacctaccttcagccatcgatgatattgtgctcgataattaatgtaaccctcttgataatggtggcacatattatatcttgtcagacatatcatcattcggtggaatattttcattctcaactggaaatgaaagatgccctctcactgtggtgcaatctcgcaatgagctcgacatatttatgtaacaatcattttgttcttatatcgaatcctgtttatcgccgagggccatcctttgagccttaagttcgattcatttgc

SEQ ID NO: 82978 - DNA, 1344 bp, Glycine max
  unsure (1)..(1344): unsure at all n locations
  Clone ID: PAT_MRT3847_45947C.1
aaaaaagagggtcccaccgaaacaatgttggagcaagcacgcaggagacacgtagacgcagagagagggagttactaaaaatgaggtttggtttggagggagttgcatcggcgacaaatactgttgttgttgttgttggagaagaatgaattctgagaacaagagactcacaagaagaagcatttagaatcgaaattggaagagaagagggtatgaatgattacaaaggaagagaaggagaaagtagcgttgttgttgttcggaagcgattcaaggaaaagcaacaaccctgtccttccacaaggcccatcatcaaccaacaacaccgtcgctctgcttccctccctaacactcaatacgaggaatctgaaacagatgtcgaagtatctgatgttagtgtttcagaaggggatgacacatcttggatctcatggttttgcaatttgagaggaaatgaattcttttgcgaagttgatgatgatttcgtgcaagatgatttcaacctctgtggattaagtagtcaagtgccttactatgattatgcacttgatttgattttggatgttgagtcatcccacggagacacgttcacggaggaccaaaatgagttaattgaatctgcagcagaaatgctttatggtctgattcatgcccgatacattttgacaagcaaaggaatggctgcaatgcttcacaagtacaaaaactacaactttggccgatgtccaagagttttctgctctggacaaccctgccttcctggttggccagtcagatgttcctaggtcaagtactgtaaagatatattgccccaggtgtgaagacatgtaccacccaaagtccaagtatcaaggaacattgatggagcttattttggagctacatttcctcacctttttctgatgacttatgggaatctgaagccacagaagcaatcacagaactatgtacctagagtttttggtttcaaagttcacaagtcctgaagctggatggagtttcaagctttcatcaaagtagaaatctgagcatgccttgcttagttgtattttctttaaaattcagtttctgaaatcagtacattctagatccacatgttctgtaaagtgtgaagatatatgcaggcaccaacagcaagagcttaatttgttttctgcttcaaattcagtgtgcctttggaaagcttctctgatagatttttaagttaagtacttgaatgcactttaaataccaagaagtggacacatgttattttcttatcaaatgaattcttgcctcttgccagttttctgatagaatttaatgattagtattgaatgcactnttcaaatatatactataaaa

SEQ ID NO: 82979 - DNA, 684 bp, Glycine max
  Clone ID: PAT_MRT3847_45948C.1
cctactcgtccgcggacgcgtgggctggtgggagggagaaaggaaggaatgaatgaaggaaagtcttatatttaataattgctaattagtaattaattaattaattaatgaaacaaacaaactaatctgtcatttctgggctcgaggaagaatgaatcctgagaacaagacactcacaagaacaagaagaagcatttagaatcgaaattggaagagaagcataaggagggtatgaatgattacaaaggaagagaaggagaaagtagtgttgttgttcggaagcgattcaaggagaagcagcaacaacaacaacaacaaccctttccttccacaagggccatcatcaaccaacaacaccgtcgctgtgcctccctccccaacaacactcaatacgaggaatctgaaacagatgtcgaagtgtctgatgttagcgtttcagaaggggatgacacatcttggatttcatggttttgcaatttgagaggaaatgaattcttttgcgaagtggatgatgatttcgtgcaagatgatttcaacctttgtggattaagtagtcaagtgccttactatgattatgcacttgatttgattttggatgttgagtcctcccacggagacacgttcacagaggaccaaaatgagttaattgaatctgcagcagaaatgctttatggtctgattcat

SEQ ID NO: 82980 - DNA, 405 bp, Glycine max
  Clone ID: PAT_MRT3847_45949C.1
ggggcccagggcaaggctattattttggtaagctcgccccatttgaaggattggcctttgatcttaaaagagggcttcatattttgggggggaaaaaaatttataaactatcattggaattgtttgctaaaaaatgtaggatttttaatggtttggaacaatagctcttggttcaaattggggggattttgacactaaaagggggggttcttttccaatacataaaaaaaaaaaggctcgcttttttaatggggctgagagactaaagaatgtttataaaaattttatttccttaacctattaagggctttatgaaaaacaaaattgtgaagactcctgggagtcgaagcgaattattttttaaatggaataagcctaacaatttaatgaacttgggggtggaac

SEQ ID NO: 82981 - DNA, 294 bp, Glycine max
  unsure (1)..(294): unsure at all n locations
  Clone ID: PAT_MRT3847_4594C.1
tgctttaatttgtcgtgaactataancaccggtaggggaaggagaatatgctgggtttgttctcatcgcgctgcagtagttttgggagcatgcccatgccaaggctcacgctaccaaaggttccctatgaaaatgaaaactggctatggtgagcgtattctgcacaatatcagtcacatagttgatgcataatggaatattatttatgacacgttgcatatatgtctaatcagtgaggccgaggttgactcttctaacgactgactttagggatctaaatacacatcatactct

SEQ ID NO: 82982 - DNA, 975 bp, Glycine max
  unsure (1)..(975): unsure at all n locations
  Clone ID: PAT_MRT3847_45950C.1
caccacctccgcccttaggtgcaaaaggtgccaatgttggagctgatccaagagggaggggacgtgggtatgcacgccctgcaggaggtggtgcaatggcaccccgacgatcctccttaaagccgttgcattggagcaaggttacgagggcattacaaggaagtttatgggaagaattacaaagacatggagaacctcaaattgcaccagagtttgatgtttcagagctagagaagcttttctctgcaaatgttccaaaacctaccgattctggcaaatctggagggcggcgcaagtctgttggagctaaaactgacagaatcaccttggttgatctaaggagggctaataatactgaaattatgctcaccaaggttaagatgccacttcccgatatgatggctgcagtactagctttggatgagtcagtattggatgttgatcaagtggaaaatctcattaagttttgtcctaccaaagaggagatggatcttttgaagggatacactggtgacaaggagattttggggaagtgtgaacagttttttctggagttgatgaaggtgccaagggtggagtcaaaattaagagtatttgcattcaagattcagtttggttctcaggtaacagaatttaagaagagtttaaacactgtgaactctgcctgtgaagaggtccggaattctgttaaactaaaggagataatgaagaaaattctttatttgggtaatacattgaatcaaggaacggcaaggggatctgcagttggattcaagttggatagtcttttaaagctcactgacactcgtgcttctaacagtaaaatgacactgatgcattatctttgcaaggtcctggctgataaatcgcccaggctccttgatttccacctagnaccttgtagcctggaagctttcactaagatacaattgaagtcattagcagaagagatgcaggcaatcatcaagggattag

SEQ ID NO: 82983 - DNA, 397 bp, Glycine max
  unsure (1)..(397): unsure at all n locations
  Clone ID: PAT_MRT3847_45951C.1
atttgattaataattacatttaagtgacaataatatagaaacttataataatttctgactggtgagttgtaacacgacctaacccattgttattgttgactagcacacaatagccacagcgaaatggggccgggccgaaaccattttccgcatcaaatttggggtattgctatttgctaatagtaatatgcacgtgggtacactttagtcatatcccaaaattgtcccttgaaaaattgtacaacataatcatatttctattgtgcaattgaggggtgtaaaaaaataacaatgaaaatacgtttccattgtacaaatcacgttttcattattaattnntttatccccttaattgtgcaacaaaaaccacgaattttgttgtataatctgtttatct

SEQ ID NO: 82984 - DNA, 379 bp, Glycine max
  Clone ID: PAT_MRT3847_45952C.1
cattttgatgcatgtaagtggacaaaaccacaaccacattcctgggaattgatcttgccaatagaggtatgcggtcctaataaagggtttgaaacgtggagttctgattgggcaaaacaaacttcatggcatttgagtatacttattgacaatcccaagacacgatacagaatttgatattctctagggaatctctcaagatttagaaattgctggtcatactcttatgccagctttttctgttccacaggctactgccagatattctgacaatgcggaaacctatgcttgatctggaatatgagtaatctttcgcttgctcggttggttaacttaataaacgaaatttggcaagatcctattgttgaaatttctctgg

SEQ ID NO: 82985 - DNA, 382 bp, Glycine max
  Clone ID: PAT_MRT3847_45953C.1
ccacgcgtccggcggcactacacacgttatctctctctctctctctctctctccctctgtccttccccaaagatgtctagcggcgatcccgagcaccgagaagaagagggaggcaccccgccgtcgcgacgacgaagacaccggagcacacgtcgctcccatcggaaagctcgaggagggtggtgtcaccacccgcgaagaggacgaaaaagcatcctaaatcttaaatcgaagctttaccgggtcgcacaggatgggaacccgtggaaagagcgaggcgcgggcacccggaaaatcctgaagcataaggcttccggcaaaggtagggttcttatgagggcatcccagacgctcaagaactgcggcaatcaattcattttgc

SEQ ID NO: 82986 - DNA, 431 bp, Glycine max
  Clone ID: PAT_MRT3847_45954C.1
tgaaaatcttctttttccgagtcacaatgtcttaaaatatatatttgcaggggtgcttcgctttgtttaggtggtcttcatccagatatgattgttgatcaggaacagcatcttaagactgagaggagagaataccactcacacatacataattatcacaatgatatgataggatttctatctaagttgaagaagagctggcaaagctgtaaagatccagaaaaggagattgcgcaaaagatatggaggtcaaaacatgtagagaaaagaatgccctcaaaagtgattgaatctagagtctatgatcatgatgggaatgttacagggacatctgattcatgctcctgggatgcagaggagaaagcatgtagtagcgacaaccaaatttcctcactgagaaaagacaatatacttcaaagaagggtgcttga

SEQ ID NO: 82987 - DNA, 246 bp, Glycine max
  unsure (1)..(246): unsure at all n locations
  Clone ID: PAT_MRT3847_45955C.1
aggttttgatgatngtgggtatggccaagttcctccgcctgcagcccaatgcttatggcggtgctggtggaaactacccacctgcgtacggttcttatggtggaaattcaaattatgaaacggatgtggttcctccgcctgcaagctatacaggtggacctgcatctggncctccatcatatgggagtaatgccgtaaccagcggcaacaatgtagctgatgcacgatatggtggtaggtcgggcc

SEQ ID NO: 82988 - DNA, 400 bp, Glycine max
  Clone ID: PAT_MRT3847_45956C.1
aaaaccaaaaaaaggccattaaccggggaggggttgggcccccctaattgcacaaaggcccctttggcaggggcccctaaaaaaaaaaattgggaaaaaaattcccaaggggggggggggggaccccaactaaagcgggcccttttttaaaaccttggcccttaaaaaaggaaagggggagctttgcccgtccccacggggctaaaaaaaaccttggcctgggggaccccaaggaaggccaaaaacctttttgggcctttccccggaaggggttccccccccccaacctgggggcaacagcgggtggaagggccaaaaaaaggggacccccccccccccctggcccgggtccaattgccaggggaccggaggggttacttggctccccctcccccggaac

SEQ ID NO: 82989 - DNA, 109 bp, Glycine max
  unsure (1)..(109): unsure at all n locations
  Clone ID: PAT_MRT3847_45957C.1
tagccctacgtaggcgaggcgttggacatagtcaacgaaacttcagnacacccaacaaggtacaaagaatcagcccgcgccttgccaagtgccaacccctctgatgaag

SEQ ID NO: 82990 - DNA, 135 bp, Glycine max
  Clone ID: PAT_MRT3847_45958C.1
cggggtaaaggaaaaccatcaataccaagaataatgcagtcttccacagaaccagcggccactgcgagaggatccacgagtgaatctcgcgttcacgctacgtcaaacgtcttcgcgggtgtcacctaaacccac

SEQ ID NO: 82991 - DNA, 288 bp, Glycine max
  Clone ID: PAT_MRT3847_45959C.1
gaaaaggatttttttgaaaaacccaaatagattgatgccggatgggtacaaagaatagatcctgaatacaatgacgttcaggctctgttggtatacaaattctgttaaattgtctcttgatgatgtagaaactgctaacggttccatgttggatctcaaaatttttcaatctaaaattgcacttcataagaacacagatggtggaaccattctgcgtagtgatctataggcatattgtttgacagatggaactttatgagcaagtgtcgatatgctgcgcactcatcg

SEQ ID NO: 82992 - DNA, 241 bp, Glycine max
  Clone ID: PAT_MRT3847_4595C.1
ttctacgcgttcgggaacacatgcgtccaggtggtgatctacgcgtactcgcacgcatacgtgcgcgggggggtatgactgcgactgtctattctgccttttatgatgacctgaagtgagcagtgacgcaactcggtgacttataatcatgtattgcctacactctaattcttatacaggtgtgggcatattctcgagaacatccttgatagactatcacacacttaaggaggatcataat

SEQ ID NO: 82993 - DNA, 774 bp, Glycine max
  Clone ID: PAT_MRT3847_45960C.1
aatttccaagcctttatctctgaactcttccaagtcccttagtatacccctcaaggaaaaatggctggtatgcacttcagtatcctttctctactgctacttctggtggccttctcttacacagaagccagtgcagatgttccaaaaacaacagacaagaaaatagaggtggtggtggaagccacggtctactgtcagagctgtgaccactttggaacgtggtctttgattggagccaagcccattccttcagccaaagtgagtgttacctgcaaaagccacaatggtcatgtgagctactataaggtctttgagacagacaagaatggttacctttatgcaccacttgaagggttcaaaatgcagcattatatacttgaccaccccctccactcttgctacgtgaagcctgtttggtctcctcttgaaagttgcagcctcctctccaatgtcaattatggtctgaatggggctccacttcgttatgagaacaagaaattgcatggaagcaagtatgaggctgtcatatatgctgctggacccttagctttccgtccttctgaatgctcacagactcaccactaatgtctcaagcaattacctttgaccatgcattgagatttatttgatcatgattttattgttgcctattgtttgtgtctacatagtattcaatctgaagatgtttccttttgttattctttttggtgtattccattttggtctttttctgtattaagctaaattgcaatgttattgtggttatttaatctc

SEQ ID NO: 82994 - DNA, 211 bp, Glycine max
  Clone ID: PAT_MRT3847_45961C.1
ctgcaaagtataccctttctaaggagacatgattttattttacttctgtttagctcgtgaattgttcttgctagatgttggcctaacttaaaacaactgctttattgtttttgggtactgtcatatagtgtttggtcaaattaattgcatgtcattattattcaaaaaaaaaaaaaaaaaataaaaaaagaaaaaaaaaagcggttctttt

SEQ ID NO: 82995 - DNA, 199 bp, Glycine max
  Clone ID: PAT_MRT3847_45962C.1
tacactaccacttccattctattctttatttcacaactctatcaataatatatgagtcatgttacaacatcccatataacttaccaaataatatccaccctacacactaattagaaacattaatattatggcaacctaatatttttatccataatacctctactatacacgacagacaaaaaaaactcttgactattaa

SEQ ID NO: 82996 - DNA, 287 bp, Glycine max
  unsure (1)..(287): unsure at all n locations
  Clone ID: PAT_MRT3847_45963C.1
ctcggtgttcggctcgtggttggtnttgttcgtgtggttgctnccgccgctgcggcgtcgtttcttcttgtgcctttgccngncgctggnnncgggnnncccgtgctgctgggtggtggtggtggtggagtttgcggttctgtggccctcgggggcctcgtgcggtggcttggtttgtgcggtggcttgccggtcagggctgtcgctcttgcccctccgtggtccgtggngctggttgcgagtggtttgtcgtcgtcgtcctcgtcggtttcgcgcgccccgggggc

SEQ ID NO: 82997 - DNA, 405 bp, Glycine max
  Clone ID: PAT_MRT3847_45964C.1
caaaactttactaaacgcgctactactagctcactacccttttttcttccttttatattttatatacaaattaagaaaatacatttcgcgcgccatcggcacaattctattatccccactactctactattaatttttataacaacacacacactatattttattattttctaatcttaaacaaacaacagcacaccaactaacttacacctcaactcatcaatacccaaaccactatcatcaaataaactacacaaaatcaacttcatcaaatttctctcctcttttaaaacaaaaaatttttaccctatccttactataaaaacccattctaccactactatttacaaaactcttaatccttttcacccacacaaattatttaactcctttccaaatatttat

SEQ ID NO: 82998 - DNA, 298 bp, Glycine max
  unsure (1)..(298): unsure at all n locations
  Clone ID: PAT_MRT3847_45965C.1
atcaactnaaaaacagnttttgnacgcncgaatctattgnccaatgaagctttgaatcagactggnatatgggntnaaggngagttantgcgaacanaancnaaantagaaatagcacagggccagttgaagagtgccattgnnacatatactcagcttcttgctantctcntncgttcagaganaaacttnnggttnagancagaagctgtataaggacnacatagatcatgctaggngcatggaagttgagatatggtctgatctgctcnngtgtacatgagtctgtcacggtngc

SEQ ID NO: 82999 - DNA, 349 bp, Glycine max
  Clone ID: PAT_MRT3847_45966C.1
gccaaaagcgacagaaaaaaataaaaagcaaattagaccatggaggtggcggtcggtggaacaatatggcgacaaccaaggaggatttcatgaggcaccaaaagcaaaaccaaatcacaatggatggagggaaaagaggcgaggggcaaagagaggtggccgaaggggatggggtggaggcactccatagtggtgttggaaaatgagaggataaaggaggaagacagagcccgagaaagggaggaacaaaggggggcacaggaggacgcaagggctgctgagagggaagcactagtcacaggcttgctaaacaggctcggagagacacgaaatgaaaaggagcaggact

SEQ ID NO: 83000 - DNA, 417 bp, Glycine max
  Clone ID: PAT_MRT3847_45967C.1
gggggaaaaaaaaatcccaaaagggggtttttggccccaactaaaaaacttttggaattaaaaaaaaaccccccaggggcccctaaaaggcgtttttgccccctccccccaccccagaggggccccagggtaaaaacccccccctccctggggcctagaaaaaattcccgggaaaggggcccaactaaagtttttttttaaaaaaaaattaattgcaaagggggaacaaaggggggaaaaaacaaatcccccccccgggaattttcccggtttaagattcccccggaaaattttcccaaatggggggaaaaaaacccaaacaaaaaggttttttttttttttcctttgaaggggttggtttttccccaacctgtttattcctccctccaaaaccaaatttgttaaccccttttttgg

SEQ ID NO: 83001 - DNA, 2342 bp, Glycine max
  Clone ID: PAT_MRT3847_45968C.1
atttaaccgatcttaacttctaaattctaaattctaaaataagttaaccacgtcagaagtgctaaatctcctcttccatagatctcttaaaactaccaaccctagtttgcattcttttctatttaaattgcctattttagttctcttccattcatttctagcttccaatttcatagaaaggtcaaattttaaggaaaataatctttctaccccttggttcctggtcaaagttctggttcttgcccgtttgtacaacgtgcaggtcagagcacccttcagatacttctctaatgttgccattagcaaaagtgaagagtcccttgaattcaaacaagaatggttacaaatgaaggatatgtatcacaatcttagccaaaatcttgaagaggtgacaagcaaaacaattccattccaacttgatggagaatatgcagttttctcaaatacagagcaaagaaatcatccaaccataattaaggttatatttgagaacatggatggcctttctgatcagttgcctcacctaatatacatatcaagagagaagaggccacagtatccacataattacaaagccggagctatgaatgtgttgaccagggtgtctgggttgatgactaatgctccctttatgttgaacgtagactgtgacatgtttgtgaacaatcccaagattgtcctacacgctatgtgcattttgatggattccaagagtgggattgcctaattttgttcattccaacaattctacagttccacattttagagaaagtcagccttttaagaaacaaagctttggacccatcaatcctgttacagttcgaggcaggatttgcaggactctcaaatacagaaccaacaaatcatccaagcatcagttaggatggaataaaagatgaccctttcggaaatcagtgggtggctgtatttgagtacataatgcggggcatggcgggacttcaagggcttttctattgaggaacaaacaccttccatagaagaaaagctatttatggaatttatcctgagaaaagttaatgcaggagaaatggaaaattagaagaaaagatattgatacaacaatttggaagtttagaggagtttgtcaaatcagcagctcatgctatggaagggagtgcatattctgcaaatgatattactccttccagctttattgaggcagcaatccaagtcgctgattgtggatatgaagatggcacttggtggggtaaacagatggggtggttgtatggatcactcacagaagatgtgctaactgggttgagtatgaaaagaagaggttggagatcagagtgttgtacaccagatccaattgccttcacaggatgcgctcccggaggattactctctacaatgttacaacaaaagagatggttcactggccacactgtaatcttttttggaaagcattctcctcttatgtgcatgctctttggtaaaatccagttcagagcaggcttgtcttatttctgggtttccactttgagcttaagaggtgtgttcctagtttgctacattgctctacttgcgtattgcatgattaccaacaccaatatctttcccaagggacttggcctttggattccaattaccctttttgtgatttataacgtatatactctattagagtacgttaaaattggattgtcaatgcgacaatggtggaacaatcagagaatgtgcatagttagaacaacgactgcatcgtttcttggatttttgaatggcatggttcagctatcagggttatcggacattgcttttgacataacggagaaggaatacccaacttctagtgctgatgaaaacagtacagatgctggaaggttcacattcaacgaatctccagtttttgttataggcacgaccattttgctggtttatttgacagcaatattgatcaagttttgggggttgcaaccaactcatagtgggaatgggagtggactaggggagttcatctgtagtacgtatgtggtagtgtgcttctggccatatttgaaagggctgtttcccagaggcaattacgggattcccctatccatcatgtgcaaatccgctgtctttgcttttgtctttgttcacttttgcagaagtaatggtctcagttgatgacttgacttttgcagaagaataggataaaagcagtaaacagtgctttttatattttgtattattttaatgagttgttaggaaattatgcctctatgaagcgtgcactttcataatggaagactctaggcctcaccatgattgacacgaggtttctttaaataagcacaaaaagtattgaaatggtataaaaataggtttttttactc

SEQ ID NO: 83002 - DNA, 336 bp, Glycine max
  Clone ID: PAT_MRT3847_45969C.1
ctacaaactataacacaaagtcccttcattcatcgattccacataatcaaagcttctagtaccatcaacactggcaccactaaagcactcacaactatccttcactccaccactcctcactcttctcattcagatctacccaacacacacacactaattaattacataaaaatgcaactacaactcactctctccactctctacctatcccttctgttaacaataacgttaacatctccaacctttgcagcacaaatcaagcctaaagatctggtccaatcctcaagcgttcacgcacggtacccgcgtctagtcctgcgcaccctctttaactac

SEQ ID NO: 83003 - DNA, 505 bp, Glycine max
  unsure (1)..(505): unsure at all n locations
  Clone ID: PAT_MRT3847_4596C.1
aaaaaaaaaccccctgggaaatccacttttttaagacatatagtttatgcaaatacagggaacttttaaaaaccgacaaacatgggttttttcagggggggggggggaccaaaacacactggttttctcacagcactgggaagggggaataatccaggtctcagctggggcagagcagggacccatattatcatttttttttcatacagggggcctcaccgccaaatccaagggattaatattatttaaaccacaaacaattaatccacttggaaaagggggcaaaggaaaaaaacgatttttgggatgatgagtggcatgcaattaagttaaagggtggaagagggctctgacaatttaaaggccccccttcctttttccggtccacactttttataatccaaagggaagggcccaaaatgggtgggtcacttgaatctcaagggggccaggggatttgggaatattcaaggtttcaccaggggttagtttcgncaccttatac

SEQ ID NO: 83004 - DNA, 435 bp, Glycine max
  Clone ID: PAT_MRT3847_45970C.1
catgcatctaacatttatactgctcgtgagcctaaggggaatgactcatctcaagatgacataatctggtgtcctcgtggtgtagctagtgctcaatctgctcaagaaacatgtagcagaggctaccacctgtacatacacttgagctaaagaggcatcaagctgcagcgcaacccagtccaatggacgtcatcaacatccactgacttaggcactactgactcgcacacataaagttacagcaaagatctcccttgtgagcctacctatatctgatggcgctgcagcacatagtgattctgaaggtgcacctgctcgcaacactcagcgagcctgtaataagacagctcgaaactattcttgtcgatcacgaaacttatgcaaaacatcagtaagacagtctgaacgatgggatagatctactagagcgactgt

SEQ ID NO: 83005 - DNA, 950 bp, Glycine max
  Clone ID: PAT_MRT3847_45971C.1
attatagcaattcacacaacacaacactggcaaataatcttctactattcttctttttctttcttctttatctcgattgtttttagtcactatgcagattaatggggaggttgtttgtggtgaatctggaagggaagatctatagctgcaaacactgccatacccatcttgcgctttacgatgacatctactccaggacattccattgcagacatgggaaagcttatctcttcaataaggttgtgaatgtttctattggcgaaatggaggacagaccgatgatgactgggttacataccgtggctgacattttctgtgtgggttgtggatcaatcgtgggttggaaatatgagactgcctatgaaaaaaaccagaagtacaaggaaggaaaatcagtgcttgaacggtacaaagtgtcaggtcctgatggaagcaattattggatcagcaatgaggcacatgttggtggaagtgatgcagatgatgcttagtcatcctaccattcccaattaaccgtatttggatgaagaaagcctttcaagtgccctgtctctgactctctctcactctcttaaatggaatgtattgaaataaaagactgctgaaaaaaatgtattataaccaaaactttgttggttgaatttactctagtttcttcaaatggattttcatcaattctgttgtcaaatacaatattgcttgaatgtatactgacataaccggattgatatccacaaattggcatacgtgtagtagtgcatgagtggttgagtaaaaaaaactatcaggaccaaacttatttgtacattctttaatcccccttcttttgttgttcaaaacatctgcgttttgcccaaaagacaatttaaaaacattttattgttaattctgatgtaaaaaaactaatgttaaaacttctaatcaatgctgtccacctagttgtattattg

SEQ ID NO: 83006 - DNA, 364 bp, Glycine max
  Clone ID: PAT_MRT3847_45972C.1
ccaccaataaaaaaagccagccaaacaaatttaaaacattttcgggggccctcccccaggcgggataaaacgacggggagaaaacccggaattgcctcccttaaaaagggttttggggatggggcatacctcaaaccctttaaaaaaacacccatgggttttggcaaacgggaaaggaaggtctggggggggcttttttcggttcccggggaaaaacctttcagagggaaaaaaaaaatagcattgggaaaggggcccctacttagttaaccggattaacacaaatcccagccgggcactggggcagaacacctttcctggccattttggggttttttggaaggggaatcttcggttcccccag

SEQ ID NO: 83007 - DNA, 504 bp, Glycine max
  Clone ID: PAT_MRT3847_45973C.1
ggctcgaggtttattttctccatctacctaatgtgaaaacttgttctttaattaagaaaaataagttaaaattaaatgtcattgtgcatttgttgtgatgttctataatcaaaccatctacccttggattctttaactattatcattaagattactattatttttttatttttgatatcagttatttgtgtaagatggaaagatggattacaaagaaattgagggataggatattttccttgcacaaagcagcataaatgaaaattttcaaacacattaacatggattctttaactagtgcaccaatttaggataggattaccctggctttgtgaacttggtctattttaatatctgctgatttaccattttcttctccatcatgcaaaagtaaaacatccatagcttcattgcatttttatttggcactgttttctatcttcttatgacacaatccaatccataattatgttatagacgggtgtcttctatgacaagccacga

SEQ ID NO: 83008 - DNA, 263 bp, Glycine max
  Clone ID: PAT_MRT3847_45974C.1
ggtctgtagaggatgatctggattcgtctggtttgccggggaatcttctatgggaagtgttgaggaggctgccgccggcggggctgttaacggcggcgatggtgagcagaggttggagggagatgacaaggagtttgtggaaaaccgccgaagaattaaagattaagggtcccgcgtgggctcaagggggttttgggtcgtcaattttgcaaaaatgtcccgggatcgggacactctctctttaaatggaaaaggatggggat

SEQ ID NO: 83009 - DNA, 554 bp, Glycine max
  Clone ID: PAT_MRT3847_45975C.1
ttcccgccgtccgcttcgcgtccggttggtgggaccatcatctttgtggggttgccttggagaagaaggttaaattcggaaaattcaacttttccattccaatcccattggtggaaatgggttccttggtccttaatcttttcccttttttggttcattatttccaatattaatctttcggttccatttttctttttttccattctaaaattcgttttccttttttccgctttcgcagacccgattcattctgttgcagaacaggcagggcaggaccctgttggccaaatcctacgttctctctggaggctctccgaggcacacagggtcgaatacgaggttcatcgtctggtggtacacagagactctatacacacaaatttcggagagttgcgcgcgcacaagataatatacaggcgatatgctgggatatttctctcactctgtggagatctcactgataatgagtgggcgtattgagagcgcacttcatgtgtttgggaaatattggatcacttcttcagcaatgtctgtgagctcgatttgtttttaac

SEQ ID NO: 83010 - DNA, 220 bp, Glycine max
  unsure (1)..(220): unsure at all n locations
  Clone ID: PAT_MRT3847_45976C.1
gttttttgnagaagnatgggaaantgtaggaggggaagtttgtatggnggagaagtanggtgaaaggaagntanagnnagagggtaagaatnnangagtngttaaagagaaaggtgagagagagtattttgaatangatgatnntaaaaaggtatttngaggagaggnttgtgatgattttggaggaattttttgtgagaangagtattagaagggggtt

SEQ ID NO: 83011 - DNA, 218 bp, Glycine max
  unsure (1)..(218): unsure at all n locations
  Clone ID: PAT_MRT3847_45977C.1
ggactcctgggaatgaagatgttcgtattaaaattacacactgtggtgtttgcgttcgcttgatgtagctttggacaacggaataacacatcggtgtacttcaaagtatttcctgttgtgctctggtcancgagattgactgggattgtgacaacaggttggcatccaatgtccacgcgttttaaggtactgcttcacgataccaaaatcctatgcat

SEQ ID NO: 83012 - DNA, 453 bp, Glycine max
  Clone ID: PAT_MRT3847_45978C.1
gggggagcttatgcagtaagtgtgaccactgaccactatgatctcttttgagtttatagatctattttgataaatgtcagtttccttctcaatgtaacaaactcaacacaaaaccagggattaggcttgcatgggaaactaagctgatttaatatggtatttgtgggggagcttgtgcagtaagtgtgaccactgaccattatgatctcttctgagttcataggtctattttgataaatgtgtcagtttccttctgaatgtaacaaactcaacacaaaaccagggattaggtttgcttgggtaaaatcttaatgttcttttatttgctcttacatattcttttcatccttctgtgttagcagagtaggaataaggtgaactaacagcgagtgtatacatttccttgtttatttcatcaaaattttggttggaaaatggattggggaagatgtg

SEQ ID NO: 83013 - DNA, 250 bp, Glycine max
  unsure (1)..(250): unsure at all n locations
  Clone ID: PAT_MRT3847_45979C.1
natggttacatgctntgtanacancttnannactagcnactaagcgcctaccgccctgccgtcctttttttattttctcatacattcctttttttctttttcaaaaacccacccactgaagttcctggggtaaagagaatacattttacattgacgaaaaccttacactacaggtatcaaacctgaattcacaaactgctaaacgttcactcaaaagttaaatttaccgagggaggaaaaatgggtaaaa

SEQ ID NO: 83014 - DNA, 550 bp, Glycine max
  Clone ID: PAT_MRT3847_4597C.1
gacccatcgcgtccgtgcacaacatgattgagtcggattagagggaggagcgagaagaagctaatgcaaccgggacacacacagagagagaacagaacgatgaatatgaataacacagagagatagagagtgtgtgataggtgatgactgatggacagatagaaggagagagagatagtttttatgagtgcaatgtacacgatttgtttggtgttgtgtctggatccggctattatctggagtagctgcctctaacgctactcgtgggttgcgtcttttgcgtgacttgaaccctagattgtgggaacagcttctgtacttgatgcttttctgtctcagaggtccaattcaatccgcgaaagatttcgataaggtttggccgatttttgatttcgcgcagtcgcttgattttcgtatggatgtgcaggggattattagtgagcttgaatctaaggcgcgcttcctaggagcaattcgagggtttcttcacttgctacatgctgtggacctaagttggtggtgtttttgtgtgatggatcgtgcctgtttt

SEQ ID NO: 83015 - DNA, 213 bp, Glycine max
  Clone ID: PAT_MRT3847_45980C.1
gatttccatgaaaacattaatattgttgcactctccatataagaaggacattctagataatcagctattctttgtgtttagcattaataacatgtaactttcataatgttcacatacttattcacttgtttgtttcaagcatttatgtttcaagtgaaaataattaattcttaaattgaatgttattaactcttgtttagcgttattaaaaaa

SEQ ID NO: 83016 - DNA, 1373 bp, Glycine max
  Clone ID: PAT_MRT3847_45981C.1
tgtggctcttggttttctcagaccaaactgggggagacgtttgtacttaatctgggctcagtttcacaaaactgacaccataattcgtttactttagtaactgaaaaattaagagccaattcagtattctccctccacagatacaaccattttttttcctccaaacactgtctcagaaacagacttgttaaccattggtagttacattctgtttctacacccttttttataagccatcatcacccttccactggctttcatcaacaaattttcttcaatcaaagtaccaccactacttggtttccccaacccagtctccatctcagaagtacgtgcagaatggagaatgtgagaataggccagtggttaagtcttctgatatgtgtactactattactgcagtcagaaggggttcctgtgggaatcacttttgttgaaaatgcagtggcaaaaggggctgtttgtttggatgggagtcctccagcttaccacttccacaagggatctggagcagggattaacaactggatagttcactttgagggacactcgattaggttcatctaagaaaatggatacatcactttccttttctgggtttttcagtaacagtaaaaagttcaatccagatttctatgattggaacagaatcaaggttaggtattgtgatgggtcatcatttactggtgatgttgaagctgttgatccgaaaaccaatttgcacttcagaggagcaagggtttttgctgtggtcgttgaggatttattagcaaaaggaatgaaaaatgctcaaaatgcaattatctccggatgttcagctggaggattggcttctattctaaattgcgatcgattcaaatcactactacctgcaacaactaaagtgaaatgccttgcagatgctggtttttttatcaatgtaaaggatgtctctggagcacagcgcattgaagagttctacagtcaagttgttcaaacacatggctcagcaaatcatttgcctacatcctgctactaatactcttagacaagggctgtgcttttttccctagaaatgtcgtgtcccaaatcagtaccccaatcttctttgtaaatgcagcctatgactcatggcaagtcaaattattctctttctcaagaaacattctatttttggaatggtgttcatttggaattttggtcctacttaaaactgataatatgtttatattcattgatcaattgattggcttgtttattaggttaatcaacgttagttatatatgaggatttatacatatcaacataatatataatagactttagattttaacttttaaattcccaattaaaaatactatgattgcttaaattatctcaatattgaaaaattc

SEQ ID NO: 83017 - DNA, 1231 bp, Glycine max
  unsure (1)..(1231): unsure at all n locations
  Clone ID: PAT_MRT3847_45982C.1
cggacgcgtgggcggacgcgtgggtgagcataggttggttgcgagcgaaacacagaaaatgatacccagatgctctgtttcaccccctcagattcgcccatttcagtttcagaacttgaacggtctccgacaactcgccgaaacgcggcgtttcaaggtatggttgctggaccagttcggagtcctccacgatggaaaacaaccttaccccggtgccatttcaaccttagaaaatatagctaagacgggtgctaagatggtgatcataagcaactcatcgagacgttcatcggtgactattgagaaagtcaagggtcttggatttgatgcctctctttttctgggtgccatcactagtggagaactaactcaccagtacttgcaaaggagagatgatccttggtttgcagctttgggaaggtcttgcattcatttcacctggaatggccggggagcaatacctctcgagggcttagacttgcgagtcgttgagaatgttgaagaagctgaatttgttttggctcatggtactgaagnccttgggaatgccgatggcagttcatgttcaatgaaacttgaagacatggagaggatattggagctttgtgctgccaaaggaattcctatggtggtagccaatccagattatgtaactgttgaagctagagacttgcgtgtgatgcctggtacactggcagctaaatatgaaaagcttgggggtgaagtaaaatggatgggcaaacctgatgagataatctacaagtcagccatggccatggctggcacagatgtttctgactgtattgctgtgggtgattcattccatcatgatattaaaggtgctaatgctgctggaatcgaatctgttttcatcactggcgggattcatgctactgaacttggactccatggttttggagaagttgcagattcatcttctgtgcaatcacttgccaccaaatatgaagcttatccttcttatgtgttgcgtgcattcacatggtagatcttcatctcaaggaatctgaaccactacagttataattgtaatccttttggttttgtatgatttattggccattgatacaaattacatactatgtgttgataatttggtaactaaaactagcaagataaaacaaaaaaaagatgagagtatagtgcatgcatagtgaagttttactgaaaaaaaaaaaaaaaaaactcgagactagttctttgtagctgttac

SEQ ID NO: 83018 - DNA, 404 bp, Glycine max
  Clone ID: PAT_MRT3847_45983C.1
ggctcgaggtacaagaactagggtttgagccttgtcatcacttgacgacaatgatcgacgacgttgactatcctgacttccgagccttgctgagccagtcgggaggctcctatgatgagaggatatcggacgagcagtagccaaccgagcagaaacccagtgcaagggagaacaaagccataacgaccgagtgatagcaggtgagctgaatgacgtcgctgaatgaaaatgggtggtaggtatcgtgtctggtgctaaagtaaaagcttcacgggtgcgagctgaagcatctgcacgtgatgttggacttcgatattggaatggtgcgaatatggatatcgatataacggagactgataatggagacatgatgagacttgttgcccgcatgacacatgcaatga

SEQ ID NO: 83019 - DNA, 388 bp, Glycine max
  Clone ID: PAT_MRT3847_45984C.1
gtggcttctttggtgttactaatacttcttctgaacaattgtgtagtgctttttccctcaaaatgtcgtgtcccaaatcagtaccccaatcttctttgtaaatgcagcctatgactcatggcaggtcagattattctctttctcaagaaacattctatttttggaatggtgttcatttggaattttggtcctacttaaaactgataatatgtttatattcattgatcaattgattggcttgtttataaggttaagcaacgttggttatatatgaggatttatacagaacaacataatatataatagactttagattttaactttgaattcccagtgaaaaatactatgattgcttaattatctcaatattgaaaattctgcttacata

SEQ ID NO: 83020 - DNA, 1069 bp, Glycine max
  Clone ID: PAT_MRT3847_45985C.1
attctttccctctcgcaataaagattcactggtgttacgcgttaacatccactctattaagcaaatgtgctcctagtagtacaataaaaatataaaataaaataaaaataacaaatatttatataagattgtgttcttgcaagttccaagttccaagttcatgcacaaccgatcttttcctctgagaagacgtgtcggtagctgaagcattttataagcctccactttcctgaactagttttaacatacaatctttcaagtacacctccccagcttccatttaagaatggagatcactagaataggccaatggttaagtcttctgatatgtgtactactattactgcagacagaaggggttcctgtgggaatcacttttgttgaaaatgcagtggcaaaaggggctgtttgtttggatgggagtcctccagcttaccacttccacaagggatctggagcagggattaacaactggatagttcactttgagggaggaggatggtgcaacaacgttactacttgcctttcccgtagggacactcgattaggttcatctaagaaaatggatacatcactttccttttctgggtttttcagtaacagtaaaaagttcaatccagatttctatgattggaacagaatcaaggttaggtattgtgatgggtcatcatttactggtgatgttgaagctgttgatccgaaaaccaatttgcacttcagaggagcaagggtttttgctgtggtcgttgaggatttattagcaaaaggaatgaaaaatgctcaaaatgcaattatctccggatgttcagctggaggattggcttctattctaaattgcgatcgattcaaatcactactacctgcaacaactaaagtgaaatgccttgcagatgctggtttttttatcaatgtaaaggatgtctctggagcacagcgcattgaagagttctacagtcaagttgttcaaacacatggctcagcaaagaatttgcctacatcctgcacttcaagactcagaccagggctggtaagtttgggaatttacgtcttctacctttgtggcttcttt

SEQ ID NO: 83021 - DNA, 645 bp, Glycine max
  Clone ID: PAT_MRT3847_45986C.1
actttctctcactagcttgccatagcttcttacttttaatctgtttctccagctagaggtgggcatatccaaggacgattgtcctttggattgtcatcatcttctatgtggactacaccttgtacccgtctgtccctcgtatggacaagcgcgaacgaacaaactcccgctctgtctcatccctaaacgcagctgccaaaaatcggaagcattcacccacccagttgatctcttgaagaccgacggaaacacccttggcgatgtatagagatcgaagccatggcaccaccgaacaaggagtagcgatggtctcgagcacggaatgcataccttaggactccagcagccgtgagcatcacttacgtaaccttcactgccccaacacacggagaaagactgcatatactaatttagacaggatcgtctctgtgaagtcataggatatacgtgagatcctggactgcatcaagtagatcgtgtgtttcaagactattgaaccgaagcttgcatattcgacccgactcgatgatttgctcgtcctcctatatgcgtctctcgacgacttgcatatcgatccttgcacggtgccgacgtggatcttcgagggacgctatatctggatgactgcgtacacaatattgccgc

SEQ ID NO: 83022 - DNA, 284 bp, Glycine max
  Clone ID: PAT_MRT3847_45987C.1
atgtttttggcgggtacaccctgtggttcttcttctgcacgtactcactatcatcatcctagaccgctgcatcataacagaaacgtcctcgataggtgctcggtgggcatcagcgtgcaggagaatcacgagatcggcaccaagctgcagtgttcggtgtctttccctccgatcatggctgcgaagatggtggttctggttaggcacaggcagatcacgttgaatgccttagggatgatctagagaatctccacattctctgttctcatcataaatggccagtc

SEQ ID NO: 83023 - DNA, 1885 bp, Glycine max
  Clone ID: PAT_MRT3847_45988C.1
agtggtgtgcaatggcatggaaggcttttacatcccaaagcttcatctggtcatgtgcaagtgtggctcttgtggttcaagaaagcagacacttagtgaatgggaaaaacatacaggttgcagatcgaaaaaatggaaacatagtgtgaaagtgaaaagtacaatgctaccactggaaaaatggatggaagaaaacattccacttgatggaatacctgagcaggtagatcaacagcaggtgctggcctttttgcaagagaagtatgagcctgttaatgtgaaatggacaacagaaagatgtgctgtttgcagatgggttgaagattgggaagataacaaaattattatttgtaacagatgccaaatagcagtccaccaagaatgctatggggcaaagaatgttcaggattttacttcttgggtttgtagagtatgtgaaactcctgatgttgagagagagtgttgcctctgcccagtaaaaggtggtgctctaaagccaacggatgttgaaatgttgtgggttcatgtaacatgtgcttggtttcgacctcaagttgttttccaaaaccatgaggccatggaacctgccatgggaatccttaaaattcctcctaattcctttgtgaagacttgtgtgatctgtaaacagagccatggttcctgcataagttgttgcaagtgttctacttattttcatgtgatgtgtgcatcaagggcaggatatacaatggagttacattccatggagaagaatgggactcaagtaacaaggaagctaatatattgtgcaattcacagggttccaaatccagattctgtactggtggtacacacacccctggggattttctctcccagaacttcacttcaaaatcagaagggatgcttcaggggatcaaggctaattttatcaaagaatatagagcttaatgaatcttcaaccactgaaaatgacttagtagagccgctgtctgcggccaggtgtcgtgtgtaccgaaggtctcctaataagagagctgatgtgccaataattcacttgctggggggacccagccttcattctttaggtgcaataactcagttgaacatttttaaggatgctgatgaatctaaagtattcacttctttcaaggaacgtcttcaccatttatgggaaacggaaaaatttagagtttgctttggaaaatcgggcattcatggatggggtctctttgctcgtagagatatacaagaaggagagatggttgttgagtatcgtggtgtgcacgtaaggcgtagtgttgctgacctgagggaagaaaaataccgttcagaaggcaaggattgctatctgttcaagatcagtgaggaagtggtagttgatgcaacgaacagaggcaatatagcacgtttaataaaccattcttgcatgccaaactgctatgcaaggattatgagtctgggtgatcaggggagccgaattgttcttattgccaagaccaatgtttctgctggtgaagaactaacgtatgattacttgtttgatccagatgagcgggatgaattgaaagttccttgcctttgcaaagcccctaattgtaggagatttatgaattaggcttaggcattttttttctctctttttgagcaattgcagttgccaaacccgtgaacatttgtcaattgagccatttttaaaatttttttaaaatagtttagtataatttgtatagcattatattattataaaataaaatagaaaacttctgagcaaatgagctggaggcatttttgtaacttgcacggatgttcttcacattatgacatttagaggcaatttacttgaagacaaaaggtgtatagaggagcacacatgttacataatacattttaggcttttcatgtg

SEQ ID NO: 83024 - DNA, 318 bp, Glycine max
  Clone ID: PAT_MRT3847_45989C.1
ctagtctgcggacgaccttggtttttttttttatttaacactctctcttatttattgaaacaatagatgaagaggtgactggccctcccctaaaacatatcacagggacaaacagtctgcaccaaactactactgactatatctatgagtgacaactcagaacatgccatgcttacagttgactgaaactcatatgactcagctgtattagaggactgtagctatgtgatacttttaactagtctgagtggctttcatccccagcggttaatctagtcgcaacctgcattgctgctctggcaccctactttggcaatt

SEQ ID NO: 83025 - DNA, 290 bp, Glycine max
  unsure (1)..(290): unsure at all n locations
  Clone ID: PAT_MRT3847_4598C.1
tagactnttctnatantngcgaaagacgttgancaggtnacagagtnaggtgaatactccgngaangactanncatgaccntcctcnggcnacgttgatcgacncanatgagctcacaaagtggtccttgtacagagccgccatagctgattcatagcaanactcctttntctttacatcaccgtgttgagcattattggntacaagagacagagtgccancaaaatccccggtaacnccgaatgtgcacggcgttngncttttgggcatcgttgggccttcggtggcat

SEQ ID NO: 83026 - DNA, 238 bp, Glycine max
  Clone ID: PAT_MRT3847_45990C.1
gttgattcaaatgccatacacccagatacttcatatcggtacgtgttaaattcggtgtggattgttggattgccacttgtttcgtaccgttcaagtgattgtttgaatgatccatcatgaaatggaccacagcactgatgcacaacgcacggacatgatgaacataacacggttcgtgctgaacgaccaatccaggcacccctagtcatgcgagtatttccacatcatgctcagtcac

SEQ ID NO: 83027 - DNA, 254 bp, Glycine max
  Clone ID: PAT_MRT3847_45991C.1
cgacggggggggacgcggctgtaatttacacgttgactaaaccaatctaactcatataaacacgggcggctttttattatgatccaagctatgtgacctgagttattacgtggtacagtgaatatgtatacacccgaatactttcagcagacctaccttagaatgctgcgcagcctttccatttatcatggcatgataggaaatcaagatgcaggtcgtctttctttaaacttatactatgggtgaccataggc

SEQ ID NO: 83028 - DNA, 548 bp, Glycine max
  Clone ID: PAT_MRT3847_45992C.1
cccgcgtccgagaaattggaattggtggtgcgattcgcgggtgcggtgagaaatgagatgaagagggccttccgacgaactgcttttgttctgatgagggagttgtcatggcgttgctttgggcacaaaatcgattggcgaagattcttcgttctggtggctattttgactgtatctgctttcgtgtttcagacgcggggtcatgcttatttagctctgccaaacagaccggtacattctcctcatcaatctaatagctccctacaaggggggaggcttcaaaaggttcacctcactcttactgactctgttatttcacctaatgcgtctaacaaggtgatccaatcattctcaggtcagctagagaatgcagaactagaagccccaatccaaaggaagaattccgtatctgcgagaaaaaaggacaaaaatcttgctgggacaacgaaagtcgcaacatctttatctcctccaagacatgttcctaaacaggtagaagtcgatgagactttgaacttactttttttttaagtttgatgaggagaggg

SEQ ID NO: 83029 - DNA, 216 bp, Glycine max
  unsure (1)..(216): unsure at all n locations
  Clone ID: PAT_MRT3847_45993C.1
gccaaacacataaagagaggaataaatccagcattgtctgtcttgcaacattctccactctaaccatggcttcaaagcttttactcatcactgcttcgttttgatttgttgcttttggacttgccgngctgctggcagagaagaagcaccgctagtgttggacggacaatgaaaagaatatcattctggtctaaactctgtatagcaactggcttg

SEQ ID NO: 83030 - DNA, 372 bp, Glycine max
  Clone ID: PAT_MRT3847_45994C.1
cttttaaattttagaaccctctcttctaccccgtggacgtaatcatactacatcgggggcaaataaaaacaaaaccctatgatccaacaaccgctcacatatccaccatcacaaatcaactacgcctgccttcaattccatatctctcttatcgtcacacctataaacaattcaatgtactccgatctccaacgctccgaatcccaaaactactctcttctacccatcttaatatccttctactaaattttactaattccacttaaactcttcacgaaaaaacccgaacactttaatttttccaacccacattcaatcttcattgataaacgaccaaaaccttaacaagcttcttaaacatcttaccatttc

SEQ ID NO: 83031 - DNA, 374 bp, Glycine max
  Clone ID: PAT_MRT3847_45995C.1
aagcccggaattcggctcgagaccctcgccttaaacaatttatctttttgcttttaagaacaaatcgatccaaaaaggggcagtgtgtgttaattcaaacagtcgccagaaagatcgctctaagtgatcttctgaacaggacatgccgatcgtgcacttgacaggtgctcgaatacacagatttcactgtcctacaaaataaggaaccctggctgttatgttgaacaaggattatggaaaacgtcccttgccatagagagccagaaaacagaagccaggtctcctcgttttagggttttgcacaccttgtattatatgggaaggagcgtgctgaaaaacggttgcaaatgcagtactgctctatgcacataaca

SEQ ID NO: 83032 - DNA, 1011 bp, Glycine max
  Clone ID: PAT_MRT3847_45996C.1
tacggctgcgagaagacgacagaagggagttgtaccactctaatattggtcttgcttgcatggaaagaaaaatagaaagaaaaaaaaacaagttttttcttttatttgattgaagatttgaaggggaaaaaaagaaaaaataattgacttgaaaaaacaaaattctttagctttaatttttttttttctctcccacttttcttcttctgcacaatcaatcatagtataaaagtaaaaaaaaaaatcgaacgaagtctaagaatctagcattagaaattgtgaatttttatttcagttaaaaaaatatacatagcaacatagtgggagaacttttcgatctctaccagatgcaggacgcccatattacgatcagccggggaatgagcttttcatccatagaacatgaagaacgtgaacttaatatgtcattgatggatagttaaaaaagcttgcaaaggaagaaatgaataaagggacgctgacttagttacatagatacttagatgttagagtaactaaccttgtaattaacttttaactcactaattctaactcaaactagatgattagattaagagttaaccacctaacctcaccacctttaactcgggttgaatggattactaattaatctatgctaagacttctgttctggtaccaccggccaccggccatcggaacatgtgtgaacttgattactttcccaataaaattgtcttagaaaattgtgatgaaataggtgttattataattaaactataaactacatgcttccgtatgaagtatgaaccaaaatgaacatatgcaaatttgttgcaaatgattggacggtcatggttttttcataaattttcttttcattaaataatagttttcagagaaatttactatatataatactaggttatacccatgtgatgcaatgatgagaattatgttacttagttaggttgaaaataaattatagtaactaagagtgggtcccgagcatatgtacggtttctttacgcc

SEQ ID NO: 83033 - DNA, 351 bp, Glycine max
  Clone ID: PAT_MRT3847_45997C.1
tatgtgatgatgttttgtaaaaaaaaaaaaaaacaaaaaaatcaaaaaaaaaaacagaaataaaaaaaaaaaaaaaacaaaaaaaaaaaaaaaaaaaaaaaaaaacaaaaaaaaaaaaactttaaaaaaaaaaaaaaaaaaaaaaaaaaaaaagggggccccccaaggggtccaacctttctttcccggggatgcgacttcaaaacccctccaaaggggcccccaatttcaattcccggggcgtccttttaaaacctcttgacggggaaaacccgggggtttccccatttaaccccctttgaaaaaaacccccttttcccaagggggggttatacccaaggggcccccccc

SEQ ID NO: 83034 - DNA, 271 bp, Glycine max
  Clone ID: PAT_MRT3847_45998C.1
ggggcagggggttggttggttgaaattgtttgatgtacacgtaaatacttgttcactcttgaagggagaagaatcaacaaagttgattggtgcttcttcccaaaagcagcagagttatgttgtgcaacacttttttaacatttataagttgagtgtttcaggtcgttagcgtggacttgcatgtgttactgtgataaccaaatgtaaaagacgtcttttatactgccgttaaaggggttcttcaaccaccaaaggaaaaagcaacaaaaag

SEQ ID NO: 83035 - DNA, 260 bp, Glycine max
  Clone ID: PAT_MRT3847_45999C.1
cccaatttgtaaaataattacccatatcataaaaatgctatctttcgccataaccacacatgctttcctcgttattaccattaacaaatgaaagcagagacatatgcaaaggcaaaggcaaagggtgtcactttcactttcagcttccattcaccatgacagcttgagagtgctcgaatgggacaagctatgctacttggtcgcttcctttgcttgcacttccttgggccgcaaagccctcaaggtcaaaacttccattc

SEQ ID NO: 83036 - DNA, 240 bp, Glycine max
  Clone ID: PAT_MRT3847_4599C.1
ggctcgagctaacatttctcagtccacggccctgtctccgatacatgtcgacttctatatccacgagacaaatatgatttactgccttgtgcacagtctctctaatgcagaatcgctatctactccttatccctcgtgctcaagaccgttttcgtcgtagaccgctcggtactgatgcacacggacaaccctctgggtcctcggctgaaatagcctttgcgcacaacagttgctgcgatt

SEQ ID NO: 83037 - DNA, 285 bp, Glycine max
  Clone ID: PAT_MRT3847_459C.1
gaacctaactttattctcactatatcttacacccaaatcaaagtaaggtttctaagtaggtcgattccctttaatttttcaacacatactatcacccaatttatcattccactactcatatttcacattaacacaaattcacttatcttattataacaataccaaatatcatttcaataaattcataaatcaacaatttattctatatcaatactaccaacatttattatcaatatatttatatctcatctacatttcataaatataaaacaatataataccaat

SEQ ID NO: 83038 - DNA, 488 bp, Glycine max
  Clone ID: PAT_MRT3847_45C.1
taaactctatctttgtctctgtttttctccaacatcattcacttcattattgcacctttcagtttccactcacagctcttaactcaacccaacacaacacaaacactctctcttcatttaattttaattctatatctcccttcctccattgaaagccacccaaagttcgcatcttcaacaccagagccaaaatgggtgcatctggaaaatgggtaaaagcattaatcggactcaacaacaagagcgaccttggtgggaagaagaagaaatggaggctgtggaagagttcttctgcgggagaaaacagatctcaaggcaacgactatgctagtagtgtggcttcggattctttcaattttgcagtggccactgtggtcagagctccacccaaggatttcaaactcctcaagcaagaatgggccgccacccaaatccaaaccgctttccgtgcctttttggcaagaaggcattgagggcgttgaagggag

SEQ ID NO: 83039 - DNA, 428 bp, Glycine max
  Clone ID: PAT_MRT3847_46000C.1
cgtgttcttcataattatgcttcaatattggagttacttttacgtcttcggcaatgttgtgatcatccatttcttgtaatgagtcgaggtgatactcaagaatttgcggatctaaacaaactagccaagcgcttccttagaggaacctatactgcttcagaaggtgaagtaaaagatacaccttcacgggcttatgttcaagaagttgtggaagagctacgtaaaggggagcaaggagagtgtccaatatgtcttgaagtatttgaagatgcagtgttaacgccttgtgctcaccgcttatgccgggaatgcctcttgtcaagttggcgaaatgctacatctggcttatgtcctgtttgtaggaaaacaatcagcaggctggatcttatcactgcccctactgagaatcggtttcaggtggatattga

SEQ ID NO: 83040 - DNA, 353 bp, Glycine max
  Clone ID: PAT_MRT3847_46001C.1
ggcttccaaaggggggttcaaatcccccaaggcccttttttttggggaaaatttccaactgggcgtccaacatttaggggccccgcttcaaaagctcacccttttttttttcagaccccccgggattcattttcaaaaaacaaattttggcccccgctttatttgggggaaacccgaaaaaatttgcggtccaaactcagggaaccggaaaaaacaaaaaacgggattcacttggactcccccattgggggggtgggaaaaaaaaaaaaaaaaaagtttaacccttccgagcggacaaattttcagactttggatggcaggacccccccgggaaacaccctttttttctccca

SEQ ID NO: 83041 - DNA, 240 bp, Glycine max
  Clone ID: PAT_MRT3847_46002C.1
agcactcggctcgggtagagctgctcgaagacgatgcgaggagacgatagcacggggggtatatcatcactacatatattagatcctgtggtaattgcatcgtcaccactactggcagtagctttcatgccaacgaccaagtgtacctggagctagactttggtgcagtagtctactcattcgatcaccagaggcgtgtatggcgttcgatcctgtccgtgcttacaagggcacatgctc

SEQ ID NO: 83042 - DNA, 362 bp, Glycine max
  Clone ID: PAT_MRT3847_46003C.1
atgtggtgttttttttttttttatcttgtcttacgttacatagctcaatttggaggacaacaaacattggcggaccttggccactagacgtgaagaaaacactcttcaaaggggtccgggaacacaatgggtctccctgcccttgataaactttaacaaaaaggacactggggggggtaaaaccacactaaacagaaaccttatttgggggagcaatcacactatttttaaagacagggcaactcctattttattggaaactataaagggccccgaaaggaagaccgggaccaatttacttagcctttactggggggggcccatgcccaaaagagggggcatgtgttgaatcacaacccctt

SEQ ID NO: 83043 - DNA, 226 bp, Glycine max
  Clone ID: PAT_MRT3847_46004C.1
ttgcttattttatattttttttatttttggggggggtgggatgccatgtcgcggatcaccaatatcttaatgtggagggctacatcgccaatttccagaagatctttaaacaaacaatgcttgaaggggggtggttaacctgcaccaactgtactttatcatcacctctggcacccttgaccttacaaggcacccaagcgataggaaccgctttttaatttcaaat

SEQ ID NO: 83044 - DNA, 433 bp, Glycine max
  Clone ID: PAT_MRT3847_46005C.1
acgccaaagtgcaatttttactggggcatctagggaagaacaatcccacaaaggagcgatgctcaataacaaaacgaatctcgctccgcgtgccggcgaacgaaagacgccgacctggagagctaaggaaccggagcctaacgttccccaacgcggattcgatgccctcgttgctcacgcgcaatggggaggagacgtaacacaggagcgtgtggtgaccgaagaggagcaataagggggtggggaattcgagcacgcgacggggagataagctccgacgaacgctggagtaagagtggttgaggaagggggaacacgtgaagcaaagagggacgttgaactgacagtgcatgaaaggcacaacaaagggccacgccgggaccatatggacagctgaccaataggagaggcagctccagaagaaccagggggc

SEQ ID NO: 83045 - DNA, 329 bp, Glycine max
  unsure (1)..(329): unsure at all n locations
  Clone ID: PAT_MRT3847_46006C.1
gtcgcangcacgcgtacgtaagctcggaattcggctcgagcnanaacatacnnatatctnnanatnntannnngatacaccgnnagtctgnatnnncnanggctggacactnngcacnccnatntntccacgancgnantgcatnnngcgnngcngnngcnaccnatcacaanaggnctgnncatntnatggngangannnnatgaagcagccttttggctttntgcaatgtcagacntnangntcttgtccacaccgaanncaggttcccncgncacaaagtcacagngccatacagctctntnctcaanntggcgangtccgncagg

SEQ ID NO: 83046 - DNA, 752 bp, Glycine max
  Clone ID: PAT_MRT3847_46007C.1
caaatctcgcgtccctcaaatctctcatacttcttacgccacatacacccttctcttcatttctcactctccggaacatttttttttttaaaaaagaaaaggggaaaatagaaagaaaagaaaaagggagaaggagtgagaataacatgaacaaacaactcacgctgctctgtctctttatcctcttctcatttctcagtgtgggtttcgccggcgccggagacgcggcggagaaaaaccctttcaccccaaaagccttcgccattcgttattgggacaaagagatccgcagcgggttggcgaagccacagtttcttctgtctaaggcgtcgccgctaaacgcggcggaggcggcggcgtttgtgaagcttgcctccggcaacgcgctctccacgcggctgccggaattctgcgccgccgcgaagctcctctgcttcccggaggtggggtccagcctcgagaagcacgacaaagacgcaaactttgcagtgtacagagacaagaacttcaccaactatggaacgggtcgacccggtgggctcgactcgttcaaaaactactccgagggagagaatattccagtgaacgatttccggcgatacagcccgtgactccgccggccacaaggacgggttttttaagctacggcacgagcggcaacgtcgtgcagcagagctttccacacctacgccggcggagcacccgggcggtgccgggcgagttcaagcgctacgccgacgaaaccaacgttc

SEQ ID NO: 83047 - DNA, 522 bp, Glycine max
  unsure (1)..(522): unsure at all n locations
  Clone ID: PAT_MRT3847_46008C.1
gtaatattcagtaattaatttgaatttatcaataatattttaaatacaatgctattgattgaatagttatgcagtgtttttaattatnagactgagggttataagcnnaagaaaaatatacacgctggtgttttgtgttggtgtggtgtgagcaatatttgtagtgaccagtcttatgtttggtctgaacaatgtgctacattcaatgcataggtgtattttacaaggtcaacttcttccagataggtaagatgtctcctagtcagcacgtcatttgcagacaagatccaaaaccaagctaagatagttgttataatgagtaatgacagagtagctgatcaattttttttctagttagttacacaataccatatcgcattaatcaataacttcttttttacctaaacatatagtactattgttaaatgtttgctaattatatctaggcaatcccagaagcagcatttcaaatgatggaatttgatacattatttttagtaaaaaaaatattcgatgtttgtt

SEQ ID NO: 83048 - DNA, 974 bp, Glycine max
  Clone ID: PAT_MRT3847_46009C.1
ggccccacccctcgcgcttggtcggttccggcatcgtgctctgctctgcacacctttctctttctctctgtctgaggctctgagcagtgagcacaccacaaactgaaacaaatccctttgagcattcagcaagatgagccacgagctgttggagacgtacgcgtgcatgcccacgacggagcgcggccgtgggattctgatctccggcgatgccaagtccaactccatcgtctacaccaacggcagatcggtggtcatgatgaacctccagaaccccctaaacgtgtccgtgtacggggaccacgcctaccccgccaccgtggcgcgcttttcccccaacggcgagtgggtggcctccgccgacgcctccggctccgtcaggatctggggcacgcgaaacgacttcgttttgaagaaggagtttagagtcctctccgctcgcatcgacgaccttcagtggtcccccgatggtctcagaatcgttgcctgcggcgaaggcaaagggaagtccttcgtccgcgcttttatgtgggattcggggactaatgttggtgaattcgatggtcactcacgtcgggttttgagttgtgcttataaacccacgaggccttttcgcgttgtcacttgtggagaggattttctgcttaacttttatgagggacctccctttagatttaagctgtctcacagggatcattcaaattttgtgaattgtgtaagatattctccggatggcagtaaatttataagtgtaagttctgacaagaagggtatcatattcgatggaaacagtgcagagaagattggtgagttgtcttctgaaggtgggcatactggtagtatttatgctgttagctggagtcctgatggaaagctggtgctgactgtatctgccgacaagtctgcaaaagtatgggacattactgaggacaataacggaaaggtgaagaaaacattgacttgtcctggcactg

SEQ ID NO: 83049 - DNA, 539 bp, Glycine max
  Clone ID: PAT_MRT3847_4600C.1
ggtgatagtgctaagttgctaacttaaccacaccacaggccacagacacaaaaggccaagtggtcagaaccaaaaaaaagctctctcataaattctgccgaagaatcagagagagaaggaaaaagaaaaatgggatgggaaacttaaattagagaggcagcacagcacagcagagaaggtcatggcggcgtttgcagggctgtaaatcgcgcttttgtgatcgtggcttttattaatgcaccttggcgccgctggccgagagagaatgagttgaaggcgctattaacgctgccccgacactgtttcctcgtctgtcctcaactaacaatccttcaaatcaatttcacgctttaaccagccaccacacgacacctacttctacaagttaagcatagaaagagagagaggagaaagaaaaagaaaaagaagagagacaacacacgcacacacaaaaaccaaagaatttatttaagacccaaaaaaaaaaaagaaaaactatccctagttgatcttttgtgtggttctctctctcccaaatt

SEQ ID NO: 83050 - DNA, 2659 bp, Glycine max
  Clone ID: PAT_MRT3847_46010C.1
ggaagaagttctcagcattcacacatatgtagcatggaacattgaaggcccaatctgaaggcacattctttcctacgactggctcataacacactcctctccctctcactctcactccacataatataaatttctggttgcaactcaacaaagtccacaaacattttcaaatctcgagtccaaatctctcacacttcttacaccacacacacaaacccttctcttcatttctcactctcgggaacatttttttttttttaaagaaaaggggaaaaatagaaagaaaagaaaaagggagaaggagtgagaataacatgaacaaacaactcacgctgctctgtctctttatcctcttctcttatttctcagtgtaagcacagcttttcctcactgtcactgttccaagtctcgatttttccaattgttttattcctcccattgccagttctgaaatgggtgtgtgttcattcaatgcaggtgggtttcgccggcgccggagacgcggcggagaaaaaccctttcaccccaaaagccttcgccattcgttattgggacaaagagatccgcagcgggttggcgaagccacagtttcttctgtcaaaggcgtcgccgctgagcgcggcggaggcggcggcgtttgtgaagctcgcctccggcaactcgctctccacgcggctgccggaattctgcgccgccgcgaagctcctctgcttcccggaggtggggtccagcctcgagaagcacgacaaagacgcaaactttgcagtgtacagagacaagaacttcaccaactatggaacgggtcgacctggtggactcgactcgtttaaaaactactccgagggagagaatattccggtgaacgatttccggcgatatagccgcgactccgccgggcataaagatggttttctgagctacggcacgaacggcaacgtggtgcagcagagcttccatacctacgccgccggagccaccggcggcaccggcgagttcaagcactacgccgacgaaaccaacgtcccgaacctcggcttcacctcctattccgacaacgccaacggcagaacccaatctttctcttcctactccgaaaacggcaatgccggcgagcagacattcacctcgtacggcaaaaatggcaacggcccgaccaacgtgttcgcctcgtacggaacagagtccaacgttgtcgggtccgggttctccaactacgctgagaccgccaacgccgccaacgacaccttcaaaggctacggcatagacatgaacaaccccaccaacacgttctccaactacgctgccggcggcaacggcgccgtcgagagattctccagctaccgcgacaaggccaacgtcggcgccgactccttcacctcgtacgccaaagccgccaacgccgcagacatcggattctcgaactacggcaagtccttcaacgagggaaccgacacgttcaccacgtacgctaaatcctcggatggcgaaacaaaagtagggttcacttcctacggcgtaaacaacactttcaaggattacgagaaaaagggtaccactgtctcattcgccaggtacaccaacattagcacgaccctctcagtttcagcttcatcagtcagtggcagtttggtaaataagtgggtggagccgggtaagttttttcgtgagaagatgatgaaggaaggaaccgtgatgccgatgcctgacataaaagataaaatgccggaaaggtcgtttttgccccggagcattttatcgaaattaccgttttcggtttcgaagattgatgagttgaagcaagtcttcaaggcttctgataacggctccatggagaagatgatgaaggactcgttggaggagtgcgagcgtgcaccgagtagcggcgagacaaaacgctgcgttgggtcgctcgaggacatgatcgattttgcaacctctgttttgggtcgaaacgtcgccgttcggactacccagaacgtgaacgggtccaagaagagtgtggtggtggggcccgtcaggggaatcaacggtggtaaagtcacccaatcagtgtcgtgccaccagagcctgttcccttacctgctctactactgccacgcggttcctaaggttcgggtctacgaagcggatcttctcgacccgaaaacaaaagctaagattaaccgcggagttgccatctgccacttggatacatcggattggagcccgacccatggagcgtttctctcgctcgggtcgggcccgggtcggattgaggtgtgccactggatctttgagaatgacatggcgtggaccattgcggattgagaaaagagaccatcagaataaggaataagagtcacttctataggaaattaaagttaaatttttacaaaaaaagaacttctgttctgctaagaaaatttagcagtctcgagaattatttgtttttaatttaaaaattaagtaatgtaattttattttttttggatagaaaagtttaagtcatgttttttttactacatttggaagaagaaggtatattattatttactcatgatcattgttgttattattagcttggcaagatgtatgtaaatgtctttcctaatgattggaggcaatgaatcaagatttgatgctcttataataaaatgttattaattgctttttatcgctc

SEQ ID NO: 83051 - DNA, 403 bp, Glycine max
  Clone ID: PAT_MRT3847_46011C.1
aattcggctcgagtaacaacgttagcgcgtgagtttgtaaaagtatagcagacaaaaggcatttcatggcgaacatttgtaccactaatgatttttgtcaattcatcaataaaaaaaaaaatactggcaaaaaatatttgctacagtttggcgccgtaattttcaaatggggttctgaaaacatttttgatactttttatattctctttgatgtttgtatactgatttgtaaagtgtagataagcaaattgcaactcttttgaaaatggcgacaaactgctttgtattttttatgtgacgaccataaaatgtcttcagaccttatgtcatgctgcaaaatttttccttcataacaataaagtaaaaaacattaaaattcgacgtattggcttgtaacattgac

SEQ ID NO: 83052 - DNA, 572 bp, Glycine max
  Clone ID: PAT_MRT3847_46012C.1
ggctcgagcatccacaactttagacatgtctaacgcaggctctcctcttaagtctttcctcttcacttccgagtgcgtctctgaaggccatcctgacaagatgtgcgaccaagtctccgacgctgttttggacgcttgcttgaaggctgaccccaactccaaggttgcttgcgagacctgcactaagactggtatggttatggtcttcggtgaaatcactacctctgccactctcgactacaaccaaattgtccgtgataccgttaaatggattggtttcgatgactccgccaagggtttcgattacaacacttgcaacgtcctcgttgccatcgacaaacaaagccccgatattgcccaaggtgtccacgttggtcgtgctgatgaagatattggtgctggtgatcaaggtcacatgttcggttatgcctcagatgagacccccgaaatgatgcccctcactcacggtcttgccactcaactctgcgagcgtctttccactgttcgccgctctggtgaactcaagtggttgcgccctgacgccaagactcaagtcaccgttcaatacaagc

SEQ ID NO: 83053 - DNA, 381 bp, Glycine max
  Clone ID: PAT_MRT3847_46013C.1
ctgcactgaaagaagtgtatgtatatccaatacacgatgaattgttttcatatttcaatttataccaacacatggggaatcatcatctatttgacgagcaaattaaatagaatcattactcatttcttcttcacaaattaactgatagtgaaaaaaggccaaatgttttacattaagatctgaaaagtctgctacatctaacagtttttaatggctatgattattccataaatacaattatatcttctggacttaatatcaactttctatatgtcaatggattgacagctctccattcatcttcatcctctggcatacaacccacaattgctgtccttctctacatagcatcacattgtgtatcattaacagatccatatc

SEQ ID NO: 83054 - DNA, 221 bp, Glycine max
  Clone ID: PAT_MRT3847_46014C.1
ctcaactctgaactcggcactaggaacaagataactgtaagtgcacagcagaagatttgtggacaatctctgaagaacgtgtacagaggaatcatgcaaaggccgtggggcaacgtgagcctcggaaactactggacccacatacaggcttccgcttctggctcagcaccctcaccatcacctaagaaaccccaccaacgtagaatcacacggcaaatcgc

SEQ ID NO: 83055 - DNA, 178 bp, Glycine max
  Clone ID: PAT_MRT3847_46015C.1
tccttcttttctgctctgtactaaaatttaatatctttcttctatttatttgttaatagtgtatgtggggagtagtagtaccaatctttgcatctcaatgttttgcatttattatattttctgttagaagtgtattaatagtcaactaattactggctattttctttgtgcttttggg

SEQ ID NO: 83056 - DNA, 555 bp, Glycine max
  Clone ID: PAT_MRT3847_46016C.1
catcgatctgtcgctacgaatgtaccaggtgccgtgcacatgagtttgattatgggcgactcttccacttgttgattgatttcaaatcttacacttaatgtctttcgcaatataaaatgctatcttaatttggaatccgatccgcgcggtaactggtaggatactattggtcgtcgtagtggtttgtggtacaataatgttggtcggtgctgctctagggttggtgtcgacaagtagtagtaacttaacaagcccgttagagttcctttacctttactttaaccaccttaactgtgccccgcctaccggtcaccaccctcgaattcatcggcgacacaccggtattcacgtcagtgttggtcataactactgtgataaataacatagtagcccaactacactatatctgataagctgtctgtattaccgggcgaattcgcacgcatacacatgttaggtgttaaccgggccatcaaagacacacctctaggcacaagccacacggtaaggccacactgcatacccaccagcggtatagcaataggcagcttctct

SEQ ID NO: 83057 - DNA, 666 bp, Glycine max
  unsure (1)..(666): unsure at all n locations
  Clone ID: PAT_MRT3847_46017C.1
tggtacgcctgcaggtcnnnnntnnttcaanccntattaccggtccggattcccggtcgacccacgcgtccgctccaatcccatcccacgccctctcagaaacaaaacaaggctttcaactttcaattcaaaactccccaatcgcatagtgtcgccgtttctacaccgtccgattcaaaccccattcccttccccatctccaatttcaattcccctctctatgccgccgcatccccgaaacggcgacgcatcctcctaaaccctaaccctaaccctaacctcctccttcctcttcctctctccgaaaccaatatttatgttctctcaaaacgtgattctccctcccgaaaaccctagacccaatgagatcgcgaagcctctgccgtcgattctcgttggccgcttcaaggctctactcaagcagcgcgacgacgaactccgagtcgccgccggcgaccccgtaccgccggcgtccaccgacgaaatcgtccagatttacgaactcctcttgtcggaactcacgtgcaatctggaacctatcatcaccgatctcaccattattgcccgacagcagagggagcacgcaaaaagcatcggtgacgcaatctgcgcttcggatttttgagggggcccggagatcaaaaagcttcctttcacttctatctg

SEQ ID NO: 83058 - DNA, 340 bp, Glycine max
  Clone ID: PAT_MRT3847_46018C.1
ggtttattactgaaaatcattcctggaaccattggggcaacaattttgggaacaaccttctggaaacccttttactttcttagagatgctggttatgggggggatattgttgcgaatggggctgcaatattcaaaattcacaccatgctagatgaccactgccgaatgtcaaacagtggtttctgtataccatgcagatttacatttgagccaattacgtgactagtaggattgaaaggacaaatgtttttagatacagtcatatatgcagataatgattaaatgcacagacaggactagaacgctaaacactgatgctcaagtttcgatggatagaagg

SEQ ID NO: 83059 - DNA, 187 bp, Glycine max
  Clone ID: PAT_MRT3847_46019C.1
gttaaaccgtgccctcaagttcacgggaccggtatcgagaagggtaggtaagggtacctccactataagagaaatgcttgtgctaaacaacctgataactggcagctagccttatgagagagggaatcttgaagaggccacaaggattggcgcatgggacactctggtaactggggctatgtcatta

SEQ ID NO: 83060 - DNA, 190 bp, Glycine max
  Clone ID: PAT_MRT3847_4601C.1
ttttgtttttttttttttttttttttttttttttttcttttgattttttttttaaggtttgcacatgacagaggatacaaagaggaaagggcgaacaccaaataatatggggccctagggaggcaaacaatttagcttctcgggaaaagaagacccccaaagacgggcccaccggggaaagggaaacggg

SEQ ID NO: 83061 - DNA, 262 bp, Glycine max
  unsure (1)..(262): unsure at all n locations
  Clone ID: PAT_MRT3847_46020C.1
aagggaganagtganatatatagttatanngcatngttgtaatttactagtgataacaangttacatcatcctctctgaatgaccagaataaacacngtttngnttactcctatatttgcttttggacgtacgcttaattaattgagtttaccattaattannnccgtactngnataatacccnttantnagngtgtgatgancnctcaganacaagtcttcnantngggccatagtttcanttcagctcaangtgcaagtt

SEQ ID NO: 83062 - DNA, 448 bp, Glycine max
  unsure (1)..(448): unsure at all n locations
  Clone ID: PAT_MRT3847_46021C.1
ccccgcgtccgcactttgacttgactacaaataagcatgctgagaggcattattatcatcggtctatcttactggatgacctgaacgttacccgggtgtgatctgatcgtgtgcatagatcgtgcgtgggcgctacctacgatggcgcgaggcctgacatgctcctgtacgcgacgatgcatcgctgtatcagatcctatccgtacgctgatgcagggaggagcaccttcaacgctttgctggggctgagtcgagaacattcttgtgtctgctgagagcgacgagctcatacaggctgtgctcaactggatctacgcggacgctgctgagtacaccgtcactgactcagctgctcacgcactcgctgatatctgaacggacaatgtccctgccaatatcagccgctacacatactgagcangcatcaggatctgagcaggccttggac

SEQ ID NO: 83063 - DNA, 354 bp, Glycine max
  Clone ID: PAT_MRT3847_46022C.1
atagtattaaccacttttaacccctatattaatggttaataatcgagtccaaaggtaaactatcaaggttgtgaagttacataccactacttaattaccaaaatgtaaccaaaattataagaatgtggaatccagcatcctacatcctgtaaatggacaaaatcttaatggaaatcatccttcaatacctgacttagaatgaaaacctttcttttgttctactgcactaatgttcattgctcctgtcaacatacttaatcaagttcataacgcccaatccatgaaattacgcaagtcttacaataacaaacaattggacgttaattctttaacctcaaataatccaaattataa

SEQ ID NO: 83064 - DNA, 253 bp, Glycine max
  Clone ID: PAT_MRT3847_46023C.1
cgtgtgcagtgtgatgatgatgcattcttctggtcaaacctccgtcgtgtactcgatatgtcccagcatagagatcaacaagaatgaggtattcattactgaaggcttaggagtagccgtcaatgtggaggcggtgagatcattgcgaacgtgcaaagggaacccgattgatgatatacgggagacggtagattgacccattaggtaaagtacatgggggactcaagtacgcctcataagtcgtaatcaggga

SEQ ID NO: 83065 - DNA, 1001 bp, Glycine max
  Clone ID: PAT_MRT3847_46024C.1
tgaagaagcaaaggcagtcctcaggcttgttccaatatgggctacatgtttaatttttgctattgtgtttgctcagtcttctactttctttacaaaacaaggtgttacgatggacagggaaattttgcctgggttgtatgtaccccctgcttctcttcaatccattatcagcctctccattgttctttttattcctatctatgaccgcattattgttcccgtagctagagcttttactggcaaaccatctggcagcacaatgctgcagagaattggaactggaatgcttctttctgcaatttctatggtaattgcagcttttgtggagatgaaaagactcaaagtggctcgtgactgtgggctaattgacatgcctaatgtgacaattccaatgagcatctggtggttagttcctcaatatgccttgtttggaattgctgatgtctttgcaatggtgggtctgcaagagtttttctatgatcaagtcccacaggaattaagaagtgtgggtctttctctctatctaagtatttttggggtcgggagctttctgagtggctttctcatctctgctattgaaaatgtcacgggtaaagataatcgtcatagctggttttctagtaatctcaatcgtgcgcatcttgattatttctatgcccttctagctgctctcagtgcagtggagttatctgtcttctggttcttttccaaatcttatgtttacaagacaagaagcacatagaagaagctggaattctgtagtaaaaaaatgcatgcaagggatgtcctaatattaaacgagtttcctatattattagtgaattctaagacgagatgcaaaggatccaaattaccttgcaaactcaaatggaatcatatataaataattgattcattcgatctattttgtaatattgccgatgtaatttttttagctttgttaacttttgacaattttattctaacaataataattgctacagtattctcaatacttaggt

SEQ ID NO: 83066 - DNA, 533 bp, Glycine max
  Clone ID: PAT_MRT3847_46025C.1
gaaattattagggagaaaacacaaaatttggatatttattagggatcaaaaacatattttagcctaaaattattaataaatatttttgtggaactttttatttattaaataattatttattagaagttagatatttaaatattgtataaaaaaaaatttcggcccccccttgatgcattcctgaatctgtccctgatcctagcataggcaattgaagtaaaagctttgctgctattccttaagaaagggtcagacacttttccctacttctgggagcagaacaaaataatttttgttttaagagtttttctgacaatattgaatcttgatgttctgactgaagattaaggttagatctgcctgaatttcaagtagtcaagttcccttgagcattttagatgtttcatcttttctctagtttcttgtaggtataccaatgtgtgtctgaattttgtcttgccaccaggaattgcaattaagtaagtttttgtttttagtttgtaatttctcatgcattgtagagtggctactgt

SEQ ID NO: 83067 - DNA, 354 bp, Glycine max
  Clone ID: PAT_MRT3847_46026C.1
cagagaaaaatcggttggggttcgtagtgatgcgctgcgtatttgtgaaattgatgcggcgcggtgcacgctgaagtgaagaatcactatgaatatgactaagggaataactccaagagattattctctgttgctcaagccctgccctttatcttctcttggtttactccattctctccaggtaaccttttatttatttccctcattaggtgggaaagaaatagatggcaacgtggtttgctttgtccagtatatttcccaaacgtaagttggttcaacttttgattcgtcgcttctcattttccctaaattaattgcttcattgcgtcagtgttctctggtcaattggtaacc

SEQ ID NO: 83068 - DNA, 229 bp, Glycine max
  unsure (1)..(229): unsure at all n locations
  Clone ID: PAT_MRT3847_46027C.1
cgcgtgagaacccgagccggttcgaaatgacaatcgcggtagtgcgccggggggtatctctatcgggcacgggtgctcctgcctctgtcgggagagctcctccggcgctggtgctgcggggccgtgcgtgggtggggcaaagcgacctggccctancagccccatggtggtggggggggtgcaaggtcatcgaagcgcgggaggaactgggggacccggtgccggcgcg

SEQ ID NO: 83069 - DNA, 488 bp, Glycine max
  Clone ID: PAT_MRT3847_46028C.1
ttgactacggccgagcccgcctggttgcacatccacggaggcacctgttcgcgccaggagctgggggtctccgacgtgttgggctatgtgcacccggacctgctgaaagatttctgcatgaatccccagacagtgctgctcctgcgggtcatcgccgccttctgtttcctgggcatcctgtgtagtctctccgctttccttctggatgtctttgggccgaagcatcctgctctgaagatcactcgtcgctatgccttcgcccatatcctaacggttctgcagtgtgccaccgtcattggcttttcttattgggcttctgaactcatcttggcccagcagcagcagcataagaagtaccatggatcccaggtctatgtcaccttcgccgttagcttctacctggtggcaggagctggtggagcctcaatcctggccacggcagccaacctcctgcgccactaccccacagaggaagaggagcaggcgct

SEQ ID NO: 83070 - DNA, 265 bp, Glycine max
  Clone ID: PAT_MRT3847_46029C.1
taacataaaaaacagtcacttataaaatttgggaggagcactcggtgttatgacatcctgatagtcttttgaaggctacaaaaaatataatttgttatacagccgacaacttttggacgacaactgatttggctctaccagctagctctgttgactggtccacatcatagaggcgtttgggaggaaaccccattgtgatgcacctggtgacacacatacttccacgggatttgctgcgtcaatcaatgctactacaattattatt

SEQ ID NO: 83071 - DNA, 222 bp, Glycine max
  Clone ID: PAT_MRT3847_4602C.1
actcgtccgcaacttgcttgtattattaaagcttttgtaaacaagttaaagtatggcatgcaaagggggcaaaccatgtatttcaaactacttaaactttttattatcactaggtgcatttatttcagatatttactatttgggtacacgtatgcactttagtccaaacacacgacgtctttccttggcgactattcccaatcagaactataatctttttcc

SEQ ID NO: 83072 - DNA, 493 bp, Glycine max
  Clone ID: PAT_MRT3847_46030C.1
ggggggttttttttttttttttttttttttttttttttttttttttttttttttcttgtttttcacttatcttgttttttgctcacatgagtacacccttagagagaaaatattgccaaaaagacggaggaaaataatcaaagacccctttctccttggaatttaaaagggacccccaaaaaatcaaatttgggggggagaaatccccgatccgggggggaaaccgccccaaggcggggggcacccaaaaacctgggggggggggcaaaaccaaaacccaattggttttcttagctaaacaaacggatttttcaacaaaactgattcttcaaaaaattgggggggggggggtgcttcaattcctgtggacaaacgatcccgtctttttccttcaaaagaacacccggaacgaaaaaaaaggggggggggggctcccccttttatcaatatggggggcaactccccccggggggggggcaccccattgcccccc

SEQ ID NO: 83073 - DNA, 325 bp, Glycine max
  Clone ID: PAT_MRT3847_46031C.1
aaaaacgggggcggcccacgcgtacaaaaattcatacacttccacaaaacatttaattttcaactcacaataaacaatcagcggctgcggcatacttaacctttccacaaaacaccaaacaaaaattacatctttttttgtactttcacctatattcacgaactgtaccatcctcttatttaatattatcgtatttcattttaatctacaccacacccccaatactttgacttttaaccaaaaaccaactcttttattaattgccatttaaccagttactattatttcaaaattcattccccacaatctgttaagttacccttca

SEQ ID NO: 83074 - DNA, 289 bp, Glycine max
  Clone ID: PAT_MRT3847_46032C.1
tacggctgcgagaagacgacagaagggaggatagggtttttgaggagcagtggcaattaaaggtaccaaccaaaggtgcagtatttgcttggaggttactaagagataggttgcctactaaagcaaacttgcataggagacaaatagaggtcgcgaataggagttgtccattctgcggtaatatggaagaggaagtagggcacttgttttttcactgcagcaaaattctccctatttggtgggaatcatcatcatggctgaatatctctggagctcacccaatacaccc

SEQ ID NO: 83075 - DNA, 668 bp, Glycine max
  Clone ID: PAT_MRT3847_46033C.1
ccttcaacatccactacatagagtaccataacaaagagtttccatagcagatgatcataacccaaccatctaaccataataataataatttatacacaataaaccattttcataaacaaagaaaagaaagaatgaggagagtaaactgagtattacattattattattagcgaagataaacagagcatgctaatgtgcatataaaccaaataaataaaagcctccgaatagtttatcattttttattctctttcagcctctaacagtgagcaaggtaggaatggctgataagttaggcgtggcgttgttcttatcagaagcatctctcttcgaagaagaagaaggaggagaccctttggtggtgaaagctctcataggactagcaaacgcccaaccccaactccttcctctgccatcatcaacagaagaagaaacccaagacgaagaagacgttgttgatgaagacgaattcataacgaagccactgaatattcctccacatctcactctttccttcatgcaatggttcatagtattagcagaagcagctagcttaggttttcctccttcacgctgagactccctctcgtaaggcatcccgagcaaaaatcttcaaaatactgaagcttgtacaaccaaaactaattcgaccttgagagagagagaga

SEQ ID NO: 83076 - DNA, 108 bp, Glycine max
  Clone ID: PAT_MRT3847_46034C.1
gcaccaggaccaatcctatataaagtggggtctcaaatgtcctacaaggtccaagagggatgagtttggaattgaaggtgatggtgttctaagcatttagaaatagct

SEQ ID NO: 83077 - DNA, 2108 bp, Glycine max
  Clone ID: PAT_MRT3847_46035C.1
ggtccggaattccagattcgacccacgggtccgggaggtttggaactaacagggccgacataacacagttctcctttctctgaatttttcgttagagaatggggaagagtagcggaagagaccgaagacgaagaagatcacatgactctgaatccgactcaccttccgattccgactccgacagacgccaccgtagcaatagtcgccggtcacggcgggactccgatggcgacaggaagatgaagtcctcgaagtctgaatccgagtcgccttccgattccgactccgacatacgccaccgtagtagcagccgccggtcgtggcgggactccgacggcgataggaagaagtcctcgaggagcatcacagaagaggaaattacaaagtacatggccagaaaggcccaatcgaaggcaatgaaagtagcgaaaaagttgaaaaccagtacggtatcgggctattccaacgattcgaatccgtttggtgactctaatctcaacgagaagtttgtctggcgcaagaagattgagcgcgatgtttcacaaggtgtgtctattgatgcgttttcaatgaaggcagagaaaaagaaacagagagaaaggatggcagaaattgaaaaagtaaaaaagagaagagaggaaagggcacttgagaaagcaaggcacgaggaagaaatggcactgttagccagagagcgtgctcgagctgagtttcaggactgggaaaaaaaagaagaggagtttcattttgatcaaagcaaagttaggtcagaaattagattgcgtgaagggcgtgccagacccatcgatgtcctaaccaagcatctcaatggctctgatgatttggatatagaaataaatgaaccatacatggtcttcaagggtttgactgtgaacgaaatgagtgagctacgtgacgacatcaaaatgcatctagaccttgacagggcaacaccaactcatgtagaatattgggaggcactccttctggtttgtgattgggagctagctgaagctcaaagaaaggatgcacttgatcgagctagggtgcgtggagaagaacctcctgctgagctgcttgcagaagaaaggggtctgcattccagtgttgagccagatgtgaagaggcttttgcaggggaagacacttgcagagttggaggctttacgggttcacattgaatcagaaatgcgtactggtacagcaaaggtggttgagtactgggaggccattttaaaacatctccacatttataaggccaaggcttgtttaaaggaaattcatgctaaattgctacgtaagcatttgcaatctcttgagagaccattggaggatgaagataaattagagaatgctcatgttatggtacctgaggaggaagatactgaggatgatattaaagtccgatctgcagatgaatcattctcaccagagcccattagagaggatcaagaagctgatgatgaggctggatcattttcaccacaattgttgcacagtgatgaaaatgaggaagctattgacccagaagaagatagagctatgctggagcggaatcgtaaggctgtattagaagagcagcaaagacgagttcaggaagcaatggcatcaaagccagctccttctgaagataattttgagatgaaggccttaaaagctatgggggatatggaagatggagattctgtgtttggatctggtgctgaagttaacctggattcccaggtttattggtggcatgacaaatacagacctaggaagccgaagtatttcaaccgtgttcacactggatatgagtggaacaaatataatcagactcactatgatcatgacaacccacctccaaagattgtccaaggttacaaatttaatattttctatcctgatcttgtagacaagacaaaagctccaacctacaccattgagaaggatggcagcaacggggagacttgcattataagattccatgctgggccaccatacgaagacatagctttccggatcgttaacaaagaatgggaatattctcataagaaaggttttaagtgtacatttgaacgtggaattctgcacgtgtacttcaatttcaaacgccatcgctaccgaaga

SEQ ID NO: 83078 - DNA, 268 bp, Glycine max
  unsure (1)..(268): unsure at all n locations
  Clone ID: PAT_MRT3847_46036C.1
cagtgaagcagccgtcccagttataacccttataatgggagcaaacctccttaaaggcaataattaattcttatatagccatgctttttttttaaaaaaaattttatactcctctttggcagcttatgaataatttttctttcttggattaatggaccacaggtttgaagggagcaaatacttcgttttggacaattcttggaattatagtagttcgatatattttcctgccaattttgggtattctagttattanagggagcaacac

SEQ ID NO: 83079 - DNA, 426 bp, Glycine max
  Clone ID: PAT_MRT3847_46037C.1
gaagatgaagtcctcgaagtctgaatccgagtcgccttgcgattccgactccgacatacgccaccgtagtagcagccgccggtcgtggcgggactccgacggcgataggaagaagtcctcgaggagcatcacagaagaggaaattacaaagtacatggccagaaaggcccaatcgaaggcaatgaaagtagcgaaaaagttgaaaaccagtacggtatcgggctattccaacgattcgaatccgtttggtgactctaatctcaacgagaaataagtagtggtcgctcatatgccagatctatatagattataaacctacacaaatgttatttataggtttgtctggcgcaagaagattgagcgcgatgtttcacaaggtgtgtctattgatgcgttttcaatgaaggcagagaaaaagaaacagag

SEQ ID NO: 83080 - DNA, 112 bp, Glycine max
  Clone ID: PAT_MRT3847_46038C.1
gtgaacaagtatttaggagctatcgacgaagactgtgatgttagcatgatagtcaggacaaagattgcactgggggtctccactggcttactatgcgagttacacgtgagta

SEQ ID NO: 83081 - DNA, 634 bp, Glycine max
  Clone ID: PAT_MRT3847_46039C.1
aatccaaacagggtcacagaattgtgattagtgtgtacactaaaaaaagaaaagacatgtaattagtatctcggcatttggaaagacccttggtctccatattcttatgcacaggagtactacactcaatccattaaaaacataatcagcagatgagaacagcataaatttaaaatatcatgacaagatttagatcaaactgtaaccggttggagtatcactctgatagtaccttataatttcttcttggtctcaatctaacctgtaaatttcctggccatctatctctagtgtcaacaccatcgaataaaatttactcttaaaatggcagagccacatagcctttctattagaaggaattttacagaaagtgaaccattgtcttgtgtaaaattatcttcggtagcgatggcgtttgaaattgaagtacacgtgcagaattccacgttcaaatgtacacttaaaacctttcttatgagaatattcccattctttgttaacgatccggaaagctatgtcttcgtatggtggcccagcatggaatcttataatgcaagtctccccgttgctgccatccttctcaatggtgtaagttggagcttttgtcttgtctacaagatcaggatagaaaata

SEQ ID NO: 83082 - DNA, 332 bp, Glycine max
  unsure (1)..(332): unsure at all n locations
  Clone ID: PAT_MRT3847_4603C.1
tttttgggggcgcgccctntttttttttttttggggttggggataagaaagagctgactgtcatacattcacgaacaccgtgaccctggcactattcctggcaaacatcctgtactaattttgagaggagtacagcaaagagagacctaacatcaaagacccttttgctgcaccaaaagcagaatcaaaacaaggagaggcaaatgttcagggggacgagcacgttaggtccgcactggaaaggcacagttaggggtgttaaaagtcagagcataagtccaggtgaaagcattgggactcgtaaccttatgtatcccatccgaccattccag

SEQ ID NO: 83083 - DNA, 189 bp, Glycine max
  Clone ID: PAT_MRT3847_46040C.1
attttgtttcttgtcacattgtcagcactgtgtatgatacaaacttcataagtaaatcgaaagcataaatggtttctgacaaccattagttactctgtgagggattgcctcagattaaagtactagtatgttggcattcacttcacccgtgaaataaagcttctgtctacaaattcctaccaaagggca

SEQ ID NO: 83084 - DNA, 477 bp, Glycine max
  Clone ID: PAT_MRT3847_46041C.1
acctctaatccgaccaaccttgctatatgcaactcacctgacagttccatgacgctatttgtatgccatggctcagtcaaggcatgtataaagagtgtattccactcattgcatggctcatgcgaagaagctcgtacatctatacattgcatgaattatgactggagcatattcttaacccagatacctgatgtatctgatcttccaaattagacggaactctcattgcaatggagtgagagattattagcagaacgatgagtcaattggttgtatgaagaaacttaaaatattgaatgctgctggttgcatgaagctcacgagttttccgactgctaacttgacctgtcttgaaacacttgaactttctcactgttccagcctagaggattcgccagaaatatttagatggatggaaaacataatggaactttcatttcaatggtgtgagactttaattgcggatgatgagtcaat

SEQ ID NO: 83085 - DNA, 1281 bp, Glycine max
  Clone ID: PAT_MRT3847_46042C.1
ggaaattcatgccaagatgttatgcaagcacttgcaacgccctgaacaaccattggaggatgaagatgaattggaagatgctcaagttagaaactctgaggacgatactgagcactatgctaaagtccaatatgcagatgaatcattttcaccagaacccattaaaggagaagttcaagaagccaaagatcaggctggctcattttcaccggaactgtttcatggtgatgaaaatgaggaagctattgaccctgaagaggatcgagctctactggagcagaaacgcatggctgtaaaggaagagcagcaaagacaaattcaggaagcaatggcatcaaagcctgctccatctgaagataattttgagatgaaggccatgaaagctatgggagctatggaagatggggacgcagtgtttggatctggtgctgaagtgaatctggattcccaggtttattggtggcatgacaaatacaggcctaggaagccgaagtatttcaaccgtgttcacactggatatgagtggaacaaatataatcagactcactatgatcatgacaacccacctccaaagatagtccaagggtacaaatttaatattttctaccctgatcttgtagacaagacaaaagccccaacctacaccattgagaaggatggcagcaatggggagacttgcattataagattccatgcagggccaccatatgaagacatagctttccgcattgttaacaaagaatgggagtattctcataagaaaggttttaagtgtgcatttgaacgtggaattctgcatgtgtacttcaatttcaaacgccaccgctaccgaagataatttcacacaaggcaatggttcactttctgtaaaatttcccctaatagaaaggctatggactgcaatttttagaataaattttatttgatggtgttgacactagagatagatggccaggaattttttacagcttagattgagaccaagaagaaattctaaggtactatcagagtgatactcccaccggttaaagtttgatctaaatcttgtcatatgatattttaaatttagttttaaggagatagtatggttatgctgttctcataaactgattatgtttttgatggattgagtatagtactcctgtgcataagaatatggatacccagggtgattccaaatgccgagatactaattacatgtcttttctttttttagtgtacacactaatcacaattctgtgaccctgtttggattatctacgctttcttttattattggag

SEQ ID NO: 83086 - DNA, 502 bp, Glycine max
  Clone ID: PAT_MRT3847_46043C.1
gtaccgctcaggtaccaatcccaatgaattccggtgtctactagcgtactactcttcttcctcccttttttttttttttttcattttaacgcctaagtgccacagggtgtgatgcactctctgggatttatttccagatactcctcaatcttggtccatgtacaataaatctgataccctacaaccaaactgggatggatattctatacaagatcatggacacccaactaattatcttaaacgacactagatggcacccgaatgactttcaattcacattctaaagtggccgcttcatgccgctggtaaaaactctaacagaagcattcttacacatacttttttgcataaatcaattacaagccatttttcttataggaagaaaactcagtcacagacactgggtatgaatttgcctttttcccaattaatgctacttccaggagaaaacctaccctatctaacaaccccatttattgaataaaaaaagggatctggaaaa

SEQ ID NO: 83087 - DNA, 436 bp, Glycine max
  Clone ID: PAT_MRT3847_46044C.1
gccgccctggtttttttttttttttttttttttttttttttttttttttttttttttaaaccaattcggtttaaataaatttccgaccaaaatttgcaaccttccccttcatggggaccccctgactaatttttccctggccttctttttttttttttaaaattctaaatttgggccccccaaaaaacgatgcttttccttattcttcgatcggttttcggttctaaaagtaacaaaaaaagctaatccgttaaaaatctcaaaccgtttttaccgaatcgccgccgtctactggggttttttttcggcgcaattaaccttccggggattcacaaattttttcacaagttttcttaattttttgctggaaacataataaaaagtctgctcggccgcggccaaaaatccccgcgggggctcttttggtgcaacaacg

SEQ ID NO: 83088 - DNA, 400 bp, Glycine max
  Clone ID: PAT_MRT3847_46045C.1
gcaaatgattgggttaaaatgaaaattaaaaagctttaaagtatttaaattaggaggccgggaaaggcaaccaaaagtgcaacctgaaacaaatatatttcccaacccacttatcccacacttagtaaaataaataataaagcaggaaatcaaaacccaaggcacaccggtaaaagagacagggaaagaaaaacaaaatcctcaaaaacacttcaacccctaagaattgaaacctttggcagccttggtggagggaggtttaacggccccaacagggaaaagagcctttccccaaaaaccttttcagtaaacagacccaacggagcagctcccaaaaaaaaaacttcaacgcccctagctttctcagggttaaccaaaaaaaatcgagcaagcctttctc

SEQ ID NO: 83089 - DNA, 145 bp, Glycine max
  Clone ID: PAT_MRT3847_46046C.1
ttgacacggacgggtatttcgtctgtgtagaaattgttaaattacaaccggcagctcgatgagcggaacataacttttacaatatatctggattcaccaggcccaagaaagacaatctttcgtcttctgattgttttctaagagg

SEQ ID NO: 83090 - DNA, 401 bp, Glycine max
  Clone ID: PAT_MRT3847_46047C.1
atggggcatgtctctaagcttcaaaatttagttatcagctaaaattaataatttttctccagggattatccactaaaatttaagtgaataccccttcatcctgattttcagttttggccatgtactctgaaaataaattgatttaaaattctaattcttaaaaaaaaaaaacagatttataatggggtgggatatttaagggctgagatttcatatttgctgtttttttgttgcaaccctttctgcttaccgatttttggggcagaaaacatgcatgtgacattggttattactatttgcatatttcagtatatttgccggttccacatgatttcagccgacctcacctagtaggataagtctttgtttggttccacatgatttcaacttaatatgtgatt

SEQ ID NO: 83091 - DNA, 208 bp, Glycine max
  unsure (1)..(208): unsure at all n locations
  Clone ID: PAT_MRT3847_46048C.1
aacggnnccccngaanangnncggncccgnngcgagggnagcccccaacgccnnggngncagcnacanngancncnannancagcaccgngnngacacaacngnacccanngaagacaccangggagagcnnaaaaggcnggnccaagagggaaaaanaaggnacanagganngncggaagccagcccngacacaannaggagggcac

SEQ ID NO: 83092 - DNA, 1446 bp, Glycine max
  Clone ID: PAT_MRT3847_46049C.1
tacggctgcgagaaagcgacagaaggggaccgtccacaagaaaaacaacaacgattcctcagacaactttactatatagctgaaaatactaccccgttgtactcagtactttgctctcaagtcaatggaagatgagactttgagtcttggcctctccactgcctccagaagctaccaatccaggctcaagtcacacttcgagctattcatcgattttgatgaggtcaatggggacgaggagttgaggacggcttatccatgccctttttgcactgaggattttgatcttcttgagctatgttgccatattgacttggaccatcctgtagaagccaagtctgggatttgtcctgtttgtaccatgtggataggaacaaatatggttgatcatatagcagcacaacacggaaacctgtttaagagtcagctcaaatcaaaatgctacaaggatgaatcctacccagctctttccttttccaaaaagggtgaacactggcaatcgttttctactgggtcatctgcgatgtctacctgacgaggagcaagtgatccatggctgtcatctttatgtcgtgcatctgctgttgatgaacgtaaaaatgtgcagccagattctttcacgtgaagtaagcattgaggaactacactcaaatgataaggtgttagtaagagatgttcaaccgtctttatctgacaaagaccaaatagagaaagcacagcgcagtaaatttgtacagggacttttgatgtctactatccttgatcctgacttctgattgagacgattaaggacatcagttgctacttgctagtttcaattcgatgggtaaaaacaaaggagaaaaatagtattttcaaccttgaaaatgattcatagtcataggatcaatgtttctggtgtatgcagagatacacctagtatagaggaagtaggctatatgtaggaattaaatgtaatgcatatttaagacaatgctatttattagttcagatcaattgcaatatagttgcttactgccccacaccatatatgctttccaggacttttgatgtctactatccttgatcctgacttctgattgagacgattaaggacacctgtcgctacttgctagtttcaattcgatgggtaaaaacaaaggagaaaaatagtagtttcaaccttgaaaatgattcatagtcataggatcaatgtttctgactaatctacatttaggaattaaatgtaatatatattcaagacaatgctatttattagttcagatcaattgcgtacgcactcttataatttttagattaatgaaattcactttgtagcttctgcagtagtgttgataatatacttaatcaggggggaatttaagtttgttctttgtctggaccatatcttcctacatatagtctatataggtacattgaggcaaatgatggtttgagccaaaaact

SEQ ID NO: 83093 - DNA, 184 bp, Glycine max
  Clone ID: PAT_MRT3847_4604C.1
tttccttaccgtgccgccatttgagtgcgcctggagagaggatttgaaattccaagaggcaggccatggttgcgagccctttaaatcattcgccatcatccatgttatactgtttctcctggaaactgttgcaggctctctctacaactttaacttagataatcactctatttacattatctta

SEQ ID NO: 83094 - DNA, 393 bp, Glycine max
  Clone ID: PAT_MRT3847_46050C.1
gacacaaaaaacctcagaactttttggttataggccttctactttaccataacattacaagtttacttgccctggaacggattctgggacccccctaatacagcccaaagacttagggtatagtaaccggcttctaagcttcaaacactttgtagcacaaaacgcaatgcgagattttgcatgctctcaagaaaattacactgtaatataagacttactgtgctgttcattgaccaagctggtcccaatgccaatgcaatatgcactggtgcaaaaccttcttgagatgttaaagaccggtgccaatgctataattgccgtggctatcatgtaccatgatgcctcgccctgcatgaataggtggctcaacaagacaatgataaagggcgcacc

SEQ ID NO: 83095 - DNA, 841 bp, Glycine max
  Clone ID: PAT_MRT3847_46051C.1
gcacgagggcatgctatgctattgctatggagaagaaaacaagtgtccaagagtcacgtaaattcaaccaattatttttccccaagcaacacaacaaagtgtacccaattaggctacagagaagctcttcaacttcatccttgtcttcattatcatcatcattgtcacaaaagtcagatgactcttctctaacagattccttgaatctagcagatgagagttttcaatttgcactgaatttgatttcgccgcgttgtcaaagaagagaaccagaaattattaatgatgcacaccaacaacaaattccacagactgctgaggctggtgaattgaaaaggtgcaactggatcactaagaactgtgatgaggcttacattcaatttcacgatgagtgctggggagtcccagcttacgatgacaaaaaattgtttgagctgcttacactatcaggattgctgatagattacaactggaccgaaattctaaaaagaaaggaaattcttagaaaagtttttgctggatttgatcctaatactgtggccaaaatggaggagaaagaaatcatggaaatagcatcaaacaaagaagttttgttagccgattgcagagttaggtgcatagtagacaatgccaaatgcataatgaagattgtgagggaatgtggatcattcagctgctatatatggggctatgtgaatcacaaaccagtgattaacagatacagatacccaagagatgtccctctaaggactacaaaagcagataccatcagcaaggacttgataaagcgtggctttcaatttttgggtccagtgatagtttattcttttatgcaagctgc

SEQ ID NO: 83096 - DNA, 273 bp, Glycine max
  Clone ID: PAT_MRT3847_46052C.1
ataaagaagaaatagggacataaaattattcaaatttatcctttatgttaaaaccaagttttacatctcagctttcgcaaaagttaaacgaaaaaacttttaaagaatttgatattcctagggtgatttttttttatttgagaagtctgattcacttacttcttttttttaatcttttttataggggccaattgataagtggttcccacttgaatcatattccatatttgttgctatcatccaatggaagtgttttttttacccatcttgatt

SEQ ID NO: 83097 - DNA, 486 bp, Glycine max
  unsure (1)..(486): unsure at all n locations
  Clone ID: PAT_MRT3847_46053C.1
ttttgctacattttccacttccaccactgcaatttaaatccgaagtacaaatggcccattataaaataaaataatataaacaaaacgttctttttctttctcctgtgaaaaaggcagatgccatcattatccagatttatcacaaatacgacattgcactccaaaagtgttatactcctttaagcggtcagtttttttttttctttaaagtatcctcctttgaaagcaacattgttggtgacacagttgaaaactaaatgtgaacactttttagtagagtttcgagctttggttcattacattattaggagactaactcctcctattagattcaattcccnnngatctttaagtggccagctagtcactctgaagatcaaagcttttagaaatgttatgtaacctctcatatttaaccaaactagtcctttctataacaataaataaataaagaatgcaactgagagaggatcaattatccattca

SEQ ID NO: 83098 - DNA, 300 bp, Glycine max
  Clone ID: PAT_MRT3847_46054C.1
ctaatcattacatattcaaatatacctacagtccatcgaactttttaataaaatcgattcagtgcctgctgatgcgtctaattcacattctatcaatgaaccggctaattctagtacggctgaagagaccgacagacaaacttctgattctgtagcctccacgcaagataattctgcacatgacgcataatctaggctatctgacaccggcatatcggcctgggccacaaactcgacaatttctcacgcattttctggccaccaagacaactgatcaagtggcaatgcttggaaatcaac

SEQ ID NO: 83099 - DNA, 232 bp, Glycine max
  Clone ID: PAT_MRT3847_46055C.1
tgtcagtaccaggcatcatataacagatttttcaagaagccaagtcactaaagggagttactggatggacgggggatctcatctatgcatccatatgcgctaagccagctaaggatccctacaaggcccacaacagcatcctgaacccaaacggaaccataacacgcgcaatcattccgccacaaagcctatcctcaccggatcccactctaaccacagcggtgaattacaa

SEQ ID NO: 83100 - DNA, 248 bp, Glycine max
  Clone ID: PAT_MRT3847_46056C.1
cgagcctaagcattcagagtcggggcctgacgacccttgcatgtatatacttcacgccaagattgcctgggaagactctgtctatagatacagcactcataccgcgggaaagaagctttctgatgctcataccgagagatacaattcgtgccatctttgtgtggttgagcggtatcacagacgggagagcacggatcactagctctctcattcggccagagtggccggcagctgacatcccccttgat

SEQ ID NO: 83101 - DNA, 300 bp, Glycine max
  Clone ID: PAT_MRT3847_46057C.1
gacatgtggaacggatagactcacacaacggcgtgctccttatcacccaataattccactgttaccatgtctcctgcccactgaagtcgaagccctaatggcgtcacaggttcttcgacaccacgcactgtttgcgcccaagcaaagtctcccttcatcatcgcgtgacttcacgtcaatttcgacggttccctccgacctattgctattcgcgttgctctcctctcactgctaagcctagtttcgctgttagagctgactccaatgtcgaatgctctggttaagccaccgcagaagttc

SEQ ID NO: 83102 - DNA, 255 bp, Glycine max
  Clone ID: PAT_MRT3847_46058C.1
ccaccgtccgctctgttctgtcttgttttcggctgattttccaacaagctcgggcttttttatggcaggtttactcatcatgggtaatgaaaagactcacatcaacattgtcgtcattggacatgtcgactctgggaagtcaactactcactggtcatttgatctacaagcttggaggtattgacaagcgtgtgattgagaggttcgagaaggaggctgcttagatgaacaaagaggtcattcaagtttccctgg

SEQ ID NO: 83103 - DNA, 481 bp, Glycine max
  Clone ID: PAT_MRT3847_46059C.1
ttattttttttttttttttttttttttcgcaaccaaataaaccgggggtggggttaaatattggatgaatgtatgtaccttttaattgctgtgaaactaaaataaacgggcgtccctgttggaccaaaaggctgggtatcctacctcgatccacactaacatgggttaattcatgttatgctcaacaaccacaaaatcctaggtgggactcactgtgcctttagctataatttcacccaccctttcttgtaggcaagggttgtcatctaaaatgaacagcggcctttattgttcaccaagacatgggaagggctctttgcgtgaaacaaccgtctaactcaagtttgattatgttcctggggcacctggagaaaactggccaccattatgagcagtgccaacttgaacagagaagaccatatatcaagtgcaagggtctttaaactgcccatggctttggtatatacccttgcgcccaaaa

SEQ ID NO: 83104 - DNA, 249 bp, Glycine max
  Clone ID: PAT_MRT3847_4605C.1
aacactgcaaaatcttgcaatctaagtctcatctaagtggatcagatatttagtatttcataaggaaccaaagcatccatccctaacttccgatccttcatccttacttaggcttccattccaattcaagcattactaatctgcaagataaagcaaaaagtactacagaggcaagagaaggcaaattaagaggaatttcaaaaaagttgttttggttttttttgggtattgggtttatttgaaagagtg

SEQ ID NO: 83105 - DNA, 421 bp, Glycine max
  Clone ID: PAT_MRT3847_46060C.1
ctgcattgccaaatagtaacaaatctatagttactatataagtatctacactaagaactcaaatgagtgctacttcctctagagagaaggaaaggttataatcatattggataaagtattttaggtagtttttaatttatttattatttaaaaaatttatttgaatgtttagtaaataagtttttttttagtaatttttaacgtttttttaaatgttatttgaagtagtattttttaagatgttagcatttaacttttaattttttatattttcttccacttttatatctaatatatttatttttctttcttattacttttttaaaataaattatgattttattagttttttatcattttgtattttttaattatttcaacaactaattttattaaatacttttaatttaatatgttgttg

SEQ ID NO: 83106 - DNA, 2959 bp, Glycine max
  Clone ID: PAT_MRT3847_46061C.1
cggtcccccacgcccgggcccacgcgtccgaagcggacctctctcttcttcagtggtggaagctactagaacactagtttgttgagcactgcgatgaggaagtggacggttgcttccgctctccttcttctctctctcctctttctctttgcagatcaaggtcgaaagtttcaggcgaatgccgagggagattccgacgagcttgtagatccacccaaggtggaggacaagatcggtgctgtgcctcatggcctttcaaccgattcagatgtcgtcaagagggaggcggagtcgatctcgaagagatctctccggagcaacgcggagaagtttgagttccaagcggaagtgtcgcggcttatggatatcatcatcaattctctctacagtaacaaggatatcttcctcagagagttgatttccaatgcttctgatgctttggacaagattaggttcctctccctcacggataaggaggtgttgggagaaggtgataacaccaagcttgatattcagattaagttggacaaggaaaagaaaattctctcaattcgagacagaggtatcggtatgacgaaggaggatttgataaagaatttggggacaatagcgaaatctggaacttctgcatttgttgagaagatgcaaacaagtggagatctcaatctgattgggcagtttggagtcggcttctactctgtttatcttgtggccgactatgtcgaagttattagcaagaataacgatgataagcagtatgtatgggaatcaaaagctgatggagcattcgctatttcagaagatacatggaatgaaccacttggacgaggaactgagattagattacacctcaaggaagaggctggggaatacttggaggagtctaaactgaaagaattggtgaagagatactctgaatttattaacttccctatctatatttgggcaagcaaagaagttgatgtggaggttcccgctgatgaagatgattccagtgatgaagaggattcatctgaaagcagctccaaggaggaaagcgaagatgaagatgctgataaaagtgaagatgaagaaaaaaagcctaagacaaagacagtgaaggaaacaacttatgagtgggaacttttaaatgatgtgaaagctatatggctgaggaatccaaaagaggttacagaagaagaatacaccaaattctaccactctcttgccaaggatttcagtgatgagaaacctttagcatggagtcatttcactgctgagggtgatgttgagttcaaggcagtcctgtttgtaccacctaaggcacctcaagatttatatgagagctattataacgcaaacaaatcgaacctgaagttgtatgttagacgtgtgttcatttcagatgaatttaatgaactgttgcccaagtacctaaactttttgctgggtcttgttgattctgacactttgccacttaatgtatcacgagaaatgcttcaacaacatagtagtctgaagacaatcaagaagaaacttattaggaaagcccttgatatgatccgcaggattgctgatgaggatcctgacgagtcaactgacaaagaaaagaaagaagatgcatcctctgacaatgatgagaagaaaggtcaatattctaagttctggaatgagtttggtaaatccattaaacttggtatcatcgaggatgccaccaacagaaatcgtttggcaaaactgctcagatttgagagcaccaagtctgagggtaaattgacatctctggatcagtacatatctagaatgaaaactgggcagaaggatatcttttacataactggaaccagcaaagaacaactggaaaactctcccttccttgagcggcttaagaagaaaaattttgaggttattttcttcacggattcagttgatgagtacttgatgcaatacctgatggattatgaagacaagaagttccaaaatgtgtccaaggagggtttgaaacttgggaaagattcaaaagacaaggaactgaaggaatcttttaaggatcttaccaagtggtggaaaactgctctttccaaagacaatgttgatgatgtgaagatttccaaccgattagataacactccttgtgtagtggtgacatcaaaatttggttggagtgctaacatggagagaatcatgcagtctcaaactttgtcagatgctagcaagcaagcatacatgcgcggcaagagggttcttgagatcaatcctaggcaccctattatcaaggagctccgagagagagtagtaaagaaccctgaggatgagggtgtgaagcatacagcacagctgatgtaccagactgcactctttgaaagcggcttcctgcttgatgatcccaaggattttgcttcccggatttatgattcagtgaagactagcctggacatcagtcctgaagcaacagttgaggaggaagatgacactgaagtagaggctgaaagtgacgcgaaagaagattcaaagcctgaaactgatgctgttaacgatgataatgatgtcaaggacgagttgtagattttgcatgacatccactatttaatgacggtgctgccgattcccctttgtttgttttagctttaagatagaccgtaaaagacttctttagcatgagttttgatttcataagtagttaaaggagaacattagtcttactgtaatcatactatccccttggaattttgccttaccaccttagtcttaacacattgttcaagttctacaaaatctgctttgtcttttttatttttcatttttagcagcagtacgacgcccctttagaagttaaaattatcaggtcttcaacgcctgggtaacagttaaaattatgaatgcgaaaatgtgtggccgaaatctcgaatgtccttgtaatgggtttatatctacatacaggtcgttaaataattacccactccttgacaagtttacgttc

SEQ ID NO: 83107 - DNA, 3228 bp, Glycine max
  Clone ID: PAT_MRT3847_46062C.1
cacccgcggccttggtcaaggttaactcggccacaacggatctcttcttcagtggtggaagctactagaacactagtttgttgagcactgcgatgaggaagtggacggttgcttccgctctccttcttctctctctcctctttctctttgcagatcaaggtcgaaagtttcaggcgaatgccgagggagattccgacgagcttgtagatcctccgaaggtggaggacaagatcggtgctgtgcctcatggcctttccaccgattcagatgtcgtcaagagggagtcggagtcgatctcgaagagatctctccggagcaatgcggagaagtttgagttccaagcggaagtgtcacggcttatggatattatcatcaattctctctacagataacaaggatatcttcctctagagagtttgatttccaatgcttctgatgctttggacaagattaggttccttttccctctacggataaggacgttttgggagaaggtgataacaccaagcttgatattcagattaagttggacaaggaaaagaaaattctctcaattcgagatagaggtatgtggtatgacgaagataggatttgataaagaatttggggacaatagcaaaatctggaacttctgcatttgttgagaagatgcaaacaagttggtagatctcaatctgattgggcagtttggagtcggcttctactctgtttatctcgtggctgactatgtctaagtcattagcaagaataatgatgataaacagtatgtatgggaaatcaaaagctgatggagcatttgcaatttcagaagatacatggaatgaacctctagggcgtggaactgagattagattacacctgcaaggaagaggctggggaagtacttgcaggagtataaactgatagaattggtgaagagatactcttaatttattaacttccctatctatatttgggcaagcaaagaggttgatgatggaggttcccgctgatgaagatgattccagtgatgaagaggattcaactgaaagcagctccaaggaggaaagcgaagatgaagatgctgataaaagtgaagacgaagaaaaaaagcccaagacaaagacggtgaaggaaacaacttatgaatgggaacttttaaatgatgtgaaagctatatggctgaggaatccaaaggaggttacagaagaagaatacaccaaattctaccactctcttgccaaggatttcagtgatgagaaacctttagcatggagtcatttcactgctgagggcgatgtcgagttcaaggcagtcctgtttgtaccacctaaggcacctcaagatttatacgagagctattataacgcaaacaaatccaacctgaagttgtatgttagacgtgtgttcatttcagatgaatttaatgaactgttgcctaagtacctaaactttttgctgggtcttgttgattctgacacattgccacttaatgtatcgcgagaaatgcttcagcaacatagtagtctaaagacaatcaagaagaaacttattaggaaagcccttgatatgatccgtaggattgctgatgaggatcctgatgagtccactgacaaagaaaagaaagaagatacgtcatctgacaataatgagaagaaaggtcaatattccaagttctggaatgaagtttggtaaatcccattaaacttggtatcatcgaggatgccaccaacagaaatcgtttggcaaaactgctcagatttgagagcaccaagtctgagggtaaattgacatctctggatcagtacatatctagaatgaaagctgggcagaaggatatcttttacataactggaaccagcaaagaacaactggaaaactctccattccttgagcggcttaagaagaaaaattttgaggttattttcttcacggatccagttgatgaatacttgatgcaatacctgatggattatgaagacaagaagttccaaaatgtgtccaaggagggtttgaaactcgggaaagattcaaaagacaaggaactgaaggaatccttcaaggaccttaccaagtggtggaaaactgctctttccaaagacaatgttgatgatgtgaagatttccaaccgattggacaacactccttgtgtagtggaaatatcaaattttggttggagtgctaacatggagagaatcatgcagtctcaaactttgtctgatgctagcaagcaagcatacatgcgcggcaagagggttcttgaggtcaatcctaggcaccctattatcaaggagctccgagagagagtagtaaagaaccctgaggatgagggtgtgaaacatacagcacagttgatgtaccagaccgcactcttcgaggctcgcggtgtaagctctttcttctcttcttgtgtatcttgtgcaccgccattgttgacgatggcgagttcatgtcgaagctcgcgaaggcgctaaggccgacatcgtcggggtggactgggagcagcttctgcgactggaagggcgtgaagtgcaacgccaaccgcatcaccacaatcaacatcgcttcgcaatcactcggcggaacgcttcctccggatctgaactcactctccagaacaacgcgctctccggcgcattgccttcacttgccaacctctccatgctcgaaagcgtgttccttagcagcaacaacttcacctccgcccccgatggttgcttccagggactcaccagcttacaaaccctcagcatgaccgataggatcaacctcgctccatggacgattcccgtcgagttgaatgataacaacaaccttgtcaaactcgaacttggaaacgcaaacctcatcggtaccttgcctgatgtattcgacaagttcgtgagtttgcaggagcttcgtctctcttacaacaacctcaccggtggcttacccaaatccttcgctagatctgcgattcaggatatgtggctcaacaatcagaacggcttcgggttttcgggtaccattgaggtgtggtgttaaatgttaatgagtgaacagagatctgtttccttttaaaaaaaaaaattgagatctgttttggaagatgaagattgaaggaagaagaagaagtttggtgaagaactactggattttaaaacaaatagtggccgttttgagtgactataaattatcaaatatgtaatggacacaaagtctaaacaaattattttaaaatttattaaaaatcaaatacaaaattcggat

SEQ ID NO: 83108 - DNA, 491 bp, Glycine max
  unsure (1)..(491): unsure at all n locations
  Clone ID: PAT_MRT3847_46063C.1
nctgtctcgcagagaggaatcagaagggaatgggctctcagctcgcggccagagccgccggcctcaaagacatctgccccatctgcaaggttttcgtcttttctttcttattcgttcttcccatcattcttatcattattttctaaaaaaaaattgaattttgattattgggtacctctgaatttgattaccctgtctgcctgtaatcacctggcggtgttattaactttgtattgtagtcattggctgttgggttatgttatggcattaaatcagccgatctgggctttgtgattattactttttttctttctgctttaagaaaataattatttgtatttttctaattccaaagtgacgctctttcagcagctcttaaaggtgaaggctttgttgatgatacaaggaggctggcatgattagtatttggcttcaagcgattcaattattatttggttaactataggcctagtgggtatcaattattaaca

SEQ ID NO: 83109 - DNA, 480 bp, Glycine max
  Clone ID: PAT_MRT3847_46064C.1
gttgcattattcaggatggaatcttcggtgccctttcctctgattttgctgctgagttacgtataccactcattcattttcgaaccgtcagttcctgttgcttctgggcttatttctgtgttccaaagctcttagactgcaaagaacttcccattaaaggtatggagtactcagattcaatattcatcgctagctcccactctacttatgccatttttaaatctgtgcttttcattctgtatatgttccaacctctgttgttgagaaattacagaatacagaacaaaattttctttagcagaaagttgtattcatttttaattaatttcccccctaattactcgaattacttgtacatatacagtatagagtcaatttcggaagatgttattaatttatatggtagttttaactattggtcgttgtcgcattgcgatttcgtcccgtgggcaaatatggtcaatgcaatcttaattgcag

SEQ ID NO: 83110 - DNA, 688 bp, Glycine max
  Clone ID: PAT_MRT3847_46065C.1
gttgcactgtgttctcatgtaatagattaacgacagtgggagaattaaatttccttaacaatcacggaccaccgacggaattaatctctcacctaatggatttagacggattaacattttgaaattgactgtgttcaattcaaagtttcaaaccatttttcatctgtatgataatagtttatgataaatttcttcaatgatattatacattttatgaaattttttgtatgaacagttgccaacctttagtgaacggaagaggtgctaagaaacaaaggccaatgacagatagtgccttagcatatctcaccacagtcaaggatgcatttaaagatgatagagaaaaatatgataaatttctggaactcgtgaaaaatttcactgctgaaagaggcatagaagaagtgaaggagctgcttaaagggtatagagatctaatcttgggatttaatgttttcttgccaaagggatatgaaatcaaacttccattggaggatgaacaacctccagaaaagaagcttgatgtgtttgttaaagctaaaaaacttctgcacaagattaaggctcgattccatggtcaagataatgtttacaagacatttctggccatattaaagatgcacaaagatggaaccaagtctcccactgcagcttacggggagattactgcacttctttagcaccatgc

SEQ ID NO: 83111 - DNA, 439 bp, Glycine max
  Clone ID: PAT_MRT3847_46066C.1
gccttgcttacgtgctagggaggacatttaccaggactttatccgccaatacattcacaaaaacatcgaatggaactttggaggcccttcaagttctcacgctgactacgacttatttgacgaatgcttagccgaaggctggcctccggtatcacttgcagaatcagttcaaactttagtgcagacttgagagatggaatggttccacgaggtggatctcaaggatgacttatcggaggacccagcaaaataccctttcagcctcacctgcaggctgcctattaggtaggctgataaatggaaacttggaaggaggcttgttcgactgtttgttacctttatgccagcgtctctgccgccttacctgcggtctgacgacacatctgattcatccgataatgccttcactacggccttcccaagtacatttgctttggaa

SEQ ID NO: 83112 - DNA, 268 bp, Glycine max
  Clone ID: PAT_MRT3847_46067C.1
ggacccaaaaggttgtcacgaataaggcgatggggttctatgatggggacccgataacaggtaacataaccaattggaccacaccttaatctaggcttgctgatgacacgactaacattatgcctcctactggttgatacttgagcatcaacaaatacactttaatgctcaataactgatttcttgatccgaatctacgagagcagctacattcataggtcacacatatatcatgaaaccgatgaaccaatggattacatgactgaat

SEQ ID NO: 83113 - DNA, 212 bp, Glycine max
  Clone ID: PAT_MRT3847_46068C.1
aattcggctcgagtctacattcacacacagcttgtgtgacctattcctgttgacatattcacatgctacctagctgcaaatgaagcatttttgtatggaaatccatgatggttatatcccttttatactctctctcttattaatcaactcataggtcatttgcctaggcttattcaattatgcacgatattttgatcttaatcaaaatcata

SEQ ID NO: 83114 - DNA, 239 bp, Glycine max
  Clone ID: PAT_MRT3847_46069C.1
atcgctgcgaaaagaccacagaaggggataggagtaaacaacgtaataatttcttgcggacaaaggatatgtggcacaggtgagacacaaccttggactgaggagcacaatagtcaagatactctgtgtataaatagataagggatcttggctttatcacagcaagtgaagaggtggtgaaccgaacacaatggatagaaaggtttgctataaagaggtggtggctgatgcgacccttt

SEQ ID NO: 83115 - DNA, 258 bp, Glycine max
  Clone ID: PAT_MRT3847_4606C.1
ctgtgcggcgctcgaggcggccgggttcgaagagcaggatggccgagtggtctatggcgccagactcaagttctggtcctcgtgagagggcgtgggttcaaatcccacttctgacaattcttttttcttcttttttaaaggtttgggctatgttggattgtggcccatttcgaatccattccgttggacccagatggtatctatgagaaataacgagttgttcacctcaaaagtaaataaaataatagtttccatttg

SEQ ID NO: 83116 - DNA, 447 bp, Glycine max
  Clone ID: PAT_MRT3847_46070C.1
ggcaccccgacactcgatatatgtatatatgtatatttacattgaccgactggggcacgtttgcaatgtaagtctaccctttaccaccccctatgagtccttgtaaaacgtttttccgtcgtcctcgccttttacaggtacgcgcctcccctgaacagccttttttacttaaggaactaagctttccatgaagtcgcgatcgcgtccaactagcgtaacagggttggggtcctttccccatcgggggtagcttcccaccttgaccccttttggctccgccttggcagcgagctcggtcaaatatccagcaacggggcttttggccattggagtcgaaatgaggatccgcaacacgcctttaccctttggatccgtcaatctagggaggatgcggggctttagtccgtctagcatcgcttaaaagaggcgaggcactccgggcaaaat

SEQ ID NO: 83117 - DNA, 379 bp, Glycine max
  Clone ID: PAT_MRT3847_46071C.1
tgaagagctggttgaatagatggcatcatggatctaggtggaggcattggaagggcaccactattatgagcataatattgtacaggaacacaaggaatattcattcccacaccacatatgatctcagttcacttctgttctagttccacgaccttatgttcttctttgtgctccaccatcatttatgtctatgatgcatacaccatttcaggcttatggctttgctatagttcgagctacaaatgatgttgaacctccagttcacgaaaaacatataagagctatattttcagctatctcagctacaagacccagggctgatgttgcctattgtatacacgcacttgccaggcggttatcaaagacacataactgggcg

SEQ ID NO: 83118 - DNA, 163 bp, Glycine max
  unsure (1)..(163): unsure at all n locations
  Clone ID: PAT_MRT3847_46072C.1
tttcgctcgatgtttatagatgtaggagaccggaatagccaaccaaacccgtcgtcgtntagatatctatctactccaccaaagaaaaccccataaccctagaattcaagaaccgatagcaatggacttccacaagnactattacttggagaaaacttggggg

SEQ ID NO: 83119 - DNA, 407 bp, Glycine max
  Clone ID: PAT_MRT3847_46073C.1
cacccccaagggaaaaagggttcctatgaattactttccccttaaaggggtggtcatggccccaccttcgcctttaaagccttccttattcgcccacctaaattcttccagaaccgggaggcgggtaaccttttgaaaccaaggcgggtccgggtaaaaggccaccatttccggccccaccaaccacgggaaggcaaggccaccacctgggattccttcactttccatggtggccagcggtaattgtaattccaaatggatggaaaatctataagttatttcccctgcaggaagcgacccgttaatgccagctggcttattctgggcctctgctggcatagcaaaccatttatcgtttcggatggaagaccctgctgatagaatgggcactggatcaagggtagaga

SEQ ID NO: 83120 - DNA, 683 bp, Glycine max
  Clone ID: PAT_MRT3847_46074C.1
tggagagtagtgcaataactcattgtacgttcctagtgtgtgggagacaaagaaagatggctaagtggtgtgttttggtgttggttcttgctctggctctggccacaagtgccagaaatgttcccaatcccaaggatgctggtctcaaggaccagaagaacttcatcagctatggtggagttggtgcttattcggggattggtagcaatgggctaccttttggaggagttggtgccggaataggtggtggttttggcggtggacttggtggcggtctcggtggcctcggcggcactaccggtggaatcggagggttcggtggtacaggtggcggtgtaggtggtggtggcgttggaaccggcgttggtggtggcagcggtgttcttcctttcccttgaaatgatgaacatgcatgcatgcatggatgcgtggctcctagcttcttcacgtctttctttttcgttcgggaaataattgtggtttaatttgtgcatgtaagtgtcgttagtcgttcaagctttctagtgtttctctcgcctgtggaaagtaaaaaatagttataatgtgtcattctgtctttcatttgcttaggttttgtgtcaaccatagcactcatatacgtggttcttttacatacgtggttctttcatttggaagtgatgcaatcaatatgagttacattt

SEQ ID NO: 83121 - DNA, 397 bp, Glycine max
  Clone ID: PAT_MRT3847_46075C.1
gtaccggacctgaattcccggctcgaccgacgcgtccggccacgcgatcgcattagtgtatgcgagctatatgaatacaagtagagctaactagggaagagataatacagacggaggctgcactaagactgactgcacgcacctcgcatgcatcctcactcattgcttcttattcatttcattgatcgtgcttcaaacaaactcactcactcacatgcaaacactcgctatccatttccttctgatggaggaaagaaagaacgtcactcaacatctatcattattcatccaccaagctggctcacatacaaccagctcactgacatacaatataccacagatacgtattccatgaatcatgcacatgccacatactcaattcattcacaagccatct

SEQ ID NO: 83122 - DNA, 1402 bp, Glycine max
  Clone ID: PAT_MRT3847_46076C.1
agcaaataaatggaactcatatattgagtacattacttccatgctaaatatgaaatattccatatgtaaaagaaccacgtatatgagtgactatggctgacacaaaacctaagcaaatgaaagacacagaatgacacattacaactattttttactttccacaggcgagagaaacactagaacaaagcttgaacgattaacgacacgtacaagcacaaaccacaattatttcccgaacgaaaaataaagactagtgtaatccaaagaaacgtgacggagcatatatgcatgcatgcatgcatgttcatcatttcaagggaaaggaagaacaccgctgccaccaccaacgccagttccaacgccaccaccaataccgccaccgacaccgctaccggtaccgccaaaccctccgatcccaccggtaggaccgccgaggccaccaccaagtccaccacctccgccaaaaccaccacctattccggcaccagctcctccaaaaggcagtccattgttcccaatcccggaataaccaccaactccaccatagctgatgaagttcttctggtccttaagaccagcatccttggggttgggaacgtttctggcacttgtggccacagccagagcaagaaccaacaccaaaacacacatcttagccatgtctctcccacacactaggaatgtgtgttttggtgtacggttcttgctctggctgtggccacaagtgccagaaacgttcccaaccccaaggatgctggtcttaaggaccagaagaacttcatcagctatggtggagttggtggttattccgggattgggaacaatggactgccttttggaggagctggtgccggaataggtggtggttttggcggaggtggtggacttggtggtggacttggtggtggacttggtggtggcctcggcagtcctaccggtggaatcggagggtttggcggtaccggtagcggtgtcggtggcggtattggtggtggcgttggaactggcgttggtggtggcagcggtgttcttcctttcccttgaaatgatgaacatgcatgcatgcatgcatatatgctccgtcacgtttctttggattacactagtctttatttttcgttcgggaaataattgtggtttgtgcttgtacgtgtcgttaatcgttcaagctttgttctagtgtttctctcgcctgtggaaagtaaaaaatagttgtaatgtgtcattctgtgtctttcatttgcttaggttttgtgtcagccatagtcactcatatacgtggttcttttacatatggaatatttcatatttagcatggaagtaatgtactcaatatatgagttccatttatttactaaaaaaaaaaaaaaaaaaaaaaaaaaaaagggcggccccagactag

SEQ ID NO: 83123 - DNA, 172 bp, Glycine max
  Clone ID: PAT_MRT3847_46077C.1
acgtaaatgctgactctgacattattattatatttttccggatcaaattttgctcaggaacaggtcttaattaaataatcgcctctaatgtggaagactctcagaaaagcttgctgcaaattctaatacaaatacacaatgagtttcactaccttcacaaacatattcacat

SEQ ID NO: 83124 - DNA, 552 bp, Glycine max
  Clone ID: PAT_MRT3847_46078C.1
ccacgcgtccgggggcgcaggctggcggcagagaggagaaccctgctctggggtgacatcgtacaggctgcctacaactgtgtgttgaagagtctatggtgcaagaagcctgcggtagccatgctcatgcttgcgagggttgaagccctgcgtagtatagacaaagcccttccttcgcaggatgacatgaggctacccgccctataccaccgatgcctgttgggcttgaacgatcaccacggctatgtgaattaccagcttctggccaagatgagaaggacaatacaaaccatttgcgactggtatggtcaatggtaagcccacaacccaaagagcatcccatgtgaatttttaaaaaatcaagagggcatatggatatgatcgagctttacagaagctggctggactgatggtactaaattcttactgggtgaatgaggactctacttatgaaaacgttgacgggattatgatggatgttagctgatgctgctattagaaatgatcccagactcacttggctagacgatccagcgcacaagcacagagcag

SEQ ID NO: 83125 - DNA, 272 bp, Glycine max
  Clone ID: PAT_MRT3847_46079C.1
aacaatgaaattcatttttttaaaaaaaatggtaatacaaagaagttaaaaaagaaaagggagggggcctttttaaggggcctacaagttttgcagggatttttttttttccaaaacattagcatgttcaataatggtcatccccccgtaatttacaagctagctgcaaatccaatggcccgctttattgcattaaaagcaatttccatttttttggggaggggagaatttcccctaattagctggggcatttttgaaccccccgactggtt

SEQ ID NO: 83126 - DNA, 442 bp, Glycine max
  Clone ID: PAT_MRT3847_4607C.1
gaccacccggttcaagaagaaccggaagaagcgcgggcacctgagccccgggcatgggcggattggaaaggaccggaaggaccccggggggcggggaaacccccgggggatgcattaacacaggatcctggtcgacaaggaccattcgggcttttttgggaaggggggaatgagggactttcattagctttgcaattaaatctacttccccattgtcaacgttgaaaagctatgggcttttattccccaagacgcgaaggaaaaagcccttaaattgaagggcaatggcccttttattgaccttacacaagacgggttctttaaaggccttggaaaagggggtctggcccaaaattaaccttttgttggtaaaggcaaacttatttccaagatccgccaaaagaagattaaagaaaccgggggcgctggtcttcttaccggt

SEQ ID NO: 83127 - DNA, 364 bp, Glycine max
  Clone ID: PAT_MRT3847_46080C.1
atcatatattacatattgaacactgtgtttatgctaaccaatgagcacttctaggccggcatcacacaaacgctgatggaataattggtacgcgaaggcttaaatgctgcccatactgaagcaaccgatatcgactgcgatatcacctttcacttgcatcacctcactgtattaattatatgaaaaattcctgatctaatttatgagtaccctttacaatctatcactttatctataatctcataacacagctttgcttgtagatcacataaaccattttacaaatatcattgctctcacacaccgcataatacatattccaaactctcaccttgattcacagttaccataatgcgttctacat

SEQ ID NO: 83128 - DNA, 1047 bp, Glycine max
  Clone ID: PAT_MRT3847_46081C.1
aattcggctcgagcaacaacacttctcttcttctttacacaaactcaacaacactcattcattgtgaaagtttcaaactaacacacacacttaaacaaattaaagaaagaaccattattacttcatcagttttttcttgctcagccaaaatgccgagaaaaggaatgagaagcattttcttcacatcaacgcccacggcatcactaccacctccttcccgtcaacgcactttctcagactcgttaatggacgaaaacatagaaaccgcagagaagctcataacgaaatgggacgattccaaagtcacaacaacaacgcaacttttcagcggcacgcgccaggaagccaaacagtacctaaacgccgtgaagggactacaatccgctatgcagtacctcgtcgcacaggattccacctccagcaccctcgtgcgcgcgcagttcctcatgcaactcgccatgaagacgctccagaaagagttctaccagattctatcctccaacagagaacacctggatcccgaaactgtctccacgcgctcctccgttgaccaccgcagcagcgtctccgattacgacgacgaaatctcaatcaccgaggacgagttccgcgtttccgagaccgagcgcgtttccatgctcgccatggaggatttgaaagccatagctgagtgcatgatttcctccggctacggcaaggagtgcgtcaaggtttacatcgtcatgagaaaatcgatcgtcgacgaagcgctgtatcatctcggagttgaaaaattgaacctctctcaggtccagaagctggattgggaggttctcgagttgaagatcaagagctggttaaaagccgttaaagtcgccgtcggaacactgttcaacggcgagaggatcctctgcgaccacgttttcgctgcggattcggggaaaagaatcgcggaatcatgtttcgcggaaatcaccaaagacggcgccgtatctcttttgggatttccggaaatggtggcgaagtgcaagaaatcgccggaaaaaatgttcatgattctggatttgt

SEQ ID NO: 83129 - DNA, 444 bp, Glycine max
  Clone ID: PAT_MRT3847_46082C.1
acggcataatgttgctggccctactatcttttcttttatgaactctgcgcacaaactcttgggcggggaactaatcaattgtggtgatgcactcctctttcatacttcataagaccagacacaactcctaaacctctccctccgcaacctttgatggtgtatacaacagatacagtgttccatgcttcttccccatacatcaccaaccacctcttctgctttctttgcaaggacagaggccagtttgaagacgatataaataagagctttccaagcagcataagaagagtttttgcatatgatgatggaatgatggaaatggcatccacagataacggcaaggtgtttcaaatatgctctatcaccctattacaaaggaaatgactatggtggtcatctcactgaattcaaaggctgaaattgatctcttagaatatgaatgat

SEQ ID NO: 83130 - DNA, 275 bp, Glycine max
  Clone ID: PAT_MRT3847_46083C.1
gatgatcaacaacaacaaccaggaaaagacgttctctcctcatagctaggaaccgcagaaccctttcgcaaaattatacgtagcaacaccttcacaacattctataaacgaaagttaaaatctagctagggttaaagaaatgtccggggtgtgggtagtcacgaatggtgtgtttcgtttggtggaaaaccctcaagctgacgcctcagatgggaggcatgggaacggaagtagctcacagagaaaggtgtgggttcactgccaactggtgaggt

SEQ ID NO: 83131 - DNA, 148 bp, Glycine max
  unsure (1)..(148): unsure at all n locations
  Clone ID: PAT_MRT3847_46084C.1
ggagtgatnanagatgaagaaaatgttggcttgtgcatgctctcaacccccatttctgaaagggacatggtcattccaccaccccttctctccaagcacagttccgcggtgactcagacccactgggccccaccgagtttcctgcctc

SEQ ID NO: 83132 - DNA, 227 bp, Glycine max
  Clone ID: PAT_MRT3847_46085C.1
gcaatttatgtttcttcaactccctgttaaagctagtgcagcttaaggttttggcttgcaatggtgtgttttttctgctctcaagtgagccatttcctttttccctccttggcccttgcatatatattatgtataacataagatgacagcctcacttagtacaaaaatagattactgtttggcttggtcaatggcaattgaagtttcctgtgtcctgtgttagtgtt

SEQ ID NO: 83133 - DNA, 408 bp, Glycine max
  Clone ID: PAT_MRT3847_46086C.1
gtttatcgcttgctgatactgggtatgcatgtgtttctaccatcatatctgtcttcatgcatgaattgggtcatgcagttgctgccacaagtgagggaatacaagtagagtacattgccgtcttcattgcgattctatttcctggtgctctggttgccttcaattatgaatttttgcagactttgcctcatttgactgccctgcgtgagtattctgctggcatttggcacaatgcagttgattggcacactacacggacaattggagtaggacatgaggtctggaggattgtaccagctttcaccaccggtggcccgtgctccattatctctcctaaatttgctcatcaacgtcttagccatcctagtcttgacaaactacgccttttagtttccagtctttcgatcg

SEQ ID NO: 83134 - DNA, 251 bp, Glycine max
  Clone ID: PAT_MRT3847_46087C.1
cttaactgccatatcagaacctccaaaactcatttgaatatatccattttgtttcctctcattaccttcttttttctaattagaaatgaagtttgttaagcttctgtaaagcagatatgtcagatcctcctcctcttcttcatcaagggtctggccatcctgccaccaagccataatcctctcttttagagtcaccaccaccaaaattatcaatgaggaagtctataacgacgacatcaacgtcgtcagcg

SEQ ID NO: 83135 - DNA, 400 bp, Glycine max
  Clone ID: PAT_MRT3847_46088C.1
gtcatcactgtatgacgtcctccttctttgggggggggggggggtaccaaaaaggaattaggaagaaaatgacgcaagcgggtagagagatagcgcacttctaataatgcaagggggggggagtaggctaccgtccaaaagaggtataggcagaacggccacgtgaaaagtgaggtaacaaagataagagcagggaaatcatggtagtaaatacaatgggcataagagccaacgcgatcggttggcaagtataaaacgtgcgagacgaaaaatgtgcgcttatgcgcaccaaacgaggtggcagaggcaaagtaagcgttacggccacaggggccccgtattaaggcctatacggtgcgtagggggcatgtggtggtgcccgcagtaggtgcgggatagg

SEQ ID NO: 83136 - DNA, 446 bp, Glycine max
  Clone ID: PAT_MRT3847_46089C.1
gggggcccttgaaaaacaaaccttttcaaaagggctaatttttctttcccttttttataaaatttctcagctccgggccccctttaaaattccccccaatccaaggtgttttcaaatccctgaaagccggcttttttggggcctcatgatatactcaagggttaatttttccaagcggccccaattagaaagaaacttgtctaaagggggtccccttgaattttgggaaaaccaatttaaagcctgaaagtcctggaatctcctaaaccaaaagctccataacctgtgtttggttggggggacaaccaaaacgggggggggggtgttttattccccaaatgaaagtatgaaaaccttggaactgtatttagcccgccataactgttagggacaggttttttgggactggttataacaccccgaataaattgttgagctgttggaac

SEQ ID NO: 83137 - DNA, 1809 bp, Glycine max
  Clone ID: PAT_MRT3847_4608C.1
ccggccgtccctcgcgttcggataatgacatccattatttccttgtcacatagtcttaatgcagattgatgctaaaacaaagcgctcatagtatcagcgccttgcttttataccaactttttttgctgggattactcaagcaacacatcgtgtccttaggttaggattcttgattgacttcctatcacatgctgctattgttggttttatggggggagctgctatcacaattgccccccaacagcttaagggtttccttggcattaaaactgcacacttcacaacggacactgatattgtccatgtgatgcgttcagtattctcagaagcccatcatggatggaactggcaaactatactcatcggagctagctttttgggttttcttctggttgccaaatatattggaaagaaaaacaagaaattcttctgggtgccagcaattgctccattgatatccgttattttatccactttttttgtattcataacccgttgcagataagctaggagtagtcattgtggggagaactgataatctcacaaaatttagaggggatcttattgctggttttccggtgaagtcctggggttggggggtggtagtggcctcccggcggccttcagcgctgtgcaggaagccacagcaattggaaaaacatttgcatctatgaaagactatcaattggatgggaacagagaaatgatggcattaggaacaatgaatgttgttggttccatgacttcgtgttatgtagcaacaggttctttctctcggtctgcggtaaattacatggcaggctgccaaactgcagtctctaatattgtgatgtcagtggttgtgttcttaaccctgaaattcatcactcctcttttctactacactccaaatgccattctttctgcaatcatcatttctgctgtcatcagtcttgtagactatgaggcagcaattttgatctggaagatagataaatttgattttgttgcttgcatgggtgcattctttggggttgcttttgcctcggttgagataggacttttaattgcagtctctatatcctttgcaaagatcctattacaagtcacaaggccacgaactgcaattctggggaagatccctaggactactgtctacagaaacatccaacaataccctgaagccacaagggttcctggtgtactgattattagagttgattctgcaatatatttttccaactccaactatgttaaagaaaggatattaagatggctgatggatgaggaagaactagtgaaaggagattaccaaacaagaattcaatttttgatggtggagatgtcgcccgttaccgacatcgataccagtggcatccatgccctcgaagagttatttagaagtcttcagaagaaagatgttgagccagcttggtctggcaaaccctggcccaatagtaatagacaagctccacacatcaaactttgctactttgcttggtgaggacaagatccttcctcactgttgcagaggctgttgcatactgttcatcaaagctggctgaagaaactatagattaattttgcttttgatctagagaaaaaaaaatagggacacatatatagatgaaatgttgtgggggaatagaaatagagaccagaagttttcagtttactagagttagttagtgaaggatatatgaagaagaaggtgtgaaggatgagaagtgagatgagatattggtcactacaaaaagctatagtagaagaaagtggcctatccgattctgctacagttagttagtgctactactagctccaccattctta

SEQ ID NO: 83138 - DNA, 448 bp, Glycine max
  Clone ID: PAT_MRT3847_46090C.1
ggctgagaaaaaaaaaaaaaaaaaataatataaaaaaaaaaaaaaaaaaaaaaaaaaaaaaaaatagataaaaaaaaaaatagagaaataaaaggggcgggccccatttactggagcgcccccccgcgggaacaaatttctccctcttgcccttgggtggcccccttttccttttggggggcttatttgtaccctgggggaaatgtgtgatcactgtcactattctcacgcgaaattcgcgttccgcgcacataatgccacacctttcgggcccctagagtctgatgtaactcccttggtgccttttgtgcgccctcccccccttccagttggcaaccctctctgccccctttccaaattgaataccccacccccccgctagatgtttttatctccctcccccccggggggggccttttttcttctttgccacgggggactttttttt

SEQ ID NO: 83139 - DNA, 303 bp, Glycine max
  unsure (1)..(303): unsure at all n locations
  Clone ID: PAT_MRT3847_46091C.1
ttatttttatatttttttttttttttggtttttaggaccccataagaaaaataagattttaaaaaataanggatatggataaagtgggttacatttgaaagggaccacatatgtgaagatattcttaccgctctcataaatttattacttaatatatagccgcactttagattcctcccaatttgggaaggtgcttcaaagcattagcacatgttttcatgtgttggtacaaaatgggtgcacaagagggctttcatttgggacaatttcatttctttggtaaattcctggaccttttaataa

SEQ ID NO: 83140 - DNA, 259 bp, Glycine max
  unsure (1)..(259): unsure at all n locations
  Clone ID: PAT_MRT3847_46092C.1
agaaaagcctntttttatttttttttttttttttttttttttttaaacaaaaaaaagacctccctttatttcttattctaataagataccccccaaaaaaagcacaaggggccccaaacggggatacacgggaaaaattggtagttttcttgtgnggggaggggcgaaccacaaagcttttatttagggacaaaaacaaattttgccctggctatataaaggggtcaaaaattaaaaagcattcaaccggacccgtggg

SEQ ID NO: 83141 - DNA, 390 bp, Glycine max
  Clone ID: PAT_MRT3847_46093C.1
ttctaacctaaccctaacataagtaacggattcagtgtctcgaacaagcagaggaaggggccttttctaaagactctacaaggtgcttatgctccggaactgcgtctacctcaaatcgatgatgggcgacgctttccttgtagagcgcgctgcgcattaccgacttctcaagatctggtagcacaatcacctacggaaacgctataactacattcatgcactacggcatactcattgagccgagcttacatgacgagtcatataatgtgctcagctctagcaacttgataactgctgtaagtgcgtaaaagcttgatctgaatgactattcggaaatctacagaatcgaattagtatacagttgatgattgaatgatatcatggaacatt

SEQ ID NO: 83142 - DNA, 395 bp, Glycine max
  Clone ID: PAT_MRT3847_46094C.1
gatcctctggctgaaggccaatttctcaagctcaggcgatagagttggattcatgatcatatatgaattggtagatatcagatgattattagagctattctgaagccaaccgaaatgagatcggaatccctcgaagaacaccgatctcacattggcaagagatactgacgccgaactgttcatatatgaggacatattatagggcggcttcttcagactatcctgattccaatggatctgacatcggaatagctacacgcactgcaattccacgattctaaagcttgactgatacgcacacgtagatatctgatcatgtacttaatggttaaattaccaagcctatcctggttccaaccgaagtgctatcgctatggatcacgcttaccgatctc

SEQ ID NO: 83143 - DNA, 374 bp, Glycine max
  Clone ID: PAT_MRT3847_46095C.1
acgtccacgctttcggtggtggatttagttcacattgcttagggtcctttatatgtgggttggtcattagtaacaaaggccatgtgtgcttgtgaatccttgatggtagtaaagtatatgacttatcctcaattatactttgagacatttcattgataggatatttgattgtgtacgataatgttaagcaataaattgtttggaagcgagcatgactgttgcatgtcaagcattatattaagaaataataatatatttattccatatagtatgtcttaatttacttcctaagcgtttatattactttatatcattgtttaatttgatcctttttcatgctttaatataatattccatcctctatttaaacattc

SEQ ID NO: 83144 - DNA, 530 bp, Glycine max
  Clone ID: PAT_MRT3847_46096C.1
ggggaaaataccaggactagctaggattaaaacaaattctgacatcatacaaattaacaggaggccctttgggttaaggaatacaaaaaaaaggcataaataaataagctgggggggggaaataagaactaaaaatattacattacagggggaaaaaatctaaacccaaacgggtggggataagggaaacaagcaaaagattaaaacataacgggaaggaactccattggggtacgggggggaattaggggccccttggcaactccacacaatggctttgaaaaaagggctgacttgggcctcacaaaatttaagggattcaagcggggctccagcaaacttggggaactcaaccaccggaacctcgggggccaccttaaatacctcgaccgggaggggcaggttccccttcctcccttccgtggccccctggatcctcaccaaaaactcctttttccccggcaccctaaaggtaaggtttttcgccaccccctccaggttggccatcaccggcgaagccaaacttggaa

SEQ ID NO: 83145 - DNA, 416 bp, Glycine max
  Clone ID: PAT_MRT3847_46097C.1
gagcggctgcgagaagacgacagaagggtcaccataataaataaattcctccggcactctcttattagttgcaagtcaagtcattttaggcgtatcctaatacttagagttgatgatgaaaattaagaaagcccgtaacttaaaaaaaaattgctcacttttatccaatttgtgttaaaagagttgaccaagcaatcatttctttcttaattataagatattttaaaaaaaatatttgaatctttttataattttttttaatttttatctgtattaattattcttttacttaattattctctctccaaacattaaaaaaacaattatttgtgaggagagataagaaaaacaatgattttataatgataataccattaattaacctatttttacctgagtaactcaattaaatactt

SEQ ID NO: 83146 - DNA, 446 bp, Glycine max
  Clone ID: PAT_MRT3847_46098C.1
gttaaatatataattttttattgtgctatcgtttggtcactttataaaaaagtttacttatccaaaaaacttaatcttatatactatatacagactatccaaaccccacatttaagtctaaccttcacgtttatattcacactttctgttactaaaatacaaggaggttgacgtacaacggtacaagacaatattttctggaaataacatgaaccttgttttgccacaatatataagtgaattgaatttgactttggagtttttagtttccacactcccaatgaccaatacacagcagataaattaattttacaaaaatatcatttatctacaaataaccttaggataatatatataccaccaaacaaccaatataaaaatgtttcagctgaactaaaaattctaaatttgagttctgtccacacacaaatatttcatacttgaaa

SEQ ID NO: 83147 - DNA, 747 bp, Glycine max
  unsure (1)..(747): unsure at all n locations
  Clone ID: PAT_MRT3847_46099C.1
gtgaggtttatccgggttggagtttgagaccgaggaatatataaatggaaagttctagatagggcctgggattgtttctgtgttttctaacaagcaatggctatgagatcgtgggtgagtcgaggaggatccatgactcgtttgatggactcaacaaatcgaggggctttgagtcggttcttgagcgacaagggtcgcattctcagcgaggaggaacaggccaaagagaatgtctacatccagaaatgggagagggagaggttggagaaacagaagcaactgtctgagaaggccaaggctctcacggacaaagatgcttctgctgctgctcataagaaacctgaaggtgctcaaaaggactgagtttatctttcacacaacccgtcaaggtcactttgtgggaaataagcatggagaataaaacacattgaccctgagtgaactttggtctttgtatagattgtgtttcttgtttatttgtagtttcgtgacggatgaaaccatgccattgcatccaccaaacttggtacgtttgttatgaacttgtgatgtaatcctttccagtaaattttctcttctgtgaaaaaaaaaaaaaaaaaattcctgaggccgcggttgcgccaagggctgaaagagtactccagttggcctaccttgtcctcagtctacatagaaggagaagtttttgggtgctgtgatatcactgttgatgcatatcanaaggaggaattgcanggactggtggag

SEQ ID NO: 83148 - DNA, 796 bp, Glycine max
  unsure (1)..(796): unsure at all n locations
  Clone ID: PAT_MRT3847_4609C.1
atcaaatcagggaactggaggcacaagccacaaccctggagcaggaattagaatcactgcaaaaccagaagagagatatggaagagcaaattaagagcagcacaactgaagcgggggaactaggagagctcaattcaggactacaaaaccaaatatcagaacttgaaataaagtccagagaaagagaagaggagctatctgctatgatgaagaaactcaaagataatgagaatgagtcatcttctaaaatgtcagatttaacatctcagatagataagctgctggccgatataggcacattacatgctcagaaaaatgaactggaagagcagatcatttctaaaagtgatgaagcttcgactcaagtcaaaagcattacaaatgagttgaatgcattgcggcaagaagtggagtccctccaacaccagaaattggacttggaatttcagttagtggaaaaagtccaagaaaattctgagtatgtgattcaaatgcaaactctgaaagaggaaattgacagaaaaatcctggaacaagagagacttctggaagacaaggaaaatttagccatgaagctaaggaccctggaattagagatgaacactataaagaataaaaacagtgaagctgaagagcaaataagggctaaaagccatgaaatcagtcacatgagtaagggaatgctggagctacacgannaaatagcagaaatagagaaaatatcaacagatagagaatcacatttctttagttctncaggataaatttattaatgcggagcaaggtggtttcagct

SEQ ID NO: 83149 - DNA, 694 bp, Glycine max
  Clone ID: PAT_MRT3847_460C.1
caaccattgcaaaagccatttacaataagattggtcgcaattttgagggaaggagctttcttgaacaaattggggaactttggaggcaagacgcaattcgtttccaagaacaacttctatttgatatctacaaaacgaaaagaaagatacataatgttgaattaggaaaacaagctttgaaggaaagactttgcagtaaaagggtatttcttgtacttgatgatgtgaatgatgtggagcaattgagtgctttatgtggaagtcgcgaatggtttggttcagggagtagaataatcatcacaactagagataagcatattcttagaggggatagagttgacaaaatgtacacaatgaaagaaatggatgaaagtgagtctattgagctttttagttggcatgcattcaagcaagcaagtccaagagaaggttttactgaactttcaaatgatgtaattgaatattctgggggtttgccattagctcttacagtccttggttgccatttgtttgatatgaagataatagaatggaagactgtattagacaaacttaagagaattcctcatgatcaagtacaaaagaagttaaaaataagctatgatggtttaagtgatgatacagagagagacatattccttgatatagcttgtttctttattggaatggatcggaatgatgctatgtgtatctt

SEQ ID NO: 83150 - DNA, 1196 bp, Glycine max
  unsure (1)..(1196): unsure at all n locations
  Clone ID: PAT_MRT3847_46100C.1
acaagacttatattctcttttttatttctgaaatgtaaggacttaaagatgatgcaaagaaatataaaatttgaaaaccagaagttattatcaatatcttatataattatagtttcctcttgtactgtttaagcattgatacttcattttaattctatgaaaaatctagaccattttgataaccggttagactaggaaattactggtgcttctaattgaatatttttattattattattttaatactttcctttctctctccccaacgcacttctcaggctcgcatcaaaactgaccctgattgcgttggttgttgcggccctgtgcgccgttgatctaacccatagagcatcatcatcatcatcatcccctcacgcgccagcgccctccgtggactgctccaacctggtcctcaccatggccgattgcttgtccttcgtcaccaacggcagcaccatcacaaagccagagggcacatgctgctctggtttgaaagtctgttcgtcaaaaccgctccggcgttgtctctgcgaggctttcaagagcaggcgctcaattcggcgtcgttttgaatgtcaccaaggcaaccactctccctgctgcctgcaaagtctctgctccttctgccaccaactgtggattgtctgagacgcctgctgctgctcctgctggaggcctctctccacaagcttctccatctccccaacaagcagcagatgcttctactaatggtcctgtaaatgaggtatctccagcaccagcaccagcaccagctcaagggaacacagcatcagcattattcccaatttcagctatctccttgtttcttgccatattggtagccacattctcaggcttctgagaggagtttcgttccattttaaagtgtagagagatgacatgagggattattattattttgatgttttctttgggttttaccattggagagctcttcttcattctatgtttgacttaaaacttaaaaagtagataacattcattttgggagtgactcgaatctatttagaggttgtacccgcattttcattatatatgagtctatttatttatataaaattatatataagtctatttatttatataactatttgagttgccatattaaaaaaaaaaaaaaaaaactcgagactagttctctcnnccttcntgtcgtcttctcgcagcccgctcgc

SEQ ID NO: 83151 - DNA, 1280 bp, Glycine max
  Clone ID: PAT_MRT3847_46101C.1
acttgaacacagactcatttttgatggtatggcagtaattcaacaacatcaatagtgcaaaacatacttcaaacaagaaatgaaaaataaccgccaaaaaagttttagaagaaaacagtctgtctctgagtatccatatggccagaaagactaatcatattctttttccttggtaaccaatttcttcatatctgtaccctttatctacaaacaaaaccatgcattaaaaggtccaggaataaggcttcagaacttgaagaacaggtttcagtcccaaaatgtgttctccaattgtaacagtacgaccaacgtttttaaagtagcatcctagtggcttagtcctccatgaaaacttcatcttgcccttcatcaatatcaaaggtatcgtcactcttcaatttgccacagacattgcattccatgacattagatggagtacaccctgtggaggtaaaggagctaaagttccccagcaatttgttctatcacacatgtattttaaaaagaaataagcatgtggaaaatcgttattatcttcatggggatgatcatcagtgtctgatgctgccatagtttcacattggtcctcatccataacctcctcttcttcctcagcattatcttcaacactatcattatctgaccaatttgactccacattacatcgatcacaattacaggtgaagccataatcttcaatcagtctcttctgcctactagaatatttttcattcacagggaaataactcaaacagatctccctaccttggggaacatcatgaatcatcctaataataaagtcagtattatggctgtcatcagaaggattagcatccacataatccagtctgcaggcattgggaaggcaatcgtggttaagaaaggaggcataggggtaaataccataagctctgacggacctctggtcatcatgttcagagaatggctgcattatgccgcaggcattgagcttgtccttgccaagaatagcagacgtgagttctaaagaaaatccattctgagggccaatgagagcaagtgagcagagggatgaaataagggggtgtaggaactgagctgcagcaatggtggaatcatcaggagaaccctgaagagaaagcataatttgaaaatctgaaggggagatattggcaagattgtaggcagcaacaagaaaattaacttggacttggtgctcaaggggctgttcaagcagtagagaattggctctaagatgagataatgcttgacatacccaagaagaatgggaggagtctcgt

SEQ ID NO: 83152 - DNA, 706 bp, Glycine max
  Clone ID: PAT_MRT3847_46102C.1
tttctttgcgtacggtgtagttctagaacaaactaatcgacgactgacgtggtggattgtggaaacgcaaagagcaattgttccgagaatgagcaattaatgaatgaatgatcaatgtctcatcaggagcaagcctttgtgtctcttctctctcagctcgccctttctttcgacggtgccgttttgggcttggccttggcctacgccgccgtccgcaccctcttcaaattcaccgccacctctgccgccctccgcaagctccaccgcgccccttctgtctccgtctccgacctccgatccctcctcgccgagataccctccgacgccgacggaaactccgacggtggcaacatcgtaattgtccgcggcactgtcgatgccaagtccgccgtcgaaggcggcacctggaaaaccctgagacctggtgtcttggtttctcgcgagtccggcgataaaagtgttattcttcaaagaactcaaacggaagctgttgaaggcatgtacgaagttccatccctactggataatccatgagttgctcaaataagaaatcacaaagagaggaaacaaagagagtcaaaggcaagagcaaccttgtttggagcattatcatccactattttgatcagattattttttttttaatgattcaacggggcaaaacaccctggtgatcagaataatgacgctgaaaatacctaatgag

SEQ ID NO: 83153 - DNA, 311 bp, Glycine max
  Clone ID: PAT_MRT3847_46103C.1
aaaaaattttctcatcctatatttttaaaaataacacgagcctatttcaggactctttctaccccatccttcacttacaaatcccacaatcttatcccatcatccccctaattctcaaaatcatcattaccaataccctcaccaaacaatcctactcccaaaacccattttactacccaaacacattcaaatacttattcccattctctttctaacccccttactacctcactatccaattcccaaattaactaccctattacacatctatactttcctcctacccataaacctttaccataaacccttaa

SEQ ID NO: 83154 - DNA, 677 bp, Glycine max
  Clone ID: PAT_MRT3847_46104C.1
gtatactggtttttgtatattttttttttttttttttttttttttttggccccccaaaaaaatgaaactgaggggcatatagggggtttctggtaaagggggggggggggaaacccgtttgggacccccgttaaagcagaaaaaccccgtaaaaggggggcaaaagtaccatttcctggcttttatggggggggaaaaggaagttattccaaacccgcccttagtttacaaaaaaaaaaaatgataaaccggccggccccccatggaaaaaaaggtttgggcttctagttgggggaaccaaaataaaaggggacaattttttcctttcgccgggggggacccaaaaaaacccttggggcaaacctttctttttaacaaaatttatctttaacctaaaaaagaccttcccaaagccggattttaaattcggccccaacccaaaaaatttcctttttttttttttccaagccctgtgaagacctggccaaacccttttggggcccttttttatttgggggcaaaagggggaaaaccttttggggggtgtttaaaaaaaggggcgtgaaaattttgggaagacgccttaaaatggggaaaggggttaaatgggattggaaaccaaggggggcccacaaacctcaatccccggttaagttattgggggaaaatgggggggg

SEQ ID NO: 83155 - DNA, 1267 bp, Glycine max
  Clone ID: PAT_MRT3847_46105C.1
gttttttcaaattgcttggggaaacaaacgagggacaaatagaaagaaggaaaaaagccttcaccatttgttgttctgcttcctgagaccgtgttccatggcatgctctccttctacaactcttgtgtcaaattctcttctccttaacaaaacgactagtcagtgtcggcttcatgttcatcccaccctttcacttaatcaaaaccttccaatatattctaataacctactcaaactctcaacaattcaataccatgcaacaaccacaccctttgttgctgcttctgcaggagttgagtctccggtgttgggtgaggataccacgagttcactggattcggtgaaagtgtttgatttgaatggaaacgggattccaatttctgacttgtggaaagataggaaagccgttgtggcatttgcacgccactttgggtgcgtgttgtgccgcaaaagggctgattatctttcatccaagaaggatataatggatgcatctggtgtggcacttgtattgattggacctgggagcattgatcaggccaaatcctttgctgagaagtcaaaatttgaaggagaaatctatgcagaccccactcactcatcatatgaggccttaaattttgtttctggagttttaaccacatttacccccaatgcaggtcttaagataatacagctatatatggaagggtatcgacaagattggaagctttcatttgaaaaggataccgttagcagaggaggctggaaacaaggaggaattatagttgcaggcccgggtaaaaacaacatctcataccttcacagagacaaggaggcaggggatgacccagaaattgaagatatcttgaaagcatgttgctcgtgaagaaagaagagagggagcccctctttctctgctttatttagcctgctactgaaatggaactcgcattatacggcattgtacatcatatttaagctgcttcttacgctgaacagtggcttttcttcgagtttcagttaaaagatataacgttattacccgccatttatccaatgacaactcacaatttggaacctattactatgaggctcttaatttaagattctattgattatttcaaaatgttcttcctaccgatggaatggtcgaatggagaaataggttacatcagtgttgtatcattttatttcattttccaatttgcgatggaatggacgggacttctaaaacagacctgttgcttaatcactttcattaaaaagactgtttagtgtcgaaaaa

SEQ ID NO: 83156 - DNA, 235 bp, Glycine max
  Clone ID: PAT_MRT3847_46106C.1
ggaattcggcacgagggagagaactagtctcgagttttttttttttttttttgacttcgacaaccaaactcatttgatgagcttgtggtctttgtaggcttttagggtgttatacagtcaatataaaaaagttttataccgtcaattaaatatatactaaaaaaatatgtttatttatgtgattttcaaattttcatttaaaggagagaatcaacaagctatttgaaagttggag

SEQ ID NO: 83157 - DNA, 316 bp, Glycine max
  Clone ID: PAT_MRT3847_46107C.1
ctgcgagaagacgacagaagggggagagtacagaacgcggtaaccctagaatcccaaatccccaatcaatcgaccaagagcaggagcttcggtggcgatcttcatccgcctcggtgaaaaaaatgtctctggtggcgaacgaggatttccagcacattctgcgtgtgctgaacaccaacgtagatgggaagcagaagataatgttcgctctcacctctatcaaaggtattggcaggcgattcgctaacatttgctgcaaaaaagctgatgtcgacatgaacaagagagctggtgaattgagtgctattgagttgga

SEQ ID NO: 83158 - DNA, 284 bp, Glycine max
  Clone ID: PAT_MRT3847_46108C.1
ggtgtgttttgaaatagagattgcattgaattgtacgattaaacaatgcactccatgattcttagaaatgcgagtaactattagacgctagctaacccacctctacataagctggtgccaaatcttatgctccgataagggaagttattgatacaaaaggggaggcgccacaatccttattcatttgacccgaactttcctcaataggtggggggcactagtgggaaccaaactgagccaactctaatacccttcccgaggggggtttgctaagaggaaatttt

SEQ ID NO: 83159 - DNA, 267 bp, Glycine max
  Clone ID: PAT_MRT3847_46109C.1
cggaccggccggaattcctttacgtctccacgcgccgatacatacccacatgaactctatacggggggggattttcagctttccggatataccgccagcaaatctttgatgatatcaaggtgaagcatctggtgggaagcatcgaaatggaatgaccacatggggagatgctggtcgacccaattatttgagcgaatttttcaccaattacgaggaggctgacatgatgaaccaactagctgacttcaagagactcaactaaatgaa

SEQ ID NO: 83160 - DNA, 473 bp, Glycine max
  Clone ID: PAT_MRT3847_4610C.1
tttttttttttttttttttttttttttttttttttttttgggggaaaaaaaccatgatccaaacctgcccttttgggaaacgaaaatctaccccaaaattttcaattttgaaaccattacacaaaagccagggaaacaaaaaaaaaaaaattgttccaaacttaagggtaaaaccaaatagactccatttattcatcgcggttcttttctctaatgaatcctgaggggggagggttaaatttgcaattagacaaccactttcacaggcacaaataaagacttatgttcatgttttcctcccaagggatttcccgaataatgactgggttctagcaatatactttcaattaaaaaaataggtttctgctcaagcaaatattgtttgaacaataaacacctttgggggccagatggcttgcacctttttttaggccttctcgcaccaaacaagacgctgttttctttggggtctt

SEQ ID NO: 83161 - DNA, 884 bp, Glycine max
  Clone ID: PAT_MRT3847_46110C.1
ataccaggtttctcaattcaactttccaacaagccaacggcaatgccagagcggcatgtgttctctgtttctcaattcaactttccaacaaggcaacggcaatggcagagctgcaatcgaagtctgaaactgcccctgctccggctccggttgtggctgaggtgccatcgaacgacgccgttgcaaagaaagcttctgaaacaggggaatccaaagctattgtttctgtatccgagaagacaccagttcctgcaaacaagcaaagctcaagaggatccattgatagagatatcgctctggctgaagtagagaaagagaaaaagttgtcctatgtgaaggcatgggaagaaagtgagaaggccaaagcagagaacagagctcaaaaacatctctcagctatcgctgcttgggaaaacagcaaaaaggcagctcttgaagctgagcttaaaaaattggaggaacaactggagaaaaagaaagcagaatatggtgaaaaaatgaagaacaaggtggccttagttcacaaggaagcaggggagaagagggcaatgattgaagccaagcgtggtgaagagattctgcagacagaggaaatggctgcaaaataccgagcaacaggaaccactccaaagaagactataggatgcttttgatttttttgcattttgggtctgatttccaaaataatttgtaattgcccattttgtccgtggtttctaatgttttgttctcaatgttttctatgtctaagaaatagtccaaataaaacaaaattttgtaaatgtcttttgttttgatcatctagcttgggcgaaatgttctatgcaaaggtggtttttcctaagagtactactctaatatcaactaattgagtttctctttat

SEQ ID NO: 83162 - DNA, 252 bp, Glycine max
  unsure (1)..(252): unsure at all n locations
  Clone ID: PAT_MRT3847_46111C.1
ttccccgcggnttctcgaacttccgacgccatctccggccacctcagagagtgaanaaggtcnttgacgatgagcaacgtgttcgagggatacgaacgccaatactgtgagctctcggcgaatctagcgnanaagtgcactgctgctggtgttcttaatggngagcaatananacananngtttctgaagtaaaggctggaattgatgaagcagaagctttnattagaaaaatggaccttgaggcaagnagt

SEQ ID NO: 83163 - DNA, 235 bp, Glycine max
  Clone ID: PAT_MRT3847_46112C.1
ggctcgaggttttttagtaaaatctgttaatttttatagcccctccaccatggactgcacgaggcgagtttttacctcatcacatgacagggtcctcttccaacttaaaatcagatgttaacattggccgacgacttgccacacgcaccaggtgataagcatcatttggcattgtgacatacaaaatacgcagactttcaatttcacatagtagaacaggaataagccctcaccc

SEQ ID NO: 83164 - DNA, 333 bp, Glycine max
  Clone ID: PAT_MRT3847_46113C.1
gttcagacattgatctcatgttgcgagtaagtgagaaagaactcacaatagataacaacatcacaattccatggctgattttgactcaacttatagacctccttctcctctgtgcgctcctctttttcttgaccctcctcccattgggtcccaacgaccaccaccacaacaacctgaggatccgacgatacgccccctgctgcgactacctattgcagagtctactttttcgacgatattcaaattcaacaaataaaatccccggttactaataacgatgtatgtgcccactaatgcaccaaccaccttgcagggtgggctgaaaccattatt

SEQ ID NO: 83165 - DNA, 975 bp, Glycine max
  Clone ID: PAT_MRT3847_46114C.1
aaaatatcatacttgagcttagctgggagtctactccagtccactccactacgaccgccactcccaaatcgccatggcaacaacactcacatcttccgttatccattctcacgcactcccacgcgcgccatgctgcttcttcctccgctttcgctttcccttcactttcacattctccccttccaatttccccgccaaatcttcttcgcgcctcgccgtcatctccgcttcttcatccaccgccgagcacaaccaccccaactcctcctcctcctctcaagacctcgccgtccttctcgaagtccagggggttcttatggactcgcaccgcgttggaaatcgcctcgccttcaataaagcgtttgagaagcttggactcgattgcgccaactggactgaacctgtctattccgatctttcaaagagaagtgctggagatgaggaaaagatggtgtttctgtattttaatcgtattgggtggccttcttcgttacccacaaatgagcagggactgtttgcaaaaagagttttgcagcaaaaggaaaaggcattagaagagtttgtgatgtcaaaaagtctacctttacgacctggtcttgaacagtttattgatgatgcatataatgaaggaattccagtggtaatattaacggcctacagtaaaagtggtgataatattgccaggtccataatggaaaagcttggtgacgatcgaagcatatcgatcattattggtgggaattaggaggatgagcgaggttgatatggacaactagtctcaactagtctattgcttcgtaattgcttctggtttggatgaaggacttgccaatgaagccaaatgcgctggtatatacttaactcgttgattagcatccccccatgcaagcatttgcagtgcacaatgatctttgctaagggctttccgcttctgccatttttgccagtttctgctgaaaaacaaaggttagcaaa

SEQ ID NO: 83166 - DNA, 502 bp, Glycine max
  Clone ID: PAT_MRT3847_46115C.1
cggacgcgtgggcggacgcgtggacggacgcgcgggggccattttgaggctggtcgaatcccgtctgatggaatgttcctcattttccggtgtccacacttgtctcagcaatttgtcctcaatgactaccgattataaggccctggccaagattgccttcaacactttgaatccatttccggccaaattgatcgagtcacgtcgtcagaattattatctccagcataagagtggcaaattcaaaatctgaatgtgagctttgattgcctgttcaattcaattccacttcctattctccacccaaattttattgctcaattctcctaattccctttttttttattccatttcttattttttgttccaattttatcaatttttatgtttttttatttcgctagtcttcctcctttgtgctttttgcccagacaaaatccccccttcccatccaaatttcttttttctgttcagcagctattaaaaatcacttcatactaatttt

SEQ ID NO: 83167 - DNA, 411 bp, Glycine max
  Clone ID: PAT_MRT3847_46116C.1
atacgcttgcgtcttcaggaaattagaggcgttccaccaaacttaaaacaattcatggcaagagaagatatattctaagcttggtcgagttcaaacatgttgtcaaatcatgaattgcatgatgcttgacaaactgaattcatgtttccaggatcaactattccacactggttcaatcaccaaagtagcggaccttcaagttctctctggtttcataataaattccctgacaaagatctttgtatacttctaacacgtctagaatccatagatctagatgatattcccatgcccaacgtgttcatcaatggcatactttgtaagatttcttctaggaactatcacataagaaagctttacatgatcttgcataaaatgaatgagaccactgtgaaattacatacagaggta

SEQ ID NO: 83168 - DNA, 276 bp, Glycine max
  unsure (1)..(276): unsure at all n locations
  Clone ID: PAT_MRT3847_46117C.1
anattggagtcgtttggtgaactggtggggctctgggaggcaaaggtcagttccgggccgtagggcggnaggctttggggcaagagagtcaggaaggatcccgcggacgaganccgggatctgaggggtttgagagggcggggcttgangaagcgaactggttgacccggctcctgantggatctgtcggnccanaacccgcagtcgtgcagcncccaggtttctttcatngcggtcagagcgtcgttcgagaacaactgtgaggtcggttgtttt

SEQ ID NO: 83169 - DNA, 1527 bp, Glycine max
  Clone ID: PAT_MRT3847_46118C.1
cccacgcgtccgcccacgcgtccgcccacgcgtccgtacggctgcgagaagacgacagaagggggaatcgaatcgatattggtgttttgttccgttctaagcatggggaaggaaggagatctatgggacgattcagtactcatcaatgccttcgaccaagctatttctacttacaacaaaatgcatagcagcggcaaacacaaagacgccgcctcggttcaagaggaggcgaagacactgatcggagaaaatggctccaattttgacactacaaggggtgctgatacgaatattccagctactgatgcgcttgattcaggtgagactggtaatttgtcgaagttggaagaaaatcatgacacagagtcacaggtggatcatctggattcaacaagtggtcaagacatccagaatgcacagaacggttatgcatatgctcaagctgtagatggttataatcaattagttgtgcagtactatgaacttgaggagaaaaggttgaagattttggagcaacttaattacggctgcgagaagacgacagaaggggtggccgctgattctaactctggtgtaccatattccaattctcaagattattcagcgactgcgtaccaagtttctgatccaaatgctgtctgtacatgttgcccgtgttacagtcaatgtctgccggctccatgcacgtcagttcctggttgttctttgggtggatcatctgttagcaagccgtgtagcaatctttctgtggaaatggatcgtaaaatgtcatttccttgtgaagatggtaaaatccacaaaatggcaatgggagctgcagagaaggcactatctactattagaacaaccatatctggtgattttaatgtgaatgaagggaaagagagaaacaattctgaacttgaagaaattaatggctcaggaacagatcttgctgctgttttgaatgcttggtattctgctggcttctttactggaaagtatcttgctgaacaatccattcaaaacaaaagacagagttgaactattacatcttattcaagcggagtcaaaagggttctcatacaaacaactatactagtacttgtgattatactcaacagttgggcaattgatcttcttctcttaacatctttgggaaatcagaagaactttggtatattctgatctgattggataggctggctcatcataattttttatgcaccggtactagttttcttagcaagattttgctggacatatttagggaatgctttcactctctgttgcagacatgaatatgttgcccgatttgatgttgaatgcagaactataaaatgcataaatcattttgttttgttgttttatctgtatttaataattggcattagcgagagaggagtaatggcatcacttgttgctcctttccttggttgaagattaacatcactaggactgttgtgttgaaatgttgttactggtttatatgatgacataaagaagctcaatcacgcttgcgaacttgcgtcaatgcccaagttgaag

SEQ ID NO: 83170 - DNA, 481 bp, Glycine max
  Clone ID: PAT_MRT3847_46119C.1
ggaaaatttatattttaagtatgaaaagttctctcttgaaccatggatggtggggtgggtccaaggggaccacagcgttgaattattaatgaggaagatacatgtgacgtgtgtgtaatagagagagagagagagagagagagagagagagggtggcacgggtgggattgtggtgagtagtcaatagtcatggtaggtatcaaacaaaagaaagaatcttataacagtgttttgttgaagtccattgatttttctacagtacaaaagaaagcatgccattgcttgaggcttgagcagcttactagcatgggttttccttcctttcttttctgggtggaggacagagagagggtggactcgaaatcttttattattttaggatacttttggtcaaacattttttagttcacatttgcattatgtgaaataaaatgtcagtgaattgccttttggtgtactaaccactaataatttttttttg

SEQ ID NO: 83171 - DNA, 335 bp, Glycine max
  Clone ID: PAT_MRT3847_4611C.1
accggggacttaataaggttttattaggccttttttggaatccaaacccagccttgggctggggggaggttttaccttgggggtggcaggttgccccccttggtttattaaattaccaccattgggcccaggggaatttattccccttaccaacccaaaggggtgccttaggtacttaccggtttaacctcgtattttttaaattttggccttggggggatcaaccttggggaatggaaataatttaaaccttaacttggtattccaattaaccgttgggctttgcaaagttgcttgggtccttgttttgggccccaaaaccggaatccaaagtt

SEQ ID NO: 83172 - DNA, 110 bp, Glycine max
  Clone ID: PAT_MRT3847_46120C.1
gggacagtcatgtcctggtcattaacaaaatcgtcccacaaaattggaaggtatgataattgataaacagagtagcttgtaaaagggcaaatagataaagtcaatgttga

SEQ ID NO: 83173 - DNA, 1021 bp, Glycine max
  unsure (1)..(1021): unsure at all n locations
  Clone ID: PAT_MRT3847_46121C.1
cccgcgtccgctcaattctctttttttcttcgggatctaggtgggtttccgttatttctcaatttggacgcatatttttgctttattctcttgaatctgcacgctctattgaagattcgttctaactcttaatttcattgcagcaaagctgcatttttttttatgttattagctagatcagaaacatgtcaatgccccaattgttaattttcttgttttccttctggattttgcatgcaagtggttgtttaatttggttgtggtggttattcaacttttttttctctgcatttctgaagcattattttcttatttgagatgtttgtgggaattgagcttgaaaataatgttatatgctaggttgaattttggtgagaataaaatgcatttgattctcttttaacatgatggnttggtntgcaggtctgtgcctcctcttatatgtaatagatagtttctgaaacaaaagaaaaaaataaaataaaaataaaaggaccacatggattatgaaaacaacagttggatttgggagggggtaaactactacccgcgtgtgtttgggtggtctaatggttacagcagccttgctgggcttgtcaaccagctactttggtgggatttggggttccatatttgtcactgcccatgtcctggtctaatttgggggatttttcacaagaaaaaatctgggaagaggcgcattcgggttgtacatggatggctgttttgatctgatgcattatggccatgccaatgcactcaggcaagcaaaggctctaggagatgaattggttgtgggtctagtgagtgatgaggaaatcgtggcaaataaaggaccacctgttttgtccatggaggagaggctggcccttgtcagtggattgaagtgggtggatgagacggaactgatgcatatgctgcagcaaagaaagctggtcgttacaagcaaattaaacgtactgaaggagtttccagtacagacatcgtaggaagaatactgtcttctttaagagatcaaaaa

SEQ ID NO: 83174 - DNA, 271 bp, Glycine max
  Clone ID: PAT_MRT3847_46122C.1
gtgcgaactgctgaggagaagcttaaacgcagtttatttggtgatgatgaaggagctgcacttgaagacatagctgaagaggaggagcaaggagaagaggaagaggatgcaaacattggagaagatgatgaaacgggcgacttcattgtggatgaagaagaagttgatgagaatggctctactacgaggcagatgaagctgtatagaaagaaaactaggcaggctcctggagtctcttcatcagctctacaagaagctgaagaattatttg

SEQ ID NO: 83175 - DNA, 618 bp, Glycine max
  Clone ID: PAT_MRT3847_46123C.1
aaagagcgacgacgcgcctatccacgcggagacaaaggtttgttgcaaagcaaaaactactacgaggagctttcctccatacgaatcaaaggaggagagagagagagagagagagaggagacacagacacaaaggaaacggaaaaagcaacacacaaaaaaaaagaggtctgtgcctcctcttatatgtaatagctagtttccgagacaagaaaaaaaataaaagtaaaaagagaacatggattatgaaaacaacagttggatttgggagggggtaaactactacccgtgtgtgtttggcggtctaatggttacagcagccttgctgggcttgtcaaccagctactttggtgggattggggttccttatttatcgctgccatgttcctggtctaatttggggattttccaccagaaaaaatctgggaagaggcgcattcgggtgtacatggatggctgttttgatctgatgcattatggccatgccaatgcactcaggcaagcaaaggctctaggagatgaattggttgtgggtctagtgagtgatgaggaaatcgtggcaaataaaggaccacctggtttgtccattggaggagaggctggcccttgtcagtggatt

SEQ ID NO: 83176 - DNA, 268 bp, Glycine max
  unsure (1)..(268): unsure at all n locations
  Clone ID: PAT_MRT3847_46124C.1
ctcgtgaagaagacagtagtggagattttcactacgacaagagtanaaaggtcgtggttctctctgacctattctattctcatctgtctacaaccatgtcccgtccactaacagctaaaaancagtcaagagacatcccgtatgataatgaaagaactccgctactcaacagaccagaagatagacctttaccaatgggtcagatgtatctcttatgctttgcgcgtatggtcgagccatgggccttcttttcgatcttcccgtttat

SEQ ID NO: 83177 - DNA, 2198 bp, Glycine max
  Clone ID: PAT_MRT3847_46125C.1
acggctgcgagaagacgacagaaggggtcatttcacctatttttattccgtgtttcaaaagagggactcctattttgtttcagacaaagttttgttgcaaagcaaaaaactacgaggagctttcctccatacgaatccaaggaggagagaggagacacagacacaaaggaaacggaaaaagcaacacacacaaaaaaggtctgtgcctcctcttatatgtaatagatagtttctgaaacaaaagaaaaaaataaaataaaaataaaaggaccacatggattatgaaaacaacagttggatttgggagggggtaaactactacccgcgtgtgtttggtggtctaatggttacagcagccttgctgggcttgtcaaccagctactttggtgggattggggttccttatttatcgctgccatgttcctggtctaatttggggattttccacaagaaaaaatcggggaagaggcgcattcgggtgtacatggatggctgttttgatctgatgcattatggccatgccaatgcactcaggcaagcaaaggctctaggagatgaagtgggtgtgggtcttgtgagtgatgaggaaatcgtggcaaataaaggaccacctgttttgtccatggaggagaggctggcccttgtcagtggattgaagtgggtggatgaggtcataactgatgctccttatgcaattaccgagcaattcttgaatcgtctctttcatgaatataaaattgattatgtcatacatggtgatgatccttgcttgcttccagacggaactgatgcatatgctgcagcaaagaaagctggtcgttacaagcaaattaaacgtactgaaggagtttccagtacagacatcgtaggaagaatactgtcttctttaagagatcaaaaaaaattgtgaagatcataatggcaccgaggtaaaacctcaagaagaaaaccagtcaaaggcttcccacatagcccaattccttccaacttctcgacgtattgtccagttttcaaatggcaagggtcctggaccaaatgcacgtattgtatacattgatggggcatttgatctcttccatgccggccatgttgagatacttaagagggctagggagcttggtgactttcttctagttggtatccactcagatgagacagtgagtgagcatagaggaaatcactatccaattatgcatctgcatgagcgtagccttagtgtgttagcttgccgttatgttgatgaagttattattggttcaccttgggaaattacaaatgacatgatcaccactttcaatatctcagtagttgtgcatggtactgttgctgagaagacattaaattgtgaattagatccatatgagatccctaagagcatgggaatattccacttgctcgaaagcccaaaagatattactactgccacagtagcccaaaggataatggctaatcatgaagcttatgtgaaacgcaatgctaagaaaactaggagtgagcagagatactacgaagagaaaaaatacgtctctggagactagagtgtatataatgatcttttacattagtttggtactgctcttcaagtttgaccctgtcacagagatgctacctatagtatgaatctagacacgctttgtgaaggacatgtggtgcagggtatgtataacataggagtggtcataactcaggaataccgatgtactttaatgtcctgatgttttacttttgtcatctgaaaggcaaccatgtggtttgctcaccagttttatgccatttggtttttgctatggttttggtgtttttagtgtactccagttccagttagagattccttactctgatagtatatatattgtgactatcagaagttatacgcatcagaatggctttgcctttatttatttgacactctttctgaaggacattagtacagggtatgtataacataggagtggcgataactcgggaataccgatgtactttaatgtcctgacgttttatttctgttttctgaaaggcaaccatgtggtttgctcaccagttttatgccatttggtttttgctgtggttttgatggttttagtgtactccaattagagattccttactctgatagtatgtattgtgactatcagaagttatacgcatcagaagggccttgcctttatttatttctattcagcagagttttttggaag

SEQ ID NO: 83178 - DNA, 222 bp, Glycine max
  Clone ID: PAT_MRT3847_46126C.1
caacacaacgggctgggataccaggggcgctaagacaagatgagacgcagtgggctgatgctcatgaagggtgcatacccagcacctgttccaatgtacaagacctaacaaacaacacgacattcgatcagcattgcacaaacaccacaaccttaattctggcaccataaccctaactttaaaagctggagctttcgatgattcaatcttacgtactcatgg

SEQ ID NO: 83179 - DNA, 315 bp, Glycine max
  Clone ID: PAT_MRT3847_46127C.1
aaccccatacttaatacgagtacttctactaattatttctgcctgactagcatcgacaaaatccttgaatacccaatttactacattgcgtaaagaggaaaaactcaagaaagagatggaacaatcaaccgccttcaatataccagctataactgatactgataataaaaattgttctctttcaaactaatcaccacttaatccatcctcaaacgaactcctaaacaatccatcttaatcctcaactcctcacaattaaaatgtaccttatttctatgataaaattcctcacataaagagcaaataaaacctctt

SEQ ID NO: 83180 - DNA, 108 bp, Glycine max
  Clone ID: PAT_MRT3847_46128C.1
ggcacttcagtcgtggaaggatgttcgtagtgtaccttacagcttgtaaatggtcttcgcaataggtaacgagcacgtgattacggcagacgttagtgttcccatcct

SEQ ID NO: 83181 - DNA, 561 bp, Glycine max
  Clone ID: PAT_MRT3847_46129C.1
tggacgcgtgggcggacgcgtgggtccaagtttgagcttctccaattcaatgtcattcgacacggaccaaaaattgccggttaaatcgccggccgaccagcgccgcgaggcaaatgccattcgcacattggcattcgtcggcgtttgtctgtccaccgtgtccacaatgatttgtgtggtgtccgttccgttggcttaccagcatttccagcagatgggcaccaacatgttgagcgaaattgacttctgcaagtcacgctcgggcaacatttggaacgaggttactcgtacccaagttctgtcgcaagtgtacggcaaaggcggcgcttttcgcgcagttcgccaagccgatggttacggtggcggaggaggaggtgccagcggcggaggagctgcctcttcacaacctcctgcagctggaggttacggcgcgggaggaggagctgcaggaggtactgcgccacagggagcagctgcaggaggtactgcgccacagagagcagctgcaggaagtgctgcaccacagggaggagctgcaggaggcactgcaccacagggagg

SEQ ID NO: 83182 - DNA, 2427 bp, Glycine max
  unsure (1)..(2427): unsure at all n locations
  Clone ID: PAT_MRT3847_4612C.1
ggttggacgcatggaagcaaagcaaaggctgataatggcggcaacccataactcaatcataaatccccacatcaaccccaccctttctccattacaacacctggcactagagggataccatcttttattattatctatcttcactattactgttagatggatagacattgccataaacagcactttcctccccttacctgaaaagtttggtttctgattcttttttccatttcagcaaagtgggtgtggtttaatttaatttacttttagtatgagttatgggtgaattatttggcgttggaaaaagaaggaacatcagcagcagcaacaacaacaacaacagttctagtagtagcgttcttgggttggatgtgaaggtgcaacagagccctgaagcattattccataataggatgatgatgatggcgcatcataatcatcaccaccgtccattgtcatcaccctttgataataatggtgatggcgatggtcccacgacttacatgtcttttactaatcatataaaccttgttagtggtgcttcttctgttcttggtcctgctattgatgctggctgtggtgctgctcctcctgcacctgtaagaactttgcagccttttgacatttcttcttatacttcttctcccaccaccactaccacaaccttcaacttcaaacccccttcagcaggtgtgatggcggcttcgttggggtttcctttcacaagtgcacaatggagggagcttgaaagacaagctatgatatacaagtacatgatggcttctgttcctgttccacatgatctcctcattcctacttcactcacatcctcttctcgctcttcctgcatggatggtggtttcaatctgaggttggcaaatagcactgaccctgagccaggtaggtgtagaagaacagatggtaaaaaatggagatgttcaagagatgtggctcctaaccacaagtactgtgagcgccatatgcatagaggccgtccccgttcaagaaagcctgtggaagttaacaccaacagcaccaccactcccactagcgtcaacaataacaaccatcaaatcaaaaaggctcgccatgagtgtaataataatccttttgctacacctgacgttactgcggctatttccaaccccacatccagaaaaaatggatcttctccccattttcttgggtctactaccactcagccataccttgattcttccctctcccttgataactttggtctaaaagctgctagttttgactccgtggcttctgtttctgctaataaggaacccaggggtttagagtggatgctgaatggagatcctatttccctgggtgcttctgactcacaatggcagtctctgatgcacaataaagatggaatgaccagtgttagttcctgtaacaccaccgagtctcagtatctgaattcattagcactatataactctggactagaacaacagaatagacgccatcctttgttcctgaaccctcttgttgttcccatggaaaatctccaaccggagaaaccaaggggttttattgatgcttggtctaacgctgaaagcaatgccaacaccaacaccaccaacaagaactctgctgcatcaattggtaaattatccctttcttctcttgatctatcaatggggggtgctgctgtgaatgaagatgtgggtaatgttaacatgggtttgggcctaatggagcctaatggaaaaacgcacactggtactaaaatttctctctccaattggcaaaacccagcaccttgggtggcttcatcacttgggggtccactagctgaagttctaaggtcaagcacagtcactgccaccaccaccaccaatgaagcaacctccaacacaccctcgccagccaccactacacatgctgaatctccatctggggtgttgcagaaaacgcttgtttcattgtctgatagcagtaacaatagcagcccaagggttgcatcatcaagggccaattctgagatggccttgctaaggtttcaatcaaattaatgtaaattaattactagcattttctgctttagttcatttcatttcaaatgggataatagtattattattgtgtaatcttttgcatatttagctacctgtgctatcctatggcctattgttcaggacgtttgttataaactaaaaaacctctggtgaagtggacaaaaacaacctgtgttttctgtttatgtgatgaagactcattgctttgcagctttaaattctagcttcatggaaacgtcatgatgttacttatctctaccaccgagtgtactgaatgaatgccatggggttagtttgttgttgtggggtcctgggctcatgccccaagttgtcggaaaagacatagatctaactttgactatgtnnnccatgtagtgcctctttagcgttctct

SEQ ID NO: 83183 - DNA, 1203 bp, Glycine max
  Clone ID: PAT_MRT3847_46130C.1
atgcaccccatatcataatacaaaggatatattccggtcaatgcctatatgttgtcccatacttcttcctttaccacatgccttggcattgcgcatgattttccacgcgtccgcaatagtccatatttagtctaggtctgtataattcatacaaattgagattttctttttcaatttccttaaatattgtacaaattttactagtttcgtattaattatgattccattggtcgtcagatctttgttgtttatttatttatttatttattcattgccatatgaatatgtactaatgtgctacaggcattgcgcatgattttacaattgggtgttaaaccttcttggtttaacacttgcagtacaaccatagaaaagagacctcacttaattccaggaactccttcatctaaaggggatcttcgcacctacatgatcgacataccacctcttggcgactcagtggtgcctgagatgctcttaaaagtattggaaccatatagaaaagaaggtctgtatcttatagagtttcgataatgcaattttttctgttttgtttttggtgttaaaaacactaccaatatctccatttcttaaggttgcatgcttgatgatgagagagcaaagttgtatgctagtattgtggataaaggttgtgccgcaaggtttgcatttgcagctataatatttggtgaatcctcagaagctctgttttggctacagctgcctcaggcacttaaacatttgttgaacaaggtattgagaaagcctccaccaaaagaatccacagcagcacctatctctgatgttgatgatgagacatctctactatctcggatatcatcaaagggaaaaccgacggaagaaacaggaagagatgtattgagtcaaggtcaactaaggttaatggcttttgaccgagaagagttgtggaaaagtgctagtgaacgcatttcttggcatgaaaaattagaaggtgaagaggctatacagaaacgtattcatgagtaagtatgcatcatttctttttatcattttgttgagagtatgagcatatggcttagtttgacttaaggtcagaagaaggcattttagcttaatatcttcatgtcaaactccttagttgtagtccaaatccttcacatttttagtacttcattatttgaaattataatatgcaagacattgtattgaggtgagcactcc

SEQ ID NO: 83184 - DNA, 446 bp, Glycine max
  Clone ID: PAT_MRT3847_46131C.1
cttaagcaacacctcaaatagtatcactgctattattatacttctttaacctaatagatggggcaacgaccttttcaaccctggaattacaagaagccttcgagggggctcctgtgggcgatgcacggtaggcgctccttgctagactcaggcttacggttgacttttctctggtactgctttataagatactgcctacgctccgaactgcaaaatgctgtatgcccgctatgcatataaaagactcgaccaggagcctgatgacacatgcagagggcacatgaccgaaaatagtgggaccgccggcgaatgaagtgagtgtttgttgaaaggctgcggatgccagcctaactatgaataatcaaccgtgcgggagaaaggggcatgctcatgctggagcccattgagcggtcagcagatacatatgatcctttggactgacaaac

SEQ ID NO: 83185 - DNA, 205 bp, Glycine max
  Clone ID: PAT_MRT3847_46132C.1
tcgcaaactcacactattataatttactttttattttacatggctgaacaatccttcatgatgggctagctttatgacgtgcatggatgccttattagtctgatcattaacacatttgagaagaaaggtttctacttgaaaggtttgaatcttgctactgaagaccgtccttatactcataatcactatacttatatatctgcca

SEQ ID NO: 83186 - DNA, 290 bp, Glycine max
  unsure (1)..(290): unsure at all n locations
  Clone ID: PAT_MRT3847_46133C.1
cgaagaacgccccaancaacagggcggccacaaggacaccccccacacgcaggcgccgcacccacaccacatacctcagtgcccaagcccaagcccaagccccggcaccagggcccgggggcgccctccacagagggggaggccggaaaagggggggccanacaccaaacaaaccccacngcggggggaggcggagccccccaccncaagcgaggcccagcgcaaaagaaacccacaaggcggcacgcgcggggcgcccaccgacaacaaccggcagagccggaaacccg

SEQ ID NO: 83187 - DNA, 313 bp, Glycine max
  Clone ID: PAT_MRT3847_46134C.1
aaaaaaaaaaaaaataaaaaaaaaaaaaaattttatttataaaaaaaaaaaaaaaaaatattaaaaaaggataaataaaaaataaaataagggtatattaaaaaataaaaaaaaaaataaaaaaaaaaaaaggggcggccgttttaaaaaataaaaatttatttacccttgcattgcaaagaataatttttttatagggcaaccaaaataaaattaaatggccgcctttttaaaacgtcggaactggaaaaaccttgcctttaccaaattaaattcctttgaaaaaaataccctttttgcaagttgggttaat

SEQ ID NO: 83188 - DNA, 195 bp, Glycine max
  Clone ID: PAT_MRT3847_46135C.1
ggttctggaagggccaattattcattccaaacttgaattttttacgattttggccattagtccagggtctattactgaattataaaaatttatccgtaggtaacagaattattttttttcttatccaacctttaaaaattcatttatggagcggcgtgcaatggtttaaccctattctgagaaaaatttacatgg

SEQ ID NO: 83189 - DNA, 399 bp, Glycine max
  Clone ID: PAT_MRT3847_46136C.1
caaggatgtaaaagtacctctggatattctaatattcaagctcatgaaggcatatatgcgttcctcatctctacgaaaagcagctttaagggctctgtctaagatgttaactgttgatgagctattttatttgagggagcagtttgcacttttagagccaagcaaaaatggcactattagcttggaaaatatcaaagcggtcttgatggtaaatgcaacagatgctatgaaggagtcacgcatacctgactttttggcatcacttaatgcattacaatatagaaggatggattttgacgagttctgtgcagctgcccttagtgttcatcaacttgaaacacttgaccagtgggagcaaaatgcacgttgtgcctatgacctttttgaaaggatggaaac

SEQ ID NO: 83190 - DNA, 205 bp, Glycine max
  Clone ID: PAT_MRT3847_46137C.1
catgaaaaacaacgagcacttgttttccaacattgcgaccgctaaaaaggcctaccattgctgaaggatctttcttaagcccctcagttttgtctttcacattcacaaccttctcccttctgatattgggcaggagaacctccaagtacttggtatattggtgaacgaaattcatgaagttaacgcctggcaaacgaatcctttt

SEQ ID NO: 83191 - DNA, 465 bp, Glycine max
  Clone ID: PAT_MRT3847_46138C.1
ttgtcctaaaatgtgacttcttttttttttacaccgttcgatttctaggatgcctttggcctggattttgcaaagcggccaaatatgcgtgtgggaataatcttgaacttggctcggggagggtttttctagggaccagtgacatactatgttaggcgcaattgaagatttagtctcacggcgtacctgggagtggatgacttaaaaaatattgcgggccaaggtcccatccttgtgttcgcaaaaactcccccaaaactttttcctttgctgggaaccgttttataaccaggggcgtaggccaaaattaatctttcttgacctaggcgaattggttcaaaattaaacccttccaagctcggcaccatattttatctagggacatttgctccccctgaatgaaccgaactcttttaaatactttttttagaaaaatttcgccccacctaaaataaggtggttccc

SEQ ID NO: 83192 - DNA, 510 bp, Glycine max
  Clone ID: PAT_MRT3847_46139C.1
aaaaaaaaaaaattttaaaaaaataaaaaaaaaaaaaaaaaaaaaaaaaaaaagggcggaagatataaaagaaaaaaaaattaaaaacacttaaaaaaaaaagggggggggcttttatagtggaacatattttctttccactggtggcggttttaaaattttttttattgtgaaaacaattacatttccctgcttaatgttttataagaacatccttgttaaaacagttggggtaataacaaaaaggcccgtacagaaaaacctttttatcaaaggtgctgtattaatgaagaaggggacgcgccttgtttttctaaataaaacccgaccattattgaggatagacacaccccttccagtacacttttaagcgcggtaggggggggtgtttttactagcttgacttctttttttgtcacgttcgcaggatccccccgttaagttttatactttggtttcttttaaaggatcggagttttttctttacggcttctaaatcgggggatactt

SEQ ID NO: 83193 - DNA, 507 bp, Glycine max
  Clone ID: PAT_MRT3847_4613C.1
cgaggctctttgtccctcacttctcttcctttatattactgtagttcttgtttgttggagctaccttgaccaaatagctctggtctttatagtagttaatattttctcttttgttcaaagaatttgttgctaaatgccgattatatgttctgggtatttatttattcatctctcgaaatatccctaattgttctggtgttcaaccatggagcaatatagaacaatagacaggatagttttcaagtatgttattatgaagaaaaagcttatatttcagatagtagaagaaagtatgcaggaaaataattaaaaaaaaaacatgtttttcctgcacagtgatctttcagtattcttttggatttaactcatctgttgcaattttgaagacacggcatggtatgcaaaaactaaagccatgtttgttctcttagttttttttaaaatttttttttttacaaattatgttccaaaacaaagagttctaaataaaataacaaaaaacagctg

SEQ ID NO: 83194 - DNA, 1004 bp, Glycine max
  Clone ID: PAT_MRT3847_46140C.1
tccaggtttgaccaagttggaatctctcaatttaaagtggtgtaattgcataacagattatgatatgaaacctctttcaggtttgttgcatcttgctttctttttagcaaagtggctgaaacttttgcccaaaattaattgtctcgactttcttttatgcaattattgtgttttctactacagagtagttcttactcatattccacctaagtttatttaccttgagtggaatggtttaatatctctttgaaaagaacatgttgcaatagctgtatttgacaacatataattgccaaggtgcctttgtgtttatactatagatcggttcactgccatcttcttgttagacatatgattcaataatcaacagtacaattgtctaattcaatttacttccagagcttgcaagcctgaaaagtctagagatttcttccagtaaagtcactgattttggcatcagttttctaaaaggtatcatgcctttccatttattattgtaacatttcagagcaataggggctatatgattatcttattcctggtactcttgcaggtttttgtatgctaatatttctctgtagtctgtaaaaatctgtgatgttgatatttttctcttgggagtgaaacttgaaagtgaggttcaacctagcattttcatctttctcaaagtatttaaatttgtgtctattctgtctgtctatgcatgttctgtgtgaagatgcaatggatgatttttttctggcggcttctacatttgtatgtaacaagatgattttattcaatcaataaaagctttacaggactgtatagtgctgtatgcaaatgccaactattcatttttaaagagttgatgttttattttgaagatcaatttagttagatattcaattctaatttgggcttcaattttaaatgtagactctaattttgtataagccagaatgctgctttaaaaatcctttcatagaaagccttcctttttatgatgtaataatttgtcaatt

SEQ ID NO: 83195 - DNA, 521 bp, Glycine max
  Clone ID: PAT_MRT3847_46141C.1
atgaggaaagtttaagtttaacaattgtaactgcggaaccgcggtgtcgttttccattccttgttaaccaacttacaaccaaaaaaaagatcagtgctcttagggcacaaggaaataatgagacactttagttcacagagtgggaagaactgcaacgatggtcaatcatcgtctttagacagattgcggtgtaggcctcttaatcttgaaagatttactgatgaaagccaacgctactggtaaacatgccgtttgcaataaaccttttaacattccaaaacgggatcgtgagatcaaaagttaaagcctttgattgaaagtgcactcacttatacactttcataagcatgggaacaccagaacatttgcatgagtggggagtttctggcttgttgaaccaaggacctgtagcagggaagcggcaaatggcctttggctcttttcattgaatggacagaacaggggcacgagcaaaaaaagggatttggtcccattctggtccgcggggcgaatggaatgaa

SEQ ID NO: 83196 - DNA, 2616 bp, Glycine max
  unsure (1)..(2616): unsure at all n locations
  Clone ID: PAT_MRT3847_46142C.1
ggaatacggctcgagtaaaaggatagaagatgatcagaaatttaaaaacaaaaaaagtaagaaaaggaaaaacttggaggcatcaaatcagttggagaatgatagaaagaaaagtaagaaagaaatgatctctaagacaagagaggaggttgaagctgattacaaggctgcatccttagccccagatgttatggagaagaaacagatgcaaactgaaactctctctgctgtctttgagacatactttcgcattttgaagaagacaatgcagtccataggtgccaggcctgaagcaaacgctggggcattatctgctgcagtggaacccctccctttgcttgctccatgtctgaaaggactggcaaaattttcacatttgattgaccttgatttcatgggtgatctaatgaaccatctgagagtacttgcttctggaagtagcaactcatgcaacacttctgacaagtgttctaaatgtttgaccgtatcataacgtctccagtgttgcattgttgcttttaaagtgatgactcgagccgggaacaatcttgatgccttgaatgttgatttacaggacttctttctccatctttacaatcttgtacttgaatacaggccaggaaggtttgcattaaatttctgtctgaagtctccctttcatttttttttttcaatttttttttccaaataacaagtatgttcttgttctgaaaatctactagacgcatgcaggataggtcattgctgtggatatctggatatgatataaatgtacttagtttttttttcaattacatgctaggttacacacataagtatgccgataactttagtgatcaatccagtatttattcatcgccttatataaactgatggtggtttaaggcgcaatcaattttgtaatactgtcatttcttctttttttatgaaaattggatttgactcctttgaatgaatattaaaattttaacctgaggtgaagtgtgcttgcatatattgacacctaaaaccccagcgactttttcatgaatgaatgcattagagatttggagataaaaatgattaccaggccttcacctaactgcaagtgcttttagagtcagttcggtccatatatgcatgacataatgcatacattgagacaaattttggtatattgaaatatatctttccgctcatatatatacccaatggaaccatggaaacataaggtgttattgaatgtcatttctggcgtttttcatttgttcctttgttactccttaatgttgtacgacgcgatgcaccccgttagtaaattgattcacttattttttatctcagtctacttaatttttaagctgtattcttatgaaccagagatcaaggagaggtgttggcagaagctttgaagataatgttgtgtgatgataagcaacatgacatgcagaagactgctgcatttataaaacgattagcaacgctttcactgtgtgttggatccgcggattccagggctgccattgtcatgttctcatatcccctttagataatcttgtacttcaatacttttcgggaagagcagaagactgctgcatttataaaacgattagcaacgctttcactgtgtgttggatcagcagattccatggctgccttggtcacagtaaagcatcttcttcagaagaatgttaagtgcagaaatttattggaaaatgacattggagggggctctgtttcgggcacaattcataaatatctaccatattccacagatcccaatttaagtggtgcccttgcctcagtactttgggaactcaatcttttgtctagtcattatcatccagctatatcaacactggcctcgggcatttcaagcatgagtactgcacataaccagatccttttatccaagtcctctcctcaacaagcttataaggaaatgtctctggaccaggaattatgtttcacacaacagagtgacggtataaaattaaataacaagaagagacgtgcaaatggccctgctatttcaccttccattggttctacaacagttacgagttcatttgatgacaatgaattgcaaaggcaacttagttcccattttatggttcttcatgacataaaggagaatgaaaggttgagaaaggagttggataggactgctctatcactacagctatatgaacaatataagaaacaaaagaaacgatcaaaaccaagtagatgatcagccattggctttgtgatgtgtatggccccataggtttcagttatgcagttacagttcatttccagtggagataattctcaaatgcgttcctcaaacgagttcacctcatttgagtgcatgaaatatggaggagagatactttttcaattgaagtaatgcaatgcaaaatgaacttgaggctatcattctttggaagttggatgatcctgtattgttattcattgccttatataaaccgatgttggtttaaggcacaatcaattttgtaatactgccatttctttttatgaaaattggttttgattattttgaacgaatatatgatgatgaagtcagagagtatttactatttgattcttagttaaatctaaaaggtattttacagttttacttcngnagag

SEQ ID NO: 83197 - DNA, 364 bp, Glycine max
  Clone ID: PAT_MRT3847_46143C.1
cctgatttgcggatcgcgcatacatatattgccgtgtcctctaaactgaccccgacggaggtaaggatgttggggtagctgacaagcctgggatcactggtgactgaaaccaacttgatccttctgtacttgatgagctggtggtcgacattggtacattatcttccgtctatcacaagccggcaaatgcatgttgaacccgcacatacttgactgcccagaaaaccgaatacgattactatactgagggaagagaaacaggctattctgagtcaccttgaaatcatgctagatggacatgcttcaccttcacctactagacctgtgcctgatttactaggtgattagatgggcacggataata

SEQ ID NO: 83198 - DNA, 662 bp, Glycine max
  Clone ID: PAT_MRT3847_46144C.1
ttttttttttttttttttttttttttttttttttttttttttttttttttttttttttttttttttttttttttttttttttttaaaaaaaggggtttttttgggaattaaaaaaaaaaaaaaaaggcccccacaaacaattttcacgagggatgggggaaaaatccaatttttttttaaaaaaaccaaagggggggaagaaaaaaaaaacatatttcaccaatagccccccccccccctactagccagagagaacaagccccacccgggggggcataatgggcttttaaggggccccccccccaagggtaatggaagttccatttttccaccatgggggggggccggccccacacttgggagggggccggtatgggcttcccccccaacgatttgggtttcacttatccgagtcaccccggatccgggggtaggacttatggaaccaggaccatttaactggttttaagccaactaagccacaacgggctcgactttggactttggggctcggcccttgaacgggggggggcaagacttccccttgggaaggggaataaagccccacgaattatcactctttgcccgggggggaaaattacaagccttgagctgaaggctgggggccccccccaaaggagcctggtaaatcggggccccat

SEQ ID NO: 83199 - DNA, 1549 bp, Glycine max
  Clone ID: PAT_MRT3847_46145C.1
gatactattcctcagaatcacaagagattgcctgtgcatttagccttctaatcacatttttctctatatcctcgaactcaaaataatgggctggtcctaaaacttgtaatagcctcacaaaaatcgaccttttttcccatcaatgttacttacaaactactcattttttttcttctaattttctccctctctttccttttctggtgtgcacctctcatcactttttgagccaatattcaaaggtgcctagtagtgtttgagatgtctggtgttcttctttgggtgagttgtggacccaaggagaaccctatctccattgttggtcttggcgggagaggtggcagaagccagaggaggtttggactgtgcaatgggatcagttttgcaagcttttcaccagcagtgcagacccttcaagatcctcagaggagagggtatatgaagtggtgttgaaacaagcagcactggtcaaggagcaggacaagggtacaaagagagctctgaatttggacaaaccaattgaaggtgatttaaccaatgtggatctgttgagtgatgcttatgatgagtgtgttagcgtctgtgttgactaaacccttaacatttaacccctcacacaattgataactgggagcaacgaataagtgatgtggttgaaggttgagtctatcatatgtatgatgctgccctctcacatactgtctcaaagtacccggttgatattcagcccttcaaggacatgatcgaagggatgagggtggacctgagaaagtcaagatacaataactttgatgagctctacctttactgctactatgttgctgggacagtaggccttatgagtgtcccagtaatggggatagcaccagaagcaaatgcttcatcagagagcatttataatgctgcattggctctaggcattgcaaatcaacttaccaacatacttagagatgttggagaagatgctagaagaggaagagtatatctcccacaagatgaattggcacaagctggcctttcagatgatgacattttcagcggaagagttacagacaaatggcggaaattcatgaagggacaaataaagagggcgaggatgttttttgatgaagcagagaggggagttgcagacctcaactcagctagcaggtggcctgtgtgggcatcattgttgttgtataggcaaatattagattccattgaagccaatgattataataacttcacaaaaagggcatatgtaggaaaagtaaagaagctattatcactacctactgcctatggtttttcacttctaggccctcagaagtttgccaaaatggttaggagataactgttacaatgtgtgatacttttcagttagagttgtatacatctcaatttaccatgaattgaagcgcatgagcaacccattcaattcatttaatcggtgggagcaaagattatctgatgttttcgaaggccggccttatgatatgtatgatgctgccctctcagaacagtctcaaagtacccagttgatatacagccatttaaggacatgattgaa

SEQ ID NO: 83200 - DNA, 2117 bp, Glycine max
  Clone ID: PAT_MRT3847_46146C.1
ttgcggcaaatatattcaattagagttttattgcaataggaataagtacaccaatgtctacccacgtgctccaattctccaactgctatcatcgaggaaaaccagaaaagatgaaagaaaattctgtcacctccatccttttaaagtatttttattaccacgtgttgaaattcacgtctttcttctctctcatccctttctcttctccccttctattttacgcccctcctctgtgcttagctctcttcactctgtttccattgagaggaaaaagaaaaaaaaaaaaacagcatgaagaaaatccgcaactcgatcctactcttattctttctgctggcagcctcggcggcggtttcatccgcggagcagattccttccgctgcctacgaccgcgtgcttttcccggaccgccgatgccagaagacggcgtcggagaacaagacgcggcgaggatcctctgcggcggcggcggagtgtgaggtgtggagtgagtcatgttcggaggcggtgctgagcgtggcccggcgcccggagacggcggagtggctgaagaagattcggcggaagattcacgcgaatccggagctggcgttcgaggaaatcgagacgagtcgtttgataagggaagagttggatctgatggaagttagttatcgataccctctagccaagaccggtattcgagcctggatcggcacggggggtccgccttttgttgcgatcagagctgacatggacgcacttccaatccaagaagctgtggaatgggagtacaaatctaaagttgccggcaaaatgcatgcttgtgggcacgacgcacatgtggctatgcttatcggcgctgccaagattttgaaaactcgagagcatttattaaagggaactgtaattctgttattccagccagcagaggaagctggtaatggagcaaaaagaatgatgcaagatggtgctttggaggacgtggaggctatatttgcagctcatgtatcccatgaacatccaactggtataattggctcaaggcctggacccctccttgcaggttgtggattcttcagagctgtcattagtggcaaaaagggtcttgctgccaatcctcaccgttctgttgatccagttttggctgcttcagctgcagttatcagcttacagggtattgtctcccgcgaagcaaatccattggattctcaggttgtctctgtgacttcgtttaatggaggcaacaatcttgacatgatacctgactcggtggtcctattggggactttcagagcgttctctaacaccagcttttaccagctacttgaaagaatagagcaggtgattgtggaacaggctagtgtctacagatgcttggcagaagttgacttctttgaaaaggagtacacaatttaccctcccacggttaatgataaccgaatgtatgagcatgtgaaaaaggtgtccattgatttgctgggtcataagaatttcagggtagttccacctatgatgggtgctgaagatttctctttctactccgaggtggttccctcaggtttcttctacataggagtaaggaatgaaacactggggtctactcatacgggacactctccatatttcatgattgatgaagacgttctaccaataggtgctgctgctcatgctagtattgcagagaggtacctcattgaacatggttgatgttggaaaatagttgaaagaaccctgctcttgttgtcacgtcttctcaaattcgtacaaaattggtacacgagttcacccgtccccctcatgtttctcacacgagtaaattctcagtttagttcgtgatattgcaagtgtttgtcactttagttattaaattaataaaatctttactttagtctctataataatatattcacaagcgtttataaaactggtacactggtcccccagtcctccccttgttcctcccatgagtacactctcactttcgttcgtgatatattgtaagtgtttgtcactttagctttgaagttaacaaaatcctttctttagtcactattttttgcatttgacattcactttacaaagaagcatcagcaccaagccttttgttgttgaaaaaaaaaaaaaaaaaaaaaaaa

SEQ ID NO: 83201 - DNA, 187 bp, Glycine max
  Clone ID: PAT_MRT3847_46147C.1
ggttgtgaatcaccataactcttccgtcttgcgtttctctgcctacaaggattgaaacatgggtcaagcactacgttgctagcaacttgatcagtcaaatgtcgatatcaccgagcattttggcacatttgatcatgtcctacaacctgcatgtcatcacctgccttggtgtcctgcgtaccacctt

SEQ ID NO: 83202 - DNA, 733 bp, Glycine max
  Clone ID: PAT_MRT3847_46148C.1
ccatttttcccatcaaagttacttacaacttctcaaatttttctaattttcttgctccctttcttttctggtgtgtgcacttcgtcactttttgtgccattcaaaggtgcagcataagaagtaagaggaagttgcctagtgtttgagatgtctggtgttcttctttgggtgagttgtggacccaaggagaaccccatctccattgttggtcttgctggaagaggtggcagaagccagaggaggtttggactgtgcaatgggatcagttttgcaagcttttcaccagcagtggcagacccttcaagatcctcagaggagagggtatatgaggtggtgttgaagcaagcagcactggtcaaggagaagaataagggcaccaagagagcactgaatttagacaaaccaacagttgaaggtgatttaacccatggggatctgttgagtgctgcttatgataggtgtggtgaagtctgtgctgaatatgccaagacattttatcttggcacacaattgatgacccaagagcgcagaaaagccatctgggccatatacgtgtggtgcagaagaaccgatgaactagtggatggacctaatgcttctcacatcacaccaaaggccttggacaggtgggagcaaagactatacgatgttttttgaaggccggccttatgatatgtatgatgctgccctctcagaacagtttcaaagtacccagttgatatacagcccttta

SEQ ID NO: 83203 - DNA, 1013 bp, Glycine max
  Clone ID: PAT_MRT3847_46149C.1
gtaaattttaggcacacaattgatgactgcagagcgccgaaaagctatttgggcaatttatggtatgtgtgattagattagattacacactcactgctatttcagcttctccagtgagacttgttttggaattgacaattattcattgtgcattgcagtgtggtgcagaagaactgatgagctagtggatggcccaaatgcttcgcacatcacccccggggccttggacaggtgggagcaacgactgagtgatgtttttgaaggtcgaccctatgatatgtatgatgctgccctctcacatactgtctcaaagtacccagttgatattcaggtactttacatagccaaatctaagattgagaattacatctttttagaacaaacttacatgaagttctttagttggttttgatgttaatctctgatcaaaattggagtatcacctttataatctatgttggcatttaatgctaacctttgttacgcatattgtcaaaataaaacttcaattttgattcgaaagcaatgcagataccgcctatgcaactttatgtaagttttatttatcccttagatataacatgttaaaattagtaactagaattaaattggtcattttacacgaaatagaggactaattagttctgttgaaacaaaattatgaaactagtttgaaccttctttttatgtgctaaaactgaagctaatgctattgaattgtctctttggaacagccattcaaggacatgatcgaagggatgaggatggacctcagaaagtcaagattcgatccctttgatgagctctccctttattgttactatggcgttgggacagtaggccttatgagtgtcccagtaatggggatagccccagaagcaaatgcttcagcagagagcatttataatgctgcattggctctaggcattgcaaatcagctttcttacattctcatagatgttggacagagagtaagtttctttgaacacttcaatgtcacgctattaaaccga

SEQ ID NO: 83204 - DNA, 1393 bp, Glycine max
  Clone ID: PAT_MRT3847_4614C.1
acggcacgcgttcggttatggagagggagtagtaagcggtcagcacgaacaaacaatcacattacacacttctctctcttcaatggccggaatccgcttgcagccggaggactctgacgtctcccaacaatcccgcgcggtggctctctccgccaccgatctggtctccgacgacgaccgctccgtcgccgccgactcttggtccatcaagagcgagtacggaagcactctggacgacgaccagcgccatgctgacgccgccgaagctctctccaacgccaacctccgacctccctccgattacagttctgacaaggatgaacctgattctgaagcagtcacatccatgctgggatttcagagttattgggattctgcatatgctgacgagctcacaaattttcgtgaacatggtcatactggtgaagtctggtttggagttgatgtgatggaagtagtagcatcttggacaaaagccttgtgtgttgaaatttctcaaggtcacataccaaatggtgtcgatgaggttaaggctgaagctgacaaactaggtgataaagttttgtctacttggagtgtactagatattgggactggcaatggtttactgctccaagaattagctaaacaagggttctctgatttaactgggactgattatagtgaaagggccatcagccttgcccaaagccttgctaatcgtgatggattttccaacgtcaaatttttggttgatgatgtcctcgagacaaagttggaacaagagtttcgacttgtcatggataaagggacactagatgctattggattgcatcctgatggtcctgtcaagagaatgatgtattgggattctgtttcgaggttggttgcatctggtggaatacttgtgatcacatcatgtaacaatacaaaggatgaattggtacaagaagtggagagtttcaaccaacgaaaaattgctactgcacaggaacttggggcagtgaaggacgaggaaccgtgcagagagcccccatttcagtatgtaaatcatgtccgcacatatccgacattcatgtttggtggatctgtaggctcccgtgttgcaaccgtggcattccttcgaaaatgaaaatgttgtcatttgttatgattaaggtctctggtcggatggatttgaagttgttcctaactgttgtgtcaaacagtaaatatctttttgcgatttatgtgaagttccattacctctccttcttgggtgaatagtagttatcattcggagtttatactctataattagtaaggagaaaatacagttagttcagcgtagcaaaagattttgttattctggttcttttgtgattctgattacgaggtcgatgaaactatatgggaattttgtgtttaccaaaaa

SEQ ID NO: 83205 - DNA, 322 bp, Glycine max
  Clone ID: PAT_MRT3847_46150C.1
ggggaaaaaccaaccattgcagaaaaaaagatccacaggtgtacgagtgcgatatgaagaagtttatatctccttctcggggagggaaaagctcagtaaggccaggacctattaaaatttaaatttgtctaagaggtgggttaaagcggcccaaacggatagggattttttgcccgtaacgtgaaaaaattgggacttaaggtggaatcgatacctgtaaatgttaattcatgttcttttcaaaaggaggttggtgtggtgaactgcaccaccttgtctatggacttgagagattactatgagaagcttggtattccaatgc

SEQ ID NO: 83206 - DNA, 812 bp, Glycine max
  Clone ID: PAT_MRT3847_46151C.1
tgaaatctctgtatgaatagccatttaaggacatgattgaagggatgaggcttgatctgagaaagtcaagatacaatagctttgatgaactctacctttactgctactatgtagcagggacagtaggccttatgagtgtcccagtaatggggatagcaccagaatcaaaggcttcaacagagagcgtttataatgctgcattggctctaggcatagcaaatcaacttaccaacatacttagagatgttggagaagatgctagaagaggaagagtatatctcccacaagatgaattggcacaagctggcctttcagatgatgacattttccgcggaagagttacagacaaatggcggaaattcatgaagggacaaataaagagggcgaggatgttttttgatgaggcagagagaggggttgcagagctcaactcagctagcaggtggcctgtgtgggcatcattgttgttgtataggcaaatattagattccattgaagccaatgattataataacttcacaaaaagggcatatgtaggaaaagtaaagaaactcttgtcactacctactgcctatggtttttcacttctaggccctcagaagtttaccaaaatggttaggaggtaactgttatacaatgtgtgatacttttgagttacaactgtatacatctcaagttaccagcatgtgttgaagagcaacccattcatttaatgagtttgcaagcatagtaatcagttttaaaatgtgtaaaaaaagaaggaaaaatgtgttaatccatttgtatattataaatttcagaggtcattcttc

SEQ ID NO: 83207 - DNA, 527 bp, Glycine max
  Clone ID: PAT_MRT3847_46152C.1
gagagagaaaataacaaaaggcgcatttaacatgcggcgcctggaaagacatgaaagaattcttttggcggctagggggaacaaaaataaaaggccccagcctcattggtacaaattttacatgaaccagcttttacaaggcaaaattttttaaggagactatttggttgcatatattttgaccctttcataacttcaatttattcatcacaggaagctttttccagtagggcaaaaaaccctttgggagcactcttttgaacgggggggaccttagggggacctccccaagggggggctacctcaaacttgggccataactcctttttaaaaggattttcaccaggacattttcccctttgaaacgaacttttaggcaggggagggctcttttgggtacaaaaatctttgggttgggtatgaccggtggaaaaataatcatcttcaaactggggggctgtgggctttaaaaaattgggcggttttctgaaccccccaggggccccccacacttttttttagagggg

SEQ ID NO: 83208 - DNA, 555 bp, Glycine max
  Clone ID: PAT_MRT3847_46153C.1
gggaatcaaccatgatgctgcaagccattttattacaaatctttcaaatttacacatgcaatgagtgctttaacagaattaagtataacattttatgcccgcattttcacgtgaatggtttccagtgaaaaatctttctttacacatagattcagagttataggggagtggattagaggatgtgtaacagttacatcataatctccatggtgcagtgaaatatctacaattcctctgttatctgctgtggcaatattaggcccagttccccactcctgaatcagcttgtccacaacgtctccagctggagtgtttttgaaagtttcatcggctagagtcgtggcgttgaaaccagcttgagctggaccagaaaacattataatcccttcaacagcaggatgagagtatgcctctcttagtatctcttccaggtactctgcctgactaggttgtggatccacacttgcttctgtgagccaaattggaagtccagtggtagcaagaagatcaagacctgacctcatataagcaagatttggccacacggacgcgtgg

SEQ ID NO: 83209 - DNA, 1259 bp, Glycine max
  Clone ID: PAT_MRT3847_46154C.1
taaaaaaaaaaataagtttttattcaatatagagaagaaaaaagtaaaagtggatcctctagagcggccgctttttttttttttttttttttttttttttcacccacaatgctgcaagccattttattacaatcattcaaatttacatatgcaatcaatgacggcttgcttcaacagaagtataacattttatgcatgcattttcacatgaatggtttctagtgaaaaatctttctttacacttagattcagcgttataggggagtggattagaggatgtgtaacagttacatcataatctccatggtgcagtgaaatatccacaattcctctgctatctgctgtggcaatattaggcccagttccccactcttgaatcagcttgtccacaacatctccagcagcagtatttttgaaagtctcatcggctagcgtcgtggcgttgaaaccagcttgtgctggaccagaaaacattataatcccttcaacagcaggatgagaataagcctctcttagtacctcttccaggtactctgcctgactaggttgtggatccacacttgcttctgtgagccaaattggaagtccagttgtagcaagaagatcaagacctgacctcatataagcaagatttggctggccactagcgaaatggccttgcaaccctattgctgctgacattccagaaactcctggaaatgacagaatctcctgaagtttttttatatatttggctgggctggaagcctcatccccactatactcaatggtgttaaactcattcaggaacaacttcggctcttgatcaagctcgtaagccgttgcatatgctgctgcagaggcattttcaccgaatttgtcctcgtaaaagtggaagtggagattctcattcatcacatcccatgcaatcagttctcctttgtatcttgaaagcacagatttcattctttcagctgctgcttctcgttaaatccgcaggtgatagattcttaacccaatccggctgatgttttggatcatcccagaaaatgttatgacctctcacagaaatgccattctcttgggtaaatttcagcatggcgtcggcaatagtgtagttttcctcgccttgctttttctctgtactataccacttcatctcattggtgaaagttgtgaatttgaaccttgacacaaaccaactctggtaatcttcgtttgtgaggatatagttcattccaccggacgcctgggcggacgcgtgggtcgagccgggaatt

SEQ ID NO: 83210 - DNA, 287 bp, Glycine max
  Clone ID: PAT_MRT3847_46155C.1
gtttacttataataatttgaaataacacttgtactgcgttcattttgagttgttaggcattcagctgcgacagaaacactgcgacagaccgacagactgtgtcactttctctcataatattcttgtatttattcatttttcgtgggcccacaccttttcgcacttctcgcgcacaaacgaccgaactttgacttcgaatgcgacttcaatcacttgccagtggactagtgaacaagatggacacgattaaacttggacactccggacaccatgccaatctgaatgat

SEQ ID NO: 83211 - DNA, 409 bp, Glycine max
  Clone ID: PAT_MRT3847_46156C.1
aatacatgatacgctatatttcatttcaatagcacaaccctggttaaactagcctttttcaaattatctaaacatggtataagcacctcaactgacagtgaaaaaatctaacgcgttcatatcttccaactaattgccttttccaagcattaacaagcttagacattggaggattccgatccacgagggctcgtgtcttccagggactagttaagcttcagccatgcacctttggtacatctatcaacagatatcgctaccttgacatgaatactgcctgacagagtgttcacgaacttgaaataagcctgtctctcaagaaagcctgaactacattgagccaaacaccacccaaaagctaattacaaattccaatgccatacgcatgttaaattcacgactgaaaagt

SEQ ID NO: 83212 - DNA, 332 bp, Glycine max
  Clone ID: PAT_MRT3847_46157C.1
aactgcaaccactcaccgtgttatgctagtgctgtggaatgtctcacactgcatgtatgactcatacacatagcatctgtgctataattgttcatctgaggcctgcttgatgagctgttcaatgcaactgagtgtgtcaccccattagcataactccattgaccattatgagggccactaccctgtggatcactattgggggcttagggacttgagagttagaaggacctgcacaggtcataaatgggtcttttttcgcatatttgatgcaccaaattcccattcccatcccaatcagaggaatcatttggcgtgaaatgaatgcaggatac

SEQ ID NO: 83213 - DNA, 1824 bp, Glycine max
  Clone ID: PAT_MRT3847_46158C.1
ccagtttaatgctttcaccaactaagtactacagagtactagaaacaaaacaaaacaaatcaagtgctcttataactttagagtccttttaccttggttctgatccagtcatatatcccccacgttcgttcgttcattcttcggtttctccgaatctgattgctgatttgggaaaatgctcctgggattctcaacgttagcgttgttggtgtgtttctcatgttgttggttattagtgttgggcgagggtgaaacggcgtcgtgttcgaacatagtggcgttggggcaccgcaccgacaacatatccataacggagtttgggggcgtgggtgatggacgcaccctcaacaccaaggccttcagagaggccatatatagggttcagcacttgccacgagaaggaggcacgctcctttatgtgcctcccggggtgtacttaacggagccctttaacctcaccagccacatgacgctgtatctcgctgccggtgccgttatcatggccacccaggattcattgaattggcctttgattgcacccttgccatcttatggaagaggaagggaacggcctggaggaaggtatatgagttttatccatggtgatggagttcaggatgtggtaatcacaggtgaaaatgggacaatagatgggcaaggagatgcgtggtggaataagtggaggcagggaactcttcagtttaccagaccaaacctagttgaatttgtgaattctagagatattattatttcaaatgtaatctttaagaattctcccttttggaacatacacccgtataggtcaatttaggtcatcaggattttaaaagcaacgttgttgttcgatatgtcacgattttggctcctcgtgactctccaaatactgatggcattgatccggattcaagttcaaatgtgtgcatagaggattcatacatatctactggagatgatcttgtggctgtgaagagtggatgggatgaatatgggattgcttatggccgtcctagctctgacatcacgatccggcgcataactggatcgtctccatttgctgggattgctattggcagtgaaacctctggtggggtggagaatgtacttgctgagcacatcaacctttacaacatgggaattggtatccacattaagaccaacactggcaggggtggatttataaagaatataaccatgtctcatgtgtatatggaggaagcaaggaagggaataaggatctcaggtgatgttggggaccaccctgatgacaaatttgatgccaatgctctcccacttgtgaagggtgtcacaattaagaatgtttggggtatgaaggttttgcaggctggtttgatacaagggttgagaaattcacctttcactgatatttgcctatatgatatcaaccttcatggagtgacgggacctagaactccaccttggaagtgttctgatgtgtctggatttgctcatcaagttagcccttggccatgttctgagcttagcagcaaccagcagggatcatgtgccaattactcctgagattatgggaatatatttccacttttcaagcattgacatgggcaaccaagggcttctttagttgatttatcataatgtaaggcaatgaattactatgaaatgcaaaatgaagacttgttggctttaaaactgagtagaattggttttgacagaaataattttgaattactgaatgtaattgagatgtatgtctaaattagtttcagtcatagattttacattaacacgtgtcacaatgaaaataatgaattttgggtttaaataaatatgccctaaattttttct

SEQ ID NO: 83214 - DNA, 207 bp, Glycine max
  unsure (1)..(207): unsure at all n locations
  Clone ID: PAT_MRT3847_46159C.1
gttcaggatgaggataagcnttttnctgagtttccctccttcatgcccttccatggcagcaccttcantctcctcngntctcaactctgtntcctcccctccctctntntntccttctccacctcctcccgccgcttctntctcctccctccaccctnacaccaacnctccaaacccctcttcctcaccctcaaatncaaacnctng

SEQ ID NO: 83215 - DNA, 320 bp, Glycine max
  Clone ID: PAT_MRT3847_4615C.1
gagaaacatcaagagtctattttatggtacccctacattttggaaacattccatggaaccctgatttggttatggggattggcaactagtcgatgtcacagatgtaccacacgacgggcatctgtgccatcaaagccataaacagtcgagttttgccccgccacgatcccaagcccatgcccaaagccccagtccagatcctgcccatgttctaccctgccgtcgatgttaacaagcccctcgtcaacaagcacgttcccaaactcgcgaaactcacggttagcattactccagggactgtgttgatcctgcttgctggg

SEQ ID NO: 83216 - DNA, 554 bp, Glycine max
  Clone ID: PAT_MRT3847_46160C.1
tgattttttatttttattttcaatttctaaaaataaagataaggcaacgcatcatttaagaagggtcagaatctgaaatggggcatgagtcattacaatggaaataaattgaacttgttactacaaggttgctgactaaacttgaatcatctctgctacaatttcgtaggtcacgcgttccaaaaccgcttcagcaacctcaacgcaaatatgtctcacttgcggtttcaactcactccattcatccatcgaatccaaactcagtaactttgttattagatttgtctcatttccacccaactcccttgtcctttcccatattatcttccccagctcttcgggtcccctagtcaattgtttcaaacattgttgttgtctacaatcttttctcgaaagatttataggagtactaatctcctcgagccaataaaataaaagttgctttgccttatgcaacaacgttttagacttcaacacgtggcaaacatctggatttgccccaaggaacctcgtgcactccttgctacacttttctctctggctgattgaataag

SEQ ID NO: 83217 - DNA, 422 bp, Glycine max
  Clone ID: PAT_MRT3847_46161C.1
acgagaaaaaacaattttaaaaaacaaacaaaaaaattcaattctcattctgaattgaattaaaaaaaaaaacctaatttagaaatcgatccttgaagtgaatagaatcttgtattattggaataaatattttttgggttgtattatttggataaatatttatttttatcattatttgagtgaaaaattcgttagaaggcacccagtgattcctaaaagtgcttatccgtggtagttggctttacttaaaacaataaacgggtcattatatagcagtattacactgtaaccaaagcacattaacatgaattatcatacatgatcagtttacaatgtaagtcgatcctaattaaaaggactatggaacagttttttcagcatgtctgccaagaagattaataaataggttcagttttattgac

SEQ ID NO: 83218 - DNA, 473 bp, Glycine max
  Clone ID: PAT_MRT3847_46162C.1
aaatgggtaaggatggttccttggccaaaattatcagaactgatgattttatatacactacactacaacatgtaaagggcatctgcccaaattaaatggaagacaattaatttaagagagaaagagaagagaataaggatagacataagaaccaccaacaaacaaggattcttcatatgcattcttgattccctacagtgttgctcagtgtgacaaaatgtgttaatggaggacttccctctccctactcctaagtttgggaaacaggtgaaccagcacctttggaactacgtgctgcttggttggcagacttgtccgtgctgcgaacgttgtatctttcatataccctgtcacggttctcggaccaccaggtttctgcttggtgctctccgaatctccttcggctgaagcgcactcgcttcagatctcttgttccatcatgcagtgccacaagtgttatgtagacaccaggt

SEQ ID NO: 83219 - DNA, 401 bp, Glycine max
  Clone ID: PAT_MRT3847_46163C.1
cttgtcttccgtctaaagtatccacgcatcctctctcacacttacggaagattggctaggggatggttcacactaaaatcgatgtaattgcccatgtctaacatcgtaaatactctaccactggtgacctgacccacattattggacgcattgaccatcctgttattgacaggtttgataataaagctgatgacatgaacaataggtctttcaaacatccctgcatgctgaacagactatgggccgcgcgctatagaggaacctccaccgctgttgctttgtggatttctgacacaacaaacgcttatctcacaagtatcgatgcgcctgcacatatggatttcattcataatatgattactacgacatcccaatctgactgtgactgtcttatcattgat

SEQ ID NO: 83220 - DNA, 371 bp, Glycine max
  unsure (1)..(371): unsure at all n locations
  Clone ID: PAT_MRT3847_46164C.1
gttaggaacatcaaggccacaatttggggtggttgcctcttccattgttcaatacacttattatgaaggttggggtgctacactttctcacttggatgctccnaaggcggacatacttttgcgaggataccctgcttggaattcaaggcgccctttgcaggttttgcatacaatttttcccaagggatgcccagcaccaaccctccttcgtgtttttttcctccccccccaaggggaggagggggggcaatccntctgcccttnnccctcccgtacctgtaaaggaatacaaccacactctcccccttcttcccatccctatgccccccctctcccccaacacccccccactatttcccccccctcccccc

SEQ ID NO: 83221 - DNA, 260 bp, Glycine max
  unsure (1)..(260): unsure at all n locations
  Clone ID: PAT_MRT3847_46165C.1
gttgatcttcatttgttgttgtttttgnaagaaaaaaacaaaaacttttgatctttttatgagcggaacgataaacaatatggtttgtaatggggacccaaaaatacttgttttgctaccgggatcaggccgggggtttttactacaaggctatggtttttgttttatccattgagattaaaaaggttctacttaataactggggggtgtaccattgattggaaattttgtttatttttctacactttttacatttaatg

SEQ ID NO: 83222 - DNA, 905 bp, Glycine max
  Clone ID: PAT_MRT3847_46166C.1
ggaggcgagagtccagagcatagtggagaaaagaagagtgtgtgtgtgggagagtgagagcaggacagcctcccactttgtttcgtaaatgctcaattttatctccgttacccaatttaagctgtttcaattcacaaacacaacacgcactaagcaatagcaaactagaacctttctcttctggttacttccaacttgttgctttgcttcgtcaccagaaaatgagtgctcatcaaaaagaaaaacacaacgcaccttcgtccaaaccaacggtttctcatccacttcacaaggtggatgatccaatgggggtgaccgatgaaaacgaaaccttgcgtgttagtaatcaatggaagcgacagaatcttcttcagctggaaataccggccagaacatcggaagagtcttcttctcaggattttgttggaataaggatgccattgacgccaagtccaactccaagtcagaaaagagtgaattttcttgtgacttctcgctctgttgatgctccaaagcctccttcttcatcatccagagccaaaccatccatgagaaacatcttaccaaaattcggcttcaggaaccgtgcaccatcgatatcgcttgatgttgaaaagggtgttactactgctgctcaagaaggttccttttctggtcatcaagagaagtcttcaatcccaagatcagtgtctctcacgaagatgtttactcctaagattaagagaacgtcttcattaccggttgaagaacttgggcgtgcaaacgtagaatctgttctgtgtggaattcttggtgcttctccatgtgtaagatctgtagcctatagctgtaaagttttaatttttaaaaccactctttaattaatttgcagcttgtcttttcataacaaagatttaattattttg

SEQ ID NO: 83223 - DNA, 321 bp, Glycine max
  Clone ID: PAT_MRT3847_46167C.1
cgcaacagcgggagggacacgggatcgagcatgtgcacatccatcgcagagctagcctgcactgcgtgcgcagatcttgatggatctgttaggtatgacaacacccttgactggaagttgtaccaattactttctctgtcatggatccatcttactgaggatagacacgtctatggtcctcgttagcacgcacacgacccacttgacgaaattactcttgtgctggacacctcactgaggcacactgatgatgtaatgctgaagcattcgctcactatgattgtaacaagggcgctgaccacaaggcatttgtgacctgcc

SEQ ID NO: 83224 - DNA, 204 bp, Glycine max
  Clone ID: PAT_MRT3847_46168C.1
catccattttgaactcaaccgaatcttaagcgcatcatcaagaagcagatcgaacgatcccctaacacaacctgcgaaccatagcgcatctccaaaaactagaaaaatagctcaccacttcctgggaaacacccaacatcctaaataagcaatcaaagttactgactagcacaagaaggaaaaacaccacaaacacatggaaca

SEQ ID NO: 83225 - DNA, 244 bp, Glycine max
  Clone ID: PAT_MRT3847_46169C.1
caaaagcccggggggagggggattagtacaggcgtagaacaaaaggaccattggtaagtgccataatacctgaagagtaacaacttattggacggaagcgttcccaacctataaacagtttaagcccctggacattttctctttcaaccttaaatacaggttagagcccgtggtcaaatcatttttttgttttttttcaggttgggcctgacctaaagcgatcttttttaatttcaaaaggccg

SEQ ID NO: 83226 - DNA, 512 bp, Glycine max
  Clone ID: PAT_MRT3847_4616C.1
ttttgttgctgttaagataagagattttattaaagtttgtcagattaattttttcgacaaagattaatcattaacataattattaaaaactttgcatctaaaattgaaaaagaaaagatacttaattggggtttctctcgagaatattttcagtttgtttatccacaacgtttgttcggggcattgattactttgatttaaaatttactcttgtacatcgttttttctcctaggctattgatgtgggatatacagtaattttttacattttgctaatgtacttatgttgtgggctaaggtgaacttgctaaaaactgattcaccataaggcatttgaatttaccgatacatatattaataaaataatgaatgagtgagactttttatacctgctggtgtataacgacccgttcggtgaaattgacacagtcgcacaaccattgctcttaagcacaaagagtttctcccaatgccttctcaaactcaaacgaaagcactcatatcttgactga

SEQ ID NO: 83227 - DNA, 409 bp, Glycine max
  Clone ID: PAT_MRT3847_46170C.1
gtactcgatcaataaaaacaataatgaagaattgtgcctacttgagccaaaaacaacatcgcttttggagggttttcccacacagcctgggatgctttgtccattttctagcctttcatgtccaccccttcttcgttcaactttgttatttcgagatcctttctatgattggatacctaagtctcaacgtctcaaagcctacaacccccgatagaccaaatgacttggacctattttacacttctgtttctgctatccacagtttcaagcatggaagctgttgaaacggacgttttatacaatgctcaacttattctcctcacccttctcatgttagttagtggtgaagatatcactagcgcgctcgaacctatatttgctaggtataaattcacccaaagtgtgcaaa

SEQ ID NO: 83228 - DNA, 423 bp, Glycine max
  Clone ID: PAT_MRT3847_46171C.1
cagatattcacatatcttggttttgggaggtatgtgcatactgctattattgaatcaaaaagtctgtctctatgttttatcttcccccccccgccccccctctagtggctagtgggaaacaagtacctgctacgtgatgttctctaaggcggtctctgtgatcattttatcaatgaaacagaatgggttttattgccttattgcttcatagagagcatcactgtggtggctacttgtaaagtttcccagctgcctaagggaattgttttctattcactgctcttggaatccacaacctggtcagcaatcgtgctagtatgccagagtccttgactgtgtcagtgtaaattattcctttcctttagccctgataggctcagcctttaatgtgcttcatattatttatcaacacctctcttctgt

SEQ ID NO: 83229 - DNA, 164 bp, Glycine max
  Clone ID: PAT_MRT3847_46172C.1
ataaatgtaaagcgctccattacaattaccaaggatcacttcatacttttaacataggtctctctctcacactctcttgctctctctcatgtctctttctttctctcagattgaaaaacatacaaatcaattagatttcatatatttaccaagaaaatataata

SEQ ID NO: 83230 - DNA, 885 bp, Glycine max
  Clone ID: PAT_MRT3847_46173C.1
ggcggcgggaggatgacataaatttcacccttttaagttttaatttacctcactcaagactcaaccatgattcttttgaaatgcaaaatgaagtaatggttgcctctatataaggcacagctaacaccagaaacactcaacaccaaaacagaaccaaagttatggataccctctctcagcttagccttctttgcctttgcctttccttctttccccttttcgcttcccctgctttgctgtttcaggggttcaactgggaatcaagtaagaaaggtggttggtacaactcgctgaagaacactattcctgaccttgcaaatgctggaattacacatgtttggctccctcctccctctcaatctgtttcacctgaaggttatcttccaggaaggctatatgatcttgatgcatcaaagtatggaacaaaggatcaattgaagtccttaattgctgctttccatgacaagggaataaaatgcctagctgacatagtgatcaaccacagaactgcagaaagaaaggatggaagaggcatatattgcatctttgaaggtggtactccagatgcacgtcttgattggggtccatctttcatttgcaaagatgacaatacttattctgatggcaccggaaaccttgacagtggtgagccctatgatcctgctcctgatattgaccacctcaatccacaagtgcaaagagagttatctgaatggatgaattggctcaaaactgaaattggttttgatggatggaggtttgattatgtgaagggctatgcccctagcattaccaaaatttacatggaacaaactaagccagaatttgcaataggagagaaatgggattctctttctattgataactatgacggccattcgtggg

SEQ ID NO: 83231 - DNA, 432 bp, Glycine max
  Clone ID: PAT_MRT3847_46174C.1
gtttaaataagagaaatgttcaattctaaaaaaaaaaaaaaaaaaaaaaaaaaaaaaaaaaaaaaaaaaaaaaaaaaaaaaaaaaaaaaaaaaaaaaaaaaaaaaaaaaaaaaaaaaaaaaaaaaaaaaaaaaaaaaaaaaaaaaaaaaaaaaaaaggggggggccgttttaggggatccaagtttacttccccgtgcttgcaacgtaatactttttttttggggcccccaaaataaaattcatgggccggcgtttaaaaccggggggccgggaaaaccccgggcgttcccaaatttaatcgctttgaaacaaatccccttttccccggttggcttaataccaaaagggcccgccccgattgcctttccaaacatttgcccaccttaattggcaaatgggaccccccttttaccggcccttaaaccccgggg

SEQ ID NO: 83232 - DNA, 761 bp, Glycine max
  Clone ID: PAT_MRT3847_46175C.1
ccacgcgtccgggataccctctctcagcttagccttctttgcctttgcctttccttctttccccttttcgcttcccctgctttgctgtttcaggtttcacattctcccctcccaattctttgattttgacccacacaaatgcacacaacacacttaacaagcaaccaccttacattaatagttatcttaaaagtattgcatcttatatttttcaagaaattgacatagaattgcatcgaatacgtgtcatatccgatatttgtatcgtatctgtacatcatagaccttatacatttctaactaaatatgcatgaatataataaatgttgtcacaggggttcaactgggaatcaagtaagaaaggtggttggtacaactcgctgaagaacactattcctgaccttgcaaatgctggaattacacatgtttggctccctcctccctctcaatctgtttcacctgaaggttatcttccaggaaggctatatgatcttgatgcatcaaagtatggaacaaaggatcaattgaagtccttaattgctgctttccatgacaagggaataaaatgcctagctgacatagtgatcaaccacagaactgcagaaagaaaggatggaagaggcatatattgcatctttgaaggtggtactccagatgcacgtcttgattggggtccatctttcatttgcaaagatgacaatacttattctgatggcaccggaaaccttgacagtgggtgagcccttataatcctgctcctg

SEQ ID NO: 83233 - DNA, 783 bp, Glycine max
  Clone ID: PAT_MRT3847_46176C.1
catacggaagcgaggaattcggcgggagaaaatggtgttctcacagttaccgttcccaaagaagaggttaataagcctgatgttaaggcgattgaaatcgctggttaaacttgttgttgctgagaaatcgtgagctttgctttgtgtaataactaataagtattctctgtcatgtgttcctgtggtgaattttgagaattgaaagattttacattgtgaaatgtaactgcttaagtggtaattgtgtgcttgtgtaattcatgtgaataaagtccagccttcagaaaaaaaaaaaaaaaaaaaaaaaaaaaaaaaaaaaaaaaaaaaaaaaaaaaaaaagtcattgtcgtgcgtaggtgagatattatgtaaaaaattttaatgtagcgcatgaaactttgcaatggtttggctgcctctgagcgaagtgggagtgaaattagtcggaagaaggatagagtggaacgaataagcggtagtggggaggacattgctgcggagaaaggtttggagcagtgggaaaggaagcgtaataagttggatgtgtacgatttcaatgaatacgatggcatggatgtggagaacataaggaggaggcatttggatggtcatgggggaagaaggtttatgggatcaatgcatgctgctagaagtggcattgatagggatttcagaacagggtcaagtggacgtgttctcgataagagaaagaactcctacggtgacaagcctaattgcttgtatccaagggataatgtgggtcacagtaggttcaaaatgaac

SEQ ID NO: 83234 - DNA, 272 bp, Glycine max
  Clone ID: PAT_MRT3847_46177C.1
gggaggcaaaactgaaatgtctatctataaaaaaaaggggaactcaacaactttttttatgttttacccacaccttactcccccaaaatttcaaaccccgtaaaagtaaagcccaggggggaacaggcttaaggggtccaggcccttttgaaaaacacccccttaattttccccttttagggcttaaatttaaaggacccttccaatccgggaaatccatttcccatagtttttttccgggttaagtccaaaaaaaaaaccccaaatttgaa

SEQ ID NO: 83235 - DNA, 464 bp, Glycine max
  Clone ID: PAT_MRT3847_46178C.1
cggcgatgatatgttctccgatgctgtgattcgaggtgaaagtcagaattgtcatcggacatgttggttatttggtagctcgtctgtgaatcaaggcgatacacaaggagttaaaaaagttgtggggattggctttcaaccaggaccagatcaaggaaagattgtgagtgctgctcatactagagatatccaatttcttgatataagaaaccatagcagtgcctatcttactatttatggtcataggggctcactaacagctttagcttgtgcatagacacgctccaattattgccagtggttcagcaaaacaaatcatcaaagtgtttagtcttgagggtgatctactgggcaccgttcgatactatcctaccctaatgccccagaaaattggttctgcaagctgcctcaatttccatccataccaagcattgcttgctgctggtgctgcacatgcatcagtt

SEQ ID NO: 83236 - DNA, 301 bp, Glycine max
  Clone ID: PAT_MRT3847_46179C.1
ctacctccttttcctttacttaccatttgttgcttctctccttttgcaaactttattgaatggtcttacaggcccgcgaggcggattccttttttaatcgaaacttttccagggaaaccttccgttgcgcaatggaccagttaaaaaagtggccaaagtaaacccccaatagggctaccaaccatttttaccccccaaacttgaaaataaaggggccccccccccttcctttgaacctccctacggaaagaacaaaaaaacattctccttccggtattctagagagggggttcatcccccc

SEQ ID NO: 83237 - DNA, 324 bp, Glycine max
  Clone ID: PAT_MRT3847_4617C.1
cccacgcgtgcggataggcaaacagacaacatttggagtgatcgaaacgctctgggagcattggtactcaacgcaaacatggcgagtacaagaaaatagactgattatgtgtatacgctgcatcactactagctcaggtttcgtaagagcgaacgacgcatatcgattgggcatactgaggctctggatcacaagcgaggacgtcggatcaaaccaatcaacgcactcatgtactctattatctgtcaagaccaatcccgtgatggcgcgcacttaatgtacactgacgtgatgcgataccgcttgaaaagtgtgcagaatatc

SEQ ID NO: 83238 - DNA, 747 bp, Glycine max
  Clone ID: PAT_MRT3847_46180C.1
acggttccggaagtatagcaaaatttgagctctagtgcggcgatgatatgttctccgatgctgtgattcgaggtgaaagtcagaattgtcatcggacatgttggttatttggtagtgagtgagagtgtaaaagcatataccataaaagttactcctaggtcaggctcgtctgtgaatcaaggcgatacacaaggagttaaaaaagttgtggggattggctttcaaccaggaccagatcaaggaaagattgtgagtgctgctcagactagagatatccaatttcttgatataagaaaccatagcagtgcctatcttactatttatggtcataggggctcactaacagctttagctgtgcatagacacgctccaattattgccagtggttcagcaaaacaaatcatcaaagtgtttagtcttgagggtgatctactgggcaccgttcgatactatcctaccctaatgccccagaaaattggttctgtaagctgcctcaatttccatccataccaagcattgcttgctgctggtgctgcagatgcatcagttatctatgctggaaaacagtttctgataataattatgtcatctttgtaaatgtgtgtaaatatcagtttccacataatggtttttcattcctgtaatcctgttttgtgtgctattcccaaccctttctggattcgtacatatttagccagaacacataagctagtttgttgacaaatgtgggtgattcactcctggaaa

SEQ ID NO: 83239 - DNA, 525 bp, Glycine max
  Clone ID: PAT_MRT3847_46181C.1
tagggaagatagtcaatggatgtttagtcggctggggaagcagtggtggagagttattgtttatttttctaacaggaacataatagtatttgaggcactgaagtttttgtggagcatttgtttgttgcatttggggggtttggagaactctgtggctcttccgctgttttctagataattttttatgcgaaagatatatcccaagtgttgaacggcttgagaagcggaacgggcaagtcagccaaagcaactttcagggaagcctgctcctcatctgactttgttttgagtttgtcttcgtatggtatttctgttttcgattgaagattaaatcacaagagtattctgtgattcttgatacaacgaattagaatggccaacagctatagataaattaatttctctgtattatttttcatctggacatgattgcgaaacataagcaatgaatacctttgctttctgcaatgtaatgtttgaaatggttttgtgttgcattgaggctcatgcatggtttggcgtgtc

SEQ ID NO: 83240 - DNA, 175 bp, Glycine max
  Clone ID: PAT_MRT3847_46182C.1
ggcggcccgcctggccccttatccagggtacaagagacgcgtgatgaacaagaagaagttccaggcccaccaccccgattaccaattcagaggcgacaactttgtccagctccagaagaccaggcccatctgcgagaccaatgcctatcgtggactccccgtgcgccaaaggccc

SEQ ID NO: 83241 - DNA, 420 bp, Glycine max
  Clone ID: PAT_MRT3847_46183C.1
tcgttccaggaaggtttcccgtcatgactgtatgacgtcctccttctttggggggggggggggggagagaaggagagaagagccggcaatatagaagaagtagtaaaataaaaaccttaaaaaaggaaaaataaaaatgggagaggtagagagcgaatagtgccaaacggaagtggggaagtatgccgggtggccgacaatggcatcacagcgacgtatgcgggtggttttggtttatggatatagatgtagaataaggagcaggtgatgtacaaccgcaacgtggccgtggtacatgagataacactggcggtggtggacagtggcgcgacctaaccaccacaataatgggtttagcggtattaattggaaaatgcggcaaaactatgcctgaggtgcagcaactaattgggtgcattg

SEQ ID NO: 83242 - DNA, 571 bp, Glycine max
  Clone ID: PAT_MRT3847_46184C.1
gcccagcattgtttcatacaagaacaaaacccacgcactctcttcttcttttttaatctccctcttcactgctctcgctgcatgaaattccgtcctatattgttacacattcaacaaatgatgtgaatcccttcttgttgccgtagcctcacacactcacttcttccgttgtaactaactttacttttccttccaaacggcttctaacaaactctcgccgcgatgttggatctcaacctcaacgccgattctgcctccgacgcgcaaatggagagctccggcagcttcaattcctccgtcgtcaatgccgccgacaccgacgactcctgctcctacggcgacgccgtcgcctacaacttcgccatcctcaacaccaccaccaccgccacctccgacggacctcccctggccgccgccggagaatcctccgttcgcaccatccagctctttccggcggtcgaatcgggagcctcgccggcgtggctggatttttcgtcgaaggtggatcagaacggtgctccgcaggagcagaggatctctccccggcaaccgccggtgaagaagaagccga

SEQ ID NO: 83243 - DNA, 357 bp, Glycine max
  Clone ID: PAT_MRT3847_46185C.1
ggacacccaaaatatgtgctccctgatgaggcagaccatgttttacatttgaccagcatttatgcagggtccaaaaaacgtttaggcagcaaggtttacaagaggacatttctgacgtgcacattgtaccagctcctatagatgcccttataaacgtgtcatatataaaaggatactaatcgtggcctgatcgcacggttttttagtcttaaaataaaacacagcggcgctgaaatttatcttgggccaaactagactatatctaacatgaacggtgcttgattatcgcaacacatatcttattgagttcttaagcggtgtttttttaccggcctgtggagctggcttgactgctga

SEQ ID NO: 83244 - DNA, 544 bp, Glycine max
  Clone ID: PAT_MRT3847_46186C.1
gagagagagagagagaactagtctcgagttttttttttttttttttaatacatttaaaactctaaatttcaccaagcaatttcaaataaatgttttcaccacacttcacatgagggtccaaaagtaccggaacaaggcaagttccacggaaagtacaacgatacacagagcacgagaagaaaaacaacacagaaagtaacataatagtgcaaacttctaatcataatcctctccttcatcaccatcttcagttgcctctgtacatgagacagcacgccatgtatttgccatggcggggatcacacttggccatcatagatgatggctcgaatgcactgttggtgatttcaccaactgatagctgctcatggtgagccttctcggctgaaattacaggagcataagatgaaagcataaaatgaatcctggggtttggcacaaggttggtctggaattcattgacatcaacattcaaggctccatcaaacctcaggggagcagtcagtgatgatatcacctgagaaactaaacgattaaggttggt

SEQ ID NO: 83245 - DNA, 359 bp, Glycine max
  Clone ID: PAT_MRT3847_46187C.1
gttttgcactagtcaatttgagttaatgtcagaacatttccaattacgtaaattttgtttgcaagcctcctcaatttggttatttcaatgttatattttgttatgatgcacaatttatcctttatacgatttgatattcgattttccgtcagttaatactggatcacgaacggtatctactattgtgttttcattgttaaatagagtttgatggcactcgcagagtgtgaaatttcattaaccggacaaaatatcatgttttggtagccatttgcaaactgctttggcgatatctttgatattttgattgatagctgcgtaacatgcctgaacactttccttggagaacatgtcctgat

SEQ ID NO: 83246 - DNA, 1816 bp, Glycine max
  Clone ID: PAT_MRT3847_46188C.1
cgcgtaagccagcgcgtccgacggctgcgagaagacgacagaaggggacagcactgcactcttcgcaacacaacaaaaaaagacaacccagagagcgcgtcttaataaacgctcttctctgaaaacccccatttcttttcttctttcttcttctctttcgcttcttcgatcttcgatcttcgtcgctgaaaatgagagagtgcatttcaatccacatcggccaggccgggattcaggttggaaacgcctgctgggagctttactgcctcgaacacggcattcagcctgatgggcagatgccaagtgacaagaccgttggtggaggtgatgatgctttcaacaccttcttcagtgaaactggggcaggaaagcacgtgccccgcgcgatttttgtagatcttgagcccactgtgattgatgaggttaggactgggacataccgccaactattccatcctgagcagctcattagtggaaaggaggatgcagcaaacaactttgcccgtggccactataccattggaaaggagattgttgagctttgcttggaccgcatcagaaagcttgctgacaactgcacaggtctccaaggttttctggttttcaatgctgtgggtgggggaactggctctggacttggctcccttttgctggaacgcctttcagtggactatggcaagaagtccaagcttggtttcactgtctatccttcaccccaagtttcgacctctgttgttgagccttacaacagtgtcctctccactcattctcttcttgagcacactgatgtggctgtcctgctcgacaatgaagccatttatgacatctgcaggcgttcactggacattgagaggccaacctacaccaaccttaatcgtttagtttctcaggtgatatcatcactgactgcttccctgaggtttgatggagccttgaatgttgatgtcaatgaattccagaccaaccttgtgccataccccaggattcattttatgctttcatcttatgctcctgtaatttcagccgagaaggctcaccatgagcagctatcagttggtgaaatcaccaacagtgcattcgagccatcatctatgatggccaagtgtgatccccgccatggcaaatacatggcgtgctgtctcatgtacagaggtgacgtagtgcctaaagatgttaatgcagctgttggaattatcaagaccaagcgcactattcaatttgttgactggtgccccaccgggttcaagtgtggaatcaattaccagcctccgactgttgttccaggtggtgatcttgccaaggttcagagggccgtgtgcatgatctccaattccaccagtgttgttgaggtcttctctcgcatcgaccacaaatttgacctcatgtatgccaagagggcgttcgttcattggtatgttggtgagggtatggaagagggggagttctctgaggcccgtgaagatcttgctgccctggagaaggattatgaggaagttggtgcagaggcaactgaagatggtgatgaaggagaggattatgattagaagtttgcactattatgttactttctgtgttgtttttcttctcgtgctctgtgtatcgttgtactttccgtggaacttgccttgttccggtacttttggagctttatgtgaagtgtggtgaaaacatttatttgaaattgcttggtgaaatttagagttttaaatgtattaaactttgggaacgattttttcatatctctgaaattttcgtgctattgctttttaatgccctggaataattctttaacaagattgcagaaaaacctttagcc

SEQ ID NO: 83247 - DNA, 488 bp, Glycine max
  Clone ID: PAT_MRT3847_46189C.1
cttcgttttttttttttttttttttttttatttacaagttaattgaagaaaatcaattggtttaatgaaattccccaaccccctctttttttatttgttcactacgtattatatgcaatacaatattatatgggagaaatattctaagttggaaaaaattgaaactaagatttttgatttttcaggacggggttaaaaaagattattttattgagatttttagaatatgtctatttctacccacactggaaagaatagggatcggactctaggaaaggacgaaaaatgccccctagagcacctttgacatatttcaagcgagatcgtttcaaattatccatctacatagagatctattgtatgcttaggttcgagtccaattttattgtattttacaaggcggacttctataaaagaactctctattcttgaaaaacgaagattgagaaaaacagggtcataaccataaatattcaatttattggggg

SEQ ID NO: 83248 - DNA, 590 bp, Glycine max
  Clone ID: PAT_MRT3847_4618C.1
ttatccaggctacctatgacaggctcctttccgaggcacccaaatacaaactcattactccttccattctctctgaccgtttgagggtatcttctatcatcacttttttttattattattcttatgttaaaggattattcttattgatgggagcgtttgtgttggtgatgttttgattcatttcatttattttgttgttcttaaaattaaattgtgaattataagagctttaatgtgggtgaggtctcagttatagctattccttaattggtagtcgtctataagatctgcattcctagactgattgattgtatggagcatatgtttggtattgttatgttcttaattgggattatctagactgattggttgggttccaacttcaattgttgcatatttgaaactttgtatattctgtgtcatttgagattccgaattgtattacaagccataaacctaggatttattgttagttgcacttatttatgtgtctatgctttgtccttttgctgccttttgggaaataattctggaaaattgttttatgttctaaccatatgacagtcttcttggcacatggctatgctcac

SEQ ID NO: 83249 - DNA, 1810 bp, Glycine max
  Clone ID: PAT_MRT3847_46190C.1
tttcggctgcgagaagacgacagaaggggacagcacagcactctttgcaacacaacaaaaaaagacaacacagagagaagcgtcttaataaacgctcttctctgaaaaacctgatttcttctcttcttctcttctctttcgtttcgatcttcgatctctgaaaatgagagagtgcatttcaatccacatcggtcaggccggtattcaggtcggaaacgcctgctgggagctctactgcctcgaacacggcattcagcctgatgggcagatgccaagtgataagactgttggtggaggtgatgatgctttcaacaccttcttcagtgaaactggggctggaaagcacgtgcctcgtgcgatttttgtagatctcgagcctactgtgattgatgaagttaggactgggacataccgccaactatttcatcctgagcagctcattagcggaaaggaggatgctgcaaacaactttgcccgtggccactataccattggaaaggagattgttgagctttgcttggatcgcatcagaaagcttgctgacaactgcactggtctccaaggttttctggttttcaatgctgtgggtgggggcactggctctggtcttggttcccttttgctggaacgtctttcagtggactatggcaagaagtccaagcttggtttcactgtctatccttcaccccaagtttcaacctctgttgttgagccttacaacagtgtcctctccactcattcccttcttgagcacactgatgtggctgtcctgctcgacaacgaagccatttatgacatctgcagacgttcacttgacattgagaggccaacctacaccaaccttaatcgtttagtttctcaggtgatttcctcactgaccgcttccctgaggtttgatggtgccttgaacgttgatgttaatgaattccagaccaaccttgtgccataccccaggattcacttcatgctttcatcttatgctcccgtgatttcagctgagaaggctcaccatgagcagttatcagttggtgaaatcacaaacagcgcattcgagccatcatctatgatggccaagtgtgatcctcgccatggaaaatacatggcttgctgtctcatgtaccggggtgatgttgtgcctaaagatgttaatgcagctgtgggaattatcaagaccaagcgcactattcaatttgttgactggtgccccactggtttcaagtgtggaatcaattaccagcctccaactgttgttcctggcggtgatcttgccaaggttcagagggctgtgtgcatgatctccaattccaccagtgttgttgaggtcttctctcgcatcgaccacaaatttgacctcatgtatgccaagagggcttttgttcattggtatgttggtgagggtatggaagagggagagttctctgaggctcgtgaagatcttgctgccctggagaaagattatgaggaagtcggtgcagaggcaactgaagaagatggtgatgaaggagaagattattgattagaagtttgcactgttatgttactttgtctgtgttgttttttttttcctcgtgctctgtgtatggtagttcttttcgtggaacttgccttgttccggtacttttggagctttatgtgaagttgtgaacatttattcgaaattgcttggtaaacttttagagttttaaatggatttggaaacgattttttcatatctctgaaattttcgtgctattgctttccctggaataattttggaacaagattgcagaaaaacctttaatcacgaagagtttctttgagattattactc

SEQ ID NO: 83250 - DNA, 401 bp, Glycine max
  Clone ID: PAT_MRT3847_46191C.1
cccacgcgtccgcccactcgtccgctcacgcgtccggttacgagaagattgccaggagagtataaaaaaaaggagatataaacatatgtgtcttgaatcgaattaactttcattcccttccaaaagagaaaatgagattaagcatgaaaagtgctttactatcaacactcccaccctcttcatcagttctcttattctcctgctactctaaattcaaactcaaatccccactcggaattcccattctcgctctcacctcctcttctctcccaaccacccgcgaccacgatgatttattcgaccctctttcccttcccgctccccaacaccttcacaaagccaccaacgccatccagagaatcgccctccgcttgcgcaacttaaggttagctttcaacaac

SEQ ID NO: 83251 - DNA, 407 bp, Glycine max
  Clone ID: PAT_MRT3847_46192C.1
cggacgcgtgggtggtgttggtgttcttttttcttattcttagtaatgaaaataatcaacaggggaaaaatgcctacttctggtaatggaaaagactaaacttctaaatactcttactatatctcactatttgcttaaactttattccttttcatgcttaaaacaccctaacactcacacataaatcccattttttatatccaaaaatatattcactattttcttactaaaatcaatataccttttacacaacaataattcttataactcaattacaatcattttttaaatcttttaaaaattttcaatataattttaaatacctttacacatacttaactttctttattaattatacttaattttccttttaatctaatatcttttctatataaaatctctatttt

SEQ ID NO: 83252 - DNA, 270 bp, Glycine max
  Clone ID: PAT_MRT3847_46193C.1
ccaccaactgatttagcatttcacgagctgtgtgaagatattttttgaaaacacaccattcacaataaaggcatgtaaaactatgaacattttctattcatagataggggccggcccctaggtgattacaaaaccccgcctggtctatactggaataaaatctctacctatctaaaaataaaatatgccattcccttcccataaagcataaaagctaaggcgcaaacatgaccaactttttgttggaacttattggaaaaaatttatctg

SEQ ID NO: 83253 - DNA, 344 bp, Glycine max
  Clone ID: PAT_MRT3847_46194C.1
atgcgagaaaacaccacaaaatggctccatttagctaatccaaacctaaaggggccttccgttaaaaccggggactctacttttctttacccatctaagcaataatatttcctatatatataccgaaaccattgctcacgccaaacctataattttacctattcaaaatctaaactacctttgatacatcattatctttctaacaccagcacccatattatatcaattttttaataataataccacccacagtttcctattactttctcactataatgcactcttcaattgaaatcctatgatattctatacttacataaacactggtgaaattcttcttatca

SEQ ID NO: 83254 - DNA, 1481 bp, Glycine max
  Clone ID: PAT_MRT3847_46195C.1
tacggctgcgagaagacgacagaaggggaacaatggcaacttcgttattccgcagcataaggagagctttctttgctctcagattctcgtactctacctcgttttcggtctctcccaggtcagttgttgggaggactcagatgtgtgtttgttctccgttgaggcactgtgtcccggtgggagagcaaggttattggtggggtttgagaaatttgagctatggcagggtgaaccttgtgataacgggagggaagaccaagtttgagactcatgaggaagagcctccgaagaaggacaagtggacgacaaagaagaggttgaagatgcagaggaagagagagaaggagaagaggagagcggccaacaggaaggacccccgtcaactcggcatcaaagggaagaagaagaagcagagatttgcctgtgcagaagagagaatcaagtacaagattgaaaaagccagaattaaggaagcattgctcattgaaaggctcaaacgatatgaagttcctaaagctcagggtcctgttgtaaagcctgatgacttgacaggggaggaacgattttatttgaagaaaatggctcagaagagatctaattatctacaaattggcagaagaggattatttggagggggttgttctcaatatgcatatgcattggaagaaacatgagactgttaaggtcttttgcaagccttgtaaacctggtcaagtacatgagtatgcacaagaacttgccagattgagtggtggtataccactttcaaataattggggatgacactataatattttatcgcagaaagaactatgaacagcctgaggttatgtcaccaatcgatacactgtccaagaaaaaggcacttgagaaatccaagtttgagcaatcactcgagtcagtgaggcgcttcgttgctatcgctgagaaagaattagagctatattgcaggcacgttgcactctatggtgatccaaacaaccgaaatcccttatcaatgatggacggcccaagtggaaactcaaaggaaaaaggtaatcatggaattagtgatgatttttcagtcagtctttcagagactgaagcagactccacggaaatggagctatcagaaatagaagatagtcttgaagatgaaaacatgtcaatgaatgaatcagattttgaagaggacagcatgttggattccaatggtaatcaagaaagagaggtatattttactaaaattcaagatgaaagtgtaagctcgaccacaggttcttgttcttcatcagtgtctgaagatagccactattataataagcaatacttataacaagttctattcactatagattaaatatattttgttaacagttaccttgagtaaatcaatacctcggaggaatttgaaaaatatattgagcggagtattatcctgttttacctgggactaatttctgttaggcctttatttaagaaattcaagttaagttctactc

SEQ ID NO: 83255 - DNA, 369 bp, Glycine max
  Clone ID: PAT_MRT3847_46196C.1
accggcaaaaacatagcccaacttttttaacaaatcaatcaaccatatgtctgtggcaggagttaccaaccaaaagcaatggaactagcggaaaaccgatatacaaaataaaagcccttcaggtgtaatcatacataacctccactgtgcatattgcttaataggctatgcaatcccacgcagcaagaacaaccaatgacggaggggaatacctttgcaatagaccacattgtgattcatttgcacccggaccttgacatgcttatacacttgtaattcaaaccaacttcagttgtgtatttgaatatatctctggtagaaacgagcattaactttcattttccgctgccaaacttgtctacaggaggg

SEQ ID NO: 83256 - DNA, 459 bp, Glycine max
  Clone ID: PAT_MRT3847_46197C.1
gggagggaaaaaaattttaaaacaaaatccttttttgacccacgaggaaatttgttaacgctacaagtacccagggggacaatatttggtaagggtataatacttattaggagcaaggggttatacttttacctaaacgtaactggtctgaattcaagggggaatacaaaattatgaaatttactttgctatgtacaaaaagggggacaggtagcaaaataagggatggcatttttaaaaagggctttgggataataaaaaatgcgccatgctcccaaggtctgggtcgggtaaaaacaaggtggggaggaaatttaagggggcccacccatggagggtggggcctttaatttttaaaaggggcaaggccaaagcttttttgttaaacgggtataaaccggggggtaatttttttgaaaaaaaccccaaagaaaggtcctgaaaaacaggggggggggg

SEQ ID NO: 83257 - DNA, 365 bp, Glycine max
  unsure (1)..(365): unsure at all n locations
  Clone ID: PAT_MRT3847_46198C.1
ttattattattatatatttgtgtgtggtagagggtgtcgcaaagcatgtctttgggcttcttcgtggatcttcttcgcgctaaggttgaactagccgttaagcgaggagacgcgatgagtttgtcttgtgcactacacgagctgttccaatcttcaactttttttaagactttttctttaagtttttgtatcaatttttcttctaaagcacttgtaattttcttcttttgaatcccgctggtcaaaaattaaaatgttattaaaatcctcattatttcatttanaacaatagtaaaatagaggaattctaatcattcctaatcaagattgactaataattaaacctaaattcacagttatcatat

SEQ ID NO: 83258 - DNA, 594 bp, Glycine max
  Clone ID: PAT_MRT3847_46199C.1
ggctcgagctcattttcgttttacatgttttgagaaagtgtgtctctcagaaaattattaatgtttgatgaaaagtgagaatctggacaaatactactgaattaagttttgatgctccagaatggagtgttttagcttattactttttatggtcttgttctatctgctccaatccatgatatacataacaacaacaacaacaacaaccaagccttatcccactaggtgaggttggctacatggaccacacgacgccatatgatatgcataacccctgattgtaatttatatatatgtttatatttatatttattttctcttgtaacacttgtcttcctgattgcttgtgaagttgataaataagttgtgttttcccaggttggtagtggaggagtccagaaataagtttgctaaccacgaaaaagaacttgcatccttgtctaaaggatttccaaatttctcaggtggtgggtctaacatcccgaaaatagaatccgaaattcaagaagagggtggatcaagggcaaacccacttaacacaaatcatcatgtagatggatatggaagagagaagacatggaaaaggacttgaca

SEQ ID NO: 83259 - DNA, 565 bp, Glycine max
  Clone ID: PAT_MRT3847_4619C.1
ctttattaaatactacctccggtcttgtatataagaaacaattacctaatccatcaagaacaataaaagtggttagattggttattttgtcataaatttttattttatttcaagactacccatgacattaaatggtttaagaggtgattattttccaaattcagccatgttttgttgatagttcaataaatgtatccacttttatgggaaaatgtgtgtatatcattaataggcctcataattaattaggggtaaaaagaaaatttagtaataaagtaatcctatgtttgttataattaggaccaacaaaatattgtctatttcttatgtacagtaccagaagtagtcattgatgacactcagattatttttattaataaagtaatcctatgtttcttttcacttttcttattggggttttgcactaatattaatttcaaaattctttttaacattgaccaaaagtagtctaagtgataagatcaaaagggcatttcaactgtccttgagtttctcttctgacaatttagatttctaatctatcatgtagatggtctttttgatc

SEQ ID NO: 83260 - DNA, 305 bp, Glycine max
  Clone ID: PAT_MRT3847_461C.1
ttggccaagattattaatcgttttggaatcgtggaatggattggggttaactgatggggggtagcactactggccaacgccataaaggcatgatctgcaccatcaacccaggcattggaacctgtgtgaattataaactatttgctcgtgcctcccactatcgcagaggtgaggctgagaatgctttacacctttatttgccacactgatgcaaacgttagggaagctacaggccaagctccattggtatgttgatttccggtcctgagccactgaggatgtaagagcgtatcgagggtgtgact

SEQ ID NO: 83261 - DNA, 417 bp, Glycine max
  Clone ID: PAT_MRT3847_46200C.1
gggggacgccaaaaaccacgtccaatttttattcatatgaaaatcatggccccaaaaaaatgccctcatggggtccattggggccctcgacataaatcccggattccccggtggaaaatttttaaaaaaaaaaaaaacccaaaaagggtccctggaaacccccaggaaaaaaaacttggtaaaaacctgttttttggtaaaagggggacctttattttaagggcaaatttttggttaaaaaaagcccgtttccccccccccacaggggcttggcccattgggcccttccttttggtttgaagcaactcattcccccattttgaacatgtcccccaaggaccccatttgtccaacaaaaaatcgattttgttttcacaggatttgcaggaaaggcccttttttacacattcccattta

SEQ ID NO: 83262 - DNA, 880 bp, Glycine max
  Clone ID: PAT_MRT3847_46201C.1
cacgcgtccggacgaggtgaagctaaaagagccaaagaaagagcaacagtggcatctccgcatccagcgtgagacacactcaaatgaaggagcaattaccaaacccaatcaagcaaacctgaactgccaacgtaatatccacgttcccccgaaaccccacacacctcgttttgaacgaattctctttctctttatcctgttctgttcccctcatatcactcactcctccgttaccgtttcagctttgtgaatcctgggatgcctctattcttctccttcaactcaatgccactccaagcatactgagtgtgtattaggactgttgattaggtgaatccattggattggggaattaagtgtactgtcaatggggggtgaaacaatgaacgggtcatggttcagtgttttgtggccagtctctcgcaagagtgcatcagataacaaggcagtagttggagttttggcattagaagttgcagggttgatgttgaaggcggttaatttatggcaatctttgagtgatgcggaggtattgagcctgagggaggggatagtgaactcagttggagttaaaacactggtgtctgatgatgatgattacttgatggaacttgcattgaacgagatacttgataactttcaatctctggcacggtctgtggctaggttgggtaagaagtgtgtggatccagtttatcatcaatttgaacattttgttcataacccggctcagaattatttccaatggtctgagtgggagtataggtggaaaaagatggagaggaaagtgaagaaaatggaaaaatttgtttccgctatgacacagttttgtcaagaagttgaagtgctagcagaggttgaacagactttcaggagaatg

SEQ ID NO: 83263 - DNA, 228 bp, Glycine max
  Clone ID: PAT_MRT3847_46202C.1
ctctttcaatctccattatactcatttaatatatatatatcttactcaaatccgctattctttaaacatctaaaacttaacacctatttaatcaccaacaattatcatctaataccttcacagttttaaacatcaaatcaaaactcgtctcatctatatcattcattcttacatacgcgtgcatactacctcatacatattctataaactcacctaacttcaattcac

SEQ ID NO: 83264 - DNA, 329 bp, Glycine max
  Clone ID: PAT_MRT3847_46203C.1
gtggaggttacagctttgcaaactatgaggacaagttcaaagaggagctacccattcatgagatagtgcattgcttaagcataaagttcaacactgttctcgggaaacttgaacctcttctaaactacagaggagaggccgcaggaggtgagattgagggttctgatgaagttgtcgaggccgacgatgttgaactcgccgtcgccgtcgatgagttgcgtggcgcagcaatcgtttgttggccatggctcgtgaagctgaagtggaagttgagatcagagaagtttggatctttgattcactttgcttcgagtggagttgttctttga

SEQ ID NO: 83265 - DNA, 438 bp, Glycine max
  Clone ID: PAT_MRT3847_46204C.1
atggcgttcgaaaaccccaagcccatctacatactcctcttagtgaattttttaatctttgcaaactatgaggacaagttcaaagaggagctacccattcatgagatagtgcattgcttaagcataaagttcaacactgttctcgggaaacttgaacctcttctaaactacagagaacagaacacgggcacacaaaccgagaacgacttgggttctggtggctctgattatgattttggagaggccgcaggaggtgagattgagggttctgatgaagttgtcgaggccgacgatgttgaactcgccgtcgccgtcgatgagttgcgtggcgcagcaatcgtttgttggccatggctcgtgaagctgaagtggaagttgagatcagagaattgttctttgattgtggtgtgtgcttacctccattactcgcattgttag

SEQ ID NO: 83266 - DNA, 402 bp, Glycine max
  Clone ID: PAT_MRT3847_46205C.1
taattcgtccacgctgatgcatacgacacagacaggtctggattagatacacacgatgtggaacacgacgagacagatcgacacgatatgaggggagagatatctatgatgttgtgatggtgtgatggtgttggtgatgtattatagtgacacgtagtctggacactgcacgcaagcggcttctccactgcgccctacctcctctactcactccacgctcaacgcgcctatcgcttggtgtacgacaagtatcgcgccgcgaggagcaggacgaggatgttgaagaccgagtagcacaggaagatgccgagatctcggcctcgcgtagagtagctgatgtcgagcggggcgtagaacgcctggccattgctgtactggcagaagttgcagtcgcccgtggcg

SEQ ID NO: 83267 - DNA, 2000 bp, Glycine max
  Clone ID: PAT_MRT3847_46206C.1
gtttcttagcattgtctcttttaaggggcatctggaaaaggaggattcgccggataaacacacatttgtctctctctctcagtgtgggaagaacgaagcagaagaagcatctcagaacagaaccaccgaacccactcagaagcaaatccgaaaacccctcatataatagtactggtattcagctgttcatgacaaaagcctgaaccgatcatgtcagaaggtgcagaaattgatgagcgtgtggaccttgacgaggaaaattatatggaagagatggatgatgatgttgaagaacaaatagatgatgatggagtggatggaggtgaagatgaaaatgctgaaggtagttttgaagaacatgaatatgaggactcagcagctgaggctggtgggaaagaccaattgcctgaagcagaaaaaagtgacattgctactgaatttggggatgatgagcaaaaattgtctttcattgatgaagatgagaaagagaagcatgatgaacttcttgcccttccacctcatggttctgaagtctttattggtggacttcctcgggatgtatgtgaagatgatttaagggaattgtgcgagcctatgggtgatattcttgaggtgcgactaatgaaagacagggacactggagaaaacaagggttatgcctttgtggcttttaaaacaaaagaggtagcgcaaaaggctattgaggagatacacagcaaggaatttaaggggaaaactttgaggtgttcactttctgaaaccaaacacagattattcattggtaatgttccaaaaacttggactgaagatgattttaggaaagttgttgaaggtgttggtcctggggttgaaaccattgagctcataaaggaccctcaaaatcctagtaggaaccgtgggtttgcgtttgttttgtattacaataatgcatgtgctgattattcgcggcaaaagatggcaagttctagctttaagctggatggcaacaccccaactgtcacatgggcagatccaaagaactcacctgaccattctgcttcttcacaggttaaagctctatacgtcaaaaacatacccgagaatgttaccactgaacaattgaaggaactattccgccgtcatggagaagtaacaaaagtggtcatgccacctggcaaagctggagggaaacgcgattttggttttattcattatgcggagaggtcaagtgcattgaaagctgtaaaagatacagagaaatatgaaattgatggccaaatgcttgaagttgttcttgccaagcctcaagctgataaaaaacctgatggaggttatgcctacaatcctggacttcatccgaaccatgttccacatcctgcatatggtaacttttctggaaatccttatggctctttaggggctggatatggtgttgctgctggttatcaacagccaatgatatatggcaggggtccaatgccagcaggaatgcaaatggttccaatgatgttaccagatggtcgaattggctatgttcttcaacaacccggtgtacaagtgccacctgcccgaccccgcagaaatgatcggagcaatggtccaagtgggcagccagggcgaggaggaggaggagctagtggcaatgatgaaggcaatcgtagtagaaggtatcgaccttattagggatagaaggctaatgcgatgtggcttatgcccccaaactgtcttttggtggtgagtggactttgggaacaagggacgtgtaattcatttgctataacatttgacagaaaatccctcttcacaatccctatcccataaaaggggggaaaagaaaaatataaagttaggattaggaccagtgatattctattgaactgtttaatgttggtgtctactgctgttagatgagtcacagcagagtaattgccatattttctgcttgtaatgcttcttggaatttttttattgacaaccagtagaaaattgtgttaatttgggttcggcaaaacaagcgaccc

SEQ ID NO: 83268 - DNA, 601 bp, Glycine max
  Clone ID: PAT_MRT3847_46207C.1
atggctctttaggggctggatatggtgttgctgctggttatcaacagccaatgatatatggtaggggtccaatgccagcaggaatgcaaatggttccaatggtgttaccagacggtcgaattggctatgttcttcaacaacctggtgtacaagtgccagcaacccgaccccgcagaattgatcggagcaatggtccaagtgggcagccagggcgaggaggaggaggaggtagtggcaatgatgaaggcaatcgtagtagaaggtatcgaccctattagggatagaagactgataaatgcgatgtggcttatgccccccaactgtcttttggtggtgagggggctttgggaacaagggacgtgtaattcgtttgctatatatcgacagaaaatccctcttcacaatccctatcccataaaagggggaaaaagaaaaatataaagagaaagttaggtttaggaccagtgatattctgcttaatgttggtgtctactgctgttagatgagtcacagcagagtaattgccatattttctgcttgtaatgcttcttggatttttttattgacaaccagtagaaaaatgtgttaatttgggttcagc

SEQ ID NO: 83269 - DNA, 307 bp, Glycine max
  Clone ID: PAT_MRT3847_46208C.1
aaaaaaaaaaaaaagaaaaaaaaaaaaaaaaaaagaaaaagaaacaaaaataaaaagaacaaagactaatggggtcttaggggacccacgtgagacacggtgtatgtggggtgtttctgccaagagtgtgcacttctggggaggaccaccaaccgttgtagtctttggttgggagatttgaagccgatgcgctgactggtggatttaacatggtgatatgttcttacctcgcatactgagtgctaaatccaaaggtttttaataaccgtgcaccacgtttttgttataacttagatgcgcaagcttt

SEQ ID NO: 83270 - DNA, 957 bp, Glycine max
  Clone ID: PAT_MRT3847_46209C.1
ccacgcgtccggcagatcatgttggatatcttggatatgtaccaaaactagttgctgctgttgcatttgagggaaggcgagaaacaatgtcatcaggttgttccgctgctaatgaaagccatagggtggcaaggtggaagcattttagctcttgagactctaaaacgtgttgtggttgccggaaaccgagccagggatgctcttgttgcacagggacttaaagttggtcttgttgaagttcttcttggtcttcttgactggagggctggtggaaggaatggcttttgttctcagatgaagtggaatgaatctgaagcatctattggcagggtgcttgctattgaggtcttgcatgcctttgctactgaaggagcccattgcactaaagtgcgagaactattgaacaattctgatgtttggagtgcttacaaagaccagaagcatgatctcttcctcccttcaaatgctcaatctgcagctgctggcattgctggtctcattgagaattcatcatcgtcgagactcatttatgctcttactgctccaccacaatccactacttctagaactcctccatcatcctctcccgacttcaatggaaagcaggatcaacctttatagtattaaaaaaaataaaatgtttttacatgatggagcatatacccaacaaacctatacctgtaacccacctgtatagtgcactgtacagttttgttatctagttgctcctgggttaactgggaagcatgcgcaattttctctagagttattcgtttgtgtaaagaggggatcttcaccttcccttccttttttccttgtaaattggatgatgtatttactattgctaaaaatagtgaggtgattttgcgcattatcgtcaaagatgagttttatttgtggtgttaaaaaaaaaaggaaaaaaaaaaaccccccaccaagggcggccgctttagagga

SEQ ID NO: 83271 - DNA, 582 bp, Glycine max
  Clone ID: PAT_MRT3847_4620C.1
ggtggctctgtgcttcgtgctgccctaagtccaccgcaaaatcaaacatgcgctagggcgttaaaaaacgtaatccagccctgattttggcccccccttccagatgtgttcatcggctatcaaagaatctattgccagtgtttttggagacaagctagatggtttgacgaggaactttgaacaatctttttgtagcaccttgagtactcttcagttaatttatgaatcatccaagagcaatgaaggaaataaattaaataatacaaagatggaaattatgagttctaaattgactctcaataaagaggaatgctcaggtgatattgttacagaggtcggtcattcaagacatgctgaaatccaagatcaatcaattagtcatgattctcctgaagaggtcagggataactttcatatagattcaattggtcgcgattctcctgaagaaggcagggataacattcataataattcagttagtcttgattctcctgaagagagcagggataactttcatatgggttcagttagtcgcgatctcactttgtatgggcaatcaaaccaaatggtttccttttctca

SEQ ID NO: 83272 - DNA, 1920 bp, Glycine max
  unsure (1)..(1920): unsure at all n locations
  Clone ID: PAT_MRT3847_46210C.1
atggagtgttgtcactcttaacagcacatgctccttgtttgcaagccatggttgcagatggatctagtctcctgcttttattacaaatgcttcactcagccccaagttgtcgtgaaggctctctccatgtgctctatgcattggcaagcacaccagaactggcctgggctgctgccaagcatggcggtgttgtctacattcttgaattgctcttgcctttgaaggaagaaattccactccagcaaagagctatggcagcgtccttgttggggaagcttgttagccaacaaatgcatggaccaagagttgctataacacttgcaaggtttctccctgatggccttgtgtcagtaattagggatggacctggtgaagctgttgtagttggtcttgagcagactacagagacaccagaacttgtatggacaccagcgatggcagcttccttatctgcacaaatttccactatggcattagagctataccgtgagcagatgaaggggcgtgttgttgattgggatttgcctgagcaggcatctggccagcaggaaatgagagatgagccacaggttggtggcatctatgttaggttgtttctgaaagatcccaaattccctcttagaaaccctaaaaggttcttggaaggtctactagatcagtatttgtcatccattgctgcaacccattatgaggcacaggttgttgatccagagcttcctttgctcctgtcagcatgctctagtttcctaactgcatttgcaccctgcactgcatttgagggaaggcgagcttggatatgtacccaaactagttgctgctgttgcatttgaggggaggcgagaaacaatgtcatcgggtgaggtaaacaatgggagacgtgcagaacaagcatatgacccggataatgaatcagcagagaacgcacaaactcctcaagaacgtgtgcgtctgagttgtttgcgtgtcttgcatcaacttgcagctagtaccacatgtgctgaagccatggcagcaaccagtgttggaacacctcaggttgttccactgctaatgaaagctatagggtggcaaggtggaagcattttagctcttgagactctaaaacgtgttgtggttgcaggaaaccgagccagggatgctcttgttgcgcagggacttaaagttggtcttgttgaagttcttcttggtcttcttgattggagggctggcggaaggaatggcttttgttctcagatgaagtggaatgaatctgaagcgtctattggcagggtgcttgcaattgaggtcttgcatgcctttgctactgaaggagcccattgcactaaagtgcgagagctattgaataattctgatgtttggagtgcttacaaagaccagaggcatgatctcttcctcccttcaaatgctcaatctgcagctgctggcattgctggtctcattgagaattcatcatcgtcgagactcacttatgctcttactgctccaccacaatctactgcttctagaactcctccaccatcctctccggacttcaatggaaagcaggatcaacctttacagtaaaaaaataataataatggagatatacccaagcctatacttgtaactcacctgtatagtacactgtacagttttgttatctacttgctcctgggtagcaactgggaagcatgtgcaattttctctagagttattcgtttgtgtaaagagggggatcttcaccttcccttccttttttccttgtaaattggatgatgtatttactattgctgaaaatagtgaggtcattttgcgcatttcgtgaaaaaaaaaaatttttaaaaaaaaaattaaccaaaaaaaannaaanaaaaaaaaggggcgggccgctnnctagaggatccaagggcttacgtacgggcggtgccatgcgacgtcann

SEQ ID NO: 83273 - DNA, 406 bp, Glycine max
  Clone ID: PAT_MRT3847_46211C.1
accaggtgatcttgattataagctaggagtataaatatttatttgaggcattctgttatgcattgcactagagttttattatttatcttcctttggaaatttaataacttgttattcaataagttagctaaaagaaaatcaacaagttaacccgcaatttagtaaccagtacccagctagcttttcaggtattttttttatcaaacatcgtcttggtcttaaagtagaatttgggaaaagcataagatgatctctttgatgttctctgcacatggatggagttacgattgttagttaactaaattcatgcttctaattctaagcttatctatttgaaaaattgcgaatgatcagagtaataattgtctcaatctattattatccgtggcctttttgtttctataat

SEQ ID NO: 83274 - DNA, 654 bp, Glycine max
  Clone ID: PAT_MRT3847_46212C.1
gaaagaaaaaaataaaaaaattcaatgccttcttttattttcaagagaaaccaaaaaggcatggaaagagtcgttgttgttgatgtctgccaagaaagatcacgcaaccgcaaggagtcagtagttaaggcaatttcctcactcctccccgaattagaaaacccaaactgaaatgaacttgaacttgaaccctttctaacaacaccacctccttttttttttttttttcaaactacttatttattcctaaaaatcatttttaattttgaggctttaggtgttctcaagtttttttggtgggtagcgtgtgaactgtgaagtgtcaattaaccgtttattattatatactacaatatttttgctttctagtttctagaaactcgacgaagcaaaattgagttacgcttttaatttgaaggtgttgttgttgttgttcttgttgttggtgttgtatgatctcgagcgtgaccgagaatgaacctgttaccggcgcgatccgtggacgaaactgtggaggagataatgaggctgcaccggtcgctaccggctcggctgggaatcgaggaagtggaggcggcaaggactctggtcgcgaacgtggagcgcgaggaccaggcgaagctcgaggccgtggcacgtgcgagggagcgcaag

SEQ ID NO: 83275 - DNA, 412 bp, Glycine max
  Clone ID: PAT_MRT3847_46213C.1
gaatgttattaaatttattttaaattgttacatattgaaaacgttttcgaacttgtgttaatccattttctaaaaagttttaaacagacatcaattaacgaagtatatttttgatataaccaccacctgtatcccttcaatgcgaccgccaagactaaacaattgttctatcatataaccacattttcaataggtcaatgctaacaaacgggacccaaatcttccctcttccctcgtttttaatcccttgagtgctgtgggaaactttagctgcattcataattggagccccctgaaaagttagaaatatgtcctagtaaacaaagccacgaaaaaaccctcgccaaggaaaacatgatctgaactaaccacgcattaagagccctcaaacaatgggagaccacgggattcc

SEQ ID NO: 83276 - DNA, 312 bp, Glycine max
  Clone ID: PAT_MRT3847_46214C.1
tccacgcctccggcgatttcagtcagctattttctgatcccagctcctatcatactcaatggggatcgggtgaataaaatgccgctcataaacatcaccgattgaccgcctgaacacgcaaaataccactaccccttgccagctgatctacatgaattcatttcaaacttcactcttcacttcgatcatctcagacttcagcataccactacaatcatactcagcgactacggcaactgccaacactatcagactaacttgcagctccatctcccatgcattcaccctatattaccccgtctcacattgaac

SEQ ID NO: 83277 - DNA, 456 bp, Glycine max
  Clone ID: PAT_MRT3847_46215C.1
aaaggttttctccaacacaatggtgttactgaggatacagttgcaatgaagcgaatatgtgggaacaccaaaaaaacacttaagcagttcaagaacgaaattgagttgctctgccagcttcgtcatcctaatttgatcactctattaggattttgtgaccacaaagacgagaagattgtggtatatgagtacatggccaatggatctctccatgatcgcctatactgtagtgatgtgaaaaaggaactactaacatggaagcataggctaaatatatccataggagcagcacatggactacactacattcacacaggtgccaagcaaaccatctttcatcgtgacataacaccttataaaattcttttggatagaaacatggtggccacttccggctttccttaaaaggaccgcattatgcatcaaagccaaaacccaagacaatatcaaaagacg

SEQ ID NO: 83278 - DNA, 600 bp, Glycine max
  Clone ID: PAT_MRT3847_46216C.1
tttttatagtacataatgctaaacatatattaagtgaaaatccatatataatggtcggctcaatttgattgggttcagtttttacaagatccaaaaaatgaaccaaactaaaaaaaatgaggttgttctacagcaatttagttcggtttaacaccgacccccaattttccaattccaactgacactgcaataatcacgagggagccacaaaagcaatccaattgacactgcaattaacccacccaaaattcccaacatctgctgcaataatcgtcatcagtaagagtggttcttcctccccgagtcttcatcagaaaaatgaagagaatgccacccaccaccaccacttcttccccaacccactctgctggtatagccactttcatcccttccaccaaactgatgatcaccaccatctctgccactgcctataccccagatatcacgtccatctgtgccactgcctataccccagttatcacgtcgaggctttgcttcttcaactctcaaggggaaacctcctagctcattatgatcaagatgtagagctttcctcacacttacaacatccttgaaccccaagtgagcaaaccccttaac

SEQ ID NO: 83279 - DNA, 136 bp, Glycine max
  Clone ID: PAT_MRT3847_46217C.1
tgaatttgcgctagatggagaccacaatctgttcagtgtccccagcaagaccagggagttgcagagcgatcgtccttacacctctgcagtgacgcgtgccgtgccggggcaatcctgagaagatgcctttagagtc

SEQ ID NO: 83280 - DNA, 487 bp, Glycine max
  Clone ID: PAT_MRT3847_46218C.1
ggctcgagaggcaggtgaggtgaattgaggttactgcaatgtcttctgcttgcgcgaccttgaaatccaatacccatttaccaaactctgagaagggctctctaggagaaagaataatgaggtggtcttcaaacaacagtagcccttggtaaatgaatcacctcgtctattcgttctacaagccacaagagggtgaaacatggggccggtgttgcatctgctgtcctcacttcaaacaatgccaaagaatcactgaccttgccagtgcctttctttttaagaagaagggctgatccaaagaatgttatttccatcatattgggaggaggacctgggacacatctttttcctgtcaccagacgtgctgccacacctgctgttgctgtggggggatgctcccggcttatagacattcctatgagcaactgactgaacagtggcatcaacaaaatatttgtgctgacacagttcaactctgcatccctca

SEQ ID NO: 83281 - DNA, 3260 bp, Glycine max
  Clone ID: PAT_MRT3847_46219C.1
cgctcgaggcactaatgaaaagccagttactatgtctattgagtctgttaacgatcctcagaccttgattaacaatatccaggtggtgcgttctgttgctcccgtcttaaatgaagagttgaagccaaaactgttgacacttcttccatgtatttttaaatgtgttcagcattctcatgttgcagttagattagctgcttcgcgctgcatcacttccatggcacagtcaatgactgtgaaagttatgggagctgtggttgaaaatgctatccctatgttggaagatgcatcatcagtttatgctcgacaaggagcaggcatgttgattagttttcttgttcaggggctgggtgtagagttggtaccttatgctcctctattggtggttccgcttctaaggtgcatgagtgattgtgatcagtctgtcagacagagtgtgacccatagttttgctgctcttgtacctttacttcctttggctcgaggccttcctcaaccaattggattaggggaaggtgtatctagaaatgcagaagatttgcagtttttggagcaactacttgacaactctcatattgaagattacaagttgtgcactgaactgaaagtaacattgaggaggtatcagcaggaaggcataaattggttagcttttttgaaacgtttcaagcttcatggaattttatgtgatgacatgggacttggaaagacacttcaagcatcagcaattgtggcctctgatatagctgagcatcgaacttcaattgggaatgaggatcttctgccatctttaattatttgcccatcaactctagttgggcactgggcctttgagatagagaagtatattgatgtttctgttatctctagtcttcaatatgttggttctgctcaggagcgaatgcttcttcgggatcatttttgcaagcataatgtcatcataacgtcatatgacgttgtccgtaaagatattgattttctaggacagctgttgtggaatcactgcatcttagatgaagggcatataatcaagaatgccaagtctaaagttacacttgctgtaaaacagttgaaagcccaacaccgcttgatattgagtggtacacctatacagaataacatcatggatttgtggtccctttttgattttctgatgcctggatttcttggaactgagagacagttccaagccacatatggaaaaccacttttagctgcaagagatccaaaatgttctgctagggatgctgaagcaggagcacttgctatggaggcattgcataagcaggtaatgcctttcctccttcgtaggacaaaggatgaagtcttgtctgatctgcccgagaaaataattcaagacagatactgtgatttgagccctgtacaatttaaactttatgaacaattttctggttctcgtgctaaacaagaaatgtcatctgttgtaacaacgaatgagtctgctgcagcagaaggaagtagcagttctactaaagcatcttcacatgtattccaggcgctccaatacttgctaaaactctgtagtcatccattgcttgtcattggtgagaagattccggagtcactttctactatcctctcagaactgtttcctgctggctctgatgttatttcagaacttcacaaactctatcactccccaaaattagttgctcttcatgagattcttgaagaatgtggaattggagttgacaattctggttctgagggtgcggttaacgttgggcagcatagggtcttgatattcgctcaacataaggctttcctggatataattgaaagagatttgtttcacacacacatgaaaagtgtcacatatttgcggttggatggatcagttgagccagaaaagcgttttgaaattgtcaaagctttcaattcagaccctatcattgatgtcttgctgcttacaacacatgtcggtgggcttggtttgaacctgacatctgcagatacccttgtttttgtggagcatgactggaaactgatgcgagaccatcaggtctatggatagagcacacaggttaggtcagaaaaaagttgttaatgtccatcggctaataatgcgtggtactctggaagagaaagttatgagtctacaaaggttcaaagtgtcagtggctaatgctgtcattaattctgaaaatgctagcatgaaaacaatgaatacagatcagttgcttgatttgtttgcgtcagcagaaacctccaagaagggcgcatctgttgtgaagagtccagagaacaactctgatggagacgctaaattagtaggcagtgggaagggattgaaatcaatactggggggattggaggagctatgggaccaatcacagtatacagaggagtacaatctgagtctctttttagcaaggcttaatggctaatgttccagattcatttcagagtcagagtgtacatatccatgagtacaaattttggcattgtaacatcttattttttttcccaccatgcccttcagtcatttttggtcgtcactttttttgtataccccaatgctggctggaatctgctcgtgtgcatgcagaccaggtaaatcagtgtctgtattttacagggcatttgagtgactggtggaagcccttggtggtgatatgtagagaaatgaatcggtgacggcttcaggagggatggagtaatattttttggattttgtacatatacagtcaatcctaattatagttataattgttgctaacataaaaaatgccctgcattttgcaatgttatttggaaagctactaataccaaaatacccattcagagaacaactcttatggagacgctaagttagtaggctgtaggaagggattgaaatcaatactcgggggattggaggagctatgggaccaatcacaatatacagaggagtacaatctgcgtcaatttttagcaaggcttaatgactaatattccagattcatttcagagtcagagtgtacatatccatgagtacaaattttgccattgtaacatctcaatttttttcccaccatgcccttcagtcattttttgtcgtcactttttgtataccccaatgctggctggcatctgctcgtgtgcatgcagaccaggtaaatcagtgtctgtattttacagggcattttagtgactagtggaagcccttggtggtgatatgtagagaaatgaatcggtgacggcttcaggagggatggagtaatattttttggattttgtattaaactttatgaacaaat

SEQ ID NO: 83282 - DNA, 141 bp, Glycine max
  Clone ID: PAT_MRT3847_4621C.1
ctccttacggtgaggaggtgcgagatgcaagcaccacctgccaagaacatatgagagtgcattctatacgtgggaggcaaaattaaatgtttatgttcacagaaaccgggattattggaaaatcctacaaaggtccccaaa

SEQ ID NO: 83283 - DNA, 252 bp, Glycine max
  unsure (1)..(252): unsure at all n locations
  Clone ID: PAT_MRT3847_46220C.1
cattgacggagtatactatgatagaactggtgaaataattcaaaattgatagtaccgaagtattgatgtattgggtcctttagataatgagcagttcttcactggatcatagcacatttacgtgacaatcattaatgaggatgaccttacagttcaactntctatctatgcgaacaggctcgcaacgctattaatgaaagagctgaacgtacctagctttaataatggcatcaacactactgatgggcatat

SEQ ID NO: 83284 - DNA, 292 bp, Glycine max
  unsure (1)..(292): unsure at all n locations
  Clone ID: PAT_MRT3847_46221C.1
cttccttctcacacttcccccaattcccaaaccaaactgctgtcttancttctctgtacgggcactctcttctttccggngtctgggggtnacatcgncggcnattncccantntgnntcnntcttcanccttnaattcaaccctnttggcttcggttcantggttccctcntcggnaannnttccggtcggctngtangggtttncntgttccaaatntccggctncgnaaggaaccnggaacttnatttccncggttaaaccnaattccnggtaatgggctatccgggaa

SEQ ID NO: 83285 - DNA, 320 bp, Glycine max
  unsure (1)..(320): unsure at all n locations
  Clone ID: PAT_MRT3847_46222C.1
agcctcggaattcggctcgagcccactatggagcttgtaagaatgtcatgtttttctttttcattggggaggggtaaggggggttcgttcattcagncctactagatggtatctaatnataggaaatacgttcttcattggaagttcttaaaatggggtttattcaagggtgatctgactcttttatatgatgaaatgactccttttgaagattcaccggctaatcaggttgttggtcctttatttttttcttggaacccaaagtattctagagcgattattatatagnactgaggcgatatatnnctgcgcattgaata

SEQ ID NO: 83286 - DNA, 748 bp, Glycine max
  Clone ID: PAT_MRT3847_46223C.1
aaaatatagtgacatacttgcttgttttatttgtttgtagagacatactggtgggttactcaaatcaagtaatgaaactagggactttgctgtttgagttactatcagaagctcttggtctgaactcaacctacttaagagatatcggttgcaatgtgggacaatttgcttttggccaggctcgagcttcctgtcctgaatcagaattaactttgggaacgataaagcatgctgacgttgatttcattacagtgcttctacaagaccatataggtggcctccaagttcttcatcaggacacgtggatcgatgtaacccctgtgcctggggctctagttgttaacattggtgattttctacagctaatctcaaatgacaaattcaagagtgctcaacacagagtactggccaaaactgttggtccaagagtctctattgcatgcttttttagtccagcattccatccatcttcaaggacttatgctcccattaaggaacttttatctgaagacaatcctgcaaaatacagagaattttcaattccagaatttacagctcactacagaacaaaatgcatgaagggtacttctcctctactacatttcaagatttgacaagtacaatgttgtaaaagtgactatgtccttgatccattgctctcgtttaacggagctgaatgtagcaaattttggaacttccactgtgtcaatttcttgaggaggaattaatgaaaaacttggaagagatc

SEQ ID NO: 83287 - DNA, 499 bp, Glycine max
  Clone ID: PAT_MRT3847_46224C.1
gcacgagcgaagtaatataacaagaatgttttattaaacagcgaaggcaaaagcggtagcaacggctaaagctgcatgcaatgcaaggtaagcataattgaactccacaaatttagtttgatatacgaatctgggtatgttgatttgtcaacgcaaacaaggtcacaatccctttctttcttcttttttccacgcatttatgatcaacggaaatggctgagagcaggtcaatagatttttatgaccattacgcaacaacgggatcagccccgctcttatttattaattattatcatgttaaataattcattgttcatcacggtgaaatatagaggattaattatacaagatttctcaacttaacttttgattttgaattcgattgttaaataattaaaaataaaattattttacagctcgtctgctgattttcttttttttttgtaccgttcatcctacttgactagaattacttcccataaataatttagtttctaca

SEQ ID NO: 83288 - DNA, 584 bp, Glycine max
  Clone ID: PAT_MRT3847_46225C.1
acgagaagaagtttggccatctctcatgctcccatgcttattggaccctcaagaaagagatttttaggtgaaatttgctctcgtcccgacgcagccaagagggatccttctaccattgcttcagtcacagctggtgttttgggaggggctaatattgttagggtgcataatgtcaaagataatctagatgctgtgaaggtttgtgatgcaatcctaagacagaaaagttctcacttgaaatctagacattagcatatctgctgatgatgttaattgtctgtccacctctgggtatttggatttatgcagcaacaactctgctagtgttgttgtttgctatgttgctcatactccaaggtcatatgtagaacaccacaatgctgccaaagccggaacaaagaagcattaagtacaatgtagcattcaataatcatcatactattgttcgattctcaattttgtctatcttgtatttatttcattccttaacatgtgtttgattcacggattttatttcaaccccatcacttgtaacttattgattcacaaatgtgtgttttgatgagtgttgataaaattgattt

SEQ ID NO: 83289 - DNA, 320 bp, Glycine max
  Clone ID: PAT_MRT3847_46226C.1
gaatttagatcaaaacttggaagctccttttgccatggccactagtgctgcacccaaacccaaccaatattatttcttcacattaatccttcatttctgtctcctccttatcatttccacatgcactactcaacaacgcttcaaacaagcccccaaattctacaacttccccagctgtcccaccattcgcctctcacccaccgacacgtgttccgacgaggcagtccacgtggccatgaccctggacgtaacctaccttcgtggcttcatgggcgccatcctctccgttcttcaacattgcttctgccccgaaaacatta

SEQ ID NO: 83290 - DNA, 332 bp, Glycine max
  unsure (1)..(332): unsure at all n locations
  Clone ID: PAT_MRT3847_46227C.1
tcncangnacgngngctcgganttcggctcgaggcngcgagaagacgacagnaagggggncacaagnttgttgcgatagctnnaagcantnccctgnaanngaaagtggctngtttngtnnngttgnaccatnggnggtggagttgccgtnntcnggcngntncnttnaanntntcncnngncaagatgccactcanggctnggtgnngnnntncgccattnaggnaggtccccnangttnngctgtnnagntcgaaacnnaagtngatngncnnnnagactgtcgnnatagctgnantganngnttcnngcnnnanggtgggtgnanntna

SEQ ID NO: 83291 - DNA, 331 bp, Glycine max
  Clone ID: PAT_MRT3847_46228C.1
ggggcccaaggtgggttttggaataattggttttttttggttcctggaaaaaccaaaacaggggcatgtggtgggggtaataaggctggtcgtactagtgttttattgcaggtgatttctttttagcttgtgagccgaataccgggtccattgcgacttctggccgtggcgagatcggggggattgtagaaaatcctgtggcaagctgacattggctgcgtgagggaacgtgcctttgatggcatttaatgactcttttggcttggtgcttacagaccttcaatggcaccaagtccaccggaccggtaatgttcccaatgatacttggctg

SEQ ID NO: 83292 - DNA, 472 bp, Glycine max
  Clone ID: PAT_MRT3847_46229C.1
tcctctatagcggccgcttttttttttttttttttttttttttttgggggtcacaaaccgttttgtcttttatgggacactggagttcaacacggaccaaacttattcccaaaggtcattacagacccattacacataacatttcttcttaaaatgtctggaaaaatccagcattgatcatgacacagatatcagttacaggttagaacccctctcgaaaacgcggcaccaagtgcagagttgactccttctggatgttggagtcaaagagggtccttccttcctctacctggttgcctgcaaaaataaccttgtgctggtccagtgggattcctttcttggactggatcttgcccttgacatagttaatggtgtcggagctctccaccttgcgggtaatagagttacccctaagggtctcgtcgaggatctgtttaccacctcaaatacccaccacccaaaggagagttga

SEQ ID NO: 83293 - DNA, 666 bp, Glycine max
  unsure (1)..(666): unsure at all n locations
  Clone ID: PAT_MRT3847_4622C.1
gnaaaagatgtgcgtccgcggacgcgtgggtgactgcccccatttactttctcgtggggggtatgatttgcttgaaaagaagatattggacgagaaaatgaagaaaagacaacatgaagcaatgatgactgagaatacaccacaccttgaagaccccctatctcccattgaaagacatgttaagtggaagttggcacgcacaaagcgatatgggcagatgacatctcaggcggcacaagaaatatctgataaaattatgagttgacgacatagggtacgtttgtcccacatggtcatgacgacatacttaacattgccattgggcgactggatcatggaggtcgtgttcaatgcaataggctctggggtcacaataagtcaatactatggaaggacatcacgtgcctctagtagctcatccacatccatcagccaacaacagttggttgaaatcataggaagccttaaggaagaatggaggaatgaatttaaagaagaaaacaaatgaagtctatagatattgaaacaagagttgaaggaacaaatcataattgagttgtcgcaaaggggatcacagttctcaacacctattaagggagatatacatgtgttaggtgcacgagtgagcacaaaggggagcaatgttgaaactgttgtcaacccatc

SEQ ID NO: 83294 - DNA, 299 bp, Glycine max
  Clone ID: PAT_MRT3847_46230C.1
gggaaaagggcaaaaaacaaaagccaaaggtagttaaaaaaggatgtttcaaggggggggctcaaaacgaaacgatagggaacaaaaaaacctaaaagagagaccgaaaattgggcggggaaaccaacgattgggggcaaaaaaaaccaaggggggataaaaaaaagagggactgttttaaaaaacggggcgcacccaactgggggcaatttggcaaaaaaaagaccccctaatggaaaaaagagttgaaaaaaaggggataaaaaaaaacgcgttaaacttcaaaacccacaaagggg

SEQ ID NO: 83295 - DNA, 2300 bp, Glycine max
  unsure (1)..(2300): unsure at all n locations
  Clone ID: PAT_MRT3847_46231C.1
ttgcctcgcgtccgaactccttaaacctctccgttctacttttctaacaccctaactcttgccacactcctccgttttctacgctccgcataagttaattcattcgataatggcatcgcgagcaattttgagaaggaggagaagtttaatccatcaatacttgaataactgttttgcttcttcttcgccgtctcccagtaatcgctctctggaattcgctatagctacgacgtcacctttgtttccttgtaagcatggaacgacgccgtacagagacggtttgttcaatcgtttcggattgggacaacttgttcctagattcggaagcgccgttccgctggacgctttttcgggattgaacgcgccgataggtgttcggtggttgtcgcagtcgtcggcggcggcggcgaaacgtcatgaaccggataagaacgatgagacggtggcgaagaagcggaaagaagcgtcaccggaggagtgcgatcaagccgtcgaaggcttgaccactgcgaaggccaaagccatggcgaaacgggcgcaagaagagtcgcagaaagacctgcaaagcgtgttgcgcaagtggcagttgtaccgcctccatttcctcgccccaagtctgttagatcatcctctaacaagctaccctacaatattatctaagccattcctccttccattatcacattcttggaattgtgtgtatataatcgcaactcgagaactgtataacatatgaacagggcccaaatgcttcaatagatgtctttaaagcataaaattcgttctctgaataccagcaacacgtccccgttttgtttggattaaggaagatgataaattgattcaaggagagagtgtggattctctttcagaagattgagaacgggaaaaatgtagagagcgaggcatgcttgggttgctttctgttgaagaaatgagccaacagcttcgagattggctggacttatctctgaatcactctgttccatcatctcttttgatactttcaaggtcatttactgtgtctgggagattgaaaccagaagaagctgtacaggctacactttcttctctccctgatgaggttgtagatactatacaggttacatctttgccctctgaggattctgtctcagagaggaggaggaaattggagttccttgagatgcaagaagaacttattaaggaggaggaagagagagaggaggtggtgcaggcaaggatggagaatagttctagtcaagatgataaggccctgaaagagatgaatatttcaacagcaaaagaggctcaccaacttgctagagacagagcatttgaaaacaaagaacaactttgtgaacttagtcgtgcattagctgttttagcttctgcatcgtctgtaagttcagagcgtgaagattttcttagactggttaacaaagagatagaactctataacagcatggtagaggaagagggtccaaatggtaaaaaagatgcctttaaggcatataaagctgcccgagaggaacatgaacacgctactgagtcgggtgaaggggataaggtgtcatcagcactcattgggagagttgatgctatgcttcaaaatcttgagaaggaaatagatgacgttgatgcgaaaatcggtgaccgttggaggctgctggacagagattatgatgggaaagtaactcctgaggaggtagcctctgctgcaatgtacttaaaggatacattgggaaaggagggtatccaagaactcatcagcagtctttccaaagatagagatgggaaaattcttgttgaggacattgttaagttgggcagttggagggaagatggtaatgctcctgaagatgataccagggagagggtatgatcccatcatttgacttccagatacatcctatttgagttccatgccacaaaatatgttgcgcaaatgtactctaggccattcgaattttccagtcattgatttttgtattcatgtattaataaatagttcaattgtagcagtcagacgaaaatgaagtgtgtgcaagctctgtaaatttttgacagctgagcacacaaatatactttaaatttataaatgaacgacacttgggccttgttggctattggggtgcattactgtactaaaattgaaatataagtgaaacaatactatttaataaaaaattgagagtgtggactgcgtttttgggaatcggtcctgcgttgagagctgtcgcgtctatgagtangggaggactgggcaaaaaaactggttcactggaaaggggaaatttgtgtcgaccttgcagcattat

SEQ ID NO: 83296 - DNA, 234 bp, Glycine max
  Clone ID: PAT_MRT3847_46232C.1
ggctcgaggttggacatagagctcttttttttgccaacaggacacagccacactgcgacggcgttagtctcaggaccgggcgtgctgcctgctcataaggcgacaatagaatctctaaccgccaagaaattcctgggacgacaaatggggtgacatgcagggaatgggaaaccactcgaacaccaaaaaggaccggacaaacaagagggagacgctagccgacagatatgaaac

SEQ ID NO: 83297 - DNA, 324 bp, Glycine max
  Clone ID: PAT_MRT3847_46233C.1
tttttattgagtctgtgcctttattcatgtcctacttcggcccagttaagtagacaccactatgcaaaaacatgccccaatgttgaaaacattgtcagagaagcagtcaaaaagaagtttcatcaaacatttgttacggttcctgctaccattcgtctcttcttccatgattgcttcgtgcaggtaatcaatcaattgcatgcatttcattcattcaccatataaatgctaaaaagaaagtaaaagagaaaatccccccattaatcacagtatcttctagctgaacaaatcaaattctatttatagctttgttggaatattaca

SEQ ID NO: 83298 - DNA, 356 bp, Glycine max
  Clone ID: PAT_MRT3847_46234C.1
gggtcgagggcgtttatggtttctcgatcttcgtcaataatcgcagtttacatttcagtcggggcttcagtcttcctatttacaatacactacatacagggcgaggtgcgtgatctctcggcagcatgcgaactgcatgggctgatgtggctgccaattctgcgcctgaaaatgcctgaacctctaacttcacatctccttcgcggacggttcatgcgcctccgcatatgagaaaccatggaccatcggaagctccatgatccaccacctacatcaattattactattattaataatactaatctgattactattattattagtattaagcataatgacggatcactgctgtgtgc

SEQ ID NO: 83299 - DNA, 216 bp, Glycine max
  Clone ID: PAT_MRT3847_46235C.1
ttttaaccttgtggatctgcccatcccgtgggagtaccaagcattgaggtatgcgattgcaatcgagagacttcaacaatgaggatttagcgaaaggggttgaacttgatcatggcttaggacatcgaatccgtctaagagattgaaatatttgatgactgtaatgcaaactgcctatgtgattacaatgacagagataattggcattggttggta

SEQ ID NO: 83300 - DNA, 169 bp, Glycine max
  Clone ID: PAT_MRT3847_46236C.1
tatttcagggggtcacattaacccatcgaagacatttgcgatgattttggctcgcaaggtgtcattaatccgacccatcatgtacatggcggatcacagctaatgtgctatctgtagacatggtttggctaaggctttccaaaaatgttacttcaacaaaaatggaggt

SEQ ID NO: 83301 - DNA, 193 bp, Glycine max
  Clone ID: PAT_MRT3847_46237C.1
cacaaatccccgctacgttgcgacccccttgaccctccgataaacccatcattctccatttccaacttccaccccatttcagtgacttggtaattcattaaggggttttaatcagcaactctaataacacttgcttatataatagcaacataaatcacattttggtaaaatgaaaaatgcctttctaccaaca

SEQ ID NO: 83302 - DNA, 1831 bp, Glycine max
  Clone ID: PAT_MRT3847_46238C.1
ctctggtctactcactaaatgagactgaagtatctactctgatctgcgagtccaagctgttgaagaagttggatgcaataagatcaagactaacctctgtccaaaatgttatttactttgaagatgatagcaatgatgaagatgctttctcaggaagtttgagcaactggacaattgcatctgttagtgaagttgagaaactcgggaaagaaagtccggttcaaccaagcttgccttccaagaatgatattgcggttatcatgtacacaagtggtagtacaggtctgccaaagggtgttatgattactcatggaaacattgtagcaacaacagcagcagttatgacaattattccaaatcttggtagcaaggatgtgtacatggcctacttgccccttgctcatgtttttgaaatggcagcagagtctgttatgctagctgtaggttgtgccatcggttacagctctattctgactttgactgactcatcaagtaaaatcaagcaaggaaccaagggagatgccaatgtgttaaagcctacacttatggcagctgtaccagctattgttgatcgtattcgagatggagttgtaaaaaaggttgaggaaaaagggggccttgtgaagaatcttttccattttgcatacaagcgccgactgggtgctgtaaaaggaagctggctaggagcttggggattggaaaagttgatgtgggataccattgtctttaaacaaattcgtaatgcacttggaggccagctccggtttatgctttgtgggggagctcctttatctggagattcacaacacttcatcaatatctgcatgggggctcctattgggcaaggatatggcttgactgaaacatttgcaggggctgccttctctgagtgggatgactacagtgtgggacgtgttggtccacctcttccttgttgctacattaagcttgtttcttgggaagaaggagggtatctgacatcagataaaccaatgccaaggggagagattgtagttggaggatttagtgtgacagctggttactttaagaatcaagaaaaaactaaagaagtgttcaaggttgatgagaagggaatgcgctggttttatactggcgatattgggcaattccatcctgatggatgtcttgaaatcatagataggaagaaagatattgtcaaacttcaacatggagaatatatatctcttggaaagattgaggcagcactatcatcgtgtgatcatgtggataatataatggtttatgcagacccctttcacaattactgtgtggctctagttgttgcttcgcatcagtccctggagaagtgggcccaacaagctggtatagattaccaagattttcctgatctgtgtaacaaacctgaaactgtcactgaggttcttcagtctatttccaaggttgcaaaatctgcaaagctggagaaaactgaaatccctgcaaagattaagttgctgccggatccatggactcctgaatctggattggtcactgcagctctcaagataaagagagagcagctgaaagccaaattcaaagatgagcttcagaagttgtatgcatgaaatgaagtttctaacctcttcaatttatggttggtgtatgttcaatgtatgtaatatgtaacaggtctcttttttatacaataatattattgaacatgtaactaatctgacataataaaatcatactccaaataatacttggctgtcaacatgaaattcttgccagtgaagccaaccaagcggctagcaatagatatagttgatttatgagcagtaatttttcttgaaaaaaaatacttatatac

SEQ ID NO: 83303 - DNA, 481 bp, Glycine max
  Clone ID: PAT_MRT3847_46239C.1
gagcaaacaacatacttttattcactataataaaaaaagcaatcttccaaaactttaccacaaattaccccggggctggggaaccccggggcctttagcatatttgaatttggaagaaaaagagagaaaacttaaaactcttatgccttaaaggggggggccccttcgaagaacattaaatgggggggggggggagcttaatagccccccccccctaaaacagggggggggggcaaagatcatatcggggctaaggggggggtatcaacaggggaagcctctggggcaaattgggccctggaagctctttgggccacaacaacattggcaggtttaggggggggaaaaggctcccaaaacaaggcccctctcctggtttgggaggggggttgcattggaaaacatggaatttgaccattggtccttcctaccccacaggacccaggttttgggacactggaaccctaggggggaggggggg

SEQ ID NO: 83304 - DNA, 376 bp, Glycine max
  Clone ID: PAT_MRT3847_4623C.1
cgactgtgtgaaccaaaaaggttcaatgcaccgagggctgcgctgcttatggacaaactggggtctaatgcatgatgggatggccccaggagacgaccacagttacctaacgagaaaggcaagatgcaaacacagtacaagaccggactacgcaactaatgagaatgatgaaactgtaaaaaagacagatgagagtgcagaatcagagacagagcaagcgttcggaaacgccatccttgaacaagcactatctggctccaacgatgcaaaagatatccattgatacacctgccggaattatgatggagaagactgtacaataccatattcggatgaattactagtgattactagaggtaatggatcagcgcatgga

SEQ ID NO: 83305 - DNA, 945 bp, Glycine max
  Clone ID: PAT_MRT3847_46240C.1
aaattgaaaattttctcatcactttttttccatcgagggcagaggtagggagaagtaagacaaataggtcaataacctgtagtgatactgtacaattctatacataagaaaaagaacaaccgctgggtggataaaaaatcaaagaatataaggcaactattacaaactcaacaaatcatgcaagcaaactaattgaaaatgaaaagaatacgaaaaccaaaatcaaatgaatgaaattaatatgaaataacacaaggcaaaaatgatttacgatatacatcttactaccaaaggtgaccccgtttctttttcatggattgtcttcaacaatgacacaaacttcacaaggtgatctttagagaaccactgaagcttcaatttaagagacccgggagcagtattttcatgattgacggtttgaaggttcatttgggtagatggatggagttctgcccgtggacaagtcagacctaaagtcacacagcagctgccaccaacctcaataaccatctcagcaatgtcagcaatggagcaacatgaatcaattctgaagtatggagaggcagacgcatttgatgataatgagtacagctgcttaagatcttcaatgcatataagcacattccctccaatcacaaagagtgatctcgatagccatgattcctcactgccatatttagaaaagacgagcaccattgcatactgatatatgctcacatttgaaccaccacatatttgattgtcaaacaactcaacctggatctgctccaaacttcttattgagcatctaccatttccaccacatgaatcaagcacgtgtatggtacatagtaattctcttgatttctcaatgcttcttgttacaaaaagatacgtttccccattctcaaaatttaccctgatcacccgaaagaattatactcagaaagctactgcttctctggt

SEQ ID NO: 83306 - DNA, 709 bp, Glycine max
  Clone ID: PAT_MRT3847_46241C.1
tgtggaagcttggaaggattgatggggacttggcgttgagaggaacgaggataagggctacatgggagtacgtgagctcagttggaggtgggcaacaagggatggtgggtttgtacgtgatttgtggatgcggagaactcgttttgcaccatcgcccgaccgccgtctagttccacatgtgatgggtaccccataatcctacaagcttgaaatgaggaagtgtagaagggtgaaacttcctgcttttattcgttgaccacatagtggtacctacagatatgtcgcgggggtcaggagaccttggggacgtcaggtggggtgctattgcccaaaaccaagcttgaccaatctcgacccaacccgggcatagtcagtcagtgagaacctgtgatgtacctaaacaggcgagctcctggcagtcaacaaataaaagaacaaagaccacaaagcaaggaggcttgtgtggtggttggccagctatggatcttgagtgatatctggaatttggcctctggtaatcgattatcaagggtgtgtaatcgattacaaggcttaaaaatggagacaggaagttaagatggcctctggtaatcgattaccaagaggtgtaatcgattacaaggcttaaaaatggagacagaatgttgatgtggcctttggtaatcgattaccaatgctgtgtaatcgattacacagagtaacagggcac

SEQ ID NO: 83307 - DNA, 377 bp, Glycine max
  Clone ID: PAT_MRT3847_46242C.1
ggactaaatactacttgataatgcccatgaacatgatgaagggtacctaatgattcatacataactttgataggagcttgtcttgacaaacaacagcttagatctagttgccaccggtgccacaaaggactatcgcagcaccatccacatgtgcgataagcatcaaaagcatcacaagaatgacaaagaaagggatgttagtttttagaatacttatagcccttaaatatgatttttttattattaacattactataactttccgctatatcggggattgtacctatgtgaatcaatacctagaacattgccggaccctaaaatggaaagtcccctaagcctatattgagaaggtgcggaaatatgatgctcaatac

SEQ ID NO: 83308 - DNA, 356 bp, Glycine max
  Clone ID: PAT_MRT3847_46243C.1
gtgcccggtaatcgcataaaacttaaaactttacagtcagaggttcaattcctcttcttaacaacatacccctcgcccccctcctactcctcattgtacccattctaatcgcaatcgcattcctaatgcttcaccgaacgaaaaattctaggctatatacaactacgcaaaggccccaacgttgtaggcccctacgggctactacaacccttcgctgacgctataaaactcttcaccaaagagcccctatgacccgccacatctaccatcaccctctacatcaccgccccgaccttagctctcaccatcgctcttctactatgaacccccctccccattcgcaaccccctggtcaa

SEQ ID NO: 83309 - DNA, 221 bp, Glycine max
  Clone ID: PAT_MRT3847_46244C.1
agattcggctcgagatcgtttctctacataatacaaacctctctaattactgaagctcattatacccaatctcgatatgcagatcttcgagaaaaccctaactggcaagacgatcaccttggaggtggagttctatgacaccatctacaacgtgcaggccatagtccaagacacggagggcattcctgccgatcaacagcgtgtaatcttggacggaaaac

SEQ ID NO: 83310 - DNA, 622 bp, Glycine max
  Clone ID: PAT_MRT3847_46245C.1
cgtactcgtggggacagacacaaactgatgggtctttcttcaactccacacccctaatccaacaccaacacataacccttcttcattctcaccttctgcaattcccacaacctaaaaacaaaaagatcttctctttttcatttttcgggaacacccttttattttttttcttctttttctcttcttgttgttgggtgattgttgttgttatcatttgatctgaaggttgaattttgagagggttattgatatgatttatcttttggactcttctgttaccagccttcattggcactgattttgctacctaccatgaattgtttgggattcatctgctgccagtatggaggtcgagagatctgttcttgttgcagttcttggatgtatatcatcatgtcctggactttctctgtgtgccctgcaaaggaaatgatgattgcaatgtctcaaatgcagatgccgctgatggatacatgacagttggaacttggaaattcttataggtttagaattagttgatcaggattgataacatttcaaattttcaattgtaattgtagttgctgataggtagattgaatggtctgaatagtgtaaaactggtaaagggttggaggctagg

SEQ ID NO: 83311 - DNA, 556 bp, Glycine max
  Clone ID: PAT_MRT3847_46246C.1
gcaattatttaatcataaacttgagaacctttccctccaccaagactctcaaaggtgcaaagcatggaatcataacctttgagacatctcctatgcattatcatggaagagaaataagccctacaagtctcaggtaaaggattctctaactatacataccttttatctcttctgcaaacactaactttaacatcaaagtccttacaaatattacactaaagttaacctggagaagatcttctcaaactattgaatttgtgtttgggaactagtttcattaaacgtaactaacatttttttcaaaaacaataaaagagatacttctacttttggtacctttaaatgcacagacaaccatttagaaggtctctacctttaagtattcttcatcttgattgaactgatgttaatattaataaaaatgaagaaaaaagttctaaagtttgcatgagttcgcattctataatttctattcaggtaattcattcttaacctgtaaataccacatttgagcgttaatgaaattcgggtagatcgaaatttcgtttctgacctc

SEQ ID NO: 83312 - DNA, 364 bp, Glycine max
  Clone ID: PAT_MRT3847_46247C.1
aaaaaataaaagcccgggaggccctttatttgaaacgggcccttaaggtaaaactggtttattttaacaaacgggcccgtttttttttttaaaaagatttaaaaaaaaaaacccaccatcccgcggggtgggtccacgcccatggaaaaaggtcttttttttttaaagaggaagttaaaatttttccccaagttttttaaaactataaatatagcctgatggaaaaaccataatttggcttcaccgtaaaaacctcggaaaggaaggggcccctgccagggtttaaaatttaaatgcctaaaataaaaaaggggcgaaacaacatttgaaaaaaagttaaaaagctgttttaattggattaaaa

SEQ ID NO: 83313 - DNA, 745 bp, Glycine max
  Clone ID: PAT_MRT3847_46248C.1
gaattcggctcgagctcgagccgctggcggagtcaactgaatgaccaaagcatcggttgcttccacttgtggccttcttcgaccgccttgacaccttaatctcagggaaccccctctcctctcttcttctcttcatgtatgtgggctgcctgccccgtcccgaatagacgaacaggaacaagctaaaggcgcgagagagagtttatactcaatgcacctcccctcttccacaattaggtgaagaccagggggccggaaaccccaacgggaaacctttcaccgcgccacacgattctttcacgaagcgctctctcagacgcactcctgcctccgcaagcaaagaggtttcaaagataccaccaggcgaccaagtgaaagtgaacagccccgagcaaatcttctagagagcgtacccgttgtagccaaaaaaagaaatgaacacatctatagttgtggacagtaaaaaaaagaggttcttcgaagctgtgctaatggtggtcaaggataaggtactagtttcagtgggagacattaagtctgcatgagaaatctgggagactccacagagaatgtatgagtcagtgacaatggtaaacattttcttcggcaacggttttttccaagcaagatgcaagaggggacgagcgtgtctcagcacttagacaagatggagaatcttctcccagaatttttagcagtgagagtcaaaatgactgatcgtgattagtgacccggaagtctgctg

SEQ ID NO: 83314 - DNA, 597 bp, Glycine max
  Clone ID: PAT_MRT3847_46249C.1
ctcggaattcggctcgagagagaatcgaagtggcacctgctgtatggatctggaaaatttgaaacaacagttctgcatgtaggaaatcgcatgcacaacctggaactttgagcaagttgaagctgaatcttttgaagaggcatagcttgcatgtagaagttcaaaaatacttctacaaggttgttctgaccatgaaatattctataacatttataacagagaaacttgactacctctagcatacaattaagaagctgcttaagatgaaggacacattactaacattacggacatgtattgtatacaacttgttaaagccactgaaatttctggtgtcttggagtattttgtgatttgtgatttgtcatttttattttattctttatgcagtagttattgtgttttcagtctaaagtgcaatgagttaagctttgtaattaagttgggcgggtggctcattaagatgttacgtagaagtaacttacgctctgttttgtaagccatattgtatcagaaacaaatgcattttgctgtatgaatgaaaaaaaaaaaaagtgttaaaaaggggcaaaaaaatttaaacaactttacaatagg

SEQ ID NO: 83315 - DNA, 350 bp, Glycine max
  Clone ID: PAT_MRT3847_4624C.1
gcgactcgagaaaatatattgatgatttattcttattattgagatggtatatttgaatacaggtctaactagcacatgatacacttctgtgaagacggatttgagagtattgtgactgctaatggttaatgccaaagatgatctgaagctaactagggcagacgccttgcttggagatattaaacctggattttaatgaaggaaccgatccctggggatgtgctatgtttgcctattgtaggagaacatatatgttcctgaatgacatcggtcccggtaatttgtatgaagctgttgctggagcactagctgacagcacgctctatcctgatatgtagatggcaagtact

SEQ ID NO: 83316 - DNA, 561 bp, Glycine max
  Clone ID: PAT_MRT3847_46250C.1
gccggaccggacctgcatgttcggcccaggccacccgctcggcctgatcatattataatgggtagattgaagaggagaccaagccgaaacataaccttgccaagggcggacaggcgagtactaccacgaccaagcaggttggctgagctgatctcatccaacacttatgtgttcgtcggctcaggctcggtcatggactacaacaagcaaactgacaacggagcgggcacccatgccggcctgatttatgtctgcatcgatcatgcatgcatcctctctgttggcggctgcgtcggtgcgaacatatatggcgggcaggtaaacccagccggcacctaccgtgcgtgccttggtgggaagataaactaccttcgtgggatggattacgtaattgatcagctacttggttggatcgatggctgcctccttctggcctgccttaccgactgcactgattgagcaatcagactgtctgttggatggggagggagcaaccccttgctggtggagatcgagatgacctaccgtctggtgggcacagactacgcaactgccattgac

SEQ ID NO: 83317 - DNA, 434 bp, Glycine max
  Clone ID: PAT_MRT3847_46251C.1
ggctcgagctgaatgttaattgcaactagtatcggatttgctaagttacaatgcactgtaaaataattaaggtaatggtatctatcactactgtcttatctactgtatcatcacattattgtgctcatgttcattaccgaatatagaattcaccagactttattgggcacacctcacatttgtctctacaagttgaatctctggtgctcatcatcctaacctgatattgagctccgctcaagtggtcaaaccatgatgactgtctttattaatatcaatctcgcaactgacatgctaagctactgacaagcccaaactgaattcaaagtatttacttttttttgcacgaatacaacgctatatatttggcacaggcagagctagtccaatgtgccgtgaattgcctaaatatgtatcaacgattcaattttaat

SEQ ID NO: 83318 - DNA, 233 bp, Glycine max
  Clone ID: PAT_MRT3847_46252C.1
aagaagacgacagaaggggggattcggttgtacatgcaagagattgactacatggggagaaaagcaaattccacagctttggtggtgctcaacacaaggaatattagagggtaccaatcagtgaaggaatgcaaaaaccaaaggtcaaaggtctatgggggaataaaatttcattcttacaaataccaattccaaagctagaccaccccaaaatctcaaaccctctggagttt

SEQ ID NO: 83319 - DNA, 250 bp, Glycine max
  Clone ID: PAT_MRT3847_46253C.1
tacggctgcgagaagacgacagaaggggagagggggaggggggctgagaaatgtggtaaatgccaatagatggtccacttgatgttgcttgggctggcgggcaatggccatgtctgcatacgacattagggcacatgggttgtatctgatgaggcagggcacaaggaaataggaacattatcacacgtcctcagcattccaaaggccgtttcttctttgtgacttcctttgacagtgatatcattctcag

SEQ ID NO: 83320 - DNA, 623 bp, Glycine max
  Clone ID: PAT_MRT3847_46254C.1
gcaagtgttataccctacgagctgcgtggcacactcttcactccctttcacggttgccaatgaggagaacgaacacactcctccgcaccttgccgacttcctcacatggcgcgccttccgcttccgcaccttcgccaccaccaagcacctcgagaccttcacggagcaattcgaaatcggctcgagcgtgatcacgctcgtccctgcaagatcgctcgcttcgccaacgccgccgtcgttttggcaatggaaaacaccaacgtcctctccaccgtcaccgcctctaaagccaacgacgccgttcgcgatttcttacctctcaccgtggattatcaagagaagcaattcgcgcaaggcgtgattccgacttcgttcatgcggagggaaggtgctccgagagagcgtgagctcttgtgtggtcgaatcatcgaccggccaattcggccgttgtttccaccgggattttaccacgaggttcaggtaatggcgagtgttctttcttccgatggaaaacaagatacggatgtgttagcagctaatgcaacttcagctgctcttatgctatcagatattccttggggtgggcccattggaatggcgcgaattggtaggatatggggaca

SEQ ID NO: 83321 - DNA, 212 bp, Glycine max
  Clone ID: PAT_MRT3847_46255C.1
ctaagtttcttcctttctctgctctttgccttctctgacacatttcggtgccttgtcagagcgtgttttgggcaggtaaggtggtataggcgaagggacgtatgaggtactgctgagcgatggctgccttgctctgcggaacggactgaccagtgtacccctgccaccatgcactcactccacttgagtgctcgatgtgagctcatcaaagt

SEQ ID NO: 83322 - DNA, 353 bp, Glycine max
  Clone ID: PAT_MRT3847_46256C.1
gttcagtgagagctaatggtggtgccgtttctattattgacaccaacagctggtagaaccagctcgaccagatgcctaagagatgctatctggctggcaaccaagagcgagagttgctatcatatcagctagagcatggaggtcatcaaagccagacaggaaagcatcagcgagactaagataacgagggaggcagcatattgagtggctggaccctggaattcttggaacatagcattcagcgtggacaagcagatggcgagaaacctacactgagagaacgaaggggacgactacggagccattgagacagtgaaaggatgtctgagcgtgataaatccacccacggacga

SEQ ID NO: 83323 - DNA, 426 bp, Glycine max
  Clone ID: PAT_MRT3847_46257C.1
aggggatgcacacctaggtacactacgcaaccggaataaggtcccgggaccacgcgctcactaggcgcgggccgcccttttttttttttttgtttttttttctttttttatttgtttttttttttttttttcttttgcttttttttttctttttttttttttatttaaaaaaaaaaaggggggccttaccaatggggggggggaaaaagggccccggagttgctttttaatttagcccacaacaacccggtttttaaacaaccacagaaaaagccgggaggccccccacggactccccgaagggcgatgttctcttaaaaacttgaaaaagggggaacacggggtaaaaccacccctggagggaagattaaaatatatccccgccgtcaaaaagagggccctcgataacaaaaaacccccccgcca

SEQ ID NO: 83324 - DNA, 453 bp, Glycine max
  Clone ID: PAT_MRT3847_46258C.1
gagggagaactatctcgagttttttttttttttttgttgttgtcagttctacacataagtttgaaatcatgttatatgtgacaacgaaactattttaagatatccagcttatttttaatggaccgtgattattttatatttttttataaaaaaggtgaaattacaatggaatgctttatatttattacattgtatttaaaatttcgctactgtagtaaaacttgattaagtttttatttaattttattactataataagaaaataattcttattgattactttcaaaatacaaaattatacttaatttttttatttattctcacattattttaatgccatctttcagttttattgtttaagtattttataaaccttaaccatttaatatcattgatgcatttaattgtattgtatttttaaaattaataagaagaaatgtgttacagtgttta

SEQ ID NO: 83325 - DNA, 370 bp, Glycine max
  Clone ID: PAT_MRT3847_46259C.1
cttcccaaaaaaaacccgtaattaatgatttcacaaaattaacagttggcctttggaaaccccctgaaaaacttaggggtttactttcccagcaccccatgtttcaagaacctaatcctacaaatcccgtggaaaactgaaaacgatcaccccctaccccagttccaaagccgttaaaaaagacttaaacaagggggaaaagcccaatcttgaacttcaattaaaggacttggagaaagaactgcgtttggaaataaaggaggactcctaccatccccttttttggaattggaatttggccgggaaccaaatgaatccggattgtcttacttgacaagcgggcgaaggggaaaatcctggtgagcctccg

SEQ ID NO: 83326 - DNA, 485 bp, Glycine max
  Clone ID: PAT_MRT3847_4625C.1
ttcgatttgatggaggtgaatacaaatagaggcttccttgctgatgtccttgcagagcgagctcatgaatttgaaaaacatgttgctcatgaaagcctcaaggatcaaattcctgccggtgacaagttgtattctactaaggttaataggttagcaaaaattatgaaccttagacaaagcgttgatggagaccttaaacttattactgatgggaagttgtatgagggacagcatattcctgtatctaatattagggcaggggaaaatcatgtattttaaatacccctaatggcacaagaagaaattctggcttgtggtgcaagtgattgaagaactgcaatggtgaagaaaaatagcaggcctcaatctactgcacagcatgtgggagctatagaaattatcattgatagtttcgcaagctctgactgacacataagaggtgcaatgcttttggttgatacttatcatacccaatctgaaaatgc

SEQ ID NO: 83327 - DNA, 481 bp, Glycine max
  Clone ID: PAT_MRT3847_46260C.1
gacgggttatgcacccgtccataaggtgggcattctgctcgagctttttcccaacaagaaggggctctttgattacactcaaactaggtatagaccaggaacgcggaaccccggtactaaaggatttgaataatgaccctactactttccgttttctatattcagtggcatgaggacatgttgaactgacccacaacaagcataggacactacgatagcctatatatcggaagtgaactcctagtttcaaaatataatcctcgtgattatcccttcatagcaccagaggatgaagtcatgacttatgtattccacgcaaagatcagcagagatgctcttataagccatgagattgtacaagaaccatggaacccggcactaaccatgtttaaggagcttgagtgcatttactaactgtggacggatccctaccctattcaccatgttgttgctgataaatgccacatgttcaagactgaca

SEQ ID NO: 83328 - DNA, 500 bp, Glycine max
  Clone ID: PAT_MRT3847_46261C.1
cgccgtaagctcggaattcggctcgagcgtttttctcaccattggtggcacacaagccatagatataattttaccttccctagcacgtcctggtgccaacattctccttccaaaaccagggtacccacattatgaacttcgtgccactcgttgtcttcttgaaattcgacactttgatcttttgcctgagagaggatgggaagttgaccttgactctttggaagctttggcagatgagaacactgtggccattgttttcatcagtcctagtagtccatgtggaaatgtgttcacgtacgaacatttgaaaagggtgtgctgagattgcgagcaaacttggaatctttgtgatttctgatgaagtttatgcccatgttacttttggaagcaaaccgtttgtacccatgatggagttttcgtcaatagtgccagttattaccattggttctttctcaaaacgatggttcattcctggttggagaatccgttggataacctta

SEQ ID NO: 83329 - DNA, 344 bp, Glycine max
  Clone ID: PAT_MRT3847_46262C.1
gttgaccttgactctttggaagctttggcagatgagaacactgtggccattgttttcatcagtcctagtagtccatgtggaaatgtgttcacgtacgaacatttgaaaagggtatatataattataagctcaaacttgaaaacatatgtatttgagttgagaaaaaaacaaaaggttgtgattttttcatgactcttattttaggttgctgagattgcgagcaaacttggaatctttgtgatttctgatgaagtttatgcccatgttacttttggaagcaaaccgtttgtacccatgagggagttttcgtcaatagtgccagttattaccattggttctttctc

SEQ ID NO: 83330 - DNA, 551 bp, Glycine max
  Clone ID: PAT_MRT3847_46263C.1
ccacgcgtccgatgttgtatggttaatcctgactacttgtggttggaggatgggatattagcaatatgaacctggttgatgccatggacagcgcagaggtgtgagacattgattagtataatcagctgacgccttacatggaatccatgcttccactccctggactatatgacccgacttgattactggccgaccagaaggagcaggccaacaacgaagttgagggcgcagagcattatcatgtctcatcaacatcatgaaaaactacctggtgcacaacagactccgcacacacgggacgaggctggttgctactgagaggctgccaacagagaaaggtgcaatggtgtgcctgcgggacttactgacaccattgcaaatctcttgcgtgctgagcacggacttgacgctgacattgctccttacagcctgcatgccattgatcagtgcatgcaaagtggttcttctattaaaggaccccctgataccactccagttccaggactgagagcgcttgacatctggcagaacactcctattggggcagatga

SEQ ID NO: 83331 - DNA, 230 bp, Glycine max
  Clone ID: PAT_MRT3847_46264C.1
ggtttccgtgattttcttataatcagtttccaagtgtcggatttgatatcacacctgacatagtatcagtcgttttcgctatggggtcactaaaggttttaatcaaactgtggtctaaagaaaaataaatattaagggcttgtctgatatttttttttcaattttttggttttagaagttgctatgtaaaataattttgcactactcagcaattattttcttatctaaaa

SEQ ID NO: 83332 - DNA, 219 bp, Glycine max
  Clone ID: PAT_MRT3847_46265C.1
gattatcatcaaatcaagttaaccaattatacatacctccttcatctacccttttcgaccctcttcattacccttcactaactcctacctttttctcattatacatcacattcccaatataagaaggttcactacacaacacaacccttcaatgacatacattttccctatttatccccaaacctactttatctaacactttctatccaaaccttccat

SEQ ID NO: 83333 - DNA, 530 bp, Glycine max
  Clone ID: PAT_MRT3847_46266C.1
aattattaggtacacccgccactcacccgagtctcagctttgcaagttcggcgcccaggctcggaaccgagcctccggtaagattccaaagctgcgcccctcgaaaactccactgaatgagagacgaagcaaggggcaaaagagagagaaagaaaccacagcgcatttctggagagagaaaagaaggaaccgattctagagagagaaaaagcggtggatttctagggagagagcggagggcgcgagcgcgatggttcagatcgcgaggaggaagaagggacggccgtcgaaggcggatctggcgcgccgctccggcgagtctccgtccgccgcgtcgcagtccgatccccggcggagcctccggcgtcggagcgtgaggtacaacatcatcgactacgacggcgattacctcgacgacgacgaggaggacgagaggaggcgcaagaagaagaagctcaagctcatggcgaagctgaaccaggacggtgaagaagaagaagaagaagaagagcgagaagaagaagaaatcg

SEQ ID NO: 83334 - DNA, 276 bp, Glycine max
  Clone ID: PAT_MRT3847_46267C.1
gttctagatcgcgagcggccgtcctttatttttttttttatcttttgttttatcggtagcaacaagccaacaaccaattataactctaagaaaattgaaaggagaggaagaccatggaacagggcctttgaactgaaactgactgaacaggacccagatacaggggcatatccactgtgggatgatcataaaaatccttggtaaaaattttcttgaatttcaaataacgtaattctcatataacctttgttttcactcttttaaaaaccaattgac

SEQ ID NO: 83335 - DNA, 257 bp, Glycine max
  Clone ID: PAT_MRT3847_46268C.1
atgggatctaatttgcaaaaaactagcaaaagaacaaaaagtcatacttgactcatctcattttaaaaatccaaattaaatatgaactttttttttggtccggcctatggtaacttgtaacatgtatcgagtcggataactcgttttgttacatgtaaaaatagtgtaaatctatacttaaactttaatttccactcaacaaaatcaccttcaacttaaacaagtctagactaacaactattttttatgtgatagta

SEQ ID NO: 83336 - DNA, 228 bp, Glycine max
  Clone ID: PAT_MRT3847_46269C.1
cactagtcggctgacgaccgttagtcttgggtttgttttcttccacctagaaaagcatcacataataggtgatactccatacaaatgaatcgagtattcgagatgttgggataaacaatagaggttatgaaccttcgagaaccaacacttctaagcctgcgccgtggtgaaaaagagatctgacttatcagaatatgctccacctgccttgagccatctaagagatcg

SEQ ID NO: 83337 - DNA, 647 bp, Glycine max
  Clone ID: PAT_MRT3847_4626C.1
ggggggttgttttcttctttttttttttttttaaagaagaataaaatttttggctcgtgaagtcaactattcctttggtatttctttcagtttttctatccctgcccgtagaggaaccgacctcagacctcgtgatccatgcttttttgccatctagtggtgtgtgttccgaacgggccctaaaattcagtccaagtccaatgattcaaggcccctgcgcgcctggatctgaaaagctgttagcctctgctcagtctctactgttgaagcgaactgacgactggctgcccatttcaagggggctggtttctccccaagaaggcgccttgtattttcgcgggttggcgctaagggaggcgtatctcttcctttgccctgttccctgggccgcagcaaaacctctccccattttaacccgggatcctcctccccttcttgggctcttagaagggcggcctccttccttattcccccaccttttccgaaacccatttggtgggatggtgcccccccccccggtgggattagagcctttaaacatggcccttggtcaagccttcccgggggggttatttatttttttaaacccttaaaaaccttttgttgctgggcccaccacccccctttggggggaaagcaaaaacccc

SEQ ID NO: 83338 - DNA, 330 bp, Glycine max
  Clone ID: PAT_MRT3847_46270C.1
gttactttgtttttcaggacattgcaaatgccgaactgcctccaactcatccaattaggcttggccttgcacttaacttctctgtattttactacgaaatccttaactctcccgatcgtgcctgcaaccttgcaaaacaggttagattcagatatagtgaatatcttgggctttgttttgctctgtttattttcgttttacaacattttgagcaatgttttggatgtttcccgtgaaaagaggaaggaattgggccccatacagtgaaatttgcagctattattgtccattaattcgaataactttatggctactcccataatgcatttc

SEQ ID NO: 83339 - DNA, 290 bp, Glycine max
  unsure (1)..(290): unsure at all n locations
  Clone ID: PAT_MRT3847_46271C.1
aaatttaagggttcgagcatgccgtctcaggggatgctcgctcgggctgcttacggaacttgatatatgaccttgccaaagagtgctgggctaatgtgctctagtgtcctgatgtgcgcgcgacttttaatgatgatgctacggtccccatcatagggctaatagacgtgcaggacaagaggggcctgatgaatctgtattgcttggggtcaatagatgcggcttgttgcttgtttggaagacgcangctaagccatacagaaatacgtgacatatatggcacgcggcat

SEQ ID NO: 83340 - DNA, 747 bp, Glycine max
  unsure (1)..(747): unsure at all n locations
  Clone ID: PAT_MRT3847_46272C.1
gcgtccgactactagagaggttagattgcagagattgtaattgatttcatttggtgcttctttctggttatgggtgcactggaggtagagttttttactgagtatggagaggcaagtaggtatgagatccacgaagtgattggaaaagggagctatggtgttgtgtgttctgccgtagacactcatactggggaaaaagttgcaattaagaaaatcaacgatgtttttgagcatgtgtcagatgccacacggatcctaagagaaattaaactccttcgtttgctcagacatcctgatgtagttaaaattaagcatataatgcttcctccctcacgacgggagttcagggatgtctatgttgtgtttgagttgatggagtctgaccttcatcaagtaattagggcaaatgatgatctttcccccgagcactaccaatttttcttgtaccaacttcttcgaggcctcaaatttatacatgcagcaaatgtgtttcatcgtgacttgaagccaaaaaatattctagctaatgctgattgcaagctaaaattatgtgattttggacttgctcgagtttcatttaatgaggacccatcagctatattctggactgactatgttgcaactcgggtggtatcgtgcacctgaactatgtggnttctttttttctcanaatatacccccgcaattgacatttgggagcattggatgcatatttgcagaaatgctcagtgggaagccattgtttcc

SEQ ID NO: 83341 - DNA, 481 bp, Glycine max
  Clone ID: PAT_MRT3847_46273C.1
tcgcccacgcgttcgcccacgcgttcgtaccggtgcgagaagaccacagaaggggcctggagaacattaagatgaaccaccatgaaagggttgcccaaaagggtgttcccatttattacccgggttttaaaatcaaaccagagttaaaaaaaattgtttgtttgtcttcttgccaacccaaaataaaaatttttttttccgaaataaacccggcaaatttcccaaccccccttgggaatttccggccacccattttaagtggggggggcttaggttcagatattggttaagggtttttggattaaagggttgttggccccacgtggaaaagggaggtgctgtttgcttcccccgcgcccggtcctgttttccccccgttttttggggggagaaaatttaggcgtttaacttttttttcccccttttttttttttttttttttgggggaaataaaaaaaataaaaaaggaattggcgaaaaa

SEQ ID NO: 83342 - DNA, 735 bp, Glycine max
  Clone ID: PAT_MRT3847_46274C.1
tacggctgcgagaagacgacagaaggggagattttcaagtaggccttcctggaatagatggtttatcaactgaacaaagaaagagactcaccattgcagtagaattggttgccaatccttctatcatctttatggatgagccaacctccggccttgacgctagagctgcagcaattgttatgcgtgctgttagaaatacagcggatacagggagaactattgtctgcacaattcatcaaccaagcattgacatatttgaatcttttgatgagctgcttttgatgaagagaggaggacaaatcatatataatggtcccttaggtcaacaatctcagaatcttatagcccacttagaggctttcccggaagctcctagaagcatagaggttaataatcctgccacatgggttttggagatcactactccagcagttgagagtcagcttagagtagactttgcagaattctacacaaaatcagaattgtatcagaggaatcaagaacttattgaagagctaagcacacctttagagggaacgaaggaccttgatttccctactaaatactccctttcctttattactcaatgtatagcttgcttctggaaacaacacttgtcctactggaggaatccacagtataatggcatccggttattcatggcagtaattataggtgttatttttggactcattttctggaaaaaaggaaatcaaacagatacggagcaagatc

SEQ ID NO: 83343 - DNA, 560 bp, Glycine max
  Clone ID: PAT_MRT3847_46275C.1
ggaaagggaaaacaatttatttcctattcataatataattgggtcacacattacaatcggggcttcctttcacaatttaggcaacattgatggaaaaaaaaaaataattggggaccgctttaaaacaaaattttttatcaaaacgggattcaagctccatttaagggaattgaaaaattttaaccccccccacctccaggaattgaatacatcacaggcgttaaattactgccattggccctgtcaattttttaaaaccacgagggaacgggggctgttcaagcaaagccttcaatcaacttttcaaacccgggcgaaaaaaacaaaagggaactaacgggcaacataccctttgcacattttgacagtttttgaacctttgaatcgccccccccaaaaaataaaaaacccttgtccagagttttttttcctttccccctgtttgtaaaggaatacaataggggggacaaaacaaataccccccgccatgaattaaaaatttccttggaaccccctggtgaaaaattcccccaagcctccaatataaagcttcttgttca

SEQ ID NO: 83344 - DNA, 400 bp, Glycine max
  unsure (1)..(400): unsure at all n locations
  Clone ID: PAT_MRT3847_46276C.1
cgggggggggtgggtttttttttttttttttttttttgtttttggggccccaaattttcttcttttggggtgacaaagggggttgccaagaaaaaaccgtattcttagcaaatttaacaacaacaccctcttcatacaacaaaagccacaaaccgcaaatagaagaagaaaaattttcttcttgtcncccaaacnacaaagnctttcgggagagcacagggacggacaaaaactccaaacgccactcttcgtggtccttggcaccatcttcctcacttccccaacccgctgcctctctggcccatcatcatggggcctcaacaccaccctcctcccttcacaaccctcctccggcaggcgctggcattacttcctgcgggccattccgattctccaaccc

SEQ ID NO: 83345 - DNA, 177 bp, Glycine max
  Clone ID: PAT_MRT3847_46277C.1
agttctccgctcgagggactctcgtgctgctatggttttagcgcatcttcctccacatttaaggaagatgggtcatgaaaacgttcacatcactattgtggtcatttggcatgtctaccctgggaaatccactaccactggtcacctgatttacaagcttggaggcattgacaagcg

SEQ ID NO: 83346 - DNA, 174 bp, Glycine max
  Clone ID: PAT_MRT3847_46278C.1
ctcttgcacacgtaccgccacttgttattctctagcacgtgacgccgacaggacggttcatttgttcacccatcgagcggaggagggcaaatagttatatttcttacggactctaccaaataaacaagggcccctgagggccctgattacccccgttgtaccgacaaaaactaa

SEQ ID NO: 83347 - DNA, 415 bp, Glycine max
  Clone ID: PAT_MRT3847_46279C.1
gacataccgctggtcagatttttatataacaaataataacgaaactggtaaattacaacctcaaatggatcacaaccttcacatgaaatgtacagggcaggtaaattaaactttggcctcatacaaaatttgggtttcaatctgcaacctttatcaagaagctctgggggggcttcagccagccggtcccgtaaaaagtccaaaggaagctcactagctttgtttaattgaaggtcacaacgagggcaggggataaaaatgggactggctttaagccctccttggttacatataggacaccaaatctctttcccatgagcctcatttttatttagctggatatgcccaaaaactgggcgagccaggtactcattcactttattttcccaaggttcaaaatcacattttaaaattt

SEQ ID NO: 83348 - DNA, 250 bp, Glycine max
  unsure (1)..(250): unsure at all n locations
  Clone ID: PAT_MRT3847_4627C.1
cttcaactttgccaatgcatgatgangtcagcncatttnactccatgcgagngcagtgatgaggtgctaaacccaaccctgcactcgnatggagtcaaatgtgctgantcttcaactttgccaatgcatgatgagccaagatcgcgagactttttataatangcttatttataattaagcaaggcataacgctacatgttatggttaataaaagtaataatgtaagaataaagacttgaataaataataa

SEQ ID NO: 83349 - DNA, 753 bp, Glycine max
  unsure (1)..(753): unsure at all n locations
  Clone ID: PAT_MRT3847_46280C.1
gatgctctttctgccgcaacaacacacaaaccataaacctaaaccccaacgttccttttgatcttcatcttcgtcttcgccttcaagcttgagcaatgagaagaccgaaatcgagggagtttcggaagcaacagcgagtttcagaggaggaagagataaacctcttgaattcatggatccagttccagccaccggattccggttcgaacccaatgtcgcttccgcctctccccaaaaactcccccgttggccgcctcgacgacgacgacacctactcgcgctacgccggcgcgtcgaggttcgagcaattcccgctttccaagaaaacaaaggacgccctgcgagaatccaagttcgtggtcatgaccgacatccagagagcgtctctcccccacgcgctctgtggccgcgacatcctcggcgccgccaaaactggctccggtaaaaccctcgctttcattatccctgtgttggagaagttgcatagagagagatggggacctgaagatggggttggcagcatcatcatatctcctacgagagaattggctgctcagctgtttgatgtgttgaaggttgttggcaaacaccataattttagtgctggccttctcattggtggtcgaaaagacgttgacatggagaaagaacgtgtaaatgagctcaacatattgatttgcacgccaggtagactgctgncacacatggatgaaactcccaactttgatgttcacagatgcaggttttggtact

SEQ ID NO: 83350 - DNA, 745 bp, Glycine max
  Clone ID: PAT_MRT3847_46281C.1
gaaataaacacaaagctttaactttaaaggaaagaaaatgaaaacactgattgaaaattttgaaattatctctaaaatggctgttcgtgtcacattcaatgtgtatatgagcttttttatttttgggaaccaaaccatctgcactatccaaatcattcattataacctaatgaatgaacatattaattgaaccgtgcccaacacacatgttacaatgtttatcccacaaagttgaagtacaacaccaactatacaagactagtttagaaggcaaagatgccagcaatggcggcagcggtgacggcgccggagaattgaagagcggatgcaccgctggtcacatcggccgggtcagtctcctccggggtggtgaaggggtcctcgaaaggttcaggttccggagcatagagctcgatggggtcgcttgccggggcaggtgcggctgagatatcactctcatctgatggggtaggggcaggaggagacgatagaggagactcggctgattttggtgaagatgaagcctttggtgatggagatgattttggggatgcagatggggcctcattagccatggccatgccaattatggcaacagaaatcagtgcaagcacaagttgacgtgccatttttagggttttttttttgttttttttttgtgttttctaggttgtttgttcttgcacaagaggctaggattcttagagtaattgcagttattctctatattataatagagaaaaac

SEQ ID NO: 83351 - DNA, 423 bp, Glycine max
  Clone ID: PAT_MRT3847_46282C.1
gggaagttgaccgttaattttctttgtgggaacaaagctacaaatgatcataactgagatggcactaacgattcacgagattggggaagtcgtcgagggggcacctctgattaatccacgagatggattgttctggttcaatcgacctcgcttcatcctctttttgattcatcttgatctctttcaagtaaattatatgatttattttcctatgattcaacctactgtcaaattgaagcattccaactcctgtgttatgaaattaattatgcttggttctgtgctgcacaatgcatttcaactagcgatatttgcttggagcacagtaagtatcccatcctgatcaattttcctaaattgaacatgttgtttagcattacaatattgaagaatgtagcagcagtgcttataccatgcaataag

SEQ ID NO: 83352 - DNA, 286 bp, Glycine max
  Clone ID: PAT_MRT3847_46283C.1
aatgatgatgaagtctgctatgtgtgcagtggtggttggagcacttcttcttctggcggaggtggggcccatggctgaggctgtgacatgcaccccaacagagttgagtccgtgtcttccagcaatcacttgcggggctaaaccttgcaatgcttggtgcacggaactgaagaaggaaaaaccgtgcttatgtggctagctcaaaaacgctagcttgaaacggtatgttagctctgctagtgcccgaaaaaccggtggttcttgtgggattccctttccaacttgt

SEQ ID NO: 83353 - DNA, 199 bp, Glycine max
  Clone ID: PAT_MRT3847_46284C.1
caggggtgccttatcgctgtggttataatcttcttcttcctctttctaagatcttttctttctttacgccgaacgcggaagccatggccggaaaaggagagggtcctgttatcggaatcgatctcggaaccacctactttggcgtcggggtgtggcaacatgaccgcgttgaaatcatcgccaacgaccaagggaccag

SEQ ID NO: 83354 - DNA, 1049 bp, Glycine max
  Clone ID: PAT_MRT3847_46285C.1
cttgatcttgagcagatgaaaagagattgtgttcctgtgctgtggatgattggttaattacatcatgggttttttattttgatttgaatatggtttatggtttcctctatcaacaaggtacaaaagcttttgtctaattgtaaaagtggctttcttaccatgaaatggcaactcttttctttattctcctgctttgttttcccacctcaaaatattggtatcttttcttgttttccctttccataaatgaaaaaaaaagtttctttgtccaatgattttttttctatgtccatgttccatctagttcttgaagggttattcttgttaggaaaacaaatcctgggaataatcatgagctagggtgtctcttttgattgagtgtgatgaattcaatgaataagggtcttcttcaaagtgtgtgtgtgtgtgattgctgagtcacaccaaccaccaccagtgagaagttttgtgttgagatgaagagaatccaaagatggaaaattgaagagaaagacaagggaatgaggctgcttggaagggacacattttactggaaatcagtgttggaaaggacataaccgtatcctaatttgtcatcatcgcagaaagatgcaccagaaggaagatgggtgggttaaattgatgaaagatcgaagggtggtgagagtgagagggtccctcttcttggtttggttatatgccaatttattagtctaatcagtttctcaagtaactcaaatcccagataatgataatgtgcttttgttttctttttcttttttttgctgacacctatctgggaagaaaaacccatttttgtatcggttttcaagtacctatttgatcaagaagtaaagcaaaggtgactttttctttctttgttttattttttaaaaaatgcagaacatttatgcatcatgtcagtacccaacttgtacttcctacaacactctagacataggacccatgtatgtatcatgtagtatgtgtaatgtgttaaaattgatcataaaaattgtgtgctgtatgggtccataaaaaaaaaaaaa

SEQ ID NO: 83355 - DNA, 499 bp, Glycine max
  Clone ID: PAT_MRT3847_46286C.1
tgattatggaactactggtggctataatgatgacaccaatagacatcatggaactaccggtgtctatggtatagacaccgataggcaacaacatgggactactggtggctatgccggtgacactggtaggcaacatgggaacatcggtggcccttactatggaaccaacaccgcagacaccggtactggtcccagaagtggaaccacgggcggcaccggttatggaggcactggtggcactgaagcaggatataggaaggaacatcgtcagcatgaccaatctcatggtgatcagaacgagaagaaagggattatggacaagattaaggagaagcttcctggaggacacagtgacaagtagatgcatcgtgcatcatgcatgcatgcatatatataatattgttgtctttgaataaatttgctgcatatgtacttacgtacgtacagtgtcttgtcatgtatgtggaggatatagtatatggttatagtttatgtagaa

SEQ ID NO: 83356 - DNA, 413 bp, Glycine max
  Clone ID: PAT_MRT3847_46287C.1
gttgataagcagaccgaccaatacggcaaccctgttcatgctgctagtgtcacctatgtagccaccagaactgctgctggtggctacagtgatgacattaatatgcaacatgataccaccaatgcctacggcgtaaacactggtagacagcattctaatggtggctacgatggtgacactaataaacatcgggggcccttactatggaaccaacaccggaaacaccggtactggttccagaagtggaaccacgggctgcaccggttatggaggcactggtggcactgattatggaacaactggcggcactggttatggaagcggaactgggtatggagtcaacactgggggtgcgcacactgaagcaggatatacgaaggaacatcgtcagcatgaccaatctcatggtgatc

SEQ ID NO: 83357 - DNA, 561 bp, Glycine max
  Clone ID: PAT_MRT3847_46288C.1
cacacaactactacaagtacttccttacaatcaaaaccaacaacaactatggcaagttatcaaaagcactacgatgatcagggtcgcaaggttgacgagtatggcaacgttgagaagcaaaccgacgaatacggcaaccctgttcatgctgctagtgtcacctatgtagccaccagaactgctgctggtggttacagtgatgacattaataagcaacatgataccaccaatgcctacggcgtagacactggtagacagcattctagtggtggctacgatggtgacactaataaacattatggaacaactggtggcactggttatggaagtggaactgggtatggagtcaacactgggggtgcgcacactgaagcaggatataggaaggaacatcgtcagcatgaccaatctcatggtgatcagaacgagaagaaagggattatggacaagattaaggagaagcttcctggaggacacagtgacaagtagatgcatcgtgcatcatgcatgcatgcatatatataatattgttgtctttgaataaatttgctgcatatgtac

SEQ ID NO: 83358 - DNA, 947 bp, Glycine max
  Clone ID: PAT_MRT3847_46289C.1
ggttgcataataactttgttctactttcttctccatccattttgattcgtaattaacttgattcacaacgcaccatggcttgaagagaaacaccacaaacaccacctcttccaccagcacaaggacgaggataataagcccacagaaaccgaaactggttacgacaatacatcttactctaagccttctgatgactatgactctggtttcagcaacccatcgtatgagacttctggcggtgcctatgaaactggtcacaacaagacatcatattctagtgatgatcagccagcttctggtggtggctacaaaaaaacatgttattctggtggcattgatgagacttctggtggcggtggatacggcggtggcggcggtgtgtactctgacactaccactgatggtggatacaccagaacaagtggtggtcggtatggtgatgaggttgactataagaaggaggagaagcaccacaagagtcttgagcaccttggtgagttaggtgctgcagctgctggtgcttacgccttgcatgagaagcacaaggcagagaaagacccagagcatgctcacaggcacaagatagaagaggaggttgcagcagcagctgcagtgggatctggtgggtttgcttttcatgaacatcatgagaaaaaggaagcaaaggagcaagatgaggaagctcatggaaagaagcaccaccatctctttggctgatgaagcataagcaaccaattatgagcatattccttctacttgtcttatatatatatatgcttttggcttatatatatatgtgtgtctttaagttaatcatcttccagtttattttgggagatcagtatggtttggagaatgtttccttgaaatgtgttgctctatatatgcatgtgtactgtgttaagtgttaagtacataaaataatatatactcaaatggtttgagat

SEQ ID NO: 83359 - DNA, 268 bp, Glycine max
  unsure (1)..(268): unsure at all n locations
  Clone ID: PAT_MRT3847_4628C.1
ggggggngaggcccacgcccacgctttggttttggaaaacaattacaatgggggggcctccaagacgggatgtgcgtataaaagaaggctttttcctacttcccatgtcccaaaggccctcaccagtctcatattccacctaaacacacgtttgtttattcctactctaataaccccctttgggtgcgtcctcccatcttaaaaacacccgaccatctaataaggctcatggtcaacaaacccatcccctcatatttgacttatttct

SEQ ID NO: 83360 - DNA, 1722 bp, Glycine max
  Clone ID: PAT_MRT3847_46290C.1
aaaaaagcaggaacttaagcagcatgtctaacatgatgatcatcaccaacactttataaataggcaactagtccttccccaaatatcacatcccaccttaaacccatttccataatcactttttcctactttcttctccatccatcccttgactaattaattatccctcacaactaccaatggccgaagagaaacaccacaagcaccgcctcttccaccaccacaaggacgaggataataagccagtagaaaccgatactggttacgacaacacatcatattccaagccttctgatgactatgactctggtttcaacaagccatcgtatgagtcttctggcggtggctatgaaggtggttacaacaaaacatcttattctagtgatgagccagcttctggtggtggctatgaaggtgggtacaagaaaacaggttattctggtggcattgatgagacttctggtggctatggcgctggtggtggtggatactctgacgtcactgatggtggctacggcaaaccaagtggtggctatggcgccgctggtggtggtggtgtgtaccctgacactaccactgatggtgggtacagcaaaacaagtggtggtgggtatgatgatgaggttgactataagaaggaagagaagcaccacaagcatcttgagcaccttggtgagttaggtgctgcatctgctgctgcttacgccttgcatgagaagcacaaggcagagaaagacccagagcatgctcacaggcacaagatagaagaggaggttgcagcagcagctgcagtgggatctggtgggtttgccttccatgaacatcatgagaaaaaggaagcaaaggagcaagatgaggaagctcatggaaagaagcaccaccatctctttggctgaagcataagcaaccaattatgagcatattccaagccttctgatgactatgactctggtttcaacaagccatcgtatgagtcttctggcggtggctatgaaggtggttacaacaaaacatcttattctagtgatgagccagcttctggtggtggctatgaaggtgggtacaagaaaacaggttattctggtggcactgatgagacttctggtggctatggcgctggtggtggtggatactctgacgtcactgatggtggctacggcaaaccaagtggtggctatggcaacactgggggtgcgcacactgaagcaggatataggaaggaacatcgtcagcatgaccaatctcatggtgatcagaacgagaagaaagggattatggacaagattaaggagaagcttcctggaggacacagtgacaagtagatgcatcgtgcatcatgcatgcatgcatatatataatattgttgtctttgaataaatttgctgcatatgtacttacgtacgtacagtgtcttgtcatgtatgtggaggatatagtatatggttatagtttatgtagaagaataaaaaatgtatgcatgtagtaatgtaagggtcttatatatgtggctgaaatataaaccataataaaggcagagatgttgtgccaatacatcatatgttgagagttgttgggacatgtaaagcctacgtggtggtggagcagggttgttcacttttggatttagaaattatttattaatttctttctaaccctttccaaagtctctagatttttaaagcctaatataggaactaaaaaattccgttacgacgtatgatg

SEQ ID NO: 83361 - DNA, 286 bp, Glycine max
  Clone ID: PAT_MRT3847_46291C.1
caatgttttcccaaacggacacttccgtatgctctggcagaactatgtgaagacttggtccactcagccaacacggaagacaaggagacgatgggctcgtcagaagaaagctgagaatatattccccatacctacagctggacctctcatgcacattgtacatggtcaaactttaaaatacaacataaaagtgataggtggaaggggtattttctcttgatagaactacatgcagctggtattcccaataagcttgcacacaaccatagatattgctgttgatcat

SEQ ID NO: 83362 - DNA, 169 bp, Glycine max
  Clone ID: PAT_MRT3847_46292C.1
tttaaagggcttttatctaatgcttgttcgctgttcagcaattcttttatctgtctattgcttgatctgtctaaatgctagctgagcactgccattgagtgcttaattttttgaataaaaaaaaaaaaaaaaaaaaaaaaaaaaaaaaaaaaaaaaaaaaaaaaaaaaa

SEQ ID NO: 83363 - DNA, 582 bp, Glycine max
  Clone ID: PAT_MRT3847_46293C.1
aaaaaaaaaaaaaaaaaaaggggcctctcaaggggggagaaaaaaaaaaaacaaggggaaaccggccgggtccccccccattaggggctatattaaaaaaaatcccccccggaaagggacccaaatccccaaacccttttttttttctctttttttttaaaggggggaacagaacaaaaccaaacggggggctaagggggggggttttgctttgggaggatcccaaggggggaaattacaaaaacccccttggacgggggggaaaaattttttccacacataaaaaaaaacagccccaaaggggttttttttttcccaaaaacgggcccctttattattaaaccctcaacatttctagaaagagggggaaaacaaaaaaccctaccaacttgtttttgttttgaaaaaaaaccaccccttgggggggggaaaggaaccccccccctgtcccaggggaaaaggggggccccattccaaacacattggggttccctaggggggggccgggcccgggcccgaaaccaaggccaggggttgggctggacccgggggttggccctggaggggaaaaaaggggggggg

SEQ ID NO: 83364 - DNA, 1033 bp, Glycine max
  Clone ID: PAT_MRT3847_46294C.1
gcaagcttcggattcggctcgacctgatccaaggaaaaaaaaaggactttccggttacatggtccatcgggtcgaatgatttgaatacgagcgaatccaggtaaatttgcctccgtacccagaacggaaccttcgctaagccttcttggtgtttgcgtcaagctcaccgaggaaaaacgacaatattttatttagttgcctgtgtttcgagacgccaaataaacgacattatcactggcaacccgaaacacactcttcatgccgtttcattcgtcacttcgcgcgtctccgactcttctcgctagtatccactgctagatgtaaattttcacagaaaccgcctcaaaatctgaagcaacgctcgatcccaaaaatgcgttgttcgacggcgttctccgttttatgcctaggtgtgtttttgcaggtaccatgggtggcttcagtttcgatgccgacttccaactgctacgctttcgacaattctagtcgcattgttgatttcagtggctggactggttatcttttcgagtatgatcaaaagcaaggttctgatttgtccgtgcgattctgcaaagatgtggagagtagatcacaaacgggatatgttgattttggccgatttgataggttcaactactttgttgctggttctggtcaatctgactttgtacaagaattttataatggtgatcttatgggttgcgaacaaagttacgacaaaatgggacgaacagcccaggtaaatatcatatgtgggaaatgtttgaatggacaatgtaaaggtcgtcctggatgcatatgtaatgtcacaaatgaatcaaactgcagagttttagttgatcttgcaattccatgtgataaaccgggccctccagtatttcaaggcttcactgttggttttcatccaagatcatgggaacttgtttataatggcatgacccaaattggttttgagaaaccccaccatgattttagctttcatacagggcaaactcaggtagttctgtttatgactgcagttgcttcactttct

SEQ ID NO: 83365 - DNA, 262 bp, Glycine max
  Clone ID: PAT_MRT3847_46295C.1
gatacagggtggggtacagtactgacagaatcaacattagattgacaccattatcaaatacaatgtcgcggctgtgaatggactgtgacggagtagagttgtcgatacacgatagcacaatgtgatgagttcatagtccggtttggagatctgatgctaagagaataatatacaaatcgtcaactcttagtctatggtcttacacgttcagtagatgagtttggcaagaattatattctgagcaggagtatgtagtctgaat

SEQ ID NO: 83366 - DNA, 643 bp, Glycine max
  Clone ID: PAT_MRT3847_46296C.1
cttctcataaccttcttctggagctctgtggaagttactatggacacaagcaggtctgagggaaaaagggtcatgaggtacaaagaagaagatgatgataatgatgatgaagaagaagaagaggtggtgagtgagatgggttttgaagaagatggaaggaggaataagagagtaataagagatctctatggaaagagagggtccaaaggtggaggctcaataacaccttcttgccaagtggacaattgtgatgctgatctgagtgaagctaagcagtaccacagaagacacaaggtttgtgagtaccatgccaaggctccttccgtacacatggcagggctgcaacaaaggttttgccaacaatgtagcagattccatgtgctatcagaatttgatgactcaaagaggagttgtagaacgcggttggctgggcataatgagaggcgtcgcaaatatgcagttgactagctaccatggacaatgatttcttctatgggatggacattaataatcattgaggcaagcatgtgattaatgaaattaaatttcccattcaaatcttcataaatcattgttgctggtctctaaggatgctctctatcttctgtcaagattttcatatgcaaagatttttctgttagtt

SEQ ID NO: 83367 - DNA, 265 bp, Glycine max
  Clone ID: PAT_MRT3847_46297C.1
cgctcgagttggccgccagtgtgacggatatgtgcagactgccagcacactgccggccgttgctagtggatttttgacgtgcgtgctcatcgacagcgtcttggcgggcggccccagcgcgccggcgacggaccgcggacggccgtacttggcctggcactcgtccacaatctgccgcacgagcttgtctctcttcatgctgatctcgcgggccaaacgctcggcgccgtcatcagcctggctgctccggatggcgtagaaggtg

SEQ ID NO: 83368 - DNA, 630 bp, Glycine max
  Clone ID: PAT_MRT3847_46298C.1
attatcacggacaaattgtgcagcactcttccctccatgtccatcaaatacaccataaaaggaagcagcctccccagaaagtacgtcataattaaacttctttaccaaatctccaatgcatatgtgagtatcctccatgtaaggacgttctccaatatcagaccactctccagaccgaagagctggaacaaaattcatcagattctgtttcttgtctacaaccactgtgtcctcacatatgctttctagaggaaaggaattttgaacactgatgttggtggtgtcatcacttgaagttctgaggaaagatccttttttgtccatgtgagtcttgagcaaaaggtggcaatgttgcaaaggccatgaattggttgtggtgctatccatcatatctttctcttggtccttcacacacatggtggctaaaacaatcgtggggtaggagcggctctttgttgatgtggaaagtaatagtaatagtataataagactgatcttgatcttgatgcaactttgtgtgtgtggtttgtgctagagagagagagagagagagagagagagaaggaagattcttaggatatgttgtgtaaagttgagaacaacggacgcgtgggaaaaaagtggttttgg

SEQ ID NO: 83369 - DNA, 1263 bp, Glycine max
  Clone ID: PAT_MRT3847_46299C.1
gccggccgctgatcaacggaggtttccttggcgctgtgttgttacatgtgccggattggtaggttctgatggtccccttctttgtggagcatttgatataaacttcatgtcatgcctaccaaacttgtgttgttcatgctggattaacgatggagccatcacttgaactgtttcaggaaaaatttccggataggttttttgatgtgggaatggctgagcaacatgcagtcacatttgcttctggtttggcatgtggtggcttgaagccattttgtgtcataccttcgtcctttctacaaagagcctatgaccaggtggtgcatgatgttgatcaacagagaattccagtgcgttttgttattacaagtgcaggattggtaggttctgatggtccccttcaatgtggagcatttgatataaactttatgtcatgcttaccaaacatgattgtcatggccccatctgatgaggttgaactcatgcacatggtggctactgctactcgcatcaatagtcagcctatctgctttcggtatccaaggggtgccctggttgggagagggtacactataagcgatggaatccccatcaagataggaagaggaagagttcttgttgaaggcaaagatgttgctttcctaggatatggatcgatggttcagaactgcttaaaggctcattcactccttgcaaagcttggcattgaggtcacggttgctgatgcaaggttctgcaagccccttgacattatgcttctgaggcagctttgtaaacaccactcttttctagttactgttgaggaaggatctattggaggatttggttcccatgttgctcagtttattgcagttaatggactgctcgatggaagaattaagtggcgaccaattgttttaccagacagatatattgagcatgcatcaccaaatgaacagcttgaccaagcagggttgagtggacatcacattgctgccacggcattgagtttactaggccgtacccgtgaagctctcctatttatgtgttcgtgacttgcttcgtgcccttttccagatacgatgaatggaagttggatagctccacaggaagaaggagaaccaacaaagcaaagatgtaaagaatgtcattttctctttaatctgtacagaactgatgttaaatagtaaaaaggaacttaacgggagttttgtttttttggacatctaacaggtaaattgttgagaaaatgactttttaatgcagtggttttagtttggataagtc

SEQ ID NO: 83370 - DNA, 388 bp, Glycine max
  Clone ID: PAT_MRT3847_4629C.1
tccctctcttctcttctcttctcttctctcttatcattctctctctctctctcctgcaacaacaacaaccatttaagggatttcgggatgtgtatcgtccagtgaattgaggagaatgacatttttgggttctgttgattgtgttgtagatggggggtttggctgttagattgttgtttgttgagtacaatcttatgttcagtgaagatgatttcgtgatgtggttgagagagtggtttttgtagaggaaggcttgttatttttgttgttgttgtggtagtttattttgtttaagagtaggaacatagtcggcagacgagaagaattaagctttgttggatgggtaataaacttgggaagaagagacaagttttagatgataaatata

SEQ ID NO: 83371 - DNA, 522 bp, Glycine max
  Clone ID: PAT_MRT3847_462C.1
tcggaatcggctcgagcaactttgtgtttctctcttcaccttcgtctttctttcatttcaattctttgtggttcagaaactctgtacagttaatcaagcccaacctcacctcacctcacctcacagaaatccaaggaagaagatgaagcagtttgccgtccaaaacgtcgtcgctccatcccacgatgagattagcgtggtttgccccaagccccgccgcctcggcctcttcaacttccccgtgaacgatccccctgttagacccttctactggcatctcagttgccaggctgagccatgtgattcaaactcgtctggttcaaatcctttggacaacttacttaccaaggatggtgattttgatgtagagcaatcatggccagtggtaacctcgtcgcccccatttttctgcgggtcgccgccgagtagagcagctaaccctttgattcaggatgctcgatttggggatgagaatttttccccgctctccccaccgtcgtgggtggtggttccggcggctgc

SEQ ID NO: 83372 - DNA, 149 bp, Glycine max
  Clone ID: PAT_MRT3847_46300C.1
catgtcacagccatcccgtgcggttctcaaactttgcacagtgaatggacaacattttgaggagatcaaagtcgatttagccaaacgtgagcagttatctcgcgaagttcgaacggttaaccctttacggcaagtctctgccagtgttg

SEQ ID NO: 83373 - DNA, 432 bp, Glycine max
  Clone ID: PAT_MRT3847_46301C.1
ccagacaggctcgaggcacgggcatcaccaaatgaacagcttgatcaagcagggttgagtggacatcacattgctgccacggcattgagtttactaggccgtacccgtgaagctctcctatttatgtgttcctgacttatatttccagataccatgaatggaagctggatagctccataggaagaaggagaaccaacaaagcaaagatgtaaagaatgccattttctctgtatagaactgatgttaagtagcacaacggaaactaacgggagttttgttttttggacatctaacagtgtaaattgttgagaaagtgacttaattgtgaaaatacttgaatggagaactttgctgtcatttttttagtggataagtagttttattttatttcatgtttcattgtcggcatattataagctgcgctctgagatc

SEQ ID NO: 83374 - DNA, 592 bp, Glycine max
  Clone ID: PAT_MRT3847_46302C.1
ctgacctccgatgtttctcggcaggagccaatacaaaaattacaataccatcatcaatccaatcatcctaaaattaaccagaaataaaaaatagaaatatttttcgaaactaattttgtggagatctgtcggagaagaaagaagcgaaaattatcctctttccattcgtcgttcaccttcacttctggtacgcttatttcgtaattgtttattattgtattgtattcttttcttctgggtctgggtggctgttgaaagattatagattagatgatgtgatgtgaaagaaatgaatgaatagtttttttggattgatttgtttgtgaggtgagcgcaacagagagagagagagagagagagcagagcagaggggaagaagctgatgagaggagatcgttggatgaatatataatataaattggtttgtttgatgggcaacacatgccgcggatctttgaaagggaaatatattcagggcttcagccagcccgaagaccattccaagcgctccaccacccattctgatccctcctcaaccaagcagcaagacgacaacgacaccaacaacaacaacaccaccaacaacatcaac

SEQ ID NO: 83375 - DNA, 177 bp, Glycine max
  Clone ID: PAT_MRT3847_46303C.1
cctaattgtacgtttaggcggacgccgaaattgaagttgcggcaggtcctcttaatcaggagattgccaaagctgttgatcttgactcttgcataaaatcactagacttccagatacatcgagcccgaccgtgatattgttctccactacacgaatgctattctgttcgatttctgt

SEQ ID NO: 83376 - DNA, 512 bp, Glycine max
  Clone ID: PAT_MRT3847_46304C.1
aaaaagggggaaaaaccttttaaaaaacctggggggggtttgtttgaaaaaaaaaattttcccccccttttgaaaaagggaatggcccccccatttttttgggcatagtttcccaatcaaacaaagtttcccggccaaattttaaaacaaaaaaggggggaaagaaaaaaaaagcacccacgcccggggctggaactttcaaaaaaaatttgggcaaaaaaatttgttgtgggggaaaaacccttccccaggggggaatgaaacaaatatttttttttaggggtttctgttcccaaaaggggaggggtttctttaaagcaaaaaaaagttcctggaaggggaacaaccctttaaactttgggttaagggggcccttttaaaacttttttaacccccgggggggggggcaccctttttggggggggggcataaataaggaaaactttgacccttttttttgggggtttggaattgccaacaaccaccgggggggggctgggagtttttttttt

SEQ ID NO: 83377 - DNA, 206 bp, Glycine max
  unsure (1)..(206): unsure at all n locations
  Clone ID: PAT_MRT3847_46305C.1
gagtattggaggtgcctaattttgttaaggttggcaatgttgattctagcgaattgacctggaagattgtcaagaagaagaaaattgttaagagagtggtgaagaaaggtactgcangttccaagtcatctgcntcaaattcactaccngctaaaacccttcctggaactgtnaaagcgganagtgnnncacctatatcattgtct

SEQ ID NO: 83378 - DNA, 265 bp, Glycine max
  unsure (1)..(265): unsure at all n locations
  Clone ID: PAT_MRT3847_46306C.1
cctagattcagccacagttggaaaaaaaaaaaaagttgttcganatggcacgtacgaagcaaactgctcgtaagtcccacaggaggaaaggcacctaggaagcagctcgnaaccaaggctgcacgtaagttctgcaccaactactggnggtgtnaanaagccanatcgttatcgtcctggtaccgttgctcttcgtganattaggaaatcccagaagagtnccgagcttttgatcaggaagctccccttccagaggcnggttcgt

SEQ ID NO: 83379 - DNA, 229 bp, Glycine max
  Clone ID: PAT_MRT3847_46307C.1
gcgtacggctgcgagaagacgacagaaggggactaactcaattagaattcttcaaaaaactcgagaatttgcgtgcactgttcttcatacaatggcattaccccagcttattgggatgggggtattggttctgggttgtcttgcaaagggttcatctgatggtaacatagaaaaggggccaggtgaaaaatttcgctttcccggtgaccatcttatcgtgagagggggg

SEQ ID NO: 83380 - DNA, 279 bp, Glycine max
  Clone ID: PAT_MRT3847_46308C.1
ttccccttcttcccttcccattttttaacttaaaaaaaaaaccattattccagaaatactgcaaatttttaacaatctctcggccttctaacaaccaccacctcctccattcttatctccatcttacctactatccctactactactctactctatttacacctattatcaaaaaactatccccctaccccaaataaaaaccccaaatcatttcccttatcttttattcttttaccaatttctcataactaaatttttatcctctaaaatctaattttt

SEQ ID NO: 83381 - DNA, 1544 bp, Glycine max
  Clone ID: PAT_MRT3847_46309C.1
aattcggctcgaggattcagtagccactgatgtcaaacaggctatcaaggacaacattttaaatcaaatcaccaatggttctcaaatgataaaactggagaaggatcctcatgctgcatttgctttaattattgatgggaaaactctgacatatgctctagaagatgatatgaagctcctatttttgggattggctgttgattgtgcatctgtcatctgctgtcgtgtgtctcccaagcaaaaggcattggtaaccaggttagtgaaacaaggttctgggaagactactctagcaataggtgatggtgcaaatgatgttggcatgattcaagaagcagatattggtgttggaattagtggggttgaaggtatgcaggcagtgatggctagtgactttgcgattgcccaatttcgatttttggagaggctcctggtagtccatggacattggtgttacaagagaattgcacaaatgatatgttatttcttctacaagaacattacatttggtctcaccatcttctattttgaggccttcactggcttctctggtcaatcggtttatgatgactggtacatgatattgttcaatgttgttctgacatcgttacccgtcatttcactcggtgtttttgaacaagatgttccgtcagaagtttgtttacagtttcctgcactatatcaacaaggacccaagaatttgttctttgactggtatagaatattggggtggatgggcaatggtctctatgcctccctcatcatcttcttcctcatcgtcaccatcttctatgaccaagcattccgtgcggatggccaggtagctgacatggctgctgttgggaccactatgttcacttgcatcatctggactgtcaactgtcagattgctcttacaatgagccactttacatggattcagcacctgtttgtatggggtagcatagccacttggtacatctttctctccttgtatggaatgctctctccagaatattccaagagtgcctaccaaatactggttgaatctcttggtcccgcacccatttactgggtaacaacccttttagttacagttacatgcaatctaccttattttgctcacatatccttccaaagatgtttcaatcccatggaccatcacattatccaagaaatcaagtactacaaaaaggatattgaggatcaacacatgtggaccaagggagcgttctaaggccagacaggaaaccaagattgggttcactgcaagagtggaagcaaagatcaggcaacttaagggaagattgcagaagaagcaatctaccttggctatttcggccccatcgtgacactatacataagttaacagttttgggtatttttagggttgcttattatattgtttgattgaatgggggtgaattgaagtccccattcgacggaaaaagcatggaagctgctgtatgtaacatatttacgtagaagtgtcagtgtgtaattctcttaccacatggttgtgattcaattgaccttcaagaaatgaaacagttaagttgtattaa

SEQ ID NO: 83382 - DNA, 231 bp, Glycine max
  Clone ID: PAT_MRT3847_4630C.1
cgcgatctagaacctctagccgcttctttgggcccttggatcaattgaaattttcctaagtaggcactgccccctctggcctggattatctggaggccgcctcacatggttacaaccaccggctcatataacacccactggcatccccttcacaccccttcctctcattgcttactgtcctctgcctgcaatatgcctcctcacaggaaagtttatcataccatcgctctc

SEQ ID NO: 83383 - DNA, 287 bp, Glycine max
  Clone ID: PAT_MRT3847_46310C.1
ggcacccctttaaatgtgactatgtaaacgtcaggttatcaacacagatccccacgcacattcaatgtctttctgatcatagtggacaatgaatctattacaagtatacacattgcacatacatcctatgctacctatagtccgtgtactagggcaacaccaactaccacattaaacacatctcagataccatgttctacgcttgcctcaatcatgaaccagacaccaagtttacctgtaagatcttcaccatggccaacttcgtcatattcttcagataattcacc

SEQ ID NO: 83384 - DNA, 467 bp, Glycine max
  Clone ID: PAT_MRT3847_46311C.1
cctatccaaacttcatcccttcaacttttctggaggatttttataaaccttctgtacacaagtgcagggtgagttaatctgtcatgatagcatttaccaggtggtttatttctagcaacaacataaaaagcgacagatttttcatacatacacactatgctcctttaagtatgcatcataggtcctagcctttttttagtgaaaaccaagacacaacatgacatttttgtcaatttcatgaaaaaaatattgaatatatattgaccttggaaaaaatgaaaatatacattacgctaactagccattacattcaatcatgaaaacttgtaaaaacaatatctagctacaacttcacaacatttgtgtccatactgtttctgtaaatccagatgcagtgcatggctaggtaaataaaaggataagcaagcatggagaggcaacgaataatacttgccttcattaaacat

SEQ ID NO: 83385 - DNA, 130 bp, Glycine max
  unsure (1)..(130): unsure at all n locations
  Clone ID: PAT_MRT3847_46312C.1
gggttttgggagacatncaactaccgtgtcggaganggagngttgcgtngccatcaccacctcgaacnaanaccaacaantcactccctcgttgaagattcttcattcgccattattccatnccanagnc

SEQ ID NO: 83386 - DNA, 282 bp, Glycine max
  unsure (1)..(282): unsure at all n locations
  Clone ID: PAT_MRT3847_46313C.1
ttttnatgtcaaatagtgtngaagaagaaatgggggtatgatcatttggnttggcctcaatttttgcnatggtggggtttaancctccttaatttcaggggcctaaaattgagaagattgtggtgaactgnggtattggagatcctgccnaaaatggcaaagggtncggacgcggnannaagtgtctagnntggancacagggcagagaacttattaagantcgggcnanggctnttctggccattttnaanntcaggnaaggtcnaacgcttgggattgcc

SEQ ID NO: 83387 - DNA, 261 bp, Glycine max
  Clone ID: PAT_MRT3847_46314C.1
atgctgagcatttttttcacgagtggagaatccttttaaactcattgggggaacatccaagcctaaaagacaatcctaaaatacaataacaaggccatttataccaataactttttatactttccctgagaatagatgaaacttaaaaacaagggatacttatcattggaccctatgaagaaaccctattaaacaagctcaaaaactgtatgaataggaataacaacttatcttcaaccggaaactaaaatagttgtaatt

SEQ ID NO: 83388 - DNA, 425 bp, Glycine max
  Clone ID: PAT_MRT3847_46315C.1
aaaacctattttcttttttctttccgtcaacctccaacagctaaaaaacacagaactccaaattggaaaaaagacgaaacaagcccagtcccaagggggggggggggcaaaaaaaaaaaccaaagaccaaatcaaccgtccagctcaaaaacaaacagaaaaagaaaaaggaaaactgaaaacaaaacagagggggccagggcccaaaaccgaggaaacatgctccattcaacaagaaaccacagggctggcggggggggcttcaaacctgcagacaggtgggagctcctcgggcttcttggagcagggagcaggacggtggattctgctcgaaacaagaagcacccggaactagggggcctggggctccccggaccatgcaagatgcttcctactggaacctgccttgtaagggaaaggggcaa

SEQ ID NO: 83389 - DNA, 245 bp, Glycine max
  Clone ID: PAT_MRT3847_46316C.1
ttgatctctctatgagtcacacttttgattattaatacctcattgtgaaaaatgtgactcatagagagatcaatgcaattataaaaactatacccaatccagtatatctcttccaaggaattgtactacgccgtggtgcccaaggaacaagaatgaaatctattgagttagcactctccatgtgtgatattattgatatatatggcttcactggtgatccacgatacactgaatggacaagatac

SEQ ID NO: 83390 - DNA, 422 bp, Glycine max
  Clone ID: PAT_MRT3847_46317C.1
ctgcttggggggggggggggggggggggggggggggggggggggggggggggggggggggggggggggggggggggggggggggggggggggggggaaaaaaaacccccgaaaaaggggttagtttcccggaaaggggccccccttaaaaggggggaaaaagggagaaggggggacagtttttgggaaatttatggttttgggccgaaattttggaaggtggccccaaatttgttggaaaacctcccccgaaatggcaccccccttaaaaaaaccccgggggccaaatttaaggggggcaaaaatcttttaggggccgaaaaacccccgggggcaaaaccgccccgggtaaggtaaaaggccccttcttggagggccccccggggaggtgccccttaggctttatgggggccccccgggggt

SEQ ID NO: 83391 - DNA, 293 bp, Glycine max
  unsure (1)..(293): unsure at all n locations
  Clone ID: PAT_MRT3847_46318C.1
gtcgcangcacgcgtacgtaagctcggaattcggctcgccnctctnnancntcttcnangttccgncnaacgtncattngctgcgccacgcncnnttagcggcagtcgctgncatanccgcatngctcctngactatgctaaaccngaatnatttgctgcgccttgggnaacaccgnctttcagacaganantggtnantgtacctnagactgggntcnaaaannnggatactgagngttgnatnnnngctgtggnactngggactnnancctntctcttatgcngacaacgt

SEQ ID NO: 83392 - DNA, 166 bp, Glycine max
  Clone ID: PAT_MRT3847_46319C.1
ggcggctgggagaagacgggagaagggttccgcttctagaagactacataaaggttcggttgctagaaaacgacaaaaggggtccgctgccggaacaataacatgctgttggagcgacagaattcattgctaattaaggttccgggctaacaaaaggggggtaaat

SEQ ID NO: 83393 - DNA, 229 bp, Glycine max
  Clone ID: PAT_MRT3847_4631C.1
gatgaacgtgtttttgcatctcaagccaaggctgcaacttactacctagctatgtggtcttcatacggcggactccaatcttattattatgctgcttctgaaccagaacacacttcagattgcaagtataatcacacttcttattctacatcaaattcatagaagtgcaggctttccctcatcgacgcccgatgacgtgatacggagctttcatattgctgatgaggac

SEQ ID NO: 83394 - DNA, 347 bp, Glycine max
  Clone ID: PAT_MRT3847_46320C.1
ctttatccgtaaaaacacaaccaaaaccttaaatggcttggaacccttttaattgtttgctgcctttacaaaaatcatattcctttcaacttcaaatttagagtcctctctctgatttatgcccagcactgcctcatccattgcaggcaaccttaatagccaacccctatgtcttttactccaggagattctacttgaagctccaacagaacatccacagacggttttctttgattactgttcgagctgattctgatcaatctgattgccatgaggaagaatgtgccccgaatcaagtactagcgaaggacaatccggaatgactaactggagtcaagacgaccgta

SEQ ID NO: 83395 - DNA, 130 bp, Glycine max
  unsure (1)..(130): unsure at all n locations
  Clone ID: PAT_MRT3847_46321C.1
gcantnctcttatgattaaagggggaacagtgtcaccatctattctgatgctgattcaaaggcggtggtattaatagggagggcttaaaacggatggaatattccttattatcgctcttgacaggctaaa

SEQ ID NO: 83396 - DNA, 370 bp, Glycine max
  unsure (1)..(370): unsure at all n locations
  Clone ID: PAT_MRT3847_46322C.1
catggacaagcgcataagctgtgtgtcaagtaatggctatctcttatagagatgttaccatgtctagttgctcagagatatgtgtgtgttttacgctagatgcttaggcaaagaaagctgaaccaactacatgtactttcctccttatgnctataaccactgtaccgaccttataacctagagatgtgcttgttttcgctctacaaattaacttctttttgtttntgcagatagactaagactgctgataaggtcttggacatatgtttcctttccggttggaagagaggcgccaaagtgacattttctgggtgaggcatccttaagactgaaactactgctgctgacgatactgtatgtgtgggtgatg

SEQ ID NO: 83397 - DNA, 137 bp, Glycine max
  Clone ID: PAT_MRT3847_46323C.1
tacggctgcgagaagacgacagaagggacctcaacaagtagtatagtagaaatttgcgctctactacaaacagtttaggaaggtaagaacttacagtgccgctatcttggattacagaagacattacgccagctgct

SEQ ID NO: 83398 - DNA, 214 bp, Glycine max
  Clone ID: PAT_MRT3847_46324C.1
acgcgaccgtgcagctgcaggagaacacataggggaaactcacaactcagcatgactgctcacctggctcgattgctgttcgtgtttgcaccgcgaacgtggtttatgatatgcgctttgttgatcacgctttaagatgtagcgattacggcgaagattactatactgtggaagttgaagttgagttcatttaataggagtccatctgaggatt

SEQ ID NO: 83399 - DNA, 431 bp, Glycine max
  Clone ID: PAT_MRT3847_46325C.1
gctttgaaaaaatgaagaattatttttattaaatatcaaactcaaataatatttaaataattctattgttacaatagactatatgctttgacacggaggatttttacaataaattattatgaaattgatgattataattgcatagagatctgagtcataatattgcacattgattattataatttaatgttttttaaattattgtataatttattttatttcagaatttttcttatattcaattttaaatttctcaagtgctttatacgcaaataataattggcgctttaagaacatttttgaataatcaaatgtgaaatttgtttaaaatattattaatatatcttattaatttctaataaatctttaagacgatattaataaaaaaaattattacaaattctttgatcagtactactaacctttttttg

SEQ ID NO: 83400 - DNA, 491 bp, Glycine max
  Clone ID: PAT_MRT3847_46326C.1
aaattctccaatgggcgcctgagatagctctccgcgcatgcagagctctagagatactacatctgtctatgtgcagaattgactgtaaaatctctcggatctaccaactacatgagagaatattctgcagcctgaagcattgaacatgacaactagcgcctgatgatgttgcgttgctcatggaggaccctcctctaccatctcctgacccgaatagtctgatgaagtcgacaacgccaaatgtgaacgtgtaagtggacctacttgtctcacttgcatcagtgtatcaggcaaacattatccagatctatgttgcagcagaactaacactccctcttgtgccagtatccacccaactacgacatgtattttgtcatcgtatgatgagctgactgagtatgataagaaggcatacatacatgacatatttgattgtgaatgctgatatgtccctctttatcgtaaagatagctcctttaaataatgttaac

SEQ ID NO: 83401 - DNA, 452 bp, Glycine max
  Clone ID: PAT_MRT3847_46327C.1
cggacgcgtgggggatgaatgggttgtctcaagggtttttcacaagaacacagatgtcaaaaagtcctcaactcctggccttttgaggataaactctattggggatgatcttcttgattattcttcactaccacctctcatggatcctccttatggcaacaccaacaccaccaacaacactaacccactttcttcatcaactaaatcacaatcagagggctattatcttcccagtttctccatcaacaaccaccagcagcagcttctcatcaagccagaagatcaccaccaccacagaagctataatgagattcccacaattaactacacctcaaaccaagccaatctcagcaacaacgttaacgcaatgggcaacaacactctctcacagcccttaaacatgttctcagctgattactatgtgcaccaaaacaggatcaaaagttccatca

SEQ ID NO: 83402 - DNA, 373 bp, Glycine max
  Clone ID: PAT_MRT3847_46328C.1
ccaggcccggaacaaaaaaagggaagcttttttttttttttttaagggagggttatttcccttgtataaaaaaaccccccccaaaaaggcaattgtttttttttgacggaaaaagttacaggaggcccattattacaaaggggggaaaaaggtttctatttgccaactaacaaaaaaaaaaggggaagggacaaaaaccccaaggtttgcgttaactataaccccctaaccatgttacattggggacataataagcgaaataccccctatttggttcgtattcaaaccaaaaatggctttaatctttgttttcggcccctcccttaaagacgggggaaataaaccctcaaaagggacgaaaagatcccctttt

SEQ ID NO: 83403 - DNA, 2085 bp, Glycine max
  Clone ID: PAT_MRT3847_46329C.1
ttgattctcttctcgcgtccgcagcagttctggtagtaatgcttttgatgagctctcaaatgaaaattctgcacgtgctgaaaagacaaaatattcatttatttgcgaatgcttctttatgactgcaagagtgctcaacttgggccttttaaaagcattttctgacttcaaacacttagttcaggatatttctaggtgtgaagatgctctctccacacttaaagccatggcaggagcggacacccacccctcaggcagaattggatataaatcggcttgagaaagaaatggagttgtactcacaggaaaaactttgttatgaggctcagatattgagggataacactcttattcaaaatgcgctttccttgtaccgcttgatgattgtttggttggttggcttggtgggtggatttaagatgcctctaccaccaacttgcccaatggaatttgctaccatgcctgaacattttgtggaagatgccatggaacttttaatatttgcttcccggattccaaaggccttagatggagttgtgctggaagaatttatgaactttataattatgttcatggccagccctgaatttatcaaaaacccatatcttagagcaaagatggttgaagtattgaactgctggatgccccgcaggagcggctcaactgctacagccactctatttgaaggccaccaactctctcttgagtatcttgtgaggaatcttctgaaactctacgttgacattgagttcactggttctcacacacagttctatgacaagtttaacatccgccataatattgctgaactcctcgaatacttgtggcaagtccctagtcatcgtaatgcttggagacagattgctaaagaggaggaaaagggtgtctatctgaatttcttaaactttctgattaatgatagtatttatcttcttgatgaaagtctgaacaaaattcttgagctaaaagaattggaggctgagatgtcaaatacggtcgagtgggagcgacgaccagttcaagagaggcaggagaggacccggttattccattctcaagaaaatattattcggatagatatgaagttggcaaatgaagatgtcagtatgcttgcatttacttcagagcagattactgctccattcctacttcccgagatggttgaaagagtggctagcatgctcaattactttctgctgcaattggtgggtcctcaaagaaaatcgcttagtctgaaggatcctgagaaatatgaatttcgtcctaagcatttgctaaaacagattgtgcacatatatgttcatctagctaggggtgacacgaattccatcttcccagctgccatctcaaaggatggccggtcatacaatgatcagttgtttagtgctggggcagatgtccttcacagaattggggaggatgggagaattatacaggaatttattcaacttggtgctaaagctaaagttgctgcttcagaggcaatggatgctgaagctactctaggggagataccagatgaattccttgatccaattcaatacacattgatgaaggatccagttatcttgccttcttcaaggatcacggttgatcgtcctgtcattcagaggcatcttcttagtgatagtactgatccattcaaccgttctcatcttaccgcggatatgttgattcccgacgatgagctaaaagcaagaattgaggagtttgtcaggtctcaggaaatgaagaaacacttaagcctacagagcaccaaggccacaattcagactacaaatggggaaacaatgttgattgattaggaaaatatcttgagtttcctaagttgtcgaatgaaatatggattcgggccatgcgcataaagttagatgttgaaccttaacttaatctttattcaatcatttttggaaaaaattgaagctatcattagaattttaaggctgtaaagatatttggaacagttaatgtaaagaagtcatcccattgaatactacgatatatatcttattttatacacagatatggaacaatcttgattttataatgcacttaataccatattcttgctataaaaaaatgaaa

SEQ ID NO: 83404 - DNA, 259 bp, Glycine max
  Clone ID: PAT_MRT3847_4632C.1
acccacgctttcttccttactttattttggaaggacaaacaggtggttcctgacacatgaaaccaatattaaatgaatcaagcatgttatgcacacacgttcgccagaccatacatgttttattcaacccaaaacgaatttatatgacagaagccaaccttatgaactttctccttaatgcccggacggacacgtggatcggcccgcgatttacagacccaaccttacggcgcacccattctacctatatatgatcttc

SEQ ID NO: 83405 - DNA, 327 bp, Glycine max
  Clone ID: PAT_MRT3847_46330C.1
ggtctcatggtattgttagcaggcattagcctatcggcgcctgctttctgtggtcgtgtgttgcagcatgatggagtcccaagtgaagcatgcacttgttgtcaaagttatgggtcttactggatccacacgacatgtgacccacgttacagtggagtttttggatgatcagacatgtcatatcatgaggaatgtgaaacgacatgttagacaaggagacattctcatcctactcgacatctaaagggaaccaagatgattgcgctagatggtcacgattgtttggcatgtctccaaattcgaacatgagcaatatgtatcttgata

SEQ ID NO: 83406 - DNA, 334 bp, Glycine max
  Clone ID: PAT_MRT3847_46331C.1
atccgctaagcaagattaccatctaccagtgctgccacccgagccggactattggactgctccataggacatgcgtgctctgacatcgatgactgctagttgaactccatacttacctgatggcacatgtgatcttgcggcatatgatgacttggtgaatatgcaaacaggacataggtgccgaggattgattgttgatgggacaactggtgaaggtccattgatgatctgggctgagcgcattatgcatattgatcactcggtcaactgtcagagtcggacatgtaaggagtagggagaagctggaaggtacagcaccggtgaagcaatgcag

SEQ ID NO: 83407 - DNA, 179 bp, Glycine max
  Clone ID: PAT_MRT3847_46332C.1
ttttgtcccaaaacagaatagtgatttttccttttcagattttatcacatcatatccttccacatgtggtacctggaaatggaatacagatttatccaaaaacaaaactagagtgattttgatcaaattccatttttccccaccaatatatatgcttaggctcactggccacagacgct

SEQ ID NO: 83408 - DNA, 287 bp, Glycine max
  unsure (1)..(287): unsure at all n locations
  Clone ID: PAT_MRT3847_46333C.1
aannngcaagcacgcgnacgnaagcacggaannncgagcnnggaancncnagagcggcngnngacaagngagcacgacgacnngggaaanaaanccggaccggnancngcaggcgnannagcnnngccnagagagagncggagnagaganaggcgnaancaaggacanagcagnaaccagngngaaanagaaanccgcacacaannncanacaacanacgaangagnannnngaagngggangaannanagaangaaaangngangggnggnagngnnnnngagngn

SEQ ID NO: 83409 - DNA, 467 bp, Glycine max
  unsure (1)..(467): unsure at all n locations
  Clone ID: PAT_MRT3847_46334C.1
aaaacaaaacaacccctaaaaacntnncccnnnggcccaaggncnnnnanngccccctaaanctaannnnaacccnggcntngnaaannaanggncnaaccccggnnnnnnaanaaaannttnccccgngntnccgtnncnnnnnnnncnnnnnangnnnnnnnntncgntnncnnnggntnncnannnngnnngganctnncntgtcgantnnnnntnannnnngnnntnnnttgnnnnactccgnanaagtgnnccaagcncgnnagnngnnactngngnntanccnntcntcgtcngtnntatagcgcagtctaaggcagngcnnnanatgtgcnccgnnatccannccncaantcngnngtcgcngngagntcccgtctngcggcacactaaannnagcgcgngccnnnaacgtntngggnnntgnacccgngcgccnaancgggggnctctntttngngnnc

SEQ ID NO: 83410 - DNA, 887 bp, Glycine max
  Clone ID: PAT_MRT3847_46335C.1
attaggctgcgagaagacgacagaaggggactcacaaaaaaagcaaaccctcccaagataggtgataataataaacaccacctagcacattatctctctcataattctctctttggttttgttttgttgtcctaatgagttgttttacttctgaaaaatccaccatgtcttcccagctccaaatggttcctctaagcaaacttcgttaccaaaggctaaggcatgaaaaagggtgggatgatgaaagggaaaggaggtcaagaagctggttcaggtttagaagggttcccattaggagaaggtttagactcaaaattccaagcttgagaagactttggagaaaaagggctaggttggtttcttccatgagaatttcatatgctaaagtgatgaaaagattcaaggaaggtcaagttcattttggtgacctttttgctgggaactacttgttcatgcatgtcaaccctacctcactcaagtgccttgaaagggatttgtccctctcaaaaattgcatagagcctttattgtgttattattttggttctcactatgctgcttgggaacttctgtctcttatctgctaatcagatcgggaaaaaatgttgggttcgggagcagcgagattatttaaaattggggcaattaatcttctccttatgctagcggctttatatatgttgtttacatcaaattctgtcaactcaagatgtttgcatcatggtaattgtaattaattggtacattaattatatcgtatatatgtataccattaattattgtaattttatggtgacgtattataattttgtaatgcatcaaactcttgggtataataattattttaattgaggaaaaagaaaaaaaaaaaaaaaataaaacgaccgc

SEQ ID NO: 83411 - DNA, 479 bp, Glycine max
  Clone ID: PAT_MRT3847_46336C.1
gaacttctttattaattggtattaagtagagaaaggattgtctgaagttgaattttgttgatgttttttaatgttagcttataacatatgacatagtttgaaaataaacattttaggcattactgaaatttgagtatcaaaaggttgaggttgggataattgatgtgctatatatgaatggtggctaaaaacttttacaataacaacacatgctgtatgctggtacgatgattcagctgatggcatctctatattttcatccttttttgtatgttgatttgaacctgcaaactgatggtgaagtctagttctgagatttagcttgtctaaagtaagagggataaactttagagtttaaagtgctgttatacttatagccattgattagaaaatcagtggttaagactttctaattattagtattaattataattgtattttctcccctaaagtgtaccccctcactttagatttggagg

SEQ ID NO: 83412 - DNA, 235 bp, Glycine max
  Clone ID: PAT_MRT3847_46337C.1
caacaacaaccttaacaaccctcaaagacctcattacaagtggcatgagtagcaccgttgagtccttcagtgggccccgccctccctctctctctctctctctctctctctctctctctctctctctctctctctctctctctccaacaatctcagataacaggtatctaactcgatgagtttctgataattagagccatggctattgtagaatgggataccaagggttctgagc

SEQ ID NO: 83413 - DNA, 256 bp, Glycine max
  Clone ID: PAT_MRT3847_46338C.1
cttgatcttgaaatagttcacgttgggcccgggtggtctgtagcaaatcgaagactgttacaggcccataaactactgcgtgggcccctactaaacgaagcgccaaaacacgacctactcaaattgctctgggaacttatgaatgaacataagacataccattctgactcaaggcatgaccaacgagcaatgattgtggacacttgactgaacaagcgtcggaaataaaaaacagatctttagcatgccatgtggc

SEQ ID NO: 83414 - DNA, 3069 bp, Glycine max
  Clone ID: PAT_MRT3847_46339C.1
gaaaaactccagaaaaaaaagcaagaaggtaaactgttaactggtaagcagaaggaagaagcccgtcgtctagaggcaatgaggaagcagattctcaataacacagggggcatgactctccctggtggggactctggtgctccagccaaaaaacccatatatcaaacgaagaaggtaaaaccaaataaccgtaatcagaatggtgctgctgctgctcagattgctgaaagtgttgaagcaaaggagactgccactgatgtagcttcagaggaaccagaaaagattgaagaagtggagtcagtccaggtggatgacaaagttgaacttcctgtagctgttgaagaggatggtgaggaagatgatgacgaggatgaatgggatgcaaaaagctgggatgatgttaatctcaatacgaaaggtgcatttgctgatgaagaggctgactcagagcctaaacctatcgtcaagaaggagataaaaaatgctgtacctgctcagaatgctggtgctactaagcctgtggctgaagaaattgaaaatggaaagcagattaatcctcacttgtacagggaaccaagaaagtctgttgtgcctcctaaacctagtgatgagaacctccgctccccaatttgctgtatcatggggcatgtgggcactggcaaaaccaagctgctggattgtattcgaggtactaatgttcaggagggtgaggctggtggcatcacacaacagattggtgctacatacttcccggctgagaacatacgggaaagaacgaaggaactgaaagctgatgcaaagctgaaagttcccggtctactggttattgataccccagggcacgagtcatttacaaacctaaggtctcggggttcaggtctatgtgatattgcaattttggttgttgacattatgcatgggttagagcaacaaacaatagaatccctaaatctattaaaaatgaggaatacggaattcattgttgccttgaataaggttgacaggctttatgggtggaaaacatgtcggaatgctccaattgttaaagcaatgaagcagcagactaaggatgttcaaaatgagtttaatatgaggctcactcagattattactgagattcaaagatacaagggcctgataccgagttgtattataaaaacaaagaaatgggagaaacattcagcattgtgcctacaagtgcaataagcggtgaaggaattcccgatttgttattactattgattcaatggacccaaaaaacaatggttgagaaacttacatacagtgaagaagtgcagtgcactgttttagaggtgaaggtagttgaaggccatggaactactattgatgttgttttagttaatggtgttcttcatgaaggagaacaaatagttgtctgcggaatgcagggtcctatagttaccacaattcgagctttattgacacctcatccgatgaaggaacttcgtgtcaagggaacatatcttcatcacaaagaaatcaaagctgcaatgggtataaaaatcactgctcagggccttgaacatgccatcgctggcactggtttatatgtggtgaagcctgatgatgatttggaagatgttaaagaatcagccatggaagatatgcggtcagtaatgagcaggattgacaggactggggagggtgtttgtgtacaggcatctacccttggctccttggaagcattactggagtttttgaaaactccagaagtgagtatcccagttagtggtataagcataggccctgtacataagaaggatgtaatgaaggccagtgtaatgcttgaaaaaaaacgagagtatgcagctatattggcatttgatgtcaaagttactcctgaggccagggaactggcagatgaattgggtgtcaagatatttattgctgatatcatttatcatctgtttgaccaatttaaagcttatattgacaacattaaggaggagaaaaagagagaagctgctgatgaggcagtcttcccatgtgttatgagtatcttaccaaattgcattttcaacaagaaggacccaattgttttgggagttgatatccttgaaggcattttaaagattgggactccaatttgcattccttctagagagttcattgatattggtcgcattgcctccattgagaataaccacaaacctgttgattatgcaaagaaggggcagaaagtagccattaagattgttggcagcaattctgaagagcaacaaaaaatgttcgggaggcactttgagattgatgatgaacttgtaagccatatttcacggagatctatcgatatactcaaagctaattatcgggatgaactaaatatggaggaatggaggttggttgtgaaattgaagaatcttttcaagatacaatgaggagacttgatgtgtgggcattcatttaagaaaaaacaaggttttagtgaaatgtttggttttatgcaacactttgaaggatttgttgagcatgcggttggatccaccagagaccagtaaagatgatgcaatgattcagatagatggctgtgtcatggagaggcaaaagtaacttaaacagacgaaactccaattctttgtcagctgagaagcgcaggtaaaaaaggtgcggaaagggaaacaggcaaggtcaaaattgtgaattactaccccatatatacatatctgtggcatacatggaagcaaataagggttctaaatgcaattcagtgaggaaaagcaaaattttacggaagtaattgatttgactaaaaagttgttcacttttggtttcctagtgtattattgtacaaattttttccatttgtagctgagaggcactttatttttcgcgggctatgtatccttttggtgtttcctaccaagcatttggttatggaaattggtattaatggcaaaggttcaataagccacgtggaacctgaaaaaaaaaaatacatgagaggattattacgtgaaacctgctgagagcaggaggccattccgtgctctaattgatgttggtcttattaggactaacaaccgtaaccgaaaaattgctgcggtgagg

SEQ ID NO: 83415 - DNA, 359 bp, Glycine max
  Clone ID: PAT_MRT3847_4633C.1
attcttttcttctctctccagttctctcttccctcagcacaaacatcccatagccactgcttaaccacgaagaaaccgagacaacaaaacacacttttcccccctgttctgctctgttctgtcctgttctttccacgctgttcttcaccgtttcaacaaaaacatgatccaccccatttcatgtttcctcttcctaccctcaaattctccataaagttcatctcttttcaatccattctcaactgggtcactcacaattccaaagggtgtcacatcgttagatctcaaattcttcagctccaatggcgtcgtgccccgcgaattccttcaacttcaacaccaccctctgcgcgtgcacc

SEQ ID NO: 83416 - DNA, 292 bp, Glycine max
  unsure (1)..(292): unsure at all n locations
  Clone ID: PAT_MRT3847_46340C.1
accaacctccaccatgtgatnagngacaaaattccacgatcattattacaacaataactacctctcttacaaaagtattaaaaaaaatgatttaaaaaaaaacaaacttacctcaagcctacccagctcatacatccaatactcttcttccaaatactccaaaatagatttttctccttgctgcttcaaaacatccacaaccaaacacttcatgcccatttttcttattctatgcggcattatcacaccaactgcttcagttatatatctacacaccaaaaactttttcttc

SEQ ID NO: 83417 - DNA, 232 bp, Glycine max
  Clone ID: PAT_MRT3847_46341C.1
gattttttttttatcgtaacatttctagtgatgatagccaaggatatggtgccccttatccgaattctgtcattttgaagattgctgtctgcactatgcagtagcatatagcagaatcagaatgtgctttcctccatgcatcgtgctttattgtttgtggtaaatgctaatcagtgtcactggttaaagaagtaagagtaaaggtttttatttggatgcctaaaaaaaaaaa

SEQ ID NO: 83418 - DNA, 770 bp, Glycine max
  unsure (1)..(770): unsure at all n locations
  Clone ID: PAT_MRT3847_46342C.1
ccacgcgtccgaaaaaatgtttgaaaattggaacatactctttaacccaatttttttaggatttattattttgattcttaaattttttagaatttatgttttagtttttgaatttttcatttatatttttagtattagaaattttatttcgttcttatttttagtcacttaaaaagactatataagtaaggataaaaaaaaagtttaaagactaaaagtaaaaacgaaaaaatattaaacgactaaaaatagataaaaagaagttaaacgattaaaaataaaattttaaaaagtgtaaggattaaaaaaaaagtaaactcttcttttaaatattaatctttttaaaactggattatcatcaaactaatgaatttaatgtttaatgattcattcttagttgaactaattaaaataaaataatactattttttaaatatttaatattatataataagcaatattaagcagaaaattaattaacataatattcataaattcataatattatataaaagttaaagttcacctaaaaatatcataaaaaatttgtatttattaactaaaatttattagaaatcatatttttttaatcttagactttatcttttatttttgtaaatttaataaattttaacaaatactaaagagggttaatgtttatgtactganggtgtaattcataaattcataatattatataaaagttaaagttcacctaaaaatatcataaaaaatttgtatttattaactaaaatttattagaaatcata

SEQ ID NO: 83419 - DNA, 2522 bp, Glycine max
  Clone ID: PAT_MRT3847_46343C.1
gttttgacgcatgcggttttttgagtgtaatcggtcttccaaatatggctccttgagaaaatgagtagcagatgaccccttatttgcttctattacaattacaaaagctatccatctccgttttcttcatcttccccaaaccctcgccgcaaaggccaaatacccaaccccattcccaaatttctcaacttcaacacaccacacaataataacggaatcccttcttccgtcctatgcccaaaacgctttgatcccactcctatgcccaaaagggttagcgctaacaacagagaaggaaaataaaattcgccccaagattgagttgaataaatagtggtttgtgagggttttctctcgggagtgattggaagtgcatcagaaggaacctgtgctgttgtgtaataagaacatttaatggaagatttgggaggtacccggtttgatggcctcagcaatgctgtgaggaggaagaggagtcagacttcgcgcaggcctcggcctgattcacagcatgcttctgaaggtcaggaactgtctcccttgtcttcgacgccttcggaggatactggtaaggcctctagtgatgagaatgttggttacgatgcgaattccaagagaaaggaattcaatcttaaccattgtgtctctcaaacctcctctggtactggagctgaagacgaaaaatcccataaaaagagtaaaaaagatggagggttccatacattttatagtaatgagcctgtacggagcggtttgaataataaacgctgtagtgaaggggttcttgctccagcaaattggaaaggttctagcaaaacaaaggatagcttggattcagagttgagaaatgcagatttgtatggtggaaggaatcctgagagcatgagtctggcacagtttggtggctctcaggatggattggggaatgagaaccgagttaaaaaggttaaactcaaggttggcggagtgacacgtactattcaagccaattcggcaaccaatggtgcttcgggaagtggaacaacaatgaagtctcgttcatcagatgcctccagaccacgccaaaagcaacagagtaattcagacgataataactctccttcggataagaggagtcgtctacaaggtgttccgtggaaggatttctcgaggggtggttttggtcttgggaaggaggaatcattgatggggaagatttctggaaagaacacaactagtaagctgggagacaagtctgaaccagttcgtaagagcaagcgagtaccaaagagacgtgtacttgatggggaatttggtgatgacgatgacgaggatgatgagattcggtacttggaaaagctgaaaacgtcaaaagtttctgcagtctatagagatgaagaagaattaagcaagaaacatcgaaagctatctagtgtctctaatttggaaaatgctgccccaaggtcaggcaaagacggtaagaaaaggtctagatctgatagagtgtatgaggacacagattatgaggatgaagacgagtcagggtctgatggtgagcttgaggataagaaaaagaaaaaacagaggaaggaatctgttgatgtattgatggacagtaagagggaaatgactcttacgactcgtcaacgggcccttcaatcaagtaaagatgcctctgcatctagtgctagtgtaattgagtttcccaacggattaccacctgccccgcctagaaaacaaaaggagaagctttcagaggtcgaccagcaactgaagaaagctgaggctgcgcagaggcgtagaatgcaagttgagaaggctgccagggaatctgaggctgaagctatcaggaaaatacttggtcaagactccagtaggaaaaagcgagaagagaaaataaagaagcgccaggaagaactggcacaggaaagggcagccaatgcactaatgcttgcatcaaataccatcagatacacaatgggtccgactggaacgtttgtgactttttctgaggaaatggggcttcctagcatattgaactccaaacctgtcagttatcccccacctcgtgagaagtgtgctggtccatcttgtacaaatccttataagtatcgggattcaaaatcaaagcttcctctttgcagtctccaatgctacaaggctgtccaggagaaggtggtggctgaaactacctgttgatgttgtcaatgatcctctatcactggcttcttccagttatatggaaccatcaatgtttttatctttcacaggggctttagttaagcaactgtgagttgagcgtttggtagagagctcatattgccgattgtgtatttgctttattatacttttctttttaatgctgatataataggttgtgataatggcatgcagttaattaggaatgatacatatatagcacagacaaacctttctggttattattgccctggcttttttattagcaatactagacgagtcattttgccacttgccccagtaatttgcaaaagggaaaataatagaaacttatatgatttgtg

SEQ ID NO: 83420 - DNA, 409 bp, Glycine max
  Clone ID: PAT_MRT3847_46344C.1
acaaacatacttatttgcggccaaatggataattgccacatagcacgacaagctagacacggggggcaaactttatgactaaggtacaatggtgaccaccagaatgatacaaaattgaagtgaacggacaattaataaataatggatttggaccaatgtgtttttttgaggaacaatcataaaatgatccaggaagagttaccgagtaaaattgatagagattaatatacataggagacattgaatcgaatatcggttataaatgaagatttccattatgtatgtgaagagattgatgagcgcgtggcgctttagatagaaacccaaatagaaggaggagatgtgccagagaatccatactaggaagccataaagagtttgaccaaacttattagagagaaagctgatg

SEQ ID NO: 83421 - DNA, 506 bp, Glycine max
  Clone ID: PAT_MRT3847_46345C.1
tgtacggctgcgagaagacgacagaaggggggcagcggatgagccagcatttgcttctattacaattacaaaagctaatcatctccgttttcttcatcttccccaaaccctcgccgcaaaggccaaatacccaacctctgatacatacttcccaacttcaacacaccacacaataataacggaacggaaccccttcctccgtctacaccttctttccctttgatcccacactcctatgcccaaaagggttagcgctaacaacagagaaggaaaataaaattcgcgccaacattgagcggaataaatagtggtttttgagggttttccctcgggagtgattggaagtgcaacagtagggacctgtgctgttgtgtaataagaagatttaatggaagatttgggaggtacccagttcgacggcctcagcaatgctgtgaggaggaagaggagtcagacttcgcgcaggcctcggcctgattcacagcatgcttctgaagtcaggaact

SEQ ID NO: 83422 - DNA, 678 bp, Glycine max
  unsure (1)..(678): unsure at all n locations
  Clone ID: PAT_MRT3847_46346C.1
agcctgtacctttcttccctctccctttcataggtcccttgccagtgtacctcccctgtcattggccacaaccacatttcccttggatggtcaccatcatctgcagcctcggccagatcttcgtccatacttttcaacaatgaaaaattgaagtattttgaccacataaaacctttccgttgttcaatagggtgctgctcttccatagaaccagtgttaggatttatatataccatctttcgtgcactatgataagcccatacattgatgagaagttccaacacgcgacagtagcagtgcttcttctcaatctctgaagagcctaacaagcacaggctgtatttagtggagtctctgtgcttagcatcaatggaatcaacaaacatccgagagaacattatgaactccaagaaagaagaggttggcatcacccagctgtgcagtgctgaccaataaccaccatcttccggcatggggggcagtgcttccgcatgggggggcaatgcatacatctggcggaagccatcttgaaaaacaattctgcagttgcctccatttaagatgtcacacatgtaccaaaaagaaattgcattgtggtttcttatggcactctgatccatgtccaaacgntccccaaaagtatattacatctcctctaaaattctcttgcattgtctc

SEQ ID NO: 83423 - DNA, 271 bp, Glycine max
  Clone ID: PAT_MRT3847_46347C.1
tgagacagtaacactaatgactttttaaaggggataatatatcctgctgcgcatgggacatcaatagcatttctcaacacaagtaacaattattcttctactattattggattataaactctgcggggcgaaatgcaaatcaaaataagggttattattatattttacattgcaactctacggaaaaggacatgagcgccatacgggggctaaagagtaattactgtaaacggatcatgagtattagctggagaaagggcaaatgagaaat

SEQ ID NO: 83424 - DNA, 491 bp, Glycine max
  Clone ID: PAT_MRT3847_46348C.1
ggcctccccggctcgtgcagtttgtaaacaaacactcaatcctcacttcattgaggatcaggctcagggggtggcaactttgttcaaggcggcgccggctgaccccgaggctcccgcggggccccgggggggccgccgagcgcgcagccgccgacggcactcccccccgccacagcgggcggagccatcctgcgtatcgatctattggcaaattttctgacggacggcaatttctgagcaagggttgattcgcaccgcactcatcgtattaaaggaacgattaaaatggcggccacagttggcagtcctgagaatgcaggtatggcattggcctgcgctgtgaatagatctgtcagggggcgagcccgctctgatattcacaccatatgctctcaagcactgtgaagtatggaatcctgcttgcgcaagagcaatgactatggcactcaataccagacccgagttgcgctgcacggaggctggaagttctg

SEQ ID NO: 83425 - DNA, 231 bp, Glycine max
  unsure (1)..(231): unsure at all n locations
  Clone ID: PAT_MRT3847_46349C.1
acggctgcgagaagacgacagaaggtggagntttttcctacttttttttttccaggcacctttantaaatacgtggagggcgttttcatgttcagccctttggtttactattaacatcttcaaaatttaattttacaaaaccatattcttttttaatcataaaaggaaacaaaaaccactgttttttaatcttttatctgctgctttacctgatttaacttacaaacacac

SEQ ID NO: 83426 - DNA, 507 bp, Glycine max
  Clone ID: PAT_MRT3847_4634C.1
ccaagaaaaatgcgccttaattaaactataatataaaacaaacttaaagtgacaatcactttctctagccctttatctcaataatagggtactataattgctaggcctttctgcatgctaaaaagtaaggtaacttcatttccattattttcacttcttctcggggtaatcaattcgccacaccttcaatctatacaagtgctctgacagttgtaatagcattataaataacactaacaaaaaaaaaaattgaaattaaactctatttgttcatgcatgggggtgctggtgctggtgcagctaattaattatgatagaaaccagagaatatcatcattatgataattttaaacaagtcactgatgattataccgaagacaattccaatacaatgttttaagtcaacattagaaatttttcttggctagaaaatgaagatcagatttgttaatcgttgagattggttttgaaatgataggggccatggggggttgttttgtttgaccc

SEQ ID NO: 83427 - DNA, 265 bp, Glycine max
  unsure (1)..(265): unsure at all n locations
  Clone ID: PAT_MRT3847_46350C.1
tttattttttttttttttttagtgattttattttttctatatatgctactacgaaaactttaaagaaccacctctcaatacctgcagttaaccactaattccacacactagcactgtcataaacgaaagcaaatatcacaaaccaaaacccacattccattctagagaaggcccttggcagaattctaatgggggcaacatttatgcngaagaaaaactacattaccccagaccaatcagagcatacagaaggattaaggaaaac

SEQ ID NO: 83428 - DNA, 244 bp, Glycine max
  unsure (1)..(244): unsure at all n locations
  Clone ID: PAT_MRT3847_46351C.1
ttttttttttttttttttagcnggaaaaaaaaaaaaggttgattactaataataatgctccttacaaagggagggggcgatttttttttttttttggtaaaaaaaccccccaaaagtccattgtaaactgctgttgtaaaaaaaccccctttaaaggggggggggtcatgccttttttattatcactgttgctcctccaaaatgacgcatcggaggcgtcaactatacaacaattgccgacagg

SEQ ID NO: 83429 - DNA, 201 bp, Glycine max
  Clone ID: PAT_MRT3847_46352C.1
atgtagtttcggctcttattgagtatctaatactgttttggtaatactgaagtaggtatagtagagttatatagcgttatacacattggctgctaaatatgtcggaggccaaactgtggtcatggaagactacccgtgctatcaatatgtggtgggggcatgctgatcatgggactgatggagaagttctgcaactaattt

SEQ ID NO: 83430 - DNA, 497 bp, Glycine max
  Clone ID: PAT_MRT3847_46353C.1
gctacaacgagagcaaagcttcgtagcatagcagcagccagcagcactgggagttccaatttcggcttctacggctcgcgtcacccaagcttctgaaactcatgccattgtgctgctacaaggagcatagaggcagcagcattgtgaataccattaaaaatcagttacaggtacttcttccttccctttcgcccttcctatgaattagtacattgaatggcactagaatctaatgttgttaatgacggatggcggttcatggcggaaagccaaaaatctgccataaaaatatgacggatggcatagcgaaaaatgacggatgtcatggcggaaaaaaaaatacatatatataaactcattgaaattgaaaaaacaaaggattgcattcaaattaacataaaaaagtttcatgagttcatacaataatcaagcacaaatgacaaataattgcgaaacctcaagcaacataaataaatctgaaaaaaataaaagaaata

SEQ ID NO: 83431 - DNA, 324 bp, Glycine max
  Clone ID: PAT_MRT3847_46354C.1
aattcccgggtcgacccactcgttcgcccacgcgtccggaagactacagatggggatggtgcaagagtttgttgttagctgtgggctattttatcgtgaggagaatatgacgttgtttgttttctttgatgctgcagtttttttgatagcttgggcatgccatggttcatgctatcaaaggtatccctcttttcatgaaaactggctatttcgagcatgcttaggaggataaatgctcaagtcttatgcttgctctgtaatcacacaatcatcccatcctttaaaaccattccttaagagtgcgttgaaccaacaaaggactac

SEQ ID NO: 83432 - DNA, 825 bp, Glycine max
  Clone ID: PAT_MRT3847_46355C.1
tttgcgatgaagggagctctgcaaattcggccgcaccaacaccaccatggccacaagagtctcccctcccgttgcccttctcctctcctccctcctcttcctcctcaccctctcacgcgcccgcgatctccccaaccctttctcccaacccaaacctcactccgaacctaaaaccgtttcgttcacgatcgacaccatcgatcccgttccgctgacgctcctccgcttccgtccgatcaaccgccacttccagcccggccgtccgttgccgctgtcgctccgcaccggccaccgccgttgccgccaccgccgcgagatcccctacggcaacgacgcaatcctggtcggcgacgccgctgccgccagtcggatccatccgcgctgggttaggcttcactccgccgccgagacgcggtttccggcgacggtggagaggcaggattccgatcacgatcatgatcacgagcaccaccaccaacaccacggcgagcgccaccaccaccaccaccgccacaaggagagctggttcgcgaagaagattcggaagttcatgaagctgttctgattttgatgttgcaacgacgaacgacgatgatgcatatatatatatagtagttatatagatatgaagggtgagtgtttgtgtaaataagtttgcatctgatatagagatgtatgatgtatgtgtaagttttgattattttatgttgtttatgagttgttagggatgttttatactgtagaataatatggtgttgatcatgagtgagtagagaaatgtaacttgctgatcctaatacttgatcttgcttcatgttgggcttt

SEQ ID NO: 83433 - DNA, 195 bp, Glycine max
  Clone ID: PAT_MRT3847_46356C.1
ttccaaggaacggtttccacgtcatgagctggtatgactgtcgctcgcttctgttgggggggggagggggaggggggaggtgggggtgggaggtggggtggcggggggccgacaaccccatcttgtgggaaccctagtaataggaattgcgcgctgattagtaaagccctagcgaataagctgctgaccaacttg

SEQ ID NO: 83434 - DNA, 369 bp, Glycine max
  Clone ID: PAT_MRT3847_46357C.1
cggggcgcaacaccgggggggcgagattaagtggccgaatcggaagaatccactctcgaagaccctgctggactatgatatcgagacagggtccagagaatcccaagatgactcggaaatcgctgaaacctatcatgaggacaatgaaaaggaggaggagctgaacaagaagaagccctttggggacactcgctccaacaacaatgttgctgctaagcctgtccctccaggaggaacaaatgcgaactctgttgaatcaaaagggcaccctgacaaccgcgccgagagaaagaagaagaactcacatcccggaactcgccaccctccatggcgaaagagggctgcctggattcaacccccaaaaatggg

SEQ ID NO: 83435 - DNA, 347 bp, Glycine max
  Clone ID: PAT_MRT3847_46358C.1
ctcctccttcatttcatcatcatcatctttattgttggtgatttgagtttttgcttaatccttttgtctattcatgtatattgctaaaaattaaagccaaattagtttactggtttgagaatttgaaaataataaatgcatgaaattataggaatttggcatacaggataccattgatgcaagtgacatttggccaactataatacatttggatttttgaaaataaggtgttaattgacatgtctagacctttcactgctagccatgtaattttaataataccttttaacactttatagttcttttattggcttgagcaatttccatccaatataatgactgtttgc

SEQ ID NO: 83436 - DNA, 283 bp, Glycine max
  Clone ID: PAT_MRT3847_46359C.1
gccgatcgttcaaacatttggtcaattttaggttctctaaggaatggaatatccggtgtgcgcgtgcctgtcgcaagtatatatatatattaatatattctcgtgtgagaaatacagcggtaaagcgctgggtaatatatataaacactatgtaatgcgctgtgacgtatatataggataggggtttaaaaaaaaaaaaaagggggggccctctatagggtaccagcgttcactcacgcgcgctcgacacgatatggctcctatagggtgacccaaatttaaa

SEQ ID NO: 83437 - DNA, 293 bp, Glycine max
  unsure (1)..(293): unsure at all n locations
  Clone ID: PAT_MRT3847_4635C.1
gncggnggtagtgactcgnatcgcgcagngtatanggtggnggggnaagangagtnagngtgnannnggnagaagggaggagttanagnangnnnggggnggngggnngaggangagtggaggnnanaggaagnanannggggaggagtggangagannnnattgangtgnggngggtggganagtgnngagtnagattngngngnngngaggganngnnntnaagggnggngnngngggnggngagnananggnggnnnngnggngnngggnngngngggnggnngnnnggg

SEQ ID NO: 83438 - DNA, 767 bp, Glycine max
  Clone ID: PAT_MRT3847_46360C.1
aagggcaacatgtttcaagcataagtacacatgaacttaacctggtaacttttaaaatcgtgctataaagctaggtgtgggaacccccacctatgttatagttcaaacagtgtgaaaatattaaactttaaatcacataaaaagtattgaaaaatgaaatcatggaagagaaaaaaaaatgacatctttagccttactaaatgtctaatgttggagcttcacattatgaaggtagttgcttatctgctgcaactgggttttctgctggtgtcattactgaacaatcctgggaaagtttcaccaccgttccatcagcagtttcaatattaccattattgcttgaaccagcagtctcatcaagttggaatgtgacagatgacatctgatcttttgtttccccaataggatttccctctcaaaatgagccaaggaatctgagacttgtatctgtgacaaattttgagataggggttcatgacttgatccagccatcaatgctggtacttgtatctgagcggccacaggacctgatagtggtgttgttgctggaacttggacattagataacacattcatcaggagctgagccagaaagtttcgtggatcattgatgcttagagggacactaacaccctgttggaccggaaaattatttgcatttgacagagcaatgatattaggagggtgaagtgggtgaatcccagcttctccattaaaaggctggtagccatggacacgcttgaaatttgacaagtggtttttttcct

SEQ ID NO: 83439 - DNA, 1696 bp, Glycine max
  Clone ID: PAT_MRT3847_46361C.1
gtctagtctatctagaattcaataatttactattttaggcaaataaaaacaaattaaacttgagaagaaaaaaaggcctgcaaagggacattgtaccttaaattaaaagattgaagtttcatgtagtttctttttcatcatccattgaactgaaccttaaattaattatagaaccatgtttgcaactaccaattcctccactttgtcacctttattctctttcagtagaacaacagcaacctctctgccttccaaacccacattctggaatttggttccaatgaaacaatcttcttctccggggcacttggccttagccttagacaatccacgtagaacacttcacgtgtcttgtggctccacatcaccacatgcttcccagagatcatcaattcaggggggtgaagcttttttcaggggtgtgttggaaagtatgcaatctgtttacttgaacagaaatcgtactgctaaggccatattggaccttgttcactctgctgagaataactcattatgctatgatcatcttgcattcaggacatttggggtgaatggttatggaattgattccatggctagtttttttctggattatggctatacacaaagggaagagttgaggtttccagccaaaaagttgagggctttgtggttttctcctcctgctgattcactggctagcaatggcagtggcattaatgggcctttgccaagaatatttatatcagagctactggtagatcaaatgagtccacaaactcaggaaataattaaaaaatacaccgaatcatctgtggatggaaacaagtatgcagcacttgcaagttcccttggacatttaacatgggaaaagcccttatattctgagtttcaacaattggcaagtgaaagtgagtatgctgcctggaccctagtcaacgggtatgcactaaaccatgttactatatccactcatcggctgaaaactcatttgaaggagataaaaaaactaaatcagtttattaaggatagtggattcagattgaattctgaaggaggagtgctgaaagtgagccctgatggtcttctccagcaaagctcaactgtagcagattcaatttctttcaaattttctgatggtataactgaatcagttccatgctcatacattgaatttgctgagcgactggtgctgccgcagtataaaaatttacctgacacagaggttaaagagttccatagaagagatggttttgaggtagcaagtgctgacaagatatttgaaagcacatccaaggagcagttgagcagagtaggctcataagaggctcatctcactccataccaagaatgtgtatactttatttcccttggggaaatatattacaatttatacccagttgtattctggaagtttggatttcatacaattccaatcatgtggatgttgcatcaataatttgggttgattaatttcaaaaaaaataattaactcaaacacaaacataaaataatcgtaagggatttgtctagcagcacaatatagagtctcagattttacatgcaagttcgagattctcccttgtcttcttgcagtgagataaatataagtgcatttgtaagtgttttttagtcggaagactttttttgtctagtacaaatatgtcatttctttcccctaaatttttctatacaaaaaaaaaaaaaaaaaaaaaaa

SEQ ID NO: 83440 - DNA, 404 bp, Glycine max
  Clone ID: PAT_MRT3847_46362C.1
cttgccttccttttttttttatttacttatcttattctattttccaacgctcgttatttgggtacatgggaagaattttatggcgattttggaacaaatccttgaaatggaaaccactccggacgggtgaaaaaaaaaatggttgaacataaaacaatcccaccacgcggaaaaaaaagaaagctccactcaacccaacccctaattattgaaaggaaaacggcactcacacatgagcaggaaccctggtcaacgctgggaggagggttgggctccctctaacaaagaaaagatcccttctaaaagccccctcttaaataaggggggattttgggggccgggcggtggcttcaaaacaaaacacaaaaaaggggggggcccaccacaaaaacaagggtttcctt

SEQ ID NO: 83441 - DNA, 424 bp, Glycine max
  Clone ID: PAT_MRT3847_46363C.1
ctactatagtaaaagagttattattgaaacaaaaggatatatgaatttgttaccataataatatgcacattacgagaatgacaacaggtcatttaaaacaacatacgtagtgtatatccccaaaagaagaacgtggaatgtacgtactgtttatgcgaccaatacatagataatatatccatgcatgacacaaaactattaaatttcttcttgaggaatgtaacgacgcaatatcatttgttactaatgtgggcgtccacgttagctacaaaaaaacccattcttgagagcctaacacagtgcaaaccatttagagcttgccaaggatttgggaaactgctgtttggaaagccattctcattgagaagatcatcacccaacttagccacttttgagttgatcgttttactcctgtacatgaaac

SEQ ID NO: 83442 - DNA, 351 bp, Glycine max
  unsure (1)..(351): unsure at all n locations
  Clone ID: PAT_MRT3847_46364C.1
tggaantttgggctgatttatgtgcttgcatggtcganaagatgatagaagggcatggtcgtgagaagatgatagaagggcatgggcgggagaagatgatagaaggggactctaaataccagcatcaacaatttaaaaacggtattactacccctactagtaattaagtctcctcttcctctaccgtccccgtcaattataataacggcccacgaagttaacctctaaccattctcgtaaatgatgccggcgcctcattcttgagatacagtaataggatttaatgtaatagcccttttaactattggttctattggaagggaccggattcatgaataacctggaataaca

SEQ ID NO: 83443 - DNA, 272 bp, Glycine max
  Clone ID: PAT_MRT3847_46365C.1
tacggctgcgagaagacgacagaggcccctcaacgcttgataatcttattgaaccatttaaacaaacggatccatagaataattccacaccttaacttgagtctaccctgttacattactgatcagctactccataacttattctcctttgatattttctgttggagaacattgcataagaaagctgcagcacatttaacagagaaacaagtagccctttttatggtccttaaagcgtaggtgccttgccagttgcatgaagatcttttttg

SEQ ID NO: 83444 - DNA, 392 bp, Glycine max
  Clone ID: PAT_MRT3847_46366C.1
ggggcccaaaaagggaaaattttttttttctaaaagctggggggaaaaaccagaaatgttgtgaccgtggggaataaccaaaaaattcaaaccggacctttatgggtacccaattttttttttttgagggcttttttaaattttgggtgacataactcacagtgagtggggtggggaaaattgtgcgccagtaaaatttaaaaaaaaaatacaaactggaataataaatttaaacttctgggggtctaggtgggagagttatttaacttagtggggggtgttttttttccccttttaaaaagcaaaaaatatgtgggcctcttttattaaaaaaataaacaagcttggagaggggggttttttttttttttcacccaggggaattttttttt

SEQ ID NO: 83445 - DNA, 167 bp, Glycine max
  unsure (1)..(167): unsure at all n locations
  Clone ID: PAT_MRT3847_46367C.1
cgcaggaccggaccggaanacctgcncgacccgacaagccnacggaagcaagaagaccacacaagggggatagagagaggtgaaaagaaacggtgcataaaaaatcaaataatcgcgagaggctttcactcaacccacctgggacctggctcggaagagctaagaaa

SEQ ID NO: 83446 - DNA, 640 bp, Glycine max
  unsure (1)..(640): unsure at all n locations
  Clone ID: PAT_MRT3847_46368C.1
gcttcaaaaagtatgtttagagtaatgtagtaaaagatacaaagaatattcttcaccaaaaatacattcagcatatgcataacagtaatccaaacatgctataaaagattaaccttgtgtttggatcaggaaattcaaaattccagggaatttgaaatgcttagaatttgaattgctttgattttaatttccttcatttttttaatgctttgtttggataaatccattcaaacttttttcattttaaattctttatttggatagggcaattcaatttcctccatattcaaaatttcaattttatattttaaatagatgaaattttaatattaaacattatagaaaataaacacaatctaattttgaaatattaattaaaaaatatttttcaatttttaataatatataaatacaaaatattgataattttaactaggattgttttgtctcactacaatcaatgatgtttttaaaccgacatcaaccaagactatttttcgatcgacatcaaatagaggttttttttgtcaaagtatgctgggaatatttgtcagctgacatcagccggnactattttttgactaacattggttgagtctatttttcaattgatgttggctaggttttttttaccaacgtc

SEQ ID NO: 83447 - DNA, 1660 bp, Glycine max
  Clone ID: PAT_MRT3847_46369C.1
tctctctctcgcgtgatgtcattcatcattctcttcctcccccgaagaacttgttggcctttcatttaaagccctctctctctctttctctcattctccgctattcttgatctgtctattaattaagtaactctctctcgctctcatttcattcatgattctcttcctagcccgaagatcttgctggccaatcaataacaaacctcgctctctgtatctttcattgcccgctattaataatggaaacgttatttgggcaattaaaccacagactccgcatttctgatgtcccggttcccccgccctcaaccacgaagggcgaggatgtagaagtgtaaccggcgacatcctcccccccactgctgaagtctactcccgctcccgaatcatcccacaaacaaggtacaggttgctttacttttcttatttctgccagagtagtccacgctttgcaactccatttcgcccaaatggctgctacttctgggcccaaagctgttggtttccctactctccatgatgttctagtgagtatccaggatggcatgcatcaacttcagaaacacgtgtccaggaaagtgccgacaactaccaggaaagatacgatcctgtctcgagaatggacctactgagaaatgcaaatgcccatgcataaccccttactaggttaaatactgataaatattcatacttatccaattttggcattttaatagccatattcagaaatccaagactggatgctattcttataattcgtaatttcggacacagattcgagcaattaaattgtctggggttaagcaggagcatgtggctgtgtctccgaaaccaaaatccaacccgcgtcggaaaagtcaagcgcaagaggccaataaaggaaacggacggagggcacggccgccacaggttccacatcaaggtggtgcggggatgcgggccctatttctggatgggtccggttctagaggtgggaccggcgtcttcttgcctcggggtggtggagctactaccccatccgaatcaaccaaagctggtggcttccctcctctccatgatgttctagtgagtaacagggatggcatgtattcacttcagaagcccgagtcacggaaagcgccggcaagtatccagaatgatacgattctgcctcaagagtggacgtattgagaaatgcacatgcacatgcatttcccattactcatctttttacacatacagaataataattatcctgttttggcagtttttttgcccaaactgaagaacaaagaaacgaagataggtgtgaactgtgaagtgaagaagaataacccagaaaagaaattcctatactacccagatcggatttatatagttagggaatcttttcccccccagagtacgacaaatagggatcgatatacggatttaataaatatgcctggttttgtattttgctatttcttatggggtataagtttaagtaggtgtatactacgtactacgtacgtactcgtgagtcgtgacagaatacgataaagcaagaaataaaatctagctcaatctctttgtatgcaaagcaagaagctagagtgggtcggttgaatctaaatctcaacagaggatgtcttttaaaatcctttgtaataattcaacttagttatgggcttctgttttt

SEQ ID NO: 83448 - DNA, 249 bp, Glycine max
  unsure (1)..(249): unsure at all n locations
  Clone ID: PAT_MRT3847_4636C.1
gaaaaattgatgcgtgaaaggacacacctgctgttgggcttgttggtccaaggtggcaatttgtaagaaagatgtttggagaanttcatgnnggatncccctcngggtttccgcncncagttnnttgcnnnagnntttttaatgnaangcccnttangaatagcnaggaaaatttanntgggccngggctaangccccccagttntggttttgacaacccctcaaaaaantcggtncnntgtgggggna

SEQ ID NO: 83449 - DNA, 452 bp, Glycine max
  Clone ID: PAT_MRT3847_46370C.1
caaaagttcagacaatttaaacactaatagatatttactttacaattgatcttgtcacacacaaacacatacatatgcacagttaggatatgatttaaatgatgcagcttctgttgcagcttacaatgtcagaaccactttcattgttgtattctcttgaaaatgatctattggtcaatatagtttatttcactgaatgtttatcatgtctggttaaaagtggttctaattaaattatttataacccttttttatttcatggattgctttttaacggaatgaaagtttttttttttttttgtgaattaaatagtaattttcactttgaactttatgttctcttctgttactctatctatcaattaatctatctacctatttattttataggtgatggaattgcatactcggttggtgccaatttcacacctcacatccttacagtaaatgat

SEQ ID NO: 83450 - DNA, 771 bp, Glycine max
  unsure (1)..(771): unsure at all n locations
  Clone ID: PAT_MRT3847_46371C.1
cagattcgagcaattgaattgtctggggttaagcaggagcatgtggctgtgtctccgaaaccaaaatccaacccgcgtcggaaaagtcaagcgcaagaggccaataaaggaaacggacggagggcacggccgccacaggttccacatcaaggtggtgcggggatgcgggccctatttctggatgggtccggttctagaggtgggaccggcgtcttcttgcctcggggtggtggagctactaccccatccgaatcaaccaacaagcaaggtaaaggttgctccactgttcttatacctgccagagtagtccaggctttgcaactccatttcgaccaaatggctgccacgtctgggcccaaagctggtggcttccctcctctccatgatgttctagtgagtaacagggatggcatgtattcacttcagaagcccgagtcacggaaagcgccggcaagtatccagaatgatacgattctgcctcaagagtggacgtattgagaaatgcacatgcacatgcatttcccattactcatctttttacacatacagaataataattatcctgttttggcagtttttttgcccaaactgaagaacaaagaaacgaagataggtgtgaactgtgaagtgaagaagaataaaccagaaaagaaattcctatactacacagatcggatctatatagttagggaatcttttcacacgcagagtacgacnaaatagggatcgatatacggatttaataaatatgcctggnntttgtattttgct

SEQ ID NO: 83451 - DNA, 138 bp, Glycine max
  Clone ID: PAT_MRT3847_46372C.1
accactcctaacagtacccttaatatattatgcaccatattgacacctcatctgtgcgctaggacgattatgtcataacaactctaacctacatcgaatatcccttcatggcattcaaactttacctgtctttgaagc

SEQ ID NO: 83452 - DNA, 285 bp, Glycine max
  unsure (1)..(285): unsure at all n locations
  Clone ID: PAT_MRT3847_46373C.1
gaggcagggcgnacggcagcaagaagacgacagaaggggaagacggcgggacaacagaaaccacaaacgaagagcagcggaacagacacccaaacgaccaggggacagaaccagaggaggaaaacncggccggagaaaaagcaaaccttctcnttgggggggggggcgaaagcncaaanccgagacacggaaaaaaaggccccccaaaggagagcagccgcgggccccaaaaagnccgnaagcacccaggcccnggaaaagaaaccagcaggagacagcgggagc

SEQ ID NO: 83453 - DNA, 1280 bp, Glycine max
  Clone ID: PAT_MRT3847_46374C.1
tcccctcaatgccatctggagccaaatttgatgggggaggatcaaccagtcaacaaggtcagatattgtacagtgatcaagagcgacaaactattctgcagcagattattgatttaaaaatgcttcaacaaaatgaggacattgattatcttgcaaagatcaataggctacaagaaaaagatttatctccttcagtatatcacactcttaagaaattggacgacaaattcaatgagcaagcacaaaagtcccaggatcttgctactaatgttctggaaaaagactgtcccactgtggagctgaatcctgaaactttgccttctacgttttctcaatttgacaatttatattcttcttcaattatcgatcttcccttgcatggagagttgttctggacatgccgaactccacttcaaagtatgcagttgtggtcccaaaatattcaagaccttgggatatgcaaagaacttgtttgtcaagatgattttaacatccctgatgttgacttaactttccaaaactatgaggaactatttggaggagatcaagatccaattagaatactgcttgatgatcaagatgtctcctgctcttctttagagaaggataagtcagttgacaagtcagttattgacaatccaagtgcaatggaggaatcttctgcagctgcgtccattactatctcccaatctgatcttgacaacaaggatatgaatcctctcagccagtactgtccaagaagcatggatcctgctcatgcaattcgaccatttgattcaactataccattctccgttctgagattcaatgaggaaagcagttgcacaaaccatgatgacagtgccctttctccctacagtgaagggagggcttattcaggtagttaagttgaattgaagattgcacacatgtggaggaaatgtcatatgaagtgtataaagagaaaaaaaaagtctcaattgtgagttctgtgtgctaagtgcctcactttagcctcgctgttttgtcgagtaatttttaccatgccgtccagtgatcacatacctgttaaaatctccgtctcagtattgtcaattttgacatttgaatttgtttttgttaccacattggtttacttccagcaataatgcattttatccctggaaatattattagaatgatatatgtattttatcatatttatgttcattttgcttccaggcatgagaagccatttcaacttcgatccaggaaacctggagatactgtaagaaagagagtgaaagccattgataaggcag

SEQ ID NO: 83454 - DNA, 475 bp, Glycine max
  Clone ID: PAT_MRT3847_46375C.1
actgagcatcggctagctatagctatctcgatcgaactgtccaaggtcctgtcaccaggggacgcaaccagggaaccaaggaaacattagcaccacataggtagtaataaacccaaaaagtatacgggcacgataactgaaataaataacgtaatacaacgttggatatggactgtgtttgaaatagggcctaagcattagaggctaatagcacagagttggacactagactgcacaagagaggcatagtgacagttcgcgaaagcgagaagcatgtggcaacccgatgggggggggaattggccgagggtaggggcacaaaggagcatagccgaccagcgaagttgaccgaaatggtagagcatataagtgtagcgggttaagggagcaaaataagaagccttcgcgaagcgcaccaggctggcaatgataagcagtatcaattagagatgaaggttgtagggaacacccatag

SEQ ID NO: 83455 - DNA, 238 bp, Glycine max
  Clone ID: PAT_MRT3847_46376C.1
aaaaaaactaaagactatttccgaccggccttacctaaatgatgcacaatgggcaagggaaggggaatcccttcttatgaagggatggaatctttgcttttaattcgaggtggattaaagataggtgtaccgaagaacacaactgtcaccaggatactacgacggacgctacaggaccatgtgcaaacgtgctatgcatagaagaacggaggcgtgttatgtttccaagaagttcgag

SEQ ID NO: 83456 - DNA, 359 bp, Glycine max
  Clone ID: PAT_MRT3847_46377C.1
gccaaataaacacaaaagcataagcaccttgcattgcaaatatggttaacggctgaactgagaatgtggtccattatgaaatgtttcatgttttgcagtgcctagtgcttgttatatgtcaatacttaatgcataccatggaagatcagaaagaactagagtaaaaaaaagatggttggtacttggtttcatttgtattgaatgaatggaagaggcagaagcttggtcctaagaagcctaatccaaaacccctttgtgtccttatttatctacgtgatcactctccctcgctctctctctctatccattgaaagaggagatggcaccaaaaccagtttccctttcacatttactccatt

SEQ ID NO: 83457 - DNA, 1438 bp, Glycine max
  Clone ID: PAT_MRT3847_46378C.1
tcgcgctatttcggaagggtcgtgtttccctgcttcagtttcagcttcggcttcgagaagcgtcgattgggtccttaagctgttccttctctgtttctgctttggagcatcttggagcaaatgagcaatggagcttgtggagcacggctcacctcaaggattgctctcttgacaaactgtataactcctatcaaacatgagcggtcgcttttctcgcacaatttatgtcggcaacctgccctctgatataagagagtcagaaattgaagatctattctacaagtatggccgtataatggatattgaattgaaggttcctccccgccctccatgttattgctttgttgagtttgataatgctcgagatgccgaagatgcaattcggggtcgagatggatacaactttgatggttgtcggttaagagtggagcttgctcatggtggtagagggccatcatcaagtgatcgacgtggatatggaggaggaggtggtaatggtggagcaggcgggggtcgttttggcatctcacgccattctgaatttcgagttattgttcgtggactcccatcttctgcatcttggcaagatttgaaggatcatatgcgaaaagctggggacgtgtgttttgctgaggtttcccgtgatagtgaagggacttttggcattgttgattacactaattatgatgacatgaagtatgccattcggaaattggatgacactgagtttagaaatccctgggcgagagcttatattcgggtgaggaagtatgagagtagtcgttctaggagccgcagcaggagccccagcaggagccccagcaggagcagaagtccaaaaagagttagaagtagatctctggagcgttctgtgtctaggtcacgatctagatctcaatcagcatcaccaatcaaatcttctaggccaagatcacgatcccgatcacgatcacgatctggatctggatctcctcatcaggtcctgtcaggtagtggttgaatttctgacaaagctggtggttctctggtgatattgttccattctggtgggcagtatcggaattatattggagttggactaaattgttttaagggaaaattattgatgtgcctaggctgtttggtgattgtcttatttcttttaaattaaaatgttggacattggccttgccctttgtaccttagcaaacacaagaatatctttagtcctcgcaaactgtgaatccaatttgaatggttttaaacagatttataaaaaaaaaatctacatatatcgcaatcaaaatattcaggtttccccaccagacaggggggtggataaaagtaaatgttgatggagctttttccatggagcataatactgttttatgtggtagtgtaaaggggttgtgaattgtgatggaccttttgtgtgcttgagtaatgaatttgaattgtc

SEQ ID NO: 83458 - DNA, 558 bp, Glycine max
  Clone ID: PAT_MRT3847_46379C.1
ctcacgcgtccgctcttgcatgcactgccatcacccttttctttcaacatgtctacaccagcagaatactacaggtctctaccacctgtgagcaagacctatggagtggcctgtttgatgaccacttctgcatattatctgcaactctatgatgcaaggaacatagcacttgattatggcccagtgtttaaaagccttcaagtttggaggcttatcacaaatttcttctttcttggctcattttcattaccatttgcagtccgtctgataatgatagcaaaatatggtgtttcattggaaagagggccctttgacaagagaactgcagattatgtttggatgttcatttttggtgcattctcacttctggtgattgcagctgtgccatttttttggtatccattcatgggaatttccttagttttcatgatcgtctatgtttggagccgcgagtttccaaatgcacgaattaacatttatggtgttgtatcattgaagggtttttatcttccatgggctttgctagctctggatttaatatttggaaatcctataaag

SEQ ID NO: 83459 - DNA, 529 bp, Glycine max
  Clone ID: PAT_MRT3847_4637C.1
cttatatatgtttaattcttttcctattttattaaatatgtataggtttaatttgatagaatctcgttacatcatctgttaactatgtaaccagttgatggaaaaaaagtttaaagactttaataatgtcactaatttgggatgataaatgaatccttttagccaattgaaagttgaattttaatgaatcagcacatttaggattcggattaaaatttatccgatccattcattttgtcaccctttggccttatcactaatatatggctaaaggtttgtcaaaatttcaattggtaacatcaaacatgcatggttactaaaaaccagcttgtataacttgtagacttgtacggttgtacccatatccaggatgcatggaaatgatagaaacccatgtaacaagcactttaccaattcactagctagaaagtagaaacatgtcattatttaatcacatatacagtctaaaaacaaattaactaatgagatgttgggcacttggctcacatatgcaggggctcatacacta

SEQ ID NO: 83460 - DNA, 460 bp, Glycine max
  Clone ID: PAT_MRT3847_46380C.1
aaccacccccctgtctgggggggaaacctgaatattttgattgggatatatgtagattttttttttataaatctggttaaaaccattcaaattggattcacagtttgggaggactaaaaatatttttgggtttgctaagggacaaagggcaagggcaatgtccaacattttaatttaaaaaaaataagacaattaccaaacagcctagggacataaataatttttccttaaaacaatttaatccaactccaatataattcccatactgcccaccagaatgggacaatatcaccagaaaaccacccagcttttttaaaaatttaaccactacctgacaggacctaaaaaaattgattggggatgctgattgaaatctaaatcgggacctaaacacaaaacgctccaaaaatatacttttaactctttttggacttctgctcctgctggggctcctgctggg

SEQ ID NO: 83461 - DNA, 1491 bp, Glycine max
  Clone ID: PAT_MRT3847_46381C.1
cggtctcgtgggcggacgcgtgggctgttctcgcgatttcggaagggtcgtgtttccctgcttcagtttcagcttcggcttcgagaagcgtcgattgggtccttaagctgttccttctctgtttctgatgacaagcgcttggacaaatatgagctttgcaatcaaacatagggatatagagagggaatgggagaatcggggtggagttatggttatttttttaaaattattggagattcttgctcactctcagaagatgtatgcctgctaatatactggaatggatgaggagatcaaatttaatttcaatattgttatagctttggagcatcttggagcaaatgagcaatggagcttgtggagcacggctcacctcaaggattgctctcttgacaaactgtataactcctatcaaacatgagcggtcgcttttctcgcacaatttatgtcggcaacctgccctctgatataagagagtcagaaattgaagatctattctacaagtatggccgtataatggatattgaattgaaggttcctccccgccctccatgttattgctttgttgagtttgataatgctcgagatgccgaagatgcaattcggggtcgagatggatacaactttgatggttgtcggttaagagtggagcttgctcatggtggtagagggccatcatcaagtgatcgacgtggatatggaggaggaggaggaggaggaggaggtggtggcagcggcgcaggcgggggtcgttttggcatctcacgccattctgaatttcgagttattgttcgcggactcccatcttctgcatcttggcaagatttgaaggatcatatgcgaaaagctggtgatgtgtgttttgctgaggtttcccgtgatagtgaagggacttttggcattgttgattacactaattatgacgacatgaagtatgctattcggaaactagatgacactgagtttagaaatccttgggcgagagcttatattcgggtgaggaagtatgagagtagtcgttctaggagccacagcagaagtcccagcaggagcagaagtccaaaaagagttagaagtagatctttggagcgttctgtgtctaggtctcgatctagatcgcgatcagtatcaccaatcaaatcttctaggccaagatcacgttcacgatctggatctcctcgtcaggtgctgtcaggtagtggttgagtttctgaaaaagcctgtggttctctggtgatattctcccattctggtgggcagtatcggaattatatttgagttggactaaattgttttagggaaaattattgttgtacctaggctgtttcttggtaaattgttaccagtttggtgattgtgttgtttcttttaaaactaaaatgttggacattagcctagcgctttgtaccttttaactagtttctatgacaattattagcgcttttaaaaaaaaaaaaaaaaaaaaaactcgagactagttctctctctctc

SEQ ID NO: 83462 - DNA, 264 bp, Glycine max
  Clone ID: PAT_MRT3847_46382C.1
atattattgcttttttattgctgttgaagttgtttagttctgagacaatgcacacatcagcatgtgctcataattaaaaaggaaaaacaatttttaaatgctggttgcatgtattaatttcacagtccccggatgctatttaattacaaaaaggagaatctaattttcctttaaaactgtactggctgttaatttacaaaaatgcttgtacaggtacctcggtcgcattagggggggaatatgcttggtccagacacgtgaatt

SEQ ID NO: 83463 - DNA, 375 bp, Glycine max
  Clone ID: PAT_MRT3847_46383C.1
caattcaaaaaaaataaaaaaaaataaagtgtttggtaccggcaactaacccaggaatagttgtttttcaattagaattagagtttccttacctccgtaaaattccaattctaattagagaaagcaccgacaatactgcgtttgtacaatatgacaatgacaattaattcaaattgccacagatctcgttttgggtctgtcctaataaaatagtagacacttgtagtttgcactttgcactcactatatatagtccagcaacatcgtcaatttcgactttgcacattttaatcttaatcaatccagcatggcctgattataacctagggctgccaatggagccgctaagatctctatttgtctactgcactacag

SEQ ID NO: 83464 - DNA, 271 bp, Glycine max
  Clone ID: PAT_MRT3847_46384C.1
acaactatcatcttataatgcttaaaataaattaaacataaatttttccaaatacaaccctaaataatatttctaaaaattaaaataaaattaattcatttaacacacataatattcgtttccttcatttctacttaactacattatatttactttcacttaaattcaatacatttatttcattatctttcccttactttaattaaaatgctaacttctctcaatttcatcaatttcttcaaatcaataaacttcatttaattcaatcacc

SEQ ID NO: 83465 - DNA, 358 bp, Glycine max
  Clone ID: PAT_MRT3847_46385C.1
gaattagtcatagtagtttcttcctatttgaacaacgtaggatacaaccctgacaagattccttttgctcctatatctgggtttgacggagacaacatgactgacatgtccagaaaccttgactgggataagggtccaactctgccacatgcacttgaccagatctctgaacccaagaggccttcagacaagcacctcacgctataccatcaggaggtgtactatattgaaggcattggctctgtacctgtccgatgggttgagactagtctcttgaagcctcccattgaagtgacttttgcatcaaatgaactgagattccaagtaaagtcagttggaatgcaccacacacctctca

SEQ ID NO: 83466 - DNA, 1111 bp, Glycine max
  Clone ID: PAT_MRT3847_46386C.1
gcgaagtgcaatgatgcttgattgtacaattgcttctaggcttgacatggaaagaaggattggatcacagctagatgttgccactcttgatgacattttgataccatctttcaggcatgcaggtgataccttatttgatgttgacacagttcatagaattttggtaaacttctgtcagcaggatgatagtgaagaagaaccagaagatgcttctgtttttgaatccgacagccctatttcaccctctcaaactgcactagttaaagtgtcaaaactaatggacaactaccttgctgaaattgcccctgatgcaaatctaaaactttccaagtttatggtcattgcagaaaccctacccgcacatgcacgcacgattcatgatgggttatatcgagcaattgatatttacttaaaggctcatcaaggattgacagatttggacaagaagaaactatgcaaattgattgattttcaaaagctttctcaagaagctggagcacatgctgcacaaaatgagcgccttcctgtccaatcaatagtgcaagttctatattttgaacaactaagactaagaaattctttgtcatgctcctacggggaagatgaccccaagccaatacaccagtcatggcgcataagtagcggtgcactaagtgcagcaatgtctccacgagacaactatgcatcattgagacgcgaaaaccgtgagcttaaacttgaattggctcgactaagaatgagactaaatgatctggagagggagcatgtttgcatgaagagggatatggccaagtctggatcacgtaaatttatgagttctttctccaaaaaaattggtaaacttagtctttttggacataattcttcaagaggatcaagttctccatccaggaactctcaaagaacagattcaaaggtgattgagagaacctgtgctagcacagagtagacaaaggtgtagcttccttttttcttttgtttatctgtcattgtactcatggggcaagggtaagttatgctcatggtgacatattcgcttctttttgtttactgttgttccctttttttgccatctttatgttagtaaagctaggaggctcctcttgcttgc

SEQ ID NO: 83467 - DNA, 280 bp, Glycine max
  Clone ID: PAT_MRT3847_46387C.1
tgcacccacggcacatgcagctattacttgcaggcaggtgactagtaagcctgtgcaatctgcatcggttccctccataagggattaacgccgtggtgggggatgctgcaacagagtgaaaagccttactgcagccgccaagaccgcagtagaccgccagacggcgtgcacctgcctcatatcttgcgacaacctaatatgcggctgcaacgcctacaactccggactcatgaccgtacaatgctgagtctccataccctacaagatcagcacctccacc

SEQ ID NO: 83468 - DNA, 368 bp, Glycine max
  Clone ID: PAT_MRT3847_46388C.1
cccaacaatttcttcggcgcgggtttctttaaccagggggttttttttattttaaaaaaagacattcccctcccctggttgccctccccctacctattgttgagcctccccacctcagaagagaaccacggcgtacacttttggtcaccaaaataaatttttttttacaaagcctcccccttcttttcctagaagacaaaaaaacccccctcttgttttttcaccattacacctcaaaacttattttcggtctcttccccccctttttttgttttacaaatttcttcctaaacaaaaaaggcccctttaccacacataatataaaacaccccaaaaagcagtaggaactcctttaaaattttgatgcc

SEQ ID NO: 83469 - DNA, 333 bp, Glycine max
  Clone ID: PAT_MRT3847_46389C.1
ggttcattcgaaaaattattacatagtctgggacctatggtccttaccaatcttcatgcagtaacatataactaagattttcaatttactaaaaagaattaattagaaaaactcagttatatgtcacctagagtttgattaggaccatgaataatatttaccatgtaataattcctcgagttagagacttagagggatgtggatgagatgatattacgtgaagcatataggttcttaagctctaatgctctattgaagacaaaagaccatcactgtcaccgattcattaggtggatatgatggtcacatacaatctgagtggacttagcccca

SEQ ID NO: 83470 - DNA, 274 bp, Glycine max
  Clone ID: PAT_MRT3847_4638C.1
aagccactttgaatttttttcttgcgtggcttcactgatcagtccatggctggcttttacttgctgcttttgatcctaaatcaagagtatatgcaagggaagtgcatgctagagataggagagtcaagcaaaaatcaggccaaaatgccggactattttagtttctgtttgatagtctcaataagagtattgcaatgtagaagtgtcctaacttacagaagaatctgagatcaagtagttcttttatttttgcacattataagttacgttgcag

SEQ ID NO: 83471 - DNA, 1099 bp, Glycine max
  unsure (1)..(1099): unsure at all n locations
  Clone ID: PAT_MRT3847_46390C.1
ccacgcgtccgcggacgcgtgggttatatgtcaatccccctccccccaaattcattcccatcgatcaaattcaacgtcctttggaacgcgtgtgattcgtataaaacaaacacacatatcacataatgttcccgcagagttttaacattagtggcggtggtgccgggcttgaacaactgttgcagcctcatcacttcccatctccaatggaacaacaacaacaacgttccaggtggaaacccagcgtcgaggtggcacccaattgccctcgctgcgcctccaccaacaccaaattctgttactacaacaactacagcttgtcccagccgaggtacttctgcaaaggctgcaggcgatactggaccaaaggcggctctctccgcaacgtccctgtcggcggtggctgccgcaagaaccgccgcggaaaatcgttgcagtcgtcgtcgtcgcggcaacaacgcgcttctagcttcgtttctggggacacagagtcatcatttagtgatgcccaacagattaacaacgggtctcgtgatatagacatggctctcgtgtttgcaaaattcttgaacccaaaaccaaccactggtgaggataacaatggctcatcttcgacttccaacaattttacaccggaaagtgtagaaattgagaatgatgcagtggttcagtctcagaataaggcttcatccgatcctgttattgtagagtctgagaatttgagtttgggtgagattgatgagttggagaggttattaggtgtgtgtggcgatgaagatggtctttggtctgatgctaccttgtcttcttcggttacttgggaaccaccattgaaggagttggaatactcgatgccgttgaatgaggatgatgatgatgctcaattgttacccatcatcacttctgcatccacaatgatcagcgactcttgctggagtaattggagttcttttgatctttcaaccatggaagccttctcatcaagtccttcttaatcaattggatctgattttaattacatttactttttatttataagtttatgattttcttcttattattgtaagagaagagaagaannaganatacanncnngggg

SEQ ID NO: 83472 - DNA, 238 bp, Glycine max
  unsure (1)..(238): unsure at all n locations
  Clone ID: PAT_MRT3847_46391C.1
ctcntncgnggggtnncgcgccacngctangtgttcnccnagcatnncnngttangctcgntgantgngtncgntggggtgggtgnnttangntctngantcgtgtctggtgtgtgntgntggtactgtngnngtgcctngcngggtgntttgngnnntggtgngtagtggntgtcgggtnggngtggtnggttnnngtgnggngcttgaggnggttgtggcggttggtttngccggn

SEQ ID NO: 83473 - DNA, 151 bp, Glycine max
  Clone ID: PAT_MRT3847_46392C.1
ttttgtttctataaaagaatagttggacacgagaaaggtgtcagataactacatcattattctaccagaaaataatttttatttttctattgaaatgtttatgtaagaacaaattgaaagtaatagatagttgatttcaagtggcatttgg

SEQ ID NO: 83474 - DNA, 177 bp, Glycine max
  Clone ID: PAT_MRT3847_46393C.1
gggagataaagtgaaaatgcttgttcactttagtggcggaaggtactataccaactactttcctgagtacacgagtccgcagtccaatccgcgggagtcccccctacaatttgcactatctgtaactggcctgttccatcaacctccgcgaggcaaggacttatgtgaacaaccttt

SEQ ID NO: 83475 - DNA, 189 bp, Glycine max
  Clone ID: PAT_MRT3847_46394C.1
acctttctctgctcaaggaaaagacaaggcaatggggaaagtttatgttgcatgtgcggccgctggcttatacaacaagacacaccccaactacaaagctggaatccggtccgcaaaaagacagatggcctaccgtgcaaccattcagaaaggacgaccgccgttgctcatcaccgcaatcagccccaa

SEQ ID NO: 83476 - DNA, 3810 bp, Glycine max
  Clone ID: PAT_MRT3847_46395C.1
aattcggctcgagtgaaatagagaaagcaacaaataacttcgattcttcaagaatattaggagaaggtggcttcggtcttgtttaaaaggtattctaaataatgggagggatgtagccgtgaagattctcaaattagatgaacagcatggtgaccgtgaattctttgtagaagctgagatgcttagccgcttgcaccatagaaatttagttaaattatagagtttatgcacacggagaaacagactcgctgcttagtttatgagcttgtccctaatggaagtgttgaatctcacttacatgttgctgacaaggtaactgatccactggattggaattcccggatgaagattgctcttggtgcagctcggggattggcctatctacatgaagattcaaatccatgtgtcatacatcgagacttcaaggccagcaacatcttgttggagtacgattttacacccaaggtctcagattttggattggctagaacagcactggatgagagaaacaagcacatctccacacatgttatgggaacatttggctacttagctcctgaatatgcaatgactggccatcttctggtcaagagtgatgtttatagttatggagttgtactccttgagctcctaactggaagaaagcctgtggatttgtcacaaccaccgggtcaagaaaatctcgtgacatgggttcgtccacttctcacaagtaaggaaggcttgcaaatgatcatagacccatatgtaaagcctaacatttctgttgatactgtggtaaaagttgcggcaattgcatccatgtgtgtgcaaccagaagtctctcaacgtcctttcatgggagaagttgttcaggccttgaagctagtatgcagtgagtttgaggaaacagactttataaaatcaaagggttctcaagagggtcttctaaccgatgtgaaaggaattttttccgaagcttcaggtgaaagagtggaattttcagagtgtcaaaaaactttttctggctatcaatctaatgaagaaaaggtaagattatcagcatcagagttgctcagtacttcaggtcaggaatttgagtcgttcaggcagtattctcgttcagggcctctaattattgggaagaaaaggcagttctggcagaagttgagaagtttgtctagaggtagctccagtgaacatggatcccattaagcttttcgtaatcttgcgttttccataccgaattcatcgagttccatgaatcgcatgttagattcacttgagagaaaatattgtgataataatgtaacaaagtcacaaactacaacaacttttgtcaatgtataaactatgtccccatgttggtttctaggtaactatgtttgaacaattggtactgcggtacgtgtccataatattagttgtctgatatttaaaaatggactaatttgttgaaaggagttaagtggcacatgcagatatatatataaaataggaagggaaagcaacaactgttgctttttacacagattgcgttgataggacactaccattttgtttctttccctctctacgtttgtttctataatttgccttcaggtttctaaataattcagaatggcgtttcctttttttcctggaaatacaaaaagttaaaacaagtccttacaataactttttcgtcccaaaatagccataactttgttgactactaataaatcaccctttactagaaattactaccaactacattcattttcaatcctaccactaacgcttttttttttcttgatgtgcaacagtgcttctcttatcttccttttacacaccttttttcaagatttgccatgatcttcacacaagggattcctccttatataccagccaatttccccaacctatgtctcaaaatcttcagccccatgtacctgcccatcatcatgacagttgcttgaggatttgttcctggtgattcgtcaaatgttgagccgtctaccacacgaagtctgtcaacgccaagaaccttgtaatcagggctgactaccttccccacatggcaccctccatggtagtgccaaattgtgatcacggtgtctttgcaaaactgtgctatcgacgctgtgtcattgggatgcttgggtatgaagttgacattagccttgacagtgaggttcagcagttcctctgcggttttcttgtcacacaaagtgtagtttgtgaagtgttttgactggacaaccttaatggccaagcgaatccccttgacacagatcgctgtgtcatggggatgactgaagtagttgaaggtaacgacagggttgtcgttcacattggtgttgttcagcctgagttcacctactgaccaaggattggcaacttttgacaaaataaaacctcccttgaataattcaaccggtatgtctttcttgttcttgataaattcttgaacagcttctggtgatctttccttaggaggaattgtagacagctgcccaatctcagctgacatgataccatggtgacagtgaatgctatcattggactgactaaacccactgctagcctcaatgtagacacccattttggtgataccaacagtttctatgagtgactgatgaactggtctattagaaggaataaacattgtgttcatgggattgtctaccattcctttcccaacaaagtggttgtcaaggaccactgggatgctcaacttctggagttctgcttttggcccaattccactaagcattagcaattgaggagtcccaattgccccactagacataatcacttcactatgcttatcatttgacagaatagcctcatgctgtttcccatgttcatcttggaaaataacccccacagcttttggtctctttccttttctatcaaacacaatcttttggacagtggcacagaccaaaacagtaagtttgtcatggttccctgaagcaagcagttcagcagccgtgtgacggcggccaaatctgtcgaaaatggttccaccaacctttgttccatagagatgatcataggtgaagccattaaagggtgacacaccagagtctagaagactgtctctaaatgctctctgataaggtgaaaactttggacggtggacaatttgcttctcaacccatggatatgattcatttactagcttggcatcccaccccaccttctttataaaccttgggtttgctctagtgtagaagccagcattgatagaacttccacctcccaagacccttgcccttgaattgtagactccatcagttgaaatgaagtactgagaagctgaagttggtgaaatgtcggccaatgtaatgtggaagttctccagaaacgaaacattggggttggtgaaaggaacaccccctctttcaagcaccaaaacactgaagttctgagacagggttgcagccaaaggacaccctgctgtgccacctccaactattatgtagtcataggcattattgcaggtggtagttgaaattgacggtgatgagaatgagcttgcatttctgataaaagggtatctattttcatgccagtgcttattaccttgagaaggaggtagaaagttccagagccatagaagtagacacaagaagaatttgcaattgactgcaccaactgaagccatggaatctcacgggtccagaaaaagcactcactctctgaagaagctgcttcttccccacctataagtggctgcctctcattggccttgttttgtgtgtacatcatataaatatgaaaaatactccatatatcctcttaccttgtcaagataatggtcacaataacataatctctcgagcc

SEQ ID NO: 83477 - DNA, 476 bp, Glycine max
  Clone ID: PAT_MRT3847_46396C.1
gttaaacatgaagagcttataagcactagagcaccaatcctaccaaggaggccattgtgtaatatgaagcataaccctttgatgaattaatcccttgatgaaaaaaggctatagcctgctatgaatgcattcattggattccaaacgcgttcctatacccttctagacttgcccgccgtgaaatataacattgcttgaacctgccaatatactcctaagtaatataatgcctctagcaaaaaacccttagtacaacatgatacagatactgacatccttgaaattgcacatggtgaagataagcccaatgaaatgtacagccttgggttggtaccatattgaatggagctagacacagaaaaaccattgctcccctaagaggaatgctcgaaaggtaatcctgacattacgaaaaaatatgccaacttcttatttctttaagaacaggtataccacacaccaagggccgggcaatg

SEQ ID NO: 83478 - DNA, 1362 bp, Glycine max
  Clone ID: PAT_MRT3847_46397C.1
accataaaacatatcataatacccctttagtaattaatcgtctgcttatacttcttactaagcacagacaaccttctctgaagggtaagcttttcatcttttttccctagtttatccaagtagtatacaatttttttaaggtaaccaaaacctcctcaatctcatgtccaaattctctcttgaatattcaggatccttctaagcagctcgagtaactcattttcatccctaccaagtctggtttgaatagacaccaaacaatccaaaccctccccaacaggaagagaatcttttccaacggccttctcacggatgcgcaaaacctccagggcaaatttctcagcatcttcatcttttttcaaatggtagagtgaaactgcaaggtataacattggaaagctgatggactggtcatcagttcccttttgctttatcatgatttgcaaacttcttctcaacaaattctcggcatccgcatagttctttgatcgtgaatacgaatttgcaagatttatcatgtgtcacctggctggggtgctgctttcctttgtacctctcagtgatccacaaactccgcgaatagctctctgcattcctcccaacagtatgaagtaattccgctagatctaccctcatcttttccattatactgtcatccggtgacaagtaatttgaatccttcatgaccttgagcacacttaactcgggctagggaactcatagccatcccaatttttccatcattttgtccatataattcggtgtatatgttaagaattctagtaaaatgagtttcagcgtcattggctctcctttcttttagtaaaagattggctagacttagtaaaggtacaaccaaatctttactattggcacctctacttgattccaaaagagtgatcacacgctggtatgtctctattgcttttgttgcttttccaatagaaccaataacttttgccatacccaaacagggtgtgacaagaaaagtgctatccttaccataggtcctctccataatgtagacagccctctcatacacgtccaatgatttttcaaacttgctcaatgttgcatacatacttcccatatgcataagtattgaatctagacgaggagcatcatccttcaaattgtcaacaacttctttcttctggccatcaatgaaaatataagaatgcactccataaatgaaagggaattagtcactaaaactttagagggaacaacaacattaagaggtgtgcaaaactgcaaatgtaagcagaaatgtggtacatataattatttccaattatcagttgggtaaatacaaactaagacagccataacaaaaactatttcagtacaagcgagtcaaac

SEQ ID NO: 83479 - DNA, 799 bp, Glycine max
  Clone ID: PAT_MRT3847_46398C.1
cccacgcgtccgtacggagaagacgacagaagggggagagagagaacccttttggctctttcattctttgcttaattcctatggaggagtttcaaagatcaaggtcttatgcaaatgggcaaatgatgcagatagagagctactatggagctcctaggccttatgatcttagtctcagaacttatagtgcttcttatgcacaaactcaaataggtcctcctagggacttgaagttgaagaaaggaaaaagcatttctgcagggtcttctttctccaagtcttggagctttgctgatcctgagcttcagaggaagaagagggttgctagctataaaatgtattctgtggaaggaaagatcaaagggtccttcaggaagagcttcaggtggctgaagaacaagtactcccatgtggtttatggttggtagtggtttaattaattgctgctcgtatttaaatttctggttttacatatatgagatgcgtttatgagaagaattgtagattaatcattgatggggttatgaatttgtgatcggtttatttgagttcgtcaaaggtttttgtctatatgtggaataatttgttacttataattaggtcctcgaagatcttctaatcttcctttgaggggtgaaatgaaatgaaattatatttattttgttgttcatgattttaactttatgatgggccagatggattaattaaatcatgtgtagtaatgatatgatatgttcccatcccaaaaaaaaaaaaaaaaaaaagaaagaccaccgtccgctctacaagcttccggacg

SEQ ID NO: 83480 - DNA, 553 bp, Glycine max
  unsure (1)..(553): unsure at all n locations
  Clone ID: PAT_MRT3847_46399C.1
tccaaaacccgaaatggagcacttcttaggtcataaccgtactgacgctttgantatagacatcatgtatacatggggatccacacttaacgatagcatgccgacacctgtttacaggcccatgcccatcttctctctttgcgttggggaagccaccaatcgacgtgactcaaactttggctaatgattcttcacttgcttaagcagtccctggagggctcccccacaaagtcacgctcaattgtaacccctgatcaaccatgttagagaatatggctagtactttgctacacgccagggaaaagaacatacatggtgcaattgtgaacacataaccagagctaagaaaatgggtacactgaaaactactagaaaatgacccgtgctaaagtatggcaccttgtgatgggatgacttatggtggatcattccaacataagaggcaagcctcacaaggatgcggtctacgaccagcgcctcagagggctgaacacctaggagtccagctccatggtgcccatatgctttgggagcttggaccgtctaacacgga

SEQ ID NO: 83481 - DNA, 543 bp, Glycine max
  Clone ID: PAT_MRT3847_4639C.1
tccttattttatgctgccggtggccccattggggggggtcctcctgggagttacggggggaccccaatgccatggggaccccctgttcctcctccatatgctccctatgctcctcctccacctgggtcaactatgtatccacctatgcaagggcaacctatgcctccttatggggttcaatatccccctcctgtgccgactggccctcccggtgccccatcccagcctgcaacttctagtgaagtgcagcagagttaccctcccggagtgcagtctgacaacagtacctctactcagtctataccagctaatgtatatggtaattcgggacctccaatgccacctcaacctacatatcctgcatcttatggatatccaccttactataatgcagttcctccgccacctcccccttctgcccccatgcctgtttcaacttcagatcaatcccacaacattgcaaatgtgccttgggccagtaattctctagtcccaccttctgcttcatcggcagacaatcaatcccagagcattggaaatgtg

SEQ ID NO: 83482 - DNA, 229 bp, Glycine max
  Clone ID: PAT_MRT3847_463C.1
gtgaaagcaaatgccatgtatatacttacagggggtaatttccctgtgacgaaacaaccgtttttatgcccttatcaccaagttccaggaccgaattttgctaggccttaagcaagttttggggcttttcaacaaaaatggctttttgtacgggtttaaggcggtcttgactgatggctactggggtttgaacaaactccggcaggaacccactgatttcatctccggt

SEQ ID NO: 83483 - DNA, 440 bp, Glycine max
  Clone ID: PAT_MRT3847_46400C.1
aattcggcaccagttaccatgaaaaaataaatttgatgtctcgagagtatattttggattcattaacctcgttcaaattttgaaagacacttaaaattcaaaccattgaatttggatgcattcattattagcactaatttagcattatgaaattctttttttctgggcagctcctcatcttaaaacatgtctttctcaagttttgtttatacatactccgtacattgtgcttgtaaatttgttgcaggatggcacaaaaacaaaattgaataaatttttagttatataattagtgatgcaggtagtgcatgttgggcgatgaagtgctaataaaataaaaaatgaatgtagcagaaatgagcatgctgaggtgaatgagtgcgtacacaagaaaagagagttggaatgaatgtatgtatccatgagtgttataatagcat

SEQ ID NO: 83484 - DNA, 1154 bp, Glycine max
  Clone ID: PAT_MRT3847_46401C.1
acggctgcgagaagacgacagaaggggggagcttttcacttgcatccacagaatcttcgtctctttctctttcttccttttcttggcccatatcactagtcagagtaatgtgttagattccacctccaactccaatatctacattgacaaatagagaaaaaagaaaagaatacaaactctatacaaaaaaggaggaaatggggttgatcaaagcagcaattggagatggagttttaacatcaatgtgggttttcataatctcaacattgaggattgtcacaactgaggtggcacttttccttggcctccaacctctttcacttgcaggcctcataatcagcaccatcctaaacagtttctatgtcctcaccataagcttcattggaagaatcttaggtggtgcaaacttcaacccttcaacaagtctttcattctacactgcagggttgaggcctgactcatccctttcatcaatggcagtaaggttccctgtacaggcatatggtggtgctgttggcgtcaaaacccttcttctagtgatgccatccaagtataatgacatgctgaaaggacctttcttgaaggttgacttgcattctggtgctgttgctgaaggtgttttgactttcactcacaacatggctatcttctttgtcatgtttaagggtcctaggaacccttttgtgaaggtgtatttgctctctgtgacaactgctgttttggctattcttggtggtggattcactgggccttccatgaaccctgccaatgcctttggatgggcctttgtcaacaacaagcacaacacttgggagcagttttatgtctattggatttgtcccttcattggggcttcctcagctgctttgattttcaggtctatgtttatgccaccaatcaagcagaagaaagcttgaattagttaagcttttacattttgatttactagttgagtaataaataaaccattgcccttagtttcttcttcttccaatgtcactagttttaagttggaattttctaaatcttttcttttttatcaacaaagttaattattaattattagtttttattgatcaatcttatatcttgttattgtaaatattctgaaagactattgtggctagggaaatttcagtattcttactaaaaaa

SEQ ID NO: 83485 - DNA, 641 bp, Glycine max
  unsure (1)..(641): unsure at all n locations
  Clone ID: PAT_MRT3847_46402C.1
atgactgtttgaatcttagcaatgtaaaagattttcaatatcacagaaactatttttggggtgggactgaaataaaagtatggcatggaaaggtggaaggtctctctgtctacttcttggaacctcaaaatgcattctttcatgctggctgtgtgtatggttgtgggaatgatgctcagagatttggttttttttgtcatgctgctcttgaatttctacatcaaaatggatttcatccggatgtcatccactgccatgattggtcgagtgcgccagttgcatggctatctaaagaacagtatagacattgcgatttaagcaaagcaggggtagtgtttacaattcataaccttgaatttggagctcatttcattggaaaagcaatggaatacacagacaaggccacaactgtctccccatcttattctanggaggttgctgggaatcctgcaattgctcctcatcttcacaagtntcacggtattattaatggaattgatccagatatatgggacccatttaacgatgagttcattcctgtatcatacacatccgaatatggttgttgaggtaaagaagcttccaaggaaaccctgcaacaaaagcttggtttgagaaaagctgaatctcctttaatggga

SEQ ID NO: 83486 - DNA, 200 bp, Glycine max
  unsure (1)..(200): unsure at all n locations
  Clone ID: PAT_MRT3847_46403C.1
tgccgggttccagcttcagaacaaaacgacgnacgcnacggccggaggccactgcaaaagcccaagccaccgaaacccccgccaangacaagcgaccccacggagcacgacccccgaaggggaaagaaaagcaccccccggcgcgggccacagacgacgagcaggacaaccagcaccacacggagaacacgcgcggaaca

SEQ ID NO: 83487 - DNA, 1842 bp, Glycine max
  Clone ID: PAT_MRT3847_46404C.1
gaaagttcgcgaacgattgatgtgccccgcgcgcggtatccaattaccgacaataacaaccatctgggtggtaacaaaaacaaaatccgcggatctgcgtttttaaccttaattaataacaacaggagcatgaaacagctccacaagcaaacgagtctgaatcaccggagggaggaagagatgttggggagcagcgagagctcaccctactcccccaaatctatcaagcacaccaggactctccccaagatccatcaactacctcctccgcgagcttgtgcttcttgttcatgcctcgtcggcattcatcaactgggctccatccttctgcatcagatcgagtccactctctccccgcatgggcccacccgagccggcccacacattcctccctacgaaccgggcttgcccgcttctagcggcactaaggcctcgcacggggcctgcgttccggtcgggatcggcggcaggtggcatgaaactggtcgtcaccggctacgagggcttcgtcgggagccacctcgtcgccaaaccctttgctcacgggttatgatgtcatctgagatcgagaaatttattcccgggatgaaaaaagcaatttgtgggatctggtgattaagatttagatttgagcacatgaagatggtaattgatgggatgttgttatcgaagatgttctatgggaagatgaaacttgagtgctccggacttgaaaggtcatctacttattcgaacacaaggcaaacttataaagtattcacgtggtggctcggcttaacatgcttggctttgcttagagaaatagggataggtttcagcttactagtactagtggatgttagcaggtgattccgttggagcatcctcagaaagacgacttactggggaaatgtgaatccaatttggtgttgaggagctgttacgatgaagggaaaaggactgcggagacgttgtgccatggattatcatcggggtgctggtgttgaggtttcgtattgctcgaattttcaacacatatggaccccgcatgtgtttggatgatgggcgtgttgttagcaattttgttgcacaggctattcgtaaacaacccattgactgtatatggtgatgggaagcaaacaagaagtttcctaatatgtctctgatttggttaatggggctggtggctttgatggaaagcgaacatgtgggacctttcaacctgggtaacccaggggagtttaccatgttagagcttgctcaggttgtcaaagaaacaattgattcaagtgctacaatagaatacaaaccaaatactgctgatgatccacacatgaggaagccagatattagcaaagccaaggaactgctgaactgggagccaaaaatccctctgagagaagggttgcctctcatggttaatgatttccgaaatcgaattctgaatgaaaacgaaggaaaagggatgaaataagcataatagcaaaccctgtatgtatatggagatgagcttgtctccttcatttttttgttcttatttgcggtcagcatcaacagaaaaattctggcaacacgtcacttttgtaagaagatatacctactgctggcctttttacatttaatcatttatgcttgcttagcacacaattgatgtatttgttaaattttgaaagaattatttcagtagtttttcttgtccattgtatcgataaaaagttgtagtatttgatattttggattctggtatcttgagaatatatattttttagaatattgtgaatctccttatttatttattttgctattaatattatgagaatatatttttttaaaatattgagaatgtcttatttattaaaaaaa

SEQ ID NO: 83488 - DNA, 257 bp, Glycine max
  Clone ID: PAT_MRT3847_46405C.1
caagaagtacacacgtcaagggtctcgtgttcttggtctggcttacaagtctcttgctggcatggacagtaagagtattatgggtgttacactgtttcaggagcctttctccactgtatattcaattatgcagaggagaacaagaatagtagtttcaagtttcctgccttgtcatgttagttatgtgaagtgggtagacttaaacatgggcaatgtgtggctattttggctttaagtcttaagaacacctaggtttg

SEQ ID NO: 83489 - DNA, 303 bp, Glycine max
  Clone ID: PAT_MRT3847_46406C.1
aaaaacggaaccttttggaaaaatttcaaagggaaacaatttttaaattgttttttttcccccccaatccgggggttaccaagaaccaaaccaggaaaggtttccctttttaaatggggcggccttttttttttcccctggcttgcccacgtggaaacccgggggggggaaattttctccaattgtggagagaccaaaaacttcccaagggtttttggaaaactatcccattaaaaggtgttggaatttaaaaatattttccaataaaaaaaaacacctcctttaacccctttcgtgcctctt

SEQ ID NO: 83490 - DNA, 513 bp, Glycine max
  Clone ID: PAT_MRT3847_46407C.1
cggctcggggccctgtctccttctcacagaggacagggcactagtgccataaggctctctttctttccatttaccgccttttatcccacactgtcgctttcacctgttcccccacctaaggaaggatgattgaaacccaataataagaccaatcggaggggtggtgagatcggctcctctagagaataccggaggctgctggtggcgatttattttgaacagcttaccatggatgctcgccctgaggaacatcacgtgcgtcgctgcttgggatggggctgcaggcgagaccaggtggcttatctactacaccagcaacacttttccgaccgatattgtgccgactgttactgacgatttactgctcatgtgcttgctctatgggagcattgtgaatctgggcttgccggatactgctggacacgaggaccataacatattaagacctccgagtctccgaggcgccccagctttcatactggctagctctctcatagccaaggccagtcatga

SEQ ID NO: 83491 - DNA, 411 bp, Glycine max
  Clone ID: PAT_MRT3847_46408C.1
cataattcttgataatcatgtggaaacatttgttgcagtatcaacgaaggttcttaatggccaacggtcatgctgcagacaaatgggatgctgtgttttatgcggaagtcactggtgatgtttatgggaatatagatgccttgggagctgctctaggtatgcatttggacaaacctaggtgttacatggaatgcatgaaatctggggaaggtttcgtaaagctgaaccatcaatgtgttgaaccattgtgttggaaataagttgacaatatatcatacgttggtcatgcatcaggagagatgtatgatatatttacaagctttggctaaattcataccaataaacaaatctgtttttgcgaacctattttctaccacgattctgagtggttgatacaggcttatggagctt

SEQ ID NO: 83492 - DNA, 496 bp, Glycine max
  Clone ID: PAT_MRT3847_46409C.1
cttgcttttgttcttctctgccagaacaacttcaattgctcttcggaccatcctctgagtcttaacacctcaacataagctcttgtaacgaaatttcaactcaatccatatcctcctaatcatgtctacccgtcctgagaatattggcatcaaggccattgaaatctatttccctaatcagtgtgttgagcagagcgagctggagaaattcgatggagtgtctactggaaagtacacgattggtcttgcccagaccaagatggcgctctgtgatgaccgggaagacatctactccctggctctgactgtgacccactccctactggagaagtacagcattgacccgaactcgatcggtcgtattgaggtcggcaccgagaccattctggacaaatccaagtcggtgaagtcagtcttgatgcagcttttcccggagaacaagagcatcgagggtggtgacaatgtcaatgcgtgctactgtggtaccaatgctctc

SEQ ID NO: 83493 - DNA, 645 bp, Glycine max
  unsure (1)..(645): unsure at all n locations
  Clone ID: PAT_MRT3847_4640C.1
ttggccaaacgccggccaaagggaatacctaacttttaaaggccataaaaattttaccattcacgacatttattgaccggaccagggggaggaaggaataataaatgggaattttttcttggtggcnntgggttggtgaatatacctaccgacccgaagacctcaaaaggtcaattattggatccctaaatgggaccaaataaaagccaaaaggaccgggtctaccagggaaaaaccatgaacccaaaagttggaacaatgggactaaggtggaccaaggggggggtaaacacacaagccaactccctttgaaacctcttcatgggtttagaaaggcaaccaaccgggataacccaccctttctcttctttaacaattttaaaggggatggaaaaactaacaacacccagtatgggttccaccccttccttggggggtccttcataaacaggctttccccnncccaaattaatggtttccaacccaagacgaagcacattccacacgaaataccaactcacaacaatgaaatgaaggccggcctnnnnnaccctttaatcaannnnnnannnnctggatttctcaatcanantccctttgggttttctcaaccactngagngcgnattccaaaggggtattggac

SEQ ID NO: 83494 - DNA, 471 bp, Glycine max
  Clone ID: PAT_MRT3847_46410C.1
taagcgtacatagtcacttacagcgtttaataataaataaaatcatctttaggataaattttaagacaattgttataaaatttaacaaattaaaattaacatacacaatattaattgattggtgaaatcatatagttacttgtatcatacaataatttctccaataaagttggagttgtgctaattatgaagtgacagttctttatatggtcattaagttagattcggattatgagctagtatttggcaaatggatgaagtagtaattaataaaggcattgatatgattctgattgggatgaggacaagttaaggaagagtgagttatgggatggacagttggtggtgctggcattcttcaagctgcaagcagcctgcccttgtgctcgcagcagtccttgctcggaaccaaagggacactatcactactctcatttttgactgaggatggggtttttttatattgagagt

SEQ ID NO: 83495 - DNA, 451 bp, Glycine max
  Clone ID: PAT_MRT3847_46411C.1
tttcgccattggatctgcccttccttccccttccggcaaaggtatgcaacttttttttgttgttctcttttttacttcttcgtattatattgttgttctgatggctgtgcctattttaaagttgttgactttcttcggtttcatgggtacccatttataatcatatgtgattgcacgttgcagtatatgtttatatatataatgcggggtgttaatgtataaatatgtttttttttttttctggggttagtttgtttttatgtgttggccttgctttccttcctttgattatcccccaggcccccgcttcttttcttttttttatcctaaagggttttatgtttcttcctttttatcttaagatttgatgatcacatttttgtctgttttgtttaaaagtttgaaataggggcttttggaaagttgtagaatttcgttttctttttttttt

SEQ ID NO: 83496 - DNA, 245 bp, Glycine max
  Clone ID: PAT_MRT3847_46412C.1
gacagcaaaaacaattaataaagatgagtttgaagaacaacatggtggtgctaaaggtgtgtttgtgacttcgggtccttgtgggccttacaaatgcacgcatggaactgagcttcttcaaaagtgatcagtcatcgacttatgatgatcaccagtactcaggatcatgctgtgatccctgcatgtccacacgctcaatagttcctcactgctactctggggataataagctgcattcatgccaa

SEQ ID NO: 83497 - DNA, 431 bp, Glycine max
  unsure (1)..(431): unsure at all n locations
  Clone ID: PAT_MRT3847_46413C.1
tacggctgcgaggagacgacagaagggccccagttcagtcatgttccattgtttcaccttcttccctcccgagggaaaaaaactctctgagatcattggtgtcagtgcaaaagccactgcacctttctcgagttggttttggagattttgttgggtctctggtaaggcgtgagcgtggtgatttcgtgacatgtgatgcttatgaggctgatagatcagaggttggaggggctccatcaaaggctgctaagaaggtgaagattgggatatactntgcaacatnggtgggttctgaatgtggtgttcaatatttataacaagaaggttctgaatgcattcccatacccttggcttacctcaactctctcccttgcatgtggctctctcataaatgtgntctgttgggccaccaaagatagttgagcctccta

SEQ ID NO: 83498 - DNA, 694 bp, Glycine max
  unsure (1)..(694): unsure at all n locations
  Clone ID: PAT_MRT3847_46414C.1
gcccacttttttttgtatcctatacttcgctgctccgccaactaccacgccctgccaatcgccgctttgcatggtctacgagatagtatgctctcgctctcaaacagctctcagaatacttgcactcttgatgtgcactcagtggatgccaggaaagacgatgaatgaactctagcgacgatccaaaggactagtttgtttgatgtgctgttaaaagacagaagcctagatattgtacatattttcttccttatttatcgtgaactccaaacactttttcaccagtgaccgataattattggcgtccttgaacttagaggagcgaacaatgccatgggacgaggactatttggagtgacgcacctgcatgctaataagaaaaacgttggctaaccacgtgataaatcataatgtcgtgaccactacttattgtcttggatgaacaggagagattcatgagcttatgaggaggaccctgtacctgtacggtctgtacttgaggatactcatggctttattcttacttataaggcgtcaagctgattatatagactgtagcctgacggagtctgagcctaaacagtgaatgtactgntaggttataccacatgcttatccatgccgtgaacgaacgagtcaatgtgccttgcagacaaacgactctaggtgatcatataccttacaggcagaactc

SEQ ID NO: 83499 - DNA, 436 bp, Glycine max
  Clone ID: PAT_MRT3847_46415C.1
catcgtctagctatctcgatcgaactgtccaaggtcctgtcacaacgggggcaaagcggcgtattttggtggtgagggtgagcttgaatgtggttgggcaggggcggcagttggtggtaaagattcgaaaattggtacgaagttattatggttattaccgttgacaccttggtttagaagacccaagtggtagtaatgacagacgttggtgtggtacactactgagctaggcgaacaaagaccgctggagggttggaaggccaggaaccttcgtagacgcgggttgtgttaaaagccattaacgactgaagcaaccataagcattggcagcgtcgccatcattgaaaggatgaccctaatacaaatgaattgagagcccggacatagcccaggggttgtagatcagacacaggccatcacaaagtacactaagggc

SEQ ID NO: 83500 - DNA, 237 bp, Glycine max
  unsure (1)..(237): unsure at all n locations
  Clone ID: PAT_MRT3847_46416C.1
ncatgcacgcgtacgtaanctcggaattcggntcnaagtnnnatnaaaaaaggttncnnnngtggaaatnntcaaccgncaccggnnnaantttnnangatttggncacaagagtgccatgggcnaaantactgtcctannaccantcgngcgnatgtatgcaggttccccctggtttccaaaggccttncatttccngcggctnaagccaacactgtgtggnattgctttctcccc

SEQ ID NO: 83501 - DNA, 348 bp, Glycine max
  Clone ID: PAT_MRT3847_46417C.1
tagctatctcgatcgactccaaggtcctgtcactattattggtattattataccctcacagccttgcccccacagagacaccaccacactattaactggcctattgcccaatgccctgactgttcctggacttgcacgaactgcacttacaacatttactactgatactataccgaacacacagctctatatgtcaccctgccccgcgtgctacaatatagccaaaaccactgcaacacacacaatgaccaacaacttacaggcggcctgaatacagaaagggagagagaagcaagaggtctgtaaacagatacttgccggtggagagaggaaggcgacccttgcaag

SEQ ID NO: 83502 - DNA, 360 bp, Glycine max
  unsure (1)..(360): unsure at all n locations
  Clone ID: PAT_MRT3847_46418C.1
ttttnnnnnnncttttttttaattagagaaaaaaaatggcaaattgcaataacaattgtcgcaacatgacaacattgaaaattcctcacctagtgggataaggctctgttgttgttgttgataacactgaaaattgaggagaatttacttattcaaaaactgaatatatttctaacttaatgcatctggactacatgctgctaagatttacaagtgtcaagcttttcactaacatgcacaagaaatttgtgttgatgggcttatcagaagctgattcagcttgaagctctaacacctgcattagcgagggccaagtttggggcacccatgggcaagaggcttataacttgtttctggagc

SEQ ID NO: 83503 - DNA, 556 bp, Glycine max
  Clone ID: PAT_MRT3847_46419C.1
ggaaaatcttagcctccttttggagaaacattaaccttattggattattccttgaatctcgcctcttgtcacttgtgttgtggagatgctgatgatgcacctaagatggttgatcacgaatttctgcaggggattataaactcgcttgagtcttgatgcattttgttttagggtttccataatacctgtatttcattacttaacttgtaaggttatcatgcattttctttggttgctctttgtcttaagattaagccttttttggtcctatattctctattggtggtggatggggaaaaaaggttttctgatctgattatgccattattctttcacaatgtaaggtatcattcattcattcttgttaaaattttgtggcaagatgtttgatcttatttgcttttgtaatttgtgagcctggaaagtaatatgctgttgaacttttatgttgtccatcatgttcattatgttgccaaaattactgagagggagttggacagggttagtgattgaaatgctcaacttgtctcaacttgttttttcattacaatttaat

SEQ ID NO: 83504 - DNA, 291 bp, Glycine max
  Clone ID: PAT_MRT3847_4641C.1
ggaaaaaacgcatgcccacccacccataaaatgacggggacaacaaataatctgagattttacgtcaaattttaaagccagacactacctactgatgcagaattaacaaccgttcacgctttaaataactgtgaaagcatacatactggaattgacctaaacttattgtatatctgtacctaaattacctccatcacacggcatagttttaattttctacgcagagctcacaccccccatgtatctcgcctgcgatattaagcaccaattactaaccagtgttttaaaact

SEQ ID NO: 83505 - DNA, 406 bp, Glycine max
  Clone ID: PAT_MRT3847_46420C.1
accgttcgcattcccactcaacccacgcgtccatatcacaatcaaacctcattaaattgacaccaaacattttcatcatcaaccaggttgtattgctcagaaattatacaatccactctaaaacccaaacttacacatccctatcaataataatctcaacccatactcgactcttatgtactagttaataccttcaaacacatcatacacatttctatatacatcatttactcatacacttcatacaaaccataccaccctctactcacatttttactaggtcatcttatatgcccaaactacagcttgcattgaaatttatcatatctctcttgctctaatttctctgcttcatattcatcatttatcaataacttatgcctcaaacacagttatacaaatcttt

SEQ ID NO: 83506 - DNA, 245 bp, Glycine max
  Clone ID: PAT_MRT3847_46421C.1
cccacgcgtcctgtttgaagaagaagcgtgtcgacaattgggcagactcaattgatgtcattaccgccgtagccaggctaggagagtgaatactccttcatagagggaaagctgctagtgacaagtcggggcgttgtcactttcaccatgcacgtacttgcctacgagtcttagcatcattaccatgacctacacaacgacctctgtatcaacattgatctctgaactacggttcagattccagt

SEQ ID NO: 83507 - DNA, 147 bp, Glycine max
  Clone ID: PAT_MRT3847_46422C.1
atgattgttatgattatgcttattgctgactgagaccaccaaagcatgataataaagaatagtactattaataataattaagtagaaacctagcttgaccatagaagtgaagaaccttacctgaaggttctggttcttgtgtaccaa

SEQ ID NO: 83508 - DNA, 293 bp, Glycine max
  Clone ID: PAT_MRT3847_46423C.1
ataaaatattaggaccgtagaattgatctattctgatgttaatacgcacatggaacatgccaataacaatgcatgtacactttccaataagtgatatatagcgcgtagtgaacatgctcataatttcatattcatatgcctatcaactccagccagccagaaaaagagggcgttcgggtactatgcatctcctagaccgaaggatagaatacggcccggggcctggaagacgtccagatcgtgatagcgcgcgtcgacttaaagcatgacagaataatcgtgctacctagttc

SEQ ID NO: 83509 - DNA, 109 bp, Glycine max
  Clone ID: PAT_MRT3847_46424C.1
gctttgtggaaattttgtacaagttcttcatccaaatgtgatgatacaaaacctgtgcgtatttttggtggggatacagttcctattagaaccgttgcctaggctccat

SEQ ID NO: 83510 - DNA, 1480 bp, Glycine max
  Clone ID: PAT_MRT3847_46425C.1
ccacgccgtccgcatctaccacaacagtggtgtaaatttttacaatttacaaacccccaccaacagtattttggcagaatctccgccaagtatcccaaattttcccccaatctcttcagatcagacattcattcatccacctgtccctctatagaaccattcacaatccgaatccccaaaacaaaaccaaaacctagggttcccaaatcctaattgcactaaaacccagaatgaaagcctctttgaagttccgcgaggaacagaaaaaacccctcttgagagcaaaagtcccactcggcatcctcggcatgcccttccaatccggcatagtcgctggcgaatccaaagaactcactctcaacctttctaccttcttcgaatcgggtccttctctcaaagttgcgtatcgacccaacgactcaaagaaccctttttccttcatagtgaaaacgggaaccggacccttcggttcccctctcaagagctccatgctcatgagctgcgagtttaaccttcccggtacaaccggtaccccgttgtttatgcttcacttcaaaccccgcttcggcgactttactttcaagaagacgcagtcttcgatttttgatgggaaagggtttgggtcttttaacacgcaaaacgacgccgttgagaatgggaataatgctgaaacgccgttgatggaatcggccaaggtttcgattcttgactccggcgcctcgatgttctccggcatggaggtggctgcgcggacgactctgccggtgcggggacgtgctgccgtgaagttccggtggggagttaggattccggcggagttcaaggggaacaacgcgtttcagaagattccgtttctcgtaatggataagatcggcgtggagcacatgatggagtgcggagattcgaaggagaagggggacgccggagagaagcctagggttccggcgagcgctgacgtggcggaggcgtgttttgcggtgaagcggcagatggaggttctgcaggcggagaacgggttgctgaggaacgccgtggaggatctccggcgagaaatcgtcggcgttcgaacctcaagttcggttatgggcaaaagccctaatttgagaaagaatgagaagaaaacgacgtcggattatggtaattttcccgggaaatcgacggaggctgaagcgagcgagaagttgaagaaagcgttgatgggagcggctgctggtagttcttgaatttaaatccgtcgaaatgaaatgcaatcagtttgccctgtcattgttttttgagtatattgtctataatttttttgggggttgtagatttgcgtttttctctcagtttttagtttcagttttgttgctgcgaaatttttgtgtagtttatatatattatgatataggttggttcgttaaggcttgttcttgtattcagttttgaagcaatgaatggaaagatcatgaaaataagcaaatttgagatttttttgtta

SEQ ID NO: 83511 - DNA, 509 bp, Glycine max
  Clone ID: PAT_MRT3847_46426C.1
agcccctacactcgacagtctcttcttctcttctctgcagcttctctcccctcaacagtgagtaattttggcagaatctccgccaagtatcccaaaatttcctccaatctcttcagagttctgcagacattcatccactttccctctataaaaccattcacaatcccaatccaacttgcaaaaccaaaacctagggttcccaaatcctaattgcactaaaacccagaatgaaagcctctttgaagttccgcgaggaacagcaaaaaccccttttgagagcaaaagtcccactcggcatcctcggcatgcccttccaatccggcataagcgctggcgaatccaaagaacccactctaaacctttctaccttctttcgaatcgggtccttctctcaaagttgcgtatcgacccacgactcaaagaaccctttttcctttatagggaaaacgggaaccggacccttcggtttccctctaaagagcctcatgctcatgagctgcgagtttaac

SEQ ID NO: 83512 - DNA, 402 bp, Glycine max
  unsure (1)..(402): unsure at all n locations
  Clone ID: PAT_MRT3847_46427C.1
ttcaattcttccttggtattgttagtctctggtcgtttgttatttattttacttgtaatgttttgatgatgctcattttgtttgcactagattcattagctcagaataaggttaatttatagaatattcttttgagtttgcagatcagaattcagttgcaccataggacctgcttttcaaactggggtttcagtttctaagtgggtgtccagtggtttgcttaatctagaagattttattatgaattcagctcatttgacttaaaatagacttttctcagttctgttttgattttcttcccttatctaatctgcacaaacatgtngtcccacttttagctgtagttttgttaactaagcaagaatagttctgttgtgttcataaaaaaaggaaagaaaagaa

SEQ ID NO: 83513 - DNA, 249 bp, Glycine max
  Clone ID: PAT_MRT3847_46428C.1
cccacgcgtccgcatttcaccagccatgctagctagttaagaaacttacatgggctacgcgtcaaacacttgctgaaacgcgctaagatgtgatcctttcgcgcactacggtaagcctacttgagctcaacgagcaaactgcacgcctcatgagagaagttgaatacagaagtggggaacaacaaagggacagcatgagcgaaatgctactcaaattcaacgctgtgcacaagatgggcacagcgtata

SEQ ID NO: 83514 - DNA, 652 bp, Glycine max
  Clone ID: PAT_MRT3847_46429C.1
gggccgtgattattttgcatttgaaagcatggatctatgaatactagatacagagagaaacatgaagttgactacttttgtttccaatatatacaaataaaatattggatttctacattcattgcaagcatagtcacttgcttaccacaaaataattcatgaacaagaggctccttatatagcaattaaacactgcaaagccagccataatacgtactacctcgagcaatagtccaaataacttatgcagcagcataatacccactcatgagcaagacttgaaagtcacatggaaaaatgtgtagttgttttaaaattgcttgtcacaatcatgactgaaattcctattatctgaatgtatgagaccaattatttgagtttttttggggtgaataagtttgggtatgagaaacccgaataatcatctagtgaaggcaatctcttaagctggtgatgagaggatttgtcatccaatacagaatgattgtgtagggaagaaccaaaatcttccttgggtatatcaaatgaaggaaaacttgatgaatgagagaatgagaaggcaggctcaaactccacattatttatgccaccatcatcatagtcatttgcagcattttgttcagtgaaatgttccctttctgtttcagattta

SEQ ID NO: 83515 - DNA, 273 bp, Glycine max
  unsure (1)..(273): unsure at all n locations
  Clone ID: PAT_MRT3847_4642C.1
caagaaacagggtntacaagcncaatgntcaaacangcaaatcttatgagnggccaattnaacttaaaggatgctgtggctagggnccataagtcttgcatggagnanangcgananacanggttngtgnnaancaattntncaaacngcaaagncttttgtgttgcgaccaaggangttggacagctaccggaggcngcatattctggttgatggnnagncctgcaactggttgccttgttgattttggcctctatngccgacnacagctat

SEQ ID NO: 83516 - DNA, 665 bp, Glycine max
  Clone ID: PAT_MRT3847_46430C.1
aaggtcacttttatacaaaatcatttagtgaatgatgaggtgaatgctgaggtgctttctaacttgcttacgtacttataaacggaggaaccgcttgcgttccgccgatgaagcccaaaaccatgtgggagaaggagctgttgaagaactcattgattccatagcagagtcaaaaacaacaaatgaagagcaattgaataagagtgttgaaaccaaggatgatcggaaagaggaagcacctcaaatagatgagacaaataaaagatcgcatcaagaagagtcttcggagtcactgttctctctctccatttcttctaggaaaaaagcttcagatgccgagcctgaagttaacagtcctattcgactcgtatgcacaaaagaagcatttgggtcatccccaagtgttgaagaaaggaagccatcagagaacaccaagcaaccaagtttcaatgccataaagaaggaagaagaaaccaaggaattaatcaagaatgaaggtgaaaaagagaaagcgaatgaccccgtcactcagtatagatatcgagattgccctgatgacgggtacgacgatattaatttaaatgttaatgatttggatgctacacttaaagatgatgatgatgatcctcccagtgagaagaaaggggaagcaggcgctgatgtta

SEQ ID NO: 83517 - DNA, 702 bp, Glycine max
  Clone ID: PAT_MRT3847_46431C.1
agctcggaattcggctcgagcttttccatttttcaccaaacatttatttcgtgcacacatctttcacgttggtgtattgagttgaagttctattaagatgaggcctggtgaaaagttatatggttttcatgaggaaccaaagaaggtgatcatcaatggtccacgtccttcctctttggtgatcaacaaagattctcacatgatacgcaaagaaaccaaactccaaaggccacagaggattaatcccatcatcatttacaccgaatctcccaaggttatccacaccaaggccaaagatttcatggctcttgttcaaagactcacgggtaggtcaagcaccaatgataatttgtccactactgcttcacttcctcaagagggttctgagaattttggctcatctttatctgatgggtcaaactacaatagcaatgaaacaagctcggctcttaggagatttggtgagaatttggttgagagtggtgcaattattcaacatggtccctctcatctggattttgttgacatgccactttctactccaaattcctcagatttcttttgctcttctcgatcatcagtgtataaatattctgattctccatatggggttttgggaagtttgatatccccttccgggttggaattcatgaaagagttgcctgaatattgatatcaattcatttgggtgcacgctttgtt

SEQ ID NO: 83518 - DNA, 347 bp, Glycine max
  Clone ID: PAT_MRT3847_46432C.1
tcgagcatggccacctctgcttcatcaatcatcattcgcaggtctatctgttcttaagcagctcaatgagtcggtgcgcaaggcgcggaggcgccgggtgagggcggacctacttgcgccgtaccgtcaagagtgctcctcatagcatttggtatggccctgatcgtcctaagtacctgggtccattctcagagcagattccgacataccttaccggagaattcctcggagactactaatgggacactgctggactatcatctgactcggaaaccttcgtcaggaacctttagctgttggtgattcacagcatatgggccatgcttggtgcactggggtgtaccttt

SEQ ID NO: 83519 - DNA, 312 bp, Glycine max
  Clone ID: PAT_MRT3847_46433C.1
gttgcacaatatgtgaagtcccgagacgtgccaaaaatcaaaaggaagcaagcttacgcgatccgtgaaaattccgtgatgtgacggaaatcgaaaggaggtatttttcgcaatccgtgagttttcgtaacttcttcaaaagctaaaaaagagtaaatacataatccgtaaggactcgtaaccttgcggaaggaaaataagtatcgttacgaaattcataaattttcgtaacgttacagaaaaagaattaccaaaaaaggtagagggggtgcatttagaaacagggggtacaaatagcaatcaggcccactt

SEQ ID NO: 83520 - DNA, 334 bp, Glycine max
  Clone ID: PAT_MRT3847_46434C.1
ttttggaatcaagcataatatactgatgcgcctagcatcttatggctgcaaaatcaccggtgttccatgtacatggccagcatgagaaactttgaagatgaagccaaatggggttattttcagcaatggccctggagatccatctgctgttccttatgccatcgaaactgggaagaatatcatcggaaatgtgcctgttattagaatgtgcatgggtcatcaattgggaggccaagctttaggaggtaaaaccttcaagatgaaatgtggtcaccatggaggaaatcatgctgtgcgcaaccttcgaagtggccatgttggaatgagtgctcag

SEQ ID NO: 83521 - DNA, 145 bp, Glycine max
  unsure (1)..(145): unsure at all n locations
  Clone ID: PAT_MRT3847_46435C.1
gccgttcagagcctagcctctgctctagaagatggctcctcccagaggtggtgggttcangggtggtaggggtgacataagtanaagaaggggcggtggtggaggaagaagaggagacaagggcacgccgttcaaagctaaaagc

SEQ ID NO: 83522 - DNA, 192 bp, Glycine max
  unsure (1)..(192): unsure at all n locations
  Clone ID: PAT_MRT3847_46436C.1
gagaagcacgtatttgcaaacgacgccgccgcgaacgaagaggccacaaacgacgaggcgcaccgcgaaaccgaggagccccacagcccaanaacaccccaacgcacgaaggcaacacgcnccgcacacggccaaacaggaagnggaaaaaccnacacaangaagccaccgcctcncaaagcaccaagggac

SEQ ID NO: 83523 - DNA, 438 bp, Glycine max
  Clone ID: PAT_MRT3847_46437C.1
cagaatatcagcaaaatcgttattcttgtcttctgattgctagcaccaaatccttgcagggctaccgtatcatttccacacgagcaaaaggattcagaccaaatccttgagaaacaacttgtcaagctcttcaatatctgccatagtaaaatggagaatgctgttccaaggaatgcttcagttaggcttgttgcattcaacttaggttgtcttccaggtggtgacaaagagataataacaagatcagaaacaacattactagcattggaagctgcatagagaattctaatgccaggtgggcttatcagcatagtggtttatgttgggcaccctggaggacggtgataattctaatgctttactttgtgtcattaatatattagtaggtccttgaactatttgagaatttttaataaggtctgtctttaaactaaaaag

SEQ ID NO: 83524 - DNA, 331 bp, Glycine max
  Clone ID: PAT_MRT3847_46438C.1
ggctgttaccttctcacatctttacacccaatatggcctgaactccctcaatcaattcctttctgggaaatcctatatctctggtgatcaattgacaaaggatgatatcaaactgtgtgcagctgttcgttgaaagccatgagactctattcctatagctgctgagtggtaccacgccgtctcttttcaacttgctacaagcttccctgggcacgctctaagggtaacacacatgggcgctgctgttccatatgaatttgcacctgtcaaagcggctgccactgatgaagaatatgatcatgatcttgatctctatggtcatcatacagag

SEQ ID NO: 83525 - DNA, 659 bp, Glycine max
  Clone ID: PAT_MRT3847_46439C.1
gcgagaagacgacagaaggggaacacctcctaaagttttatagagagaaattttcccaacagaaattcccattccctaacaaaattttagaaaaattatgttactataattgtctttgtgtacagatttgagagactaacactatattttactacaattatcttattttggttcaacccgattttgccttgtatgtactccatatctgccgtattagttgttggatttgggaacatcctttccttctctggatcagcttttggctcaatggcaacatttatcccatcctggttgaacccgattctggcttgtatgtcctccatatcttcagtaactgttgcatttaaggacatccatttcatctcttgatcagcatttggttcaatgaccttctctgtagcatttatccaatcctggttgaacccggttgtaccctgcatgtcctccatatctgcagtattaattgttggatttggtgacatcctttccatctcttgataagcttttggctcaatgaaagaatttattttatcttggttgaacccggttctgccatgtatgccttttacatctctaggcattgattctttgcagataggatgcatcttggaatgtaaagaaagatgagatatatgatcacctttgcactccatactttc

SEQ ID NO: 83526 - DNA, 265 bp, Glycine max
  Clone ID: PAT_MRT3847_4643C.1
ccaactgctaaacgcctgcagaccccaacttagtatacagtcagaacatgcgcttattgccacatggaacaatagcaacaagcccttccccggtgccgctttcgacctgtttcgctgcccgattggccaatgcgaccttccctgacctggctacatcaacggcccgcaggaaatgtacattcaacagggtaagggtatcactggcatgagatacaccgcccgctctatcacatttgatgagtctcttcatcctcaagaaagagga

SEQ ID NO: 83527 - DNA, 290 bp, Glycine max
  Clone ID: PAT_MRT3847_46440C.1
gagctgaacgtggcagatggaagttcacagaattctcgcatattattgcaagaactatgagatgcgccgtcttttacatgggctgaggacatataccactattggagtgatgcacatatcgatgacacattctgatgcatctaaacagggacatgaagcgctcgctggcctagggtggtaactgaaaagatatgactgcattattagatgagatgataatcgcttgatgacatacacatatagcacggcgcaaccctgtgccaggtgactgattcacagcaacattaatt

SEQ ID NO: 83528 - DNA, 207 bp, Glycine max
  Clone ID: PAT_MRT3847_46441C.1
atatatatcttcatctctcattttactattttattatcttaatacacttatttcacttgaaactttccttccattacatctcattatcttcataaacttccatctttcaacaacaaattcacttacaactgttaccaccacaccttcaatttcctattttaataattttattcttactttgatttttccaattaattttttatcaat

SEQ ID NO: 83529 - DNA, 239 bp, Glycine max
  unsure (1)..(239): unsure at all n locations
  Clone ID: PAT_MRT3847_46442C.1
ggtcaagcattatttgattttaaaatatttattgggtaacaaggtgccttttanaatgtagaaaattccgacattctcctttgagtaacnaagaatgtgtaaattttattgtgcatgataatatntcttgccgattagaattcttaatgttttanaaacatttcagttaggatggggagtgttttaaaaatatttctttggtttatttgtttattgtgtattgcccaatgtaatagttt

SEQ ID NO: 83530 - DNA, 384 bp, Glycine max
  Clone ID: PAT_MRT3847_46443C.1
cactcgtatcctgacgcgagaattcatactattagacttatgcctttgcaatttattacgcggctactgattacatttccaactattggtactctttgtcttggtaatgctttcttactaagacaacgcttcattttaacatgctagtgcatacctaaacctgtctgctttgccatcatcaacaatactgatccgacatccaattgcaagatttcaacgtcaatctacagattttaacctttcaagatgaaaagtcaataatgtgaagaccgaattggttaaattgcattcacagcatattgataaaacaccctatcatattgaatctgctatccattgtacaaagtattttaacccttcagaagctatacattatcgcattat

SEQ ID NO: 83531 - DNA, 1401 bp, Glycine max
  Clone ID: PAT_MRT3847_46444C.1
ggtggaacctgttcatgctgctgacgatgtgaaagaattagatgctgtgtgtaaagccggggaagtcggctgcgagaagatgacagaaggggatagaggttgtatgcaggataccaaccaagagtctggtgctacactaccggggtatggaggttgcagttccttggctgagaaacatggtgaaaaacgtgttgccgaagatgatgatgatgtgagggaggacaacaagaagctgagagaatgggtgccttcccttgttcctaagactgggggtggggggtactttctgcatagtaacccaattgaagtgaaagagagctcaggagaagatgaaatttcacatattgacaaagtgactatagcttctgatcaggggagactgatgagtagtggttctcagttcacagaaggagatagaccctttcttcaatgttcagaggagaagccttctttgccgagttcgtttagaacttgtgatctgaatctcattgaagcgtctgaagtgcatgaaaatcatgttgatcattccagttctgctgtacccccctgcggtttctgaaacaaagaaagctgtgccaattgacatagatctgaccatgagtcatgctagtgtatcagggaaattcaatactcatgcaacaaatggcaaagagattgaagtaattgatttagaaaatgatgattccattcaagaagagaagtcaatcaacagtatggatagaaagacagagactatgtttcctggccttgaaggtttttccaaccatgctcaaaatgctgctgacatgcatgatgttcaggatggatatgggcttatgatatcagagttgcttggtgctcagtttcctaattgtatttcagaacctgaggatagaaattcggtacacaaaggaatggagctgtggcgatgatgatcgtgagagattgaggatgattccatatatatgtcacttggagaactaagtatgccagattttggttaagggctttttgcggccatgggagcaacctccatcgcaggattatcagaaagctctttttgatcttgtgatcactcagaactctcaggttaccttatacacttttgagttgtgatcactcaactctcaggagacattatgtagtggtatgtttagtcattagctttatacaaaaatgaaatgctcctttttattttcattttttttcattttcataaattgtctcctcttaggaattatgtatttatttaagctgaattttatgttgtccaatgttctcctctctctttttaatgcctctgcatcactactagggttattagaggacaattatttcgcagaatgccattcaattgacattcttgcataaattaattttcttatgtatttggccattatttaacagaatggctttcaattg

SEQ ID NO: 83532 - DNA, 332 bp, Glycine max
  Clone ID: PAT_MRT3847_46445C.1
aatcaataggggcggagaaaccaaaaatctgatcaactcggaagctacataataaccccccgtaaccctcgtttgcttgatacactgtgccactggggcccaaaacaattattggcgggtccaaattcaggttgccattcccgaagacttttgtgtccgagctggttgaaaaataaaccaatgaccgttcttaacaaatcttgctcgctcctttgtggaccccctgggatcaaataatccccaagctttgggctaataaaacctcgacattgaccgataatttaacccggtgatctattggacattaactttgcataaaggcccattgttta

SEQ ID NO: 83533 - DNA, 184 bp, Glycine max
  Clone ID: PAT_MRT3847_46446C.1
tcgtagctggattggtcggacatgctcgcctgctagaaacctcatatctctgtttagaaacgaagatcttaaagttgggttcatcatggttcaaatggtgagaattgctgttgcgatataaggttatatcaaagtgcttgtacgagttcgccagtgagttgaattgaagacaacttgagaatca

SEQ ID NO: 83534 - DNA, 286 bp, Glycine max
  Clone ID: PAT_MRT3847_46447C.1
ccaacggggacgttaccttcgttgctagcaacagaggaagaggcaatgcctgcaggtgtggccaccattgacaagaagaaccttgagactttttcccaactgacctaacttgctgaagctcaataggcataggaaatacaataccttcttaggaaaggatggattccttgcttggaatccgagtaagagcactgaacaccgtaccgggagcacagcaagccaacatgagactactacggacggtactggaccatgcggaagctgcctatggtgacctgcactgctg

SEQ ID NO: 83535 - DNA, 398 bp, Glycine max
  Clone ID: PAT_MRT3847_46448C.1
cttatggaatgtcattattccaactccaaactctcatgaacatgaacgataatgacattgacattaaatatgacgatatcgtaagcgtcaacgtccacgactaggaatcagggattggggtataggcaactaaaacaacaccatcacccttaagctatatcgctcatgcttatgctatacttaaattaaaacctaaagctaatgttccccaaacctcctgctcgtgcatgtgatcatgatctccatatcagtacatcatccccatctcacgaataccaagaacagccttgaccttacccgaatcttcgtgtacgtgaccaacatccacattaccaagagcgaagctgatgcatttgacatgagcttattactgagacagatgaagctccagcctgaaa

SEQ ID NO: 83536 - DNA, 1952 bp, Glycine max
  Clone ID: PAT_MRT3847_46449C.1
ctctagtccgttataagccacaacacccttccctttcgtcgcaaaccaaaccaccatcacaactggtgtgggactcagctttgttcaaatattaagttaatccctcctcttttattaacattgtattaccatgaaaaatcctaacaagaaacaatgcgcaaaataccaaagcgaaaataagaaccaactacatttcaaaatcagctgcacagacacgtaactatctacagccgagaattatatttgacgaaaaaagctatttatgctgaggtcaaacattgattacagaacaattatttgcatggtgcatgatgttgtgaaaactcccaagaaggctgtttagtatacgataaaggcggcaccctcaaattcaacacatcccttaaccatttaatcctattcacaagttcctccaagtctatgattgcagcttctaccgtattggaagacatggaattcagacaaaggcttctgtcgctcctcttctttgtgggatactcattatatccaccattgatggtagccttttccgaattctcaattgatgcatccattatgtgcggatttgaaacgttacttgagaaacaaacactttcaactttactaccagactcatcaatctccatatcatttctagcattgttgcattgctttctcctcgcagtggatctttctggacagtctttcaaatttaaagacaaaggagaagaaactgtccttgccatatgctggccaacctttactgttccatctgaatttgctggattcattatacgagcacaaggttgcctgcattcaccaccctgcaacataggcataggaacaggcacagtccaaccttcttctggacaccagtccaaagatgggcgcagatccttgcttaatgcatcataagataacccttcacccattggaggaggtagcaaatcaatctgaactttatcatttcccaatattttggtcacacttccagaccaatagcaaccatctgcaaaccaatctaccaagtccccaaccttccatatgttattaacaataacaatcacttctgatatggtattcacatcaagcttttcactttcataagaaagagtaggaaatgaaggtcgcagcatcaatcccttgttggagccctttgacttgccaatattagttagaggcctttgatccatcttgatccatcttggcttttgcattgaacccatacaccacgacaaccacctggaaagcattttgactcagccaaatccccaacttggaatggaagatcaggcatctttatgtatttccacttttaaaagacaaaaatctttatataaagctgaaactgaaacgcgttcgatcagacgaagaggggactctctttcggaaaccaaaatgggatcgagaacggggttctatcattccttccctcttttcttttcttttgttccactaccgcagcaagcaccattctcccattctctctcctttgccgtcgacaaggacgatgaagagggccatggacaaggaagacgaagacgccaataatgacgttcttgtcacttaagggttgatctcgcaaaagatttggagtagaggggcagcgctgagttgctaggcgaagaggtggagaggaagaatgggcaggacttggaaggtgcggtgagatctgagagaaaatgtcgagctaacgggttccagggataatatgagaaaaaaaaaagaaaataaagaaaaaaccatctaattgtaccaataaaataaaatggatttagagtttagtgattaggatttaggatttagtgttggtggtaggttgtaggtttagtctggatttgcccgtggaactcactatcaatcattcactttcaacttcttggggttctctttccccactctcaaactaaagagctgaaatgatttattctgattttagtgatgtttaccaaacatgctatgaagtagtattt

SEQ ID NO: 83537 - DNA, 255 bp, Glycine max
  Clone ID: PAT_MRT3847_4644C.1
ccagtctaatgccaaatgtcaaatactatggaaagtagaattggtgtgcccgacgacaggaatgaggggactgtccaacgtctaatggacgtgccacaacacagatgtgagggtttgggtacacagcaagccttatcctgcgacaatgatgcaaaatcaaagactagtatgccctgtatgtggaggggaaatcaaagagtcgaccataatcgatgcgggtcgtatttgctgaatgaaaaattaacgaattgttct

SEQ ID NO: 83538 - DNA, 315 bp, Glycine max
  Clone ID: PAT_MRT3847_46450C.1
gcgtccgtacagcattcagagcgaccactccgtggcactggggttcgaccactttccgcggactcactctgcgttgctccagatcgatccacgtctacttcatcctacatgccacgtcagatctctcgtgtgggggtctcctactttcttgtgactgcacgtcattttaacatttcgggactgcgtaaatcctgctcttattcaacttcatcccgtttcggcacagctccatttcctcagttgtgctagtaacaagaaggaccggtgggttctcccttcccaccagtttcggaacctgtttttctactagcactg

SEQ ID NO: 83539 - DNA, 374 bp, Glycine max
  unsure (1)..(374): unsure at all n locations
  Clone ID: PAT_MRT3847_46451C.1
acgtgngngagnncgtnangncngaacagngtnatggacgcntacanacactcgcnangcgntctanaaacnaccttaagaancttgtccanatgtncccttgaagatngnanttggtcggatnaaanntggcgggtangggnagtgccttttccagnatnactagctttctncgcanccaagaanccncttctcaacctntcaattctncncgcgtnctctctngnacctnnngactgatgnctttaccncggttnggganccatgatgagtngtagagtgnngaaggggganaagggtnnnaanggngctggggtgcancnaggtannaccgtgnngtngcagngngnaagtgggntagggngtgngtagtt

SEQ ID NO: 83540 - DNA, 433 bp, Glycine max
  Clone ID: PAT_MRT3847_46452C.1
ctcctctccatatactcgaccttcttaactgcgctttactccttcattcgttcagctctctcccctaactctgcatcaaatagcttatttctgttcacaccacccatctcttgaaaggacgctttttattgccttacaacacccgcattggtaaaatagacctactcccttaaagcttctccatcatttgttgaatgggataggctacgtaacttgccgtggacaatatggcactagcactatagaaactcgcacgggtctctaggttttaacgactatcacatcatactacatatgcttcacgttactgtgaatgtggacgaaagtaccacgtgtacacccctcattatccaggctcccaggcctaatagacatctgggaccccatgcatgactggatctgcgacaacctactcgcgtgtggatgacgtacc

SEQ ID NO: 83541 - DNA, 972 bp, Glycine max
  Clone ID: PAT_MRT3847_46453C.1
ggaaaaattactatgcctagagcaggcaaagggtaacacagtgaacagcttttttcttttttcccaaggcaatggaaaacttctggatgacaaaaattatacaaaacacacaattaaataaaaaacagcttccaagatgatcagatatcaaatctatgatccaataacaaagcaacctcaagcaaaattgaaaggtagttcaatttggtataagtggcataaaaaatttcaaacactaacaaaaactactcaatacttaacaggagcaagaacatcaagttgggaaccgagcttctcttcagcaaccttctcagctttcacccttaatttgttgagttgcttctttctctcgtaaaccaccgctgccttctcctttctcttcttctccagctccctaatggtatcatagtagctccatccaacttcagatgacaacctgcccagcacacaatacttgtgtcccttctgaagcctcaacaccttgagtgcatcaggaacaaccattctcttggtcttgtcatatggaggagggattccttcataaaccttcaaacgagcaagagcagcttccccacgctttgtcttgtgtggtatcattccacgaacggtgcgccagaagatcttggagggggcacggaagtggatggggccatgggagggtttggtgttcatgcgtttgcgaaggaacctcaagtatttcatcttctgcctcaccagcccgcccgagatgcaaatctcttcacagcgaacgaccaccactttctggccgttcagaagctccttcgccacgatggaggctagacgacccagcatgtggtggcgcgcgtccaccaccacccgctttgcgcagattccagaacctgacaccatcttcttcttcgtcccgaaaacaacacaaacggcacaaggcaaacccctcttgtttgttgctgctggatgctcaaggaagagcacattagggtttttgaagac

SEQ ID NO: 83542 - DNA, 521 bp, Glycine max
  Clone ID: PAT_MRT3847_46454C.1
cctggaataattttaaattaacaccccgggtaacagattcccttcacacgggccactcgtttaaaaaaggggcccctgactggataaaaaaggggggaaacaaagaaccccctgggggaggggggaacccttattttaaaacacaaggggggtaattaacaccccggggggaaggggggtggatcttttatcttttataaaaggccttttaattaatttttaaaaaaaaacaagggtgggggcaaaaacatttgggagggaggccacgggggggtcccccagggaaacgttggggtgggaaaaaaaagccacaggggggggcactaaaacagggccccttgaaagggggggtctgaaactaaaaaggtcttggttttgccaccattgggggccccataatttcaggggcccccaaaagcagaagcaagacaaaagggggtgaaaccaaaggcccggagcgggacatgggggaaaggaacaaagttccaagaaagactgaacaagccggtttgagccaaatt

SEQ ID NO: 83543 - DNA, 568 bp, Glycine max
  Clone ID: PAT_MRT3847_46455C.1
cgcgtgaattttactttctatacggggcgttctgatacctgatcctctgcattcttactcctcattccatctttggcagccatcacccttgaccttgttgggttctccgtggtcctctattgtccccccgttcttcctggagctcgtcttccttcttggctagtctccttctccgttccccttcccctatgtagcgacgacactctgttctcggggggcttgttcccatgtttgtttgtcttggtcttggcacatttgattgagttctcatctgaacacatatatttggtttaacattgtgataatagcttcatttatcaaaacactcttcaaaaacattatggttttacatatgtcaactaacaacaagctaatgctagtggattatgttgacatgcttaggacagaaaatatcatttacgatcaatgacatgctttaggcatagccactgacacacacacacacacacacacacatatatatatgtcaacctagccacataaatattcatcaatccgtagtagttcttaacattctaatttattgctatcatcctttgctgatggc

SEQ ID NO: 83544 - DNA, 605 bp, Glycine max
  Clone ID: PAT_MRT3847_46456C.1
acaaacaatctttttggagatctccttattatatggaggtatgaatgtttgcaattaaagtacatgtttacttgtgaggaatatttaaggctataaatacagtaatataggatgttgcatcacttagtgtatattcaacttcattgggacactttaaaattcaatatatatgccttttcacagtaatcaaggaaaattcaagaagagatggaaccaacttagtgttccatacaacctttggattcgatcaaaattgtattaccaagtgttcctacatgtcatgaggaactgtctgtgttcaaacatgtcaaaccgagttttggtgcaccatatactcatagagggccacccgttattgtaattaatagaggcaacactttggctctttagcctttagtgttctcatgcctaattatcaatgacaactttgatgagaccaacctcctttaccatactttctccctcggtttcatgcaccccataattggctactataacattcctttgcttaatttcttgcattctgagtaaagcggtgattcttccagcgactgcataagtgctatatatgaggagggaatctgtacgatgctctgcataaatgc

SEQ ID NO: 83545 - DNA, 320 bp, Glycine max
  Clone ID: PAT_MRT3847_46457C.1
aattcggctcgagcaacaagacattctcctatgccaagactctaacatggccgaacgctaaacactggggtagcaaacgcgcacaggggaactacattaccgttaccgggacatctgctaagggggccgtcgaagggacccgactgaaccgaacggggaaccacatctctcccactgccgatggtaagttcacaagataggagctacaagtaccgccacatctgcgaaggacactgccaaaccgaaagcccgagggaacgctgcgtgcccatgtcacaaccccacccatgggccccagagcccacacttggttgatccca

SEQ ID NO: 83546 - DNA, 2173 bp, Glycine max
  Clone ID: PAT_MRT3847_46458C.1
gtttcaagttgttgttcccagcataaatagcagaaaatgagaaactctctcatgagttctgtctgattgcattagcattgttggtagttggtctcaaaaatctcttgccctttggccataatcaaaaaccaagacactgttcatcaagctgctcaattatcaagccaactttgcttggttccactgcagaatttcagtttattcttatctccgtagattggattgaacgaagttcatgaattctctcttttccccaaccaatttgttttgttgctgaataaattagttctgtctggcaaaggttgttgagtctctctagtgctggaaaattttgtggtgattcatgattttttttttaactgaggaccttcaattttgtttttgtgcattgatggttgtctcacaatcacaaatctagtctccaaaattggtgatttcacaggggtgtgctgttaactttcctgtttgtttcatcttcaagctcaattctggttctgggtttatcttttactggaagacagactttgaggtagattccttataagtgggcataagttcaagtgtagagaatgagtcagcctaagattaagcgccgagttggtaagtatgaggtggggaggaccattggtgaaggtacatttgcaaaggtgaaatttgcaaggaactctgagacgggagaccctgtggctcttaaaattcttgataaggagaaggtgctaaagcacaagatggctgagcagatcaggagagaagtagcaacaatgaaactaatcaagcatccaaatgttgttcgattgtgtgaggtcatgggaagcaagacaaaaatatatattgttttagagtttgtaaccgggggagagctctttgacaaaattgtaaaccatggaaggatgagtgaaaatgaagctcgtagatatttccagcagcttataaatgctgttgattattgccatagcaggggtgtttaccacagagacctgaagccagaaaatttgctattagatgcttatgggaaccttaaagtttctgattttggtttgagtgccctctcccagcaagttagggacgatggacttcttcatactacatgtggcactcctaattatgttgctcctgaggtccttaacgatagaggctatgatggggtaactgcagacttgtggtcatgtggggttattctctttgtattggttgcaggttacttgcctttcgatgaccctaatcttatgaacctgtataaaaaaatctcagttgctgaatttacttgccccccatggctttctttcagtgccaggaaattgattacacgaatcttggatcctgatcccaccactcgtatcactatacctgagatattggatgatgaatggtttaagaaagattataagcctccagtttttgaggagaacggggaaaccaacctcgatgatgttgaagctgtctttaaagattctgaagagcaccatgtgacagagaagaaagaagagcagcctacagccatgaatgcatttgagttaatttccatgtccaaaggactgaaccttgaaaacttgtttgatacagagcagggatttaaaagggaaacaagattcacctcaaaatcccctgcggatgagataatcaacaagattgaggaagctgcaaaacctcttggctttgatgtgcagaagaaaaattacaagatgaggcttgcaaatgtgaaagctggaaggaagggaaaccttaatgttgccacagagatattccaagtggcaccttctcttcacatggttgaggtacggaaggcaaaaggagatacattggagttccataagttctacaagaaactttcaacaagcctggatgatgttgtctggaaaacagaagatgatatgcaaatgcgagaaacaaagtgatattgttattatcattatcttgtgtaattttctttatgtctgaggttctactattttccaatttcttcattcgttatttcctcttaaggttccttcgtgtaggtttgtttggacatttaattacatattacttatatattgcgtaccatgctactattttttgaaagcatgcagagtttatgtaagaattttactcatcaacagttccagttatgttcatgaaacaaaaaattgtaagaaaagttgtatatatctatcttccttttttgctaaaaagt

SEQ ID NO: 83547 - DNA, 135 bp, Glycine max
  Clone ID: PAT_MRT3847_46459C.1
aaaaaaggtatcattcaaacagattgcttaatacctttctaacatgcataattccccgaatgcacattcaacacatgcttagttggagccggacttaaggaaaaagaagccccaaccataatttacctttcagaa

SEQ ID NO: 83548 - DNA, 378 bp, Glycine max
  Clone ID: PAT_MRT3847_4645C.1
gtttctcgagcaaaaacaattcgagggtttaaattttttctttctggaaaactagatgaggggtctgagcaagccttttattcggtatgaaatatcgaagcagcaactgcgaaagctgcaaacttataaggaggagagccatacgaggaaatcacctcaaagctttgggtgcgtgacccccaagtcaatagctagcgactagtgagggacggacaatgttgtagtctctcgtggccgacaaattggagtataacaaaggcatgcgcctattgccacgaccgggaatataggtaatgcgataatggatcttcttaaagaccaatggttaacgctggctgtgacgggcggttcggcagacgaaaacgatgatcacatcac

SEQ ID NO: 83549 - DNA, 407 bp, Glycine max
  unsure (1)..(407): unsure at all n locations
  Clone ID: PAT_MRT3847_46460C.1
ccggggggaccggaccggaaanaccgggacgacccacgcgcccggtttttttctccaacgcaaccaccacacacagagccgaggcctctctcaagccctaacggcccctcaacaccatggccacagaagagcccactggcgcgggggaacccgcgcccgaacctgccaccgccgaacctcccccggaggagaaggaggagaccaaacctgaagccaaggctaagaaaaccaaggagcccaaacctaaaaagggggccagaccgcgcaacccacccactcatccaaactacgaagagacgggaaaagaggcaaccacctcgctgaaggagaaaaccggatcgagccaacacgcgaacgcgaagaacaccgaggagaagcacacgcagcgcccaccgaaccgcaagaag

SEQ ID NO: 83550 - DNA, 374 bp, Glycine max
  Clone ID: PAT_MRT3847_46461C.1
tcaaaaaccaagacactgttcatcaagctgctcaattatcaagccaactttgcttggttccactgcagaatttcagtttattcttatctccgtagattggattgaagggtgtgctgttaactttcctgtttgtttcatcttcaagctcaattctggttctgggtttatcttttactggaagacagactttgaggtagattccttataagtgggcataagttcaagtgtagagaatgagtcagcctaagattaagcgccgagttggtaagtatgaggtggggaggaccattggtgaaggtacatttgcaaaggtgaaatttgcaaggaactctgagacgggagaccctgtggctcttaaaattcttgataaggag

SEQ ID NO: 83551 - DNA, 919 bp, Glycine max
  Clone ID: PAT_MRT3847_46462C.1
ggatgatgaatggtttaagaaagattataagcctccagtatctcaggtatagtgatacgagtggtgggatcaggatccaagattcgtatcactatacctgagatattggatgatgaatggtttaagaaagattataagcctccagtttttgaggagaacggggaaaccaacctcgatgatgttgaagctgtctttaaagattctgaagagcaccatgtgacagagaagaaagaagagcagcctacagccatgaatgcatttgagttaatttccatgtccaaaggactgaaccttgaaaacttgtttgatacagagcagggatttaaaagggaaacaagattcacctcaaaatcccctgcggatgagataatcaacaagattgaggaagctgcaaaacctcttggctttgatgtgcagaagaaaaattacaagatgaggcttgcaaatgtgaaagctggaaggaagggaaaccttaatgttgccacagagatattccaagtggcaccttctcttcacatggttgaggtacggaaggcaaaaggagatacattggagttccataagttctacaagaaactttcaacaagcctggatgatgttgtctggaaaacagaagatgatatgcaaatgcgagaaacaaagtgatattgttattatcattatcttgtgtaattttctttatgtctgaggttctactattttccaatttcttcattcgttatttcctcttaaggttccttcgtgtaggtttgtttggacatttaattacatattacttatatattgcgtaccatgctactattttttgaaagcatgcagagtttatgtaagaattttactcatcaacagttccagttatgttcatgaaacaaaaaattgtaagaaaagttgtatatatctatcttccttttttgctagt

SEQ ID NO: 83552 - DNA, 2730 bp, Glycine max
  unsure (1)..(2730): unsure at all n locations
  Clone ID: PAT_MRT3847_46463C.1
actgtttcaagttgttgttcccagcataaatagcagaaaatgagaaacgctctcatgagtcctgtctgatggcatagcattggttggtagttgtctcaaaaatctcttgccctttggccataatcaaaaaccaagacactgttcatcaagctgctcaattatcaagccaactttgcttggttccactgcagaatttcagtttattcttatctccgtagattggattgaagtatttcttctctctttctctctccatctcttttcacgttttttgtttctaatttttttttttttcatcttcatgtctatcttcttctcatatgagtctcaaggtgttgtatatataacatgctgccttgtgactggagtttcggtacgtgatattgggtccctggatcttgatgtgtgttgttttttctttagcgggtggctcctaagttcataaattccctcttttctccagccaatttgttttgttgctgattattttagttctgtctggcaaaggtttgagtctctagtgctggaaaattaatctttgtggtgattcattttgtttttttttttttttttttaactgaggaccttcaattttgttttttgaacatcgatggttttctcacaatcacaaatctagtctccaaagttggtgatttcataggggtgtgctgttaactttcctgtttctttcatattcaagctcaattctggttgtgggtttatctcttactggaagacagactttgaggtagactccttataagtgcgcagaagttcaagtgtagagaatgagtcagcctaagattaaacgccgagttggtaaatacgaggtggggaggaccattggtgaaggtacatttgcaaaggtgaaatttgcaaggaactctgagacaggagagcccgtggctcttaaaattcttgacaaggagaaggtgctaaagcacaagatggctgagcagatcaggagagaagtagctacaatgaaactaatcaagcatccaaatgttgttcgattgtatgaggtcatgggaagcaagaccaaaatatatattgttttggagtttgtaactgggggggaactctttgacaaaattgtaaaccatggaaggatgagtgaaaatgaagcacgtagatatttccagcagcttataaatgctgttgattattgccatagcaggggtgtctaccacagagacctgaagccagaaaatttgctattagatacttatgggaaccttaaagtttctgattttggtttgagtgccctctcccagcaagttagggatgatggacttcttcatactacatgtggcactccaaattatgttgctcctgaggtccttaacgatagaggctatgatggggcaactgcagacttgtggtcatgtggggttattctctttgtattggttgcaggttacttgcctttcgacgaccctaatcttatgaacctgtataaaaagatctcagctgctgaatttacttgccccccatggctttctttcactgccaggaaattgattacacgaatcttggatccagatcccaccactcgtatcactatacctgagattttggatgatgaatggtttaagaaagaatataagcctcccatttttgaggagaatggggaaatcaacctcgatgatgttgaagctgtctttaaagactctgaagagcaccatgtgacagagaaaaaagaagagcagcctacagccatgaatgcatttgagttaatctccatgtccaaaggactgaaccttgaaaacttgtttgatactgagcagggatttaaaagggaaacaagattcacctcaaaatcccctgcggatgagataatcaacaagattgaggaagccgcaaaacctcttggctttgatgtgcagaagaaaaattacaagatgaggcttgcaaatgtgaaagctggaaggaagggaaaccttaatgttgccacagagatatttcaagtggcaccttctcttcacatggtagaggtacggaaggcaaaaggagatacattggagttccataagttctacaagaaactttcaacaagcctggatgatgttgtttggaaaacagaagatgatatgcaaatgcgagaaacaaagtgatgtggatattattatcattgtctattaagtgtaattttcttcgtgtctgaggttttactattttccaatttcttcattcgttatattcctcccccgtaggtttgtttggacattaattacatagtactcatttattgcataccatgctattattttttgaaagcatgcagagttcatgtaagaattttactcatccaacagtcgcggttatgttcatgaaacaaaaaattgtaagaaatttgtatattgtatatatctatctatttatatcttttcaatttgttgttgctgttgtttgtgaaaacagaacatgatatgcaaatgctgagaaacagagtcatgtgcatagtattatcactgtctagtaagtgtaattttgttggtgtatgaggttttgctattttccaatttcttcattcgttatattcctctccccnntaggtttgtttggacatgtaattccagtagtactctatttattgcatcccatgctattattttttgaaagcatgcagagttcatgtaagcattttcctcatgcaacagtcgcggttatgttcatgaaacaaaaaattgtaagaaatttgtagattgtatatatnntagcgtannnaaa

SEQ ID NO: 83553 - DNA, 333 bp, Glycine max
  unsure (1)..(333): unsure at all n locations
  Clone ID: PAT_MRT3847_46464C.1
gaaaaattatttttagaaacagaatggatttattnngatttttttcttcaaaattttctccactctttcatgggtgtattaatatgttgagacaggtggaaatgagtacaaacttggaaaaaccttaaagggggagcccagaaaaacaaggaaaggatgtccaaggagaagtcgaagtatgttagtatatctgcaatgaaaagattaaatatactaatttgccaaaaggaaaaaaaaattcaaaacaatgggaattttttgggaaatgggatgcagttggatatgtccaatatcaactatcagggattttaatggtggaattgggaccttaaa

SEQ ID NO: 83554 - DNA, 411 bp, Glycine max
  Clone ID: PAT_MRT3847_46465C.1
gaatttaaaaagaaagcgaaaagaggagaaaaagcgtttgcgtgatcagcgtagaaagcagaagaaaaagctaaaatacgggaatgaatagaatttatatacataactgagccattaggtaaaattttgcatcaaccaaagttgtcataagttgctgaattttttaaggcagcgtctgtagtttctcctgcctagttttagtgcttcttatttgagtttggatatatatcatacaatatcctgtatcgattagtggatgtgattgtgtttatattaattatatcatgggaaacccgttgtcatcaaaaaaaaaaaaaaaacacaagtagaaacaaaaaaaaataaagaaaaaaaaaaagaaattataaagttacaaaaaaaataaagcaaggaaataataaaaaggggggg

SEQ ID NO: 83555 - DNA, 771 bp, Glycine max
  Clone ID: PAT_MRT3847_46466C.1
ggaaaagattccaagagggggtccccacccactctcagtgcgatttgcattgcattcacagtttccgcgccaaaggaaaaacgcagacgtcgacgaacagcagcgttaacaatggcggtggtggacgatcgcttcgcggatttgaaccctaagacgtgcgtggttttaggcggcagaggattcctcggaagatcgttggtgctcaggctgttgaaactcggtaactggatcgtccgagtcgccgattccgctcagtctctccaactccaccactccgagtctctcctcgaacaagctctctcttcttctcgcgcttcttacttccacgtcgaccttctcgataaacggagcattgtcaaagttctagaaggttcctctgttgtcttttatatggatgttgccggcgtcgatgtgaataacttctatacttgctataagcttatggttcaaggtgcaaagaatgtcattagtgcttgccgggaatgtagagtgagacgcctgatatataacagttcggcagatgttgtagttggtggtttgcatgatattcgtgatggagatgagtcgttggcgtatccgtgggaaactaacaacacgttaagtgaccttaaggctcaagcggaagctttgatcctgagtgccaatgacattgatggcctattgacatgctctcttcgtcctagaaatgtttttggacctggtgacacagaatttgtgccatattttctcaaattagcaagatatggtttttcaaaggttattataggggac

SEQ ID NO: 83556 - DNA, 272 bp, Glycine max
  Clone ID: PAT_MRT3847_46467C.1
ttttaaaaagctaatgggttcttgtcggtcttcttctgtcgttgtctctgatcttgactctggttattgttgcacaaagaagtaacaacacacacatatataatattgaagatatatatatataatatatgacatggttttcttcacaagcttgggacaaacgctgggggccggcaccggaaacgggctgggaagctcaaagacaatcgtctcggggaattccggcggcaacggggcggagcattccaaagtccagataccattgttcgtcc

SEQ ID NO: 83557 - DNA, 102 bp, Glycine max
  Clone ID: PAT_MRT3847_46468C.1
tacaggcgtgcgtacacgtcagagagggctaccgtaggagacacaagcaggctctatatagtggaccgacatgtgtctaactatgctgctattaacaacatg

SEQ ID NO: 83558 - DNA, 365 bp, Glycine max
  Clone ID: PAT_MRT3847_46469C.1
acgaggccagctgttgcttctaatcatcatcaacagccgctacaatctcagccaccatataagcaaagtaatcagactcaatcaaatgttcagagaatgctgcaacaaaactgtcaggtgcagtctgagtcatcaagcatgtctcaatctgattcacctaaagttgatcaacatcctgcaaaccgtgcttcacaattcagtacaaacactgcaatgtctcctgtttgtatggatgcagctagtgtaactgttgttcctcccagtgcatcttctcagtggaaaacgtcagaatcaccatttgattccaatgtgcccaatccagttattcaagcgagctctctggggagcacacctgttggaaattc

SEQ ID NO: 83559 - DNA, 1739 bp, Glycine max
  Clone ID: PAT_MRT3847_4646C.1
atccactccatcctgttttctcaccctagtaactatgtctcctcctttcgcctcttcaactttctctctctctccctagttgcatgttttcccatgttcaataataataataattctcactaatctcaaccttgttcagtattcaatttgattaatgacaccaagatccaagcacaaaattaaaacttgggagtgtgtgattattattccaaaatgaccccaccccacacttagtgttatgataacttggaaccttttgcacgcaagaataagctgtacacacgcaagaatagcgctattattatttcttcattttttgttgttgtgggtcaaagaagtagcacctggaagccctgaatattcagcctgtgatatggggtacctcaattcagttttgtcctcttcaagccaggttcatgctgcagaagattcacctgtcagtggagggggcctcagtcagaatggaaaattcagctatgggtatgctagctcccctggcaagagatcttcaatggaagatttttatgagacaaaaattgatggtgttgatggtgaaattgttggcctttttggagtttttgatggccatggtggtgctcgtgctgctgagtatgtcaagcaaaacctatttagcaatttgatcagtcatccaaaattcatttctgacaccaaatctgcaatagctgatgcatataaccataccgactctgaatttctgaaatctgaaaataatcaaaacagagatgctggatcaactgcttccactgccattcttgttggcgaccgtttgcttgttgcaaatgttggggactccagagctgttatatgcaggggtggaaatgccattgctgtttctcgggatcacaagccagatcaaactgatgagaggcgaaggattgaagatgcaggtggctttgttatgtgggctggaacttggagagttggtggagttcttgctgtttcacgtgcatttggtgatagactcctgaagcagtatgttgttgctgatccagaaatccaggaagaaaaggttgatagctctcttgagtttcttatattggctagtgatgggctatgggatgttgtctcaaatgaggaagctgttgctatgattaaaccaattgaggatgccgaggaggcagcaaagaggctaatgcaagaagcatatcagcgaggtagttctgacaacattacgtgcgttgtcgttcgttttttgtcaaaccaaggtgcatcttctcatagtaactctggctaagtgtccttcactcgaaggctagtgtatatctggtgatggataaaaaaaagacgggatgtggcaaaatcagtttattatagtaggtcataggcattccttgtagctatgtaccatgcaagaatagaaatcaaatttgaactcactatggccctctagcatagagctattcacaccatccccacatccataattgagtcctacttgtagctacgaaaaatagttgtgcaaagagtttacaatgttttaattatttcacacacatgctatttgtacatgtggtgttgatcttattaatcccctcactccaaaacaaaattctcgtgtgcttggttgaagttaagttccccctttcattgtcaatctggttttacagtgttagtcccgtcccatgtaacagtttgttctactttaattatggcttttatcaagtgtataataatataaatctaataagaaacaatgtgctttctctttcttcttttgt

SEQ ID NO: 83560 - DNA, 213 bp, Glycine max
  Clone ID: PAT_MRT3847_46470C.1
ctcaaactcacacccgtcgccgccgccgccgccgtcgccgcttgaccttaatctttcatccattcgcaatatcagatctttcgagctatcgtcagacataacttttctcattctgaatctccctcgcctagttatgattgtctctgcgcacttcatctagtgtgctttgtgtatgtatctcttcaaatactttggcattaggcttgtcagatt

SEQ ID NO: 83561 - DNA, 206 bp, Glycine max
  Clone ID: PAT_MRT3847_46471C.1
cgcacggcccgcagtggaggatcactttttaggtgctatccagcaccctggaaggtccttataatgatggggccttggaaatatgtttgagtacatcttccgactactatgccatgcctcaaggaagttcgccttgagattcttccatctgcttcataaatacttatgggtgtttgtctccagctctttcgcacagattttgaaag

SEQ ID NO: 83562 - DNA, 349 bp, Glycine max
  Clone ID: PAT_MRT3847_46472C.1
ggcaatgtcacaatttctgagacttatcaatcattgattgtacgcaaatatgtgctcagataagctcgagctcacatgttctctgattaagcacatccatgacttcatctgaaatcatatctgacttccacatttgagtgaataactacattttcatgagtgtgtgatgcaacccgttggagataacaactccaatcacatgacttgctactatcatgacctcgacaccgctggaaccttgatatgaaacattctcgcagccctctttattgataaccttgacatcatgatcatggtgactgatcttcttgccgcacttgatttttggctaatgaagcctgtcagtagg

SEQ ID NO: 83563 - DNA, 335 bp, Glycine max
  Clone ID: PAT_MRT3847_46473C.1
gttgggaaaggttttttttttttttttgggacagagaaaaacacctattattatatagtttttgtgacaaacattattaggagcaccggcctttaacaagttagggggatattacatttttcttttggcacattaaacaacgaggtttcctccttgaggggggggttgagcacaaagcttggaagatccaaacataattcttgctaccaggggacaacggggaagcaaaagaccaagaaatcgcatcatgggggtgaacggaaccttcttgctgcccgggggggggagaaaacccaacgctcacccattctggaagatgacttttgaagttcact

SEQ ID NO: 83564 - DNA, 469 bp, Glycine max
  Clone ID: PAT_MRT3847_46474C.1
ttccgttccaaggaaggtttcccgtcatcactgtatgacgtcctccttctttgggggggggggggggaaacgacaaggatataatagagagaaggggaggagacacctgtgctgtgcgaggtaaattgtatgtagtaaggatagtactgtaaataagataagcagaagaaagaagccgaccaagaaacgagagccgaaagcagcaagtaagaagataagaacaaatggagccgactaattagaaatagacgatgatagcgcaagggaaagcgtatccgggtggtgataggtacaccaactgcacccgaatcctggtgcgtacgctacgacggcgacagccacgagggttgcgtctatttattgcagttagtgttaggcacaagtagtaacagtagcagatgcgctggcagtttattattgtggcttggcgcgactatacaatgggctaggtatgcaactggtatattta

SEQ ID NO: 83565 - DNA, 222 bp, Glycine max
  Clone ID: PAT_MRT3847_46475C.1
cccacgcgttcgcccacgcgtccgtccacgcgttcggtttgaatgcatctttgtctgtagcaaacgtttccttcatgttacatccaaaattgagagcaaaaccttcttttagccttttgaagaatatacttgttatcaatggtagttgttcgttattggggaaaaaaaaaaaaaaaaaatataaataaaaaaaaaaaaaaaaaaaaatataatattttttta

SEQ ID NO: 83566 - DNA, 293 bp, Glycine max
  unsure (1)..(293): unsure at all n locations
  Clone ID: PAT_MRT3847_46476C.1
gccccacttttccctcgtttacaagacgggaacaacagcgaccgggcaagtttcaaaaggaggaagacgccccacacangccgactgaccccagagacagagaacgagggacaccctgacaagctctgcgaccaaagatccgatgctgtcctcgacgcttggcttgaacaggacccagacagcaaggttgcctgcgaaacatgcaccaagaccaacttggtcatggtcccccgagagaacaacacccaggccatcgttgactaccagacgatcgcgcgagacacctgcaggaa

SEQ ID NO: 83567 - DNA, 230 bp, Glycine max
  Clone ID: PAT_MRT3847_46477C.1
ggagaatgggatctggcagcagaaaaacaagtagtttagaactaataagaaggaaatggctttcctcaatgattctcctccccagctgttaccaccgtcaaccgtgccggtgccgcatggttgttccattaaccggcctcaaatccatggctggcttccccacgaggaagaccaacattgactttacctcaatggttagcaccggtgaaagagtacaatgcatgcaggtg

SEQ ID NO: 83568 - DNA, 251 bp, Glycine max
  Clone ID: PAT_MRT3847_46478C.1
gaaaagattcttttccttttttttttttccttatttccaaaaggaagcgattcttatttttgcccatattattaaaacaatacttttggtgctgggcatccctccttttcccactggaatcttcaacctgttccttttggaggttcattatctggcggggccatcttcaccttataatgtgttagacggggtcaagaattcttctccccggaaatgtgcttcttaaaaaaaacccctttccttggcaaaaa

SEQ ID NO: 83569 - DNA, 409 bp, Glycine max
  Clone ID: PAT_MRT3847_46479C.1
acccaagcgtcagatttaagtgtacctgcaaattttccatcaatttcttgagtgagccccatcagctgatttgtagtattctagctatacttgcaaaatcagtgtcactcagtaatggtagcctcttgatccatgatgctcacttcaactagttggtgcctttgcaaattgcaaattttcaactgaaatcctctcctctatgaaatctttctttttgcttatcacctttctgaaatgagaattgcaacacaacttgtaattgtaagttgtataaatcatgctgggtacaaggtcaaaagtattatttggataacactgtccagagaatccaactaacatgtcttaccatctgcctggtggctttaataaagggctcttttacattagtctgaataaatttgttagtttc

SEQ ID NO: 83570 - DNA, 1895 bp, Glycine max
  Clone ID: PAT_MRT3847_4647C.1
ctgttttctcaccctagtaactatgtctcctcctttcgcctcttcaactttctctctctctccctagttgcatgttttcccatgttcaataataataataattctcactaatctcaaccttgttcagtattcaatttgattaatgacaccaagatccaagcacaaagtttgtgtcttttttcatttatttttttttctgccttttgagtggaacaaagtttgagtcttttttcggaaatttatatgctctgtgacattaactgcactttcttccttgtggggtttcttctgtgcagattaaaacttgggagtgtttgtgattattcattattcccaaatgaccccacctcacacttagtgttatgataacttggaaccttttgcacgcaagaataagctgtacacacgcaagaatagcgctattattatttcttcattttttgttgttgtgggtcaaagaagtagcacctggaagccctgaatattcagcctgtgatatggggtacctcaattcagttttgtcctcttcaagccaggttcatgctgcagaagattcacctgtcagtggagggggcctcagtcagaatggaaaattcagctatgggtatgctagctcccctggcaagagatcttcaatggaagatttttatgagacaaaaattgatggtgttgatggtgaaattgttggcctttttggagtttttgatggccatggtggtgctcgtgctgctgagtatgtcaagcaaaacctatttagcaatttgatcagtcatccaaaattcatttctgacaccaaatctgcaatagctgatgcatataaccataccgactctgaatttctgaaatctgaaaataatcaaaacagagatgctggatcaactgcttccactgccattcttgttggtgaccgtttgcttgttgcaaatgttggggactccagagctgttatatgcaggggtggaaatgccattgctgtttctcgagatcacaagccagaccaaactgatgagaggcgaaggattgaagatgcaggtggttttgttatgtgggctggaacttggagagttggtggagttcttgctgtttcacgtgcatttggtgatagactcctgaagcagtatgttgttgctgatccagaaatccaggaagaaaaggttgatagctctcttgagtttcttatattggccagtgatgggctatgggatgtcgtctcaaatgaggaagctgttgctatgattaaaccaattgaggacgcagaggaggcagcaaagaggctgatgcaagaagcatatcagcgaggtagttctgacaacattacctgtgttgttgtgcgctttttgtcaaaccaaggtgcctcttctcatagtaactctggctaagttttcttcactagaaggctagtgcatatctggtgatggataagaaaaaagatgggatgtggcaaaatcagtttattatagtttggtcataggcattccttgtagctgtgtatcatgcaagaatagaaatcaaatttaaactcactgtggtcttctagcatagagctgttcacaccatcctcactttccataattgagtcctatttgtagctaggaaaaatagttgtgcaaggagtttacaatgttttaattatttcacacatgctatttgtaaatgtggtgttgatcttattaatcccctccctccaaaacaaaattcttgtgtgcttggttgaagttaagttcccccctttcattgtcaaagctggttttacagtgttagttccgtcccatgtaacacttactcctgtgatacttgaattatggcttttatcaagtgtataataatataaatctaacaagaaacaattttcttttgtaactatattcaacagtttagtgtgtttgagtgagctg

SEQ ID NO: 83571 - DNA, 249 bp, Glycine max
  unsure (1)..(249): unsure at all n locations
  Clone ID: PAT_MRT3847_46480C.1
ctgctgcctcaagcttgctgcttctgtctgccaaaactagcaagtngaaatgcaggaggaatacgagtggaggtgacactgtatgagccacgttctctcagaattgataaagaagtcgttgatggtagagaagaatcaagcggtggcaaagactggggttctggtggggccactctgaaaattgttatataagttacattggcccaagaacagtctagattgaggctaacacaaaaggtgaatttaatg

SEQ ID NO: 83572 - DNA, 466 bp, Glycine max
  Clone ID: PAT_MRT3847_46481C.1
tacggctgcgagaagacgacagaaggggactccgaactccacattaaattcaaaattgaataccgaaggaagactcagcgtatgatttaatctgaagagtgtgaagatggccatagaagtggatcagattcacactcatgaattaaggtttcccttctggaaaccgtttcgtcgcacgttcggaccctaatctactgtcttcgctcatgtcaacctgcaacgggaacttattgtcaatcagcttgctttggaattgacagaagagaaacgcagctcgtgaatgtgtgtccgaggaacaaagagggcaagtctttggtcccttgcagtttgaggctctcgcttaggctcattggaggactctgacactcacttaatgcaacgcatactgcatcctgatctgcgtgctcctgagtttacacgtcatcttgattgctcaggatacatgtatctaaagcgcatgattctt

SEQ ID NO: 83573 - DNA, 2014 bp, Glycine max
  Clone ID: PAT_MRT3847_46482C.1
gtggtgttgtgtggattgtgaaaggttgtgatttttgttggttattctcaaaagggttgtgacggatccttcaagggaagaaagtgggtgctcgagtggtgtggagtgcattcttggcattctaagggcccttaagatggggtcctgcttctctgcggaaagcaggagccctcaccccaattcaccaaattcatcatctttcaggaagagcaagagcaactccaagaagaggcttggatcaagaacctcttcatttgagtattggaggaatgagcctctacataggatccctgggaggatcttcctcaatggctcatcccaagttgcatccttgttcactcaacaagggaagaaggctaccaaccaggatgccatggttgtttgggagaacttttgttctagacaagatactattttctgtggagtttttgatggccacggtccatatggtcacatggttgcgaaaagagtgagggattctcttcctctaaaactgaatgtccattgggaacaaagtgcatctggtgaagaagtcctcaaggagattagcgttaatactgcaggaagcatgaattcagaagaggctgcatttgcatctgctgatgatgaatccagggtatctgttgatgccgaggaaacagaaaaacacccagaaatctttcagacacttaaagattcctttttgaaggcattcaaagttatggatagagaactgaagatgcaccaaagtattgattgcttctgtagtgggacaacagcagtaactctggttaagcagggccgtgatcttattattggaaatgttggtgactctagagctgttctgggtacaagagagaaagacaattctcttgttgccatccagttaactgtggatctaaagcccaatcttccagctgaagaagagagaattcgcaaatgtaaaggacgtgtttttgctcttcaggatgaacctgaagttgctcgagtctggttgccaaacaatgactcacctggccttgccatggcaagggcatttggagatttttgtcttaaagattttggcctgatatctgttcccgaagtgtcatacagacgactcaccgagaaggacgaatttgttgtcatggcaacagatgggatttgggatgttctctcaaacaaagaagtggtggacattgtggcagccgcgccaaggcgtgccttggctgcacgggcgctggttgagtcagcggttcgctcatggaggtacaagtatccaacctccaaagtggatgactgtgctgtggtttgcctctttctggactcggactcggactcccacaaagtgtgtagtgcttccaatgtcatcaagtccaaggaacaacctagttcaggtatccaagtccacaatggcgacaacggagatgttcctgcacctactggtctggcaaggtcaggaacttgcagggaaaacaatgaagataacaacaacaaccacaaccacaaccataaggaagaggaaatagatactgatgcagaaatagagtggtctgctctcgaaggagtgtcgcgtgtgaacacattactaaacctcccaaggtttgaacctgacaacaaagacaaggggatgagaaaacacaaatgaaaaaaaaatggttcaaccaagaaatgttgagttgagttaaagatgttcttttactttatatttgtttattttgttttgtttcccataatcattatatagatacataccctttttctttttttttttcttttttttgttctttttgcacaattttcttttctatttatatattcatgttcccacccattgatgtttttgtttggactatagagaggatggctgttttgggctcttttagtgtgtctggaaatctgtccttcctcacgtgtgcttgaagattttgtaaaatcaaactcgtcatagtgcatacctaataattttattttttttaataaagtcataaatggcttatttatttagttaaaaaaaaaaaaaaaaaaaaaaaaaaaaagaaattaaaaaaaaaaa

SEQ ID NO: 83574 - DNA, 272 bp, Glycine max
  Clone ID: PAT_MRT3847_46483C.1
gatttcgccatgttggccaggctggtctcaaactcctgacctcaagtgatctgccccccttggcttcccaaagtgctgggattgcagacgtgagtcactgcgcccagccattccatgtctcttaagtctcagaatctcccctagctccctccaggtgtctgcagtggttgtcccctcaaagctgtcccacaccctcctccgaggaccctttgtgtatctcctccagctaccgcagagcccacaaacccaggcatccatcaaagtccctcatt

SEQ ID NO: 83575 - DNA, 507 bp, Glycine max
  Clone ID: PAT_MRT3847_46484C.1
aaaaaaaaattggtttctttaccctattttaaaagggactttaaggaaaaaatttctttttcccaagtcaacatggcttaacctacaattggaccaaacccaaaagggcttcacctgattggcggttgatcctaccaaacccaccccagcaaattcctccagactaaaaaaaaaaccctacccaggtcaaacaaaacctttcctttacctgcaacttttaggaaaaaaagcaaaataccggggcccaacattgatggcaaaggagggaacttggttaatgtaaatcagggccgaccttttttgttactgaaaaagggccccttgaatggctggataggctctgccctaccaggggggatcttcacacttttaccatggaaccatttttcgcagatgtcccagcaaatccaaatttcttcagggccttagggctcaccacatgccccacacagggcctctccaggtccataataatctggaccgcccagttcttcatcctaatctttg

SEQ ID NO: 83576 - DNA, 1133 bp, Glycine max
  Clone ID: PAT_MRT3847_46485C.1
cttgcattgatggcagccgctatgttggggagttcaaatggggagtcaaacatggacttggacagtaccatttcagaaatggggacatatatgctggtgaatattttgcagacaagatgcatggttttggagtgtatcaatttcagaatggtcatcggtatgagggggcatggcatgaaggaagaagacaaggactgggaatgtacactttcagaaacggggaaacacaatgtggtcattggcagaatgggattcttgatgatcctaaaagacataatagtcctactgggtctccatgtgctgtggaccatgccaaggttttcaatgcagtacaggacgcacattctgctgctgagaaagcttacaatatggcaaaggtggatgacggggtgaataaagtagtggctgcagctaataaagcagcaaacacagccagagatgcagctgtaaaggctgtgcaaaataggatgcaccataataatagtaataataaatgataataacccatttcctcagtgtcatcctccatcataagtttgcatacacagaacattattagatatgcgaaagcaaaggaagcagaatgaatgcaaggaaggagaatcacaaagatgtgcaaaaaaatggtatcttctctgaagtttgatagctaagttatgtacatttttcttctcctttccacttgagaggtgtttccatttcttgtatctttgtatagctacgaggtgcctgcttggaaccactttctgtcattgaactcaatggcagattgtggagcaagtaggttcctcacttttggtggatgcttttatgtgtataagtaagaagagcaagaatagtagagtataaagttacaccgtgtaaggcaaaaagtgccacaaagatggacaaaggatagcgtaggatttacatgttggcttcttgccaagccataaacgtgttggtgtatctatccatctgggtgcatttatcaagttgcccaccagctagtgctgtatgtgttgtttggtgaagagttaaagatttgggaagctcaatttcgttatcatttgtacgatcagacttacacgtcaaacaacgatgtaaagtttcattaatttacaatgcatgcttttctttcaacagctactatc

SEQ ID NO: 83577 - DNA, 372 bp, Glycine max
  Clone ID: PAT_MRT3847_46486C.1
acggctgcaagaaacagacagaagggaatgtactgtccaacatacatagttgcaccaacctacaagtggtgtcgttcctcttctctaagagtgaggctcaaattaccctctctacttcactcaaagctcacacaatcacgcacaccttattcgtcaatctcgcttcaaaaccctacctaccgtcctgttatctgtatacacagccagtcacccaccgatccacctaacaagcattcctttaacaacagaaactcttaaatacaacctccaacagaacaatcagagtgactctctcactgtatattccaactacattcccaatcattatgaatatactacggtctgtaaaacattgtaacatcgatccacttt

SEQ ID NO: 83578 - DNA, 244 bp, Glycine max
  Clone ID: PAT_MRT3847_46487C.1
gatacattcccaaagcaaagtttctccctaaaaaacgaaagccttctcaattcttgcaagttgcaacccatcaaccatggcctcaggcagacccttcatcactgctttccttcttcctgtgaccttctcaagcatgagtttgagcctagcatcatctcgtcacctcttgcaaacaaccacatctccaaatttgcctggtaatcccactttgggcaacccatcatcactgtcaccttttgccatc

SEQ ID NO: 83579 - DNA, 934 bp, Glycine max
  unsure (1)..(934): unsure at all n locations
  Clone ID: PAT_MRT3847_46488C.1
agctcggaattcggctcgagctattcctgataaagcaaggatgaactccatggcttcattgtcatcacatgtgttcttcaagcagattgttgtccaactactctccctggcagaagaaagagagacaattttgctagacaatgtagacatggatgaaatggacaaaaatggtgcactgttatttgtaggggaaatgttttctcgcatttgtcgccgtggctctgctgatctcctaactagtgaattaattccagaagtttttaggcttgtcaacagcctcttatcatcacataatgattcagttactaatgaattgtttgagtcaaaaccagacacggtattttggtcgagaataatggaaaccatcagtgatccttataccgtggaaagaatctctgagctgattttgcataagttagctactcaagatgctgatgatgttcaagcgtattgggtgttgtggttgttattccatcgaatttttaagcttcagccttctgtcaggtctatgtttgttgacaaattcctgctatggaaagtattccctattagctgcctgaaatggatccttcaatttgctgtgcatgaatgcccacctggtacctcattattaggacataatcgccctgagcttttgaatactgtccaacatctgcttgcagtatggtnnaagaaagaatttgtgcaaacagcacctattgagcaacaagcttatatatctgctgnnnnaggcctttcnnnagagacaatgtataaggaggaattggatgggatgaagaatgccatgcactttattcttcaaggagttagctgtaattatcattnngtnnattgttgggnnnnntgataataaggnnngaagcatggattatgtgggtggaactattgcatgatgcctacccttaatccttcagaacactttaaataactggcc

SEQ ID NO: 83580 - DNA, 215 bp, Glycine max
  Clone ID: PAT_MRT3847_46489C.1
tggtacagtctttcatcaaaaatattgatactattggtggttggttacaatcacaaaatactaatttgcaaaaagatgacttcgttgatactgaatatgatcgttggacgattacagaaatcgacaatcatcaaattatttgggtcaacttaaattatgaatttaatagtggacgtccttctgttaatgaagaacaagaagatgacgaacgtgat

SEQ ID NO: 83581 - DNA, 388 bp, Glycine max
  unsure (1)..(388): unsure at all n locations
  Clone ID: PAT_MRT3847_4648C.1
cccttctcgcgcccgataaccgaataccanaggggggggggtactaaacatgatttccaggttttaccccccgagcaccactaccaatggtgattttgcccaaggaaaacaactcgcaagggttaaagccaatgtagcatgtgctgctgctggcttgacatcaagctacactccaactccattgtcggaaccaggcttgcaaaaagacagagggctaaccgcggaatatttaggacggagggcccacgtagcacataacgtgaacccgccccaagagaaagatcagctggagggcaagctgcccgaagatatgaaatagcgcccctagactggaaaaaggttcccttactaaagcacaatctgtcagtggaaaaaccctcaaaaacag

SEQ ID NO: 83582 - DNA, 325 bp, Glycine max
  Clone ID: PAT_MRT3847_46490C.1
aactaatacaacaaaccacatctcatcatactattactaaacgtacacaaagcatgtgccgttttaaatggctatgggatcccaatccaagcctgacaagatcgttaaaaactacaccatacggaaacaaagttgcaaggttgatcacacataaaaaccgaatcactcagggctccatagcacacccacgatacaaacccaaccaccccaagtactacatccaattcaaaaactagccccagacctatctaacctcataccaaccaactgacaaccgatgggacactgatcacatttactcaaacacaaaaacctccttcaaaaa

SEQ ID NO: 83583 - DNA, 244 bp, Glycine max
  unsure (1)..(244): unsure at all n locations
  Clone ID: PAT_MRT3847_46491C.1
cnttaactgattcggtccttgatcgaagattgttttcgcgcgatagcactcggcttcacgtcggtattcattctcctcactatgatcaacctggcgtacccggtgtcgcagccggctcaacaggccatgtgggtgattggtatcgcacaggtggcactgctgatcgtgcgcacggtgtaccacattgcgcacatctttattgcgcgcaacttgcggcagaacgagccacacacagaaaaattac

SEQ ID NO: 83584 - DNA, 599 bp, Glycine max
  unsure (1)..(599): unsure at all n locations
  Clone ID: PAT_MRT3847_46492C.1
cggctgcgagaagacgacagaaggggacagactatgaaaccatctatctcccaatttctctctctaaaaccgccgtctccttctcagaccagccgctgcagcattttctctgcgactctcgctcggaccagcacttggatgtgactggtttcggcatcggttagatcgaccatggcggaggtttccggcgagggagtagcggaggcgacggtgtccacgccggcgccgccgttggcggtgtctggatctttcaaggaagggaagagctcttcgcggaggcgcgcgcattcgatgaggccgagcctcgacgcggacgagttcatgaacctgttgcacggttcggatccggtgaaggtggagcttaatcgcttggagaatgaagtgagagataaggacagagaattatcagaagcgcaggcagagatcaaagccttgaggctctccgaacgactcagagaaaaggccgttgaagagcttactgaagaattgtcaagggttgaggggaagctgaaattaacagaatctcttctagaaagcaaaaatcttgaataagaaatcantgatgaaaaaaagctcgaggcagctcagttgcagctgag

SEQ ID NO: 83585 - DNA, 2714 bp, Glycine max
  unsure (1)..(2714): unsure at all n locations
  Clone ID: PAT_MRT3847_46493C.1
ggctcgagcagtattggtctgcttaactataacatccagctatacactgattactcagatttatttaatctcacgctcactctcactgcaaaaacaacacacagcaacaatttaataaataaataaataaaagtggaaaagaagaaaagcccagatttataatcacaatctagagagagaaacaagcagactatgaaaccttctatctccgaatttctctctctaaaaccaccgtctcgttctcagagcagctgcactttctctccgactctcgctcggaggagcacttggatgtgagtggtttccacatcggttagatcggccatggcggaggtttccggcgaggggggagcagaggcgacggtggccacgccggtgctgccgttggcggtgtctggatcgttcaaggaagggaagagctcgtcgcggaggcgcgcgcattcgatgaggccgagcctcgacgcggacgagttcatgaacctgttgcacggttcggatccggtgaaggtggagctcaatcggttggagaatgaagtgagagataaggacagagaattatcagaagcgcaggcggagatcaaagccttgaggctctccgaacgactcagagaaaaggccgttgaagagcttactgaagaattgtcaagggttgaggggaagctgaaattaacagaatctcttctagaaagcaaaaatcttgaaataaagaaaattaatgatgaaaagaaagcatcgatggcagctcagtttgcagctgaagccactcttcgaagggtccatgctgctcagaaggatgatgacatgcctcctatagaggccattcttgctcctctggaggctgaacttaagcttgcgcggcaagagatagctaaacttcaagatgataacaaagctttagatcgtctcaccaaatctaaagaagcagcacttattgaagctgagaagactgtacagattgccttggctaaggcctccatggtggatgatctccaaaataaaaatcaagagctaattaaacagattgagatttgccaggaagaaaataaaattttggacaaaatgcatagactgaaggtggcagaggttgaaaagcttacccaaaccgtgagagaactagaagaggctgtccttgcaggtggtgcagctgcaaatgctgtgagggattatcaacggaaatttcaagaaatgaatgaagaaagaaaaactctagaccgggagttggctcgtgccaaggtaacagcaaacagagtagctgttgtggttgcaaatgaatggaaagatgctaatgacaaagtgatgcctgtcaaacaatggcttgaagaacgacgattcttgcagggagaaatgcagcaacttcgggacaagcttgctataactgagcgaactgcaaagtctgaagcacagttaaaagaaaaatatcaattaaggcttaaagtgctacaggagagtttgagagaaacttctaacagtattaatcgcggcacctcagagggaagatgtgttagcaatgggccttctcgacgtcaatccctaggtggagctgataacatctcaaaactaacatctaatgggtttttgaagagatcaccgtccactcaaattaggtcttctgtgtcttcaagcacagttttgaagcatgctaaaggcacatctaaatcatttgatggtggtacaaggtcattagaaaggagtaaaattcttctaaatggaaaacctccaagttactcattcaaccaatctgccgaaggaaccaaagtcagggaagaaaatgataaatggaaaggaaattcagatgataaaccaaatgacttcccaacagtggatacagacgatagtgatgcaggagttttgtatgatttgctgcaggaagatgccttagccttgaggaaagatggtgatgagaaagatcaaaacctaaaagataaagaatgatgccattgaagtagtggcaaagcatgtggggaaaaaagacgagagccgaggaaagtggtgcaacaataaaaagaagagtgtaagcattgctgaacaacaacgtatctctgaaacaaatgtgaaaaggggtggattaacgagcaaaccgtcacagtaatgtaaaggtgccctgggcgcattggacagcaacagcttcataggcatcattcatgtggcatggggagtattaacacgcagcacgcaatgtcaatcttctcttgaagaggcattaaggagtgggttttcaaagcatcgttcatctgcccttctttgtttactttattttttcttttgtcttttcccccccaattgattataagattgtaactggcattccgacaaccattatttatgttattggccatggattgatggtgagaagagcgtttaaggaatcggtatgcgcctgacagactttgtatttcctgcttagagagagatcggctaagaagccaggcaaaggaagaaaattaacttggagctaaccttcagcttttctttgagtggctgtgtggttgtataggtagccgctttatatcccccctttctcctttttgcagttgatatttgtaatacgcagatagtgtgattgtgtcctctcatctcaggtttgttaatatctttgtaatcagatcaagatctaaacttatttggttgtgttatacattaatagtttcgagttgatttataagttagaaaaaaaaaaaaaaaaaaaaaaaaaaaaaagcggccgctntagagga

SEQ ID NO: 83586 - DNA, 265 bp, Glycine max
  unsure (1)..(265): unsure at all n locations
  Clone ID: PAT_MRT3847_46494C.1
ctccgttttggctctcaccaaccacagattnccccttctctgtgtcttcctgcgcgtnaccaaatttgattttancttttctctctttatattcttctcttcaaattctgatactttctacgccggccactcagtttctctttcgtttntctttntctnttctntctttctttcgttcacttatcctatnagtattatttcccagtcggtttctacattcnctctggtttgttcctnccaccgactgctagnntncgttaanacc

SEQ ID NO: 83587 - DNA, 1800 bp, Glycine max
  unsure (1)..(1800): unsure at all n locations
  Clone ID: PAT_MRT3847_46495C.1
ctgcgctcatcttcgctctgagaggttgctggttcttcaggttggttgcggtaagcgtgcacaaacttatctatttattaatactatattagtatagtagtaattcatgtactagtatttgcttatcattatcgatcttttgctgtttcaagtgccctataacctgatccttatctactcgtgtttttttctactatttcttttccatttatttctgatactgaaagcgtgactttttatagtactttccttgatggtgttttgaacacgaaatccaaatggaggtcttcgaggcacgcccttcttacgctcttttctcaattctcactattcatactttaacggaaaatctccttttgggatgaagtttcactaaacccttgtttttttctctttgcctttctctccttcttctgctccttgtcgacagtgtaagatcttttctcgccctcatttttggtccacaaattgtgctccacgcactcattaggttaagagaatccagcataaaagggcaagtcatgggttttaaatttatttatttttaaagtgttgaatttgaagggtcagaatgagatgtttcatatatatcttggatctgtctccttgaatgccattatgtttgtagccttcatttgaggtaaaggaaaatcttgggagagatgattaagcagctagatatggcaagatttggtctttccctttgggcagctatataagcgtttgtttgctaccgtgattaaagggaattcaagcaacaacctttcttatacagtgcttaatttgtaacatagattccatcagcacagaactttgtcgatgttacgaataactgctcactgaagatcttgaagcactactataatcactcaggttaattgcaagggaaacaaaatggaacgccaactctagcatacataggatggtggtgttgagaggtgaagcaagtacctgccaatgtaataatggtagtgtttaggtacctctgatgatgctgatgataccactgagcaggttgtgatgcctgtatgtactgcctgagtgataagcgattgatatggagaacgtagctttgggaagtaaatgaaagatggattacatgttataaaagcttatacctggtggtggggaaaatgcgaatatagttttacagaagatgcatactcaaacgcttctatttcaactgatcacattatgacagtgaatccgttgtgaagttcccagcttcatacatctaaaaaatgaggactgagttgcacaaatgtcacaataacacagtttgcagttttggccaggattctttaattccttacacaatgccattaagccctataatagcacactatcaagtttggtggctttttattctaccaattggcttgctcaaatagttttattttattataattatttgttagagcctgtctgatgcgtgtatatatatattgaacttattgaaatataccattatctctaagcatatattgaacttcttctgagcaggttgtgatgcctgtctgatgcgtgtatatatatattgaacttattgaaacatatgtataaagaaaccaatcttaagataaaaactagtatatcaataatctttaccttcaggtctttaacttcttctgtcttggatataatttcttctaacaattgtttgaatttgatttctctctggtacacgcatgagtgcatacacacataaacacacattttgtattacctagaatctaaacatacattntactttgcccaaccttactatgatcaaggagatcttattaatgatgagtagat

SEQ ID NO: 83588 - DNA, 197 bp, Glycine max
  Clone ID: PAT_MRT3847_46496C.1
cacaagggggtgtgagtgaacaagcagatggaataacgggattacatctgcagatcttcagttaaaactctgaaaggtaatactaaaatcctcttcgtcgagacaattgaaacaatccaaactgtcattgcaacgattccaaacactgaatgacttacgtccgatcactaaccttcacatacctccgtcaatctgtt

SEQ ID NO: 83589 - DNA, 497 bp, Glycine max
  Clone ID: PAT_MRT3847_46497C.1
gctcgaattcgctcgaggagtttcctgtaaatgttactgacaatgagttgatcaataaactttcttcagaaaatgaacatcttaaggaactgattaattcactggaaaagaaaactatacaggagtttcctgttaatgttactgacaatgaggtgagcagtcagctcattacagaaaatgaacatcttaaggatcaggttaattcattggaaagaaaaattgatgaagctgagaggaaatatgaagaaagtaacagggtcagtgacgagcgcatgaatcaaattatatagacagaatcaaagatgattgagataaagacaaatgtgcataggcttgaagaaaaactatctgatatggaaactgaaaaccaagttttgcggcagcaagccttgttgagttcatcatccaagagaatgtcaggaaagcttgcacctgctacaactccgactttggaaaatggtcatcaggcatcacagggttctgtccctgcgaaaaca

SEQ ID NO: 83590 - DNA, 1796 bp, Glycine max
  Clone ID: PAT_MRT3847_46498C.1
cggacgcgtgggcggacgcgtgggttttttttttttttttttttttttttattctatttcttttccatttatttctatatctaatactgaaagcgtgactttttatggtactttccttgatggtgttttgaactcgaaatccaaatggaggttttcgaggtaccacatcttacggtctttctcaattctcactattcatactttaacggaaaaactcctgttggatgaagtttcaccaaacccttgttctttttttctttttctctttgcctttctctccttctgctccttggcgaccgtgtagatcttttctcgccctcagttttggtccacaatttgtgctccacgcacttatcaggttcagataatccagcataaaaggacaagtcatgggttttaaatttatttttaaagtgttgaatttgaagggtcaaaatgagagatgttgcatatatcttggatctgtctccttgaatgccattttgtttgtagccttcaattgaggtaaaggaaaatcttgggagagttgattaagcagctagatatggcaagatttggtctttccctttgggcagctatataagcgtttgtttgctaccgtgattaaagggaattcaagcaacaacctttcttatacagattccatcagcacagaactttgtcgatgttacgaataactgctcactgaagatcttgaagcactactataatcactcaggttaattgcaagggaaacaaaatggaacgccaactgtagcatacataggatggtggtgtagagaggtgaaacaagtacctgccaatgtaatagtggtagtgtttaggtacctctgatgatgctgacgataccactgagcaggttgtgatgcctgtatgtactgccagcgattgatatggagaattgatatggagatttggaaactgaatgaaagatggattacatgttaagcataatacctggtggtggggaaaatgcgaatatacagaagatgcatactcaaacgcttctatttcaactgatcacattatgacagtgaatccgttgtgaagttcccagctctcatacatctaaaaaatgaggactgagttgcacaaatgtcacaataacacagtttgcagttttggccaggattctttaattccttacacaatgccattaagccctataatagcacactatcaagtttggtggcttgcatttcaatgtcaatatagtaagaggctgtgctcaaaataaagaatatgaaatcatggttcatactttgtagcaactcaagtttgtgaagtgtctgatgagtgattgcttagtttttagaagtaatgatcttaacttgaatatatggttggataagggagatctcagctaaagatgttgaagtaagattgatgaatgaacttgtcatccctcgtccctagctagaagacaggccacaagctggagtggttggagacatacacatcgttttgataacagactaacaggatgtactgaaagtgtttgtggaaaaaaaaaaaaaaagactggtcgagctagtgatgtactagtgttatatttggccttgtgagactagggagtaacgagaggggtcaaaatcattctacattttttatcttattgggagtgaaggtggtaatttacttagttgaaatgtacatatctccagatgatatctgaaccagacctagatattgttagatattttttatttttcaaaatggtcccttaaatagtattttcttataacaaaatataaatattctgtcattaagattggtttaaaacccggaactcttgg

SEQ ID NO: 83591 - DNA, 466 bp, Glycine max
  Clone ID: PAT_MRT3847_46499C.1
tacggctgcgagaagacgacagaaggggggagcagatgaagttatgagtgatgatgatattgacgggaaaacatgtcctatcttatgtttctttccctttgagttgagaattccttgttgatcactcactcacacccatctgtttcttgcttcccaacatcatggacttggacttcaggagggcttcaaccattcattccaccaatcatcacttctcttctctccaaccttctcgccttcactctgatgatgatgatgatgctcgatctcttcttcaatgtccttcctgtgattttgagattgatttttcgtcagcccatacccatttggaagagatgcactgctatgacccaaaaaatctgctatgtcctgtgtgtgatgaaacattaggggaggaagcaatctgggttgcacagaattcaagtgcacaaaagagagcttggaagtctgacaaatctagcattag

SEQ ID NO: 83592 - DNA, 127 bp, Glycine max
  Clone ID: PAT_MRT3847_4649C.1
gacactgcattcttttcccttttcaaggattaaaccttatttgctggaaatatgcgcgggtacttgattcgcgatgggatttgtcgaaaaaatttacattgaaaggggacggacacgggaaccccct

SEQ ID NO: 83593 - DNA, 1500 bp, Glycine max
  Clone ID: PAT_MRT3847_464C.1
aagggtttgagggtgcgaaagaggtgtgatatatcgcgggaggcaccgccctgtataaattaaccatacaatattaaaaaaaactcccccaaaacaattctttgtgtttctctcttcaccttcgtctttctttcatttcaattctttgtggttcagaaactctgtacagctctcccatcacttctgtgtttctctcttcacctacactttcctctttcaattcaattcaattcttctttttggttcagaaactctgtacagttaatcaaaccctacctcacctcaccggttttagctgttaatttaatatatagatagaaatccaaggaagaagatgaagcagtttgccgtccaaaacgtcgtcgttccatcccacgatgagattagcgttgtttgccccaagccccgccgcctcggcctcttcaacttccccgtcaacgatcccactgttagacccttccgctggcatctcagttaccatgttgagccatgtgattcaaactcatctggttcaaatcctctggacaacttactcaccaaggatggtgattttgatgtagagcaatcgtggccagtggtagccccgtcgcccctatttttcagcgggtcgccgccgagcagagcagctaaccctttgattcaggatgctcgatttggggatgagaatttttccccgctctccccaccgtcgtgggtggtggtaccggctgtgtcgggtctgccaccgtctccctcttcctctgcaaggaagggaggatgtgtccgagccaattttggtaacaatcctgttgtgagaattgagggctttgattgccttgacagggacaggcgaaattgcagcatccctgctctggcttagaacccctcctcacacaccacacgtctctttgatattaggattcagttcaacataaacataaccacagaagatgagccttcatacaataataccctacagcaaatagagtaatttttggatgcttgagtctagaggaagagataaaattttatcttgtgtctgtttgtaaatatgttcagttaatcgccagtgcatgtaaatgtcaatagtgtgtcttgtgtagagaaatattgtctagcctctccaaataatgatagagggttgatttgggtgttaaatttcgcccgggccctatgtttagtagtgtctaaggaaataccattctcttttttgtaagtagaagtctttagaggatggagaatatttcattttgattttcttttatgattggtccttgaattgtaactagtagcggcttaagaagcatttaatctgtacacaaaggaatggtttgtttgggaattctcagttcatgggtcttcttttgaaaagtgaaaagcatcagcaaagttttactgcgttcccctcccgggcccccgaacttactactccttccgggaggggcatctaagcttgcttgtgcttagccaatagcactttcctttccgaagtaaattccaattccccttccctttcaaaaa

SEQ ID NO: 83594 - DNA, 167 bp, Glycine max
  unsure (1)..(167): unsure at all n locations
  Clone ID: PAT_MRT3847_46500C.1
ncgaannaaaangaacatgnacgnaancncggatcgcgnntncagctcgaaggnnnnancnanantnccncgnacaacaacctcagaatccagaggcttcacgaggtggtcgtgtttgaggaagagaacggaagaggaagattcttccgagacaacaagctcttccg

SEQ ID NO: 83595 - DNA, 262 bp, Glycine max
  Clone ID: PAT_MRT3847_46501C.1
ctctctttctctctttaatcttaaaccccgttacgacgtcgtacggcttgggctctttctccctctacccgaaccgaacaacaatcgtgaaaaaaaaaaaacagaataccttcattctctctctctcttactttctctattgcaacgcgttttattctctctcttataatatatttctccactcgcgctctcttactcgccggcgattgtttcagatcaatcgccgacgccgtccaattcactcgctctccgtggcgttcag

SEQ ID NO: 83596 - DNA, 301 bp, Glycine max
  Clone ID: PAT_MRT3847_46502C.1
gggggataacacatgcacctttcacttgcattactaccatcactttcatttattgctttaaccgatctaactctgacctgtgttttcgatcactgcttgggagaggtttaaaacaataattatttacaatattttttagccaaatctaactatacctcgtatgctattgactacattgtgtcccatgctacttgaattattcaccattggaactgactattggtgatttatatctcctaagcttgtaatcacatcaccaccatcttattttttactgactcaaaaccttgataccttactt

SEQ ID NO: 83597 - DNA, 216 bp, Glycine max
  unsure (1)..(216): unsure at all n locations
  Clone ID: PAT_MRT3847_46503C.1
ctcgagccgaatcggctcgagatagccagcatcagcattcagtaacatcaatatcatcgacaacagacaacaatttcgggaatccgctggctatgactgcagttgtggtcgtcccattgggccttctcttcttcgcttccggcctcatcgttaacctcattcaggcgatatgctacgtggttgtgcggncggtgtcgaaaaatctgtaccggcggg

SEQ ID NO: 83598 - DNA, 316 bp, Glycine max
  Clone ID: PAT_MRT3847_46504C.1
gacaaggtgcctttgataagtgacatattaaaatccatacttgttccaagaagtgacgaaagactgcgagacagggagaggtctttgtcgaggtcgcaatctagcatcaaatgctcttgttactctagatccctttattccacacccccaaatctatatgataaattgtctcctcaacctttttgcattgtatacatccatctctgtattcctccaatttgttttagttttttatagatatgccattccttttttaagctctttgaagataggtttttttctctatagttctagttgatcaccttatttctttttc

SEQ ID NO: 83599 - DNA, 769 bp, Glycine max
  Clone ID: PAT_MRT3847_46505C.1
aattcgccacgccgaagcacaaacacaacaatcgagcttgcaacttcacccaagtctcaaacaaccttttaaacctcatcaaacatgtctctgattccatcattgctaagcaacagaaacatcatggaccccttctccaccaacatctgggcaccctctgactccgacagcgaggtttccgccttcgtgaacgcacgtgtggactggaaggaaaccccggagtcgcacgtgttcaaggcggacttgccggggctgaagaaggaggaggtgaaggtggaggtggaggaagggcgcgtgttgaacatcagcggagagaggagcgtcgagaaagaggacaagaatgagaagtggcaccgcgtcgaaaggggtcgtggaaagttccagaggaagttctggttgcctgaggatgccaaagttgatgaagtgaaggcctctatggagaatggagtgctcactgttattgttcctaaggtgccggacaagaagcctgaggtaaagaccattgagatcagtggttgaataacttcaattgagaccattgagatcatatgatacttgaacctcttgaataggagttaattgttagaaagaatggcaaaataaaattcaataatcgatgtataaaaatcgtattcgttttcttaagtgttaatgttgtggtggttgtaaatcttgtattaatttttacttgtgaggtaattcactagtttcttgtaataaaacataaagggagaaattactgtttaaaaaaaaaaaaaaaaaaaaaacc

SEQ ID NO: 83600 - DNA, 556 bp, Glycine max
  Clone ID: PAT_MRT3847_46506C.1
gccaatccgggtggtaacattgccaggtaccatggtgcagagcgcaccaagcatgaattgaatgtggcagttgaggatttccactaccaatgtaagataacgcttagaggaatatatctcagtttgggaaaaatccatggaacgtgtacagctgcctgttctcgacatctatgacactttcgattactgtgattgaatatggtttgttaaaagacacttggatcctcagagtgtgttgatagaggatcgctctacattgctcataacttgaataattcgcattggatagagtcatttggaagtgaaatgtttatgcttctgtatactcaataactgtgctctaaattgtgaaaacagtagcttctaaaatatcgctaggagctagtggatattcctcgccatatgatgtattggcagctggatccttatcttcagaagatgtcctgaacgagactatttgcatgaccactctggaatggttcaatattgtaacatatactaaatcctgagtaccctgaaggaagagatctgatctgaacaaacttgattaaactga

SEQ ID NO: 83601 - DNA, 399 bp, Glycine max
  Clone ID: PAT_MRT3847_46507C.1
gtaacgggataagcttagttgtcaagttggaatcaacccatactccatggaatggactggttgggccaatacattactgcgtaagggcaacaatattctgtgatgcgattattcctcttttgatggattgattaccatgcaagatatgagcaagatggcagatatgataaacagcttttgcggtggagatgaaaaattgatgcttgaaaggacacacctgctgttggcttgttgttcaaggatggtattttgttaaaaagatgttcggagagtataatgtggaatctcttctggatttccgctcacagaatatttgcaatagcattcttaatgagatgtctatttgatatagctatgaaaaataactgcgccaggcttaagctccaagtatgtttatac

SEQ ID NO: 83602 - DNA, 267 bp, Glycine max
  unsure (1)..(267): unsure at all n locations
  Clone ID: PAT_MRT3847_46508C.1
gnnaatgaacacnaaaaaaaaaatacaaaattaggaatcctcaaacttaagaacaacattctattgtggaggcaatgggttgaaatgaaaaccgaggaccgcatgcatgttgctgctgctgcaaagaagtactcctgctagggatagtgaacataaggtgtacccttgtttcgaggcctgttgaatgatggtggcaccggtcgagctacctcaaaactagaagctggtagtttaggtggacgcgcagaacgacattgccgctcgtgc

SEQ ID NO: 83603 - DNA, 589 bp, Glycine max
  Clone ID: PAT_MRT3847_46509C.1
ccttgagccacttagctttaaagatttgcagagcctggagaagcaactagacataacgctcgcactaactcgacagcaccaagtaatgtcactaaatgagtattcactaatgcattttaatatataaatgatctgattgaaaccggtaaaacaccgtagtgttcttaataaacaaaaaccttaaaacactctagggccaaaatattttcttgtatgttcaaattgatgtttatgtaaattcagataatgcgttagtttttttgttttgtgtttcattttttctggttataaatacgtaatctgtaattgtcttgattgattatccttcaattttttatggcacaaatatgttttttctctataaaaatattttgtttttgtcctcatccaaaatcttatatgtttctttttagtgtctgcgattaagattttctattaaatgataacgtggtcaacaaagattggaaaatagacttgatatttcctaagagattaaaatgaaaatcttttaaagtaagagagatgcataaaataaattataattttaaaaagattaaaacaattaagtgaataagttggatgtcacgtc

SEQ ID NO: 83604 - DNA, 304 bp, Glycine max
  Clone ID: PAT_MRT3847_4650C.1
ccttgagcggcgcatttgtagtcccggaaagatgctaagaaacggctgatctaatatatcgtgtgttattatctttttatgatcttattataacaatgccgtttggctgttaatgattcttcaaactttcatgcattgtgtaacaaagacctgtcccatctaggcttaattatctttaaagcctacatgaagagcgaaaaacgaataaacgcctacgacgctggacccatcgcaccacagcgtcttcgtggtgagccaacaattccagctgaaagagagccctgagcgaatgtcgctgcggagt

SEQ ID NO: 83605 - DNA, 298 bp, Glycine max
  Clone ID: PAT_MRT3847_46510C.1
ggcctcttcagtgatggcatctgtggccctcaaacctgcccctttcactgttgagaagtcctcagatagaggccttccctccctctcaaggaactcctcttcattcatagttgtggccagtggtggcaagaagataaaactgacaagccttagtgaattaagtggggcaagccttagaaggaaagaatagatgcatccggcaagaatcgaagggaaagggctttaccagtttgtgacaaatacggggctatgtcgatggttacaggctatctactacaccaaggactggtctccaccg

SEQ ID NO: 83606 - DNA, 266 bp, Glycine max
  Clone ID: PAT_MRT3847_46511C.1
taggtacttcttttagaagacgacatataatttataaacagcccgtttttatttgtatgaaactcccaacacaattttgtggtctttttgccattcttatctaaagcttgtgtctttctgcttcgattgcatcttctgctgcgtaaaattgattcttttctgattcttccttatatttcatctctgaaactagttctaatactttatctacatatctctatattcttattcaacgtttactttttatcccacttctcacttttcta

SEQ ID NO: 83607 - DNA, 365 bp, Glycine max
  Clone ID: PAT_MRT3847_46512C.1
ggcaaaccaggagaggatttatttgtttttcacattctattatacaggacattccacaactattagggggattcttttacactactacacatgacacatttattatcatatgttacatacaagaccatttaacaggctatttccccccacaaggtttattactcaagggattacaaattacttgggaaggcttgagcacatgatcaagggatttcaatgatggggaagaaaggaacataatagctacttggtggcaattcccactttggaggcagagggagatccacaattttggatgaaccaacctttttcccagacttgcattttggggttagggggcatgatgtcctgaaactaaagggagt

SEQ ID NO: 83608 - DNA, 340 bp, Glycine max
  Clone ID: PAT_MRT3847_46513C.1
acgagatgtgcctgacactgggtctctctctcttgtggtgcttggcgcctctctggatcttgctctgaacctgacatttcctctgcttttccatctataccctcacggattcttaccctccgctgtagtgcacatttttggctatgcgcggactcaaatatctgttgatgccttgtgagaccctttgcgtgtctatcttgttccccactcacgtgcttctctccccctgttggaggatgtttacacctgtttacagctgatcgcatatgtatgtggctctcttgattctgtggatgggtttctcttgttgcataaagagatttctcagcgtgagtatatg

SEQ ID NO: 83609 - DNA, 606 bp, Glycine max
  Clone ID: PAT_MRT3847_46514C.1
aaaccattaaagacagttgtatcacttcattttatggaagaatatccaaagcctaatattttcagaataaacagattacacattgccaaaattaaaataaaaataaaatacacccattacaacaaaacagcaatattaaacaagtgcagcagagctcagcgggataagtgctctcttaactctttctacagctgcctgtagggtagtaagggattctgcataagagatgcggatgcaagtgtcatctccaaatgcactccctggcaccagggctacctggcccacatccagtagatatcgacagagggactcagaatcctcaattttaccgaatccttcagcttctcttccataatagaagctgaaatcaaggaatagataaaatgctccctggggttcagatatcttgacaccatctatttctctaaaactttttaccaagaaatcccttcgctccctaaatgctttcagtaattttggattcaagaagtttgggatccaaaaggaaattatcagatattaaggttggaagaatcacaggtgtcgcatcagccaaccttgccatttctgggtaactaacccagaatggagctggaataataacct

SEQ ID NO: 83610 - DNA, 337 bp, Glycine max
  Clone ID: PAT_MRT3847_46515C.1
gacacccaaatccttcttcaccttcacaattggaaaaaaaaaaaaaaaaaaaaaaaaaaaaaaagcggcggtttaaaagaaccaagcttaacttccccttccttccaacttataagccttttaatggggtaactaaatttaatttaatgggccgtcgtttaaaaacgtctgaccgggaaaaaccttggggtacccaaattaaacggcttggaagaaaatccccttttgtcaagttggggaaataccaaaaaggcccgaacgaatggcctttccaaaaattgggcaacccgaattggcaattggaacaccccttgaacggggcaataaaccccgccgg

SEQ ID NO: 83611 - DNA, 2436 bp, Glycine max
  Clone ID: PAT_MRT3847_46516C.1
cacgcgtccgccacccaccccaccccatcccaccaaactccctctacctaccgctattcaacctccttcttcttcttcttcttcttctcatctttcttactttttcagtaaccccttctctcccaaaatctccctctgttcagtttcaatatggcgaacacactatataacggcgccacatgccgaatccctctccgtgatgaatccctggccttctctcgccacgtttccagatccctctctttcctcctcaaaacacgtgcgggaaaacaatcatacgcatttgcggttaaggcttcttcgcactctgacttcgacgttgacctttcgctcagtccacgtgtcaatgccgtcaagccttccaaaaccgtcgccatcagcgaccacgccaccgctctcttccaagccggcgttcccgtcattcgcctcgccgccggcgagcccgatttcgacacgcccgctcccatagctgaggctgggattaatgcaattcgcgaaggttacacgaggtacacgcccaatgccggaaccatggaactgcgccaagcgatttgtcgcaagcttaaagaggagaatgggattagttatactcctgaccaagttgtggttagtaacggagccaaacagagcattgctcaggcagtgcttgcagtttgctcccccggagatgaggttattattccagctccattctgggttagttacccagaaatggcaaggttggctgatgcgacacctgtgattcttccaaccttaatatctgataatttccttttggatcccaaacttcttgaatccaaaattactgaaagatcgagactgctcattctttgttcaccatctaacccaacaggatctgtctaccctaaagaattacttgaagagatagcccggattgttgcaaagcaccccaggctcctggttctctccgatgaaatttatgaacacataatttatgcaccagcaactcacacaagttttgcatctttaccaggaatgtgggacagaactcttactgtgaatggattttccaaggcctttgcaatgactggttggcggcttggatatattgctggtccaaaacattttgttgcagcatgtggaaagatccaaagtcagttcacttcaggggccagtagtatagctcagaaagctgcagttgctgcattaggactaggccatgctggtggggaggcagtttctaccatggtgaaagcatttagggagcgaagggatttcttggtaaaaagttttagagaaatagatggtgtcaagatatctgaaccccagggagcattttatctattccttgatttcagcttctattatggaagagaagatgatggatttggaaacattgtggattcacttcccgggcctgtagtatagctcaaagaggtccaggtgctccttttggcatggagcatgcttggggatgacacgtgcatacccatctcaaatcctttagggagcgaaagcatatattgagaaaaagattgagagaaaaagatggtttccacatatctgacccccaggcttgttttattttaatgcttgttttgttcttctattttggaagtgtatctgatggattcggtaaaattgaggattttgagtccctctgtcgatatctactggatgtgggccaggtagccctggtgccagggagtgcatttggagatgacacttgcatccgcatctcttatgcagaatcccttactaccctacaggcagctgtagaaagagttaagagagcacttatcccgctgagctctgctgcacttgtttaatattgctgttttgttgtaatgggtgtattttatttttattttaattttggcaatgtgtaatctgtttattctgaaaatattaggctttggatattcttccataaaatgaagtgatacaactgtctttaatggtttaaaattataacaacaaaattgtcctccttttatgtaacatatgtctcgaagcgaaggggaagcaaataaactggcgttcaatggctacaatctgaaaagggtgtggtaatttttgaagtaaattccattaagagtgtgtttggatgaaggaatttaaaattttgagaatttaaaattctaagaatttcaaatacttcaattaaaatttttttattttcaaaattgtgtttgaataaaaaaagttaaaattatgagggtgaaaaaaaatgaatgaaaaaaaagaaaagatgtgattgatgtattagttacaatctctcttgaagaagactcgaagaagagaatttcaatttctcattttttataaggaaattgaaatttcagatttttagttgtttaaaattctgttttaaattccaaaattttaaattcttcacaaaaaaacatctaaataatgaattctagattacagaaatttaaattttctcataattattttctgcaggcatgcaag

SEQ ID NO: 83612 - DNA, 965 bp, Glycine max
  unsure (1)..(965): unsure at all n locations
  Clone ID: PAT_MRT3847_46517C.1
ccacgcgtccgcggacgcgtgggttcgaagatgaacaaaaatggcgttattccgtcgtggatgaagcagcaatggcggggcatagtgaaagtgcgtttgaaatgggtcaagaaccgaagcctggaccacgtcatcgacaaggaaaccgatctgaaggcggcgtgcctccttaaggacgccgtgaaccgctcctccaccggcttcctcaccgcgcaatccgtcgccgactggcagaaacttctcggcctgaccgtccccgtcctccgcttcctccgccgctaccccaccctcttccacgagttcccccaccctcgctggccctccctcccctgcttccgcctcaccgacaccgcactcttcctccactcccaggaactctccctccaccaaacccaccaaaacggcgccgtcgaaaaactctccaagctcctcatgatgtccaactcacgcgccctccctctccactccctccacgcgctcaagtgggacctcggcttacccgacaccttccacaaaaccctagtcccccaattccccaaccacttccaattcgtcaagtcccccaacggcgtcgtttcgctcaagctatcccgctggcccgacgaactcgcggtttccgcactgcagaagcacaacgagggtgggacccactaccgcgaattcaagcggggacaatccgcgttggcttttccgatgcggtttccgaggggctacggcgcgcagacaaaagtgaggacgtggatggaggagtttcagaagcttccttatgtttctccttatgtggattccacgaagattgatcctaacagcgatttgatggagaagcgtgtggttggggttctgcacgagattttgagcttgactctgcacaagaaaaccaagaggaactacttgaggggcttgagggaagagttcaaccttccgcataagtttacncgcattttcaccaggtatcctgggatttt

SEQ ID NO: 83613 - DNA, 517 bp, Glycine max
  unsure (1)..(517): unsure at all n locations
  Clone ID: PAT_MRT3847_46518C.1
attcccggnngtcgacnccacgccgnntccgaaaaatataaaaaaaaaaaaaaaaaaaaaaaaaaaaaaaaaaaaaaaaaaaaaaaaaaaagaaaaaaaaaaaaaaaagaaaaaaaaataaaaaacgcaaggccggcaaagagaaaccatattttataggggcggccttgccttgtttcgggggtctgttttttttcccccgtcgggtctgggatattcccctggggggggccggctaatttccggtgggtttccctgcccctttccccagctggcgttttggcgaagtggcccgtttcgcccccccttcccattgggggcgggcccccattggcggatgggcccccccttgcggcggcccattaggcgcgggggttgtggcgtggtcccgcggagtgaccgctacggttgccagggccctaccgcccgctcctgtcgctttcgtcccttcctttcccgccctttttgccggttctccccgtgatgtttttagcggggggcttttttttggctcccg

SEQ ID NO: 83614 - DNA, 358 bp, Glycine max
  Clone ID: PAT_MRT3847_46519C.1
gaacggaacaagtcccttcccataaacagccaaatggtttttttgcgatggctttctttctgcaaggggaacttttaatccaatccaaggcgtgtttaaaaattccaggtttgggggggggggggaagagtacctttgtggggtcgctcagggcccaaaataagggccggggggcccaaattcccttcaccgggggccctaagcgacacataaagctgttgggcgagagccaagccgggcaaagcattccccattttcggcccctccttaaagcaaatccccaaatccttaacgaaggggttcacgaaaaaccccggttccaaacccctattaaagattttttttccgaacaaataaa

SEQ ID NO: 83615 - DNA, 484 bp, Glycine max
  unsure (1)..(484): unsure at all n locations
  Clone ID: PAT_MRT3847_4651C.1
gtgggcaagatcaaaagtgtngaantngcgaggatgggcttgaaagctaaccggcgagttgcgcgaaggcgtgacctacccccatcaatttcaatactactatccaaccacatcccaaaacccaacaacactccctattttatccttttttgattcacttccaacccagtagtgtgtgtgtcccctgatttacattccatttctttcccccaaaccccttaagccaaaaatgacacccccaccaagaaactaaccccaaacagaagacatggaattggcgttggcattggagtgggacgatcaagtgcgggaaggcgttctaaagaagctaaagctctggcaacaacgcaacaacaaacccccaacggcatgggtcacagagctagtggagcatttcaacacactgggcattgccctaccctgccccgagttaggggaacttctagtggcccaaatatgcttcgacaacaaccaccctttgatc

SEQ ID NO: 83616 - DNA, 356 bp, Glycine max
  Clone ID: PAT_MRT3847_46520C.1
cccacgcgttcgcgcgaatgtttgtagaattttagacgccaccagggttcaggttttatttgactgattaagaattggtcaatcactacttgagaaggaagtgcgcggatcaaccaatctcggttcccatcatcaaataggtcgatttgtacaagatatattcatggcatcttccacaaattgactactactgctagaaagaatggtacttcttttcttctcgggatcagaaatactcgaacggttcacggcctaaaccgtgccatcttaagcggatattggtaagctcacccgcgctgataagccatcggaaataccaaagcgctagggatccaataatgctttggttttttacg

SEQ ID NO: 83617 - DNA, 2263 bp, Glycine max
  Clone ID: PAT_MRT3847_46521C.1
gcatgcagtttataagttcaaacaactgaaacaagtatccattttcatttatttttcagttcttacaaatatattcataatgagtgagacaatttttaagtgttgagattttgtgcagttgcccagacaactcaaatcccaactattttaagataacataacaccaccaatataaaagagacatgatattaattcttggggtgaagcattatgcttataaatcaatggataccactagtggagagtcacctttgtcaagcccaaatgtcttttgaaatttctttgacggggtcacaccttgcccattgtatgttccatgaaaccctctgaagttggattggccttgttcataaacagggccccggttgtgagagagccactcttgttttagagctaaaaaccttttcccagcctcattgatgtcaccttctgcattgaccaaatgtgaatggtccctactcataaacagctcccaaaatccccacagcattaagccttccaccgtaggatgagccatggcttcgcgtagcataacttcgagatcgtctgctctaacgtattcgttgacggaagacacgtcaagctcggtgaaccatatggctgcgagaagaataccgaagggcggatgacgtgtggcatgaaattggagggtcctttagaattgaaaagcagccatcaaaggttatggtttatgtgcaaggtcctgcttctggtgtggacttaatggttgctggacttcaaatttttcctggatagacacacaagatttagatatttaaagatccaaactgattagattcgtaaacgtgatgttatcctgaaattctctggactggactctggcagctatgctaacaccttaaagttatacaaacacataatgatttcccaattggaacatgcatcagcagaacgaacattgacaacgaggactttgttaacttcattgtgaagcattttaactgggctgtgtttggaaatgagttgaagtggtattggactgagccacaacaaggaaatttcaattacaaagatgctgataatctgttaagcttgtgtcagaagcacaagatacaaactcgcggtcattgtatcttctgggaagtggatgaaactgttcagcagtggatcaagtcactgaacaaaaacgatctgatgacggctgtccaaaaccgcctaaacggcctgctgactcgctacaagggcaagttcagtcactatgatgtcaacaacgaaatgctgcacggttcattttaccaagataggctaggcaaggatataagggcaaacatgttcaagactgcaagccaactagacccttctgccacactctttgtgaatgattatcatgttgaagatggatgcgacaccagatcatgtccagataagtacatccatcacattcttgatttgcaagagcaaggtgctccggttgggggaattggaattcaaggccacatagactgtccaatagggcctattgttagttcttccctggacaagttgggtattcttggcctacctatatggttcactgagcttgatgtgtcttccgtcaatgaatatgttagagcagatgatcttgaagttatgctacgcgaagccatggctcatcctacggtggaaggcataatgctgtggggattttgggagttgtttatgagtagggacaattcacacttggtgaatgcagaaggtgacatcaatgaggctgggaaaaggttcttatctcttaaacaagagtggctttctcatagccgtggccatgttgatgagcaaggtcaatacaacttcagaggctttcatggaacatatgatgtgcaagttgtgaccccatcaaagaaaatttctaagacatttgtgcttgacaaaggtgactcgccactagtggtatccattgatttataaccataatgcttcgccccaagaactaatatcatgtcttttatatatatatatatatttgggttggctgaaaaactacattggtggtgttatgttatcttaaaatagttgggatttgagttgtctgcacaattgcacaaaatctaaacacttaaagattgtctcactttattataaatatacttgtaagaaatgaaaaataaataaaaagtgatacttgtttgaggtttgaacttataaactgcatgcaaaaacaattacaaggatgctgatgatatgttaagcttgtgtcagaagcacaagatacaaactcgcggccattgtatcttctgggaagtggacgaaacgttcagcagtg

SEQ ID NO: 83618 - DNA, 647 bp, Glycine max
  unsure (1)..(647): unsure at all n locations
  Clone ID: PAT_MRT3847_46522C.1
gttagttcttccctgnacaagttgggtattcttggcctacctatatggttcaccgagcttgacgtgtcttccgtcaacgaatacgttagagcagacgatctcgaagttatgctacgcgaagccatggctcatcctacggtggaaggcttaatgctgtggggattttgggagctgtttatgagtagggaccattcacatttggtcaatgcagaaggtgacatcaatgaggctgggaaaaggttcttagctctaaaacaagagtggctctctcacagccgtggccatgttgatgaacaaggccaatacaacttcagaggctttcatggaacatacaatgtgcaagttgtgacaccgtcaaagaaaatttcaaagacatttgtgcttgacaaaggtgactctccactagtggtatccattgatttataagcataatgcttcaccccaagaattaatatcatgtctcttttatattggtggtgttatgttatcttaaaatagttgggatttgagttgtctgggcaactgcacaaaatctcaacacttaaaaattgtctcactcattatgaatatatttgtaagaactgaaaaataaatgaaaatggatacttgtttcagttgtttgaacttataaactgcatgcaatccta

SEQ ID NO: 83619 - DNA, 464 bp, Glycine max
  Clone ID: PAT_MRT3847_46523C.1
gtgtggaggttgggggattttgtgaagaagagggataagagggtgattgatatgaagcaaatgagtggtttatttgctctcaagaatgtgttcccaggacctattgtggttgaaacccacatattcctttaggaataaataggttgatggggaaactgactttccctcagggcacttcctgaagtgttaaaagaatgcctctttctataggcggaggagctgatgcaaagaatgctaatttcatgaatatgccaaatgctgttctttcaatgtggaaatataatgttgaagatctcgactttgaagtttctaagatgacttctccctacattaaatgtacagtctctttcttcatagcctttggaaatctgtctgatgacaccatctatttcgaagcttccccccacaagctaatgcagtttgtatagaatcaacatataggtgtattgaaacttttacaatag

SEQ ID NO: 83620 - DNA, 172 bp, Glycine max
  Clone ID: PAT_MRT3847_46524C.1
aaataaaagaaaacttttataagccactaggtattccaaccaatgctaggaaattttagcttgcctaggtttcccctttggatttttaaaggttggtacaacacaaaaattaaagctattgatattccggtcaaataaaagcaaaatttcataaattgtgggtgggggaaaa

SEQ ID NO: 83621 - DNA, 1411 bp, Glycine max
  Clone ID: PAT_MRT3847_46525C.1
caaagacatgggtacggtggctcccagagttgaaagcttggcgagcagtggaaagacatgggtacggtggctccaagagttgaaagcttggcgagcagcgggataaagtgtatcccgaaggaatacgtgaggcctcaagaagagctcaagagcatagggaacgtgtttgaggaggaaaagaaggaagggctacaggttccgacaattgacttgagagagatagattcggaggacgaggttgttcgagggaaatgtcgtgagaagctgaagaaagcggcggaggagtggggtgtgatgcacttggtgaaccatgggatccccgatgagctgatagagcgggtgaagaaagcaggggaaacgttctttggtctggcggttgaggaaaaggagaagtacgcgaatgatttggagtctggcaagattcaaggctatggaagcaagctggccaacaatgccagtggccaactcgagtgggaagattacttcttccaccttgctttccctgaggacaagcgtgacctctccttctggccaaagaaacccgctgattatattgaggtcacaagcgagtatgcaaagcgactgagggggcttgcgaccaagatattggaggcactctctattggattggggttggaaggatggaggttggagaaggaagttggtgggatggaagagcttctacttcaattgaagatcaactactaccctatttgtccccagccagaacttgctctgggagttgaagcccacactgatgtgagttcactcactttcctccttcacaacatggtgccaggtctgcagctattctacgaaggccaatgggtcacagcaaaatgtgtccccgattccattctcatgcacattggtgacaccattgagatcctgagcaacggcaagtacaagagcattcttcatagggggttggtgaacaaggaaaaggttagaatatcgtgggcagtgttctgtgaaccccccaaggagaagatcatcctgcagccacttcccgagcttgtcactgagacagagccagcacgctttccacctcgcacttttgctcagcatattcaccacaaactattcagaaaggatcaggaaggtctcccaaattgatcactgcaggcatcacatttgtatttgtttgcttgtcttatgaattacttcttagttcttatgggttgtactaataaactaggccttgcatgtcggtgtggcctcatcaatcatcatgctaagtttgttttatcctttattaaatactattgatattattcttgtttgagtttaattctcgatttgattaacatgggcgttcatgattattatccaaatcaagttgaagtcctttactccttccaaaaaaaaaaaaaaaaaaaaaaaaaaaaaagcggccgctctagaggatcca

SEQ ID NO: 83622 - DNA, 460 bp, Glycine max
  Clone ID: PAT_MRT3847_46526C.1
ggggaccaaccaaaaaaaaagggtttagatccccaaatcctgggccggaattccagcgggcaaatataaactaccccaaaaccaaatcttataaaaacccaaaaaaaccccaaacccaaatggggcaaatggggccccccccgtttccaaaaacccccctgggttgcccccaacccttaaatttaaaccccggggcgattaccccttcttttggggggccccctgaaaaggcaaccccgaaaaaccatttttggcggaaaaagaaaaaaaacccctggaaaaagaaaatcgaatgggcgttactgggcccccattcgggaaataaaatcctggaagcgaatttggccgcggaaaccgacgggaatttcacggatccactcgtgaaacctggagggctcaagcttctcccccaaatagggaagggaggggcggaccttgaaaacggggaaaaacccggggg

SEQ ID NO: 83623 - DNA, 691 bp, Glycine max
  unsure (1)..(691): unsure at all n locations
  Clone ID: PAT_MRT3847_46527C.1
tacgcnctgggcaggtaccccggtnccggnnaattcccggngtcgacccacgcgtccggtctggaaggagggaggttggagaaggaagttggtgggatggaagagcttctacttcaattgaagatcaactactaccctatttgtccccagccagaacttgctcttggagttgaagcccacaccgatgtcagttcactcactttcctccttcataacatggtgccaggtctgcagctattctaccaaggccaatggttcacagcaaaatgtgtccccaattccattctcatgcacattggtgacaccattgagatcctgagcaacggcaagtacaagagcattcttcatcggggtttggtcaacaaggaaaaggttagaatatcgtgggcaatgttctgtgaaccccccaaggagaagatcatcctgcagccacttcccgagcttgtcactgagacagagccagcacgctttccacctcgcacttttgctcagcatattcaccccaaactattcaggaaggatcaggaaggtctcccaaattgatcacatttgtatttgtttgcttgtcttatgaacttagttcttatgggttgtactaataaaataggtcatggatgtcggtgtggcctcatcaatcttcatgctaagtttgttttatcctttattaaaaactattgatattattcttgtt

SEQ ID NO: 83624 - DNA, 395 bp, Glycine max
  Clone ID: PAT_MRT3847_46528C.1
cagaacaacaagtccttaacaactaacatggacaagcaaatggctcactcaaagagctgataccgagctgttacgcactgataaccgtgccggtgcacagcatggtgagctacattcactggactaaagtccatggctggcttgccgatcaggaagaccaacagagtcatatcctgcacagctagcaacgggggaagaatgcaatgcatgcaggtgatgtcaccacttggtacgaagaagtttgagactctatcctacatgacagaccttgatgatgcacaatcagcaaaggaagttgaatacctctttacgaagggatggattaattgcttggaaatccagttggagcacagagtcttgtacctagagcacaacatgtcaccatgatactacga

SEQ ID NO: 83625 - DNA, 301 bp, Glycine max
  Clone ID: PAT_MRT3847_46529C.1
gggtctgctcgacaagctctgggatgaccctgtggctcgcccggatcccgatcgtggccttggctacctccaactgctctcctccctgaccactattgatgaaggagacaggagcaagctgccgaagacgttgacgatgccgtcgacaccgatcctcccgatgactgccaccactacaacgactccaggatcgccgcgtacagctgacaacctggggatgagcgtgtcccatcctgggaacgacctcgacgccacgacgattggtgctgacatgtggcgacaaaccacttaccaacactcc

SEQ ID NO: 83626 - DNA, 518 bp, Glycine max
  unsure (1)..(518): unsure at all n locations
  Clone ID: PAT_MRT3847_4652C.1
gaggaaccgtgttctctaatcttgtaattttctgtgtcgcttcgtggttcattcttctcgtaagttctctctttctctgtagggtatttttaggattcatgttgtgtgcgtggtttactaattgattcagatatttttgaagagtttattttgttccttaaggtagaatttggggtgccaattttgtgttggatctgtaaatgtttgaaagtttgaattttggatttgggtctaccccgttgtggaaaaaaactttttttttcttgggttgggggattcaaattgtgaaattttcaaggggtggttttttgaaaagggtctttgcgttttgtgttgcttctggattggattttgaattgttgttttattgatttatttttatgaaatattttcttattcggttgctccatgttgagatgtttttctgtttatcaatgtntagtttttgttttgaagcctactttggtgggagatttggagtgatttggacgangcttggcggttaaaattttcgtttg

SEQ ID NO: 83627 - DNA, 375 bp, Glycine max
  Clone ID: PAT_MRT3847_46530C.1
gggagactactggccatttggatgccatatacaagccgtactccaaaggagtttgttcagagctggagccgaacctctagattacgtcggaataatggcaaaacgaaagctcatttgtggcgtcacataaattgaatacagtggccgcaattctacaacgtggtgcctgggaaaaaccttgcggaccgcgaattaattgccttcaaccaaatcaccttttggacgatggtgtaattgccaaaaggtgcgctacgatcgaagtgcccaacatgtgcataccctgaatggagaatgggacccgaaatggtgcatggcattaaaccgtgtggttgaattctgtccccgcacaagggccgttaaaattgacattgccct

SEQ ID NO: 83628 - DNA, 521 bp, Glycine max
  Clone ID: PAT_MRT3847_46531C.1
tgtgcctgaagtttcattctttcaacaacagcaagttcagaaatcattggagcgtattctgtacacatgggcaattcgacatcctgcaagtggatatgttcaggggataaatgatcttgttacgccatttttagttgttttcctatcagaatacttggaagggggcatagataattggtcaatgtctgatttatcttcagatgaaatctctaatgtagaggctgactgctattggtgcttgtcaaagttgcttgacagtatgcaagaccattatacatttgctcaaccaggaattcaaaggcttgtttttaagttgaaggaattggtcaggaggattgacggtaacttttttctcaggcctgtatatctatattgaaattgtttttcttcaagtatatctataattgcatgaatttaaagaccccacttttgaatatggatttggatatgcattaattttaccgaacctcagttttaggaaaatataaaaacatttggctaaattattctctcactctcta

SEQ ID NO: 83629 - DNA, 309 bp, Glycine max
  unsure (1)..(309): unsure at all n locations
  Clone ID: PAT_MRT3847_46532C.1
gcccaaacaaccaatnnaactncccaatcatcacnaactttctattttatttatctcaatccatttcaaactcgtacgtgatttcattttatcaacgggtcccatacacacaaaacaaatctttaantctcttctaattcaattactattacatttcctccaccttcagaatatctactatactttaaatctactactcttaacttattattacttcattttaattcccctaaacaattatgtttttaacataaaaacatatccatatattcttccactcaaaaaaatccttctattctccaatctttc

SEQ ID NO: 83630 - DNA, 563 bp, Glycine max
  Clone ID: PAT_MRT3847_46533C.1
cccacgcgtccgcggattaataatatcagtttatttcaaaaaaaaaaaaaaaaaaaaaaaaaaaaaaaaaaaaaaaaaaaaaaaaaaaaaaaaaaaaaaaaaaaaaaaaaaaaaaaaaaaaaaaaaaaaaaaaaaaaaaaaaaaaaaaaaaaaaaaaaaggggggggccgtttaaaagaaccaaagttaactaccccgggcttgcaaggaaaaagttttttaatggggcccccaaaatcaaatcccggggccggggtttaaaaacggggggacgggaaaaacccgggggtacccaaattaaatcgcttggaaaaaaatccccttttcccaagggggggaaaaaccaaaaaggcccgccccgacccctttccaaaaagtggcccaccctaaagggcaaagggaaccccccctgaaacggccaataaagcgcggggggggggggggtaaccccaaaggggaccgttaaattggcaagggccctaacccccgttcttttggtttttttcctttcctttttcgccaggttcgcgggttttccccgaaaggtttaaaaaggggggccc

SEQ ID NO: 83631 - DNA, 353 bp, Glycine max
  Clone ID: PAT_MRT3847_46534C.1
tagcttctatagcaagttaaatcagtggaaattctacataatcttgttaacaacattcaacacaggatatgtgaggaaatacatgaataaaaaatgaataagcaacaatggaggtttaaggagcatctacttgaagctcttgtgctttgattaccacttgatgggacttgatggaagcttgcttgagaagcttttatggaggctagatctttgagcttcaatgaggtccttcaatggtgattttcaaccatggatatgcagcggaagataaaggagaagaggtgagagaatacggcatccacaagggaataagccatggaaggaggagcttcaccaccaagagagtgtcttgg

SEQ ID NO: 83632 - DNA, 156 bp, Glycine max
  Clone ID: PAT_MRT3847_46535C.1
taattcgtctcgagctcgagccgttttcttgtatgagactataacaaaatgtatcgccaggctaattcacagacaagatcttcaggagcatgcaggaaggacctcatctgcgaattagcctggcgatacattttcttgtatgagactataacaaaa

SEQ ID NO: 83633 - DNA, 453 bp, Glycine max
  Clone ID: PAT_MRT3847_46536C.1
cattttcatattcggaaattcttattcttcttcattcttgcaatggcctcaagcaaagcattcatcacagctttcttcctgcttgctctgaccatgtcaagcatgagcatgaacctaacagctcgtcatcttatgcaaacaagtactggaccaaatttgcctaaaccaacattgccacctttgccttcacttccaattcggcctcaggccatggttcccccattgcctacaataccatctttgactaccactttgcctccacttcccatcagcatcccaaccattccaacagttccacagctcaaccatcctctattgccctcaatgccaaccactatgccctacatcccatttctttccccgacaccttcagcctcaagcccttaaaatacccttcccttcatttcttcattctatgacttcggtgggatctctgcaaaattgcatgcattc

SEQ ID NO: 83634 - DNA, 477 bp, Glycine max
  Clone ID: PAT_MRT3847_46537C.1
aattcggctcgagtacggctgcgagaagacgacagaagggaggataaataaattatagatgtaatgtatatcacaagcttttagaacattctgctttaagcttctaattgttattcttaaaatgcaggcactatcttcatatgtattcatagcagctaatgtcattctcaactcatctaaagatgttcaatctagtcatttgaacgaattgtttcctcctctagttccattattaacatcacatcatcatagcttacgtggttttacccagttacttgcatatcaaattctacataaactgtttccattgttgaattatggatcttctgagatgctacctttagagaagaggtgctttgtagatttgaaaacataccttgcaagaaattctgattgtgcacgcttacgaacatcaatggaaggatatcttgatgcttatgacccaaatagctctggtacacctgctggaattttcat

SEQ ID NO: 83635 - DNA, 1873 bp, Glycine max
  Clone ID: PAT_MRT3847_46538C.1
cttgatctttatgagcgggttataaaaacaattataagcaaaggtaatgtttctggcactgtaattggagaagctctaaatgcttatgcctcaagaaggatgcctggtttcaacaagggtgtgatccaaggagatattgtaagaaatagattactgttggagaccataatccgaatattacccttggacgtgggcagtgtctctttcagtttcttggtgaagttattaagggtagctattcagttggaacgtgaagagttggagagatctgaactgattaggagaataggtatgtgccttgaggaggctaaggtgtctgatttattaatttgcgccccagttggtgacacagtttttgatgttgacattgtgcaaaggctagtagaagagtttgtagcatgtgatcaacatgttcagacggatactctgttggaagatgactttcaggaggagatcagaagccccgggatggtttcagaatcttcaaaggcaaaagtggcaaaattggtggatggataccttgctgagattgcacgtgatccaaatttaccttttgcaagatctgaaaatattactgaaatagagtgaagccatcagcagaagcaacaacaatgacagtagtaaaggcaattctgagagtgttgctgctagtaaaatgaaaggtctcgtgtcgaagaagataatctccaagatttggtcaagcaaagaaagaagtggtgagctaagtagctctgatacatcagagagccctgcttctacggttgtagaggaaacaaaatctactccatctagaagtaggaggcattcattgtcttagagaccatgttctgcagaccttattccttagagctccattcagtttactgtataatcatctctcactcaagtagcatcagagttagaggacactgagatgaatggccagctgtgggaacaatggaagacataaaatccctgaaaggggagcttgatgcactaaaattatctggtggaaccagcggagccagcagcagaagcgacaacaacgacggtgataaaggcaatgccgagaatgttgctgctagtaaaatgaaaggtttcatatcaaagaagatactctctaagatttggtctagcaaagaaaaaagtggtgagctaagtagctctgatacatcagagagccctgcttctactgttgtagaggaaacaaaatctactccatctagaagtaggaggcattcattgtcttagagaccatgttctgcagaccctagtccttagagctccattcagtttattgtataatcatctcattcaagtagcatcaggagttagaggacactgacatcatattccatctgataattcaatcagaaatctatgtaactgtgaactaatgtgagcatgtggctaaaatatgaagcaccaaaagtatatgttaattgaggtttatgtcatgcccttagggatgcaacttttattcagccattactgatattattaggttagaatgtgagctcttgtagtgagttatccagttttgattattggagactggtttgtgactgctacaatttgtaagcttagttttaaagggaaaaggaggataaggaggtgcagtgtttggaaggcttgtgttgggagtattaattagcattttgatccgtcattaatgttcatttgagcagtggtatgagttgtaaaaccgcttgggctgcgagttttcctttcctgtttcccccgtccggatggctcctgggcaggtcggggtgggtttgtctatctccatcctaatctccatcctcacaaaaggcacggtgggttgggtttggctttataaaagacggggtgaaaaatggaacctaactccatcctcatctagttttataggatt

SEQ ID NO: 83636 - DNA, 621 bp, Glycine max
  Clone ID: PAT_MRT3847_46539C.1
gctttttatgggttcattcgtgaggtgaaaaggaatgcgggggtgctagcttaagatgactgaggtgaagctccaagatttgcctttagcgctagatgcttggtgtgttttgcatactatatgtgagtaaacgaatgaagaaacggatcatgatgtgttgaataatatagatgatggtgatgatgactatcttggtgaagcgacagagccacatggtgccttgaaatctcgaccacttcttgatcgctacgagagcgctggcacataagcttctgtaccatagactagctggaacttgtatcgaactattgctattgccaactgactagtaagataggggataaataactctttcgctaagcattaattctacacatatgatgaggtgattcaatatatggattcataactgctaaatgatgggactttgtaactgagaagcttttttgccctgtgctacacttatacggttaaaagaaatcggtcatgtcttgccctatatccaagacaaatggaatggacatatgataggtgtgttaaagacatagatgactgtcggtcttttttataggatacatagctaacgtacgccagcaggccacttctgaattaatttatggt

SEQ ID NO: 83637 - DNA, 568 bp, Glycine max
  Clone ID: PAT_MRT3847_4653C.1
ccattatatagaaaaagttgagagtggacttaacaaaaacggaggagagaaaaacaaatctctaaaccaagaaataagtaactttttcaaagtcaacttaaaaacaaaataattataagatccaaaccatgtgtataagttaacacccatcgacaagaatcttcagcaaatgaacaaagtgttaaaaattttgctagtatatacacttttaacaatactaatgaatcgagttattgatttttcaaccttaaaaagctattttcagttgacttaaagggaaggggggttaattttggtaatttcctcatttaatcctgcatactcgttaaataattaaatgtactataatgtcaggctcacatgacagccaagatgactagtttccttccacataatttgtaggataaaaaaaccaaggaagattttcacacgtattagtgtttgtacgagctagactcacgtacgcaactatcacaaaccttcataaaccgccaaaatctttgttttcatgcgcaagaaaatagcataacgtgtggtctcgggggaaccaaaaactgtgaaattctga

SEQ ID NO: 83638 - DNA, 420 bp, Glycine max
  Clone ID: PAT_MRT3847_46540C.1
gcacgaggaatttggactatatgccatgattaaaattgcaaacatgttagcagttaggatgtagcattgcctctatctctcttaacatccttttctcttaaaacttcttttattaacctcttaattatgaaatccaaatcttagttataccagaatagtaaatgaaagagaaggtggacatagctatttttgttgcatccaataatttccaccccttgaaacgatcaaatccatcaacctgttttcactccatccaattagatcatatccacaaatcacaacataaaatttccatttttgcttcacattgtttagggtctccaatcacttgtaaccatttaccaccggtagtatatgttgatataagttactttttgtttagacaaatccaagactttgttcaattcccttttgtctgag

SEQ ID NO: 83639 - DNA, 802 bp, Glycine max
  unsure (1)..(802): unsure at all n locations
  Clone ID: PAT_MRT3847_46541C.1
ccacgcgtccgtggatttattagcaggaaggaactggaaaaaatcttaagaggaagtttgcagagccctattcctggtatgggttcgaaggtatttgagaacttagatactagtgatcttgtgaggatgatgctaaaacttgaactttgttatgagcaagacccatcagatccaaattctctgctattgattccttccattcttgaagaaggaagaggaaagcctcagaagtggcagctaagcatgccagactgtgtttatgctggacgtcacctcgagtgtgatgattcaagccacatgtttctaactcccggattcttccctcgtttacaggtgcaccttcacaacagaatagaggctctaaaggatcaacatgaggcaacttacagtcttgagaagtgcatcatatcaatctgcattaatggaatctacataagagtagaacttggaggacaattgggttactatattgatgtccttgcatgctccacgaaaaacttgtctgaaactttaagagtcattaatcaacttataatccctgcaatccaaagtgtttgccatgggatcaccttgactgaaaatgtcataagacctgaatgtgtgagaaaactgacacccnctagatacagaaaaactcaatttgcttccatgcagcaacttanacaagcattactttcacttncagcagacagcatgtatgattatcaacacacatggagtccagtcctagactctggtaggccaattctccaagatggatttgattttgctcgggaccttttatccgatgatgacttccggg

SEQ ID NO: 83640 - DNA, 452 bp, Glycine max
  Clone ID: PAT_MRT3847_46542C.1
attaggcgaattatagatgtcctaacaatattgaaggtcgctcatcgggtcaatttaatgcttctcataccaaacttcattcactaggtctttgaacccccaccaaccaaccacatgattcttatattgaaagggaaaggggaagggtttccataagatatacttaacaccccaattccctaccccaccacacacgaaagaacagatgagaaataaactgcttatgcgacaccgaaagaaataacacccttccaagatttaagccgtgggccaacaaaatataacagagttgaccccagggggctactaccacgggcttggaggtcctgcctgaactggatccgaccttctagctttcctgccaacgggtaatccttttaccacctgggcgaacaccaaatactttccttccagccactatgtcctatcccagcagaagaagaacctccatc

SEQ ID NO: 83641 - DNA, 283 bp, Glycine max
  unsure (1)..(283): unsure at all n locations
  Clone ID: PAT_MRT3847_46543C.1
gaaaaattatgtgattataaagttctaaaccctggcaggtttatatattcttaatttctctcagaaagagaactcagcgaggttctgtacacatgtacagtaccccctgtcccactgagcaaaggctttttctcctttgacacaactttgataanaaaaatctgcactgcactgtttcattcagctagctagcttctcatatataccaattgtgtgactgttcatcaaaagtttcagataaatggacacaaaaatgtgctctcaaaaattatcacttgaaggc

SEQ ID NO: 83642 - DNA, 522 bp, Glycine max
  Clone ID: PAT_MRT3847_46544C.1
ggcacaacccctaaccatacataaagtttaagcgcaggttcatataaataatgtgtacaatgggcattactttaaatacacttattgaatttccgacccatcggacatggcctatttgcacagctcctaacaaatacatccacaattttattgactactaaatgatccttactttgcgaaaccactttttctatgcaataacacggttgttcttgcgcactattgaaagccacactaacaaatgtattgaataaactaatatcctgagccctgttgagataaatattacataacgccttacaaaaaaaaaaaaacattaattgtaaacgaactgatgttttttttatacgttaaaggtgatccatgcactttaacttatatacgggtgctcccatcgaacttttccaaaagttgaaacgaaatgttgcttttaactcatgggacaaactcaatcttataaactttctaatattctaatccaataaatccttataaaaaattttatcaaaacaaacaatttta

SEQ ID NO: 83643 - DNA, 1025 bp, Glycine max
  Clone ID: PAT_MRT3847_46545C.1
cagagaaatcaacattagtcgtgcaaagaagaagaaaaacagaataaagcagggctaaaaatagatgctgaaaattcaggcatgacaatagattttcaccaaggacggaatctcttttctcaagaatcattgatccatctttttgacaaagtatttagaatcttgaaagtagaggggttcatttccccaagcaacccatccagccataatttctctagcaaataactctatacatcgagaaggtttgagcccaggaacgtactccagtaataaatctccaattgggggtttccttgagaaatccccaggaatgctcataatcactcgatcattcttcacaggtttaaattttgattggttatcggtattatttaccttcccaggactatatcccaagataaggcattcatatggcctatgatggaagagatctaaatcacaaatccaggatccattttgtttcacctttaaccaataaaaagtagcagcatagctgactccccaggcaggaaaaagctctctctcgacaaaactacgcagcttctctctgttggtcacccataaggctacaatcgctccttcagtatgagtgagttgcttaataggaagggataaaaaatacctgttgggcaaaatcgcataccttgaggactatatcccactggcattttcccatatggcctatgacacaagcaggctgaatcacaaatcaaggatccattgtgtttcaccttttaccaataaaaagtagcaccatagctgactccccaggcaggaaaaagctctctctcgacaaaactacgcagcttctctctgttggtcacccataaggctacaatcgctccttcagtatgagtgagttgcttaataggaagggataaaaaatacctgttgggcaaggttgcataccttgatttctggtgggcactggcattttcccaaggtggatccaccactatcaggttgaaaccagaatcagcgtgagcatgtaaaagcaactccctcgtgccgaattcggcacgagg

SEQ ID NO: 83644 - DNA, 661 bp, Glycine max
  Clone ID: PAT_MRT3847_46546C.1
ccacgcgtccggtcccaaagcaaacgcactacactctacagtatagagagagcaccacaacacaatacgagatgagaattgttttttcattggatagaacacgtgtacactatacataaaacaaacgcactgcgctcgtggcttttcttagccacgttgccgcttctactcttaacgtgcgcccctccaccgtacccaccacggcacagattccgccttgtccgatccgatcggcgaaacccttgtcctcggcggtgccgtcactctcataatcccgattcctaccactgagctcagataatcatattatgatcttcaaattgtagagagacagagaattctaggctgtgacgacgacgacgaagaagatgcagagacgaagtcctccgaagcacaggcacgacgggacttcgccgctgcctctcggcatggattggagccctgcgcctcgaaaatgggcattgaaatctgatagggtatcaaagtctgtagcccatttctattgcttttgtggtttgtggaggggatctcaaccatttccatagtttccttcgtgtattgcctagttcggctggcatctatggaggggagtctcagaaagtcccacatacccctgccttaatggagtgggggtgataatcttatttctggtgctttttct

SEQ ID NO: 83645 - DNA, 243 bp, Glycine max
  Clone ID: PAT_MRT3847_46547C.1
ctgcagccgacaatcctcgtgacaattcgttgcgtttaataactctagccaactgggtcatttttttctcaagcatatcactatttcccacataccaaaacaactctctgactctcaattggtctaacaatctaacacacattcaccatgtgggtacttacacttctaatctctgaagctcgccttcagaagtggatcaaacgcgcttgtgacgttcactctcctatctttgtaatgggtcac

SEQ ID NO: 83646 - DNA, 228 bp, Glycine max
  Clone ID: PAT_MRT3847_46548C.1
ctgcccgatcattccttgcctccacactacggcttggtcctgtataacttgaccctattatgtcattggcgacacagtgcgaaccaaatactatccttttttcgacaccctttactatgggaaatactacccttaatgactctatctctatgcctatccctgaagcagagcgccagaatcaatcgagaacccttatatctgtatctaggctgaatcacattattacat

SEQ ID NO: 83647 - DNA, 190 bp, Glycine max
  Clone ID: PAT_MRT3847_46549C.1
ctcgagccgttatcccctttctccttctaacgagtgaggcaaacatggagcgtaagcagatcagagtgtatgactcaccgaggttgttgcaggagcactttaagagactatatggcaaggagttgcagatacaagtctgcacaagttaccgcctcaactgctttctctgagctacaagagaaggaaacct

SEQ ID NO: 83648 - DNA, 292 bp, Glycine max
  Clone ID: PAT_MRT3847_4654C.1
aaaaagggggccccggcccccccctttcattttcaaaatttacaaaaggacggccataaagacaagcaattttttttgaatccccatcatctttggaaactaattaagcttgcttgattccaaaaatggaaaaaaaaaaaaaatatttggggggggggcttatgatatctaggggggccccccgcggcttaagtccctgacagttctaaaagactcttgggatggattggccttctcaggttttagggggggggataccataccaaaaaaaaaaagcttgttcccctgaaaa

SEQ ID NO: 83649 - DNA, 450 bp, Glycine max
  Clone ID: PAT_MRT3847_46550C.1
ataaaagggaacaacattataacattattacatgtgggcacagtctaggtggtaagtatgtaaacttatgtatgatgcacaaattattttaatccttggattattttttgatacatcatagtatcttggacttttctctcgtaatattcttcctcctccacacaatatcctgattgtgctaacgtgcgcccctgttcctgctacgccaccagctcctcctccttttcctccttcttatcgcgtttttccggtgccgacgatggcgtcggtttcgttggccgcgtccacaacctcatcgagcaagagttagggcttcgccgctcgcactccatggcgattccgtttctcttgtcacggtcacggttctctggcggtggcagtcgcggcggagataggctttcggatctcgacagcacgagggactcgccggcgagaaaacgacggaagccg

SEQ ID NO: 83650 - DNA, 462 bp, Glycine max
  Clone ID: PAT_MRT3847_46551C.1
tacgtaagctcggaattcggctcgaggaggtcgacattttatgatttttatatctcagatgcagagagcagccttagctgaacgggtgacagaggggaattcttaatgacatgcaaccgactatccggataaagacagaaggatggctcatcgatacatggaaccctaacaacaagccattccagtgtgccggtgttaccctctatctatgtaccctcaaccataacgacattagtttaccttgctacaccaacggtccccatgaaatctacatccaacatggtaagggtattattggcatgatatacccggattgtgctagcacattcgaagagccttaacaacctctacatagaggacaaatgcgggcaccacactaccgtcaccagaagatctatatctccagagagggtgatatgatcgcagggcctactggagttgcatggcagatgtacaacaatg

SEQ ID NO: 83651 - DNA, 293 bp, Glycine max
  Clone ID: PAT_MRT3847_46552C.1
aactcgaccctttatgaactaattgaaccggaacatacgcaaggcttgacatacacaggagcaataacgcaacacagcgtggggacagggtctgggacgccgacttgggaagcctagatgtcacccgggtacgactcaccagtcagcataaccgcatcctaactaatgcctcctacgggcaccaaaacgcgtactgagctgcatctaatagtccttgaaaccagactctgcggacacactaggattgccattagcacagcatattgatccatatcttgtgccaacccgcaaag

SEQ ID NO: 83652 - DNA, 784 bp, Glycine max
  Clone ID: PAT_MRT3847_46553C.1
cgcctggtcaggtaattcccattctccatgtaaatcccaccagcataaaacatggaatgcccattatttgcatcaatggaaactgacacaggttggtgccacagctttctggagtgcctcctcactataggaaggaactgtctcataccccttaatttgagccactgtggaagctgctatggttgtgttacaagtcccattaactcccttgtaggggtagttagcctcagtggtgattccaccatttttaataatgaattcaaacccatcttccatataacccccttcacaaccttggtcttcaccttttgtgtcacaagacactagctcttgctctgagagggagaccaggtttcctgtagttatttggtggatgccctcagttgctgccacggttgaaaatgcccagcagctccctagtttttcaaacaaaattagcatgaacatgatccaaatcgtttcaatatatacaatgactatgaattttaattgtattttttaattttctacacgtgtcttctatatcagagataatcttgttccaaaatacattaaaaaaactttatgtgaacacctctcagtgagtatttgaatattattgtgaataattaaccttttttctagactcaactttcatttgtaatttgaattacttaaattatcatccttacaaatatattttttaaaattaatctttctctaaagaatatttgtttatagcttaaaagttataaagttaaagtatttttagtcccaagactatacgaattaaataataaaatca

SEQ ID NO: 83653 - DNA, 300 bp, Glycine max
  Clone ID: PAT_MRT3847_46554C.1
aggcgtgcgaacaggtgcgagaggacaacggataggggagtattcaggccggataagacgagcgacactttctacacataccgctggctcagggacgtactacgacctccttcatgattaattatgacgcagccattcaccgatcgcattcaaactcaacacagagcgagatgcttctctgttgatacgtaccaagctacaaactttgagatattatatctcagagtcgctcgcttagcatactgagtctggctcctagctacacgcccatctcatatgcgtgattgtgtcgtatcacga

SEQ ID NO: 83654 - DNA, 367 bp, Glycine max
  Clone ID: PAT_MRT3847_46555C.1
tcgctttcgcgtgggcggacgcgcgggcgatggatgatgctgtttttcatgcttaaaatatgtgctgaacactctcctatggggtctaggactgcccgtggcagttaaacttcctatgcgcatacatgagctctctgtggaacgccacgtgccagccggggacagcttgaagtagagctaccgctctcctatctgtgttaggacttagtgggtagacttttgtatctctctgctacatttcactatcttgttctcaccgatccacattgctgcacacagtgtgtctgtgagtaaaacactggggcgttgttgcacatgtgtgtttcgctcattatgtttggagacaacatgatcactgatacaacaa

SEQ ID NO: 83655 - DNA, 238 bp, Glycine max
  Clone ID: PAT_MRT3847_46556C.1
gcgtgggccccagcggggaattttagattatgtctgagttttaaccgacgacgcttcctgttcgcggggttgctgctctaacgaaaaaacctactcgttcttgaccacactctttgggagaacgtgcggcttgacctttccccaccattcaacagtcgcttgacttgattcagggcttggctaccagtcatgattcgctcaacatttttgactgttcaactaatactgtgagtaggca

SEQ ID NO: 83656 - DNA, 1702 bp, Glycine max
  Clone ID: PAT_MRT3847_46557C.1
ggagtggtgctggctactggtggtgaggatggtatggtacctgtgtggaaaacacagcgaagatccctatgaagattgtttcgatttctggatgaagctccaattttgaaacacttcaaaataaataatttttcatgcgttgctccccttgatgtagggtgacattttagaccttgcttggtccaaaagagggtttctactgtcatcctctgttgataagaccgcgcctatggcatgtaggaatcgacagatgtcttagagttttctaccacaataattatgttacatgtgtcaatttcaatcctgtcaatgataattttttcatcagtggttcaattgatggaaaagtgcgcatatgggaagttgttcactgtagggttagtgattacattgatatcagagagatagtcacagctgtgtgcttccgtcctgatggaaagggcacaattgtgggtaccatggcaggcaattgccgtttctatgatatcgtagataatcatctgcaattggatgctcagttgtgtttacgaggcaaaaagaagacatcagggaaaaagatcactggctttcagttttcacctagtgacccaagcaaactattggttgcttctgctgattcacatgtctgtatactttctggagttgatgtaatctacaaattcaagggtctaagaagtgcaggtcaaatgcatgcttcattcaccaccgacgggaaacatatcatctcagttagcgaggattcaaatgtatgtatatggaattacactggccaagatagaaatacctccaaagcaaagaaaatttggtcttcagagagttttctctcccacaacgcagccatcgctgtaccttggtgtggcattgaatcaatgccaggaacactcttatccccatcgctaggagaggatgtaaatcagaggtgttctctgccttctcctgattgcttcttcttgagtcgcggatttctgtctgagttgatcccaaaggtttctgcaacatggcccgaggagactcttgtggactcatcgtgtcaaactcaaactgttgtttctcctacaatgtgtaaatcagagtacaaattcttgagaagtgcttgcaagggaatgtctaattctcacttgtggggccaagtaattgtgacagcaggatgggatggatacataagagtgtaccagaattatggattacccgttcgtggctgaaaccaaagtttaggctcatttgttggggaattataaggttatttgctatgctcacatagcattagagggttcttggatacaatagaatttgcttcaatgcaaaacttcattgttttcaagcataatagtatagcagccagggaaattcttcagtagctgattggtgattgccctcacataataatattctttatactaagtcgatatcaattatatgattcttttaatttttaaggactgttggttgaaagaatgtaagtttcagttttgctgatggtcctgggcgaaatgtaattcatgatcatttgtatatacagaggactgtattctatattaatttaatacaagaattttttgttcgcactgcccacacacaataatattctttatactaagtgaatgccggaaagtgcatgtttgaatttttaaggactgttggttgaaagaatgtaagtttcagttttgctgatggtcctgggcgaaatgtaatttatgatcat

SEQ ID NO: 83657 - DNA, 431 bp, Glycine max
  Clone ID: PAT_MRT3847_46558C.1
atatgcgttgtattttttattttttccccataaaataacatataacactctcaattttttatttacttgctttgcttcaacgccaccaagcctccttcttttctcatgaccctaaaaaaactccattaaaaaaaaaaatgaaccgattctccccctcgactccaccccatatgtgtcaaaggggacggcctgggactaatgatcatctatcacggcatggttgagagctggagctaacataccaaaacatgcaaaaaagagaactctttctaagggtggatccacacaccttgtggcaagggccccggtcctttcatcgagaccaaaaaaacatatcacaagctggcacagctcggatatcaaggagcaagctgcacctgggccccgcgcggatcctctttgaaagctaacagacagggtcttagatggca

SEQ ID NO: 83658 - DNA, 634 bp, Glycine max
  unsure (1)..(634): unsure at all n locations
  Clone ID: PAT_MRT3847_46559C.1
aaacctccccgatgccgtgtttacccttttgaacccngttagaagtttgattaccgttggtaaaatcagaacttggtccaaaccttttgccgatgtccctggncccccaccctcccggttgcgggnnnnccgncgcgaaccacagcaaattttttcttnccctattatttcctgcctatcccgggttttgtccantcctttttccnttttctttccctttttcagggacctgttgggattcgggcctgaattttgtccnctctttctgaangtacactccaagtcannncnngaaatccgtttgtcctccagcctgatagggctgaattgatgcttgctcttccgttgacgagttgcctttgaagaacttccccccgggactccgaatcatttaggcgccnnacgaattaaaatttctttgatnaaagggccgtcttcttctttactttggggggcccctttncaaatccctcaagatcctggaggggttctgtttttttttccagaagttcttatttctacccctggttttcccttgggttttggtggtctttgccccgccccatttctttttctgtcaacccctttttggccgcctgttgttgtcccctttgggtgggggaattttttcccc

SEQ ID NO: 83659 - DNA, 553 bp, Glycine max
  Clone ID: PAT_MRT3847_4655C.1
cccgggcccattttaaaatttttttttaggggaaaaaaatccccaggggcgccaattttaaattaaaaaccagttttttttaaaaaccggggttccaaaactttcaaaaaagtccacaaattgtttttttgtttgtaaaaatcaaagctttttttgacacaaccccatttttacccgcccttgccaaacctaaaagggtccccccccggctatttttactttccataaaacttgctttaggggccccaaaaaaaaaaaaagaaattttttttttaaaaaaaaaaggggtgggaaattttttttaaaggaaaccaaacaccctctttcccaattaaaaaacgggaagcttaaatttttgaaaaaaacccaaaaaatgcgaaaacttttccccggggggaaacataccccccccttccaatttttaaggggattcaactgtttaaaaagcacaatttgataacttacccccttcccaaaaatttttggttgttcaaaaaccaccccttggttgtggtgatgggaaaaaacccctgccagaaaaattttccaagac

SEQ ID NO: 83660 - DNA, 333 bp, Glycine max
  Clone ID: PAT_MRT3847_46560C.1
gcatgcaaacactaccatttcctgatttcgttataacagctacacctctaagagtaatcttggtgcttaaggatactattggaagaccttttataattagagtgacatctctgaacttattaatctgatacatctacaccatgaaatgacacgacgatcatgagtttaattttacctgcaaactctgctatagtgtgttactcctcttgctgaacagtatatcgtgccatagcctatatagaggtctacatcagcttgggtccacataactccagctaagtttaagagctttctaataacaaaaccgatgagcactaatactaccctgatcga

SEQ ID NO: 83661 - DNA, 552 bp, Glycine max
  Clone ID: PAT_MRT3847_46561C.1
gtcacattgattgatgtagagctgtcaaaattggcctggtccgatggccctccaggccgggctgtataaaagttccccttggcctgacatttttaaaattttgttccttttaaaattagtacaaatttaaacaaaaaaaataaataggccaatttggcccggccaaatgggccaggctgggccacaaaagcatggcctatgagatattcaggccaggctgttttcaccatttgacccgactggccaggccggactggcccatttgacagctctagattgatgtagtagactgttggttgtcattcaatattgtgatgttaaagtgttaactgaagaccagaagtttctagattaagaaggtccattgtgtttgtagacctcaagtagatattatttggcttttgttacttgtttgatgctgaactgtagttgatctttccctctctctcacacacacacacacacactgttgtacactcacggcggaggctggttcacaattattactttaattggttgcattagattggaaaaaaatgtaattcctcaaaa

SEQ ID NO: 83662 - DNA, 439 bp, Glycine max
  Clone ID: PAT_MRT3847_46562C.1
aataataatgcatgtcatcagatgatggctgagaatgttttacttgtgtttcccacaagtttgattcttttgttttgttctttttttcctttttaatccttcagtttggtggtttcttagttctgtttttctgcctgttatacgtggcttgctgctcctttttgctgttcttctctctaggtttttggaggatttattaaaccttgattgtttgaaggttttgtggggttctattaatgactaattatattggattagacactaggcttgtgattacatagagcagggaattcttataatataacatttttttttgttgtattctgtgtctctgattcagaagtctccattagcctattttcttttttgataaagcaaattgcttcatgtgacaagaacttgagagttgaaactgaaatcaaatcattgattattttga

SEQ ID NO: 83663 - DNA, 604 bp, Glycine max
  Clone ID: PAT_MRT3847_46563C.1
ttggcacagagttgcacagtgttggttgctactttagtggtttggtttctggttctggcttgcttgtgaagcacagagcactgaaggattattttggagacagaaagcctgatattggggttggaagctctagtgttcatgatcatctttttctctccctttgcaaggaagcatatgtggtgaacaatgaagagggcaagggcaacccaagttcagtgttgccaagggacaaatatccaaagcccctaatattccatgatggaagactagcattcctgcctactccctcagcaactctatatatgttcatgtggtttccattaggaattcttttagccatttatagaatccttttgggtattctacttccttatggatgggcaatggcattaggggtttggagtggcataaatctgcaagtcaaaggcaatgtcctagaagaaaagtcagagcaaaacaaaggggtcctatttgtatgctcccacaggactctccttgatcctgttttcctaagcacatgtttggcaaagcctttgactgcagtcacatacagcctaagcaaagtgtctgagttaatagcccctattaggacagtgagactaac

SEQ ID NO: 83664 - DNA, 538 bp, Glycine max
  Clone ID: PAT_MRT3847_46564C.1
ccccccccttttaatcctttaaagaacacaatttttctactaccaaaaaacgaggttgattgagccggtggaggtacctgtagtaggctgaatcaaaccagcggaaaaaaagaaaagccaaggttgttgtgagcctgtttcacgccaaaaccagaaaccatgcgccggaagaatgaggtttgaagaaccaagagactgagaccgggaccaagaaagaggctttgttgttcttcaatccaaaaaacttagcggcattggttgcattctcctttttcatcctctgttccttaatcctcctcgtacaaccttcttctttttcgacccaacaaaccccccaatttaaaccccgataacatcttccttcctcggcgacgcccacgttgtctccgccgccgccgacaacggcgaacttcccaacgtgcgccttaacgcgccccaacccttccttcttccggcatactccgccgacgagagcccctcgctttctccgaccccacatccctctccacggaattctccttctccgtctccggccacg

SEQ ID NO: 83665 - DNA, 996 bp, Glycine max
  Clone ID: PAT_MRT3847_46565C.1
cacgcgtccggccaaggaacatagaaaacaaaacctccaaacagccaaacccgtacctttctgaaccctcactcactcttctgcttcttcagatcatcggataagctccaatattctttaattcccactccacttctctggaatgtgatatttcccccttcaaattctgcttcctattttgtctcaattcccactcttgggtttcgtttccctttcaagaaaccgaaaccctagacgacttttccgcctctgaatttgagcaattggaaccccaaactctttcctaggatagtaacattggagatgaaagcgccaaatgctttgcttggtgcaaaacgcagaaaatttcaagggattttcaatgctctgtgttccatggttgtgcttttcttcttttacaaccgggaagacatcatcagcaacccgattctcagacaatcctcgtatttcacgaatcatgggttgcctcaaaatgcgattttgagagatgggtcttccttggttcaccgtcgaatggtggaaatcagcgccaacacttcaggtgtagctggtgaaaatgatttaggcgtaagtagttctggattatgtagtgggttggttcaacatgatggttattctagtccctgtgaattcttaaaggttaatccacagtgttcttctgatgggtatctcgattacttgaagtttttctattgtacatgtcagggttttagtttgtttggttatctagtgttgggtgtgtggctggctgctttgttttatctcttggggaacactgctgcagattatttttgcccttctcttgagcatctgtcaaggctcttgaaattgcctccaactgtggctgggttgtgctgctttcacttgggaatggagcacctgatgtgtttgctagcatagctgcttttgtgggtgctgaaagtggtgatgtagggcttaacagtgtgtttgggtggtgctctttttgttaccactattgttgctggaactgtttcg

SEQ ID NO: 83666 - DNA, 275 bp, Glycine max
  Clone ID: PAT_MRT3847_46566C.1
tttttttttttttttttttgggggcaaagaaccagcctgacgctacgaggaagttccattctcggcattccaaaagacgtgatgtgggacatgggaactcagctacgcttgtcaaattttattcttggcacgaaattattgattagattataagaataagtgtttacccttaagaattaatgttagatgaatgatttttaatttttcctaaatatcttttgaagcaacctttttgaatggcttgtttataaagagttttaatttggtttatagag

SEQ ID NO: 83667 - DNA, 519 bp, Glycine max
  Clone ID: PAT_MRT3847_46567C.1
gttctttcctttaatataaccttttatcatgtcaaaagcacctaaggtaccaatctattactagtattagctacttgatgactctacctgatgaaattgtcgcatcaagaattgaatgatcactgttgtggtcaacaaagaaaacatgtcattgatggctttgttcacttgaaacatcatgcacatatcattttccaggctaaccaaagcaattgatggatgattaggcagcaatgaacactgagggaaaagttgggtgggaagaaattgtggattctcacctccaaggaaactttgatgtcaaggaactcaataaagtggcagcacttgcctacaaatgcatcaaccgtgccccaagtaaccgtccttctatgagggacatagtgcaagtgttaacaaggatccttaaatcaaggcaccatgggagtcatcacaaaaattccttgtcagccacagatgaaagtttcattgatactgatcagcttgagaccaagatttctgttactgaccacaggagag

SEQ ID NO: 83668 - DNA, 458 bp, Glycine max
  Clone ID: PAT_MRT3847_46568C.1
ctcataacacggcctccggatcagaacaagcatatacagcgataggctatgttagccgcacaggagcagtccgaagagaactgaacggaagaacttttccatcgcttcagaaaagctccagcaccggcacatacacatgaccatgtgcttcttcaaacaggtggttgtgaacgacgaggagggccatctacttggccgttatggctgcatcgaggacaagcagatgctcaacagccagaagatcgacgttgttcgtgccatggctctgaacatacgaaacgaggttgtccgcgccaccctcaagtaccacgcctacctgcgcaagatgacccggaacaaccacacccgcggtggacccttccacttacgcgcgcccttgaagagcttatacaaggacctttcacgacatgaatccccagaggaccgcccgcggtgccagcgtccttgagcgcatcaag

SEQ ID NO: 83669 - DNA, 248 bp, Glycine max
  Clone ID: PAT_MRT3847_46569C.1
ctgcaactacaggcagatgcaccgcctctgagtcaaacaccgcttctcatttctcttcagcagccactatagtccgtgagtttcggccatcctcatcctaatgctccgtattctgcgcctcttacggactatctcgttcaagctgatggagagattgtggcagagaccctggtactgtttgatcgcttgcttgcgctgttagggttccgccaggactcgcttttgagcttggtggtttcgtggagcgt

SEQ ID NO: 83670 - DNA, 279 bp, Glycine max
  Clone ID: PAT_MRT3847_4656C.1
gccacgcgtccgaccactcgtccgcccactcgtccgaaaaaaaaaaaaaaaaaaaaaaagaggaaaaaaaagagaaaaaaaaaaaaaaaaaaataaaaaaataaaaaaaaaaaaaaaaaaaacaaaaaaaaaaaaagtcaatgaggttcaaactactcatattccctaacccatcattaacaattcatttagcgctgatcagtctcacagcttatagattgaataaaggcataatgattaacctaaaaaaaagggaaactcactataattagacaactt

SEQ ID NO: 83671 - DNA, 371 bp, Glycine max
  unsure (1)..(371): unsure at all n locations
  Clone ID: PAT_MRT3847_46570C.1
aaaggggaaagccgggccgcgcccgggccccgatccccaagtcccgccacgccccacgcgttacgatcaacacacccggaagagccacgccgcgnagagatcaattaggaaaaacgacggcaccgggcaaaagcagcaagaggggggacacaaaccgcgaacaccagagcaaaggagagagcgaaagggggggcacacaaaaaaagggtgcaagaacaggcaaagccttaccctgggggatgaaaagagaaaagcgggggagcggcacatagagataccacaccagaaggtatagacacaacaagtgcaggaatgcagctagcacagaaacaaggacgagatcatctcaagaaaacccgtgagcagaggca

SEQ ID NO: 83672 - DNA, 896 bp, Glycine max
  Clone ID: PAT_MRT3847_46571C.1
caaaggaaattttaaatgacgtgttattgatattgaatttcaatcaatcctcatattctaaaaatagatacagaacaaccctttggttcttatacatgtcttagttccttgatcccagctactcaacagtttccctgcaaaactttctgaatcttctttttcattggctgcgaaggaagcaaaagccttaagatctctaggctctagcaacgacaaatacagccaacaccaatgctaaacatacaacagtgcaaccaatcctgggcctcatttgatattacccttggttgcagataaatgaatctccgaaccatcctagccctgcaaacagcagagataagacattttgaagctaaaaatcagtatttgatcctggaaggactagaagttctccatttggggggtcatctggttcatcctggcaataagaacagtgctaagtgtgccaatgatcaccaaccatggccgagccatcagaaccagaagcagacccaacctttgcttaaaaaaatcttcaaagatgtgttattcctcaaatgattgcacagagattttctccaactgtagtggccaatcttctccaagttgctgtggatttagctccatagcaactttaaaatcatgtaaagatactgagtgtggtggtgtgtgttcgggctcaggttctaccagccccccagcactcgggatacgtcaatgattatttggccagatgccattaatgaccttcccctgaatctgctgttttgagacagggagcttcctcggctcatttccggacctagcccccactaaatcaacacaagaccttatcaaccgtttcaagtacacatctaacacattattcaacatatttgcacattccctagaaacgcctccaagacccagaactgttg

SEQ ID NO: 83673 - DNA, 215 bp, Glycine max
  Clone ID: PAT_MRT3847_46572C.1
ttttgatttacgacatccttatgtgcatgaaaggtggagggggaacctgactcatcgccagcgcactgcccgcagcgttcactgggtgcctgaatcgatacggggaagagcaggtgcagagaaggctagactgatggatgcgcaacaagctgttgtaaaaacgcggagagatgttggagcctatcgatatatggcaccggctaatagcacgcatg

SEQ ID NO: 83674 - DNA, 306 bp, Glycine max
  Clone ID: PAT_MRT3847_46573C.1
gattcagacttgcatcaactggtacccctatgaaaaaccccagtttctctctttcactattgccgttcaagttctaagcaatcactcagactaattttgcttctctcgaagatgtctctacgaatgctgaaccccaacgccaatgtgccgaacaaatctgcggcacttcagatgaacatcaatgccgccaagggtttgctagatatcctcaaaatcaacctctgtctcaaaagatgcatcaaaatactcgttggtagtatcggtggtatcaagcttatccaagatggcaacagtctcttgaaagag

SEQ ID NO: 83675 - DNA, 2091 bp, Glycine max
  Clone ID: PAT_MRT3847_46574C.1
tcatcaatggtggcacaaagcaacgcgtttcttactcctacttcctttcctcattcgattgcacataagcttgattcaactttcctgttatggcgtcaacaagttgaaccggtcatcaaatcacattgtcttcaacgtttcggtgtcaatcctcagattcctctatgttttctttctgagacggatcatgaagctttaatagagaaccttgcgtatgaagcatgggaacagtaggatcaagtgctgcttacttgcctccaatcgacgcttttgacgccgatcctgttgcgcgtgttaggatgtgctcactccaatgaggtttgggagcgtattcatgactatttccaaaaacaaacacatgctacagcacatcaactgtgaactcagttatgagctacaaatcttggcggaaaatcgatgcaagagttcttgttgcagattaaagctctttcagatgctcttgcctccgttggaggtccaattatgcttcaggaacacattgattccattcctgaaggcctttcgttggactatctctccatcattgcgattattgagagcaagtttgaacctctccttgctcacgaagcacattcaccttccatcaactatccacaagcacatcacaagtcttcagtgattagctctgatgactattctgtgccaaacaagacagatccagagagtttctcggctttccgtggtggtggtagttttcatcgcggtggtgatggtgctggccatcgtggtggtggcggtggttgtggcagcggtggtagttgtttcgctagcttccagtgtcaggtatgtctaaaatttgatcacactacttcagtttgtcactatcgctttgatcagtactatcaaccaaactcaactttgatgctgacaaatgctcaacctcaatccaattccactaattagattccagattctggtgcttcatttcatgttactggagaatcacaaaacatccagcaactagagccttttgaaggtcctgatcagatctttataggcaatggtcaaggtatgcaaattcacccctctggttcttcccattttacttctccatataattcctgtgtctctttatctcttaatcatcgattatatgttcctacaatcactaaaaatcttatttcagtcagcaaaattgccaaagacaatgctgtttactttgaatttcactctaattattgtgctgtgaaatctcaggttaccaatgaagtcttacttcaaggcagtgttggttttggtggtctttacagtttacctcacattcagtttcaaccttcaattggtgttgcttcctggtgttttagtctttggcatgacagacttggtcatccaaatcatcatgttttacagcttgtgttataacattgtaatatacccactattaataaaaatttgattagcttttgctctgcttgtgctgctggagaatctctcagacttccctcttctctctctacctctgtttactcttctcctttggaattggtctatagtgatctttggggaccatcccatgtcacttccactaatggctttctatactatattacctttgttgatgctttctctagatttacttggatttatctacttaaaagcaaagctgaaactttcactgtctttaagaaatttaaagccatggctgaattgcaattcaacaccaaaattaaaaatcttcagactgattggggaggggaatttcacccattggcaccctttatagctgagtgtggtattaatcatagactcgtttttcctcacacccatcatcaaaatggggttgttgaaagaaaacataggcatgtggtagaacttggtctcaccttgttgcacctcgttttgggacgttgctttcccagctgctgtttatcttataaacagacttcccacagactcactgaattcttcagtaccttatcatgtgcttttcaacaaatttcctgactacaattttttaaaaacctttggttgttcttgtttccctttgcttagaccttgcaataatcacaaattagaccttatcatgtgcttttcaacaaatttcctgacttgggacagggataggatgcc

SEQ ID NO: 83676 - DNA, 2060 bp, Glycine max
  Clone ID: PAT_MRT3847_46575C.1
ccacgcgtccgcaaatttggaactgtggagaggggactaatggctctgtgcatagtaggttcaagccaattggagatgggttggttggtttatccaaccatggtggtactgctggtggtattagttcctttatgcaaggtaataatagtcagtataaaactactagttcagataaccattcttttttcccttcagagttgcctgcaaggtcaaggtttgaggctcagtcaggggactcaagggggaggaattctaagaatctgagaatcttggaaggcttggatgatgggaaggtaaggaagatttctaggccagagagaattgttagggaaattgtttcagagtctatacctgtcatggcattgacaattcaggagcttactgatgatgtcatagcatcaactaaggaatacttgaggaatctcattgagaagcccgagaagaaagaggaactggtaagcctccagaaccggctcgagagaagatctgaccttactaaggagagtctttcaaagtgccataaagtgcaattagaggttttagtggctgtcaagatggggcttgctagcttcctatctaataaaattcaattgtctgagatggtagaggttttcttgtttaagaggtgtaggaatgtaacctgcaagcatttgcttcctgttgatgattgtgactgcaagatttgctcagggaacaagggcttttgcagttcttgcatgtgtcctgtctgtttgaactttgattgtgcaagcaacacttgtagttggattggatgtgatgtttgttcacattggtgccatgctacttgtggcattcagaggaatcttatcaagcctgggcctagcttgaaggggccttcagggacctcggagatgcagtttcattgtattggctgtggacatgcctcagaaatgtttggtttcgttaaggacgtcttcgtgtgttgcgcaaaggattgggggcttgaaaccttgatgaaagagcttgactgtgtaaggaagatcttcatgggaagtgaagatcgcaaagggaaagaattgcatgttaaaactgatgacatgctattaaagcttcaaactagaatgatatctccttcggatgccagcagttacatcatgcaatatttcagctatgcggacagcatgccagactttcctgcttctggtatttcttcaaaggatttgtcagcctctcaatctaaccttacaaaggatacaccatctctttcaaaacctaattctctattaccaaaatatggttatgacatgggctattctaggtcacatcctgatgccatgtcatgtgatctacttcagaaagacctcaaagcttccatcttaagtgaactgaaaaatgaggctgattttcatttgggggccttattaaggaaaggtggacttgaaagtttggagagcattgtgaggataaaggaggcagaagccagaatgtttcaaaccaaggcagatgaagcaagaagagaggcagaagggttccagaggatgatcaggacgaagactgcgcagatggaagaagagtacgccgaaaagctttccaaactctgcttgcatgagaccgaggaaacgcagaggaagaaattggatgaactgaaagtcttggaaaattcctattttgattactataaaatgaaaaagagaatgcaagatgagattgatggtttattgcggagaatggaggcaacaaagcagcaatgggtttaattttatttttgttgcttttccttatgttttcttattcaggatactgctaaatgtgtgtaatttattgatatgtgatgtgttggtattgaggtggttcccagaatggatggttttcaatttgataaaaacaagttttttggtgtctcatctttgtttctttttccttcataaacggaggtatgaaagctttgcacttcctgtcactgtttatattacgacttatgagactataaaacctgtaaattttttcgttatcacatatcattgttgcacatagatttgcatcttcctttatgataacattttccctttaagaaattgaattgtccttttctctatttt

SEQ ID NO: 83677 - DNA, 471 bp, Glycine max
  Clone ID: PAT_MRT3847_46576C.1
gcatgtgcatgcatatgtgtgcttgcatatatttctgtgctgagtttgaagaatctgtttgaatgaactatataaaagaaaatcatagaagctgaagtacttagattgaagaatatgtaccaataagctacataaaggaaaatcaaaaggctgaagatcaatgattaaccagtcagtgtctttattgtgtttgttactttaatccctgcctcaatgattgaatgatctctaatctggttatggtagtctcatgctttgtttttctgggatgcagatttgtcctatatgctccgttaaagttgcacgggacatgttaaatcacataacgctgcaacatgggcatttatttaagatatcctttgtactgttatttttcattgaatattggtagcttgctcagataatgggttgtttctcaagtgaaaattgaaaagctttaattgctttccttaactgaggattacttacaga

SEQ ID NO: 83678 - DNA, 369 bp, Glycine max
  Clone ID: PAT_MRT3847_46577C.1
gggccttttaggcaaccccggtaacggcccttccttcaagaaccttattaatttcttctaactctttcagaaaccttaattcaaaaactttggcaacattaacgaaattccattctttaacccttttttaattaacgaaaaaacccccttctattgccttttctttccccacaccaattaagttcctcaaaatgagagagtgcgcccacaacgcccctctaaagttcgcctctccctataaaatttttctttccttcgcgaccgcaccaaagacattctcagcgtcgccctagacctcctcttttgcgtctgatgaggcgccctaaccgcctacaccatgtacctagtctggtccgtcttattcacgcg

SEQ ID NO: 83679 - DNA, 243 bp, Glycine max
  unsure (1)..(243): unsure at all n locations
  Clone ID: PAT_MRT3847_46578C.1
cgccgattcatccnctcgcaagnaatttgancnatantntggacgnacatttgcaattatgggggaagtnanttnnatgcaggatgatnntnatcgtgtggagactacncgaactcaatttggaagtntannttaaaagacatggagatttgacagancggcttgctagggnttctgagnaagataanatntgagcgtctaccagaaggngtntggnactgcacgagcntctntnaactgggt

SEQ ID NO: 83680 - DNA, 365 bp, Glycine max
  Clone ID: PAT_MRT3847_46579C.1
gtgggatgctcttgaaaacaagtccacagtacttttttatggtggtggggctttagttgctgtggggctatcgtcgattcttgtgagcgccatcaactctgttcccttgcttccaaagattatggagttggtggggctagggtacactggatggtttgtctaccgataccttctgtttaaggtaagtaaaatacaccacgaaggcacaaatactttactattttagattttagaatctaacacgttttgttgtgtggacataagtggtggttttgagtatatcaagcccttgcattggtgtcaatattttttggatttgaatgatcaacttctttttttccatggatatccatttaccgtttttc

SEQ ID NO: 83681 - DNA, 351 bp, Glycine max
  Clone ID: PAT_MRT3847_4657C.1
ataacgctcagttctcataactctgccgccgcagcaaacccaaatccattggcttgcgagaggaaactctcccacccactgagggagataaaggtgcgaaagctcgtgctcagtatctccgccggcgagagtggctatcgtgataccaaagccgctaacgtgttggaacagtttaatgtccacgaccctgggttttctaaagcaaggtacatcggctcgttccttatggactaaaataaattagaatattgcctgctatgacactgacatacgtgacaaggcaactcaacttttgcatagtggtcgcaggagacggaatatgaacttctcagaacgaacttctgagattct

SEQ ID NO: 83682 - DNA, 958 bp, Glycine max
  Clone ID: PAT_MRT3847_46580C.1
gggagatgtgaaagtacttggattttggtcaagccctttcgttcatagagtgatatgggctctaaagttgaagaacattagttatgagtacatagaggttgataggttcaacaaaagtgagctacttcttcaatccaatccagtttacaagaaagtccctgtgcttattcatggaggcaaagccattgcagagtctcttgtcattcttgaatacatcgaagaaacgtggccagagaaccacccattgctgccaaaagacaaccatcaaagggccttggctcgcttttggattaaatttggagaggattcgattgcttctattaccgatttgtttcttggaccctctaaagatgaacaagaaagagcaagtgcaaagaaaaaggcagaagaaactatcatggtaatggaagagcaaggcctaggagacaagaagttctttggaggcaacaatattggaatggtggatatagctcatggatgcctaagtcattggttagaaggcttggaggaaattgtggggatgaaattgattgagccaaacaaatttcctcggttgcatgcgtggactcaaaatttcaagcaagttcctgttattaaagaaaaccttcctgattatgagaaactgttgatccatcttgaatggcgtaggcagggatatgttacatagtagaactagaaatcataaaatgggtaatgaaattatgactatagtctataggcctatagtgaataggagtttagcacattcacatgtgattagtgaacttaaaaaagtttggttttatatataaaataaaataaaaaaaatttgggagagcatttatttccaatcttgaactgaactcaaatttattttatagtgtagtattttgcaaagctctttttttgtgtctgtcaaactagtggtatgcccggctgatatagtgagtttgaattaatagatttctcatttaccccc

SEQ ID NO: 83683 - DNA, 368 bp, Glycine max
  Clone ID: PAT_MRT3847_46581C.1
aattcggctcgaggccagatgacaaaagacggcggatggggaatgggttatggatgatgggtgtgtagactccaaagaaatacaggtgcagggttccccaatcaatggggccgtggggcatgatcgaattgcctgctgaataatgaattatacgattcgacgcatatatttagctcaacattctcttcacacaaatatagagaccagaaatgaatgatttatgtcttgaaccaaaaatgtctctcgaattgactccaaacttattaataaaatgtgagtcactaatgaaacttgatcataatcaactatataaaaccaatactcatgaaaataatactcttatcattatcatcacgtgtgatatactg

SEQ ID NO: 83684 - DNA, 322 bp, Glycine max
  Clone ID: PAT_MRT3847_46582C.1
aaacccaatgacaaaaatatgtagccagaatggcacaaatcaaaattttaatttaacacaaccagttcaataaaactagaattaaatttcaagtccaaatgttgtctaataataaagctgaaacaaaaccaccccaaattcttttttctagatgaacaaaataccaactttttgaagtttttcaacacacaagctccataaaaaatacatttgcaaactaaagctttgtccaacgcacccaccaccatgcttaaaatcaaaaaagagcttttaacggacccgtgggcggacccttgggcggacccttgggcggacccttggg

SEQ ID NO: 83685 - DNA, 891 bp, Glycine max
  Clone ID: PAT_MRT3847_46583C.1
caccatcctgcgaagataaactttgaaaaacctatatgaagagctccatcttattgttgcgagaagacgacagaagggggatatattatccctacaacgtaataataaccaaaacagcagagagaagagaaggtgtagacaaacacaatctctaatggcactcaggatgtgggcttcttccactgccaatgcactcaaagtctcttctacctccagacctcatctcttgcatcctttttctttctccagatgcttgtcttccgtcttggatggacttaagtatgcagattcacacgaatgggtcaagcacgaaggctcagtcgccaccattggtatcactgaccatgcccaggaccatcttggagaggttgtgtatgtggagctgccagaatcaggtggcacagttacccagaagtctggcttcggagccgttgaaagtgttaaagcaacaagtgacataaactctccaatctcgggggagattgttgaggttaacaaaaagctcacagagacacctggcctggtcaactcaagcccatacgaagatggatggatgatcaaagtaaagccaagtgatccatctgaattagattccttgatgggtccaaaagagtacacaaaattttgtgaagaagaagatgctagtcataaaaagttgaattcatattggttcctgcagttatatgtgggactgactgttctttacatgtttatgattttattatcttctgaacagttttttaatatgcaatataactggttctttccgtttgtttctttccatttttccttcccctgctattgtctcttgtcaccgacacttcagtgtgtctacattctaatttctttaataaaaatatttttattaaagataaaaaaaaaaaaaaaaaa

SEQ ID NO: 83686 - DNA, 394 bp, Glycine max
  Clone ID: PAT_MRT3847_46584C.1
gggaaaaaaaggggccctcagccgggggcattggggggttaaaacaaacctgggccttggggccttaccttatttccggaaccggaaaggaattaattccaaattcggaggcggttaggtaaccggttttatttttattcctaaaaagggttttggttggttagttaaaaggggcgaggggggtttccaattggccttacccaaaagaagggcttttttgggaccaggattttaatttgggttggtggccatggtggtttaaccccccttgtaaaacggtgggccaaggtcctgccgggcccaaatttaaaccctaaggttcacatttccaccgtgggaaagggcattttttttagcagcccatgactggggttttaccggagtggggccccgg

SEQ ID NO: 83687 - DNA, 428 bp, Glycine max
  Clone ID: PAT_MRT3847_46585C.1
tcgttctctcatactctcacgcgtacgttattgtttctaaggttgcacaagacatggttgaggaatggtttgattgtgtagatgaggaggattccttttatgaagacgttctaggtgcgatactaactggtgttgatggtttggactttgtggaaagaataactcttgccacatctgagggttatcttaatgtgcttacacgcaaaaatggcgaaaaaggcacaaagagatttgattctgtggatggtgaagagattacattgattcctggaaccagggcagaagaggcttacaacaagataataagtgaactcgagaaatgtgagcatacattgattgggattgaacgttccaaggatgatagacttccttgtcagaaaatttttgacatattaatacgctctgatgactattccccctatggagtt

SEQ ID NO: 83688 - DNA, 206 bp, Glycine max
  unsure (1)..(206): unsure at all n locations
  Clone ID: PAT_MRT3847_46586C.1
acttacttcttaaattgataagctgagagctgaatctgatatttctgaaaagagtcttgatcattctgttcctggtgatatttataagagggagtggaggcatttatnaatatcttcttctattataacatttctatatttcatggtccaattatttatttgctgaattgatattaattatttttctcttcttttgaatttacttt

SEQ ID NO: 83689 - DNA, 394 bp, Glycine max
  Clone ID: PAT_MRT3847_46587C.1
aggacataaagaattttaaaatcacgtgatttcagtttctgaatctttaacagtgacagcaacacatgtcttagccgcatcccaaatataaatgtacagatcattcctcttaacaagagcccaggaacccactctttagcaggtgagtgtttgaaatagtgcccaacatccaacatttggtttctcacaaaagacccatataaatacatagaagcctggatgctttgctgtcaagaccactggattttacgggaaaccaagcataccttcagtcacttttggcgacctaagatctgttggctcctttattgggaacttgttaccaaacacagcatcatataattaactgttgtggggtatgcatcatatgtgcagaggtcatcaaatcccatat

SEQ ID NO: 83690 - DNA, 641 bp, Glycine max
  Clone ID: PAT_MRT3847_46588C.1
ccgggacactgcatcttcttcaattcctgtcctgaagatgacaagcaaagtggtatctcattgggtgagttgtagcgatctgagccgttgatctgtgttcatcatgcacaccatgcccgtgccccaggaccatgaccgtccgtgtagtgttcaaacctggtattgaccttatcggattgcctctccttcgatagcaacggcagcaccggcaccaagccacaggaaacttgctgctcttccttgaaaactgtgctcaacacaacccctaagtgccgtttgacgaggctttcaacagtaacgctcagataggtttatgcatccatgtcaccaagggtgactcgcttcccgctgcttgcgaactctctactccttctgccgctaattgtggactgtctgctacgcctgctgctgctcctggcccctctcctacatctgctactgcaactattgtcactccaggaggagttccgtcatccactcccgagaacgcattatcagcattaatccccatatacagctggatcctctattgcttgccttttagtagatcgatctctcatgttcactttcggagtatggacatgacattatagactattttcatgtcttctgacttttccagcttctatgtgagacttaat

SEQ ID NO: 83691 - DNA, 282 bp, Glycine max
  unsure (1)..(282): unsure at all n locations
  Clone ID: PAT_MRT3847_46589C.1
aaacatttgatctcaatttacacagtattctcaattttcagcctcatcagaaaagaggaacactatctctgggacagtcatcactaagnnncnnnttctaatttgaccaaaagtcaggtgtgtccaagagcgtcacgaatgctgtccttagcaagaaaccacgttgaaaccctactccctaccgcaagatatgacaatttcgactccnntcagcacaccacgtgaaaaattatatacgaacagcaacattcatggggattccatcaatatgagtnngtgcca

SEQ ID NO: 83692 - DNA, 1036 bp, Glycine max
  unsure (1)..(1036): unsure at all n locations
  Clone ID: PAT_MRT3847_4658C.1
ggggggaggttggaaagctaatggaaaactacatagctgaattagccaccgaccgaaatttaaccgttacaaagttcaccaggttggcggaattaattcctgaacaatcaaggccaacataagatgggatgtatagagccatagacatctttcttaaggctcatcctgctctaagtgacatggacagaaagaaagtttgcagcgtgatggactgtcagaagttatcgcgagaagcatgtgcgcatgccgttcaaaatgaccggctacctgtccagacagtggttcaagttctctattatgaacacaaacgtcgtttttcaatgccaataattgcatttatgtgataccatgtagattgtatgattatgatcatgtggtacgaactatattttaaagtgttttgaaaaattctctccacttctcgaagagaaaatgaagccctgaaattagagttagtgaaactgaaaatgagattaaaagagatcgaaaattccacgcttaagtcaacggttaatagtcctgctgtaagtgcttcaccttctgctgataagcctcctttgcctcgaagatcattcatgagttcagtgtccaaaaaacttgggaggctttctccttttgtgcgtgccgatggtgtcttgccttttcccaaaggtcgcacaaaaccaaataagaatcgacgccactccatttcctgaggccattggtagttcttggtgtgcagactaaaggttcttccttagattcaggggtttgaaaatacaggattagtctttccaagttttttgcttcatttatgtgataccatttagattgtatgagtaatgatcatgatcctttggtgcgaactatattgtaaagtgtgatgaaaatttaatataattgtagagttggattgctgtctagccggtgagtggcagtaataatgttgtaatacaagaataataaactaaatttaacattggcagtccaagcaagaatcataattcttcctggccgccggctagtcgacccgtcgacccgggacccatcatggcan

SEQ ID NO: 83693 - DNA, 464 bp, Glycine max
  Clone ID: PAT_MRT3847_46590C.1
cacttattgaaacaggaaagtagcatggaggattttcgattcactaatccttttagaaaaagaaaattggttgatgatttcaatagttcagaatcataaaaccaacggtttctgtgaaagtaaagatgagtggactcaatttgtgcagcaccaacaacttatgatttgagttttttatatgtcacacatgaggaactgggcaaaattgtttggcttctcttcctgcaccagcagtcaacaatacgataatgagcaagacgattcgagttcaactggtgttaatgtagataaaagacaacttggtaactagttttatttttctagtgcttacttgaaactgatctaagttttgcagtcaagtatgttttagatatgtaacttgtctgtgctttcattgaaaatagattgttccaaattttacacgtaagtctcttaatacaattattgttccatattttacttaa

SEQ ID NO: 83694 - DNA, 440 bp, Glycine max
  unsure (1)..(440): unsure at all n locations
  Clone ID: PAT_MRT3847_46591C.1
ttcatanccggcgaaaaactaaatcgcaggttgccgcctttgaatggcaactgcatctacacatgggaccaagattctaaggatttgacaacaactgactactagattgtgtgcgatttcctaagggaaagaaaaacaccctctgggctggtcaccaagacttcgcgaatcatttgatgttccactcttaatttatttgctgaacaactcgcctattagatataggatttacgtggtaggattaaacttcttttggttctttttcagttctctgtttaattacaagttcaagctggggaaaacttgggattagtgcttccactctcctatctgggatagggacttcctggggagacctttctatctcccttttgtgcttgactctcttccttctcactgatcccgattgccgttcaaagtggtcttatttgaaaaacact

SEQ ID NO: 83695 - DNA, 331 bp, Glycine max
  unsure (1)..(331): unsure at all n locations
  Clone ID: PAT_MRT3847_46592C.1
gnatcgcatgcacgcgtacgtaagctcggaattcggctcgagnttatgangntcaancannancgagtncnnagnngnactgccctnctagnttctnaanntggaganaacggnttgcncagtgcgatgccagtangctgttgctcgtcctctngcaaaantggctggttgagagttgcccntgnaatgangcccagagtatacagatcncagaactcaagttgcaanggcctnntggggtctacgagccaagcgnagatggtgctngtcanggatcctatcnagaangcnattnatgatctctacagntantttagatttnanncnacgn

SEQ ID NO: 83696 - DNA, 675 bp, Glycine max
  unsure (1)..(675): unsure at all n locations
  Clone ID: PAT_MRT3847_46593C.1
tacagagctaagatccctaataacatatttccatacaaaagtacttctaaaaattcagttctgataatcacagatctcacctattttgaacttgaagcataatgatcttagatgtcctcgcaacataaaaaatgaattattataaaagaacaacctttgtttatgaaaagaacaatggggaagagaaaatgttacacttgctttccagtagctaatccaatatttcactacaaacaatatcaatatcataacactcattacccataaggataaaaaattaaaaatcatttggatgtatccatgatttcacataaaagtatgcactaaaagaaatttgacaggtaagcaaacaaagtgacgacggaggaaagtgaactgcaggtctaattaatacccccccccggttaatattctcatcttccatggttaatccaccagagttgcttgcatcagtatccagcagaaaaataaaaactaactctacctgagtgcattccaatccagtttctatcagcctccaaaccccataaatgtttatgaaatttgaacaggttaagttagtgggtaaaccaagattcataggctaagatgcagtacaagaataatcattccaaagcccctgatgatccacaagactttcactattatcgggtnntgatagtcaaatgtacactt

SEQ ID NO: 83697 - DNA, 302 bp, Glycine max
  Clone ID: PAT_MRT3847_46594C.1
gggcggacgcgtgggcgcgatcacagggtggcgttccttaaaaccggaaacaaaagccatcggtacctgatttcaagaatcttccaatttcttcctacctcttgggggaccaattctttagggaaagaaaatcactctctgggctggccacagacctggggaatcactttcttttccactcttaggttatttggtgaaccccctcctatttgatttaggacttcggggcagatttaaaccttctccggttctttctcaggtctctggttaatttcaaggtcaagccggtggaactctggatt

SEQ ID NO: 83698 - DNA, 477 bp, Glycine max
  Clone ID: PAT_MRT3847_46595C.1
caaaatacacggcttccttcggggggagaaaagagaaagcaacaaaagacctagttttcgaatagttcgcaaggggaacttttttacaccaaaacatattacaattattttttctttcaacagtacacacagctaacggataattaaatatcacattcttttgtaacacctgggagataagcggggttaaacaagaacctcagggggagtggcttaagggttggttactccaaaggctgaagaaatatgaggaggttcagttgacggatttaagatgccaaaggagtgcaagaaacctccaagtgccgaatgatctgttagaaggccaatggatattccagggtaaacccttctaccgcttccaaagggagcttggctgaaaatgacgacccttaacgtcaatatctttatgagggggaagaaacctgtctggctcaagcgcaaaggttctgaccaaactttaggatccgggggaat

SEQ ID NO: 83699 - DNA, 939 bp, Glycine max
  unsure (1)..(939): unsure at all n locations
  Clone ID: PAT_MRT3847_46596C.1
atctaagctacaaagacatacatatggacataatttcatctggcttcataaacacagcatctttcaagggcagtatggtgtaactttgaaactttcatatttattcaaaatgctcagtgtaatttaaattgttttttcctttctgagcaagtgcatatcgctatgtgcactattataatcacttgtagcctactgaatacattactttatgttttctggttgcaatgtcatggctatgatcatatttaatatcagacccaggttttatctagtagatcacatgtttaataaanaacttcgtaccccattgcccagaggctcttcgctatgcgaaaggattggggaagccacgcgtccggctgaagctccttctgcagcagcatttatgatttggacacaaaaaagttccaaacttttcagttctctgagtttctggtaagaactggattcgtttccatgtgtgatcgtcagaatttgaatatactattttgtgtatgataattataaaattcaatgtttttgttgatatgttttgtgggtgttgacctaaccacactctagttgtgcttgtgcatgtgtgtgtgtctgtgctttctgggaatcttattttaatgatggatgttggttgaatcgatcttgcctatgttgttgctctagtgttttgttttgaatcccatgtcttattgggcattttcacaaatgacaaatctaatagttgtgactggtgagtactcatttcttgttctgatttctgagctggtttagccacattgttcaccccaagttcaatttgactcaatgtcagttatgattttacttttacttttgaaaagcatgcctggaactggaattaagaatgtggggttttattgtatccatgggtttagattcaaaagtgaacatcttttgggtgggtggggttttttaatatgcttatgg

SEQ ID NO: 83700 - DNA, 207 bp, Glycine max
  Clone ID: PAT_MRT3847_46597C.1
ttcgtcttaagcagcggtaacaacgcatattacgcggttctagattttccatttcagaggtacacaccgcagatctgtgcaactgcatcctccgccgccgctgtcgacatgggtatcgatctagtagctgatggttaaagcaatctatctaaatgaactgcacctagatctgatgatatttacctgatactccttgttaagctttat

SEQ ID NO: 83701 - DNA, 365 bp, Glycine max
  Clone ID: PAT_MRT3847_46598C.1
acttttggtttttttatgccttcaccgcgcttaatcgaagccattgtaaaaaaagtaaggcgtcccatactctatggtctatttccctaacgccaatgaagagcacgataggctccttgacgaacgcaatagccctcttgacttaacactctatgaaaattgaccctgctttacgctatcaggcacatatgatggcatctcctctacgaacccttgttgaacttgtggctatgggacctccttattgcctcctccaaagcctcaaagcttatggcaacaccttgtcttcctaaacgcccacttagggctatgcgacgaagataaatggcaggggggggaggaagaacattgattatggcccagga

SEQ ID NO: 83702 - DNA, 565 bp, Glycine max
  Clone ID: PAT_MRT3847_46599C.1
gttttggtccattccgctccttccctctcccatacagaacactctgttctccactcaagcctccaaccccactcatctctctcccattctcccatatttccaatgaattcatcttttttgaaggaaattaagaaataatcttgggtacttgccaaaaattgttccctacccaataaatcctcccaaaatttaattttatctcgtctgcccactttccactccaacaatttgagtacatattcatcaatcatcatatcgttgattaagtaaattcctgaaagtattataagtaagtgctgtacaaatatttttcttctcctcctctctgtccttttcctccctcccaattcatccaaaaagggatagacatttaccatttttattatatgtattattctcgtaacattattattttttctttttatttattaactgcagtatgtcattcttctttacacacgtttcttgctctttctatcattctatgtatctcatttttaatatgcataaaatgcagttcacaaacatttaaccgacaattactttcctttggcctttataaata

SEQ ID NO: 83703 - DNA, 178 bp, Glycine max
  unsure (1)..(178): unsure at all n locations
  Clone ID: PAT_MRT3847_4659C.1
tgantgtacaantngggcttggcanggtcttcactcngcnagtggcacgtgncccanntnttgggtggttttntcggctttggntggcntgtagttacgtggntgtggcntcacgccaagnaagnacccgtcaaanctttgaactaaggggttcnttgttgccnggtggttgggatca

SEQ ID NO: 83704 - DNA, 333 bp, Glycine max
  Clone ID: PAT_MRT3847_465C.1
cgcgtccgcctgcttgcagaagactacaaaaggggaatgtgcttgactttgttgtgagctataagctgcggtatcgtgaggagaatatgaacctccttcttttctttgttgctgcagtatttctggtagcatggccatgccatggcgcaagctaccaaaggttccctctcccaatgaaaactggctattgtgagcgttcttcggaggtaaaatgctcaagttttaagctctctgttgaatcacgcaacatccgtacctttaaaacctttcctgaatagtgctttaaaccaacaaaggtctacattaatggcgagcaatttacatcatactcta

SEQ ID NO: 83705 - DNA, 416 bp, Glycine max
  unsure (1)..(416): unsure at all n locations
  Clone ID: PAT_MRT3847_46600C.1
ntntnangcacgcgtacgtaagctcggaattcggctcgagctngaatcncgcctctancaatacanncantnncancngacncgagnatnnngcncnaannatntnncnngccgnaggntagctngnctaanttntcagtgccgngngnaatagttcggganngaggnncgtgaagnggngaactgncagtcgttnntacagatgtaggnaatgantancccgagtggggntgnctntacaaananagattaggagacggcncgtacaaagnaagnggccnngngagacctnnnntatngtgcnatancatgcnncatnagttttgcgcaagagttngntatgcgccggancagctgcttgactgtagaagattagntaacggannacaaagnctaatgganactcgacctgccga

SEQ ID NO: 83706 - DNA, 355 bp, Glycine max
  Clone ID: PAT_MRT3847_46601C.1
gtagaagccacttggattctctcgtctcctcggtgatcaccagttacccttctcgatttctcagcacagcgagagagatagagtcattcggcattcgaatgcgtgtgttgtgtggtcagtcaccgatggcagcactaactgccagggtacatgccgctgacgattaacgcatcacactgcctcgtaatggcgataccggtgtcagacagagtgactgcttttgcgaatttctgatggctccatcacaactaattttatgacatcagtggcattgatcttaagagatgaatgattgtacttgatggcaaacgggtcaagtgacaaatctgggatactgctgatcacgagcgatttc

SEQ ID NO: 83707 - DNA, 241 bp, Glycine max
  unsure (1)..(241): unsure at all n locations
  Clone ID: PAT_MRT3847_46602C.1
gcagagatgacaggtgggatgtgtggacagaaggtgcaagagatagaggtgacagtggtgatgatgccaaagaaggtggtggacttcaacggcgtaacctccgtctgataagtgagttgctatggggancgccaccgagttcgtggggaaatgcttgggcgcattaggtcatgcagttgatgctctcactgccctgcgctcgccatagtatctccttgcagctgtatcagtgctacgcaga

SEQ ID NO: 83708 - DNA, 258 bp, Glycine max
  Clone ID: PAT_MRT3847_46603C.1
gtttctgttagccggctatgactggcatgcctcgcgttagtgccttggtgctgatgctgctagtgtatgttgggagactcagtgcattatgtgttagtagatgttgagtgttgtatggatggacacacccgatgtggaaagaactcccatgtattgataggaagtgccgtatgacactctagatgcagcgccaattttaaggacgctcgcatccagcgatgtcatcgggcgtgagcgagcgttgtcgtgctgttcgtg

SEQ ID NO: 83709 - DNA, 469 bp, Glycine max
  Clone ID: PAT_MRT3847_46604C.1
tcgtcactttcagtgtgtgtttctttattggatcccaaaagatctgctatatcatctcccctttttcattcatttcgaagtcaacacatgtatgagccacccattcctgtaaacccagacactattggtgctatgctacctaaattaagcgaattgcttatgcttttgaatgtatcatctgatgaaaaagtattgcctacaacatatggagaattgagacctccactcgggaagcatcgattaaagattgttgagttcattgctgtccttctaaaaactggaaatgaagtggcagaaaaagaaatggtcaattcaggaaccattcaacgagtcattgacctcttctttgagtatccatataataactccttacaccatcatgtagaaagtatcatattatcttgtttggagagcaaaactaatgccattgttgaacatcttcttaagagtgtaatttaattggaagatt

SEQ ID NO: 83710 - DNA, 178 bp, Glycine max
  Clone ID: PAT_MRT3847_46605C.1
ctatctcgtcgcgaaccaccagcaaattttttttgagactgtttaccggccctttgaggttccactactacacaacctcgacaggtggcaaactgttatcgacgatgaggaggagacatccaagcaaaaaataaaggcccaaagcagggaaattaagcgtctggaaaaggaaggcctg

SEQ ID NO: 83711 - DNA, 344 bp, Glycine max
  Clone ID: PAT_MRT3847_46606C.1
tttttcgccttaaatgatatatttttttgaattatgagggtaagttaatagaagatacagctgtgcacctaggacttgttcatctctaataatgtgtttggttgagaggatgaaaatagatgagaaatatttgaattacaagagtatagaaagtgtgagacccacttgggatccatcctatttcttctttatttctctccttcccctctttacgtcaatcttcatgtcagcagcagcaaaaattcaagtctgatgtccataactaagcaggttgcacattttccctcgtttttttgtcaccgaattccccagctcctccttgcacccatcaaactgatgcaact

SEQ ID NO: 83712 - DNA, 179 bp, Glycine max
  Clone ID: PAT_MRT3847_46607C.1
ccacgcgtccggttcggttcaaccacaaaccttcctctgaatcacttctcttactctgcaacaacgtcgttttccttcttcttcttcgtcttcttcttctttgctcacccggctcagttcgcgctctcagtaaaacgcgctcaagtgtcgccgttttctgcaaattcagctagggtttc

SEQ ID NO: 83713 - DNA, 683 bp, Glycine max
  Clone ID: PAT_MRT3847_46608C.1
cgccttaaatgatatattttttgaattatcaggataagttaatagaagatacagctgtgcacctaggacttgttcatctctaataatgggtttggttgagaggatgaaaatagatgagaaatatttgaattacaagagtatagaaagtgtgagacccacttgggatccatcctatttcttctttatttctctccttcccctctttactaaacacaagaagaaaaaaaatgtaagattctgtgtacagtaaaaaatatacatctatcatccgcatagagttgttaggagactgtctgattcaactatgtaccgtcaatcttcatgtcagcagcagcaaaaattcaagtctgatgtccataactaagcaggttgcacattttccctcgtttttttgtcaccgaattccccagctcctccttgcacccatcaaactgatgcaactgccattccctcgagaagtttggtttgcccttaacataaaagccttctcctgcatcatgtgtcagctagatgatgaaatttagcatttatgatgaatcactaaaagatagaaatactgtaactttaaaatatttaattaaaagaagttatatgaaaagcaaaggctcaacagaagtcatgttcttcagacactgttatacttaaatatattattacctcttggtcccctcgtgccgaattcc

SEQ ID NO: 83714 - DNA, 598 bp, Glycine max
  Clone ID: PAT_MRT3847_46609C.1
ttttgttgtttttttttttttttttttttttttttttttttttttttttgtttttttttttttttgttttttttttttttttttttttttgggaaaaggaaagggggccctaattttatttcaaatccccaacctttgggggccaaggggaagaaaaaaaaaaagggggaaacccccagggggggaccttcccccctccctcccaaaaaaaaggggaaaaagggggtccttaagcttttgccccaaccccccttaagcattttggggcccaaaaataataaacttttttcccctttcccctttctttttttaaacaaacaacgggttccccgcccttttttggccccggccccttaaatttaataccccatggccccccccaccccgggtctaggggaaaacccttttttttttccgcccccccaaccccaaaaaaaaaaaatttgaaaagggagggggttaattttttgggcccctcgggataggtccccccaaattttttaaaaaaattcggccccggggggcgccccgggatttccggcccgggccctgggggggtaccaactttccctataggggggggttttaaagcgggggg

SEQ ID NO: 83715 - DNA, 1037 bp, Glycine max
  Clone ID: PAT_MRT3847_4660C.1
atctattaggttgcactctttttgctaacaagagtgcaacacatgtttatgtcgacctctcgtccgctttccgagacttgagtcagagtggaagttatgcatgagtagttgttgctctagtgcatatgtatgatcatttgaatgatgcttgtaagagcgacgatcgaaagcttgctggttacatcatctcgaatacagccactcccaagaaattgatgatatgtatcattatctctagcagaagtatcccaaaagcaagtatttttttccaagaaattaaaaatggattcttctgttcttttctctcatctcctgtatacatatataggctttgcttttctgttaggcttcaccatttgttagaggtacgtataggtagaggactgtgtaaccttgcttcttggcagcacgatagataattagagaaagaagagtgtagtaactacaacttgcatcatggcatccaggattacccaatcaacagaaggttcggtgcaatctgctgaattgccttgtgattgcagtttcgctcaaacagttttcactgatatgttatttacttattaagttgcatatgatttttttttatctttgttatggaagtaatattctatctaaaaatgtctaaccacacttcctcaatttttattactacctagttaatttatgagatgataatgctttactttggcaacgactaatgtgatggcttgagttgacattctatcaacaccgtatacattgaaagaagctgggtggatgaacatggtgttgatgattctttttgccgtcatttgttgtcgtacagtcacccacccttatgagatactactttgaaagcagagaatgaataactagctacccagagatatgagaagctgcatttgaaaaaaatgtggtcgtattattgtttttgtgagtttatctatatctttatttaaattaattgaaaattgttgtaccatgcttcctagagaagtgtttatacaagtacttatttgatttttcttaaaatgttatcaaatatttatatgttt

SEQ ID NO: 83716 - DNA, 296 bp, Glycine max
  Clone ID: PAT_MRT3847_46610C.1
tggggatggtgaattgtttttatttattccgggaaccggtgttgaacaggcttacaacaagctaatagttgaacttgagaaaaggtgttcctacattggttggcattgaatgtcccacggatgagaaactttcttgtcgcaaggcttcttgtcaaacctaaaacgcgctgctttactattttccctatggaggttaatcttgtggtcccttagaaggttttaaatttttgtgagggtcattatgaataaaagggacacgcttacttgttaagttggaatcaacccataccccatgg

SEQ ID NO: 83717 - DNA, 302 bp, Glycine max
  Clone ID: PAT_MRT3847_46611C.1
gtattaggggtttttgttactttttttttcccttcctacccttttttcccaaaaccccaaaaggaggggaaaaaattttttttcttcccaaaaattaaaattccccacctcccaaggggccccattgcagtggggaaaagatttcaccattttaaaagaaacccctggcttgttttcaagatcacctgcccaaattaacccaaggaaccgccgtaacattgaacccgaacatttcagggggcttaaaaaacaacatcatcccggcttttaaacaccagcatgggccacaggatcctacccct

SEQ ID NO: 83718 - DNA, 204 bp, Glycine max
  unsure (1)..(204): unsure at all n locations
  Clone ID: PAT_MRT3847_46612C.1
gntaggctatggntggtgagagcgtcgttgagtccccagtgnagangcagagncatggtnatgnagaanatgangtctctgtttccatggatgtggagggtgncaaagaccctcttagtaacggtttatnatntgtgatncctgggtggntctctganattagntcantgtcgnctggagacnctcactccttgaaggtggaaa

SEQ ID NO: 83719 - DNA, 411 bp, Glycine max
  Clone ID: PAT_MRT3847_46613C.1
ttcagtgaggataaaacggaagttcaatttggcagacccatgctagtggttgtgtctctgtccaacagttttttagatgagttgcccaaggcttgctctgacacggaatggatgctgcctgagctttgtatccttctaaaaatgtcttataattacatagccaagcaaaatataatgttctcaccatgagatggagcatctcttcctctctctgtctgtgtgtgtgtgtgtgtattaatcttgatattagtttccttaatccaacaaagtattcagttttagtgttgttggtgatcttagtggagctgggatgtgcagcctttatattttttgacaaaagctggaaagaagttagttgtcactggcattttatgatatgaaattcaagaagttatttttgtatatttataa

SEQ ID NO: 83720 - DNA, 299 bp, Glycine max
  Clone ID: PAT_MRT3847_46614C.1
acaaatacaaacagttgtggtgttatgtatggagagagacacatatcggtgaggatgtttctgcatttaatacagcctagggagtctacctttgcgcatgaggaacgatgaactcgttgttggtgacattaaacgactacaggatgaagacattcaggacaatggggtcaccataattggtgcagatattctgggcatatgcatgactgggccaacagagccactgacatcgattggtattaagctaacattcatgggcatgcttgccacgactataatgacgcttttcacatgggaga

SEQ ID NO: 83721 - DNA, 343 bp, Glycine max
  Clone ID: PAT_MRT3847_46615C.1
ggctcgaggtcatatgcagcgtgcgtcagttttattgcttgagccaactatcgctatgtggctatgggatgcattgaacctaagcctgctcctccagatctcctgaggggttttaactaccacacattaaaggctggcagaacgttcggacgattaatttttcaagcaccaaatggttggcgtagccaatgcatctccaccagcagcggaggtctgtcattcacctgtcaacttgaaggcaagtaactcataggctccaagcacagggcagaatccacgatcaggaatagtaccgcccggggatggattttctcatccgtgaggaatggattatcctttcatt

SEQ ID NO: 83722 - DNA, 574 bp, Glycine max
  Clone ID: PAT_MRT3847_46616C.1
ctctccaaggcaagggggttgatgttagtgggtcccttggcctggatggagctgctggtttgcagttgatggatgtaaaggacagtgatgatggtggtgatggtgttgatgggataatgagcctatcattaactcttgatgaatggatgaagctggattctggtgagattgatgatatagataatatcagtgagcacacttccaaacttcttgcagcccatcatgccaactcttttgacttcattcgtgggagttcaaagggagagaagagacgaggcaaaagcagaagatgtggtttgctaggaaacaatttcacagtagcattaatggtgcaactccgtgatcctatgagaaactatgagccggttggaacaccaatgcttgctcttatacaagttgagagagagttcatgcttccaaagcaaagaattttcaacagtgtgtctgagataaggaaaaattattatgaggatgacgagagcgatatagtagcaaaattggagacgaaggacactgagaaagaggagaaaagttctgaagaggacgagggcattcctcagttcagaatcactga

SEQ ID NO: 83723 - DNA, 607 bp, Glycine max
  unsure (1)..(607): unsure at all n locations
  Clone ID: PAT_MRT3847_46617C.1
nnnnnnnnnnnnnnnnnnnnnnnnnnnnnnnnnnnnnnnnnnnnnnnnnnnnnnnnnnnnnnnnnnnnnnnnnnnacgcgtacgtatttttttttcctctagagcggccgcttttttttttttttttttttttttttttctacattggtggcactaaaattttaatctgttaacttataaaaactactacttaagcccctcaccacaattacaacaactagcttgatgatataaatgaatgctacatttaaaatcccacgcatccagcatatcattatcaacagcatataacaatgtacaatctataaactttcctatcttcaacgcattacatctgtagatgatgtttatttgtaaattagaacgaatatccggttaacccatttactatcactgcatcaatgaaagcccttaaacccatggattttttctgtatatggtatcagaagagtaaaattactaaacaaaaatgaaaaaaaaaagagtctaaattctttcattcatcaatttcataataaatatgaatcaagtgaaagaaaagaaaagacaaaccatacatgaatgttggttagaaactaaaaacatgtatgtatttaagtttgtgcgc

SEQ ID NO: 83724 - DNA, 272 bp, Glycine max
  Clone ID: PAT_MRT3847_46618C.1
gttttcggccgccggctagcgggggggttgtgtgcgccgcgcacgacgtgcaggcccagccggcctgggaaggtgtcctccgtgaggccctccccgcggttgtgcgacagggccagccctcgccgggccttcgtgcccagagaggcacgaggggcctctgctgtcttgaggttccggtccgggtgcgggttctgcggcctgggcatctgtgcaaagacgctatctttgacgcttcggggtgcgttcctgctcttttccccctcccgcggttc

SEQ ID NO: 83725 - DNA, 348 bp, Glycine max
  unsure (1)..(348): unsure at all n locations
  Clone ID: PAT_MRT3847_46619C.1
tttttacatcattgtccacgtttatttaattttttatgggacccatgctctcggcgctcttaattacgtggcatgggaggccccaagttctctatcagttctttatattcagacccgggaccaccggggccaaacggaggcacggttctggcaaaaaaaaaggaaattgggtacaagacccccccaaaaaaaaaaaaaaaaagccgcaaaggcgcaggagggnaagaaaaccaaagtgaaaaaagntcactcccctacaacgaggagggccctcttcttttcttccccccccccccacggaaaaaattccccctgcattaccgtccccccctcagaaggggggggggg

SEQ ID NO: 83726 - DNA, 203 bp, Glycine max
  Clone ID: PAT_MRT3847_4661C.1
cgtacattctagtggtaatgcgactgttgctgtcaaaatatagcctgatgtagacatgagtacgccaaatttgtagactggaacttcacttaaataatatgattttatatcaactaatctaccaaaatccattagatctatgcctgtataggatcacccttacactgtcagactacaggacttggatattaccttatcattta

SEQ ID NO: 83727 - DNA, 457 bp, Glycine max
  Clone ID: PAT_MRT3847_46620C.1
cttatcctttggaagtgacatggaagaaatgacagaggaagggaaaatagaaaataaatattttcccttctttttttggttacacaagatgaggaagtgattaatcctcacggggaaaaaaacaaataatttattggtaaactgaataatttttaatcgggcggccgcatatttgagggattaattagcccggtatattatacgcaacgacaaccttaggctatccggaattctttattttgcatctcatatgtgcgcaggctaccactgattctatgcttgagcatgtgaataagttgtttgagataccatgaccaaagtttctattgcggggtggtttatatggagaaccatgggagtcccacatatgtgtggtagctattaataccaatggctgtctatattcctctctattaaattatgaaagacaagaattctgagcttgtaacaaaagaaa

SEQ ID NO: 83728 - DNA, 470 bp, Glycine max
  Clone ID: PAT_MRT3847_46621C.1
attcccggttcggcccacgcgtacgcccacgcgttcgcttctccgatttttatgaccgatccaaaaccgcattctccttctactactgtcccatttacttcaccgtcctttccatgccttctcgtgttatcacaatcgactactctcttcttctcaaaaccactccctctacatatttcctctatctatttcataaactacttctactgcacttgttttatataaaaccacccaacactcttactcgactcaccttcttcgtcttagagtttttgcccttcctaacccttacgccgattaacccaccaacgacttatctttagcgtctcattctcatgaaaatttaagccattctgagactgacagtttctaatatgatcaagaatcttcaccacaaatggtcaatgtttggtcaacgattacatcctcaactttaagttgatcccgtggttgcatcaaagctttacttt

SEQ ID NO: 83729 - DNA, 414 bp, Glycine max
  Clone ID: PAT_MRT3847_46622C.1
ataaaaatcggagtatcattttaaccaaatttatgtggtttcttatactcctcaaagatggtgggtgccacaacaggccaattttatcaccggttggctctggggtcaaatctgaaatgagtgcaaaaaatcctgctcttttaaaatgctaaaaaaggcgacttgttgataatacacccttggctcgcgcttgtttttataaatgcccgaaaaaatgattttgccatcaaagactgtactgtatttgcaaagttcccaacagccctttagaccaacagaacaccgccaaatattatctgccactcataaacaaccccaacaactgcagttctgagcaacaacagcccaacatatgccttaaatacctgcaatgtgaaaagtataggacacaacaaccacagttgggcattcaca

SEQ ID NO: 83730 - DNA, 433 bp, Glycine max
  Clone ID: PAT_MRT3847_46623C.1
gatattcatccactcattttgaggtagattggtggaaataatagataaagagaaatagaaagaaaaaaaaggaggtgagataaaagacaaagtgtatatatgataactattatccttaattaaaatttagaatttaacaagcattggaatttggaaagtcattagttaaaaaaattaaaaacacaatcactatcagagtaatgaatgttatccgtatatttttattgcaatttttaataaaactatctgttaatatctgtttttaaaaataaaaaatatttattaattatttttaggataaaaattaataaaataaactaaaaatatttcaaattatataaaaaaatgtattcaaaattaccgtaaaacatattgatgatatttttcactcttgattactttagtgcatgtttggtttagataaaaaatgaaa

SEQ ID NO: 83731 - DNA, 881 bp, Glycine max
  unsure (1)..(881): unsure at all n locations
  Clone ID: PAT_MRT3847_46624C.1
ggggggggagtgcaggtgcggggcgtgttcttttgtgcttaactttggatcctccaatgaanaaagaaaagtacgatacagcgtggcagagctgaaaaccctatggaaccagcttctctcttccgcctcgcacatcaacaacctccctctcctcctcaccttcgtttccccttcttcccctcctcaccacgtcctcgaatccctcctctcgctccactccttcgccctccctcagagaagatggtggaaaatagacttaggtggtttgggcatgtagagagaagaccggtagactctgtagtgagggctgtagaccagatggagagaagacaaacaattcgaggcagaggaagacccaaaaagactataagagaggttatcaaaaaggatctcgaaattaatggtatggatcgaagtatggtacttgtttgaacattatggcggaagttgatccatgtagccgaccccacctagtgggataaggcgttgttgttgttgttgttagtccttttttcttggattatgatggtttgtgtacgagttatgttttcacattagatggttgatgatgattatgggaaagttgatgtaggatatgggacagatgagaaagcggtgctattggtattgggacacaggaatgctcaacaaaggaaggaaatcagagaaacttatcggcagctttacaatgaatcgctcattgatcatctgaattctgaattgtctggttattttagagtgtgtcatggtttcttcacttggttgactttgtattttcttttgcttttaagaaattattcttcagcaatcgtgtttctttggcaagtgttagaatgatagaaatcaactgaaataatgtcgtaatttttagtgattatgct

SEQ ID NO: 83732 - DNA, 541 bp, Glycine max
  Clone ID: PAT_MRT3847_46625C.1
aaaaaggcaaaatcccaaggggtttggggaaaattaacccggcgggttccccccgtttttaaacaaaaaaaccggccggcgggaaaaaaaattataaccaaaaaggcccccaaaaagggttaaatctaaaaaaaaaaaccaaatttaaaaagcctttaaaggagaaaggcccgaaattttttaagggccatccttgggaggcaaaattggttataagggggctgacctttaataaaaaaaaaaaacccctcccttacaatcaggaaactcccccaacaaacgcaaaagttgttcccgggggcaacaccttccttaggggaccggacctaacccttaacccggttaaaaaaaagagcaaaatttttttttacctgggcccgtttggccaggctacaactaaaacgggttcctttggactaaccaaagcttttggccttttttttttcccaatcttcttcacgggaaaactaattccttttctcccgatcggaatggttggctccccttcccagttttccccagggctttcccttcttttcct

SEQ ID NO: 83733 - DNA, 412 bp, Glycine max
  Clone ID: PAT_MRT3847_46626C.1
gctgtgcacggaaaggggagcacccggagtcagtgtccataagaacataacgtacatgtcacctgcaaaattaggagaagatatagtgattacagcacatgttctgaagcaaggaaaaacactagcatttacctctgtggatctgaccaacaaggccacaggaaaattaatagcacagggaagacacacaaaacacctgggaaactgagagaacagcaaaatgacctaaagaaacccaacaatgaatatcaagtatagatttgactcaaacaattgtaattattgaaataaactatcataacctgtcaaaacatgtcaaggggaaggatatatgtgacttgaggagtttatatgtgcttctttttgttgattgttatatcataattttgataatttatactgtctctgattt

SEQ ID NO: 83734 - DNA, 197 bp, Glycine max
  Clone ID: PAT_MRT3847_46627C.1
aggagaatggtgacggctttcttttatagaatagaaatacttacttttgtttttagctttgggtgatgagagtgcgtgacatcctgtaaacagcatgtcactcgcaactatagaagcatgttttttagatgtccgtctatgtgaatctttattatggactgattcaacatgaatggaatgatgactgctatttttta

SEQ ID NO: 83735 - DNA, 172 bp, Glycine max
  Clone ID: PAT_MRT3847_46628C.1
gtcatatgctccaagtgcactggtaagggttttaaagctggtgcttcgatgaaatgggctgggtgtcaacgaactgctatgaaagtttctatcaaacatctttgcccgttcacatattcaagtgatgcttccatcatgcaacgtatgcaagggctctttagaaaccattaac

SEQ ID NO: 83736 - DNA, 1229 bp, Glycine max
  Clone ID: PAT_MRT3847_46629C.1
gaaaaaagtaaaaaaccagtcagggaccggggaaaacacacaattcacaaaggcattcgacggagaatggaaaagaagcggaagaggaagcagcaggtgaagcgcgacggagagccaaagcccaaatcggttcgtgcgggttcaacccgaaccgacaatgtgaaagatccatttccatctcatgctcgacccaccccacaggaatgcgaagccgtgcgtgacactctcttagccctacacggcattcccccggaactcgccaagtaccgcaaactcccaccgtccgatgacccggtccaactgcagccacccgaaccggttctcgacggtcttgtccgaaccgtcctctcgcagaacaccaccgaggccaattcccaaaaggctttcgcttccctcaaatcctcctttcccagttgggaactagttctctgtgccgagtccaaggacgtggagaatgccattcggtgcggaggtctagctccgactaaggcttcctgcattaagaacgtgttgcgttgtttgcgcgagagaagaggtgaattgtgtttggagtatttgcgggacttgtcagttgatgaagttaaggctgagctttctcttttcaaaggaattggtcccaaaacggtggcttgtgtgttgatgttcaatcttcagcaagatgattttcctgtggacactcacatatttgagattgcaaaaaccatgggttgggtaccagctgttgcaaacagaaataagtcatatcttcatctaaaccaaagggtaccaaatgaacttaagtttgacctgaattgtcttctgtatacgcacgggaagctttgccaccaatgctccggtaaaaagggtaacaagcaaggaaagaaatgtgacgataactcctgtcctttattgaattatgataaagactcagttgaactttgagctggggaagcaaattatttttcaattatttgtttctctaactaaatgaagtcaataggggcactctaatcttgtaagttgtaagtgtatagaatactactagtatagagttaggctgttaggcaggagaaccaattttgagattagatgaaagaaaggtcaacaattgtgagctagtgcatcaagcacttgtagggtttgggttgcctaaaaattgcccatctttaattaattctgtaaagggatcttgctggaaatggaacattatgtttatttctcttctaatggacattaaatgtgtaggactt

SEQ ID NO: 83737 - DNA, 239 bp, Glycine max
  unsure (1)..(239): unsure at all n locations
  Clone ID: PAT_MRT3847_4662C.1
tagtttccattagtaatgtgagcatggtcagatcagtgttcaactaanagatcacctgggctactgttgctggangcatccttntgnttgnactggattggaggtggctgacaggatgtgtattgttgatgagtagctgatgctccgacagtgacattctgaaagctatgaaaatgtttacactactgactatgatatacttgtgcgaccttgctaatattggcatatggatatctgtg

SEQ ID NO: 83738 - DNA, 753 bp, Glycine max
  Clone ID: PAT_MRT3847_46630C.1
ccacgcgtccggttctaacatacatcaaagatattgctagatgttcaaactgttaagacacccgagtgtaactttcaatctctgtaattttcgaatttgttggacaggggatggttaggtctgagaaaacaaataattttttgatatttactgcaaaagtttataacttatgctgaaaggtcttcaaagattcagtgagattaatgatttcaggcgcgcatgcaagaaatgaaggaaaaagaactcaagtaccttgggaacggcgatgcaaattcccatgtttgtaaagtatgttttgaatctccaactgcagcaattctgcttccatgccgacatttttgtttgtgtaaatcttgttcacttgcttgttctgagtgtccaatatgccgcacaaatattacagataggatttttgcttttacataacagagggctctatcccattgaattaatatactccatgctgttacgggtgcaattcttttattagtttgcctgtatgtaaatccgtttaaaagatatatcaatatcttctttcttttatactaccccaggggaactgtattatagggggggggtggggggggggggacaaaggggtgcggagaaagaatgtaaaaagaaaaaaggtgtaaacagcactgctgaagtacatgtgcacaatatacgtttgttttatgtaatccagcagaattttgtttccccatcctctgtatgttctttactgagtgtaagagctgaggtttcttattg

SEQ ID NO: 83739 - DNA, 1114 bp, Glycine max
  Clone ID: PAT_MRT3847_46631C.1
gggggtctgttcctctccccactccctagctgtcttctccttctcctcttcacaatgatccaagagctggaaggaaggggaggatttctagccgtgctaatgaaatttcaggaactggtgtagatgattttgagttgaggagtcttgatgctgatgatttaaagatagaactacaggctaggaaacaacgagaggcagctctggaagttgcattagccgagaaggaatttgtggaaaagcagtaccggaaaaaaactgaagaggccaagagaagagaagaagccttggataatgatttagcaaatatgtgggtccttgttgctaagttaaaaaaaagacgggggtgctgttccagaatcaaacatcgataaaaaaaatgatggtgcataacacataaatggtccaaaaactaatgacgttgaaagtaatattgttcccaaggagcatattttggatgcaccgaaactagatgaggaaatgcccaaagaagatcccttggttgttcgcctcaaggtgctggatttggatctaagagaaaatatatgtttcggaaagtgaccatccagctcaagcttgtggagggtgactttgctggaactggaccatttcttatgtaagtggaaataatatcttttattttaaagaagcttatttgctcatgatgctcttttgatgttttagtatgatgcttgtgatatttactatttactatctatagcgcttagttagcaatgaatcttaatttatggtgttcatgatcagctcaatgcattgagcttttcccaagtgcactcacattgacttgcatcaatgaatgcaattttggcagtaattcttttattggtaaacctgtttgtaacggcgttcgataggttcttccttttcctcctccctggctaccccaggggaactgggtgaccggggggcagggggggtgcggagaaagaatgtaaaaagaaaaaaggtgtaaacagcactgctgaagtacatatgcacaatatatgtttgctttatgtaatccagcagaattttgttgcccatcctctgtatgttctttactgagtgtaagagctgaggtttcttattgattccctcctgctaaaaaaaaaaaaaa

SEQ ID NO: 83740 - DNA, 532 bp, Glycine max
  unsure (1)..(532): unsure at all n locations
  Clone ID: PAT_MRT3847_46632C.1
tggtacagcctgcaggttacccggtccggnnaattcccgnnggtcgacnccacgccgntccgggnacncaccactcgccagtttgtagtcaacatagaccatgtgcgcattggtgagtgaacaatgcacgttgctttctaaaggtactatgtctctcggtgatacgaaagaagccggcttgaatatggtcgaaaggaccatagcattgaagcttacacatggatacactgatgtgttgctgaaaaattaggatatgtctacgtgactcccactctgagcgaagctcatgaacagggccctatgccgtaccaatagtatcgcttacacttctgtctctccattaataggatatggtgagtctaaagacctgggatatgggcactcagattataaggaaggagacatagcggggggctctaccaaaggggaagagcatacctcgcaaccctaagctcagatactttgcaacatagaccacgctgatgatacacttacctactacactggaattctgggtgagccatgagagact

SEQ ID NO: 83741 - DNA, 402 bp, Glycine max
  Clone ID: PAT_MRT3847_46633C.1
gaagacaacagggggcgtggaagggggtttccacgaaaatgttgtaattcttacctgttataacaccattattatgctgctcgacgatagaagtgattcttctttcattatctgacaacagcatcgtcatggatggatcaacctcttatagatctgcctctctagctgttgctgatgatggctttctcgcgcattatctatccattgaaaacagtgcagcggccagagatgcatcaagcagagtcattagtaatgcatgcttacttagcatccttttacaggtgagctatttatggctaccaagactctttatatgttcactccttaagaccattctataaaggagagtgtcatttatggcaccatagattacatatttatgaatgcagccagtattctaca

SEQ ID NO: 83742 - DNA, 258 bp, Glycine max
  Clone ID: PAT_MRT3847_46634C.1
aaaggccaaaaatatcccgatccataaaagtcaatacagcaccaaatgcggggcatacgataaattattttacaattaacagattttaccgggctcctaattaaaatctttcctggccccgacacaagggctggttatatatcatacccgccaaaaataccacaaaactaccatgaaaaatttatctatactttcctcttgtttctaagaaaaatcactcatgatttaaaaaaaaaatgtttataattttggggaaaa

SEQ ID NO: 83743 - DNA, 309 bp, Glycine max
  Clone ID: PAT_MRT3847_46635C.1
cgtgcgcagggcataaaccctaacacagggctcttccccttctatatctctctgcgtcctcagttatgggctctcgcaggctctcatcatctctgatgcgaccattcctccctccatctacgaaagaatttgaagctgcgatcccttcccagccattctctgtcccaaacattcccactggcggctattcagtcgccattacaaaattattctgacaattcgagcccagtaatggcttagcatccgagctcgaaagctctggactgggcccgtatcagcaagctgggggggatggacccccttctgcta

SEQ ID NO: 83744 - DNA, 1915 bp, Glycine max
  Clone ID: PAT_MRT3847_46636C.1
atctgaatttgattgataataattggagtaggagcccagccgcattgttgtaatttcgggctgccacgcgtccgctggtagtatccgagtcggagtccgagtcgactcgctgcgatctcatacatctcattccttcattctctccgacccacaaaatcaaacctatttttttttttttgttgtgttctcttcgaaagcggaatcaatcaatccctcatctcattgctgagatctgcaagctggctatggactacgaaccctacgacagtagcggaactgatgatgaccttccaccaacccatcaaaatagaatttccaggggaggaggaggacgtctcgctgggaatgggagatctgctgttggttcaattccttacccaaggatgtatggtgaaattgatatggagacccaaattcatcagcttgagcaagaagcatacagttcagttctaagagcctttaaagctcaagccgatgccattacttgggagaaagaaagtttgattacagagctgagaaaagaactgagattgtcaaatgaggagcacagagaacttctaggtcgagttaatgctgatgatgtgatacggaggataagggaatggagacaggcaggtggccatcagcctggtgtacttagcactggtcaaggtcttcatgattcaattcccagtcccacagtctctgcttctcgcaaaaagcagaagattacaccatctgtaccaccatcacgatcttttggcggaccttctcctccatttcacccccaaacactgactgcgccccaccaaccatcttctgcagcaaaacgtggatctgctcctgggtcaaagggaaagaagcacaaacctggtcaaatattacctggtgtatcttcaatgaagcagtatccttcgtcaggaccaggtggaaggaatcaggtacctaatagagctgccatgggtgagcatgccgagggagcatcatttgattcgttggttggtaggagagtgcggacaaagtggcctgacgacaataacttctatgaagctgttatcacgaactacaatccagctgatggacgacataatctggtctatgacatggggagtgcaaatgaaacatgggaatgggttaatctatcagagatatctcctgaagatattcagtgggtaggtgaggatcctggaatcaatcatcgtgggggttttgggggccctggtcatgggatgaataggtctgttggacgagatggtgttccaggagctggaagaggtagaggagcagcaaaggggcaatccagaaaagattttttgtcatcacagaatggcataggaaagaaggcgcctgatgatatacaaatacttcacacagacacactaatcaaggaggtggagaaggtattcagtgcaaatcaccctgatccccttgaagttgagaaagcaaagaaagtattgaaggatcatgagcaagctcttattgatgcaattgcaagacttaatgatctttctgatggtgaaagtgatggggctggggctgcccaccatttctcacatgctcaatcaatggatcgagagtgatgagcacctgttaatttgtacaatgagcagaggaggcattaagatagcataattctggaaaagggtgtatttctattgtattatcacataaagattattaccctctaacagtttatagctgtaggcatggttcttgtggattaggcattatgtaggatggcaaatattgtagtttggtaataattatttatttcagtttgaaagttgacctaggaccagctgatgatacttgtataattctgtttcattagtgattagtgtgtggtagtgtataaattcttgtatttgatgtctcaaattggtgtccaaaaatcatgtttactcgtccttttaagtttgtttttaattgacatgtt

SEQ ID NO: 83745 - DNA, 876 bp, Glycine max
  Clone ID: PAT_MRT3847_46637C.1
gtggctgtcagccttccaggtgggagaattctgatatttggtgggtctgttgcgggccttcattctgcttcccagctttacatactagatccaactgatgagaagcctacatggagaatcctaaatgtaccagggtgccctccaagatttgcttggggacatagtacatgtgttgttggagggacaagagctattgtgctgggtggtcaaactggggaggaatggatgctaagtgagctccatgaactttccttggcaagttctgtcatctagacccagttaataaacgggcatgctgttgcaaaggaatgctaaaatcaggaaatcattttaaggaggaaaaggtttgtgttggtcactgataactcttgatgagtattgctctggtcagaacatttgtgtattaagtcatttctacaatgcattttattttatggttgattctggctcgagaacttttcaatgagtgacacaataccatgtttggcttttttgaggttttgtgagactttgcccttcagtatgcacaatgaattattcttcctgagtagactattagtgtctgataacaagtaggtaatatattaggatagtagctcacttgatttccctgtctgttgctttgttcaaattatgtattttgaaccatgacgaaggatagaaaaaaaatgctgtttatagtaacgtaattaggtctattgtatgtaatgtggaggtatctacttctgttttatgcttttgaacgagtcagctgacgtggtcataattggttgtactggtttgtgccactgcaaacaggtgtataagctagggaaccttgcagtttgcacatatttttgttaatgttgtgataatatggagtatggtattggtaac

SEQ ID NO: 83746 - DNA, 484 bp, Glycine max
  Clone ID: PAT_MRT3847_46638C.1
ccacgcgtccgcaagatcaataatattgttggttggtgacaagtctaaggtaaagttttacatcaaataaaagtaaaaaaattgaacagtaagatgaaaatcagtattaggttttgtggttggcttttccttctagatttagcattagttgatcaatttgcgaggttgaggtgttaagaagcttattgaccaacgatccctgcaatgattaagagtgaataagtccattttgaattgtctggaggtgctaaatacgatccatgtgaggtgtgttggattcggaataattcaacgcagattttagcaacaaaatcacaagccattgaggtcgaaattcttgtttagacttgggctgtgtaaaactaggttcatgtttccgattttcaccagagtaacattttttcaccactcaaacagtagtcatgtagtatatgccaaacaagtcaataatttgagtgattgagttctttaagattttaagttc

SEQ ID NO: 83747 - DNA, 441 bp, Glycine max
  Clone ID: PAT_MRT3847_46639C.1
ccttctcattcgaagactttgcggtggagatgaaaaattgatgcgtgaaaggacacacctgttgttggcttgatgttcaaggatggcaatttgtaagaaagaatgttggagaggttaatgtggaatccctttttggatttccgtttacagttatttgctatagcattttttaatgaaaatgctattagattatatttttgaaaatttactgcccccggctaaatctccaataatgttcttacaaacttttaaaattttgtttttttgtgtgtgtatggtgattaaaacttaattagtgttcatgaatttgtcaagccttttttttattggttcttaattgaaaaagctttttaggctggttataatatcaccattactgatggtattggataaacctagtgcaactttgcaatttagaaagcttgctttattgtgatattt

SEQ ID NO: 83748 - DNA, 298 bp, Glycine max
  Clone ID: PAT_MRT3847_4663C.1
ccggaccgtgattaatcccccgctcgaccatctcctagtcagcggccgctgacggttgttattatatttttttttgtttcgaaacccggaaagggtgggaaccgattttgaaaatccatggggctcggatccaagactaccagggaagccatcgagggatcctacattggcaatcattgcccattcactggcaatgtttccattacgtggccgtcttttggctggaacatgtcccggtgctaaaagcaaccggaccattatgggcaggaggagcaatgttgctttatcagcagggaca

SEQ ID NO: 83749 - DNA, 332 bp, Glycine max
  unsure (1)..(332): unsure at all n locations
  Clone ID: PAT_MRT3847_46640C.1
cgaccaaagacaaggaacccaacaagcaccggccaaccagngccaacaaaacgggccggcgggaccacaaaaacaggagccgcaagacggaacaacaacccccagcnagaaccgccggagcaagaggaccaacacccgccggaggacaaacaaccgagaggagaagcccgcaaaacccgaaagggaacgcacaccagaacgagaggcccaagccaggggccgcaagagcaaagggcaaccacgagggcaaccaagacaggccacaccagacaggggcagaacncccacgagcccccggagaacaaacgcccggaaaagaacggggcccaacc

SEQ ID NO: 83750 - DNA, 346 bp, Glycine max
  Clone ID: PAT_MRT3847_46641C.1
acctcccggaaaaaaccgaaatttgggtcattttattagaggttccaaaattcaccagggggtttaggttatggcttccttaccattggcttagttgacccttattggggggataaaccttatttttactggtttttggaccgggttttaaaaccttaccttacttttggactggattaaaaggcttttggaaccaaattttagcaaaatcaatggtcgaaaactttttttcctcctaggttagtttgcaatcaaaaatttacggggccattagtttcacagaatgaatgttttattctgctaccaacatctggagaacagttgcaaccagccagatttcaacagt

SEQ ID NO: 83751 - DNA, 565 bp, Glycine max
  unsure (1)..(565): unsure at all n locations
  Clone ID: PAT_MRT3847_46642C.1
ggttttcccatatggaaaacctttcttggaccatcggtttgccattggtgggccttgccgatctaagatcactttgaggatctcagggacaatatgtgcaccacaagatccagtagtgtggcatggtttaaatcagcgcaaatggctatacttccatggggtgaatcatcttactgtagatggtggtgggaggatcaatggaatgggacaggaatggtgggccagatcttgcaagatcaactccacanatccatgtcatcctgctccaacggccatgacttttcatagatgncaggatctgnaagtcagacatcttatgttgatagatagccaacgaatgcacttgtcattcactaactgtatgcggattggtgcatnccatctcnaagtgttagcacctgctttcagccctaataccgatggaatccacattagtgtcacannaggagttgaggtcatgcatagtgntattagaacaggtgatgactgcatcnntcatagtagaaaatcctcacgggtctggatcagaaacatctcctgtggtcctggccatggcataagcatg

SEQ ID NO: 83752 - DNA, 1109 bp, Glycine max
  Clone ID: PAT_MRT3847_46643C.1
ctgcctggggacggcgacttctctcactattggtattatcgtcggaagcggtatccatcaatgtttctttctgataaacttgcaccacacttcaattccacactctttactcatctccacacccaccaggtaccgtcacttcaaattttcagccacatttcacaatcttctctgcattttccttccaaatttatgatctgtttcgttttctgctatctgggtatgtctcaagtttgagttagagtgcttccctcgcttctccaagaaaagggttggtacccttttcatgccatggtatttccctgaactgaagagcaatacccgtttgtgcctcactttccgtggaagaaggctttgttcaagtttcagcaatgatagtgctcctgagctatcagatgcattatgccatgaaggttatccagacagtgaagagaataagaaaggaaatcttctgtcaagcaatgaaaactgaggagatatggaatttctggaatcctatcctatggacttttgaacactgcatactgtctcacaacgtttctttttgtgtggttttacattgctccagcacctgcaaagatggtgtatggtgcagctgtaaaaagatttctcaaagtgatggccatggtgtgggctggtagtcaagtcactaaacttgtaagagcaggaggagcattggcactggcaccttttgttgacagaggattgtcctggtttactcataagtttaagtttcaaacacgggaaggctttcatggcaatagtgggactctgtcttggattggccctcattgtatttttggtcatcacactgctttgggcatgatgcctctttctgccaccttcttgaaaggacatttaaatttatttgtcacctcaaaatgtataaacaatttttattatcccattatgtttttgctctataatacattgttgaatttttagcatgttgtatatgacagtgtctcccaaaattgtactctttttcatgtatgtgcaattttatgttggtttggttttaaaaaaaaaaaaaaaaaaaaaaaaaaaaaaaaaaaaaaaaaaaaaaaaaaaaaaaaaaaggacaggacgctttaaaaagatccaaattt

SEQ ID NO: 83753 - DNA, 295 bp, Glycine max
  Clone ID: PAT_MRT3847_46644C.1
ctcactcccaaattcttacgcctaatatttactacactctgataactaacggtcttaagggagttgggtaataaattaatgcgacttctcaaacacaacatttattttgctatcatctacttagagccgttcctattattgcgacagaagatctaatgagaggaatagaacttattcacacacgatctgacctaaatgtttcattaggaggagcaactctaggacgaatcttcaacgtacttcgagagaccattgataatctacttccagtagattctctcacaacatatcccat

SEQ ID NO: 83754 - DNA, 322 bp, Glycine max
  unsure (1)..(322): unsure at all n locations
  Clone ID: PAT_MRT3847_46645C.1
aaatctanttgcacgantacgtaagctcggaattcggntcagagcttctctcnnacagctatacanctntnnnnccanaanacatgangtgnnancaangggaccaagcttattngatcgtnnntgtcanngnagagccaagnacaaacacancaggagntnagncctacnccaggnaaaatgcatcgntagtctncgttccaatcgccggcgggaattcnacngcgggnngagccctaaaggtctctgatttngacaacctaangtaccaganncngggcgncncacacgcatnggcctcatnnanntgggctcngnngcc

SEQ ID NO: 83755 - DNA, 228 bp, Glycine max
  Clone ID: PAT_MRT3847_46646C.1
caagattctcccccagtggtgcaagtgaaggcctgagatgtagagaagtgggggagttaacatggataaagtttatacaagagtttgaattatgacacgggttcagaaaggttcagaggaaacactgaagaggattttggaggataacgcatcagcagagtacttgcagaatttgggtctcaatggaagaactgaccctgagagtttcaaggcctgtgttacactggt

SEQ ID NO: 83756 - DNA, 389 bp, Glycine max
  Clone ID: PAT_MRT3847_46647C.1
atataaaatttttttttttgggttgttttttttttagttttccttccctttttttttttgcaggtaaccgaaggcaaaactggcccaaccccctttttttaaaaataaagggattgtttccctctaaaaaccaaaaattcaatgtagttttggctactggtgacctcttctgtacatgtacaaactcactcgtgtaacccaaggagataaaacaaaatttttgggaatgtttaagattaccaatgttcttgtgtctcccctcccttgcgcgtatgaccttcataatgcctcttttcgaaaaaaaaaagaggaaacaaatcctccccctggtcccacactttttagggggtttacatttgtccccccacttcccccaaaaataccttttt

SEQ ID NO: 83757 - DNA, 126 bp, Glycine max
  Clone ID: PAT_MRT3847_46648C.1
ggggaccgtcaagccggaaatttttctcttaccctcttgcggcacacataagggtcagttctacgatctgagggagctctttcggataggaggaaacgctcccgttactaatttcctgtttatggg

SEQ ID NO: 83758 - DNA, 468 bp, Glycine max
  Clone ID: PAT_MRT3847_46649C.1
gaaattgggtcactgtttaaattaattatcattagaggctgtgtttagaaaaacattaatgtatgtatggatttgtctcatgcacttttttaagaagaaaaaagatgcttggttttttatggggagtgttgaaggttgaaacttccatgtaagggttttgagagctcagcgtgatttgtggacagcaccgaaagctgatttctcgactcacgaggcaaccaaggtatgaaagaacaaggttgctttaatggaggattttcggggttcatagttgtcctagtctactactacccttcaagggactttggcgctccaaaaatggaagtggcttttgaaattcaaactaaactggtgcgggtacccaatggcaaattatgtgggggggagttattccatccattattaattgattgatgttttaacttcaaagaaacgtgtatgttcaaatgtaattttcgtaattaaaaa

SEQ ID NO: 83759 - DNA, 354 bp, Glycine max
  Clone ID: PAT_MRT3847_4664C.1
aagggggaaggtccttaatttcaaactaaagattcatgttttactttacagagtatctaaggacatacattaaagattacaaaagaccttcatatggggatacaaaaagggggtaagagacacttttgtcatattgccaacgtgtgggggtggtttaacttggagttttacgcaacaacaattatcactgctgaaactgagagaccatgaagaaatttagggaaaccaaaatccttatttccaggttagtaatgggggagaagttttagcaggattcacttttttgccatcagaatcatattttatgaccccagagaaatcagggtgctgacacttcccacccattataatgtt

SEQ ID NO: 83760 - DNA, 251 bp, Glycine max
  Clone ID: PAT_MRT3847_46650C.1
ggacagggtctatgatcgtggctggacgtagggacttagagcggcttaaagtgacgcatagtaaatgagagctgcacgatacatgctcaacgtccagttgagatggaccgtgatatcatgctcacagtacacgacatttcatactaggttaatgcctaggcatcagacatatggaacaggatcatggacaagcttgctcatctacctgcactgatacgctctgatcgtagcgtaaatatcacgatactatc

SEQ ID NO: 83761 - DNA, 244 bp, Glycine max
  unsure (1)..(244): unsure at all n locations
  Clone ID: PAT_MRT3847_46651C.1
atttctatttggtgcttaaaaatacntacatgcagtgtatctcaggaatccttctcctctgtacactcttcattcatgggntgtgtagagctttccccgtaacttattatattaatatgcatccctcactcatatgcacctctaaggggaaantgtgtgtttctantgngaaantccaggggggacaangncccattggncctnggttgncaatggccnggggtttctntnggaaanagaaaat

SEQ ID NO: 83762 - DNA, 153 bp, Glycine max
  unsure (1)..(153): unsure at all n locations
  Clone ID: PAT_MRT3847_46652C.1
caagnagctgagcnantnatgnntggngccattgaccagnttctggagaaaactggtntnaangctaangatcttgggatttttgtggtggattgcagcttgttcaatcccacaccttctctctctncaatgattntgaaccnntacaanctg

SEQ ID NO: 83763 - DNA, 299 bp, Glycine max
  Clone ID: PAT_MRT3847_46653C.1
ctactatttcagtgcatgagccctattgtgagttgggcccacagtactgtgcacgtgtaggatgcgctatatatgtctttttgcggatgtcactgagctcattcgtgctatccgcaaagcactatctgtcttaatgctacgcccgagaatggaaatgtgatcatgcagacgacagagagaacaagtgcgcttctcatggacgggctttcggctctggtggatcaggcctggcactttaccgaagctcttatggcactgaggacaaaaggcccagctgtggcgggcggtatcacctctgg

SEQ ID NO: 83764 - DNA, 169 bp, Glycine max
  Clone ID: PAT_MRT3847_46654C.1
cccactcgtcagtcccgtcggttcagctcctacgtaagcgtacatgggggctgcgaactctactctctgtgttcgcatgttcagttcactggcagtatgagcgacggctgactgacagtgggtgcactagcgttgcccccctcgctaacagggcgtccgcctcctcttt

SEQ ID NO: 83765 - DNA, 334 bp, Glycine max
  Clone ID: PAT_MRT3847_46655C.1
ccacgcgtccgttccgctgcgagaagacgacggaaggggatcactcacaccaaccacttacaaagtagaactacttggttggaatcaaaacacatactcatactttggaggccacagcaacaataacaatggcagcctgactacaagctgcagataccttcatgcaacccaccaaggggggcatggtcactcgcaagctcgaatctacacactgcatttttaaggcttttggattggaacccgttgtagctaaactcattggctcccttaaacccgatctgaaagattttgctaaaaaatgagtacacgccccaaatatgcaggattcgccctt

SEQ ID NO: 83766 - DNA, 1853 bp, Glycine max
  unsure (1)..(1853): unsure at all n locations
  Clone ID: PAT_MRT3847_46656C.1
gggcattaaaaaaaacctgaaccctcgcgcccgcgggttttggtttcgcaattgtagtttcctccagcctactcttctagtttttctgaactgcattctcttcccctttccgccgcagcgattttcaaagatttaaccttatttgctccgcagatatgcgcggttactgattagtcgatggtatctgtcgaaaaaattcacatcgaaagggaacgaacacggaaacgccctcgtctcgcgtgggacgttgcccctccctccgcgtctgaggcacaacgggctctgccagtgcccggtgacgaagaattcgaaagaaagcacgtttcgcctccgaaaagggacgacaaacgatttcaagcttagatcgtgtctaagagggcctgaaggagttgtttcaagggagagcattagtgcaaggatgaaggttggtcatcttatggatattgtatcacaaattgtggactcttcaaggtctccttgactgacttgtttcatggcttattcacatatgatccgaccaaacgccttacagcttgccaagccctcgattatgtcttcatcttgacgaaatctcactcctagatataaaatcctagatgggtggaaagacttcatttaaagattagcggttgcacaagtgtcaactctgaatagattttatttttttattatttgtcactgtgcttgtgtcgcttttgtttaattcagcatattgcccaagtctagtgctgtaggcacatttggtcgggttttggaatgttgggaccgccaaaccagagaatatgtggcacaaggtagtcagaagcataccagttctaaggaaataccgggatgcagcgatgcttgagattgatgtgcttcacaactagccaagaatgatagaggaagctcccatgcgatgtgtggagtgttggttggattctcatcgaactatgctcgggtgaagcattgtttcagactcatgaaaacttggagcacctggcaatgatggaaagagttttgggacctattccagagcatatgatttgcaggtctaacaagggtgcagaaaaatatttcaagcgaggatcgcgactaagatggcctgaaggagctgtttcaagggagagcattagtgcagtgaagaagcttggtcatcttaaggatattgtatcacgaaatgtggactcttcaaggtcctccttgactgaattgttacatggcttattaacatatgatcctaccaaacgcattacagctcgccaagccctcgatcatcccttctttaggaatcctacttaggaaaaccagattgacccttgttttggaatgacttccattttaaagattcagttgcacaggctacagctttgaatgtatccatttctttattatttatagcagtggctcagtggtgttgaaaatatattttaattttatcattctttgttttcatttaaaaaaaaaaaaaaaaaaactgggactagttcctccgtgcccgaattccgcacgaagtggggtccgttataaaagactggtggaaaaatgaacaattctgggttatcggtgggacatctgcccctctttttgctgtgttcccaggggcttccttaaattgcttgctgggattcaatacaaattttactgttactccaaggctcaaatgaagatggtgactttgcccaactttacttttttaaatggaatcactctcatcctcctacaacgggcttatgttaatttggtanggattgttgccgggttcctttcccaacatggtacatcttgggtcctattggcaaagtatattgtgcttatagcatttctttcaatatataatttccttgatttaccatattcaaggagtttttttt

SEQ ID NO: 83767 - DNA, 446 bp, Glycine max
  Clone ID: PAT_MRT3847_46657C.1
caacgcgactgagccactgctataaataataaagaaatggatacattcaaagttgtaacctgtgcaaccgacaatctttaaaatggaagtcattccaaaaatctggtttcttaagtaggattcctaaagaagatatgatcgagggcttggcaagctgtaaggcgtttggtcggatcatatgttaataagccatgtaacaagtcaatcaaggaggaccttgaagagtccacatttcgtgatacaatatccttaagatgaccaagctttttcactgcactaatgctctcccttgaaacagctccttcaggccatcttatacgcgatccacgcttgaaatatttttctgcgcccttgttagacctgcgaatcatgagctctgggatagatcccaaaactctttccatcattgccaggtgctccaagtttttatgagtctgaaacaatgc

SEQ ID NO: 83768 - DNA, 1498 bp, Glycine max
  Clone ID: PAT_MRT3847_46658C.1
tcccaacgcgatccgtcgtttttctgacactgcattctcttcccctttcaaagatttaaccttatttgctcgcagatatgcgcggttactgattcgtcgatggtatctgtcgaaaaaattcacatcgaaagggaacgaacacggaaacgccctcgtctcgcgtgggacgtagctcctccctccgcgtctgaggtaagcttccttcaattccctaattcatattaaattagggtttcttcttttcatagctttttcatcgtttattgtaggcacaacgggctctgccggtgcccggtgatgaaggtttcgaaagaaagcatgtttcgcctccgaaaagggacgacgatcgagagggccattatgtcttcaatcttggcgaaaatctcactcctagatataaaatcctcggcaagatgggtgaaggcacatttggtcgggttttggaatgttgggaccgtcaaaccagagaatatgtggctatcaaggtagttagaagcatacggaaatatcgggatgcagcaatgctcgagattgatgtgcttcaacaactagcgaagaatgatggcggaagctcgagccgcgtgcgattcggctcgagaccgaaatcacatatgcattgtctttgagaagcttggaccaagcttatttgattttctaaagagaaataaatactgcccattccctgtggatcttgttcgggaatttggacgtcagcttttggaatctgtagcatatatgcatgaactacgcctaatccacactgacctaaagccagaaaatatacttcttgtttcctctgaatatgtaaagctccctagctataagagaatttcctcagatgaaatgcaattcaggtgcttgcccaagtctagtgctattaagctgattgattttggtagtactgcatatgataatcagaatcatagctccattgtttctacaaggcattacagagctcccgagattattctaggtctaggatggtcatatccatgtgatttgtggagtgttggatgtattctcatcgaactatgctcgggtgaagcattgtttcagactcatgaaaacttggagcacctggcaatgatggaaagagttttgggacctattccagagcatatgatttgcaggtctaacaagggtgcagaaaaatatttcaagcgaggatcgcgactaagatggcctgaaggagctgtttcaagggagagcattagtgcagtgaagaagcttggtcatcttaaggatattgtatcacgaaatgtggactcttcaaggtcctccttgactgaattgttacatggcttattaacatatgatcctaccaaacgcattacagctcgccaagccctcgatcatcccttctttaggaatcctacttaggaaaaccagattgacccttgttttggaatgacttccattttaaagattcagttgcacaggctacagctttgaatgtatccatttctttattatttatagcagtggctcagtggtgttg

SEQ ID NO: 83769 - DNA, 492 bp, Glycine max
  Clone ID: PAT_MRT3847_46659C.1
ccttgtatcttaagtgttattcttgaaatatcattgttggattgaggtttgagaaattagtatatgcttgtatgatgactttgaaaatgattaatgtgtttaaggattattgtgttaacaaagattcattgtgataaacaatgaatagaaactaaataaaagtgtgaatctaataaaatattaacaatgaataaaaactaaataaaagtgtgaatctaataaaatattagatttaataaatcttaaatacctttatacactgaaatgcatttttaagacaattatgatatgataaattataaaacaaaatacatatatagaaaaagaaaaaaaaacttattttgaaaattgcacatcgaaaatctattttgatactaagtttccaaacaacattttagtccaaaatcaattttcaatatgttatccaaacaaaaattaccttattatatgataacactgcttttaggtgcatcagatatatggtatcagatg

SEQ ID NO: 83770 - DNA, 768 bp, Glycine max
  Clone ID: PAT_MRT3847_4665C.1
aatgaagttcctacatattcctcttctccgtgggaacaatagctctaaacaaacgatgtcaaaagtgactatgccaatattattagccttttttatatttattctcaccacaatttcttgttctttgttaagttaccattcactactgaagatcaatgatgaatataaggagccatcttttgaatttgatgatttgattgtgccagaatccttgccctcaacacctgtgaataagtgtgacattttcactggtgattgggtgccaaatccagaggcaccatattacacaaacacaacatgctgggaaattcatgagcaccaaaattgcatgaagtatgggagacctgacactgatttcatgaagtggagatggaagccaaatgagtgtgaactccccatattcaaccctttccagttcctacaaattatgaggggaaaatctttggcttttgttggagactccataggcagaaatcacatgcaatccatgatttgcctcctatcaaaggtggagtggcccatagatgtatcatacacagatgacttttccttcaagcgatggaagtactcaagctacaacttcacaatgactactttttggtcaccctatctagttagagctaaacaagtggattcaaatggtggtctctacaatgtttatcttgatgagtttgatgaaaaatggactactcaaattaaagagtttgactatgtcatcatcaatgtagggcaatggttcttggggcccatggtgttctatgagaaaca

SEQ ID NO: 83771 - DNA, 358 bp, Glycine max
  Clone ID: PAT_MRT3847_46660C.1
tccttttcgtccgcccacgcgtacgaaaggccggatcattatttcttatttgaaatacagagcgggatcattcacatgatagaggagaccctccatgggggagggccctagaaagaggagcacataggagaacaccatggtgtgcacaaaggtgaacacaaaggagaacaccatggagagcacatgggtgaacacgatggagaacaacgccgttgggagcacaaggagggacttgtggataagatccaggacaagatccatggggatgggcgtgacaagggtgtgaaaacgatgaagacggaccagaagaagaaggagcatggacatgagccttatggtcatagtagaagctgcgaca

SEQ ID NO: 83772 - DNA, 313 bp, Glycine max
  Clone ID: PAT_MRT3847_46661C.1
acctccactttttatatatatcccctaattgtgaggaattctcttttcacattctctttgtagcccaaatttccagaattgagtttaaaaaaaaaaaaaccaaaccccaccccctcatcataaacaaaaaaataacttaatggcccccccctctttaggttccaaacttacctacccttgcatgcaacatcataacttcttctataatttcacccaaaattcccccccctttccaaaatcccacaacccctccccctggaaacccctgtcatttccccaacttaatccccctacatcacatcccccccccccc

SEQ ID NO: 83773 - DNA, 327 bp, Glycine max
  Clone ID: PAT_MRT3847_46663C.1
atccggctggagctcgagccgattcggctcgagattgatttaaaatcataattttttctattttatcttctggaatttctagaagtgatgctactaacttaaaggagattacaaaaagtaattcccttccattatctatatcagattccaatgccattagtccagtactatcagagtctctaattgaaaggaagtatgaaaagaaaatggaaactttaaaatttgaaactactacgtaattatttaaatctaaaagtttcaaattttttgtttttggattttttttgaaacaaagttttaaacttaaaaaactgaattcataaattt

SEQ ID NO: 83774 - DNA, 275 bp, Glycine max
  Clone ID: PAT_MRT3847_46664C.1
cccgagccggggtcggttctatgttttccaaacactttttcataattgtgatccattgagaattttctttatctctcggattctgttccgggcaaaattcttgccaagcggggcttgtgccactcacccttagatgcaccgcagagaggggcagaagatcttaaattaggggggcaatgaggagggctgcggacccgccccaaaacatggataagcaaaggaaaacaacaaacatctcgaacctggctggggggtactttaattaccttcaaaac

SEQ ID NO: 83775 - DNA, 468 bp, Glycine max
  unsure (1)..(468): unsure at all n locations
  Clone ID: PAT_MRT3847_46665C.1
acgagcctatttgaattcaagcaataacagaaaaagcttttttactttggtccttcaactgacttaaaacaaatttgtaagctttggggctgaaaatatataacagcaccaaggctctagtttgaggcacaggaacagatgaagaaagatctttatattataacttcaagaacaaaagatataatgccttaacaaaaggaaactctaaagtctaggcccaaccgtagatttttaaagctacaaaaggttacattatgcttgtcgcgtaaacgtctgggcgttcctccatccgccaatttcctagttggaaaccaagagggtatggccgtaccaaatccgatctcctcggggagtcatcatcgcatatcgtggcgacttgaccatcgcatcttaaacccgcacttatgaagctcctactaatgtggcacggcggggcctctntggctcgctgtcccaaccgcgagccct

SEQ ID NO: 83776 - DNA, 589 bp, Glycine max
  unsure (1)..(589): unsure at all n locations
  Clone ID: PAT_MRT3847_46666C.1
gtgtttcacagatnnnaattgaagtacaaaagcatgtaaattttggagcaaccaagcacaagaaattgaaaggatctcaatagcgaatatgcaaattgcaatccattcaaatcaagctccgggtgcagcagcatccagccccttactattcatattccccgcacggtctttgactcggttcagcgcgtggctcacccggttcgaaccgggagggtggtggagacccttgaagtaacggtacatccacgtcagcacagccaaaaccacaataccgaacccgcacatggacaagaacattgcggtgacgagaaagagaacggcgcagagagggatccatattgggctcgtgacgatgatgagcggcgcgaagaggatgaggcccaaaacggagcccacgatggtgaggcccgttaggaggagcaagatggacccggttataaggagggtcaggacgccgaagagctggtttgagtttgccacgtggtgtcggagttttcggagtagtgatgatgaagttgtcgtgcgtggtgttgtttgtgtttgggataggcttgttgggtggtggtgatgatcagccatggttgttgtt

SEQ ID NO: 83777 - DNA, 444 bp, Glycine max
  Clone ID: PAT_MRT3847_46667C.1
agatgcggcgcggcagatcgagcgcgcgcacagcgggccggtgagcggcattgagttcgtcggcagcggcgtggacctgctcacgtgcggcagcggcgacgggcatttgcggtatatcgacggcggcacgggctcggcgctgatgcacatcgacgctaaggagaagctgcggtgtgtcaagaccgacggcgccagcgtcatgtgcggcggcgacagcggcgtcattcgcacgtattccctgaagggactggctttcacgcccgcgctggcgcacgacaccggatgcggtgccatcggctgtctggcgcttacggagaacgccagcaccgagaaggaccgctatcaaatgaaaaagattctgcactcacgctaggatgaccctgttcccccccccttttcttctctcgtcttcttctccccccctcccccctctcttctttcccc

SEQ ID NO: 83778 - DNA, 297 bp, Glycine max
  Clone ID: PAT_MRT3847_46668C.1
aacccttccttacggctagaagaagacgacagaaggggcctgcatacgcgagctaaaagccacacttaagcgtggctcgccgatcttagtcctatctcatgaaataacgcacttaagcgaaggctccatcactcttaagcgagcagcaaagtagagcttcagctggttcttggatttgaagcttaggcgtaaaagaagctatgcctaaccgcggctaaaaataggatcccaaggatggtacctacagcgtaaaaggatagacacttacgccaggaccactttagaaaactggggcat

SEQ ID NO: 83779 - DNA, 316 bp, Glycine max
  Clone ID: PAT_MRT3847_46669C.1
acgagggtgcaataaaatccctgcggacacggcactcagacttccgagctttactacttgtcacgatttggtgcacttgccaaagtcataacaggcactgaagtacagaagttctggcatgcggaaatgtggcatccattcctttaacttgttgggttcctgaatgtattaataaaaagcttgcccaggcaaaaatcaagttataggtattgctggagactagaaggaaactgcaaccattattatggggctttatagttacttagacatgaaacagatagtgatcactcttgattcttcagatatcctatcattg

SEQ ID NO: 83780 - DNA, 385 bp, Glycine max
  Clone ID: PAT_MRT3847_4666C.1
gtcacgcgtactatccaagtcttatctagacgggatgggaattaaatgtccaaatgcacgcattgctatggatatgatatctatctatggaggatttgctgcaccttcgagagaatcgattgctagggatatgaatgcgtctacaatagactcttcagatactcttcctattatttatgaactaggtctttctggtatatatcatgattggcgtgaattatttagcacctatgctaggacctatgatctgctacatgctgatcatcagctttcaaagctcaagaacaggtgcaattcggctgctgtattgcctgaagctgatcgaattcttaggcctgaaggaaaacttattgatcgcgatactgctgagatcatcgaatagctt

SEQ ID NO: 83781 - DNA, 1014 bp, Glycine max
  Clone ID: PAT_MRT3847_46670C.1
tacggctgcgagaagacgacagaagggggggggggaataggagggggcaaattgagttgggtgttggaaaggcagagcaagaggagtaacataatcaaacatggcggttaggcaaagagccgtgtctgcacttccaactcttctacgcactctccgcaaagaacctttgaagcctcgcaaccacgcacacgtcaatgccttgccctctcttcgacgcgctttctctttgtacgatcagatcaacctcatcgatcaagtccccgaagaccagctccgatttcaagggtataatgatacggggtttactgtaaatggggttgaatacgaaggaagcttgctttgtgttggaaatttgctcatgtcttggaaacctaagaagttttcagagatcactgccgatagcttgtcaatcttccaaatagttcgccctattccagagattttgattattggctgtggaaagaacattcaacatgtagatcctgaacttagacggtttattcggtctactggcattaagctagaagctgttgattcgagaaacgcagcatcaacttacaacatactgaatgaagaaggtcgaattgtggctgctgcacttcttccacacggagtttcttcatgaagcttggacttgtattcttagtagccaacaattgctccaaagatgttcacctcaatgccacaaaattttttagcccaagtccttgggacatgctttgattttccatttagaaagttttgacatagtaataggacaatgtgaattaaactcaagtgagtcctttgacgtctgctgaagttttcaaatgtaataaggagaattaaaatgtacagagtgcagtaaatccctgcaaatttggactctaatgactggctgtttggttttaatgctatcttactttgttagagttgaaaagaaaactgtataattttactattcttcaatcaaccctttatttggatgagaaaaaaaaaaaaaaaaaaaaaaaaaaaactcgagactagttctct

SEQ ID NO: 83782 - DNA, 670 bp, Glycine max
  Clone ID: PAT_MRT3847_46671C.1
cgatgaagaaatcggttgagaacaaggacgccgcacaatcagttgccggaagccccatcctctacgtcggttatccgacaccacatccacaaaattttcctcaactgctcatacatttgtgcctcagttttgcagggatatgggaaaacagaaagaaaaaagaaacaagcaaaattcctaatttataaaaccagacaatgaggcaggcactctttcacattcatcccatcactccactcaatttgaatagatataaagaaaaatgtagatccaaaccaaaaatgcaaattaactaaaaggcaaacagaaaaggggccaaattagttgtagatgagaggaaaaggggaacaattaaaatatttcattttagtaggtacatgattgtttgaaaaggaagaaaaaaacaactccattccatcttgcatctactacgtaacgatcatgtttctcttcacccgagtatttcatcttgctgcactccgcatccccttccttgaatgctccagcctcgaaaaactcctctgtgcctaccttcgctacatcgcccacgtcgccgcgacgatctcaaccctaaccctcatctatctgcaacgccagattcatggcaagacgacaggacaataccattttgaaccccgcgctgtaccgcgagcggctcttgaggacgttc

SEQ ID NO: 83783 - DNA, 1191 bp, Glycine max
  Clone ID: PAT_MRT3847_46672C.1
cggtccggaatcccggtcgacccacgcgtccgggagggggcaaattgagttgggtgttggaaaggcagagcaagaggagtaacataatcaaacatggcggttaggcaaagagccgtgtctgcacttccaactcttctacgcactctccgcaaagaacctttgaagcctcgcaaccacgcacacgtcaatgccttgccctctcttcgacgcgctttctctttgtacgatcagatcaacctcatcgatcaagtccccgaagaccagctccgatttcaagggttcctaccaacccatcatctcccccccccccccccctcccttttcaattctcaagttttaaattttaaatcccatgacatgacatagtatagcaaatgtttgatgctgggacttaactttattgcagttttttggggttttctactcattctggaaaatgaggtgttttaaattttgatttttttaatatggggttcaaggaggagagttgaatgtgaaatgggttttgtagaatagtcttaaataacatcgtgatatgtttttatgttatagcaaaagattgatgcaggaacttaacttagtttcaatttctttgttcccttctgtcttttggggtttttcttctcattctggaaagtagggtgttttaaatttttattttgtcaatatggggttcatgttacagaaatgtagtagaattgatagtgaaatggcatgtagcatataatttctgcagggacttaacatggtttttatttttttatttttttttatttcaatttttgtaggtataatgatacggggtttactgtaaatggggttgaatacgaaggaagcttgctttgtgttggaaatttgctcatgtcttggaaacctaagaagttttcagagatcactgccgataggtttgtttgttctattccccttgtttcttctccctattcattgttagtaacatttttatttaaataagcactttttgcattgtcctgatccttacaacttctcaattcctttcacgaatgaaactgtggtaattttgtctttttggtgtatttagtgtttgtcctgaaactgattctttatatctaaagttgaaggagtgcagtggtaactgtgctgccttagtaatccaagttcaaagtttcgaatttacttttgaagcttgaagaaaaatagaaaaaaaaaaaa

SEQ ID NO: 83784 - DNA, 373 bp, Glycine max
  unsure (1)..(373): unsure at all n locations
  Clone ID: PAT_MRT3847_46673C.1
gacgtcgcactgcaccgccgtacgtaagnncttggtattcctctagaagacggcacgccccttttttttgttttttttcttttttttctttttttctttttttttttcttttttaattctttacaggacctggaatttaatattctgaaaagagtatagatgtctatggaatattgggatgatgttccttattattaggtgggggtagggcggaaggagcatgaaaatagcgtctggaccaaaagagatagttgaggaagttgaggaagcttaagacagcccgtgcccattagaaaagatcaagcctatcctggttaaggttgttgttgtgaagcccgccaccaactgangaacaagttgaagtgatcttatt

SEQ ID NO: 83785 - DNA, 624 bp, Glycine max
  unsure (1)..(624): unsure at all n locations
  Clone ID: PAT_MRT3847_46674C.1
gggggggaagaaaaacgcaggcggcgtgttgtgatgaggggagagaggaaagagagagaacaaagggggggggggagtgcttctgcttcatcatcatcagagaatggggggtactgtgtcttctgcgtgggcaaagcccggggcgtgggccctanattccgaggggcacnaanccnagctccttcaacagaacaacaacaaccccaacgacaagcctaaaggtgtgaatccggtcngagaggcgaggcccagggagcangtgtttggggagaaagggcangattggaaaaaaattgaggagcancttgagagcgtcaggagtaaggaggcgagtggggnggagggggttnngaagagggggtttggctcttccaacgggggggggggacgtgctactttgcctgaaaggcncactgagaggaggtggaggaagccccaatttgaggaggagcggcctaaaagtgcggagaaaggggaaaaggaacctnatcaaaaaaaggaggtgcgagatgagcacgttnaaaaaaattgaagagctattaatttcttttgggccctgcgnattgagcgagaagagagtgggaaacgagcactgaacctctaaaacttattttttgtgtccca

SEQ ID NO: 83786 - DNA, 255 bp, Glycine max
  unsure (1)..(255): unsure at all n locations
  Clone ID: PAT_MRT3847_46675C.1
tttttttttttttttttttggatcaagaaagcttcctgtaacaaagaatttacaaaacgtgaagataaaaaaaggagcctaggagcaagactacacaagttagacacaccttcatcttaaagattttggtacttcagaaccctcgatcaaaggagaaagaaagattgtgaaaatagtaacaaatatagtgagttgcatggttcaactgatancataaagaaagttgtgattctaggagatatttcacctcgtgcc

SEQ ID NO: 83787 - DNA, 247 bp, Glycine max
  Clone ID: PAT_MRT3847_46676C.1
cgtgctcttacattgcctagtgcggccatgtcgactctgaggaacctctgccggtgtcgtgggttgtgtctatccggagcaagatataatacatgttttgacaacgtatatactagcaatgcttgccgatggccgaaactgctgtctttgcttattctggcaacaaccttgtggctggcactcaaggatacctccattgaggagcaacggtcacacacagactaatacaccgctcatgatgaccact

SEQ ID NO: 83788 - DNA, 187 bp, Glycine max
  unsure (1)..(187): unsure at all n locations
  Clone ID: PAT_MRT3847_46677C.1
aatcaattaatgcatccatttcagacatgcaaatataacagcgagggtncgngagacctagtgagagaagtaagagtgacgattaatactcaananatctgccaacaacacatttatagtaaggccaccaggaagggaaccaggggtgnaagcaccttaaaacattacgaagggaaaaaaatggccc

SEQ ID NO: 83789 - DNA, 442 bp, Glycine max
  Clone ID: PAT_MRT3847_46678C.1
aaaggggaaaaaggaaactaaagctaaaaggcgggaaaaacaaacaaatcccgatcaactaaaatcataacccagcaaattaagggggggcgcaaaaacaaaacctaaaaaaaaggggccctttaatttcttttgaaccatcccacttattaaaaacggggaaggggggtcccgcaaaccacggggattcaagccccccaacccgccccattggggatagacaatgacctttgaccccccccattggggggggaaaaaatcatggggcccccaggaataaaaactttaaaaagcccgggacccccaaggggaagtttaaaaccccacaagagattcctctcccaaaattcctgggggggggcttgtaaaaactgaccccccccatagccaacaccataaccaactggcccaccattaccttgggggggcccataatttccaa

SEQ ID NO: 83790 - DNA, 1224 bp, Glycine max
  Clone ID: PAT_MRT3847_46679C.1
gaaaacatagaattgttgaaggaacaaaacgtgtgtgtctgtcttacaaggtttagtagtgactatggagcagagcattggtggacaatctagcatacaatgcatatttctacgcaaggactgcttctcctcaaagctcgcgtctcttccaacttctccttccgagatgccctttggtcacaaccgttggtttcgcaggttgtcggtttttccacgtttgcaactatgtcaagggctgagaaagggtttctccaaaaacatggcttgcagtgtcagtgtggataattgtgatacggttcatccagcaacagatgcttatgctggagaggcagttgaagctttgaaagctgggaaagtcattgcagtaccaactgatacactctatggatttgcttgtgatgcttgctcaatggaagcagttaacagaatttatgagattaaaggccgtagacatacaagcccagtggctatttgtgtcggtgacgtatcagatatagcccgttttgctgtcactgaccatttacctcatggtctgcttgattccctcctacctgggcctgttacagttgttctaaaacgaggggattcaagtattcttgaacgatctttgaacccaggatttgatagtataggagttagagtgcctgattgcaatttcatcaggatcattgcccgtggttcaggaactgccctagcccttaccagtgcaaacctaagtggccagccaagtagtctttccatcaaagattttgagaacctctgggaacactgtgcttttgtttatgatggtggtttgattccatcaagtcgtgcaggttcaacaattgtggacctcaccacaccacacaaatacagaatacttagacctggaagtgcaaaggaagagacagttgccatcttggagaagcattctttcgttgaggcagagaccacgtaacataagttgtgattcatttgcagtgtcacgttctagctaggcctaatgtttcacttgcaaaaaaaaaaacgcgttataaatgtatggtcattgtgcttcaactaagttattctattctatttccattaatagcatagcaatacattcatataaaacttctatctggagcacgtgctatggaattgttgagaaactagtaaaatccaattctatgaatcatttgatgtatggatagcattattgttataatgaaaaaccaatcattactgcagggaaaatttgaaaaa

SEQ ID NO: 83791 - DNA, 151 bp, Glycine max
  Clone ID: PAT_MRT3847_4667C.1
ggctcgagggataattagctaattagctaattatccattgagccgtattccgggcgtacgtgggcgctcatgcaatataattgcatttctgtcgtgtctcgaaattcatgatcattgtccggccggctacgctgaacaaaaaaaggggact

SEQ ID NO: 83792 - DNA, 701 bp, Glycine max
  Clone ID: PAT_MRT3847_46680C.1
tagttctagatcgcgagcggcccctttttttttttttttgagaaaaacgaacttgttctgtgttttatttttgcccttcacattagtacaacgtggaagactcatggttacacagaatcatacataagtacaatgcttgtccctaagaaaacaagcactcgttgtattgaacctttacggctcaaagaggagagtgatcaactcttcgatgacctttaacgcgagcagacaccactgatgatgattatccttacagagctaaagagggtagatgcaaagccaataagatacaagacaaggttacaattgacggatgtgaaactctaataatgtcagatgagagtacagaatcagagacagagcaagcgttcttaagcgccatgcttgagcaaccaattagtgtctcggattctgcactctcatctgacattatagagtttcatatccgtcaattgtaaccttgtcttgttacaatggatggcactatcaatcgttcgaatgggttttagaacatggtgggattgccactgatgatgattatccttacagagctaaagagggtagatgcaaagccaataagatacaagacaaggttacaattgacggatatgaaactctaataatgtcagatgagagtacagaatcagagacactaattggttgctcaaggatggcgcttaagaacgcttgctctgtctctg

SEQ ID NO: 83793 - DNA, 422 bp, Glycine max
  Clone ID: PAT_MRT3847_46681C.1
caaacaaaaatatttttttaaaaaaacggttccaaataaataaatccctccaaaaaggtttcactaatcccccggcctacgggacccagggccccaaaaaaataggggaattttaagccccggggggggaggggatcatcaatacaggactggggagcccccaaatccggcttccaatatatcatcagagggctcgggtttatttttttgggcatcagcaactataggctttgttggagggaaagggcgaatcactttttccaggggcccggagctttttgggaccttcggctttttttttagccgctcctctatagcactcaaggcacgggatggaccaacttgggaaggatagaaacccctttttttttgggcagcaaaaagttctacagccagctttggctcccgaatagcttttttta

SEQ ID NO: 83794 - DNA, 371 bp, Glycine max
  Clone ID: PAT_MRT3847_46682C.1
cggtgcttcataattataaattccaacaaaattgagtttcttcttcctattatatacttgcttcatacattctcttaattaacttaggttcctgctttctccttctcggtttggggctaaataattaagcttcgtagatttgcataaacctagttatgggttttatgagcgaagtaaggatggtagcttaaatttaataaacaacagagttggttatggtggggtcatacatgatgtgattgctgaatggatttctagttttatgggaatgttcccgttgttgacatccttcatgctgaattaatcgctttatattaaggttggttattgctgagtctatgaatgtttttcaactcatttgtaaaactgac

SEQ ID NO: 83795 - DNA, 254 bp, Glycine max
  Clone ID: PAT_MRT3847_46683C.1
gacctaatatgctagaaaaaaaattagcttgttctgaattgttttaagaaaaacaacacaacttggttccgggtgtggacgaaaaaggaaagggtattcttccccctccaaaaccataaaatggggcctattacctttgaccccctgcctttgcttggcattgtggctttagagaagattggatcttcccgaggaagaacccctgccctttttcctcctttgaaaaaccttaataaatctgcttggcgacaaaa

SEQ ID NO: 83796 - DNA, 180 bp, Glycine max
  Clone ID: PAT_MRT3847_46684C.1
agagaaaaaaatgtctcttccaagacccagtgagggtaaagccccttctcagctgaaagaaggattacaaccggcggcggctgaagcctcaccctcttcttcagggaatattaggcaaaacacttccctcccttggctctatacacaacaagattcacaaatttgacagtgagaaatatg

SEQ ID NO: 83797 - DNA, 394 bp, Glycine max
  Clone ID: PAT_MRT3847_46685C.1
ccacgcgtccggaacgacagcccgacgttgaagaaccggaaggggccggtggagatgccgtacatgctgctgtaccccaacacgtcggatgtcaccggcgagaagggcgaggggctcactgccatgggcattcccaacagcatctccatatgagcctcctcactgcctgagcggatggtttgtagatgttctgttacgctgtgtgtaatgtgtcgtttattcgttggttttgtcagtctcagggtagggaatggagatgttgattggatccatgatctgtagggttgagagaggagtcacgtctggagaatgttgtcaatgtgtgtttctttcttgttaagaataaaagttcgtcagctcaaaaaaaaaaaaaaagggcggccgctctagagga

SEQ ID NO: 83798 - DNA, 340 bp, Glycine max
  Clone ID: PAT_MRT3847_46686C.1
ggtaagtttatgaacagtcaccctgccttgtttaaaatttccatttccggaacctgaaatcaaactctcttattcctttttttaataaataaattaagttttttcccattcaaatgggatggggattttttttaagcagtccaaaacctgaaaggttttttgaagatggggaaaatgactgtcttagatttggttaatcgtccatgcaggggtggcgtgcaccaatggaagaggctaatgctgcatatactgatctggatgagcccacttcattttttggggtttatgatggtaatggaggtaagggggttgcaaagttttgtgccaggttttttattta

SEQ ID NO: 83799 - DNA, 206 bp, Glycine max
  Clone ID: PAT_MRT3847_46687C.1
cggctcgagcggctcgagcttcgtgtcaatttctctctctcagcgctttctgcaatcgaaccttacatctccaacaggatccacaggccgaatgagaaatggggctgacatgcacaaagcttgtcagtcggcttttcgcgaagaaggaaatgcgaattctgatggttggtcttgatactgctggtaagagcactatcctgtacaag

SEQ ID NO: 83800 - DNA, 400 bp, Glycine max
  Clone ID: PAT_MRT3847_46688C.1
cttatcgcttgcgctgcattatgatccgggtaagcatcaggcaatgcaagaagctcatcttgacgatctcctagatgtgttacgagactggtcttagcacagtccacaggaagctcggcaagcgagaaggaaagctgtctgtctgattgaaggggtggagaatgccgttgtgcctaccatagcacagaatgaagagctccatacgatgcatgggatgatgaatgctgctgattcagatgatcagattgacctactgttgagcattgaacaggggggatgacaaggagcaggtaacgctattgcaaacaagaatgagcttgatgatgagctcgcgctggctaacacacaagaattctttgcagggaattctccagtggctacttgggtaccaagtcttgag

SEQ ID NO: 83801 - DNA, 155 bp, Glycine max
  Clone ID: PAT_MRT3847_46689C.1
tcggtcagcgttcgtctcacgtacggaatatgaacatgcgggggatgcatatagctgaggctctgtagaacatatttttgagaagataatttctggtatgtatttgtatgaaatagtaaggagagttgcgttgaagctgtgtgaagaagttgact

SEQ ID NO: 83802 - DNA, 370 bp, Glycine max
  unsure (1)..(370): unsure at all n locations
  Clone ID: PAT_MRT3847_4668C.1
cacgntcncgcacacntncgtnagcgcggaatgtcngtctcgagctggcntcncgtngncctgtgctaaggctntgngggnccnngnnnncgtnnngtnaacgncgatgnncagntcnggnggantngngnntgtatgtgnanngnggtngtnnctnccgcncnntgtgaaccggnaatgntnntgcgncgnggtngttgctcgatgcattgncgtgacgntnactctngcctgnncganaactgctcgggngcncgntgtgttgcngcgangttgagngngtattttnattgatncgtgtcaggtncgcaggcgagnnnaggcggctgnnccccgnaggnagntgnncgtgccnngttgtgtgtgnggn

SEQ ID NO: 83803 - DNA, 419 bp, Glycine max
  Clone ID: PAT_MRT3847_46690C.1
gcctccaataccagacccaccgctggcgcgagggctttacccctccagaggcgatgactagcatggttctggtgaaacggaaatcgaaagcagagagttttgacactaaacaatgactcacacagatgaaagccctctctttttatatggcatcttggttacttgaaattttttctgtagatgagaaagattctgatgttcatactgtcgttgcgaagggaaatggaagggctttttgagctggaggacacgttgcctttgattgtcgggatggcatgaaaggatactggagggttagagcctatttttttcaaagtgaatttaaactgtacttcttgatggccacctatactaaagccccatgccttcaaattcttaatgtgaattgttatggagaggtggcagctaggtgtttctgt

SEQ ID NO: 83804 - DNA, 289 bp, Glycine max
  Clone ID: PAT_MRT3847_46691C.1
ccgactaggccggcggccgccctttttttttttttttttttttttttatttttttttttttttttttttttttttttagggaccaaccgattcttttttttaaaaaataaaaaatcaaaaaatcaaatttgggcaatttaacataacagaagcccacataacctacgacaattttcaccatggtggggggtaaaacaaattggtatcattttagaatcacctttgcctaaaaaaaatattatgcttttgggtccgtcccaaattttcatgttcatgggcaatttcatct

SEQ ID NO: 83805 - DNA, 261 bp, Glycine max
  Clone ID: PAT_MRT3847_46692C.1
cgacgagtacgtggtggtatcgcagtgcaaatatacttatgtattgaaggttctggctcagaacgggcattaatgatgcaacagttttatcaacgtgcgcttaaaggggagactactaaatttcactatccagacatagatccctcatgggcaaacttaaatatggatcctattacagaagacgagtggacacgttacgaagggtattatgataagatgttagaacgcaatgcgaaaatgaatgaaaaattagatttttag

SEQ ID NO: 83806 - DNA, 214 bp, Glycine max
  Clone ID: PAT_MRT3847_46693C.1
gaaacaacctcattgtctctaatatttaaagatttgtatctcaattcttaaggtttgtaaagagtgtgaacaacccttgttaatttttcaattaaatttaaaggaatgcatcacgtgtcccagttcatgaaaaatgtgaacttggcagacactctgaacaaggtcgagaggggcgagagcaaattggattggttgtcaaggcacaaaatctccc

SEQ ID NO: 83807 - DNA, 933 bp, Glycine max
  Clone ID: PAT_MRT3847_46695C.1
cccacgcgtccgtgctgattgaccgtatgggccagaaagattcagtcctggaagacgaagttagatatcgttataatagtgtcatcttgaattacaagaagtcacaagataatgctcagcgagtttctcccctaacttttgaacttgaagctactttgaaattagcaaggtttctttgcaggagagagctggccaaggaggtggtggagttgttgaccactgctgcagatggtgctaaatctttaatcgatgcaagtgataagctcatattatatattgaaatagctcgtctgtatggaagtcttggataccaaagaaaagctgcattcttctcaaggcaggttgcacagttatatctgcagcaagaaaatagactggctgcaattagtgctatgcaagttttggcaatgaccacaaaagcttatcatgttcaaagtagatcatcaatctctgatcattctttgcacagtaagggaattgtatcaaataatgctgatagtgggaaaacatatcaccaatcagcagtctcactatttgagtctcaatggagtaccctccagatggttgtgttaagagaaattctgctctctgctgtccgtgctggtgatcctcttactgcatggagtgcagcagcacgacttcttaggtcctactatcctctaataacacctgctgggcaaaatggccttgctaatgcactttcaaattcagctgagaggctgccaccagggactcgttgtgctgatcctgctttaccctttgtgaggctgcattcctttcctcgaaacccaacacaaatggacataataaatgcccccactcatagagaagactgggtgggcgggtgctggttctttcaggccctttcatttatacaccaattcagttaagggagagcctaataatatcaaggaagcaggagctcatttggga

SEQ ID NO: 83808 - DNA, 290 bp, Glycine max
  Clone ID: PAT_MRT3847_46696C.1
tttctgatgtgtggactggtgaagcttttttttggtaactgtcatttttggtgagtttcatactcttttttaatattctgaatcttagttttgggcatgtgtttgcagagagattttcaagttgatgcaggacatctttcacaagttttcaacccttacattttaaaaagaacattactagaattgcttgctttttacggtgtcatgatatcaaaattcaaatataaagaaatgtctattacgttattctatctaactgaaggaggctattacaatgtgtgctcttgtgt

SEQ ID NO: 83809 - DNA, 1018 bp, Glycine max
  Clone ID: PAT_MRT3847_46697C.1
cccgcgtccgaaacttggaaagagaggggatagatagatagatagatataagagagagagacaatctcacacaacgcatatatacagagagagaaacaaaagacgacttgttggggtctatagtgattttgttcttacttatcagattctcatttgttcttttcaatcatcatttcatacaagagatctctcttctcctcaactccttctgtctaaaagactcaatctttaatctgaacgctgcgtttttcattccgggctcccctttttttgttgtcccaaaatataataaaaaaatttcattttttctttcattgcacaaatggcacccagttttgattgtgtttcgagccttctctgtgtggaagacaacagtatttttgacgaaaacgattatggtggttcggtggaggtgttggaggacgcgtggcaggatcctagatatcgtcgaaaccttagtcaaagtgagaacttggatgtcccaaatgggtggtttcagttgcagagtgatgagtgtttgagactgatggttgaaaaggaatgggatcacttgcctaatggtgattataggaataagctgaggagtggggatttggactttgaggccagaaaagaggccattgattggattcaaaaggttcaagagcactttggttttggacctgtctgtgcatatctatccataaactacttggaccgcttcctttctgcatatgaattaccaaagcatagaacttggacaatgcaattgttggctgttggatgcttatctctggcagccaaaatggaagagactgatgctcctatgtctcttgatttgcaggtgggtgaatctaagtatatatttgaagccaaaacaatacagagaatggagcttctggtgctgagcacattgaggtggagaatgcaagcaattacccccattttccttcattgaccatttcctttacaagatcaatgatgatcaaagtccaattggagcttcaatttgcaatccatccaacttatactgagtact

SEQ ID NO: 83810 - DNA, 174 bp, Glycine max
  Clone ID: PAT_MRT3847_46698C.1
cctcagaggccccacatggtttgaggcctagcttctaatgaaaagagaactcccaattataccaatttcttgcaatactagagtaaattttcaattcgttgcctcacttttgagttattgatgtttagtaattggcatcctgtgattataaccaagattcatcctgtgacctga

SEQ ID NO: 83811 - DNA, 361 bp, Glycine max
  Clone ID: PAT_MRT3847_46699C.1
ggggttgtctttcacacaccctattatatccggctctatgatagctaaaaatatgcgtattctcatggactgtcttgatgctgctggtgatactaccatctagtacacactctatctgggaaaaattgtctctaccattcccacaatagtattcaatgtgccgactgagcattctctgaatattagctctactggatgggatgtgggtgaccaagatatgatccatgctttatggacacactacttacacaacactcatgcgcttatctctcgtgtggatggcagtgatcgtgaccgtgtagatgatgctagaggtaacctccaccgaatgttgaatgaagatgatcgagagatgctgctc

SEQ ID NO: 83812 - DNA, 363 bp, Glycine max
  Clone ID: PAT_MRT3847_4669C.1
gggccggcaaaattccaagggatttttttttttccgaaaaactaatgtttttctttaacaacttgtgaaataaaaaacttatgctaaaaaaggttttttcggttttttttaaagtttaaacctttaaaaacaaagggaaccccccgccccctcattaaataggggatgttatgcaaatttacaactcgttcttgggattattaacattaccattttgaaccgcattagctttaggttttgaattaatttcagcctttacttgggggttattttccttctaaactgttgcttcaggactgatttccaagctggtcttaactgaatcataaatacgggaagcaaaatttttgggatttttaagca

SEQ ID NO: 83813 - DNA, 150 bp, Glycine max
  unsure (1)..(150): unsure at all n locations
  Clone ID: PAT_MRT3847_466C.1
ctagttgtaacanggatagnntnatacnannncatgagatgagagcaacctagttanaagggaaaaaggggtccaaaatcctaagacaagtcgcacctcatctcatggctttgtatcaaactattcctagttgtaacaaggatttggttt

SEQ ID NO: 83814 - DNA, 424 bp, Glycine max
  Clone ID: PAT_MRT3847_46700C.1
gccaattattatagaaattaattccagaagatgagaaggttgggaacttaatctaccagaattacttcttgatgtaacgttaatgatttttttctatttataattattctaatttacacctgcaactactaatatgttctaactttggtcccccgcatgaaagagcataatttatctattttctctctcaaatctctttgtagagctaaaatagtaaattgcattaagaatagaaatgtataacaaggtaatcaaatatcaacatatccttggccataactttatttagatactcttttccagttctattagaaaataatatttctctacgctactcctaaaacttaccatgaaaatgggtgatcaagccacaagaaataatattaagcacaagaaaagatactgtaaatgtaatattcataga

SEQ ID NO: 83815 - DNA, 170 bp, Glycine max
  Clone ID: PAT_MRT3847_46701C.1
cgtttccgcttttagtccacaacatatcggtaatgttacaacaagactattcatgcgtatggtttcaagcttccgatggtggtcttttgacactacatttgggtctttagtcgctatcctgtttgttgtgtacattccttagaggtttgggtgtgatttgtggtatggtc

SEQ ID NO: 83816 - DNA, 1708 bp, Glycine max
  unsure (1)..(1708): unsure at all n locations
  Clone ID: PAT_MRT3847_46702C.1
ccacgcccgtccggtagaatatgggatgcgangaaattcacacaatccacgaatatatgtacctcgacctccagatgctataaatgggaagggcaatgctccaccagctagtttgccatcctcaagtaatgttcaacaaagctatcaagtactttgttgtgcatataatgcaaatggaactgtttttgttactggtagctctgatacttatgccagggtgtggagtgctttgaagcccaacactgatgacgcagaacaaccaatacacgagatggatttattatctggccacgagaatgatgttaattatgtgcagtttagcggttgctctgtggcttcaaaaattttgacatctgacccctggaaagaagaaaatactttgaagttccgaaatttctggtattgtcatgataacatagttacctgctctcgtgatggtagtgcaattatatgggttcccagatcacgtaaatctcatggaaaagtaggacgctggactcgtgcatatcatttaaaagtgccaccaccgcctctgcctccccaacctccacgaggtggtccaaggcagagatttctacctactcctcgtggtgtcaatatgattatatggagcctggacaatcgctttgtgcttgccgctattatggattgcagaatatgtgtttggaatgcagttgatggcagcttagtgcactctttgactggtcatactgaatcctcttatgttttggatgttcaccctttcaaccctcgaatagctatgagtgctgggtatgatggacgaaccattgtgtgggatatatgggagggcatacctattcggacatatgaaattggacattttaagttggttgatgggaagttttctccggacggaacatcaattgtgctttcagatgatgttggccaaatatattttctgaacacaggtcaaggcgagtcccagaaagatgcaaaatatgatcagttttttcttggtgattatcgaccccttattcaggatactcagggatatgttcttgatcaggagactcaacttccaccacaccgaagaaacattcaggaacctctatgtgattctagtatgctgccatatccagaaccttatcagagtcaatttcagcaacgtcgacttggtgctcttggcattgaatggcgtccttcattgataaaatatgctgttggtccagattttactgttggtcaggactacccagtggtacctttggtagatttggaagtaatggttgagccacaaccagagttcttagatgccatgttctgggagccagaatatgacattattgtaagcgatgatgctgactctgaatacaatgcaaatgaggatagttctagtgcagccgggcaagggagtgttatctcttctagtgatctagaatatagtgatgactctagtaatagggacggccttcgaagatcaagaaggaaaaaacataatgttggagttgaggtaatgacttcctctggaaggcgtgtaaggaaaaggaatttggatgagtgtaatggtaatacttctggaagtaacagactccgcaagaaatccaagggcagctcanaagcctcaaaaaggaaatcttccatagctaagacattgagaccccagcgaattgctgcacataatgctcgtagtatgttctctcaaattgatgaaacatctactgatggggaaaagatatgattctgatga

SEQ ID NO: 83817 - DNA, 2225 bp, Glycine max
  Clone ID: PAT_MRT3847_46703C.1
ctcgagccgcgagtttgagatcagtgtgaattatcataagatcggtgtgtccgcagaaatatatgtttataaaacaaaaataaaaacccctttcattaacccaacagtgtcgctgcaggagaagaagatcgaatcgaaacgaaacgcgaataagtttctttctctcttgctggacgaataatggttctgaggaggaagaagatggagcagcgcttcaccttcttctgctgatgttgatttcatggccacctcccagtcccagcatcgctgcgttttcgttgggaatataccgtatgatgccacagaggaacagcttattgaaatctgccaggaggttggcccagtagtctcattcagactagttattgacagagaaactgggaaaccaaaaggttatggattctgtgagtataaggatgaagagacggctttaagtgctcgacgaaatcttcagggttatgaaattaatgggcggcaattacgcgttgattttgctgaaaatgataaagggaatgatagaaaccgagaacagggtcgtggcggtcctggaatgactacaaatgttgaccatcagaaacaagttggcatcccagctgtccttggggaagctgttcagcatcagcctattggtcttcatattgccataacagctgcagctgtcatgacagcagctctaggtggtgctcagtttggcatccagtcaaatcaaaacagtttgcagagtcagtcagcattggcacatgatcctttaactctgcatctggccaaaatgtccaggagtcagctgacagagattatctctgagctgaagggaatggctacacaaaacaaagaactggctcgccagctgttgctttcaaggccgcagttgcccaaggctctttttcaggctcagataatgctaggaatggtgacttcccaagtgttacaaatgccaaaccttaggctggtttcagatcaaacctcacagtcttcaatgaatgaaggccagctgggtcagccatcattggttcaaactctgtcaggccttcctcctcctgggcagggcaagttgcagcctggtttgacaccttatgctcaagaaggccaagtcaacaccatacctcataatcctttggctcctagtcaattaactgcgcatccaaagcctccagtgcagcctcggattccccttcagcaaaatccaaacaatcttgtactgccaggaacattgtctgggcagtctaatttaatgcttccttctgcacgttctccaggtttgggaagtttgtctgttaggcctccaattcaactggcaacttcaactgctctaaaccagcaaatgcatgcctctttgctacagcattctgtacatgttggaaactcaactgtaggacataatgttcaaaaggttcgtccagacgccaactttcagcctggcccctccatgtcaacaactaattctcagttattgagtaaaggtgataaatcttctaaagttattgaggatttaaattgggccaagagaactaatacatattcaaaatcaaacattcctttgggagtagagaaaacaaacatggttcgtgattcttcagaatcttttactcggccgtcaaaggttatgaaattggatgagggaaggagcacccctctttctgcagggattttggatatgcctgtcaccgatggatcatctcatatccttggaagaagctcattacctgtacatgcagctcctaaagcggaagggcaatactctgagcaacaatcttctcagcttccacctgatgtggagtctgttttgctgcaacaagtattgaatctgacaccagagcaattaagttccttgccaccagatcagcaacaacaggtccttcagctccagcaggctcttcggcgagatcagatacagccctcataacagggaactcatcaacaattcaaaaatagcatcaacttatttgtatactagcatttgctgtagattagcttcagaatatcaaaattctttcaaccactattgcttctttttgtaatttgttttctaattccttgtccaaatatttgatgtagcattgaggagctccagatgggcatataaatcatttagaagagatgtacaataataattttgacgttaaatttttgccgttgacatatcctttggtgtgggctgaatatatttgccttgtcatttgagctattataagcatctgtatgcttgaatatattgctcttgcact

SEQ ID NO: 83818 - DNA, 230 bp, Glycine max
  Clone ID: PAT_MRT3847_46704C.1
gtttattatgttcatattgtgaactgtgaccgtgtgtgtgcatctgaggaggaagccagactcaaggggctggatgacattggaaaatacttgtctttgaattatgcaaaactggctttacacgttaatgcagagataactggaaaggtatgtatactgcggttatcaattactcaaatgagtagcagtctggagcagaaaccgcaagagatggcttcatgcatagcaca

SEQ ID NO: 83819 - DNA, 403 bp, Glycine max
  Clone ID: PAT_MRT3847_46705C.1
ggttcaaagtccttgttataaaatttggcaaaatggaaatcattaaatgagaatcttccttgaccattcactggtcaaaggataaaaagcagtatgaaaactaccatttgtctttttccacataaaaaatgtttatactaaacaggatttttcataatatatactatctcatttactcccatctagttgctaactagagcacatgagtactttttctttgttgcgcaagtcctgttacaagaacaatcttacaatttgggcttagggccaaactcaatcccacaaaactgccttatgtagtgaagattgtccaagcttcataagcactatttgagccttatgtgaatctcaacccctaagacccaatgtctcaacagctgcacactacgacttttcacacagc

SEQ ID NO: 83820 - DNA, 388 bp, Glycine max
  Clone ID: PAT_MRT3847_46706C.1
ctggggggaaaaaatttaaaatccataaaaataataaattacccaaaaaaagagcccaaaagccaaattcccccccccctttttttcccaccgagggggggaaaaaaaacaaatggccctcgtaaataaaaaaagtcccaagaaccacaagcacccagaaaacccagggcccactcctgaaaaccaacccccccttggaaaaaatgggggtgacaaaaaaacccaggcctctctttggcccctgaccaaaaagaaacgaccaacccccggggccaaaagggatcccggcaaaaaaaaaataggtccatgtctcagggggcacaaaaaccccgtctttgctaaaaaacaaaaaacccaccattgggtgtttttaagggccccccccccc

SEQ ID NO: 83821 - DNA, 324 bp, Glycine max
  Clone ID: PAT_MRT3847_46707C.1
accgtctcgaactcactagtactcagccgccgcaatcaggggggcacgtagctcgagcgcgcgctccacctggcccgacgcgatgcgggccaagtggaagaagcacaggatgcggcggctcaagaggaagcgccggaaaatgaggcagagatctaagtaggcgcatcttgagaccgaggatggcgagcttctcctgcaccatggctgtgacgcgttgggatgattgtctccctttgtagacgtgctttgctgtagacgtaggcgatgtaaaccgtcctttttgattaattctatatgttctgagactgggtttatattgtaatt

SEQ ID NO: 83822 - DNA, 498 bp, Glycine max
  Clone ID: PAT_MRT3847_46708C.1
aatttacgttttagtaataaaatgccaaaattttggcggaaaatgccgagacctccacgaaaaaggattgccaagaaaagtgatgacaaaaaatcgacggaagacgaaaaaaagaagaagaagaaacggaggttgcccaaaacactgaaggagtgttttgagtgcgtcgacgtcggttccatcgttttgtgcgcctcctatttggacattccgccggagccgatcagcagcagcagtgacgagaaaagcaacgggaaaagaaagaagcaaaagggacagacgaaaaaagaagggcccaaaattgtgacggatgtccacgaatttgggtgcattccatggcgactttcgcttgtgcaccagcttcgcaaggacgacaacggaggctattccaaacacattctcaagttggcactgcactcggactatcgcaaggacgtcgcatggcgtgccgatgtgtccggcactttgacgatgaaaaaatgggtggacaaaatgccg

SEQ ID NO: 83823 - DNA, 215 bp, Glycine max
  Clone ID: PAT_MRT3847_46709C.1
gagaacaccgtttgcgaagtgcttgccaggctccactctttgtggcagtttgatggttggtagcgcgccacttttttcctgcgcccagtcaccacctgtttccatgattaccgtatacaggcttgggtggctaggctgagacgactgctgcgtaatagtataatagcattgtgatccccagtcttgatgatggtagagtaactacttttgctttt

SEQ ID NO: 83824 - DNA, 460 bp, Glycine max
  unsure (1)..(460): unsure at all n locations
  Clone ID: PAT_MRT3847_4670C.1
tttccctttttttttttttttttttttttttttttttttttttttttttttttttttttttttttttttttttttttttttgggttttttttntttttttaaggaacaaaacctaaacccaaaaaatttattttaatctcttacgttacaaaagggggggggggacttttgcctcctcgttgggaaaaacgttaacaatttcctacagggacaacagggtcacacaagaaacaacaggtggagcgcaacaaaacttctggatgaatgcaagggattcaaaccacttcccaaaagcaaacaaaccaaaagggccacaaaaattttcccagccccaaatccaaaaggaaatgaaaaaaaaccgcggatttttcttttaatgcccccaactggttaatttttttcaaaatcaaaatcaaaaccccccattggggaggatctaacgaccctacggggaccggct

SEQ ID NO: 83825 - DNA, 202 bp, Glycine max
  Clone ID: PAT_MRT3847_46710C.1
atgttttttttttttttttagtccacacaaacataaacttttataaaattaattagtacagtattccaaactggtgatgaatgctgatgaaacttcaatttgcagtgcaaaaacagtgccccaggaatttttttgcaataaactaaaataaatgctgcagtttctgaatgagggaaataggaaaaagtgggtcacgaaaaca

SEQ ID NO: 83826 - DNA, 1830 bp, Glycine max
  Clone ID: PAT_MRT3847_46711C.1
gccagcctcgacctagaccttcaatgattcgcagacaaataaagaactaatgagaccatttgtaataataataaaaatcacatgagataatgagatatgtttttataaataaataaggaacaaaaaagattgacaaattatatttcaaagaaataaacatattttaacccatccttatctgtagtatttaaagagcagtaatgggtttagattccccggacgcatgcgtaaaaatgaaaagaagcactcactcgtgaaccccacgcagtgttcgataatcaaatcttctttctttttcttccgcagtcccaaccttcatggattctcactcacacatcattgcttggggctctggtgaagatggtcagctaggaatcggaagcaacgaagagaaagaatgggtctgcctcgtcaaagccctccagccccaccgtattcgctccgtcgtcgccggcagcagaaactccctcgccatcgctgacgacggcaaattgttcacttggggttggaaccaaagggccacacttgggcaccctgctgagaccaagtctgagaacaagactgagaacactcccagccaggtcaaggctctttccagtgttaaaattgttcaggcggctattggggggtggcactgtttggccgttgatgatcagggcagagcttatgcttggggtggaaatgaatacgggcagtgtggcgaagaacccgagcgcaaggatggcactggtagacctttaaggagagatatagagatccctcagcgctgtgctcctaagcttgttgttcggcaggttgctgcaggaggaactcactcagtggtacttacacgagaagggcatgtttggacatggggtcagccatggccgcctggtgacataaaacagatttcagtccctgttcgggttcaaggtcttgaaaatgtgaggctcattgctgttggagcatttcataatttggctcttcaagaggatggaactttatgggcatggggtaataatgaatatggacaacttggaactggagatactcagcctagatcacaacctattcgtgttcaaggactttctgatcttaccttggtagatattgcagctggtggatggcattctactgcattgacagatgaaggagaggtatatggctggggaaggggggagcatggcaggcttggatttggtgatagtgacaagagcagtaaaatggtaccccagaaggttcaacttttagctggagaagatattgttcaggtgtcctgtggaggtactcactcagttgcattaacccgggacgggcacatgttttcttttggtagaggtgaccatggacgtcttggatatggtaggaaagtcaccactggtcaaccaatggaggtacctatagacctccctcccccacaggatcccagtggcactgcaactgagggacattggatagctaaactagttgcttgtggtggccggcataccctggcaatagtagaatggaaatcaaatgaatcttaaaattgactcaaattctaaataaaacagaaactggaaagtggatgaggctaatgactgatttggaactcaattcaggtgctggaatttcactcgttctgcatgatatgatcttgcctttgtataatcatgcatatggcacaagcataaaattcatcaatatagtaacggggtttggttttggatggtcttaatttgcatattcatgcaggcgatttttttttttattcgtaggaattgaagactgttaaaaaaatttacaataattcacgtattttgttcaatcacctgagttaaactttgactcatgtagaaaatgtttagtgag

SEQ ID NO: 83827 - DNA, 443 bp, Glycine max
  unsure (1)..(443): unsure at all n locations
  Clone ID: PAT_MRT3847_46712C.1
ttcgaaattttgtatttcatgcacattagaaaaatataaatcagatcgatcctaatggccaaaaatatatgaagatataatgtaatctatgaagcaccggctaccaacaccagacacgatcacggacacagacacatagacacctgtgatgatcaaaatgtaaaacataatacggatggatgcnntggtgcggnatcatatcatgcagaacgagtgaaattccagcacctgaattgagttccaaatcagtcattagcctcatccactttccagtttctgttttatttaaaatttgagtcaattttaagattcatttgatttccattctactattgccagggtatgccggccaccacaagcaactagtttagctatccaatgtccctcagttgcagggccactgggatcctgggggggagggagggctataggtacctccattg

SEQ ID NO: 83828 - DNA, 162 bp, Glycine max
  Clone ID: PAT_MRT3847_46713C.1
aagatattaacaagcttatattatttttatattgattgtaattgtaattagtactcaacaactttttacttggactaaaaaattattctctctattgaacaccagtccatcacaaagagtaaacatacatttttatctaattaaaaaaatgatctttagtgc

SEQ ID NO: 83829 - DNA, 443 bp, Glycine max
  Clone ID: PAT_MRT3847_46714C.1
cccacccagggttcgataatcaaatcttctttctttttcttccgcagtcccaaccttcatggattctcactcacacatcattgctaggtttcttctctttctctctctctcacacacgcacacacacactatcaccattttttctctctttttctgcactgactcactcaagtttcttcttcacttcattttcaggggctctggtgaagatggtcagctaggaatcggaagcaacgaagagaaagaatgggtctgcctcgtcaaagccctccagccccaccgtattcgctccgtcgtcgccggcagcagaaactccctcgccatcgctgacgacggcaaattgttcacttggggttggaaccaaagggccacacttgggcaccctgctgagaccaagtctgagaacaagactgagaacactcccagccaggtcaaggctcttt

SEQ ID NO: 83830 - DNA, 211 bp, Glycine max
  Clone ID: PAT_MRT3847_46715C.1
gaaaaatcattttcttatgaatcttaagttgaagacaaagatgtgattcagtttcagttacattgtgaggatcgggatttgaatttcactactaacatagaagagagactgactgtaacgccaccatttcaagttggagctacggatggaatcattagatacacactctctagacttgaggtaagtgtgatggaggacgaggctgatagtg

SEQ ID NO: 83831 - DNA, 1997 bp, Glycine max
  Clone ID: PAT_MRT3847_46716C.1
ccacgcgtccggaggtgggtcactagcagtgtcccttcttcgcgatgaagagaaataccctcaaagcatcagtggtgacctctgtggtacttctcatcgcagctaaagcagaggccgcgctcacggcggctggcaatctcttcagaggtcaggcgtttgaaaggttgagtgggggaaggtggcaggaggcggcgtccgtatgggtgacggtgatgggaagatagagtagaggcaaacgtaagatgatgtctgttactgttgctgccgacactacctccgccgccgtaggatcctgtctttcacgatcgcggcggcggtgcttaacggtggctctccgatctaaagtgtcagtcaccccaaccagaatattgacgaaactcaaacacgagtgtgccactcctctgccccttcttcagcaagtggccaataacatgtcttctgacatgcgagctgggcttgctgcagaggctgggcctgggcccgggcttcccatgatacccagctatgttgaaaatcttcccactgggaatgagaaagggttgttttatgccttggatctcggaggaaccaacttccgtgtgctgagggtgcagttgggtggcaaagatgagcgtgtcattgccaccgagtttgatcaagtttccatacctcatcaactcatgtttgctacatctcaggagctgtttgatttcattgcttcggggctagcaaaatttgcgtccaaggaggatggtagatttcatatctcaccgggaaaaaagggagagattggcttcacgttttcatttcctgtgaagcaggcatctattgattctggcatactaatcaagtggaccaagggttttgcagtgtctggaacagcagggagagatgtggtggcttgtctgaacgaggcaatggaaaggcaaggaatagacatgcgagtttctgctctggtgaatgataccgtggcaacgttagctggagcagaatactgggataatgatgtcgtggttgctgtcattttgggtactggaaccaatgcttgctatgttgaacagatcagtgccattcctaagttacagggccatgtctcttcttctgggaaaatgatcattagcactgagtggggtgctttctcaaatggtctccctttaaccaagttcgatagggaaatggatgctgctagcatcaatccgggcgagcagatctttgaaaagacaatctcgggaatgtatctaggcgaaattgttagacgagtgctgctggaaatggctgaagagggtggtctgtttggaaaatctgtcccgcagacactatctacacctttcatactcgggaccccagatctatgtgccatgcagcaggacagttctggcgatttacatgcagttgggtccctcctctatgataaagcaggggttgaatccaatttaagtgaaagaaaaacagttttagaggtttgtgagacaattgtaaagcgaggtgggagcttagctggtgcaggaatagtggggattctacaaaaaatggaagaggatcagagaggtctcgtctttgggaatgggaagagaagtgttgttgccattgatgggggcttatatgaaaattatcctcaatacagggcttatttgcaagattcagtcacagagctgctaggaacagaaaagtcaaacaatgtggtgatagagcatactaaagatggatctggaataggagctgctctattggctgcttcaaactccatgtacaaccaagatttatagggaatttatttaccattatcattatcaccgagataaaaaaatttagttcatgtaccacgtatgtaattattggaacccctagtccttgattgagcattggagaggtaagaataagtgcatatttagattgcagtttttaaaagtttcaataattatttctttcaaactgaacttttaggttaaattttagtttcaaatatactttcagtgacaaaaaaattatgatgtcaaagtcaatttcctctctaaatt

SEQ ID NO: 83832 - DNA, 589 bp, Glycine max
  Clone ID: PAT_MRT3847_46717C.1
attctccattatatatgattgctgttatttttattttaaacatataaaaacatttgaggataaaatagacaaataaaaataaagatcgtagaataattataacaatctatatcgcctttatctattggtgtatatatatatatatatatatatatatatatatatactacatatatatatacagaaataatgacaatgccctttagacactcactgaagaacgtcaattctcaaatctcagtctatagcaaacattcgttccaaaaaacaaactcttagctaagtctcattattgaaaataacaagctaggccttgatttctgattaagaaatatccaactctgcttatctaatgcaaaccgcttttatactatctgaaaaaaggctattaagacgtaccatctattctttaaataggattaacgcgtataattacctttgtttccaattgatagactgttaaatgcgtacgaccaaggcctacctatactatactaggatcgcaagcgatcttaaaagtattttgtataacaaggtcgtgcgctgtttaatgaatatatttatgcgacataaataattcttgcagtat

SEQ ID NO: 83833 - DNA, 647 bp, Glycine max
  Clone ID: PAT_MRT3847_46718C.1
ttgaaaagagtgtatcagtcagaaaatcaatcattactttttattgttattttaggttcattaacagcatttggcccattggctattgatatgtttttacctggactacctaatattagtcatgattttgatatttctgcatctacaactcagcttactatctccttttttatgattggattagcgttaggaaattttttggctggccccatatctgatattactggtagaaaaaaaccattaattttctcactgattatttttactattgcgagtttaggtattatattcgtcacaaatatatggattatgattattttacgatttattcaaggattaactggtggtgcaggtgcagtcatctcaagagccattgctagtgatatgtactcaggtaatgcgctaactaaatttttatcattattaatgcttgtcaatggcattgcgccaattatcgcacctgcgcttggcggtatcattttaaattatgggccatggcgaattgtatttgtaatactaacaatgtttgggattgtcatgttaataggaactttatttaaagttcctgagtcgcttgaaaagagcctaagggaaagtagtaacataggtacgatgtgatgaactactgtaccatctgattaggagca

SEQ ID NO: 83834 - DNA, 350 bp, Glycine max
  Clone ID: PAT_MRT3847_46719C.1
tttcgttctttttttttttttttttttttttcaaccaaaaacgatatgcatactcgcgcacttgcaccttttgcgcactatgcacaggcttagctaacccccggttcctaagggccagccggttagggcccaaaggggatatgttaagccaaccctatgcaaatgtcctagccttgatcttttagatgagcaagatgttgaccgccttcatgtactcatgggtggagacccattcccatatatgcacgtactgtcccttcagggccaaagcgagagccctggaataacgctgaccttgtgaatgaccatcggacaagacggactcataacctgggcgaattcgcccaaag

SEQ ID NO: 83835 - DNA, 367 bp, Glycine max
  Clone ID: PAT_MRT3847_4671C.1
acttcatacaactcttcctgatttaacaaccttttatctaatacttattatgatgaatgtgctatttgtacataggcaatttctaaaactaaaaggcgaaacttcaatcatctcttccatctttcatgttttatatcttttttgtatcaaagccttacttatatatatacttatccaacattccgaaatccacttttttctgtttttcctaaaaatcaaacaaactcctatttttttacaatatctatttattatcaactttcaccacaaatatattctaaattatatcctccaaacttcttttatcataccattccttcaaaattttatccaaatcacacactaaacactcctaaaagttctcctt

SEQ ID NO: 83836 - DNA, 1142 bp, Glycine max
  Clone ID: PAT_MRT3847_46720C.1
ccacgcgtccgcccacgcgtccgtacggctgcgagaaaacgacagaagggggacattaggatgaagagaggactcgcaagcttaatcaagacgccaatagagagagggtggggtaatgggttgcgctgtttcaactcttcttcttcggtgttgaagggcgtcaccacccccactctgcttcagcccagagtgcttctctacgacgccgtttctcacctctgccaccgaggagtaaaatgggtaatcagagcagacaaggacagaaagatcaaattttgttgcgttcagtctgatactgctgagctctatctgagagcttgtggtcttgaacgagaggatgtcttgcaccgcattctgtttgttgaaggcctgaatgtttactctcagggatccactgctgcattgcgagtactgtcgcacttgccactaccttactctgcttttagtgcgctctgcgtgattccatctccactcagagatggtgtctacaattatgtagcaaaacgaaggtacgaatggtttggtaaggctgacgattatttggttttgcaagagaaagagctgcttgagcgtttcatagatagggaagaactgatgagtcgagataaggattcctagttttagctgctgcctgaaggtatcagccgcaattcacattcacaatcaagattttttcttttgttaaaaaaatgtttaagaattgcaaattacacttgtatctgtagtgatggacaagtaatgagtggcttagtttaagaatcaaatgctaaacttgttatttgatacttgtcttgtatactagcagtcttgtatttgatctgagctaagggagagcttaaggtcgaagaatagattgctaaagcacaagtgcaaatgttaaatcatggacgcattttggtgagaacttattgttgggattcttgggaacacacggtgcttcaagagtacattatttgttgctgcagttattattatgatagtaaatagttagatagttgatgagttaattaatttgttcatagttagttatagatacatcttctatattttagaatttagttggcagtcataagttgatgactgtgtttttgatgtaaaaaaaaaaaaaaaaaaaaaaaaaaaaaagcggccgctctagagga

SEQ ID NO: 83837 - DNA, 192 bp, Glycine max
  unsure (1)..(192): unsure at all n locations
  Clone ID: PAT_MRT3847_46721C.1
tctactctaactggaaaaacgaagaaaaataacctctttcatttatctacctctccctctccaaccaatgaatgtctaccctanaaatttatagagagacccccccnanancctcccactttatatctccccatccattttcacccaacctttccaaaaacacttcacatatatcatacatatataaactca

SEQ ID NO: 83838 - DNA, 411 bp, Glycine max
  Clone ID: PAT_MRT3847_46722C.1
gcgcttgagctattttatcattatcacctccattgccaattctcctctatagcttgtgtgagtatagaaataagagatggaagagagagtgagtggatgtagccacgtcttaatggttccatacccaagtcagggtcacataaacccaatgctccaattcagcaagcgcttgagcaccaaaggagtgagagtcactatggtcacaaccattttcatttccaagtccatgcatcttcaatcttcttccttgttaggaaatgttcaacttgatttcatatcagatggctgtgatcaaggtggttttggtcaagctggtagtgtgtcaacctatttatctcgcatgcaaaaaataggtttcaataactttgaggaactcataaaaaaatacaactcttcagatcaccctattga

SEQ ID NO: 83839 - DNA, 640 bp, Glycine max
  unsure (1)..(640): unsure at all n locations
  Clone ID: PAT_MRT3847_46723C.1
cgggcttgangcctggctgagtgcgaatattataagcacgctcttattttataataatggtggtggcgtttttaatgatgaaaatgataattttcttttttgtgttaagtgtgttcttgtgtattagagtcgtttgaaactaacaacaatgtcatttaatcagagaaattaaaatgtcagtagttctgaaaaaaaaaaaaaaaaaaaaaaaaaaaaaaaaggggggaggaaaaaaaaaaaaaaaaaaaaaaaaaaaaaaaaaaaaaaaaaaataaaaaaaaaaaaaaaaagggggcccccggccccccattttttttccttttaagggggggaaaatgggcccgtgggggaaaaaggggaaaaattttttcctggggaaaaattttttccccccaaaattcccaaaaaaaaaagacccggaagaaaaaaggggaaaccctggggggcctaaggggggggccccccccatttaatggggggggccccattgcccctttttaaaggagaaaaccctgcgcgccagttgtttaaaaaaatcccccccccccggggggagaggggttttcggtaggggggctttttccttttctcggtaaataaaccggggtgcctggggctttggggggggggggggggggtt

SEQ ID NO: 83840 - DNA, 1150 bp, Glycine max
  Clone ID: PAT_MRT3847_46724C.1
gttcccctcagtcacagtgtgtgtgcgctctcgtctaaagccaactcctactattagttgttagtgccctttcactcgtaactagtgttcactgatataaatgtctttgtctgtggaagacaactactatggcatgagcagcagtgtgagtgagatagaggaagagaattcttcacacttgcacttgaataatgatggtcctaatcctatggtcaccattggtgaagaagagaacgaggatgatgacgacactgtttatggggcgggtggttgattccataggacccagtgagtcctgagcagggagaggcatgaatggcgccactcagtcgaccctggagtgtgtctctaaccatatccctcaaatcatgctccgcccgaaagcttctgactccacaaccactctggaagtccctgccaattttgttaaggtcgaaggcttgaagtgtgaaaaatatcaagcaggttaaggtgtactccatcctgtttgagaggtgacctgaccgcaaaggctgacggtggcctcattccaattcttcaaagacctgaactaatgattggagccagccattcccgaatatgttagaataaagaccccaccatctatgtatctcattagaacttcagtttatgcctacataaaataagcattttttttattattagaaccacttacattttggttgcccagaaaactgagatcaaggaaagggagtggcatagctgatcaggtacttcagaatgctccagaaagttgcaaggtgagcattgtatgtgaaggaaaagaagtgaatgaacagatagctcgtgccattactactgatccttccatgtcccagaaaaacaagcatcagcaaaatgcttcatgtgtttgtttcaacttttaagccaaagctttacataatcacagggtcacagaattgcagcatagggaatagttccctcaatgaatgttggttttagattaattttagactttgaaaaaccaacagcagtgttgatgaaaaatgaagtgtttcatagaacatgacacaagtttatgtaacttatggttgggctgctaatgtttttaaggtagtccttattgtaaataagaactgcaggctaaagtcgattaactatgaaagatgtgaagtctttgcttcctaaa

SEQ ID NO: 83841 - DNA, 543 bp, Glycine max
  Clone ID: PAT_MRT3847_46725C.1
gaattcatcatcgtgagtgtgtaacagtgataacaagtttgagattgaaaggtgaaatgggtgcgataacgagcgcggtgatagcagtggtgggagttcttctaggttggatcacaatagagattgcatgtaaaccctgtcttcaacaggctcgccaagccatcgatcggaatctcaatccagattacgatcccgacgacgacgacgccaccgccatccgcgccccactcaaccccgcccccacagcagcttcctccgccgccgtcaaagccgtttgagaatcgatgtcccttcttctcatgtttccgcctggtattctattcgatgtctaaatcaaaaggctattttttttttatgtgtgcatttgctcgtttttggtggcgaaattaggatctaaaatgtgtggagacttgttattgtatgaatggagattgtaatttacctcagtcattggggatcgtaatgttttcttcatcattgtgaatgtataattacttatatttgttaaaaggggattagtattggatcaattggtgggaattg

SEQ ID NO: 83842 - DNA, 2194 bp, Glycine max
  Clone ID: PAT_MRT3847_46726C.1
gcagtcgtgatttatattttgaaaattaaggagccagtgaaagtactgcacaaaatagttcatctcattattatttctatgaattctacatattcagaagccgagtcccatggtttaatacatttgtatagacaggttctctagacttatgcgagtcgattttcttatttgcatagatatggtttccaggataatgctctgctttttctccaccgctgtcttactgtgtgtcgagttgcccttgatcgtgcaaggcataaagttttaagcattacgcagagttattgattgctatgggtgattggtgagtggaagattagtttgctgagtctgtggaaggtgttgagcaaagaaaaagttctatctctggtggtccagttctcagaccaccaaaccagaaacatggtataccaccctctcaccctaatatcaatatttcaccttcagcaactccttgttcccgatattctcagcgattgcgttctccgggttcctcccattcgaggtctttgtctcaatctcccattttctcgttggattcattgcccccattgagtccttcccctgctgctgttacctccatgtttgactcaatctcaacaactgatatgtctgtggaggaaagtaatgtttcctctcaggtgcccctcaatggagggcatgcccttcttcctcctaggaagggacacaggcgctctagtagtgattcccctttgggaatctctggttttatgcagtcttctccagttccctccggaggagagagctcggggttcgagaagccgattcagttggtcttgaaggcgtcctttagggacagcctggatgggggtcatgctaatgagcctgttaatgggaggaaggaggaggctgcggatgatttgttcagggaatacatgaatttggacaactttgataatctgaactttcctggcatggaagataaggacttggatagcaggaccagtggttccaagacagttgagagcagcgataatgaagttgagagtcatgtcaatgggaaggcgagtggggctcagggggcaagttcaagctgctcggaggaaaggagggaaggagtcaagaggagttcaaatggggaggttgcaccgggttcccggcatcggaggagtttttcgttggatagttccatagggaactttaacattgaagatggattgcctaagcttcctccttcgaaaaatcaaatgggtcagcactcacctagcaattcgatggacggcaaaatgtcagaaacctccacggagtttggaaatggcgaatttagtgcagaggaggtaaagaaaataatggaaagtgataaactagctgaaattgcttcgactgatcccaaacgtgcaaaaaggattttggctaatcgtcaatcagctgctcgttcaaaggagaggaagatgcgatacattgctgaattggaacacaaagtgcaaactcttcagacagaaacaaccacattgtctactcagtttaccaaattacagagggataactctgaccttaaaagtgagaacaacgagtgcaaattaaggcttcaagccatggaacaacagtctctattgaaagatgctctgaacgagactttggatgctgaagtccggcgtttgaggcgtgctgttgcagaacttggcggtgaatccctcacaagttgcatggctcgacagcttgctattaaccaacaaatgttcgagttacagcatcagcagcccagccaacagagacattttctactgcaaaatcaccatactcaggaagagatagagtctcgatcacagcagattcaaggcaatgaattgcatccccaggcacagattcagtcacagcagattcaacgcaatgaattgcatccccagccttaaattgcagagaaatatgttgcctattaatggtgccaaatagtggaagcaaaatacttttggacgtggagctggtgaggtataagtataatctcaatcgtacataagcagtgatctagcattagtttgcttgaagtttcataagatcggttcatcatctttatttaatttattattttgactgttttacctgcatacaaactcggactatcctattcatgtagtaaaccttattgtcatgaatacaacccacctttctctattgagaggggtcatgttgttgcataatctatgttactctacaaaaaaaaaaaaaaaataaa

SEQ ID NO: 83843 - DNA, 266 bp, Glycine max
  unsure (1)..(266): unsure at all n locations
  Clone ID: PAT_MRT3847_46727C.1
attattcaatagaaaagaaagaaagatgagtccaacatgggtttttgtgttaggtattattgcagcaatgttggtggctgngaatgganaatcatcagtnaagccattggtgaagacagtgnnggggaagaaggtgtgtnacananggtgggantncaagggttggtcngcttatngctgcaatnagactatctccgattactttcagncataccagtntgagaacctcttcgcgaangcanattccgccggnggcacatgcantc

SEQ ID NO: 83844 - DNA, 329 bp, Glycine max
  Clone ID: PAT_MRT3847_46728C.1
gaaagaacttcatcgcagaccacactactccattatccctacgacgacaagaactgggcctgcgaacaccgacggaggaagcgatcgctctgcgggcgaagaaatgaacagggtcagcaatggacaagcggaaagtgaacgatcatttcacagcctcctagtcgggggcgcgctgtatagatgaattacttacgcttaaggagtgggagaagctcctgcgaatccttgtatcctgggggaacggatggtggatgggggccagcctaaacggaggcctggatattttagcgatctgggctcgacagacgcgtataatgtggataacgaag

SEQ ID NO: 83845 - DNA, 483 bp, Glycine max
  Clone ID: PAT_MRT3847_46729C.1
ttagcgcgccttcagattggtcacttggaagcaaagcacaaagccttagacagactctacgatgttatgaaagaggatgagaagaatgttttggctgtttttggtaggagcaatatttctgctttagtccaattgctcacagcaacatctccaaggataagggagaagacagttaccgttatatgctctctcgtggagtcaggaagttgtgaaaagtggctagtttctgaaggagttctgccacctctcataaggcttgtcgaatctggtagtgctgtgggtaaagagaaggctacgctatctcttcagagattgtcaatgtcagctgaaacaactcgtgcaattgttggacatggtggtgtccggccattgattgagatttgtcaaagtggtgattctgtgtcgcaggcagctgccgcctgtactttgacaaatgtatcagctgttcctgaggtgagacaggctttggctgaagaaggtatt

SEQ ID NO: 83846 - DNA, 352 bp, Glycine max
  Clone ID: PAT_MRT3847_4672C.1
ttccaggaaggtttcccgtcatcactgtatgacgtcctccttctttgggggggggggggggggcagcaactcgacgtaacaaaatggacagggccgagggagggagtgctacgaatgaaacgtagagaaggcataaaaaaaatgaaaccgtggagtgtgtgtgttacccaacagtggcagcaaccagagaataaaagaggctacatagaggtgaaacgtacgctccacagtataccgtaggcgtagtagtaggtagcaccgcaaaaagaagaactataagcgataactaagaaagcgtcctgtggagtggcctggtaaaagtgtgtgggcgcgtacaatggcacgtatgtaa

SEQ ID NO: 83847 - DNA, 859 bp, Glycine max
  Clone ID: PAT_MRT3847_46730C.1
catcagcaaagataaaatattttatgatgaggtataagagtacctcaacccgtatacaagggtaacaattcttacagagcttttattcataacaaaggatctatatatatagataaaagaaaacccttaacgtttccagttaagtagtaccaaaatctaaattttatcaagtccaacaacactatctcagcagcatatccaacctaaatggttttatggtatccttctgatatggaaatatgtcaaaagctttttccataaaatcagaggatggggcagctatgggggtatgaatcataaactctgggacgatacatgggagctgaaggtggaaaatatgtggcagtggcacacattgcacaagttggaagataggtggtacatattggagaaggtggaacatacgtgctattagtatatattggacaattaggaatatggtaattatcataatgaggttccttttgcgtgacttcttctgtttctgtttctgcttcttcttcttctcctcctccatcttgaccaccctcatctccttcttctaaatcttcgacacttaacaacgtagcgtaacggaacttctttctcaactgatttactaagcaaacaggatccacatcatttccaatcaccaccacttgatcattattgctttcttcttctaaggacagtgcctgcaccccttgcgatttagcagcaattttgagagctttgcttctgcatttgtcagtctccaattgcacctttataactattctctgctgcatatatatcgcagaattcatatagagcttattatatattctcaaataaatagagtagcttgtaatttaactaatcattacaaagtgatattacc

SEQ ID NO: 83848 - DNA, 449 bp, Glycine max
  Clone ID: PAT_MRT3847_46731C.1
gtgattcagaggaggagccatctattgggaaccaagacttcatttcttttgttaccccataatcatgaaaatggcccagaaaatacccattggtaaaagggaccagagaatttgactttggcagaagagcttatattttatgttggaaaaaaagcccaatatgttgagagagggcctcactctaaactagggggcaaaagtgacagctaaccatttagcaaggaatcaattggtggaatgacgttgagggcatgagggcatagaacttagatgtactttgtcattaataaaaactagtgcatgaaaattaccgcttacaccaatagaactcggtaactttggccttacaggctgtgcgaatacaaattgattctttatacacttatccttaggactagccaacgcttgatctgtcacctttgggacttcaacagccattttattaaact

SEQ ID NO: 83849 - DNA, 347 bp, Glycine max
  Clone ID: PAT_MRT3847_46732C.1
agaagtacaacactttttgagcttgattatatagaagaaaagaagagcattatatgccgggcaaaagatattcacatatgatttcaaaacgccatctaaaatctatctcttaggttttgctggcaaaagcacggcaaaaaattggtatccatgggagtgtatcacaggggaagttaaaattcctaatttgcactaaacaggggttggtgcattcttgaagcacactcttcaaatattgctggggttattagttgcatgcatgggaatgcaaatgaagaggatgaattcttgtatctaaagactactacctttttttactgagtcctctaagaaaagatgggggggcc

SEQ ID NO: 83850 - DNA, 1887 bp, Glycine max
  Clone ID: PAT_MRT3847_46733C.1
aattcggctcgagtagagagccttgactgttcttattcagttggaatgaggttcaggatgcgttttgaaactgaagatgcggcagatcgaagattcactggattaattgctggaattagtgatgttgatcctgttagatggcccggatcaaaatggagatgcctactggtaaggtgggatgacatagaagctgctaggcacaatagggtttccccatgggaaattgagccatctggttctgcttcaaattccagtaacttgatggcagctggtttgaagaggaacaggattgaaatgacttcagcaaagctggaatttcccaatcccaatgggattcaaacatcagactttggggaatcgttaaggttccggaaggtcttgcaaggtcaagaaattttgggtgttaatactcccccctttgatggtattaatgctcagagtccctggttatacgagttagggaggtgctatcctggttcaaactgttctgggattcctccaacaggaaataacatcagagtgccgcatccggcatctgatttttcctgcaatggcataggctttagtgaatctttccggttccagaaggtcttgcaaggtcaagaaattcttccaagccaaccatatggaagagccttatctattgaggaggctcgagcaaatggtcgctatggattttatgatggctgtcagttacttaactccagaaatggatggtctgcacagatgcatgacaatgcttcacatttgcatgcatctgttacacctgcgcaagtgtcatctccatcatctgtgttaatgttccagcaagcagttaatccagtttcaaactgtgattataacattaacaaatgtaataaggaaatggagggtagaatccattatcaaggcttatacacatctgaaatgaaaggtagaacattggcatcttccccatttgacgatcttattgtatctaggcgagctcccgaaggtgctagttctataggtatgtttggatgttcataatcagttgggtagttcacagttacatgaatcagtgtcagcattgagaagcagtcaaaagttggtttcctcatgtaaaagtagttgcagactctttggtttttcattgactgaggacacacatgttgcaaatgaagaggtatcagcctctaccatcactttaccattgagttctggaccttcgtttactagacttgttgaagatgagttccatcctggccattcgcatccgagtaaggcggttggaagtaactgcaccaagagtgtattgcagtattgagcttagaatcatgatgtgtgctggctatatgacacactgggaatgagataagctgaagaacgggtccatagtttgctctggttacgtgctttgctataatatctttggatttaagtaaggaggaaaattgttattatttgtgccatatttgttggctgaccaagttgaagtgcttgtgtattaacggtttgctcatgggcaatatgacctgtaaaagatgcatactccgaagtaaaaactattgctgtaatcttaggcatatttatcctccatttggcacttctaaagttgaatgtatttgttagacgcaagaagttaaaatttcaatggaaaggccatcgacccatcttggaggatctcgaaacactatagcctatagggtggaacgttcttcaactgaactttctcagtgatttcttgacacctgaaagtgggttagtatttcaattgacactggattaagtttcgttttttttctcttaaaaactattcctccccaagtcctaatataatacattgactggccttttaagttttgattgtataaaatgagtgaaacctccagtaatatatagggaaaaatggttaattttattttgggg

SEQ ID NO: 83851 - DNA, 1059 bp, Glycine max
  Clone ID: PAT_MRT3847_46734C.1
ggtattctgatatgtgtatatttttatattatatgtcagtggtactgaagtatcttacagaagaatggaaagacaacctcaaattgtacataggctataataatatgactttatgaaaaaaaaaaaaaaaaaaaaaaaaaaaaaaaaaaaaaaaaaaaaaaaaaaaaaaaaaaaaggcaaaaaaaaaaaaaaaaaaggggccctgaagctcaagttttttttttttttagggagggtaaattgccccctgggggaaataagggcaaaaggggttccttggggaaaatggtaatccgctaacaattccacacaaaaaacaacccgaaagcaaaaaggaaaaacccgggggggccaaaggagggagcaaactaaaataaatggcgctggaaaaaatgcccgttttcaacatggaaagtgttagtagtttaatgtaattgtgaatggtctcatccccggggtaacttagttgggatgtggggcaatttactgatcctggttaatcgacccgtagaagtttaatttgcctcagtgacctggatttgtttggtgcacgaatcacagattttgggacaaactatttgaaaaaatttaagaagcagaggtcctggaaaatatgcggtggaggattgactgatactggtgtgaaaaatattaaagagctttcttctctagtgtgcttaaatttatcacaaaacagcaaccttacagacaaaaccctggagttaatttctgggcttactgggttggtttctttgaatgtttcaaattctcgtatcactaatgctggactgcagcatttgaagacactgaagaacttgagatctctgacattggagtcctgtaaggtgacagcaaatgacatcaagaaactgaaatcaatgtacctcccaaatttggtaagctttcggcctgggtagttattgcggtattctgatatgtgtatatgtatatattattatacttatatatgtcagtggtactgaagtcgtatcttagagaagaatggaaagacaacctcaaattgtacataggctataataatgactttatggaaggtgt

SEQ ID NO: 83852 - DNA, 322 bp, Glycine max
  unsure (1)..(322): unsure at all n locations
  Clone ID: PAT_MRT3847_46735C.1
cnnncctntancnccccnacncnngccnnnnanannnnncgncctncngctcgnngcctgancttgacatcnnatacatgannnananatgcaaatncantcggattgantgcnctnnnntnngtgcatnatgangggnnntnccnccgccnccttnccctagcncgcnctnnccnncctcgncntncccccncgccntccncacacncctcagntnnntatnngactgacgncgnccccntctngcnggnnnnnncggcancatnntnnacgatntnngnataattttnnnnngngaatnnnttgnttnngcnggannata

SEQ ID NO: 83853 - DNA, 788 bp, Glycine max
  Clone ID: PAT_MRT3847_46736C.1
acaccattagaaaattcaacaaccaccatatccagccctctatgataatcacacgccgtcaccttcgcccatccctgcataaacccatccttcctcaataactcccacttccctctactcaagtaaccctcatcaccatcctcaatatcaattttctttcttttcttcacaccatcattctcactaattttcttcttttcttcacaccatcattctcactaagctcaaaattctcttccacatccctctccggcgtccccggagagggcggctccgaaccctcaccaccatcttcctcaccctcaccatcatcatcagaagtaaaaccccagctaaacaaataacaatccctactaaccgtataagccttacaaaccctattagtcttcgaattgacaccgaagaacgaaccggcaacagaatccctatgccctaggagcaaaaaaggcctttttttaacaccaccagtgttcaatttcttcaagcacaagattctcgcggtcaaatccttggacccggcgacgaggtatttcgagtcggggctccaatcgagggaggtgaccttcgcgtcgaagtccgcaaagcggacgcgggcccgataggggaaatactcccgccggaacaccggcgagcgccagttttgtgccagcttccctgcacggacggcaattacgcacccttcgcggctgaacttcgctgcggtaccacggtgcttaaggctattcaatggagaagggcgcgccgccgcaggttcatgcacaggcatcggttccggttgtaaaagcaca

SEQ ID NO: 83854 - DNA, 358 bp, Glycine max
  Clone ID: PAT_MRT3847_46737C.1
cgatgatactctctctcgaacttatatttttctctctgcttctctgatttgtgtgtgcttttcaaaacataggcggttattattattggattttactattataaactaattctgcattgcttatgcaatggccatagagtgcattacaaatatacaatcaatgtcttaaccacaaatgctccatcaagagcacaatgaatatgaagcaccattggtttttgatgccttacttttcatgcaccaactcaacctaccaaaacagttcatttgtcctgattaggaaaagccatgcatgaatgtgcctgagcttggtgttcttctcattgacttgggggggtttctctctgttgaccctgtt

SEQ ID NO: 83855 - DNA, 178 bp, Glycine max
  Clone ID: PAT_MRT3847_46738C.1
aagcaatgacatcacatcgggattcgattgcagttgcaggtctctctattctggtgcttattcattatcatcaaggtctcagcctgctgaagcaatggtcccaagaacataacatcaaccacataagtatcattgctgaactctgctgataagattaccgacgtgccattagggtcca

SEQ ID NO: 83856 - DNA, 590 bp, Glycine max
  Clone ID: PAT_MRT3847_46739C.1
aagcaagcaaatctgattttgggttctgaacaaaacccagatatattacgcgccaaaaatgtcttctgattgtctaaacaaaactgtgtcactcggcttacacagaaacattggacagaagtttgtaacttaattttcaatgataacgtaagaaaaagaaaacctagaacaaactgaatgcatcatgaaatcaagctccaacaatttcagtgggttcctctgccactatttcatcagcaggtctgtctaccctctgagtaatctccacccaagatcgaacttaggggctttcaggatcttgactttacgaacaaacacattctgcagagggtaaatactagatgtcgccttctcaatctcttttccaataatctcaggaataaacttgcggaccaactccttcaaatcacaggatgttgcctggttggtcatgatctccctcatcttcctacgaatctgtctaatctggcttgattgtgcatagcaggttctcttcacttggttagctcttctcttggtaaatccaatgcaaaacatcctcaatgtgtagttatcaagtgtcttcacatccacatgggcttcaattagag

SEQ ID NO: 83857 - DNA, 295 bp, Glycine max
  Clone ID: PAT_MRT3847_4673C.1
taacaacatcaaaaaccagcttgcaaaactttaaaactgaccacctcaagcggcagtaataagcagcctaaagtagtgccaatgacagtacaaatatccatttaaatcccatcagttttctctcttccatctcgaatgtcacaacccaaattaagaataacacaacatccttccccatctgagcttctatagcaagagtaccatcttcatattccacagcaccatcattaagcattgtaagcatagcgattactccaccaggaaagtgaagattataatgaaagccctctcttat

SEQ ID NO: 83858 - DNA, 476 bp, Glycine max
  unsure (1)..(476): unsure at all n locations
  Clone ID: PAT_MRT3847_46740C.1
cgtcncgtgttcggacgcgtgggttttgnactagcatctatggattaaaaactatccaagtatttgcatggtcaatctgtcaaaaaaagaatttatgttcctggcaagattttgaacattgttttgggccgcaaaaacattaaggttggtgtacagtagctgctttcactcttgcgtccatttctactggaagcaactgtcaaccgttaaatttatgctgtgcctggtcaacttggcaatgaccctgtatccgcttcaaaactaaagcatatgtaaagaggtgcatatataactagccaagtattcacctcttatgactgttaatttatactccgctttaagaggtgcatatataacttaatagaagagaggcggcgaggctttccagcttgctttcatcatttcatgctcgatgcctaaccaatttattaaaacaccatcacataaacagagtgcattttaccacttataatggg

SEQ ID NO: 83859 - DNA, 490 bp, Glycine max
  Clone ID: PAT_MRT3847_46741C.1
gttctttcaatgtggagatattttgttggagatctcggctttgaagtttctaagatgacttgtccctacatgaaatgtgcagtctctttcttcatagcatttggaaatgcggctgatgacaccatccattgtgaggcttttccccacaagttggtgcagtgtgcagagattcaggaaaaagctgtgttgagaattttcacaagaggaatttcttacagcttggtcaactcaagtgcgtgctgcaacaactatgtccggtgatgggtgtccatatatggatgctatggtacatgatcgttcagagtctacaataccaggggagtttgtcattggtgttaaggtgacaaccataaacaatatgtgagcatatgggctcattcctggaatttcaggttctggtcttttgggcaccattcctgagcctatttcacagcagactgtttggaatcaaatggcaacagtgagaacaccattgagttatgattctagc

SEQ ID NO: 83860 - DNA, 771 bp, Glycine max
  Clone ID: PAT_MRT3847_46742C.1
ggtcgcgtgggcggctggagaagacgacagaggggggatcggagtaatgatgggcaggggctctgttgaatgtagaacgctgctgccgaaacccttcccgatccttaaggtaagtgagtaatcggtggttgagaatggtggagaaggcgaagggtaggaaggaggaggtggttaccagagagtacaccattaacctccacaagcgcctccatggctgcacatttaagaagaaagctcctaaagctattaaggagataaggaaatttgcccaaaaggccatggggaccaatgatgtgagggtggatgtgaagttgaacaagtttgtctggagccagggaatcaggagtgttccaaggaggattagggtaagaattgctcgcaagaggaatgacgatgaagatgccaaggaagagctatactctcttgtcaccgttgttgagattcctaaggatgagctcaaagggttaggcaccaaggttattgatgatgaggattgatttgtatttgtttgaaccctggagacatatatgtaggttttttgtttctgcaattcagtcttgtttttctagattatcaaattactcctaattttgttgggttacttcgaattttgttgagacataatgtggcttgataatatcaattttagtttctgcccctgcagtttgtttaaaaaaattcgaagtaacccaacaaaattaggagtaatttgataacctagaaaaacaagactgaattgcagaaacaaaaaacctacatatatgtctccag

SEQ ID NO: 83861 - DNA, 3046 bp, Glycine max
  Clone ID: PAT_MRT3847_46743C.1
gagggctaaaatcaatgttactatttccactagcacaaacgcataaacaaacagcaggagtaaaaactaaaagtgatattatcaagccacattacgtctcaacaaaattcgaagtaacccaacaaaattaggagtaatttgataaatctggaaaaacaagactcggttgcagaaacaaaaagctacatgtatgtctccgggtttcaaacagatataaatcaatcctcgtcatcaataaccttagtgcctaaccctttgagctcgtccttagggatctcaacaacggtaacaagagagtacagctcttccttggcatcttcatcatcatttctcttgcgagcaattcttactctaatcctccttggaacactcctgattccctggctccagacaaacttgttcaacttcacatccaccctcacatcattggtccccatggccttttgggcaaatttccttatctccttaatagctttaggagctttcttcttaaatgtgcagccatggaggcgcttgtggaggttaatggtgtactcacgtgtaaccacctcctcctttctacccttcgccttctccaccattctcaaccactgattactcacttaccttagggttccggaagggtttcggcagcagcgttcggttagtcgatcctaagggacgggggaagcccgtctgatagcgctctgtgcgcgtactccgaaagggaatcgggttaaaattcctgaaccgggacgtggcggctgacggcaacgttagggagtccggagacgtcggcgggggccccggaaagagttatcttttctgtttaacagcctgcccaccctggaaacggctcagccggaggtagggtccaccggctggaagagcaccgcacgtcgcgtggtgtccggtgcgcccccggcggcccttgaaaatccggaggaccgagtgcctcccacgcccggtcgtactcataaccgcatcaggtctccaaggtgaacagcctctggtcgatggaacaatgtaggcaagggaagtcggcaaaatggatccgtaacctcgggaaaaggattggccccaaagggcccgttcccaatccgtcccccgaccgggacgcaaaaacccgcttttgccggggaagcagtttgagcagtccaccgacagccgaggggttcggaactgggacccccgggcccagccctaaaagccaatccttttcccgggggtacggatccatttggccgacttcccttgcctacatgggtccatcaaccaaagggggttcaccttggaaacctgaggcggttataaaaaccaccgggcgggggaggcacttcggtcctccggattttcaagggccgccgggggccccggaaagagttatcttttctgtttaacagcctgcccaccctggaaacggctcagccggaggtagggtccagcggctggaagagcaccgcaaacaaacagtgagccatggccgtcggaaagaacaagcgcatctccaaagggaaaaagggtggcaagaagaaggcagctgatccctttgccaagaaggattggtatgacattaaggccccttctctttttcaagtgaaaaatgttggcaaaaccctcgtctctcgtacgcagggtaccaagattgcttctgaaggacttaaacatagagtgtttgaggtctccttggctgatcttcaaggggatgaggatcatgcattcaagaagattaggttgagagctgaagatgtgcaagggaagaatgtcctgacaaatttctggggaatggatttcacaactgacaagctgaggtcattggtgcgaaaatggcaaactctaattgaagcccatgtggatgtgaagacaactgataactacacattgaggatgttttgcattggatttaccaagagaagagctaaccaagtgaagagaacctgctatgcacaatcaagccagattagacagattcgtaggaagatgagggagatcatgaccaaccaggcaacatcctgtgatttgaaggagttggtccgcaagtttattcctgagattattggaaaagagattgagaaggcgacatctagtatttaccctctgcagaatgtgtttgttcgtaaagtcaagatcctgaaagcccctaagtttgatcttgggaaactgatggaggtaattttttgataataaagttcttttgatttttttctcaatcatgcctcatgaaaaatattttctgttacctaaacttggttgcccagtctgagtttggttttccattagaagataacccaatgcttgttattttaagaagtaattattattgcatgctaggtaattgtgctaattgtaaaccaaacatgctcttattgattcgtattgttgcactaggttcatgcattctttgcttgaatagaaggatcagctggcgcgtaatttcatctgatgtttcttttttagttctagtatattctatgattgttctgtttaaaagataaaaccaatttccctatgatctgttattatgtaaactaaaatagaaatttagcccagtttgtttctttcttttatgttcatctcctttattgaatcttatgattcgttgacccttttgccaattaacatttattggcaagaaattctgtttcacttgctcccatgtttggtggattggtttgatgcctttgctgtttggtccgtgtaggttcatggagattactccgaggatgttggtgcaaaggtagacagacctgctgatgaaatagtggcagaggaacccactgaaattgttggagcttgatttagtgataatgcatattcaaattgttctaggttttctgtttcttatgttatcattgaaaatttaagttacaaacttactgttctgtcaaatgtttctgtgtaagctgagtgacagttttgtttagacaacgagaagacatttttggtgcgtaatatatatctgggttttgtttagaacccaaaatcagatttgcttgcttatatcgataacattatattgttattatgtattttttattacactatgacttgttaattttgttttttg

SEQ ID NO: 83862 - DNA, 483 bp, Glycine max
  Clone ID: PAT_MRT3847_46744C.1
ctgtgcggcgctcgagccggccgggtcccgaacagatattcgtcttaagctgctactgatgttcccactgcataccttatgtcttccgaattcgaggataatgtgttggatgacgatggaaaacgatcaatataatagtgtcggatgatcatgagaaccctgaagaagcatccaccattaacgagctgaggaaaactgctgtgaataaagaaaatccatagcatggcatacgacgcaatgcacggactggctcttaggctaactcataaaattatgttaacaaataatctgaacaccctagtgtatcaaggacatcatctatgtgtaagttaagctaactctgctatgattactgtctttgagatgatagtcttgatgaagagtaccattctgtatgtattgctttccttagaaagataatgcatgcttcatatcttctgtctgacaaaaaataaaagaaaacgcccctatggacgaattcga

SEQ ID NO: 83863 - DNA, 1001 bp, Glycine max
  Clone ID: PAT_MRT3847_46745C.1
aaaagccttatcaaataaagtgtgtgcagagagagaactgaagaagaagaagaagaagaaggagcttcggtatctcagccgggactttcaatttgcataagaatctgcatctgggaaacctcagacacacactcacagtgacaagaataagaaaatggtaacagaagaagttgcacttaggtaccccggccgtcctaatgagtgtgaagaaagagacctgaaagtgtcgttgagtcagtgtgtgtgtgcatcagaccaaaagcaacaatgggaggcacttgtgcagatcttcaccaccatgaatcagatatagaactcactgatgctgaaaggattggcactgatgttggacctgacagtggcaccaaatcccagggtgaagaagctgaaggacaacactacgttgaggtgaccatggacattcatcgtgactctgtggccttacacagtgttaaaactgttgcagctgatgatgttgacatggtggaagaagaagaagaggaaggtgataaattgggtttgatgggaaagaagaggcttgagaaaaaaacatcctttggtgcctctgtggttcagagtgctgccaatcgcatgaagcagctgaagcgtttggcatcattttcaaaaccagcgcccaaacactttgaaaggacaaagtctgcagtgggtcatgctctcacggggctcaagtttatcagcaagaccgatggtggcgcatgatgggttgaggtggagaagcgctttcacaagcttactgctaccactgatggctatcttcctcgggctctctttgcccaatgcttagggttgaacaaaaagtttgaggcttatgcaaaaaagctttttgaaactcttgctaggcagaaaggtattcaggggggttccatttacaagatccaaatgaaggaattctgggatcatattttttgaccaaagctttgatactaggctcaaaacattttttgacatggttgataaaaatgcaaatggcaccctccccc

SEQ ID NO: 83864 - DNA, 688 bp, Glycine max
  Clone ID: PAT_MRT3847_46746C.1
caagaggttagcattatacgtacatatagaaggcaaaacgagcaggtagctagtagagaaacaaatgagtgtgaagaaagagacctgaaagtgctgttgagccggtgtgttcatcagacaaaaaaaaacccagcaacaatgggaggcacttctgcagatcttcaccaccatgaatcagatatagaactcactgatgctgaaaggactgacacgaagttaggggcttctgattcaaaagctggcaatgatgttggacttgacagtggcaccaaatcccaggctgaagctgaaggacaacactacgtggaggtgaccatggacattcatcgtgactctgtggcattacacagtgttaaaactgttgcagccggtgttgacatggtggaagaagaaggtgataaattgggtttgatgggcaagaggcttgagaagaaaacaacctttggtgcctctgtggttcagagtgctgccaatcgcatgaagcagctgaagcgtttggcatcattttcaaaaccagcgcccaaacactttgaaaggaccaagtctgcagtgggtcatgctctcacagggctcaagtttatcagcaagaccgatggtggcgcaggatggggtgaggtggagaagcagtttaacaagcttactgctaccactggtggctatccttcctcgagctctctttgcccaatgc

SEQ ID NO: 83865 - DNA, 2627 bp, Glycine max
  Clone ID: PAT_MRT3847_46747C.1
gttgaaacaaatgagtgtgaataaggagacctgagagttctgttgagccggtgtgttcatcatacaaaaaaaaacccagtccggactcgaccgcgtccgatggaacattggaaaagccttatcatataaagggtgtgtgtgaagagagaggaactgaaggctagaagaaggatcttcggtatctgaaccagtacgcataaaaatctgcatctgggaacctcagacacacacaggagcagcagaagaagaagaaaatgggaacagacgtggttgtcggaggagcttcttcagattcacatcaccaccaccgtgactctgacatagaactcattgctgaaagagcacctttacctcacagtggaccactgaacaaaagaagaagttccaaattaaacaacacttcttctgcttccacctccgccacagaggaacaagatgaaggagactacgttgaggtcactatggacatccaaggtgactctgtggcacttcacagtgtcaaaactgttaacaacgatcaaagcgaagatgagaaactgattctgcttggcaaaggcatggagaagaaaaggtcctttggtgcctccgttgtgagaagtgcttccattcgtatacaacaagtgtctcaggagctgaagcgctttgcttccttgtcgaagcaaactgcacctgctgcgagagttcactatgacaggaacaaatctgcggcttctcatgctctcaagggactcaagtttatcagcatcaagactactgatgctgatgctgggtgggttgaggttgaaagacagttcgatgctctcactgcttccaccaatggataccttcatcgctctctcttcgccaagtgcatagggatgaacaaggaatcagaggcctttgcaggggagctttttgatgcgctttctaggaggaggggaattcaaggggattccattaacaaggcccagttgaaggacttctgggaccaggtttctgaccagagtttcgattctaggctcagaacattctttgacatggttgataaagatgcagatggaagaatcacggaggaagaaattaaagagattatctgccttagcgccactaccaacaaacttgcaaacatacagaagcaggcagaggaatatgcggctttgatcatggaagaactagaccctgaagacacaggatttatcatggtaaacgatctagagatgctcttgttgcatggaccaacccattctactagaggagatagcaagtacctgagccaaatgctaagtcaaaaacttaagcctacatttgcggacagtgcagttatgaggtggtgtagagatgccaagtacttcttgctggacaactggcaaagatcttgggtacttgcactttggattggtgtgatgtttggcctatttgcctataaatttgtgcaatataggagaaaagctgcctatgaggtgatgggccattgtgtatgcatggcaaaaggtgcagccgagacacttaaattgaacatggctcttatcttgttacctgtttgccgcaacaccatcacctggctcaggaataagaccaagctaggtgttgtagttcctttggatgacaacatcaacttccacaaggtgatagctgtggcaatagcagttgctgttgctgtacattccatctatcatcttacttgtgattttcctcgccttcttcatgcaagcgatgaaaagtacaagctcatgcaaccttttttcggagacagaccatcagattattggtattttgtcaaatcatgggaaggagtaacagggattataatagttgtgctaatggcaatagcctttacgctggctaatcctaggttcaggagaggccgggccaaactacccaaacctttcaacaaattcacgggtttcaatgccttttggtattcccatcacctcttcgtcattgtctatgccctgttggttgtacatggaatcaaactttacttgactaaggaatggtacaagaaaacgacctggatgtatctggctattcccatcaccatttatgcattggaaagactggttagagcattcagatcgagcattaagtccgtcaaaatattgaaggtgactctttatcctggaaacgtgttatcacttaaaatgtcaaagccgcaggggtttagctacaaaagtggacaatacatgtttgtgaattgtgctgctgtgtctccatttgaatggcatccattttccataacttccgcccctgatgatgattaccttagcgttcacataaaaatacttggtgattggactcgaagtctgaaagccaaattcacacaggcgtgccagcaacccctaaatggacagagtggacttctaagagctgaatgcttgaaaggagataacagcccaagttcctttcctaaggttctggtggatggtccatatggggcgccagcacaagactacagggagtatgaggtggtgttgctggtggggcttggaattggggctaccccaatgataagtatactaaaggacatggtgaacaattttaaggcgaatgatgaggaggagggagggcaagatcgagggtgagtgacttcaagacaaggagggcatacttctactgggtgactagagagccaggctcatctgactggt

SEQ ID NO: 83866 - DNA, 168 bp, Glycine max
  Clone ID: PAT_MRT3847_46748C.1
ccctctcctgagtctcataatattagggtgttaagctagcaattcatttgataatttctgtgtcgatcacaatatatatagatctctcgcttacatatatatatctagcaatggttgcaccctgtccaacattcatgatggtaagaaccaagaacactcctgccatgg

SEQ ID NO: 83867 - DNA, 470 bp, Glycine max
  unsure (1)..(470): unsure at all n locations
  Clone ID: PAT_MRT3847_46749C.1
cctcgagccgattcggctcgaggaatatgtaagtaaccatagataagagattcacttaggactctctctttctctctttaacactcactaccttttagcctcttctctctaacaccccaaatcctactttgtcacagcttccaatattaaaaactagttgcaccaaataatacacaatctctttaagaatgaataacaggcttggtttggttgttctgctacttgctcagatcttagtacttcatgtcaaggctcatgagtctgatcaggctcaggcaccactcacagtgctgaacccttttgagcataaaactcaaacaggagttcaacttcatgatgatgaccagaatagtgatcataaagttgcagtttctggagctattgaagagtcaccatcatcatcagaagagaaaagtggagaatctaacgaagctgctgaggcaccacanattcggagaatgggaaaacat

SEQ ID NO: 83868 - DNA, 418 bp, Glycine max
  Clone ID: PAT_MRT3847_4674C.1
cccacgcgtccgaaacttgtctattgtacctgacatgaattattctaggctagtataaaacagcttatgccaaagaggagattttattgaaggtttttactccatctcattctaacatgctaatttgattcttaaaattcattttttatgtgattgtttgattacttcattgattttaccagaacaatgacataaataactctagacttgttggatcttatttttagtaaacagtgtacaaaataggaggactcttgaaggtttcttctccatgtcattttagcatatgccaattctaaacttgatagcatttgtgatgtgattgtatgcatgacttgactgcatgtcacctttagaaattttaaatttggttcttttgaaatttcttaacaagaaataagtaatctagaatagtcta

SEQ ID NO: 83869 - DNA, 241 bp, Glycine max
  Clone ID: PAT_MRT3847_46750C.1
tcgtcctcgcggctggccttcgatccctgcatctggccgttattaaggcagcccagccatccacgcaccatggtaatagtcatcacaaaaagcacagacccaccacatagtcgcctcgctctaaacgataaacagacgggatactgtaactaggggtaccctgtctagcgtgaaggcagcgtatagaggaatccaaacagtgcttcggaagatatagctacacatgagctacataagcaag

SEQ ID NO: 83870 - DNA, 493 bp, Glycine max
  Clone ID: PAT_MRT3847_46751C.1
tagcttactcaaagggaactctctagtctctagtacgtactctcatactcacagctactctatcacttttccctttattttcttcttctgttcaatatagccactcatttttaggtagctgagtcttttttagagtgtgttttgtaattttgtttcagatttgcgttttgattcattgattccttcatttccttgctgagagtgcgtgtgatttctctcgtctcctttagaattccgattggtatttctaacactgtgaaagaaagagagatatggcaggaggtggtggagctccagcacctaagatcgatgagccacagccacatccaccgaaggatcagctaccgaatgtttcttactgcattacgagtcctcctccatggcgtgagttgcttttcttttttttttcatcatagattccgtttctcttggcctcttaactttgaacctgattcttctgttatctttcgtaaagcatgtcttgagattctga

SEQ ID NO: 83871 - DNA, 251 bp, Glycine max
  Clone ID: PAT_MRT3847_46752C.1
gaagcctatggacaggggaaattttatcccccaaaggcgtgggttttatgccctccattataaaaacccggaggaacaaaacttaatcaactgcgcacagcttgagaaaacaattgttctcatactaattgaatatacaacctatcaacatgttttaatggagtacttttttgtgggaaaataatatttttttttgacaatctactgggggggcttaaaaaaaaacaatttttttcccataataaatcttt

SEQ ID NO: 83872 - DNA, 412 bp, Glycine max
  Clone ID: PAT_MRT3847_46753C.1
tttttgaattcaaacttctaataatattcattcaattattcaaagattacatctatacggaagaaatatgtcagtgacacggcaacaatgagacccacaaagtcattattattgttattttgttacatacactggtattaatatattattattgaaagtctaaccctgctttggctaggatcttagcaatttgagcagcattcttgcctttgattttgttgtgttactacactgactctgcagaagcaacagcaaccgagtcaaaactccactctcaatggcttcctctcttgcacgctcaaattcaccacaaacagttaaaagcacttcaacagcactctcactgcacttttgatcagataccctgaaaaccatattcaccaaagtttgaacaccattagggtgattcacc

SEQ ID NO: 83873 - DNA, 587 bp, Glycine max
  Clone ID: PAT_MRT3847_46754C.1
ctttcatagagagagacaagggaatgatcttaactacttcaacacaaagaagaaagaaggcgcataccaacatattggaatatttctgtagaccgtaagcgtacacgccctagcgctcattaataaggatgccttgtatactgaaacatacatcattactgtgctttttatgaaaataggataaagtccgaggtactatctcgattataagtaatgctaatcttcttataggagggctaacactttactaactaaatagttatatgacaaaataaagtgcgattaatgtgttatagaacattacttaatatttaatagtgggactacatatgataggagtatgtaaacctatcttccaatcttatcatacacatattttttgcgtatacaatgaagattagaatttactatcatgactctttttatataagatgacccgatactggtaagaatcattaacacgtttgttttttcttcttttatacgctgaagtttatcactaacacgtacaaaattcgattaagagctaaagactattttgctgacgattttcatatgaccgtacatatttactcgacacattgtcg

SEQ ID NO: 83874 - DNA, 247 bp, Glycine max
  Clone ID: PAT_MRT3847_46755C.1
ggaaccagacatcaaataatcatggctttcggtagtctcacaatcgtcttcagtcttcgtgtttcatctgcgacagcttgtgatcgctgcctgtctcaaaccaaggcttcctagttcgccaatgcttctgctctttcagctggggcacgtgggtaaggctctttagtacaacacataagtgccggatacgttgacgctggtgtggattctcgcgtcataattggattacgaagtggagcttgctttc

SEQ ID NO: 83875 - DNA, 459 bp, Glycine max
  Clone ID: PAT_MRT3847_46756C.1
gtacaacctttctaataggctcaaatcattacagggactttgcaagcaacacttcatggaagaggattcagaattacttccaataatggaagcagtggggttgagcaaagaggaggaggaggatgcattagagcattgttttgttgtgatgcaaggaacacatggccggttgttaaagttccttcttgaggggctcccacctaatgattctatgaagtacttggacttgatcagcatgtgcagggacaaagagaggatggaatccatgcttagggtggtagtggagtgagtggcatatcttctatcgtgggtcctatgtcatgtggcacacacaatgatggattatgaagcataaattgtgaatagaaatccaaattttctagattgggaactctttttttgtcagttttctatgtgaaacacccagcacatgagtaggctttcattctttcaactctt

SEQ ID NO: 83876 - DNA, 266 bp, Glycine max
  Clone ID: PAT_MRT3847_46757C.1
caatggaaagcggagttcctaacaggatgaaagttcccccatcagttcccccagtacctccaagcaagtagctttccacatttgtcacagaaatcagaggagagatggtgttgggagccctttggagaacgccagtccccaggccccctgcatctatcgagtttgcaatgtcacaacctctctgatcttgtgctcagcatgattctttaatagaagttttattttttcgtgcactctgctaatcatgtgggtgagccagtggaaca

SEQ ID NO: 83877 - DNA, 410 bp, Glycine max
  unsure (1)..(410): unsure at all n locations
  Clone ID: PAT_MRT3847_46758C.1
tttttgttttttttttttttttttttttttttttttttttttttttttttttttttttattttattactaaaattctttaactcgtgagtaaacgggaaaaaaggcagaaccgaacgggcaatggcgggtaaaagaaaacaagccaaactaaaacaaggggggggggacacacttcgggtggggtaaagcnaaaacacaaaagcaacaccgaaggaagggggggggcaaaaaaccccccccgcagcaccaggcccagagaaaagcaacagccacccgccaaagcgcgcggaaaagaagcaanaaaggagaaagcggcgagagcacaccaaaaaggcgggccccagcagcagccaggccgaggcagcacgcgcagaccgagcccggaacagagacaacgaggacaaaacca

SEQ ID NO: 83878 - DNA, 263 bp, Glycine max
  Clone ID: PAT_MRT3847_46759C.1
ggcaagcataggaacaagctgacttggctagctatctcagccacatgtcatcctaccaaacaggactgctgatatgaccctgacaaacttgtgctgacagctagagtggctagttaatatgtcggctcactgtaaccttaaatcttactgttttagagatgggggagaacatgaaaagaagattcgccaatatgcgcacatgtttatggccaagtggagtctcctgtgaacattctcaagcaaaggcttacatcattagcagc

SEQ ID NO: 83879 - DNA, 1090 bp, Glycine max
  Clone ID: PAT_MRT3847_4675C.1
tccttgcgtcaactttctcacaaaacaaaactcgatttgtaactctcacaccatttccactcatatcccataagcaccaccatgactccacctaaagaaattgtgaccatcatttaccacaatggtcacattgtagatgatccagttcaaggatagatgtacacgtctatgaccccaatatttttttacgccagttgttctattacgtttatacaattcattcgaaaaattaacaatcgcctccctactcaagcaactgaacaagttgctcaattgttatttcgtgtccctatttcatttcatctcggtcagacacgtgttatttcagctcaactattcgacaatgatgatcttagaggtgcgatggaaacaattctccaaaatccacaattgaattctaccgaattctatgttgttactgagcttattcctcaaccacaatcatcgtctccacaaccctcatgtccacaactacaactatcgcctccacaacagttaccgtacaacaacatagacctcaataatccagtatcttcatacaacaaccttgaatcacaagacccctttgacatttatacttcatacacacaaatattatccgagaatgattctttttttcatggccaacaaacctcctttgacaaacaaaaccatccttcatccccctttacgccaccttcacagctaccacaaatgcaaacatcaaatcgagatgaacatcccattgctaatgaagatcttattataagatttcatcatgaaaacatggatgattttactgaggatgaggatcaacagttctttgatcacatcaatcagcaaagcgatgaccaaagtgatgaccaaaccgatgacgagggtgttggcagaccaacgacacctccgtcacctccgttgcaatatcagcaacctaggtgtccagtagacttgaactttgaccacctaccacactatattgatcgacaccattttgttcatcagcaacacaatgtacaaccaccagtcggtgtactcgaggttggcatgaccttcgatgacaaagcacaatgtatttgagcaatcatggaatacaacatcagaaatcattttg

SEQ ID NO: 83880 - DNA, 294 bp, Glycine max
  Clone ID: PAT_MRT3847_46760C.1
ccattatagaagactatgtgagtacttacaaacaggccgggcggatttattttatagggaaaacacatctacttctggctggataaatcgataattctctttcgacacatcttgcgtgtctacaattattttcattgaatcatccttaattaaatcaatgtgtaagggctcaatatttattgatgccagccctggatcacatggggcaatattcatccacaatagcactgactttgactttgcaacgtttactacacactttggcccattgcaaattcccttataaacagcttt

SEQ ID NO: 83881 - DNA, 358 bp, Glycine max
  Clone ID: PAT_MRT3847_46761C.1
cgccggacgaagaaatgtcggccgtcctaagaaaaagccagtttcaacgtccgtcaaggccagtctccacttccccatcagaccaatcggccgttctttcaagaaaggacggtacgcccaccgtgtcggtaccggcgctcccgtatacttaaccaaacttctacagtacttatctgctaaggtgcttaagttttctgaaaatgctgcacgtgacaacaagaagaacatgattattcctatacatgtactgttggctgtaaagaacgataatgatttataaaaattacttactgatgtcaccattactcataataatattcttgcagacattaaccctattgtactacctaagaaaact

SEQ ID NO: 83882 - DNA, 320 bp, Glycine max
  unsure (1)..(320): unsure at all n locations
  Clone ID: PAT_MRT3847_46762C.1
gataaatgaaaatgatcactgcttaacaatcttctgttctgtaactttttttcaatagaattttagaattgggtttgaattctggagttcattctgttgttctggagtacatctacaacttggtttacttcttgaaatagaagacctttgagaaataaaacgcagcctttgttaatatttttttggaggcgcgtgggacatttaaaactctcaaaggtatcatacctctgcaatcttattattcgtggccagttggttcgacgacaagctatttctgctttatattngtgtggaagtcaaatagttaaaatttcaagcat

SEQ ID NO: 83883 - DNA, 420 bp, Glycine max
  Clone ID: PAT_MRT3847_46763C.1
gaataaaagaaatcgtaagtctatggacggtgcgtctcttcacactggtggatcaattcctcatcgtttgcattggaagagaatgaaggaggaaaaaggcacagatccatcattggctgagttttattttcgtactcatcgaagaaaaaaggatcaaagttgggtgggtcctcgtgcagaatctgcttatgataaatttgaacagaggaagactgagttatcttctaagagttcaaaatttacttcgggggaaggtggaactgatagtcaagctgatagtcaaccatctatgcatctttgcccatcggtccgtgggttgtcgccagattccgaaatatggggcccccaagtactaaaagtgcttccttatagatattgaccagtttaaatttatttgtgtatgtattttaataaaaaata

SEQ ID NO: 83884 - DNA, 140 bp, Glycine max
  Clone ID: PAT_MRT3847_46764C.1
gggaaatgtctgaagcctgggaaaaggaatacgcgaaggctcacatcatatggcttaaaaaccaaatggcacagccgaaggctcggaaccataatcaataatctccaaatcacgtttgttagccccaaacccgccataac

SEQ ID NO: 83885 - DNA, 825 bp, Glycine max
  Clone ID: PAT_MRT3847_46765C.1
cgtgtatatatcatattttattgtatttcaaatctaaccaaagcttctgttaatagctattcttagtgcaagtacaacagaatggtatgagaatgattaagcatattcataatcaaattatgtgccaacatacaaaaatcatcaatgcaaaaaggtttaagcaataattccataacacaacaacaaagaaatttaataaccttttcactgaaaacagatacacaattctttctaatctctaaattgtctttgcttttggggtcttcttcctgatttgtcttctggtaatcgagtacttcatctctataaaaaatagcaatgcaccacaaagtgctgtgctctgaatgaaatcattcagcagtaaatagtattcagggttattagatctatagttgtaaaaatcatatagaattggagtagaaagccccagatacaagagcagaagataagatccaaatgtactgccaagcacgaatagaattcctccaaccccctttagaaatatgatagaggcaatgactgaccgcacattaatatctggtgtctttacccccagtttggaggataaatttctcttcagaacagtgaacttgggaatcaactcctttgcaatgggtccaccagtgtcatcaaattcattaaacatctgccatgctgagaggatgaagagggaagcaaagaggacgcgacccagaaaggaggagaaccccatatttttctcactgttttgaagcagcaacaagagaagaagcagaagctgaagacgaagggaagaagaaaagtgtgaagagtcgcagtgttctacagtactgaggtcaatttggt

SEQ ID NO: 83886 - DNA, 367 bp, Glycine max
  unsure (1)..(367): unsure at all n locations
  Clone ID: PAT_MRT3847_46766C.1
gcccaagccctatacaaccaaaccctaacacacacccatttgattcagtttccatggctagcctcaaggttgcatttttggctgcagtgctctgcatggttgtggtgagtgcacccatggcacatgcagctatcacgtgcgggcaggtgactagtagcctgcccaattgcatcggttacctccagaagggaggaacgtcgtcttaggtatgctgtaacggagcgaagagcctcattgctgtcgtcagtaccaccgtcgaccgtcagacggtgtgcaactgcctcaagttgtctccagcctaatcttctgttttactccnncaacgtcgctttnttcccngntatgctgtgtttcttttcctattgta

SEQ ID NO: 83887 - DNA, 847 bp, Glycine max
  Clone ID: PAT_MRT3847_46767C.1
caaattgaccgcagaccagagtactgtagaacactgcgactcttgcactttttcttttctgcttcttctcttgttgctacttcaaaacacactgtgaaaatatgggcttctcctcctttctgggtcgcgtcctctttgcttccctcttcatcctctcagcatggcagatgtttaatgaatttgatgacaatggtggacccattgtaaaggagttgattcccaagctcactgttgtgaggagaaatttatcctccaagctgggggtagcgataccagatattaatgttcggacagtcattgcctctaccatgttactaaagggggttggaggagttctatttgtgcttggcagtacatttggatcttatcttttgctcttgtatctggggatttctactccaattctgtatgatttctacaactatagatctaatatccctgaatattatttactgctgaatgatttcattcagagcacagcactttgtggtgcattgctattttttatagagatgaagtactcgattaccagaaggcaaatgaggaagaagaccccaaaagcaaagacagtttagagattagaaaaagatatgtgtatttgttttcagtgaaaaggttattaaatttctttgttgcagcgttatggaataattgcttaaacctttttgcgttgatgattttgtatgttagcacataatttaattatgaatatgcttaagcattctcataccattttgttgtacttgcactaagaatagctattaacagaagctttgaatagatttgaaatacgatagaacatccaagatataaaaaaaaaaaaaaaaaactcgagactagttctctc

SEQ ID NO: 83888 - DNA, 2124 bp, Glycine max
  Clone ID: PAT_MRT3847_46768C.1
tcaggccgccctccacacagtactgacagaactcagaaccatactcattcgtttcactacaacacgacaaaactcccaacccaaaattcttgctttaactggaaatgaaagacacactgctttcttcttactataatttgtgccaccgtaactgaaaattgaaaccccctttcgcaaaatttcccaatttcgcgaaaccctaactagccctatggaactctctcgtctcttcgtttccgacacgtgcttcttctcccctccgattcgctgctccccttcgccggcgctgtccacgtttttcgccgtcaagaaccgccggagcaggaggaggagcagcttctgttccgcctccaatcccgacaccttggtcgccggcggtgccgccgtcgtcgctggggccggcgagaagcacgaggaggacttgaagtcttggatgcacaaacacggcctccctccctgcaaggttgtgctgaaggataaaccttgccccaatgattctcataaacctatacattacgtcgcagcaagtcaagatcttcaggttggcgatgttgcattctccgttcctaattccttggtggttacgctggagagggtgctgggaaacgagactgttgctgagctattgactacaaataaattgtccgaattggcgtgcttggcattgtatctgatgtatgagaaaaagcaggggaagaaatctttctggtatccgtacatcagggagcttgatcgccaacgaggtaggggccaactgtctgtggaatcacctcttctatggttaaaatctgagctggattacctgtcaggaagtccaattaaggatgaagttattcaaagggaagaagcaataagaaaagagtataatgaacttgacacagtctggtttatggcaggttctctatttcagcaatatccatatgacattcctaccgaggccttttcatttgagattttcaaacaagcctttgctgctattcagtcttgtgtggtgcatttacagaaagttagtttagctcggagatttgctttagttcccctgggacctcctttactgtcctaccaaagcaactgcaaggcaatgctaactgctgttgatggcgctgttgagcttgcagttgatcgcccgtataaagccggggacccaattgttgtgtggtgtggccctcaacctaactcaaagttgcttataaactatggttttgttgatgaaaataattccaatgatcgtcttatagttgaggcagctttaaatactgaagatccacaatatcaagataaaagaatggtggctcaaagaaatggaaagttatcagttcaagtttttcatgtatatgctgggaaggaaagggaagctgtcttagatatgcttcgttatatgcgtttgggctatgtttcagatccttctgagatggaatctgtcatctcccctcaaggtccagtttgtcctgtaagcccttgtatggaacgggctgcgttggatcagttggctgattatttcaaggcacggctggctggctaccctacaacattggctgaagatgaatctatgctgacagatgataatctgaatccaaagaagcgagttgctacccaatatgttaggctggaaaagaaaatgctccatgcctgtttgcaggcaaccaccgacttcattaaccagcttccagaccacactatatctccatgccccgctccctatgcacctttattgaaatgaaaggaactggaaatgtatgtagtctgaactgtacaaatatggatttgatgaaccaggtcaattacaaatgcatatagttgaatcatgactcattgaacaatgatgcaagagttccggatttaaaaggttatgggtctgctttcccccctgaagataaaatttcaatccgagtgttttctgcgatgcccccttcaagtaggcgtgttggttcattccctaggtaggaggaaaggaaccatcatttgagcaaatttttgtatgtcttactgtagttgtaccgatgattctaagtttgagtgttggaatgatactcatctttgtaaatggaaacctgaatcacaaattctaattcaattgtgtatatatagttccatggattatatagatccctttattttttttgt

SEQ ID NO: 83889 - DNA, 395 bp, Glycine max
  Clone ID: PAT_MRT3847_46769C.1
gcgcttggaatggtcaaagcccttggttacattttcactttcctgtggaagctgttcttcacctgggggaagcagcagaccacagagcaaaggtgcaaacagaacaatcagcagaggtgcaagcaggacatacaagggtgcagatcaaggaaaagcccaaaaggagagtcacaagactaaattaccttcgagactatgcttgagggcaggaagggaattgagtagcaatccttatcgtgtgatgctgttgctagagcaggggacaagcttaacggatttgattctgtaatattccttttgcacaaaaagataagaattctgttagtagaggatagtataaataagtatgtaaataagccagaatcataaatgaatgaaaatcgcaaagttccctt

SEQ ID NO: 83890 - DNA, 152 bp, Glycine max
  unsure (1)..(152): unsure at all n locations
  Clone ID: PAT_MRT3847_4676C.1
ctctcttacacacngaagcantgnaggntactactactttctctctagatntgggtnctngtggtgtgcaactgtttctgatnttggnggctcttgtgctagctcatgcntagcccaagcaccaggtgntgcancgtcacaaccacncanta

SEQ ID NO: 83891 - DNA, 572 bp, Glycine max
  Clone ID: PAT_MRT3847_46770C.1
acgagccccctcacgcctcctctgacgtggccaagatcagatcccgtctgagaagaagaactccctacacacatcattgctgtgcaatgctacctgggagattctcgtttttcggaggcggcggggattccggcgcggtggtggacaacgccaattcgtcaccatcaaagggtggtggagacgaactcgctgttgttcaacccacactgaagctcgagacggataggcaggtttaccggcccggcgatcctgtgattctgaccatccagatctcaaatcccgccaatgggtactcgtttctcatggaatgactctggtttgagatcaggggcatcgagaaattggacactcagtggttcggcacgcagaagctgatgcccggctcgaaacaacggagttgttcgttgcgagatccgctatgcatatcaggatccccgagccgtcacaccctcacggcgacaatgcgcatccgccgcgctcccccccgaaaccaacggcagctgaatagaaatcatagttggtatgaccaaaaagtagttattgtaaaagtctataaatttatcatacgtagt

SEQ ID NO: 83892 - DNA, 1112 bp, Glycine max
  Clone ID: PAT_MRT3847_46771C.1
agtacgtgagaaacgaccgtggcactcccatgattctagacaacaattactacagaaacatattagacagcaagggtctcttgatagtggatcaccaactagccaatgacaagaggaccaagccttatgtgaagaaaatggccaagagccaagactattttttcaaggagttctctagagccattcccttgctctcagagaacaaccctctcactggcccaaagggtgaggtcagaaagcagtgcaatgttgccaacaagccccatgatcaggacccttgaattttcctccccttgtctatgatcgaggaagaaaatctgtaatatattatgcaaaaaataattaaggtcttttcctttaaatgggctggttcaatgaaccgagaccactgcaggttcatggggatgggaggattaagaggctatgttttttaatcttccgatgttactgttgtttttttttttaatttcaataaggatattatatatgtagtactatgcaagtagcttagagttgggtagaagggcatgttcatggtgttaattatgttatgtatgcgtgtgagtgctgttatgatggcagtgacaatgcttatgatattcatactcataaagcaaggttgttctttctaaataaataaatcatggcccatgggcattattcaaaaaaaaaaaaaaaaaaaaaaaaaaaataaaaaaaaaaaataaaaaaaaaaaaaaaaaaaaaaaaaaaaaaaagaaatataaaaaaaaaaaaaaaaaaaaggggggggccgttttaaagaaccaaatttttcttccccgtgcttgcaacttaaaaccttttttatgggggcacctaaataaaatccacgggccggtttttaacaacgttgtgcctggaaaaaccttggggtaaccaaactaaatccctttgaaaaaaatccccttttggccagttgggttaataccaaaaaggccccaacctatggcctttccaaacagtttggaaccctaattggcaattggaaccccccttgtaccggcccattaagcccgggggttgtgggggttccccccaatttaacctttacatttgccagaccctaagcgcccgttcttttagtttttttc

SEQ ID NO: 83893 - DNA, 489 bp, Glycine max
  unsure (1)..(489): unsure at all n locations
  Clone ID: PAT_MRT3847_46772C.1
gtgttggggnntttttttttttttttttttttttttttttttttttttttttttttttttttttttttttttttttttttggggaaccagggcccctttttttttaaagcccccaaagaaaaaaccaccttggggagttttttactttattttgttgccccccccttaaacccccttaagggaagcttgggcccctttttgaaccccttttttttccttttaatagaaaggggcccgcttaattttttgaagggggagggactctttgatttttttccgggggtttgggaagtttaagggcctttttttcccctttggggccttcgggggaaacgctcctttgggctccaaagaacccaacaaagggggatccctgccttaaaaaattttttttccctgctgttttggaaaaaacttcttttgggggggaaggattttttggatccttgaaaattaatttttctcctgggggggggccccccttttttt

SEQ ID NO: 83894 - DNA, 673 bp, Glycine max
  Clone ID: PAT_MRT3847_46773C.1
ccccatcgtccgtacggctgcgagaagacgacagaagggggaattcgtcgccgagatttcctctaacatgttcctcaaactaactattctagctgctaatttctaccatgctcatattaatattaatatcatatcatatcatctacatgcataatgcattgcacctaaacatgccacatacttaattatttatcattagatactaaataattgaaccactgttacaaaatagcattatataagtccatgaaacgccgtatataatgcttttgttattattattagcgttgcttcttgcgccattgagccattttccttttttcagcagcactagttccgtgtttgtgtctaatcaatgatgttgtgttgtgctctgttttcctctgacttgtatggtttagttccaataggttatgattgctaacaatcagaatcagagtgtgttggggaattagagaatcttcttccattagcaaaaacaccgtgactagttgcagagggtaaatggtatatcttattgtggactacgtacgaggatcccttttcttcttttccgcttttgggatagaatgaaggcgcagtttggcagagaggtataaagcaaaagctccaagtgggaattgttcgaatttgctttttctaagttgaaaagaaaaacagggtagctgaagcc

SEQ ID NO: 83895 - DNA, 250 bp, Glycine max
  Clone ID: PAT_MRT3847_46774C.1
ggcaaacgccggatctggtatggcagtccatgatgactgcaagttaaggttgttggagctgaagacgaagcagacacaccgtttcatagtgttgaagattgaggatcagcagaagctggtcattgtggagaagcttggtgagccagcccaaggctatgaagatatcactggcagccttcctgctgatgagtgccgtgatgctgtttatgatggtgagcatgtgactgagaggaatggccgtgaaagcaaa

SEQ ID NO: 83896 - DNA, 377 bp, Glycine max
  Clone ID: PAT_MRT3847_46775C.1
gtgggctgtattcggtctctcctaatgggatgcacactgtaattgtcttgattgctatctgtgtagcttcaatacacataggactgaacttcatatataacacattgatatttgctgtgcaacataaaaaatgatagcactgcgaacgatctatactttaacatgggctggctataatgaatactgtgacatttcaactcaactgtggagctcaaattacactaacgagctcaattggtacaaatgagccaatgtgaaccaatttagctactggacagttcattttgatcagattgacctaatcaacgatggtcacatacattcatacactaatgacactgcacagcaatatcactatcactgggatccaccattat

SEQ ID NO: 83897 - DNA, 598 bp, Glycine max
  Clone ID: PAT_MRT3847_46776C.1
tacggctgcgagaagacgacagaaggggataaccagagcgtgcatttccgctttagcaaaagaaaaaaagaaaaaaaagagtgcatcagattaattcagaagaatgggtgaagaggtgaaaagcttggttgttgaagaggaaatgggggtggtggaaagcaaagaatggtacttggtatcttatgctccacacggtgttccaaccaccgatcatcttaaactccgcaaggttcgtctatcaattgcacctgaatcaatccctgacgcccatgttgccattgagatgctgcttttctctgtagatccatatcttcgaggcagattcactggaaccttagatggcctttattttccgcagtttgaactcaaccaggtgatcacaatatttgggattggaagagtgaaacgtcaaatgacagtaaatatgaagagggagatattgttttgagtgcaagttttcctgttgctgagtattgtgtgatgccctccagtgagatcgatgcaaaaattgatgctgcaagtgggatttcattgccggattatctgagcactctaggagtgcctgggatttgcagcatggctggggatagaggtggtg

SEQ ID NO: 83898 - DNA, 416 bp, Glycine max
  Clone ID: PAT_MRT3847_46777C.1
gggggggcccttttgatacaacattttggttccgatgtatcttcccttgtcaactgctacatgatagagtgaacatgtcatcacaaaccctcaaccaaagcctagttagaatgtcgttgacttaaaatgtccctattctaatacaaaacaaaaactattatatatatatatggaaaataaattcatgtgtgcaacaaaatctagtattatgaaatatgttttgaatctggctttcattcattacacttgaatcagacttaaaacacaaaatttggggttagaaacttgcttgggagatgttctatcagctctatcatatgttgtacaacaggtttccaataattaggggaaaaatgttataaaatgtacaagatattcaaccttattagcctacttatatacctctaataaaaagg

SEQ ID NO: 83899 - DNA, 142 bp, Glycine max
  unsure (1)..(142): unsure at all n locations
  Clone ID: PAT_MRT3847_46778C.1
acgtctnnactgcgtacgtaagctcgnnnattcggctnctaggttncggttctntncaaggatnnnnaacnngttnngnttccntntgnggntnacgttnnctcnanacncatccgtacagccattagtannantnagtgcn

SEQ ID NO: 83900 - DNA, 779 bp, Glycine max
  Clone ID: PAT_MRT3847_46779C.1
ggctcgagtcgagcgtcggattcacctttcgcgtgtggcttcgtctcactgtcactgccgaatgacattggtgatggcttcgtagttcatagtagtagcagaagaaaacgaaactctcaaaccaagcgaaactatgggcatataactgagagaagaatatatcaatatcatctccaaatacgacgtcgttcaggttggggttttagcacaagatgtcgctgcgaataaaggcggtagtagataagtttgtccaagagttgcaggaagcgttggatgctgatattcaggataggatcatgaaggacagagaaatgcaaagttacattgaggagcgggaacgagaggttgctgagcgtgaagctgcttggaaggctgatctttctcgtcgtgaggcagaaattgctcgtcaagaagcaaggctgaagatggagagagacaatctagagaaagagaaaagtgtcttaatgggaactgcatcaaatcaagataaccaagatggagctcttgaaattacagtaagtggtgaaaagtaccgttgcctcagatttgccaaggcaaaaaaataaggctttgctggggtgacaaaaaggaaaagtatgattttgacttctctcccccagggctagtgctgtcgaggaatcacctgaaatgccaagctcagtttaagtacttctaggattaattattgaaatttaactgtttagttgtggtttataattcctgttagatttgagttaagtgtcatgacttcctcaattaaattttattcatttttcaaa

SEQ ID NO: 83901 - DNA, 269 bp, Glycine max
  Clone ID: PAT_MRT3847_4677C.1
tacgcggaggcacccgaccaaacccaaaaaggtgaagaaaacgtggacaccgtggctgcggaagctgctggaaaagaggcaacggctgacaaggcagaaagaagaacccagacttaagctacactgagaaaacacaccaccgagaccgtgaacatggaaggagcaccagctgaggctaacttggaagaagccgaaaagggtgtgcccgacgagaaccaagacagcaaaagggaaccaacatgatgcagaaaaccctgcactagcaagaa

SEQ ID NO: 83902 - DNA, 438 bp, Glycine max
  Clone ID: PAT_MRT3847_46780C.1
tgtggatatgctaggtacggaattaatcgccgggctcactagctggctgccgccctgtcgtccttttttttgaacattatttacttacaattcttttgttcccttttaatggcttatgtgatccgtgacacaattatcctttttcgcggagcccctgatgaagcgctccgttaactgtctaaacgttccaggggtgagtgaactattagacccagcctgatggcaagcgccaatttgtctacagctgcaacgacttcgccagcttgtttaacccaccatgggggctgttgtacaacactatgaggtgcttgatgtcatatacggtcggtaacttcatccggatcagatcgaaaaacccgggctgcatgtacggctagcttcggcatgtcgcccgcttcaggaggtagccaaaatggggcttgatgaggacggttaccc

SEQ ID NO: 83903 - DNA, 328 bp, Glycine max
  Clone ID: PAT_MRT3847_46781C.1
cggacgcgtgggtccgtccaaggctaaatactggcgagagaccgatagcgatacagtgtttgagagggataggagaagggaaaaggaaagagatagaagtagggacagaacaataggtggcaagagagatagagacccggagaatgaaagggatgataagaatcgggaaaggcgagatgatagatatgggcacaaagacaggagacaagaaaaggaaagagataggagctgggatacagtgtttgagagggataggagaagggaaaaggaaagagattgagtgggaacacaaaaggggaaaggaacgtgaaaggagccgtgagaggta

SEQ ID NO: 83904 - DNA, 423 bp, Glycine max
  Clone ID: PAT_MRT3847_46782C.1
ttgcaatgtaggacaactggaaaatgctgttcttgttatggaggaggctttgcgcaaggggttctgcccaagcaggctagtatatagtaaactaagtaacaggctgcttgcttcggataaatcagaaagggcttacaagctgtttttgaagatcaaacatgcccgttcccttgaaaatgcaaaaaaatattggcgttctaatggttggcatttttgaacaggcatgctaatcagaagctcttacagtagatcctcttgtttgctcttcacttagctggtctttgagcctgcttggatgcttattttgaagctgatcccaagtgcatcaatctttccaactttatgcgaggttgggtaaattaattggagaaaaataactttatcaacttcgaaatacaattttcaactaatgtttttctgcca

SEQ ID NO: 83905 - DNA, 274 bp, Glycine max
  Clone ID: PAT_MRT3847_46783C.1
gctcagaattcggcacgaggaattagtgactcccttatgtgttaatccactcgcatggtacagtgatgaaatttttggtggaaagtccatacaaaatgaaagaagcgtctactctgaaaatccacttacatacttggatgatctaatctatcaacagggtgaatcttatggaattacagactcccctcatgggatgccccatgccttatctgatccacagttgaacaagagtggagcaaggtctggttacatctcgcaagatgggcttggtcaa

SEQ ID NO: 83906 - DNA, 497 bp, Glycine max
  Clone ID: PAT_MRT3847_46784C.1
aaaaattcaccacttatccccaaaaaacttcaacttttttctgccactttttcggcgggatattacatttccaaggagaggatttagccttaccactccggggaacaaccactggaaaaaaaaccctaattcctaggttatttaccaaacctaaattccccagcaaggtggattcgggacattcatccatctttggattcatttcaaggggaacctttaacaatataaagggagcaaaacccgccaaacctgaaaatcccgggaaaattcaaacattggcaaaattaaatagacaaaaaggggactaaaggcttatatttcccaaaaaaaaaacaggggggtatatggcaatatcatgccccccccaaatggcgaattagcaagataccaaaacagttctttcaacgcactaaccccgaaaaaaggatgccggtttgtaccataccaccatttacactttgacggacaaagccacgctttgaacaagggcacccatt

SEQ ID NO: 83907 - DNA, 386 bp, Glycine max
  Clone ID: PAT_MRT3847_46785C.1
gttgtagacataggcattatgagtcacattcttttaaattaaacaatgaatagcagcccggtagacggtggtaggggaattgaaattataactatgaaaatatgtaaatactagaactcaagggtagctcccggtatttacagcatccggcagtacatatggatctctctctctctcatttcgtgaactacaatgttttaccattgacaatggcatcaaaactcaatagaaaaagaagaaaaaagtgaacccgcacgttgcatatattagaagcatgctcaacaacttgtgtctgatctgggtgtttcattgtaatctagtagagaaatctggcgctgcagcctcatttgctgaaggaatttagcaatgaactcctcagcttgctt

SEQ ID NO: 83908 - DNA, 528 bp, Glycine max
  Clone ID: PAT_MRT3847_46786C.1
ttatactcaaaattatcttattttttacgtttttttttcttcagctatttttttatctcatcaacactctatttctttttcttcatattaatcaaagttattttttaatgtattttgttattataaatcataaaaattgaatttgattttcaatatgaaattcctttatcatttttgtgtgtcaaaatcccttaatctacactctttgtgctaatttcaatttgaaatcattttttttcacaaaaaatacatatgtctttttctatctttattttgcttattgaagtacctgaaatacgctagaaaatggttgaatagtgtgaaagataaaaacttagtctttcaaaaattattaaaagtttttttgaaacacgtatcaatgaatgaatgattttgtctaaagggtttgaaattactttgtgcttaaaaaatcaattcacaaaacttggatatgatagtgtagatgtgaattatagaaaagaatcaattatatagaagtagtaatgaaaatacaaaggttttttaatg

SEQ ID NO: 83909 - DNA, 362 bp, Glycine max
  unsure (1)..(362): unsure at all n locations
  Clone ID: PAT_MRT3847_46787C.1
agaagatcctcttccataatctcgcgccacttcttcgccgctctcgcctgcgtcgagctgcttcctcgcaggttccccgctaataggtacggtgtctccagcgacggatcccaaaccatgcattcacacgaagcccagaccgttaaatttccgtgcatcggcgattcctcacacggtgcagtttgccgttgagtgcggttactctaactacgaagaggttagtggcacgaatagtgacgaaggactagagatcacgaatcttgggatcgctccacagatcgtagatgctctggccaagaaagggattgcgaantcttccccattcaggatatgcttggaagttggaatattaaagcaaatga

SEQ ID NO: 83910 - DNA, 164 bp, Glycine max
  Clone ID: PAT_MRT3847_46788C.1
agggggggcactcacaactgagcgcccggtgtccactatacaagattcaagcttacttactcgtgcatgctacatattatctaagctaacgtaccaccaaattccaattcattggtctacaatatacaaactggtaactaccataactctcccattttaatact

SEQ ID NO: 83911 - DNA, 240 bp, Glycine max
  Clone ID: PAT_MRT3847_46789C.1
gacgtaggttttattacaaaacatatgactctgaacagcgacgcgcaggtggggctcccatgggaacacccattcgaggcactggccgctaacaccagagaccatcggccgctggccaaacccaacaataggctggcgggctagggacccggctacctcaccatgccgctggtgatactgaccctacagaagcaaaacgggggaagccgtacaagaggcggcgagatatcctgaagctca

SEQ ID NO: 83912 - DNA, 466 bp, Glycine max
  Clone ID: PAT_MRT3847_4678C.1
gcacgagtataggtatagggtaactacttaacagggttactgtcagatgtttggtagcttaattcttggtaattaacttgtattaggctaccatacttccgcatatcctggtcctgatgtgtattttgtacagtacctcttgtactgctgtttatatccaatttattagtatttttgctgataaaaaaaagaaagtgtgacaaaccatgacctttgatgaccggatgaagctgattacactgaagaatgtaattggagttcgttagtttcactgaaatagaatgtgaaaaccaagtcggagatgacggcggtggaggaggagatgaagcagaagccatgaataattagtcaaggatcgaccttgctctgataccataatagattcagagaaaaggaagagagagagagaaggaaaggtgattatattgataaaatcaacccaaacgaacaacagattagaaagctg

SEQ ID NO: 83913 - DNA, 1708 bp, Glycine max
  Clone ID: PAT_MRT3847_46790C.1
atgcagcctcctcgccgcaagaacaataatcttcccaactcagaaacctcaacaacaatgaaaggcaaaaggaacagcagcatcagcatctccattgttgtggtggtgttctccatattcctctttggggtcttcatgtacaacgaggacgttaagtcaatggccgagttcactttcttgaggcctaaggctcaagaaatccaagaagaaacggtttccaacaacaattcaagaactcaaccagagagaaaccgggtcgaggactccgaggaatctcaagaaccgattgatttgaaagccgttgtggcagaagagaagatagtggaagagtatgaggaagaaaatgaagaggttgtgttgcccccagaagagtgtgacttgttcacaggagagtgggtttttgataacttgacacaccctttgtacaaagaagaccaatgcgaattcctcacttcacaagtcacctgcatgaggaatggaagaagtgattctctctatcagaattggagatggcagcccagagattgctctttgcccaaagggaggaggcttatgtttgttggagactcactgaacaggaaccagtgggaatcaatgatttgtctggtccagtctgttgttcctcaaggcaaaaaaagtttgagcaagaatggttctctttctatcttcacaattgaggattacaatgctacggtggagttctactgggcaccgttccttgtggagtcaaactcagatgatccaaagatgcacagcatattgaaccgtattatcatgccggaatcaattgagaagcatgctgtgaattggaagaatgtggactatctgatcttcaacacctacatatggtggatgaatactgccactatgaaagtcttacgagggtcgtttgatgaaggatccacggagtacgatgaagtccctcggccaatagcatatggaagagtcctcaacacatggtctaaatgggtggaagacaacattaatccaaatcgcaccaaagttttcttctccagcatgtctcctcttcatattaagagtgaggcttggaacaatccagatggtataaaatgtgctaaggagaccataccaattctgaatatgtcaacaacattacaagttggcacagatcgtcgactttttgtggttgccaacaatgtgacgcaatcaatgaaggtggtgccagtgaacttccttaacatcacaaccttatcagaatttagaaaagatgcacatacatctgtttacaccatacgccaaggcaaaatgttaactccagaacaacaagctgatcctactacttatgccgattgcattcattggtgtttaccaggattacctgacacttggaatgagttcctctatacaaggatcatctctcaatcttgacctacaacaaacaacctatagatatcttcacacatacttttattctcttttccctctttccttaattgttattatttctccttttacttatgaagaatgctcttttttcattgattgcctcaacatttgtttcaatttttgtaatttagtcattttttattggcttttttttttttttaggaattgggcatttttccctttttttcctttgttaagccaatttagccaagcacggaagcacagcaagatccttaaatgtacaatgaatcttttctccttgaatgaagagaaaataaagaacaaaggttttgtttaaaaa

SEQ ID NO: 83914 - DNA, 2126 bp, Glycine max
  Clone ID: PAT_MRT3847_46791C.1
aacttggtaacgtgagaaaagattactttttttctgatatcatttccccctttttcgtcttctttttatttcttcttctaccccccttgcagcctcctagaagaaaaactcccaaattcaccacctcagaaatgggggtaatgaagggttgcaactaacaccaagctctccatctctttctcgatgttttctaccctttttctcccctccttgcacagcatcgaacaggggacgtttgttatccagtcttttctctctctcttcaatgcagcctcctcgccgcaagaacaataatcttcccaactcagaaacctcaacaacaatgaaaggcaaaaggaacagcagcatcagcatctccattgttgtggtggtgttctccatattcctctttggggtcttcatgtacaacgaggacgttaagtcaatggccgagttcactttcttgaggcctaaggctcaagaaatccaagaagaaacggtttccaacaacaattcaagaactcaaccagagagaaaaaagggtcgaagactccgaggaatctcaagaaccgaatgatttgaaagccgttgtggcagaatagaagatagtggagagagtatgaggtaagaaaatgaagaggttgtgttgcccccagaagagtgtgacttgttcacaggagagtgggtttttgataacttgacacaccctttgtacatagaagaccaatgcgaattcctcacttcacaagtcacctgcatgaggaatggaagaagtgattctctctatcagaattggagatggcagcccagagattgctctttgcccaagttcaaaccaagacttttgcttgagaagcttagagggaggaggcttatgtttgttggagactcactgaacaggaaccagtgggaatcaatgatttgtctggtccagtctgttgttcctcaaggcaaaaaaagtttgagcaagaatggttctctttctatcttcacaattgaggattacaatgctacggtggagttctactgggcaccgttccttgtggagtcaaactcagatgatccaaagatgcacagcatattgaaccgtattatcatgccggaatcaattgagaagcatgctgtgaattggaagaatgtggactatctgatcttcaacacctacatatggtggatgaatacttcctctatgaaagtcttacgagggtcgtttgatgaaggatccacggagtacgatgaagtccctcggccaatagcatatggaagagtcctcaacacatggtctaaatgggtagaagacaacattgatccaaatcgcaccaaagttttcttctccagcatgtctcctcttcatattaagagtgaggcttggaacaatccagatggtataaaatgtgctaaggagaccataccaattctcaatatgtcaacaacattacaagttggcacagatcgtcgactttttgcagttgccaacaatgtgacacaatcaatgaaggtggtgccagtgaacttccttaacatcacaaccttatcagaattgagaaaagatgcacatacatctgtttacaccatacgccaaggcaaaatgttaactccagaacaacaagctgaccctgcaacttatgcagattgtattcattggtgtctacctgggttacctgatacatggaatgaatttctttacacacgtatcatctctcaatcttgaccaacagagtataacatattttcacatatcttattttttttctctttacttcctcaattttctatttacatgattgttatacatttttctctttttacttcaaaacatttcttctcttcgcttcgttgcctcaacttttgttagttttgtctctatgcccttgtaagttgtaaattttcttgagacattttttttagctttttctattcttgtagattgagatctaggacttgggacttattttttagtttttccccttttgtttcctctttgtgtctctttgttaagccaatttggctgaggtcggaagcacatcaaacaaatgaattgtacaatgaatccttgaagagaaaataaagcattcatacattgaatgtgattggactctggtacatcaacgttttatatataaatgcttcatttattttatgtgtca

SEQ ID NO: 83915 - DNA, 252 bp, Glycine max
  Clone ID: PAT_MRT3847_46792C.1
gggggacataaattttctatccaccactacaaattggaccccaaaagtttttatttcttaaaaaaaatttctttctttaaaatatcagattaataacaacatactggctaaaaaggggccttttgatccacaaaagaagaagagttttcccaaagttccctcacgcgactctttaggcggaccctttaaattacaagagttgttcccaagaaccacctttggaaaaacaatttttttttgggaaggaaattt

SEQ ID NO: 83916 - DNA, 894 bp, Glycine max
  Clone ID: PAT_MRT3847_46793C.1
ttaaacaaaaaaatagcatactcatcatcaaaactcggagataagggtgttctgagatttttcttttcctttcctttctcaattacaagattcggtcgaattatttttacacatcaatgaacattttcctctagtagaaagcagagaatagttttatttttcaaaccatgtgaagatagataaaataagcaaagccaaaattcagatatctcatgctatggggggaaaaacagtatcagcattacgttgatataatcacaaatcagatccagatttatcctctttaggaggagcaaattgcctgctgagacgagaacgtgcccagggatcaaggggtgctctctgtggtggctgaggagtcggtgcctttgcctgcctaagctcattttctctgtcaataaactcgatataggccatcggtgcagcatcacccactcgaatacgggtccgaagcaatctggtgtatcccccagctctatccttgtaccgataagctagttctgtaaacaacttgtgaatgacatcatctcctcgcacaaaactagcagcttgtcttgcagcatgttgggatccctcctttccaagctgcaccatattatccgcgagtcttctgatctctttcgccttggcaacagtagtttcgatgcgctcgtgcttcaccaactgcgagaccatggttcggagcatggacattcggtgaccggtgggtcgacccaatttcctgaacttagtcatcttcgcagaaacgcagaacccctaaccctaactaggtagctagatttctatcactgcactctgcacacagtgggacactggaactggcgcagaagaagggttccgcttcagttctgatgctgggcttgttgaacagcccaagattttcggacgcgtggg

SEQ ID NO: 83917 - DNA, 658 bp, Glycine max
  Clone ID: PAT_MRT3847_46794C.1
tcagatccagattttatcctctttaggaggtgcaaattgcctgttgagacgagaacgtgcccagggatcaaaggggtgctctctgtggtggctgaggagttggtgcctttgcctgcctaagctcattttctctgtcaataaactcaatataggccatcggtgcagcatcacccactcgaatacgggtccgaagcaatctggtgtatcctccagctctatccttgtaccgataagccagttctgtaaacagcttgtgaaggacatcatctcctcgcacaaaactagcagcacgtctcgcagcatgttgggatccctcctttccaagctgcaccatattatccgcgagtcttctgatctctttcgccttggcgacagtagtttcgatgcgctcgtgcttcaccaactgcgagaccatggttctgagcatggacattcggtgaccggtgggtcgacccaatttcctgaacttagtcatcttcgcataaacgcagaaaccctaaccctaaccctaaccctagctagcgagctagctttctatcactgcactttgcacacactggaactggcgcacaaacgaggtatccgcttcagttcggatgctgggcttgttgaacagcccaatattttgtacgcagccgtcgacccgggaatccggacc

SEQ ID NO: 83918 - DNA, 419 bp, Glycine max
  Clone ID: PAT_MRT3847_46795C.1
ggggaaaaacaaacgggaaatgttcataagttttgtaaaaaaaaacccttacaaaccctgaacacccaaaaaacaaccgttaaacctctcccttttttaaagggggaccccctaaaaaattttattggggcaaccagggggcctaattcaaaaaccgggttttttcaaaaaaaaaaaaaaagttacccccccggaaccctgtttctggcccaaggtattatccaaatacctgggaatttccggccaaaaaaaattttaggggtaatcaagtaaatttgaaaaccccagaagggtgggacctatattaaaactcagggttttccttgcggaatcaatgatgaccatggttttgttgccaaaatttttccgaacaaaaattttgggaacaatcggttccctttaaggggatcttaaagatt

SEQ ID NO: 83919 - DNA, 161 bp, Glycine max
  Clone ID: PAT_MRT3847_46796C.1
ggttccacagggttcctttgggccaaccgccaaaaaagaacccctttattgcaggtaccaggcctggtgaacctaattggaaatcacttgtgggttaactgggaccagcagtcctcatccaaaccttaccaagcccccttttgccactccacccattgttt

SEQ ID NO: 83920 - DNA, 1325 bp, Glycine max
  Clone ID: PAT_MRT3847_46797C.1
atggtaaggaaaacaataataattatatatttagtcaaaattatcatctgcagaagggggcagcgtactgaaagttgcaagcacacagaagagaagagaaagatgacgtcatcgcgtccccctccgtcgaaatccgtggatctggacctaacaatcgtgtcggcgaagcacctgaagaacgtgaactggaagaacggcaatctgaaaccctacgtggttttctgggtggacccggagcggcgcctcgccacgaaatccgacgactccggcaacacctcccccgtctggaacgagcgtttcgccctccctctccctctccccctccacgactccttcctcaccctcgagatctttcactccaaaccctccgacacccccaaacccctcgtcgccaccctccgcctccccctcaaagacctccacgacctccacgactccacgcgcctccgcaagttccccctctctcgcccctctggccgcccccacggcaagatccacctcaaactcggcctcctcggccgcccccaattcgattacgcctcccccaaccctaaccctaaccctaaccctagtcctaatttcgtctgctacagaggatacaccccttccccttcccattcccattctcactccccttctccaccaccttctccttacacctcttacaccgactcctattctggttactaccccggttactattctggcgcacctccccctccccctcctagacccttcttcgaccgttacgctgggtctagtgggccttctgctccgcttgattactcctccacttatgactccaagcccaaggctcccaaaatgggcctcggcgctggcctcgccgttggcgctgttgctggggctctcggcgggcttgctctcgaagaggggcttaattacgaagaggacaaaatcgcggagagggttgagaacgacgtcactgctgctaatgttgctgctgcgcgcgacaattacagcgattaccgagtggattattgaattgaacacttactaccggcttggtgttgtcgcaaggcttgaaattcgaagggtatttccattcggattcactctaatgttattacagtatatagatatatgtctatgtatatagttcgacttggtgttggattgatgaatgatgcatcggtgttgttttacttgctgcttgtggtgatttgatactcttcttgcgcttctttatttaaagtgaaataaagctggttttgccttaattaagatagctacgggatatggcattatttcctttcaatcgcatatattgcatgcattgtcgtcgggggaaggatagcaatttgctc

SEQ ID NO: 83921 - DNA, 1190 bp, Glycine max
  Clone ID: PAT_MRT3847_46798C.1
cccgcgtccgctgaaagttacaagcacacacagagaagaagagaagaagagaagaagcaagatggcgtcatctcgtccccctccttcgaaatccgtggatctggacctaacaatcgtgtcggcgaagcacctgaagaacgtgaactggaagaacggcgatctgaaaccctatgtggttttctgggtggaccccgagcggcgcctggccacgaaatccgacgactccggcaacacctcccccgtctggaacgagcgtttcgccctccctctccctctccccctccacgactccttcctcacgctcgagatcttccactccaaaccctccgacacccccaaacccctcgtcgccaccctccgcctccccctcaaagacctccacgactcaactcgcctccgcaagttccccctctcccgcccctccggccgccctcacggcaagatccacctcaaactcggcctcctcggccgcccccaattcgattacgcctccctcaacactaaccctaaccctaatttcgtctgctacagaggatacaccccttcccattccccttctccaccagcctctccttacacatcatacacctcttacactgactcctattctaattactaccccgcttactattctggcgctcctccccctcccccccctagacccttcttcgaccgttacgctgggcccagtgggccttctgctccgcttgattactcctccacttatgaccccatgcccaagcctcccaaaatgggcctcggcgctggcctcgccattggcgctgttgctggggctctcggcgggcttgctctcgacgagggccttaactacgaagaggacaagatcgccgagagggtcgagaacgacgtcgctgctgctgcgcgcgacgattacagcgattaccgagtggattattgaactctcactactaccggtgttgtcttgaggtttgaaattcgaagggtatttcgattcggattcggattcgctctaatgttattacagtatatagatatatgtctatgtatatagtttgacttggtgttgaatacgaatgatgcatcggtgttgttttccttgctgcttgtggtgatttgttactgttcttgcggctctttatattatatttaaagtgtaataaagctggtttcaccttaattaacatagctgcggttttctttttgttttg

SEQ ID NO: 83922 - DNA, 1307 bp, Glycine max
  Clone ID: PAT_MRT3847_46799C.1
cggctcgagcacatatttaatgtaaaccgcctagtttctaacttccaccaccaactacacgcatcccttttccccaccacattatttttccttctcctacttccacaaaatcggcatttcttcccacaaccactattgagtagctccaaatttttatatctagctctttcttatgctagaatttgattcctcttcattcttcaacaactccaatgtattccttagcccaacacaagtacataccacgcttccacctccaagcttgcaagaaccacccaccccaccacccatcgtctccagtgttttgttccaccacaaccacaacgtctagggacaagcccaatcctaagccattggtcattgagccatggctcgtgccggtgccgccaacggtggttaccgccgataacccccgtccaatgaacaatgacccaagtttgcaatcaacatggtctcatagagcatgggtggcagctggatgcacaactttgctcatttcattgggagagtctataaagggtgcaatggatttgaacatgtgggctgagcccattttggcaggttgggttggatatattttggctgatcttggatctggggtttaccattgggccattgacaattatggcgatgcttcaatcccaattgttggaacccaaattgaagcctttcaaggtcatcacaagtggccttggaccatcactaagcgtcaatttgctaacaatttgcatgcattggcacgtgcagtgacctttacagtgcttcctatagtccttctttgccatgaccctattgttgaagggtttgttgggatgtgttcaggttgcatcatgtttagtcaacagtttcatgcatggtcacacggcacaaagagccggcttcccccgctcgtggtggcgttgcaagaggctggtgtgcttgtgtcacggtcgcaacatgccgcacaccaccggccaccgtataacaacaactactgcatagtgagtggagtatggaatgagtttcttgataagcataaggtctttgaagccttggagatggtattgtattttaaaacaggggttaggccaaggtcatggagtgagactgcctctgagtggattgaggagattgagaccccttctcaaatccaagctcaatgatgtttattctctttaatttttaaaccatttattgcagtatgaaatattttgttgttttatatatataaaaaaagcttttggttcatgtcatgttacacgacatttaaatttataatgcttggaaggctaaatatatgatacgagaggtctttgttgtttcttttt

SEQ ID NO: 83923 - DNA, 314 bp, Glycine max
  Clone ID: PAT_MRT3847_4679C.1
agtcggcggccgcccttttttttttttttttcttgcttattttactttttacttaacttttcggaaatttactgggatgagggctttttttgccaccaaactatttccaatttgaactttttcgaagttctaccaaattttcgttccaaacgtactgccaaacggtgcattaatttttttcttaccaccaccggacggggggggcgtgttatcttcctaattatcctattgccaagggtagaattgtggtctgaggtcaggcacttcactgcactcacaacttgtaaccgctgcccaatgttgcgtatatttac

SEQ ID NO: 83924 - DNA, 528 bp, Glycine max
  unsure (1)..(528): unsure at all n locations
  Clone ID: PAT_MRT3847_467C.1
tcgatatcttgtcatagatctcgagcacaattaacctaatttattatttatgttgattgtggtaaactaacgcattcttgctgctcgtgtcctgcttccttctcgccttctgctcgatccctcctggagcgcaaatactgaaagaaaaaagcaatatggatagcactagtgatgctaggacatattatcaaagtgaaacgcatgatgatcacgtatttaagccaaaagaagataaagataatgcaaacgaagtgttctcaatggattacactccagccagaaggaagccaccgatccacaatttgaattgatcgatcgatggataaatttagtgccacaacttattttatatactaggaaatattttaccatgtattatccaatgtcttgcaattttatagcgttgtaattatctagaatacacggtaagaaaatatgcatgtgtacagtactctgcgagatctctattgaaatttcagaatagtgatactgaaatntcagaatagtgatacttatataaacttatat

SEQ ID NO: 83925 - DNA, 472 bp, Glycine max
  unsure (1)..(472): unsure at all n locations
  Clone ID: PAT_MRT3847_46800C.1
tttgtgttgaggtctatttcttttttngccgcagaattttttttttgggtctttgtttttttttttttccaaaaaagcccccccccacggggtgaaaaccctgggggaaaaaagaaatttaaaaccaagggggtgcccttcccccctcgccataaaagctgtcttatctaccaattcaaaaacccccgggttttgggttttccccccaacccccgggtgaggaaaaaaacccaaaaagggggacccgcggaccaacttgaactcaaacccctgctttgctttgggggacccaaggcccaatatttcttgttggggggggggggaaaaccggatttcttttttttttaaaaaaacctggctcccgaagggacccacaacttttgtggggcaacccctaaaaatgtattggtgggaaattgctgccccccggaattcaacaaacgggccaaccccgttaatccattggggctcc

SEQ ID NO: 83926 - DNA, 325 bp, Glycine max
  Clone ID: PAT_MRT3847_46801C.1
aaagcattcaacttttggcatttttaggttatcttgaatccgattatcaatggagaccccatcgtccaccagaagagtaataacaagatcacagactttatctgcttccaatgatgctctcatcacagttttcagtgagtgattttttctcttacaatttcaatttttctttctccaaactcacccaaaacaacattactcgtttgtcttttgcaggaaatattgaagattccgaaaagaacacatcaaagtcaaaaacaagggtgcaacaacaacaagatcattcggctctaatagacataccaaatgattttccaatcgcggg

SEQ ID NO: 83927 - DNA, 165 bp, Glycine max
  Clone ID: PAT_MRT3847_46802C.1
taagctcggaattcggctcgagcgtcgagctatagccgcattcacttagcgagagaacatcatgtaatcgacagcgcttcgctcgaagaagagacatgtgagggttccaatcatgaactgaagcaccacacatacccattttctccaaagacatcatttttatta

SEQ ID NO: 83928 - DNA, 657 bp, Glycine max
  unsure (1)..(657): unsure at all n locations
  Clone ID: PAT_MRT3847_46803C.1
gccgcgtcgtagctcggacggaggaagaagaaagcggagtatcgatacaactggaattcccgaagggtcgggtgaagaagattatggcgctggacaaagacgtgaagagggtgagctcagaagcgttgtttctggtgtcgcgctccacggaattattcctccaattcctggctgaaaaatcggcgcaggttgcgattgaaaagaaacggaagaccgtgaatctggaacatataagagaggccgtgaagaggcaccagccaacccgggattttctcctcgacgagcttccgccgccatctcagcccaccaagcccgataggcccactcagcctgccggtcggcccaaattggatcctcctccccgtggtactcgccgcatcgatctatttttccggaaaccagaacttgacaacccagcccaagcccaaccacctgaaaatccagctcaagctcaaccgcctgaaaatccagaccaagaccaagcccaatcgccagtacccgtagatgagtcttaggttttgtttgtttatacacctgcgtttgagattttgtatccgatctgaatctgagataacatctaacaatgcattagcgaaaatatgggattctaattagttattcgcatattctattatggtccatattcnnncnnnnnct

SEQ ID NO: 83929 - DNA, 616 bp, Glycine max
  unsure (1)..(616): unsure at all n locations
  Clone ID: PAT_MRT3847_46804C.1
agacagattatgagtatttgaatgtatttagttagacttgcataagcatatctctactaaatttaaaacaaactactaaaagattaagaggcatggtattagtaaaaactcgtgatattagtctaaatccattgcattcgcatgaatcacttttactgttacaactagaaactcattccagaattagcttataataagtatgtatgatatttacaatgtctgattacagcatccagttgagtctcttgcaaatttacaaagcaccgtcagctcaacaattccgcaacagttgtgcaatttacatccagcccagcttccataaggcaatgataagttttatatttcctataacatcgttctgcttcagaatcaagccataagttcaaaaacagtgacgcctctgggtgcatgtgtttatcaaaatgcagagttttccccagactcctcctaataacctgaagctgagctatttcattgcctttgtcctggtgttcactgctagatgctaaaaatctctgtccactctgcccaaacatattaaaaactctgtttttttnccatataatcatttttgttgataaagctggttttggatcattaaggggtctctatactt

SEQ ID NO: 83930 - DNA, 165 bp, Glycine max
  Clone ID: PAT_MRT3847_46805C.1
aaaaaaaaaagtaattgatatagaatggaggcaaggcaagagaccatgcaaaactaatataataatggagggaaagcgagttacctgtctaatatgggaccattctcgggaatttgatgattgctgcgggtatcacggggaacatggggggcgttgacctgattt

SEQ ID NO: 83931 - DNA, 507 bp, Glycine max
  Clone ID: PAT_MRT3847_46806C.1
cgtaagctcggaattcggctcgagcgtggctctgccaacatggatgtgctcattgcgctgggaacaaacgcagcgtatttttactctgtttactctgttttgagagctgccacctctccgcatttcgaggggaatgatttctttgagacgagtgcgatgcttatttcgttcattctgcttgggaagtatcttgagattctggccaaggggaagacttctgatgcgattgccaagctcatgaacttgacaccggacacggcggttctgttgactctggacggtgatgggagcgttgttggggaggaggagattgatagcaggttggttcagaagaacgatgtgattaaggttgttcctggggcgaaggtggcttcggatggatttgttgtgtgggggcagagtcacgtgaacgagagcatgataacgggggaggcgcgacccgtggcgaagaggaaaggagacactgttattggagggactgtgaatgagaatggagtcttgcatgtt

SEQ ID NO: 83932 - DNA, 347 bp, Glycine max
  Clone ID: PAT_MRT3847_46807C.1
gaggataatgctatgtttcgagaaatggcgtttacatgccatttggaaataccgtacacccccgacaggggtttaaaagagaaaaaatgcggcgcagaggccactttcaaaaaagggccaccaggttaaaggatctccatcgaccatctcgtaaggctttcctttatggtgaagtttaccagcagacttgacagcaagctccgaaccggattccttgaagacatccaggggcaggaaatcccaacttaggaaccgcggtttgcaaaaatggcacctttcaggagggccccaaaagctttagttccttcccgaaatcgccaagctcggacttcttgaagaccgcaagt

SEQ ID NO: 83933 - DNA, 290 bp, Glycine max
  Clone ID: PAT_MRT3847_46808C.1
ttgcaccgttcattgatataaactttaccaatgccctgctgagcacgagcgcgtacctgcatgcgctatgcacactcttttagccctcgacaccaacactgacataaaggcccagcctagcatccccagtgtgcatctgcgcctcctgcctcggactgaaccgacatacctcgcgcgaggaagacgagtcggacccgttgctcgatgacgcacaaacagtgagatatggcgctgagggggaggatgatgtggcacatccagatgaggaagagctcgaaagagagagggag

SEQ ID NO: 83934 - DNA, 328 bp, Glycine max
  Clone ID: PAT_MRT3847_46809C.1
ttttgtttttacttttttttttttttttttgttttttgggaacaaaattctgattaaatttccattggatcaaaacggtaacattggataaccaaaaaataaattgtgggttaaaggagaaaaggaaaaaaaaaaaccgtttcaggtttgatgaaatgaccttggacccttgaatgaagaacgatggggcatggaacacccaattttttcttccacacctagcaagaaatccatgggagggggggattaacttcacaacattcttatgcttgaggctcatcagacctgagtggtttctcaccttcccaggggaaattagggccttccc

SEQ ID NO: 83935 - DNA, 445 bp, Glycine max
  Clone ID: PAT_MRT3847_4680C.1
aacaagtcacgagggtcggaaaagtatgatgaagctggccgaaagaatggtattgagcttttctactggtgtgggtgcttccactgcaaacgcttggacaccactaccacttgatcttgaaaatgttagggtcatgaccagaaagagcgtggatgatccaggcagaccttccggtatagtgctcagtgctgcaacttctctctggctcccagttcctgcaaggagagtttttgactttctcagatccgaaaacactagaaatcaggtagtaacgtatcagatttcaatgcttctcacactctattcatagtacaatatgtatttattactatttattgctagcaatatttctcatctaattcatatttttttgtaaacatcttgttgaatttatagtgggatattctgtcgagcggggctcaagtgaacgagcttgcacatattg

SEQ ID NO: 83936 - DNA, 267 bp, Glycine max
  Clone ID: PAT_MRT3847_46810C.1
ttgttttttgagacaaccaacgataggtctaatattaattgtggaaagcaaatacaaacatgtcgctaataaacccaagcattacaggggggccctaaaattcgagaaaccctcacaggccacatatgctagccaatccattttttttaatacagagctgcgagaaggtcctatgcattacaaacgcaggaaacacccccaacggtttactactctccgactacatcactgcaggaggtaagttgttgaaaaagcattcatccaaca

SEQ ID NO: 83937 - DNA, 394 bp, Glycine max
  Clone ID: PAT_MRT3847_46811C.1
gtccctaattctcaatttcttggcggctctcacagtacgacacttcacatgtgacagtttactcaactccttgtttggttagaaccctctatcagtcaaaatcctatgtaggtagctcttttcgagacctcgacaatttgcttcagttgctttcaagatcaatgattgtttccataaaccatgaaaattaagttgctttctagaatttcttaaaagtaaaagtatggaaactattttcaagacatttacttatatctaaacatgaaaatgttaacaacacttttttttactctctctttctaagattctccctatattttggtgaagcgtaatggaagttaccaattttggtggcctcacttttaaatttggtgagaaaatttttaaatgaaaa

SEQ ID NO: 83938 - DNA, 479 bp, Glycine max
  unsure (1)..(479): unsure at all n locations
  Clone ID: PAT_MRT3847_46812C.1
ggcgggggctccatttacctcttcttttccttcaantccaggcctttccctcccgccctgtttaaaattgtttttcttaattcccaaaaacgccaggtgcgggctccccccctccgttcttaaaacccggagtgggaacccggggtcttttccgggcccgagaaattttttccacccctgaaatccttaatcgctaaaataccttatgccccccaagggaaaactgcttcccaaccgtcctcttctttttctgcgaataatccaaactcacggggcgccgcccccgtggcgcccggaaaaccgctcgcctccctgggccctttgattgggcctcccttcctgccccatttggcccctgttcctagccggcctccctggggcccctggtccccccctgggcccccccccggctcccccccccgcgtccggccgcggcccccccccccccgcccccccctttcgccccccccccccccccc

SEQ ID NO: 83939 - DNA, 288 bp, Glycine max
  Clone ID: PAT_MRT3847_46813C.1
ggaaaaataggttcagcctcacctgtgagaccaacatcacataacaaggttatttgatgagatgtactatatatatacacaatggtgtaataagttggggccaatatccttgcaggtggtgggaagggggtaaacatgacaaaatgcctgcagattggtgctaatagctataaaaactaacatttggagcctgttattgaacaagcggaacagattctaggggggaaaatgaacacggaaattgggaaacaagtgctgggtgaagggaaaatgatcatgtgagactga

SEQ ID NO: 83940 - DNA, 242 bp, Glycine max
  Clone ID: PAT_MRT3847_46814C.1
ttttttttttttttttttttttacctaacaacaactaaactttcttattcatataaattaaatttggcagtattcaaaatcaattatcttgaaaccatacaggctctacaatcgatgtttcctaccaaagaaaaacaaaatactactcttcctggtttctaaatgccatgtttttcaacatctggataaaaatctcattccaagtgtctacgacccccgggatgcaccaatgaacctcgtgc

SEQ ID NO: 83941 - DNA, 2671 bp, Glycine max
  unsure (1)..(2671): unsure at all n locations
  Clone ID: PAT_MRT3847_46815C.1
ggaaaaactttttactgacaccttggctaaaaccatggtggaacctcggcgtcgttgtttcactttacctgctgttgatttaaaggaaaaaagcagttggaggcattatatatattcgagtgatttcagcaaataaactntctaggagttgctntaagacatgtaggaggcaaccaaatggtacatccaatggttgttcagaggataattttgatgataaggacctacaaacatttgtagaggtagaaattgaagaattaaccaggagaacagatgtcagactgggttcaacccccagatgggatgcaccatttaatatggttttacacgataatgcaggaactctacgtttcaatcttcacgagagtagtcccaacaacgtgagatgtgactacctagcaagttgtgaaatcaagttgaggcatgttgaagatgattcaacaattatgtgggcaataggacctgattctggagtcatagcaaagcaagcacagttttgcggagaagaaattgaaatggttgtcccatttgaggggtccaactcaggagagttgaaggtgagcattgtagtaaaagagtggcaatattctgatggttcacatagtttgaatagtctccgttctaattctcagcgatcacttattggatcatcaagtcttctgtcaaaaactggaaggaaacttaagataactgttgtagaagcaaaggatctcgctgcaaaagacaaatctgaaaaaattaacccatacattaaattgctatatggaaaggttgtcaagaaaacaaaggttgctcttactactactagtactactacaaatcctgtctggaatcaatcatttgaatttgatgagaatgatggtgatgaatacctaaatgtaaaatgctttagtgaagaaatttttggagatgaaaatattggtagtgcaaatgtaaatttggaaggactgggggatgggtcaatcaaggttgaatggatccctcttgaaggagtgagttcgggtgaattgaagcttaaaattgaagtagttaaggtggaggaccaagaaggatcaaggggttcaactaatggttggatagaacttgttgtgattgaagcgagggatcttattgctgctgatcttcgagggacaagtgatccttatgtgagggtaaactacggaaactcgaagaaaaggacaaaggttatacacaaaacactcaaccctcgttggaaccagacattagagttccttgacgatggcagtcccttgatactgcatgttaaggaccacaatgctttactacccgaatcaagtataggcgaaggtgttgtagaatatcaaaggttgcctccaaaccagatgtctgacaagtggatacctctgcaaggggtgaaaagtggtgagatccacatccaaattacaagaaaagttccagaaatgcaaacaagacatactctagactctcaaccctcttcgttaagtaaatcacaccaaattcctacccagatgagagagatgatgaaaaagtttcgatcattaatagaggatgaaaatcttgaaggattaacaacaactttgagtgagttagaaagtctagaggatacacaggaagggtatataacacagttggagacagagcaaatgcttctactcagcaaaataaatgaactgggtcgggagatcatcaattcttcttcccgcgctagtagtagtccttctcaaagtggaatttgaccctcatgagcatcatctacctaacgttatccgtagttgatactttgactttcccatgcaaaatattgctcatgggaatgggaatcataacgtacagactttttttattttatccaagaattcttgtgtagttgcccctcacatagcaacggtatatgtttaattgatcaataaattgcaacgagtttatgtttctcgtagaatatcaaaggttgcctcccaaccagaccgccgacaagtggatacaaaaacaagaagtgaaaaggggtgaaattcacatccaaattactagaaaagttccagagatgcagaagaggcaaagtctagactctgaaccttccttgagtaaactacaccaaattcctaaccagataaaacagatgatgatcaagttcaggtccttcatagaggatggaaatcttgaaggactctctgcaacattgagtgagctagaaactctagaggatacacaagaagggtatatagttcagctggagactgagcaaatgcttcttctcagcaaaataaaggaacttggccaagagatcattaattcttctccttccctgagcaggagatcttattcaattggaaactgatctggcatcagcttagtatttacaatttaatgttttcccatgctaaatattgcttatgggaatcatcaaggacagattttgtacatgtttcacaaactagatagtcttcttataccaccacatatatttgtacatggttctttgatcatttttttttgttctagtaagttcattgctgggtaggggatgcataataaatggaagtggctactgtattcacacttgcccaggaatgaggaaactaggttatatgattggattttttttataatttcaataggaaaaagaattaattcctattatattgtggttgaaaggaatgatatcttttgcaaagatgaattttctcttgtc

SEQ ID NO: 83942 - DNA, 316 bp, Glycine max
  Clone ID: PAT_MRT3847_46816C.1
aaaaaacgttaaaacaattaacggtcttctgatgcgtataacttctgatgggcacagtacatactataagagcaaggcattttttattggagcgcgcttaaaccatcaaaaccaccagtaaaaaccaaatggcataaaactggtgagcacaccacatgggtgccttatagaaaaccaaagtaaaacgttaggacattaaagttcatttggtactcccgcgttatcgccacttctatggaatgcataccctgggataaggctcttcaaaagggggtattggatccaataatcctatcaggggggcatattttttaca

SEQ ID NO: 83943 - DNA, 224 bp, Glycine max
  Clone ID: PAT_MRT3847_46817C.1
ggacggggtaaattaaaatgccttttatttaaagacacattgagatatggcaacaagaagactcaagttaaccaaccattatggagtggaaaactaggacccactacccagttgacaaagatctaagacacggaaccaatacaagagccaacccaaggtgtcaaaattgcacgggaagaagtcacaccatggaacccttggaagaaatgcactaatcgacactc

SEQ ID NO: 83944 - DNA, 396 bp, Glycine max
  Clone ID: PAT_MRT3847_46818C.1
gaatcaaaagcattcttcacttaatttccttggagtgactggatacacttttcagaccgataaataacgatggacgctaagaggaaggccaacaaataccaatgggggtaacccatttagaagcacgccccatgactaataataataaaaaggacccctctctaccagctggaactataattagccgcccaaagaaactgatccactaaactaagctaggagaaattaatattcatttctcattaaaatatgaggttgaccaaagcatttacaccactgttgtttggctatggtgttgttacccataaaagggtggagggaatcaatcaaccactaatgcttcattgtaacgcgcagcacttgtcaaaaaatctcctcaaaacgttccctaaactg

SEQ ID NO: 83945 - DNA, 343 bp, Glycine max
  Clone ID: PAT_MRT3847_46819C.1
gggccaaatattttacccaaaaggatgtaaaaggaaataaaccatgaatttaacatctggcgaactgacgcaatttagcagggggtacgtttaaaaccgaaaaaacaaaatttccctttagaggggcactaatactacctaaattattaccaggacaactaggggtttgatgctctaggggaaatctgataacctggctgggccaacaccattctgattgagcctttagccgtcaattacctaatagccttccttggccgggaacccttaatccttaaacgggctgagagaatggcaggagtaatgaccctgtattcgggtgcctcatagagggacttggcat

SEQ ID NO: 83946 - DNA, 2651 bp, Glycine max
  Clone ID: PAT_MRT3847_4681C.1
gcacgagtccccatcacaagactatgcataaatctgtctaacccgactggtagtcaagcttttttatttaatgatgcttttgtccagaattagaaagatgtggctccagcttcggaatttattttgacaactctaaatactgtaataacagtaatggaaactacacagccaatagcatctaccaaaccaacctcaataccctcttatccaccctcacttcccacacagaaatcgactatggtttctacaatttctcgcatggccaaaactcagacaaagtatacgcaatagggttatgcagaggagatgttaagccagacgaatgtcgcagctgcctcaacaattctagagtgagtctcacacggttgtgtccaaagcagttagaggcaatcaattgggaagagaagtgcatgttgcgctactccaaccgcgcaatttttcacaccatggatgcttctttttcgtatcatatgaacaacgtaaacaatgcaacggatgcggaagagttcaataaagtgttgggtgagttacttagaaatctgagtgacaaagctgcatcaggtgactctcgtcgcaagtatgccgcggatactgcagtctttgcgaatctccaaaccatatacggtcttgtgcagtgtacgcctgatttgtcaaggcaagactgcggtgaatgcttgcattggagtttggcagatttcggaaatgttttcaaaaacaaagttggtgctgtagtgcttagaccaagttgtaatgttagatatgaaatctaccccttctacgatgaacctacaccatcagcatcggtaccactttccctaaaagaaaagggcaactcactgcgaactacaatcgccatagttgtgcctaccgttctcgttgttgttgctttgctcattttcattagcatatattttaggaggaggaaattagcaaggaaaaatcttctcgctgatgaagacgatgatgaaattgaattggctgaatcattgcaattcaacttggacacaataaaagttgcaacaaataacttctctgactctaataaactcggagaaggcgggtttggagctgtttaccaggaaacactctctaatggacaagtgattgctgtcaaaaggttgtcaagcgatcctggccaaggtggcgtggaatttaagaatgaagtccttttactggccaagcttcagcaccgaaatttagttaggctacttggttttagtttggaagggaaagaaaagctacttgtttatgaatttgttccaaataaaagccttgattacttcatatttgatccaacaaagaaagcacgactggattgggatagacgatacaaaatcattcgaggtattgctcgaggtcttctttatcttcacgaggattcacgattgcgcattatacatcgtgatctcaaagcaagcaatgttctcttagatgaagagatgattcctaaaatatcagattttggcatggcaagactggttgttgtggatcaaacacaagaaaatacaagtagagttgttggaacctatggatatatggcaccagaatatgtaatgcatggacaattttcaataaaatcagatgtcttcagttttggtgtactagttcttgagattgtaagtggccaaaaaaaccatggtattcgtcatggggagaatgtggaagatctactaaactttgcatggagaagctggcaagaggggacagttacaaatattatagatccaatattaaacaatagttcacagaatgaaatgataagatgcacccacattggtttactctgtgttcaagaaaatctagccaacagaccaaccatggctaacgttgcactcatgctaaatagttgttctatcactctcccagtgcctacaaaacctgctttttttatggatagtgcaactacaagccttccaaacatgtcatgggaagttaattcagggacaacacgatcgaatcagtccacaaccaaatcagctcacgactcagtaagtgaggcttcaatttctgagctataccctcgttagattctggtcatagttaggggtgatatatgcatttgtcgtcaatgttattaatacatgttttggaacttgtaatttatttgtgcaaagtatggttacttaaatagaccatagaacttaattgtttcagtcaactaagacagaaacatgaaatataaatgaatggtgtattggtcttaaagtgtatggtttggttattatgctatccgtgctgcttggtgttgcttccacagctacaacgaaaagcaccttcaatggaaataaatattgcttttaatggcaattaaaatggccataaaatattttactagcaattatatattggttggcgtggacgtgggtggtggatcttcgtcatactctcagagaagggaagggagtgttgatttcatctctgagcttggtcctaattcaggggtgcagcttcagctggttgcaagtgttccgcaaggtctcaaatctatgctccaagcagatgctcatggaactagtttcctaagactgtaattctgttttttcttttcttgtttttcctccacttaccaaaaaaagacgtttggttggcgtatgcagtgttacaatggctagtaaaagtaatttggttaaattattcatttagtctgcata

SEQ ID NO: 83947 - DNA, 337 bp, Glycine max
  unsure (1)..(337): unsure at all n locations
  Clone ID: PAT_MRT3847_46820C.1
aaccatgaatctagatatgaatctgcttcacgataccatcctgtactaggaaagacgaaacatgctcnctctgataacntagaagttaaataacctgtcctagatctggatcctgaacaactgtcgcattgcaacagaactctgtcttaacgtacttaagtatcttgatatacgtgaattctgttcgcaatacctgaacggttgtnaggcttctgctaccatttcgttgctgaacgcgaatactcgcatacacgctttaccacacacccgagtcgtcagcattcgcatcatcaaaaagatcgaaggtcagaacgatctgagcgtctaatcgacgcat

SEQ ID NO: 83948 - DNA, 736 bp, Glycine max
  unsure (1)..(736): unsure at all n locations
  Clone ID: PAT_MRT3847_46821C.1
cctaaccatctagttcaccttatatctccaacacacaatatatgtgaggtaatagatgaagattattcttgatgatctcaaactaaaataggaaggacttatgaggctgttttgtggtaacaattcagccattagtgtggcccataattcaacctagcattacagaacaaagaacatagaaattgataggtacttcatcgaagaaaaatggacaacaatcttatagtcacaacaaatgttcctacgagactccaattcatagacgtgttcaccaaggggccgggcttcctgtaacaagattttaggaacttattggcaagttggatatgattggtatacatttaccaatttgagggaaagtattaatacaattgacatttaagatagaaaaaattatcttttaatttatttatatatatatatatatatatatatatatatatatatatatacatattataacccataatattgaataaataaacaatttcttctctttcatctatagggctatcttgttttttattaagagaagcctcaacaataaagtgaataatgtctcttaacgcatacacttcttgtcctaatctaatgaagacagtaaaataaaactgggaaagaactcgggggtgattgaagtatcttgtattcaaacgtataagaaaataatagaaattatctgtgcaccggtgacanagaaaagngatgaatcactactaactgcctttgggacttg

SEQ ID NO: 83949 - DNA, 228 bp, Glycine max
  Clone ID: PAT_MRT3847_46822C.1
aaaaataatattggttttttatcttttatatggatcaaacttttaaagctttaaaaaaaaaaaggtgaatattgggttttctagggggaggttatacataagatcggaaacaaaccaaaatcagtttgatagacctggggggggggtagatataagcgggacaaaaccctccctttatatgagacaatcatgaagcggccatcggaaggcgcggacagaaatccctct

SEQ ID NO: 83950 - DNA, 381 bp, Glycine max
  Clone ID: PAT_MRT3847_46823C.1
cttttctctcttgttctcgttctcgttgcgtggaaatgaatgcgtttcgtttatttttttcattttcggtttttttatttgaatttttggggaaatagcattgacgtgttttttttttttttttttatcggtgaagattctgataagcaatttcacgacgatgatcttgggatgcagcggggcgatgaatctgctcgaagtgagaatgagtcaaagtttcgtaatgaactgaagcatataaagtggagacctccaggtataggaacaaagcaggactgggtagattgaataaacaaccttcggaaagggagaaaggatgttgaagctacaccattatgttggcgattgtaacgtgggcttttgttccattttatgatgaaa

SEQ ID NO: 83951 - DNA, 266 bp, Glycine max
  Clone ID: PAT_MRT3847_46824C.1
ctgtcacgtggggtgatatttccccctctcagagactcaagtttggattcctttatctctgcattgaactactagcaggatgcagggagtcaatagttgggtctgaggaaccagctctgcaatatgtctttgaccatgagactcgtcgcactatgcttcatagctactcaaccccattatttaatgcctttgggttactcttgccagcaagtgctgacagacgccctcttgatccacatacataccttggagagaagggattacac

SEQ ID NO: 83952 - DNA, 540 bp, Glycine max
  Clone ID: PAT_MRT3847_46825C.1
gaattaagatgctttctctggaagttcaagcggctggacaattgcatcttttagtgaagttgagaaacttgggaaagaaagtcctgttgagccaagcctgccttccaagaatgctattgcagttatcatgtacacaagtggcagtacaggtctgccaaagggtgtcatgattactcacggcaacattgtagccactacagcagctgttatgacagtgattccaaatctaggtagcaaggatgtgtacctggcatacttgccccttgctcatgtttttgaaatggcagcagagtctgttatgctggctgcaggttgtgcaattggttacggctctcctctgactttaactgacacgtctaataaagtcaagaaaggaaccaagggagatgctactgtgttaaagcccactcttttgacagcagtaccagctattcttgatcggattcgagatggagttggtaaaaaggttgagcaaaaagggggccttgagaagaatcttcccatattcatacaagcgccgactggttgctgtaaaggaag

SEQ ID NO: 83953 - DNA, 403 bp, Glycine max
  Clone ID: PAT_MRT3847_46826C.1
gtacacaagtggcagtacaggggtgccaaagggtgtcatgattactcacggcaacattgtagccactacagcagctgttatgacagtgattccaaatctaggtagcaaggatgtgtacctggcatacttgccccttgctcatgtttttgaaatggcagcagaggtgatttcttcttagccttctaattgtcaaaaacagctgatgttgatgatattatctctaaattacggtggttgtccagtctgttatgctggctgcaggttgtgcaattggttacggctctcctctgactttaactgacacgtctaataaagtcaagaaaggaaccaagggagatgctactgtgttaaagcccactcttttgacagcagtaccagctattcttgatcggattcgagatgg

SEQ ID NO: 83954 - DNA, 432 bp, Glycine max
  Clone ID: PAT_MRT3847_46827C.1
caaaaaacctaatatttttaaatggcaggtattttttaaaccggccaacttaaattaccgcaggggttttcaaaaaaactccataccgtttacggggattttatactggggcttcctgggtggaaaaaggggatccaaaactaatctaagtttttccttacggggtaaaacaccctaccaaccagtccttattacacaacaaaactgggggggcggaaaacccaaatggcgtccccaacagggatggggctaagcagagtttaaaacccgaaaaacccaagctggttggctttttctttttaaaaggtttcaaagtcctgatagatgattgttactgcaagcaatattcctgtccctgaaccaatggcccccatgaaatttgccaacacagtcaaggcaccgatccatatgcctccaaatgctgcacggggg

SEQ ID NO: 83955 - DNA, 271 bp, Glycine max
  Clone ID: PAT_MRT3847_46828C.1
gagccagcgagacctgaggcgcgcgggggcacgagcactcaacattgcccccactacaaggggaggagcaagggcaggggcccgtgtcctcccaaccctcaggggtaaacgcgggggcattgcactccgtgtgcacacagcgagagtctcaggggtggacctcggcgttcatgtctcaaaaaaaaccttaggagaaaatgagagagcgagattcagagagagcgcagacaggggtctcagggggcgcctctgtgtgtgcgaaggggcactt

SEQ ID NO: 83956 - DNA, 384 bp, Glycine max
  Clone ID: PAT_MRT3847_46829C.1
gggaaaaaaaaaagggccccctttgggcctttaaaaaccaaaagcttttaaaaaaccaggggtttttgaattatatgaaccccgtttccaaacctttaagccttgggtccccctttccctccttttggggcccttttaagggggtaacccccccccggggggggtttttgtcctttaaaaggcccccggaaaccaaatccttcccctaattgttccttaaatttcccaaaaaaaaaaaaaaaaacttttcccccctcccgggggcccatggggcggggaaaaatttgcattttcccagctttgggaccgtttaacttggcttccccccccgggggtgttttttttttacaccccttgggcccccttttggttttgcccgggggg

SEQ ID NO: 83957 - DNA, 284 bp, Glycine max
  Clone ID: PAT_MRT3847_4682C.1
cttatattgttattttctttggcggttctggatcatgttatgtgattaaattttgcaccttgattttttgtttgtgtgtctttgaatctatgggttcgttgtcggattgttgctgggattgtgggtatctaataatcaacataaagccttttgaattcaaaatggaagaaaagtctacatcatgcaatgtgtgtgacacatggtgctcattttcattgtatgtgcatattgaacaagtggcagcaacagcggtgtgggaattgatgactttattgataaaacct

SEQ ID NO: 83958 - DNA, 190 bp, Glycine max
  Clone ID: PAT_MRT3847_46830C.1
ggagtctcaggtgaaacacgcacttgttgtcaaagctatgggacgtactggatccagaggacaagagacccaagatacagggaagctttgggatgatcagaaccgtcacatcatgaggaatgggaaaggacctgtgacataacgagacattctcaccctactccagtctgaaagggaagcaagaaaattg

SEQ ID NO: 83959 - DNA, 987 bp, Glycine max
  Clone ID: PAT_MRT3847_46831C.1
ttctcattcatccatccttccttcccaaccatgaacaagaaaccctcaagaaacctcctcacccccaaaaccaaaccctttttattaaccttaaccacgaagtaaaacacaaacacaacctccatgtgcaccttaaccacaacaaacacaattcgtgtcttattacttattttcctctaaatctaacccaactcaacccgtgctcatccctaattatgggaaactgcgtgttcaaaggtttacaccacggcgtttctgaaaacatgatggtgaaagtggttacctcaaacggaggcatcatggaactcttctctcccataaccgtggagtgcataaccagcgagttccccggccacggcatcttccgaagccgccgcgacatgttctccgaaccgctccccaaaaacgaagagctccgcggcggagaagtctactacctcctccctctaaacccttcttcttctcgcaagagcttgacgagacaattctccgacgccgaggccaccttaacaccgtaccgaatgtcaacgtgcgagaaaaataacaacaacaacaacgtgtactcggaaccacccgaggtgattccgagatacaatagtagtggggtgtggaaggtgaagttggtgataagccccgagaagctgtcggagattttgtcgcaggagtcaaggacggaggcgttgatagagagcgtgaggacggtggcgaagtgtggtaacggcgtgccgtcgtcggtggcgaactccgatcagtggagtgtggcaagcagttggaaaggttctatgtcggagaagatgggtttacaatagctagctatatgttaattaattgatttttttcctacttttttgactttttttttgctagtgtttaacgaccctgattattattttcttcatttgtttgtctacttgttaaatattttattttaggtattgtacgtttgtgtatatatttgcatgtgatgaagtgagatattgtttatta

SEQ ID NO: 83960 - DNA, 1205 bp, Glycine max
  Clone ID: PAT_MRT3847_46832C.1
tgaagttgctctctctgtaaccccccaaacccaaaccttcattatctcaattctcacactcccatttctcccttctcttatttattattattacacacatcatcacaatttgtcaatttccccgaagaaaaaaaaaccctaaaaaatttgctcctttggatccatccaggggcacaccccggatctccgattctctagatcactctcaagttctcatctttttcgtttttggcgcagtgggtcgttgttaaatacatggtttctgatctgggtttgatttaagttgggggtttctgggtttgtgattgaaatggcttatttccatagctcaatctccctctgcaactcctccgttgaccaatacatggcgaattccctcgatttcgagccgaaatcgaggcacaggaaaacccccaattccctccagtctccgccgtgtcggcgatcccggtcggcggtggttgacgttgtgatttttgcagcagttatcgcggcttttgggttcttgttgttcccctatgctcaaattttggctagtgagagtgtcaaatttggaattttgattgtgaatttggtcaaagaggaggtttcttttaccccttggatttatatgttcataggtgttagtgttacctttgcagcattgactacttgggttcttgtggcttgcacaataaggaagtgtgggaaccccaattgcaagggtctcaggaaggctgcaacgtttgacattcagttggagactgaggattgtgtgaagaattcaccttcattaactaaggatggtggagttaagaagggactgtttaaggttttttgtgatcatcaccgggaactcgaggccgagcttaagaagatggcaccccccaatggaagggctgttcttgtcctcagaggaaggtgtggctgttctgttggtaggttggaggttccgggaccgaagaagaatcgaaagaccaagaagtaggatacagaaaagaagaaacaaaaagtcttataggaaggagaggatattggatacagaaagcagtcttaaattggtagagaagttgcttatagttatatggtcatattttatttaaaattaggttgtctttcgaataaatccctccaatttggcaataagttgtaagaaactatggatcatacacagtttgattatttatacctggtaatataaaatcctttaatttgaattgatttaa

SEQ ID NO: 83961 - DNA, 228 bp, Glycine max
  Clone ID: PAT_MRT3847_46833C.1
atagtctcatttgcaggcaagtaacattcccattatatgacaatagagccgacataataaactaagccaaaaagaaatacaaggagaccatagaagatgttgaccatgtcttctaattatatgcaggtgcagaattaaggataactgttactaaagaattattgaaagatttcagaatttcagtagggtgttctctgtttgaggataataagagggaaacggaaagaa

SEQ ID NO: 83962 - DNA, 521 bp, Glycine max
  unsure (1)..(521): unsure at all n locations
  Clone ID: PAT_MRT3847_46834C.1
gtttataaaacactcaacccacaacccaattatacccaaaaaaaataagtataatattttctaaaaaaaaaaaaaaaaaaaaaaagnagaacaatggggaggagtcctaaataagcacggcttccatgccacgggcatagcacctctaaagcgcccccataaatgaaaatccaatgccctttcttgggccaccttttaaaacaagtatagacccggaaaaaaccccaaggtataccccccttgagagggtttttgccatcaaccacctcttggggaaaaaagcgagaaaaaccccaaaaagatagcccctcaccaaaaacatttcgccaattttgttcgggccttggaaaacgccaacgaggaaacccccccttttaaagcccccccaaaaaaagcggcgggggagaggcaggagaaaaacaccagaaaaatatccccttaaacactcaacaccaaacccgccgcagcggccgggtgttaccacttattcttaacccccgccatggtgcggcacaaattcc

SEQ ID NO: 83963 - DNA, 495 bp, Glycine max
  Clone ID: PAT_MRT3847_46835C.1
tcgtacggctgcgagaagacgacagaagtcttcttttctttttatatgccactttcgaatttgggttggctgaatgctacattcacaaaggattgaagctcaactgaacgtaataacaattcaaacccgttgccttgtatctgcttggaagttgggtcatggagagaaaggaaacgaggataatttttttagattatatattatgtttataaaaacaaacaaaaagttaggacattaaattcatgcctggccggagcataacacatacctttgtatactgctccaaaacctattggtgtctgtgagattatgtttgatattattcctgatattgtatttattattagaatattctatttcctattatcagtaattgattgatcttgtaatcaatattgattttcttttcatattataaatagcatgagggtgtggtctacattgacacacaacattacacagtaaacacttgtcatagtgtcaatcctaatttct

SEQ ID NO: 83964 - DNA, 548 bp, Glycine max
  Clone ID: PAT_MRT3847_46836C.1
cggacgcgtgggataaaaaaaaaaaaaaaaaaaaaaaaaaaaaaaaaaaaaagaaaaaaaatataaaaaaaaacaaaattacttacactataaatgcaaaaaaatagggtgtctgtttttgtggattcaatttaatttactggtggttgctatacaatagttttttttttggagaaccttgaatttacttaatttgcccgccttttacaacatccccttttgaaaaactttggtattacccaatttgcccgctttgatcgcaatttcccatttccccccctggcttgaatgttaaaaaggcccctccctgtggcctttcataaagcttgcccgtttttggtggtaaatggcacgcgccttttacggttgctttaaccctagcgcctgttgtttttacttccttcctttcctttctctttgcgatggccttatttcccggtcattttcttttttggcttttctttttagggttcttattgggtttttcccgtgaggttttaaatagggggtttcttttgggtttccgattaagtgttttgccgtccctt

SEQ ID NO: 83965 - DNA, 125 bp, Glycine max
  unsure (1)..(125): unsure at all n locations
  Clone ID: PAT_MRT3847_46837C.1
nngcncgcgnacgtnnagcncgganattcggctcgaggggangttgaacnagccnnanangtncatgancaattcactannncanggntcngttccnaagaaaattgtacgaaatggcaataacg

SEQ ID NO: 83966 - DNA, 359 bp, Glycine max
  Clone ID: PAT_MRT3847_46838C.1
tgtatttttgaaaccatgacaagccgattttcatacagctagtttctactaacgtgcgtgctgcatcaactgcggtgggggacgggtgaccatattcgtatgccaaggcgcatgagcgaacagtgtctacaatgccagctgagtttgagattggtgctaagttgacaaccattaacagtatgcaagcatatggtctcaatccgggtaatgcaggctttccacttgctggcactgttcatccatcaatttcacatcaaacatgtatggaagtaaatggcatcagagagaacactattgattattgaacgctatcaacatagcttttgtcaatacgctattgaccttcttcgcggaggaaa

SEQ ID NO: 83967 - DNA, 405 bp, Glycine max
  unsure (1)..(405): unsure at all n locations
  Clone ID: PAT_MRT3847_46839C.1
ttgttttttagttttgggcattatctttaaacaattatcttggtttaaagctttatggcaaaagattgccttatttgttaagcaccttaatttaaaaacccttggccgagaagaattgcgttatttatcgaagactatgttcgccccacatcgatttaccttncnntacgaaaaccgtgtggtttgagtgatacaaaactccattttaaaggttatataagaaccgggacaaaccattggccgacccttctatatgatccaaaaggtcgtacccatagcatctttcacaacaattgtcccccgagaatgcaaagtaaaacccactggcccgtgttgtacaacccaccgactgtgaatgctctgccgttaccgacctctttccacttgggaaacactccccccccg

SEQ ID NO: 83968 - DNA, 281 bp, Glycine max
  Clone ID: PAT_MRT3847_4683C.1
tctcctcccaaattcataacctctaaacactatcatcctatcaacctttttcacaaattccaccacctatttctaccttaactaaacttacaccttcacctactcttaattattcaccactcccctctctcaattttcaccaccatacttacatatttaacatatacatcttaatcctaataatccataataataaaattcaatccaactataatatacatttcattccattttaaaatccatcattttcaacacaataactacctaatttcaatatcaaa

SEQ ID NO: 83969 - DNA, 127 bp, Glycine max
  unsure (1)..(127): unsure at all n locations
  Clone ID: PAT_MRT3847_46840C.1
tatattagagatggagatggtctgaaatatgaggagagctatatttcctctttatgctactggaatattgttatcgctaatttatttgaaattatagcctttttgtncaaaacaagggcggaaaagg

SEQ ID NO: 83970 - DNA, 715 bp, Glycine max
  Clone ID: PAT_MRT3847_46841C.1
atttcgtgaaattagggttttctcaccccctttcttccttcactgattctcgagatacgagagaatccagtttccttaatgatttcgtcttgtagctttgatcttccacttcaaaataatatgctatctcgtaatctccattggaacattactcttcttattctctcgtgcactcacacacccctttccaatttctccttattattgatgccccactccctttctgcctcactgattctcgaggtgagagaatccggtttccttaatgatttcgccctgtcggttggactcgctattggaccgtaaaatgattcttgggatttttgagtatataatcccaacgcctctgctgcctttcgcttttcgtgttatggttctttgtgtttgatgcccaaataccaaagatgaaaggtgttagagattgggtcttctctcaaatactatccaaatcgctggtctcgccttcaccattatctggcagtaatagtctctatgctggagagcatcggaatgaaaattttaatgagcaaggttcagatcactcagctaattcagtatcatcacccatcccttccaactcatcaaactcttcatatggtgatcagagtaatcagcatagttcctccttgcagctagtttcagatacagaaatctatcagtatcaacataacactaatggaagacggaaggatactttggccaaggttgaggaact

SEQ ID NO: 83971 - DNA, 407 bp, Glycine max
  Clone ID: PAT_MRT3847_46842C.1
agccttcagatgctattgtctctaatcagttcaatggcctcatgaagtggatgataattttccatattttattcctacgtctgtaatagaaggagaccttatcgccgtggtagaaatcactctccgcaaagaattgataccatggttgtacaacatatctgtgcccaattccaatgtgaaggaccacaacattccactgcaatggaagtccaaatcttctacgtgcatacacagggtcgtttccttagtcagttagcaagtgtgattttttgttgcaagacagatataaaaggaaacacactcttgaagcaaaaaaggcttaatacttataataaagttgatgttcaaactacaaaacattgtttggaaaattaagaaaatacaaataaaatttacttggtatctaa

SEQ ID NO: 83972 - DNA, 215 bp, Glycine max
  Clone ID: PAT_MRT3847_46843C.1
gagggcaggaaatattatactctaggtacaacatatcatttacatacagaaagggtttacatctaagggcccctgttttttataatgctgggcggggacctaagggtaaaaatacaaatttctgcaatttaacggggggggggatgaatttccaagcgatttctttgggagagccttttaataaaaaaaaacaccctggggaaaaaccaattaag

SEQ ID NO: 83973 - DNA, 464 bp, Glycine max
  Clone ID: PAT_MRT3847_46844C.1
ctgcgagaagacgacagaagggagaccatgcattgatgagttacagattgaccagtaaccaaataaaataattgctcaacaatatagaacaaaagaaatccatgcaatcaacaccatgtcagatttcttacatgtatagaaaaacacttgcactagactcaatcaaatatatgcccaaagtgtcttgaatatcacaatcaaactgctaattgttcaaggaatagaatttaattgtctcaactctcaatctgctagaattataaataaggcatgcaaatttagctcatgacaagaattttctgtccaccttcactaatccaaacagaatatcagttgagagtgttctttcatgagcctcatccaccatcacaacactataacatttgtaaacataaaataagagaacaatcataatgcctgcaaccaaaccccaaatatgaatccaatataagcccacctataac

SEQ ID NO: 83974 - DNA, 283 bp, Glycine max
  unsure (1)..(283): unsure at all n locations
  Clone ID: PAT_MRT3847_46845C.1
ccaaggttcaatcttgccatcatcaatggcctcagcaagaccttcctccaatggtcttgctgaggccattgatgagggcaagattggaccaagggatgaccccaaggttacgttgcaagatcttgtgcagaacagtccatgagggacaatgatcttgccaaaaaaatggggtgctttggcccagagtaccctaggacccaacctggtggttcatatggnacaagggagcctagntttctaaagataacaagacctatgtggatgaaggataacacagcgcacc

SEQ ID NO: 83975 - DNA, 347 bp, Glycine max
  Clone ID: PAT_MRT3847_46846C.1
gaagactggtcttggaatcgccctgcacttgattatctggagctttaccatgctgcacgtaagtcagcatgagatttaatagacatgaattaagtttcatcctctttgtacacatttttgtggtaagcttcagtttgaacacacttgattgcatctggtgaatccttcaaaaagataacaactacgaggtgaaaagccataaaagatgatgagcttcaaatagttcatttttttagcaagcaatagtgtaggctatttcatgacaattttatatatgttaggagatttgtgtttttaaattgaagagtatgtgaattgtgatattgcagaataaaaataataaagaa

SEQ ID NO: 83976 - DNA, 484 bp, Glycine max
  Clone ID: PAT_MRT3847_46847C.1
ggctcgagattaaacagaaacaaaaagtggcattgagaagaacagaacatcatcaacacaaacacaacaaaaacacccaaagaggaataccacaacggaacttcctcgttttggcctttaccctcttttttctctccttgcttttacccttaaacaacggagcgagtgtttttcctctatcgatctggtttcgttggatttggattgaactctgataatgtggtgtgcgatgggagattccggtggccattactgtcctaagaagaccgatgatttatgcggcgacgtttgtggccaggtaattatcatatctcaatatacaaggaaaaaaaaaatccatttttttaatgtctgcgtgatttttgtgagaggattttccccctttgattaatcttcgaggctttgatttgcccttttgataaaatgataaaatgattaatcctggctttgggtttgtggggggtaaaatgataaatgaaaatag

SEQ ID NO: 83977 - DNA, 398 bp, Glycine max
  Clone ID: PAT_MRT3847_46848C.1
aggttaaagcgaattttcaaattgatccaaaatccttaaagtttatgaagaacaattatggcaagcctgagttggactggcaatatgctgatgattggagcctaccgcatctgcattttaatatctcacacacttcttctttgatagcttgtggagtgactgtgggttcacctattggtattgatgtggaagagaaacaaaggaggttaaagaatgatattttagcctttgcacaacgatacttttctccccatgaaatagaaatgctgactcacatttcagaccctgaacttcggcttcaggagtttattaaattatggactctgaaggagtcttatgtgaaagcaatatcgatgggctttttaaactctccttttaagacttttactatttctatt

SEQ ID NO: 83978 - DNA, 557 bp, Glycine max
  unsure (1)..(557): unsure at all n locations
  Clone ID: PAT_MRT3847_46849C.1
cagagtaccgtacatgggctggtgtgtgtgtgtagccacgtagcaaggtaccgtggcagtggtgtgttatgccccggtttgttcgggtggcacttttggggggtggggttcccttgggcttaaggtgtaagccaccggttacaaagccaacctaacatgcaaacgtagagcatagtactactacttgggcgccaacccccccggtaacaactggcgcagcagctggctactagagcttggcaccagggggctaaaacgcagttgcttatgcgtatgaaggctaactagcacggttattgctacgctaggtggcaagcctatcggggaagaggggggtagcgcgcgtgggtataaaataaacagagggacgcggagggggattgtgagcggcgtagacccgaagagagggggccggtaaggccggttgcgagaggaaaagccgggtgtagcaaaacggacaatgncaacgtgaagaaagctagncagggccataaccgctgagatgaattattgataaaaggccgactactgtgaaatcaaactanaagacaaagaac

SEQ ID NO: 83979 - DNA, 623 bp, Glycine max
  Clone ID: PAT_MRT3847_4684C.1
ttcgcttttcttttctttttcgaagctcctaaactatatctttaactatcgatcctaccaatcgttcttttgcttcaagatttacttgtatttggttcaactgccacttcttttcgcttcaattgaaggatgatatccaccatgtctgctacaattccctgggtcttcgttagggttttctaaattgcgtctctttttattctaatcttgattccgctcatcgactttcgctagttttgtggataatgcttgttaagattaggattccatttaattaattaattaattgcttcgtattacatcattttcgctttgtaaaagttacatttatgcacgtcattataattgtttttgtccgtacttcgaaatttatatcattggctcactcgccaatttttatggttgtttactcttacagggggctttgagggttgattctctggtgtggtagcaatcagcacaatagaaaatgttttttgacggatatggatatcatgggacatcatttgagcagatttatcgatgctacccagcttcctttattgaaaagccccaaattgaagtggtgacaaaattatcatgcctccatcaacccttgaccgtctagcatctctgcatattga

SEQ ID NO: 83980 - DNA, 244 bp, Glycine max
  Clone ID: PAT_MRT3847_46850C.1
gttgaaactgcgccatctccattgctgttctctcttcttgctattataatccaattcaagaagttcgttcaacttttgtgctcaacaagtctaacataacagatattcaaattgagcataattgtgattcaaactttggtctttccctggaatgaatccattgtttgtcaagaaatttggaagtgatttttgcggttctatttaatgggctgctactgctcaacttcaaagaaaacggaagcac

SEQ ID NO: 83981 - DNA, 461 bp, Glycine max
  Clone ID: PAT_MRT3847_46851C.1
attctttttttttttgattataattgaggaactgaatcactggcaggggatttaaatactttgcaggatttcatggctccaaatttccatcctatctttgtaaccaaaaaaacaagtaagaaaagataaggaacaaaacactccgaaattgataaataacacaactaagaaacctatattgttacaataagtaaaacaaaatctttccaacagcacagatgaccctgtctctaggtactatgataatataaagggagagaactacttgaaaaacacattcagatctttatttctcagcaacattactaaaggaacccaaaagactaatcctcctatcccatattatatactggataaccatttcgtgatgaagccattccctattttacaggtatgccctgactaatcccctggtattcatgtggatccccctaaccccaaccttgaactaagcccaattg

SEQ ID NO: 83982 - DNA, 408 bp, Glycine max
  Clone ID: PAT_MRT3847_46852C.1
tacggctgcgagaagacgacagaaggggggtgggagtggatgctccaatccaatggcaatcctagtctgtgactgcgatgcacactgaaataatcaaccttatgcatcattctccagcgttgcactgccatcaatgtccaccaccatttcttcccttgcctgttctctaccacttcgccagagctatagggttaccctaggcaatccaccctcttctcctaatccataccagtcataaggcacctgtgctagactagaaacgtatacttgtgtggtttacgcatggaaacacttcatcacagactgaggactctgagctcaatgatgataaattggcataatatgacgtgaagctcgatcgagtccactccacatacctgaagacagactgtcttgcaaccatcctta

SEQ ID NO: 83983 - DNA, 797 bp, Glycine max
  unsure (1)..(797): unsure at all n locations
  Clone ID: PAT_MRT3847_46853C.1
ccaaaggtcagtccataatgaacataaaccaatgattgtatcaagggtaataaaaaccggaactaaatagtgtgctcttccaccgctgcagaagaaacaggttcacagttcaatccatatttcctgtgatcaaatccagaaaattaaaagtataaacaaagtcatacaagacatttaggtttatctgcggccaaatctaattcactattgccagaaaggcataatattttattgattcaatcttcaatcagcaacaccatggaaataaaactcatctggaatccagaaaggcataactatttattgattcaatcttcaatcagcaacaccgcggaaataaaactcatatggaacctagcatgtggcaaatgaataaatacaagtagatgattaaatcaagtggttataataaccaacaataagatagcccacttcaacagccaacccacaccatgtgagctttatttccgcggtgttgctgattgaagattgaatcaataaatagttatgcctttctggattccagatgagttttatttccatggagttgctgattgaagatggaatcaataaaatattatgcctttctggcaatagcgagttagatttggccgcagataaacctaaatgtctcgtatgactttgtttatacttttaattttctggatttgatcacaggaaatatggattgaactgtgaaccctgttcttctgcagcggtggaagagcacactatttaggtttcggttntattacccttgatacaatcattgttttatgttcattatggactgacct

SEQ ID NO: 83984 - DNA, 424 bp, Glycine max
  Clone ID: PAT_MRT3847_46854C.1
gggccgggaaaccctttactacaataactttggtgatttactaacccggctggtctattggaaaaaaaaaaagaaaattgttttactctcctcccgatgactttggatcccccaaaaagggaaaaaatttttataatctcatttaccctgggcccaacaggggttaagctttggccattcaatttccttccgtttagaaatttgattttccttttttggggagaaaaacaaaataaaccttttatttgaaaaggcctggtttaccgagctgaaacctacctcggaaattgcctttgagaactttttagggtcggctcctcccgtttttggatcaaacctggtttttacttgtggtttcaaaagccagccccctggcttgggcggtctggacgattcttcggggggactttgggaggtgggtccc

SEQ ID NO: 83985 - DNA, 360 bp, Glycine max
  Clone ID: PAT_MRT3847_46855C.1
ctgtcgcgtgggcttctatcaaacactatcttctctatggatttgattcactctacaggtaaagcacaatagttcatggacttggtgaccaatatcacaaagctgggtggaacaccaaacttggcagaattttattcagaggtgaagacggttgatccacatagcatcaaaagacgacagagtaagaactctacaaaggtgttgcacatgtatcaccacctggttagccaaaggttgccttttaaggatggcgggaaatgtcacaatgacatgttagatgccatgctaaaaaaagcaaatgatgacaagttcaggggcaggaatatgatagaacatgactcacaagagctattcgttgcg

SEQ ID NO: 83986 - DNA, 173 bp, Glycine max
  Clone ID: PAT_MRT3847_46856C.1
gttcttcgatgcgatcaagatgcattttccgatggggtaggacatcaagcacctgagtggtttctgcggcggcctccacggagggttgaacaagcttgcggagttgttggaggttgagaggtctgccgtgttccctcgctctggtgctccctctccctcggtgctttgccctt

SEQ ID NO: 83987 - DNA, 445 bp, Glycine max
  Clone ID: PAT_MRT3847_46857C.1
gagcgagaaaaacttgcacattattgaaaaattaacacaatgatgctgggctagactaaaaaggttttatattccacacaaaatattacatatattgggtgcaaaattgatactcagctacctagcaaatgaaacgcaactaactgctcacagagaaagaacaaggcccatggcctgtacttcttatatactcaaccctactagaactcctaaaaggtttgaaattgagctgcactagggcattaactggggtcttttcacttctactattagtggaaaccaaggaataagcaaaccttgcttgagcacaagctatcatcctctaactttaaacctgcattctcttcattgccattcaatgttttgttatgaggcgaatctcccaaacttgaatctctcacctcttcacgcttgaacctggacataaatctgggacgttctgcct

SEQ ID NO: 83988 - DNA, 408 bp, Glycine max
  Clone ID: PAT_MRT3847_46858C.1
agtttcaatttgcacttaatggtaacaagttttatgacaagctgttcagtttcaaacttttaacctaaagcttgagagattataacttctttaagaaagaatagatttcaaataacttgtttcttttgtgtgtgttttgaccatcctatggaaagaccttccaaagaaaatacacattggaagttaaaattgtttaaattaatatgtgaccacaattttatttccatgttgagttgggttgcttctggtaaaaggttttgtttatcatttggcagagacaggttaaacattttgtactttaattttttttgtttttatatttcttttgagtttttggttgataatgcatgtttcactgatttgtttggactttggaatctattaatatacaggtacaaggcagagatc

SEQ ID NO: 83989 - DNA, 316 bp, Glycine max
  Clone ID: PAT_MRT3847_46859C.1
aggaaaggccggaattagaaataaaaatgggcttcccttgctggaacaggtaatattttaagacaacaaaaaagggatggggccccaaaaaggaattccgggagaaccaaagggtctaccctcttcccttggtctcccctgcagtatagagatatctcggggtgccgcgctttacatttgcttcaaactcaagggaaggtcaccgcctatggggtgcgggggaaaagcttttgctatctattctctctttatctctggaattatgggaccgcttaattacatggggcaaccttgtcaagggcatctttccgtggat

SEQ ID NO: 83990 - DNA, 434 bp, Glycine max
  Clone ID: PAT_MRT3847_4685C.1
aattcggagcaccactgctcagtatcttggaaagaaagtagcacaagccaaagatgctactatggaaactggaaagagtgctgcaaaagtggctacatatttgagggacaaggctttgtccacagggtggagtggtgcacagtattctactgagataactatggagggaaccaaggttgcaaccaatgctgttatgggagtagctgagtatgcaggccaaaaggcttctaaacttgcaggtatgtcagtggatactgctaaaggtttagctgctatagctgggagaatgccaaggagtactctgcaaaaaagaaggtggatgctaagaaggatttggaggccaaaagggaagctcaaaatgaggtggttatttttatcaatggctcttctagtatgtgtaggtagagaaagcaagaccaatggaagctaaatga

SEQ ID NO: 83991 - DNA, 681 bp, Glycine max
  Clone ID: PAT_MRT3847_46860C.1
cgatgccatggccaagcgcgctttcctccaggttttggatgccgttgaatactgccactctattggaatctaccaccgggacctcaagccagagaacgtactagtcactgaccaaggaatgacttgcaaacttgccgactttggacttgccactaccgaccacgtcacctctgactttggatgcggctcgactttctacatgtctccagaatgccagacatcggcacccaaggcctactcatgctacgcctcagcgcccaacgatgtttggagtctgggagtcatgcttgtcaacctcacatgcggacgcaacccatggaagcgagcttctttcgaggacagcaccttccgcgccttcatgaaggaccccaagtttttgaggaccatccttcctgtttccaccgagctcgacgccattctcaggtgcatgttcgagttcaaccctgccaacagggcaaccattcccgagattcgtgagatgattctccgatgctcatctttcactgccacaaagtcagcggtcgcaacgcctctgtcttctcctcctttcagcccagtggactacagccgggatgccgcatacaacgcctactaccaggctcctgcggtaccccagtttgctcctctcccggctcagcctacgccccatcacccttccagcactctacctcatctgggagc

SEQ ID NO: 83992 - DNA, 292 bp, Glycine max
  Clone ID: PAT_MRT3847_46861C.1
tttatactttagaagggggagatggattcaaactatccgtttccttaaagtggagcccaagcaaagaattttagtacactggtcaggttgttagatatgaggataacttttactcaaccacctacttggttttcatcatcatttttactttttagatcctcactttaacatttattttttctttctttatttttaaatataatattttttttttttttatattaaagcaattttttttatttattttctatcccaatttttatttttttttttttatatatttttttttttt

SEQ ID NO: 83993 - DNA, 530 bp, Glycine max
  Clone ID: PAT_MRT3847_46862C.1
ccatgcgtccgcttagcttagttcggtggttgggggatgccagtgtgtctgtggcccccaaaagccatcaacgaaaccgcatgtcggggaattcttctcattccatagttcgagtggtaccagatgagactcttcacttttgttcagagcattctcttgaagataaaaaggaagagaaaatgaggatgaggaacaaatacaggaaaccaacaactttacgttgcaatgcagggagcagatgttcaacgtctgttgtggtattgagcttgttaggatgcttatatttgcttcatttttatacccttattcatcacagagatagaaatggtgaagagtctctattgcgtattagtaatcatccccaattccgtgaacttcaagaagtggaagaggaagatgttcaaatccccccaccaaggggaaagaggttccctcgggcagcaaaacgcagacctaaccggacaaccacgctgattgatgacttcttggacgaaaattcccaactaagacatgtgttttttctggtaaaa

SEQ ID NO: 83994 - DNA, 327 bp, Glycine max
  Clone ID: PAT_MRT3847_46863C.1
ggtccccaccccccaacctatatgactctatacttcgcaacaaatacatttgttgaatgaataggggcaatgaaaacaaaaaaaaaaagggcgaatgataaaattagggtgtttcccaaaacatttttaggccccactgggtcagaacaaacaaactcatgtggacccagccccgtgggtccaacgacacaatccggcaagggttaaccctgaggatatcccaagatttgggccgcaaaaacatgggccagctaaccttgggagaccgcctattctataataggaagaagaaacactaaaggggaaaaagcgggaatttcggctttc

SEQ ID NO: 83995 - DNA, 241 bp, Glycine max
  Clone ID: PAT_MRT3847_46864C.1
ggctcgaggttatttcataatgagctaataggttcatttgactattagagtgtcaatgaataaaagaagccatggagattcataactcagctcgaagcagcattggtccacctgtgagcattggcgttctgcttgctgtaccttcctgagttgccaaagatagaccatcagtacatgtgtaaccatagtacttctggtgacgctgtggcattataaagatgtctcataaagggaaacccca

SEQ ID NO: 83996 - DNA, 279 bp, Glycine max
  Clone ID: PAT_MRT3847_46865C.1
cccacgcgtccgcctttgaacttgttttgttgctagacacccttgtacatttctctgtgtgcatctgtaatatcctctgcaatgcaaaccactagttgtcaatttttcggtaaaaaaaaaaaaaaaaaaaaaaaaaaaaaaaaaaaaaaaaaaaaaaaaaaaaaaaaaaaaaaaaaaaaaaaaaaaaaagggcggccaatagaaaaaaacaaaaaataaaaaacacgggcatgcgacataaaaaaattttttataaggaaaccctaaattcaatggggg

SEQ ID NO: 83997 - DNA, 345 bp, Glycine max
  Clone ID: PAT_MRT3847_46866C.1
gtaaactggaaattttagtgagcacaaattgaagaaggtttgctaatgtagatgagaaccgtctttaatgtagtgtgtttgggtgagtttttaaaaaatgattttgactttgcaaaattgatttccaagcaatgtggtttatgtttcatgtttcgatgtttttatttcaaaagcaggatacgatttgttatccaatgaagttatctataattgcttcaacgcaatcaattatggactcgtggatcattttttttaacataaaactaaacatatgaatatttacttaaaatcatcttagctagtacttcaactagacatgccattacgaactttacaatgcacaac

SEQ ID NO: 83998 - DNA, 122 bp, Glycine max
  Clone ID: PAT_MRT3847_46868C.1
gggacaggaagaactaacctaaccgatgataaacacaactactaaacccctaacgtgtattatccatagcaacgctctcttggagataacctggagccaaggcgagtcataatggaaacaac

SEQ ID NO: 83999 - DNA, 286 bp, Glycine max
  Clone ID: PAT_MRT3847_46869C.1
cccacgcgtccggagaatcgggctgactgtttcatttgctctgaattgcaaattaaccagcacgcgggttttgaatacattctagagcatcataaatgttttattgcaccagctcaatccagtgatgtacggcgctcacctggtattatggaatataatatatatgcatgcaactcggcaatatgggttgcagcgggcttgatattccttggaggcgtcatatctaataaggctgatatcatttgccctttatctatatatgtacattatttcgaaatattttcgt

SEQ ID NO: 84000 - DNA, 597 bp, Glycine max
  Clone ID: PAT_MRT3847_4686C.1
acgagaaaaaattcacgttaggaaaagaaaatctagaagcagacatgtaagcatggaaaacaatcagtcaaatatcagttcagaagatgtaaaagataattcaacagaaggagttggaggtgcttctggggaaactgcatcagatatctgctgctcttgtagtaaatcttcgtcatgcaaggcaaataaatgcaaatgcagaactctgggtggcacttgtgggagttcttgtggttgcctagcatccaagtgtgccaacagatcatcagtctcaaatgaggcacaagttgaaggggctggtaatgattccagtattgacgaagcagacaaagatcggcttcttgttgctcaaggtgctgagttgcttcagggtgcactggttgaggggcctgctgaggtgcacagtgatcatgggccaagaaagcctctttcagatattggaaatacactggtgcgtgtcagtcattctttgaaaagggaagtccctaaataaatgatctaatcaaacctctctctgtctccccatggggtgttttgtcgtgtgcttctgctgcgtctatcattgatttatgtctatcattacatgtgaactggatg

SEQ ID NO: 84001 - DNA, 714 bp, Glycine max
  Clone ID: PAT_MRT3847_46870C.1
ccacgcgtccgtgaaattgggcagcctcctctcccggataaaaactttttttttttacctatatgttttccatttaggactctagtatcccaaagtttcatgtttgagatgcatttatattatattattttgttttatttttttataaagagttgcattttttcttttcacctttgactaaaaagtgcacaaggttattatagtttcttttaatttcaatatctcttcacttgtttcatggtttgcaatttatattctaagtttttaatgtaagaggtgctagcacttaagtataggataggaatagttggccaaatgaaggaatgaatcttagcatcatcacacctatttcaaaagtctcaggtttgtgttaattgtgctacgagcttatttgtaatattttatgttcctagaaatatattgatttcttgtgaaattatttagacaatttatcaaaggctactctaaaaatacattggtatatttagaaagatatttttaaagaaactaataataggtattgattttaaatttgagtgttataaggggaataagtttcttggaataagtgagtggttgattctggtggtatatgtttgattctccttaagcaaaatctagctaaaatctcttataggagagttagctccacaatgttggggatgctgctagtatgaacaagattgtttctcgtagagatacttgggatccttg

SEQ ID NO: 84002 - DNA, 662 bp, Glycine max
  Clone ID: PAT_MRT3847_46871C.1
caatgtgtatatgtgactttttttattcctgggaacccaaaccatttgcactatctcaatcattattcaatataacctaataatgaatgaacatattaattgaaccatgccagcacacattattgcaatgttttaccccctcaaatttaaagtacaacaccaactacaaaactagcttagaaggcaaagatgccagcgacggcaacgacggtgacagcagtagagaatcgaagagcagaggcaccgctggtgacatcggccgggtcggtctcctccggggtggtgaaggggtcctcaaaaggctcgggctcaggagcgtagagctcgatggggtcactggccggagcaggcgcagttgagatgtcagtctcatctgatgaggtaggggatggaggagaggataacggagactcagctgatggggcaggtgatgattttgatgatgaaggagatgattttggtgaaggtgaagcctttggggatgcagatggggcctcattagccatggccatgccaattatggcaacaaaaatgagtgcaagaacaagttgacgtgccatttttttagggttttgtgttttttgtgttttctaggttgttgttcttgcacgagaggattcttatatagagtaattacagttattctccggacgcgtgggcgc

SEQ ID NO: 84003 - DNA, 290 bp, Glycine max
  unsure (1)..(290): unsure at all n locations
  Clone ID: PAT_MRT3847_46872C.1
caatgatcaagcnaanganctgaagcaaagtaacaatttgagggtagtatatanatctcaaacananagggtgaacgctattgtttgtcagttcgtagccgttacttnagatggattcaagattttagtncatnagnacaanaatttcaccatcactctatgaaacaatggtcatctgtatgtaatgttccagccaaggctcttgtnctggctctagatgtcttntcaggnaatgtgttgtggcagagaagtatngggccattaagcaaagtngantctgcacctgtagt

SEQ ID NO: 84004 - DNA, 426 bp, Glycine max
  Clone ID: PAT_MRT3847_46873C.1
acgagatttgatctactctcctaactgggttttctaaaaaccacctatagtaatattatagcatcttttctaccataggtgctatcccaactttttctccaattcgtacatttctaatcctatcttgtccagtacatccaatgtaataatctcatctctactacattgagttgattctttttgttagctttttatggcacggcatttagttccacactacattgcatgtcttatatttggatggtaaaattttcctttggttttaagtggtacattctggcataaataaaattttccatttcattcttcctgcatgaatcctatggtttacgtccacatatttctccattgtcttgcatgatggaccctagatagttaagctgtgacttgtggtggaactatctaaaagttcctatcaaatacaag

SEQ ID NO: 84005 - DNA, 188 bp, Glycine max
  Clone ID: PAT_MRT3847_46874C.1
caaacgccgggaacgaggattgggcggaggggggggagaactctgctctgcaatttcagcccgctatcacaacaccacgggataatcttgctcgcctgcccctttggtgcatgctgctgggacactatcttagagggcccgagctgccaattggagacgacggatatgctttccttgacaagtgatgc

SEQ ID NO: 84006 - DNA, 307 bp, Glycine max
  unsure (1)..(307): unsure at all n locations
  Clone ID: PAT_MRT3847_46875C.1
aaagaaaaaaacaaatttacattaattttattttcaaaacaaaaaaaaaaaaatgcatcgtttttatttaaaatgcccccaccaacaacaccacaanaancatccaattctatttaatcaattcctctaattttatacctttaaccattatcaaccttcttcatattcccttctccttcaactcataacactaatatttcttttccaaaactaaaaacacctcaacaccaaaaactccaacaattatcacatacttttacctacacacaaccatacattcaacctatatcttccatctaaaccctcc

SEQ ID NO: 84007 - DNA, 1971 bp, Glycine max
  Clone ID: PAT_MRT3847_46876C.1
tacggctgcgagaaaacgacagaaggatttgttgagtaggtacccgagtgaggggcttgtggaggaacagattgaggctaaggacatgctcaacattcagcgttaggttggtgggtgggttggtttgttcttgccaaggtttttgaaatgcagtcacaaggtttttgaaatacagtcacaattgcagtaagccaaaacaaatactaccatgttgttaatctactctttttatcactcttcctctttcgggggcaagttcaattcttcactcttttttttttttttgctgttagttcggtgaatcatggcgaacccaatcgacggtggcgagttcgagtgcctttccgggttcggcaaccacttctcctccgaggccctcgccggagctctgccgggcggcgcacaacagccccctcgtctgcccgtacggactatacgccgagcaaatctccggcacctccttcacttctcctcgcaaccgcaacctcttcagttggttttatcggatcaaaccatcagtgactcacgaaccgttcaagccaagagtaccgggtaatgggaggattttgagtgagttcaacaactccagcagttctgctaacccaactcagcttagatggaagcccatggatgcacccgattcgccaatggatttcattgatgggttgaattccacatgtgtggttctcagctccttcatgcgccacggatatgctattcacatgtaatggcacgctattatgttccttattggtatgatttaaacaatttctgtccttataatacagttctttttcttttgcttgattttcttttttttccacccagatggctggtttctgagcatactttccggcctccatattatcatcgcaattgcatgagtgaatttatgggcctcattcatggtggttatgatgccaaggctgatggatttcttcccggtggtgcaagtctccatagttgtatgactagtgttggattggataaatgtaattaaaatataatttaggtgtgtcaaaagtgaactcaacccaattggtgggaatcaaatggtttcaggcaagttttatgtacagtgcaagggactggaatctttaagatctgtcctaaagagggtctgtgttaatcacaatctataagttaggttgtttttggttgtgcgttattttcatgcaggattcctaagaagtaggagctcataacttttgatttaacaatcatttgaaatcttccaacggaaaacaaacgtttattaaataataatatatattttaaacacaatttgtattcttctttatctaatgggtgttgtgccagtcagttatttttcttttgtcattgattttctttttttttttgggttggcttggtttcttaatcagaatggcataatttgtgagctttaagtctctacaattataatatgatgccaatgccattgtttaatgactataaattgaaataatatatattttagttgatgataaaaaaaaaaaaaaaaatgatgattgtatcgcggcgtgttgagagaggatctatccaattccacacgttggatactcactcataccatacttggatcaggctagggtttataatacgctgctgatcgaaaccactgttgctattgcagttgaataaactttgatacccgacatcattcaatgcgccctaaacttacccttcttcgatcatgattattaccaatgttggcttggcctgaaatctcattttacagttactgacacatctcctgataacacgaactagcggaatggacagtcaggagtgaaatgggtgctaaaagtgaacttaaccaatagattgtggaatggactattagaccaccaaaagattgggttgttttgtacatgtaatctaagaaatattatcgagtctaatgcttatatactatatattggaaaattattttatattatcatttaattataaattattcattgaatt

SEQ ID NO: 84008 - DNA, 421 bp, Glycine max
  Clone ID: PAT_MRT3847_46877C.1
tacggctgcgagaagacgacagaaggatctgttgagtaggtacgcgagtgaggggcttgtggaggagcagattgaggctaaggacatgctcaacattcagcgttaggttggtgggtgggttggtttgttcttgccaaggtttttgaaatgcagtcacaaggtttttgaaatacagtcacaattgcagtcacaatttgtattcttctttatctaatgggtgttgtgccagtcagttatttttcttttgtcattgattttctttttttttttgggttggcttggtttcttaatcagaatggcataatttgtgagctttaagtctctacaattataatatgatgccaatgccattgtttaatgactataaattgaaataatatatattttagttgatgtatattaacacctgatttattattta

SEQ ID NO: 84009 - DNA, 700 bp, Glycine max
  unsure (1)..(700): unsure at all n locations
  Clone ID: PAT_MRT3847_46878C.1
ggaataccgctcgaccacgcgtccggacaactgagcctgttgctatattacgattcggtgaatcatggagaacccaatcgacggtggcgagttcgtgtacctttccgggttcggcaaccacttctcctccgaggccctcgccggagctctgccggtggcgcagaacagccccctcgtctgcccgtacggcctctacgccgagcaaatctctggcacctccttctctttttctcgcaaccgcaacctcttcagttggttttatcggatcaagccatcggtgactcacgaaccgttcaagcctagggtacctggtaatggcagaattttgagtgagtttaacaactccaacagttctgctaacccaactcagcttagatggaagcccttggatgcgcccgattcgccaacagatttcattgatgggttgtccactgtgtgtggttctggcagctccttcatgcgccacggatatgctattcacatgactccttgtcactactgaatgtggaaggttgaaaggttctccaggtgaaattgctatattacctcaaggctttcgtttttctgtgaatcttcctgatggtccatcccgtggttatgttgctgaaatttttggtactcattntcaacttcctgatctgggaccaataggtgctaatggccttgcttcccctagggatttccttgntcccactgcttg

SEQ ID NO: 84010 - DNA, 719 bp, Glycine max
  Clone ID: PAT_MRT3847_46879C.1
acaaattctgcccttataatacagttctgtttgatcatagtgatccatcaatcaatactgtgttgacagcaccaactgataaacctggagtggcattgcttgattttgtcattttcccacccagatggctggttgctgagcatactttccggcctccatattatcatcgcaattgcatgagtgaatttatgggcctcattcatggtggttatgaggccaaggctgatggatttcttcccggtggtgcaagtctccataattgtatgactccccatggtcctgatacaaagtcatatgaggctaccattgcacgaggaaatgatggaggaccttgtaagatcacggacacaatggcttttatgtttgaatcgagtttgataccccgtatcagtcaatgggccctggaatcaccgttcttggatcaagattattaccaatgttggattggcctgaaatctcattttacagttactgagacatctcctgaaaacacgaactagcggaatggacagtgaggagtgaaatgggtgttaaaagtgaactcaaccaaaagattgtggaatggacaattagaccaccaaaagattgggttgttttgtacatgtaattaaagaaatataatcgagtttaatgtttatatactaaatattggaaaataattttatattatcatttaattataaattatcatttgaattacttttaaaaaaaaaaagaaa

SEQ ID NO: 84011 - DNA, 724 bp, Glycine max
  Clone ID: PAT_MRT3847_4687C.1
agaactgagcgagatcatcaagttgccgaggctggaaacaacgagttacgagctggggaacgagtttgtgttcatggactcgcaggacgcgtggatgtatcagccaccgataccgtggttgcatactacctacgacggttctgatgcagatgagtttgtagtgccagagagtggggttgtgactagttttgagagttttctgtgggactactgagatttcttttcttttcttttctctgtttctgtttctgtttctgttttttttccttttatggatgcttttgtgatttgacaaaatttaagtggagtatttccaagtgttttggtgctggtggtttttaattaaaattagagttttatcataatgattattagtgataaaactcaagttttgattaaagattcacatcaaaactactgcataaaaatactttgcctaaattttgttcgttagtacgttctttattatttataatgtagcttactattgttttctttcttttcttctttttttcttaatttggctttgtgttctaagccctttgtggttttttgttgaggggtttgacactgctttctttgtttgattaacgggtttttgtctactctgtttgtttgctgtgtattcgatatatgtttttcttctgaatttaatcctaaatgtttattactgaggcaaaaaaaaaaaaaaaaaaaaaaaaaaaaaaaaaaaaaaaaaaaaaaa

SEQ ID NO: 84012 - DNA, 716 bp, Glycine max
  Clone ID: PAT_MRT3847_46880C.1
caactgataaacctggagtggcattgcttgattttgtcattttcccacccagatggctggttgctgagcatactttccggcctccatattatcatcgcaattgcatgagtgaatttatgggcctcattcatggtggttatgaggccaaggctgatggatttcttcccggtggtgcaagtctccatagttgtatgactccccatgggtcctgataccaagtcatatgaggctaccattgcacgaggaaatgatgtaggaccttgcaagatcactgacacaatggcttttatgtttgaatcgagtttgataccccgtatcagtcaatgggcctcagaatcaccgttcttggaccaagattattaccagtgttggattggcctgaaatctcattttgcagttactaagacgtctcctgaaaacccaagcttgggaaatggagattgaggagtgaaatgggtgttgcgacacaggcagttagaccaccaaaagattgggtttctttgtacataaaaataaatgtaattacaaaaatataatttaggtgtgtcaaaagtgaactcaacccaattggtgggaatcaaatggtttcaggcaagttttatgtacagtgcaagggactggaatctttaagatctgtcctaaagagggtctgtgttaatcacaatctataagttaggttgtttttggttgtgcgttgattgaaaaaagtaaagtag

SEQ ID NO: 84013 - DNA, 759 bp, Glycine max
  unsure (1)..(759): unsure at all n locations
  Clone ID: PAT_MRT3847_46881C.1
caaaacaaatactaccatgttgttatctactctttttatcactcttcctctttcgggggcaagttcaattcttcactctttttttttttttttctcttagttcggtgaatcatggcgaacccaatcgacggtggcgagttcgagtgcctttccgggttcggcaaccacttctcctccgaggccctcgccggagctctgccggcggcgcagaacagccccctcgtctgcccgtacggactatacgccgagcaaatctccggcacctccttcacttctcctcgcaaccgcaacctcttcagttggttttatcggatcaaaccatcagtgactcacgaaccgttcaagccaagagtaccgggtaatgggaggattttgagtgagttcaacaactccagcagttctgctaacccaactcagcttagatggaagcccatggatgcacccgattcgccaatggatttcattgatgggttgtccaccatgtgtggttctggcagctccttcatgcgccacggatatgctattcacatgtacaatgccaacaaatcaatggacaattgtgccttttgcaatgctgatggggacttcttgatagttccccaacaaggaagactccttatcactactgaatgtggaagattgaaagtttctccggggtgaaattgctataatacctcacggtttttcgntttttctgtgaatctgcctgatggtccatcccgggggtatggtgctgaaatttttgggactcattttcac

SEQ ID NO: 84014 - DNA, 709 bp, Glycine max
  Clone ID: PAT_MRT3847_46882C.1
gggagggaagaagttcaattctttactcaaactttgtgttcactctttctcttttttggtgttagttcggtgaatcatggagaacccaatcgacggtggcgagttcgtgtacctttccgggttcggcaaccacttctcctccgaggccctcgccggagctctgccggtggcgcagaacagccccctcgtctgcccgtacggcctctacgccgagcaaatctctggcacctccttcacctcccctcgcaaccgcaacctcttcagttggttttatcggatcaagccatcggtgactcacgaaccgttcaagcctagggtacctggtaatggcagaattttgagtgagtttaacaactccaacagttctgctaacccaactcagcttagatggaagcccttggatgcgcccgattcgccaacagatttcattgatgggttgtccactgtgtgtggttctggcagctccttcatgcgccacggatatgctattcacatgtacactgccaacaaatcaatggacaattgtgccttttgcaatgctgatggtgacttcttgatagttccccaacaaggaagactccttgtcactactgaatgtggaaggttgaaagtttctccaggtgaaattgctatattacctcaaggctttcgtttttctgtgaatcttcctgatggtccatcccgtggttatgttgctgaaatttttggt

SEQ ID NO: 84015 - DNA, 717 bp, Glycine max
  Clone ID: PAT_MRT3847_46883C.1
acgcccacgcgtccggggagggtgcacgttggcatcatcaagctataaaagaaaagaaaagaaaaaaagaaggttggagttagatacacacacatcacaaaaagaaaaaaaaaaaaaagaagctacattgcttcttgttggagacatcaaacatggcaactggtgccaccccagatggattattctggtcagtgtatgaagggtgcatatcctgctacgataactgcgtcgagcgacgaccctaccaccgtaactgtggctgtgcactccataacaagtcacttattaattgcacgcacaagcttccaaggtgtaacaatgtgtcataccctatgaggagggcatggagtgaaggaagcttggtcttggcagcttcttcttcttctccttctcaagttgcaactgggggaaggccacaaccaagtttggcaaacgttgaggaggaaaataagaattgctttagttaaggtttgacaataattaatatgtttgataaaactctgttttgctcttcttttcgttttattagtctgaatccggtttagccgtttaggtctttttcttttcctttctttctctttttgaattaataagttgatttgtagaaaggttgtcgactgtttgtaacatgctattgtggttcatggactatggtcgtttcttagcttccgtatatgataatacaactcaatttattgtaaattgtaattatgctct

SEQ ID NO: 84016 - DNA, 924 bp, Glycine max
  Clone ID: PAT_MRT3847_46884C.1
aagacgacagaaggggataacaatccctattaaaatcttctaaaattaaattaccatatatagtcacattttctttacactttgtgaggtctaaaatgttgtccatttttcacaaggggtttgctcacccacctgaagagcttaaaagccctgcatctaacagtggctccaacaagcctaagattcctgaggaaactctaagagaatttctttctcatcatccccataacactttttctctgagttttggtcactctgctgttctagcttatactcgtcctgatccaccttcctttgttcatcaaaggttgttttgtgggattgatgacatatactgtatctttttggggagcttgaacaatttgtgctcactcaacaagcagtatggtttggcaaagggcaccaacgaagccatgtttgtgattgaagcttacaagacactccgtgaccgtggtccataccctgcagatcaagttgtgaaggatcttgatggcagctttggctttgttgtctatgacagcaaggttggcagtgtctttgcagcactgggttctgatggtggaattaagctgtattggggtattgcagctgatgaatctgtggtaatctcggatgatctagatgtcatgaaagaggggtgcgccaaatcctttgctcccttttccaccagggtgtatgtttcacagtgaaggaggattgatgagctttgagcatccaatgaacaagttgaaagcaatgcctagaatagacagtgaaggggccatatgtggagccaacttcaaggttgacaagtacgcaagggtcaacagcatacctcgagtaggaagccaggctaattggatggaatggacccagcattagcccaaaaaataaaatagtttaaatgtggatttagtttttataaatataataaatttttgtttt

SEQ ID NO: 84017 - DNA, 1078 bp, Glycine max
  Clone ID: PAT_MRT3847_46885C.1
ccacgcgtccgcttatactgcgtcgcttcagcacagaagtgaccagttattatctgttgctgatggtgaagaaccatctttacattttagatggtggtatattgttcggcttttgcaatggcatcatgctgaagggcttcttcttccttctcttatcattgactgggttttgcgtcaattacaggaaaaacaattgcttgagatttggcagctgctattgcctattgtatatggctttttagaaattgttgttctatctcaaacatatgttcatactcttgctggtgtagctcttcgtattattcgtgatcctgctcctggtggatcagacctcgtccgcaattcccggagggcatatacgacttctgctctgattgagatgctccgatatttaatatttgcggctccagagacttttgttgctttggattgctttcctttgccatcctctgtagtttcacatacaataaatgatgggaattttgtactgaaagcaactgaagctgcaggaaagataaaaagtagttcagaagatgttgtgtgtttatttagaagtaaaggatttgatgcacaattccagtcattggcatttgatcatgtcatttcgtgcattcaagaacgtgtagaagatctcacaaaggctgtaagcccaggctatccaggtcaatgtctggctaaagcttcacaagccttggataaatcccttgtacttggtgatatacatggagcatacaaatttctttttgaagatctttgtgatgaaactgtatctgaaggttgggttgcaaaagtcagccattgtttaaggttatcgctgaagtggtttgtgactgtaaataaatcacttgtttattcagtgtttttcctgtgtgagtgggcaacatgtgatttcagggattttcgaaatgctcctccttgtgacgtaaagttcactggcaggaaagatcttttcccatgtccatatagcaattagacttttaaagatgaagctaagggatatgcagatttcaccaaagcataagagtggaagcactccggggtcattggagtcagttattttagcaaaaatgttcaagtc

SEQ ID NO: 84018 - DNA, 315 bp, Glycine max
  Clone ID: PAT_MRT3847_46886C.1
attaaatgtacagtctctttcttcatagcatttggaaatttggctgatgataccatcaatttggaggcttttcctcacaagctggtgcagtttgtgagagattcatgaaaaagttgtatcgaaattttcacaagatgaatttcttacagcggtgtcaactaatgtgcgtgctgcaataactatttttttctaattgttgtacatatttgcttgcttttatgcaatatattgcatggtatattactgaagtgatgacgagatcaaatttaatttgaatattgatattgctttggagcatttttgagcaaatgaaca

SEQ ID NO: 84019 - DNA, 476 bp, Glycine max
  Clone ID: PAT_MRT3847_46887C.1
agaaaatctctaagttaggaaacatagatttctaggaaatgattgatagattatcgatccaactatccttattaaggaaagaaatcaaagaaaattttttgagttgtaattgatttgatgttttatccacttaacatgcgttgtagtatcggctcctagtcctttacaatcaacttcggcatatgaaattactcttacaaaaatttatttaaaaataaaataaaatgaaaaagattattaaaaaaattatgaatattattttttgaagtatactctaagagataatatatttatttaaacttactcgtgaccagtaaaagtccatgggttccatccttggggagtcatcacagaggaaaaatatgttccatgaaatattatcctcgagtaagcacaccaaactattcctaaatttacctttccatcccaaaaaagagaacctgcctcaaacacaaagatgttttgatcaatggatg

SEQ ID NO: 84020 - DNA, 251 bp, Glycine max
  Clone ID: PAT_MRT3847_46888C.1
gaagcccaagcgcaaacccactcaggtccaccgtcgccgttccaagcctgttccaacaccgttctcccgccaatgtccaccccaatttccccaaaacaaggtccgaattccttttcagccccaattggcttaaaacccaccaggattaaagccaaaattgttccctcaccccatgaaaatggccatcattgagaacccaaaaaaccttgcaaccttaatgaaccccttaaaccttccttcaagcccaaaaa

SEQ ID NO: 84021 - DNA, 280 bp, Glycine max
  Clone ID: PAT_MRT3847_46889C.1
agctcggaattcggctcgagagggtggaagagaacaatggttgtctcatgttgggatggcacacttttcccttgattgccacctcctcatgacagggggcttcatctaggtgaggggggtggccgaatccttaaccatctttcattttttagtttaaattctataatactatctatccatgcccaccgaaaaaaaaaatgtaactagcctttaccactggtcagtgaacaaaagatctatgctgaactgtgagcactgatttcattacactgatacccat

SEQ ID NO: 84022 - DNA, 1859 bp, Glycine max
  Clone ID: PAT_MRT3847_4688C.1
gggagaggtattcgtgctcacattgttcgaatgctgtgaagaaaggaggggagagtccgacagtcgaggggaatgggaatgtgttggggaagaaggatggaggattgaggactgtggtgacactcattggtgcgccaaattggctggagtgcagcgcgctggcgaaggtggctgtgaatttgtctgagtggagtgatgttaggcctgggatggattgcgaggttcacccgtgtgcccttcgcgataacttgccccgcccaatggggcacttttatgtgatttctgggttctttgtggtgtaccggtttttcaatttgactgcagaggccacacttgaggatgtgttggagaaggggagggagttctgtgagaagagatgggatgttgcgaggaagagtgtcgcccctcaaccgtttattgagcagtattgcttcagggcaccatatattgcatcgttgctgagggagggtttgcacattactgataagcatataactgttggctctggaagcataacttggactcttggggtggccttgttggaagctgggaaggcgtattcggttaggtttggactccgtggtttttacttgcttcagatgaagatgaatccgcttattcttattcccattttgatactttctttcattcttctgctttgtgctttgtcgtgggttgtcaattggatgccaagatttttccggagacagtatcttccatttttcaggcataacagtgcgtccagtgcatctggtattaatatcccatctcctttccggtttcagcggtggagtcctatgaattctggagatggaagaacaaagaccccactcagcccaacaattgcaggttcacaggatagaccgtttagcctggggcatggccttagtgataacagtggaaacatccagctgatggaatcttcctttcacccatcagctagtagtgtctcacatagttattcctcgaacaatttagggcagatgcagttcgacagcagtagtataggggcattctggtcacctcacagaagtcagatgcatctgcagagtagaagatctcaatctcgagaagacctgaattcttcattggctgagacacacatggtgaaggcttagggtgtgatcttctgaaaactttgcgtttcagtttttgtcatggagatgacgaccacggggctaaagaagagttggcaagattgtttaattccatactaatttgcttcttctggatctcacttctaaactgatttcctctacaagaggcatagcacaacaaacaagaactcacattccatcattccttaccactctcctttagtggctactgagtgtccatgttctgccgtcgctgtacagttttccggtgaccataaaagccttcagatgtttaaagtttcaaagtcagctgagcgcgagaagcttttcaaaccgtgaagatcaatttatttgtgactattttcataccatttttagactaataaacctccattactacagagaatatccctttgtttcataggagacttttgactgggaaaaaagcacttggatgctgtaacagttaaaccgctaagaaaagttgtaatatgatacaatctcatatcttacatgtcaaaataagcttattaaattactcaattcagttgcaccttgcaagctacttaaaaaaaaaaaaaaagggcgcgcgagacgccgaccctggaattaagttttgatgattttagggtgagaaagaggtttctttttaagaaggttttaaaggccaatgaattgtacaaagagtagagcatacatttcccttgaaccacgggcccttatttatcaatctatgatttccggttctatataagtcagagg

SEQ ID NO: 84023 - DNA, 1008 bp, Glycine max
  Clone ID: PAT_MRT3847_46890C.1
agaatgaatatgacctaaattttttgaacttttgagaatttgaaaattttcagaaattgctgtgtgggagtaaaagctcattgtcacggtggacatgtgcagatattagaattttgtcttacggcaccaactgtacctatagaatttgctggacaaaaggaatctaggaagtgctctctttcacaaataatggggaaatcacgaaagtactcaaaaggtcatgccaccggttttgttccagattttcgccatgctgttgagactatgggtgaatcagaaggacttggtaacttgggaagggttgataatgagttgacaatgtcagaaatttcatgtgccccaaagagaaaaagggttgatgagagttttgatgtgccatttcaactgttatctttaacaaagatggcccgttctgggagaaaggacttgacactgagattaaaatccgaacttgaagaagtaaggaaacttcaaaagaaaattgctggtatgagttcaatcactactgaattatctccatatagtgacataaggagctgcagtgtgggagagaagaggcctccactggaatcattagcactgcatggtaagaagcgcccactactaaagcataacggtcctaaaacaaagagaagtatttctgggcgatttatatctgcgaaatctgctgcaccagtaactccttcatatgccgtgctgatgaagcagtgtgagacattgcttaagcgcgtgatgtctcatcaatttggtaaagtttttgacaaaccggttgacattgtgaaatggaacattccagactatttcactatcatcaagcacccgatggatttgggtactgtgaagagtaagctgatttcgtgtgaatatacaagtcttatggattttgctgcagatgtgcggctgactttctcaaatgcaatgagttataatccaccgggcaatgatgtgcatgtcatggcagagacactaagtaaatattttgaaacaagatggaaagctatagagaaa

SEQ ID NO: 84024 - DNA, 254 bp, Glycine max
  Clone ID: PAT_MRT3847_46891C.1
gatcagcgtaacggcatgctactgacagatgttgatcgaagatggctttacagatcctaggacgtccatataatgctacatttggacttcacggacgtggcatccactaatactagacaagaggctaatggactgaatgaagacaaatatactaggggaagctatggaaggggttacccaaatcattgaagaacccgatattatgcctatgaataaagaagctatgctgctcatggcgggtgctctggacactc

SEQ ID NO: 84025 - DNA, 220 bp, Glycine max
  Clone ID: PAT_MRT3847_46892C.1
cctacgcgtacgcttcctatccggcggcagcgagcggcttctcgagatcttgggccccggcattgatgggggcctcttactccccattctcgaggcactccccgacgccatgctcattcttgtgtctgggctttcagggagtaaagaagtttctcaaagtaaggcatttgttggaaaggaactgttagctgggaaaacaacactgcttctgactataata

SEQ ID NO: 84026 - DNA, 507 bp, Glycine max
  unsure (1)..(507): unsure at all n locations
  Clone ID: PAT_MRT3847_46893C.1
tgccaggtcctgtcaccgttccgtgggctcgggcctatacctgctctacgcgggcaatcggcaaccacactcgacacctacgccggggtgggggggcagggtgtgggcgacaagtcaagtcacggaagggggcagtcgcgcacgcgttcagtggcaaagttataataataagccgcacaccaggctgtaataactgtcgtgtgtctgtttgtgtccgtcttccaaaagcctactataagtaatgttcttcttgtaatagttatcacgattacccgctgcaaggcagcactaaatatccacgtaatcggttcacacctcgcctgcgggttgtgcggcaacaccttacaaaccgtagtaaccattggggtttgaagcaaaagcacggccgccggaacacgtaaaggggacttcctccatcaacgggcccaatgngtaaaactccttggaacccaacacgctataggcggaacatgcattancgggcacatagactgcccaacagctggc

SEQ ID NO: 84027 - DNA, 810 bp, Glycine max
  unsure (1)..(810): unsure at all n locations
  Clone ID: PAT_MRT3847_46894C.1
ccacgcgtccgctttggttttgttttcttcttctttatcgttttctccagcttctatttttagcctcttctctctcagaattgtcgttcaaacttcaaagctaccgttctctactgtccgatctgactcactgagttgctttctctgctcgactcggatgagttagaccggaagatcgcgccgcattaatcgccatgtctgcaccagtgaatattattgtaggttctcatgtctggattgaagatccagcacaagcatggattgatggagaagtttctaaaatcaatggtgaagaagtccatgctcgcaccacagatgggaaagcagttgtcaaaaatatttcaaaggtttttcccaaggataatgaagcccctcctggaggtgtagatgatatgacaaaattgtcttacttgcatgaaccaggagttctgcacaatttggcaactagatatgaactcaatgaaatctatacatataccggaaatatcctgattgcaataaatccttttcaaagattaccgcatctatatgatactcacatgatggaacaatacaaaggagctgcatttggagaattgagtccccatgtttttgcagttgcagatgttgcatacagggcgatgattaatgagggaaaaagcaactcaatcctggttagcggtgagagtggngctggaaagacagagaccacannaatgcttatgcggtatcttgcatatcttgggggccgatctggagtagaagggaggacagttgaaccaacagntctcgaatctaatccagttcttgaagcatttgggcatgccaaaa

SEQ ID NO: 84028 - DNA, 342 bp, Glycine max
  Clone ID: PAT_MRT3847_46895C.1
cccacacgtgcagcatgatatggaatatgcaagtgatgagacataaaatgagctctaaatatacctctgtatgggcatgagtcttaaaattatgctaaagtggctgatagatcatgagattaaccttaaagctaaatggaaagctctatcctaatatacctactaatattcaagcatagcatagactctatactaagaactaggcaaataatcatgctggatctaatttctgagcatgaggagccaatgatgataccacagatgaactatctgacgcttaatatgaccctgctagcagaatagcatacagtgaaacatagaagatgaaatatagtatgacag

SEQ ID NO: 84029 - DNA, 159 bp, Glycine max
  unsure (1)..(159): unsure at all n locations
  Clone ID: PAT_MRT3847_46896C.1
gcatttcagactcgatcagagaacnnganannaggaaacaggaantcgagatcgacttcttgttatgttgtcttgctctttccgttttaatctcgtcttatgantttcanntttacagtgtccatgtccatccctatgacctnttcctcactanccnct

SEQ ID NO: 84030 - DNA, 265 bp, Glycine max
  Clone ID: PAT_MRT3847_46897C.1
gcgcatcatccgtttccatgtccttgaaactgacaatttttccctggaagaaagtaaaacagcaaaataaataaaaaaatattgaagaaaaaaaaaacggagagagagatagagagagaagaagaagaagatagtgaaactggtcctgtcctgatccaaactcatacaacacactcccttgtttgtggcctatgttgtgtatgaagacagaagaaagcatgctttaacacgtgctttttcagtcccattgctccaacacttctct

SEQ ID NO: 84031 - DNA, 463 bp, Glycine max
  Clone ID: PAT_MRT3847_46898C.1
ggctcgaggtaactgacctttggtttccattgtcacttagaatggctacagggactggtactagagctagggatgccgggatcgaccagttactcggggtggtgccacgcatcttctgcatctgctatgctatctgtggctatgagccattcagcggtgcgctcactgccatagagaggatacgttataggagtcttacactgaaggactggctagatgacatatcacagcatgctactatcatgattgctcagatgaccaccggcacgttgtctatcattgacagtgctatggctatgactgaggcctactgggcccttgacgtagagactcttgtctggcctgaggcctggggatccatggaccgcccgtacgctgatgctaatgttaacgtgcatagacggtttagggatagagaatactcagttcaccttgtaccagtgaacgatcttgatgccacata

SEQ ID NO: 84032 - DNA, 192 bp, Glycine max
  Clone ID: PAT_MRT3847_46899C.1
aatttattttgcctgccactcctttcaggaagagcttatctagaggaagaaacacgggcatgggccccccttcacgtccataataactaaccttcagtccaaggtattcacataataacttgcggaaaaagctcaacccaagcactgtacttattgaaagggacagatcgaaataggtgctacttcggccca

SEQ ID NO: 84033 - DNA, 248 bp, Glycine max
  Clone ID: PAT_MRT3847_4689C.1
accgcttacgacagaacaagtctgttgagtgtagaacgctgctgcctaaacccttccggaggcctaatgtaagtgagtaatcagctgttgagaatggtggataaagccaagggtacaaaggaatgacgtgctacccatgagtacactattaacctgcacactcgctttcatggctgcacatataagatgaaagctcctaaagctatttacgtgatagggaaactctatcaacaggccatgtggaccaa

SEQ ID NO: 84034 - DNA, 1239 bp, Glycine max
  unsure (1)..(1239): unsure at all n locations
  Clone ID: PAT_MRT3847_468C.1
ccacgcgtccgtgcgattggaagaaaaagagatcatcaaaccctaacacacactctctttctctcttcgaatccgaattttttttccatcttctcctcgatcattgcgattgagattgagattaaccctaacacacaaacaaatacacacacacacacacactcactcactctgttccgatttcgattttggtttcaatggctatgagtggtgcctctcccaatcattcccccaagcccggcttctcctcgccatggagccagattgtcgccgccgccgcacctccctcctcctccccgccgccggaagactctgacaacggcggcggaagcaatgccgataccggtaagagggctgcgtggattaaaccctcgactgccgcttcttcttccgtcatgggcgccgattcctggccgctgccgtcggagtccgctcgcgctccggctaaatcgccgtctccctcgctgtcgccgtctgaattggtgaaggcttccacggacacgtcctccgtgccaccaccattgcagggtcctggaagcctgactccctcaccacataggaatgttagggataatgctaacgcgaacaacaacaacaacactgggcagactcacccgaagtcttttaaacgcagcaattcgaacaccgctcgagcggcacggtatcatccaccacatatgtctgggcctcaaggtccaattgctcctgctgggtcccacaactacaattcggctcttaaggagcatcaacccagagctggatttttgcctaatgatcacccaccgcatcgaaattcttttaggcaccggaatggtggtggtccacatcagcgtggagatggtcaccaccatcataataactatgggggaaggcgtgatcaggaccctggaaatcaggactggaataatcaccggaattttaatggtagagacaactttatgtccccgagatttggtccgaggtttataaggcctccaccgcctcctaatcctgctcaattgtttccaccaccacctccactgcgcccttatgggggctctattgggtttactgaactacctccacagatggtatatgttccgcctccgcctctggaatcaatgagaggtgttccttttgtgtctccaatacctcctaatgcaatgtttttccaacctctggataatcagttgcatactaagactgtcaaccagattgactactanttcagcaatgaaaatttagttaaagatacatact

SEQ ID NO: 84035 - DNA, 252 bp, Glycine max
  Clone ID: PAT_MRT3847_46900C.1
gtgagcactatagtgccgacgacagtcattcatttatggttacgcttattgcgctcagcaaccagtgtagcgaggtaactgctgagtcttgaagagaggcttctgaaggatgagggactgatgagaatactgttatggtaatattaggtcatagaactgtttatcagaaggagttaatgagaagagtctatggcgctattttccaggaggatgttgtgaaacgcctagggtctgatatcctaggggactttg

SEQ ID NO: 84036 - DNA, 909 bp, Glycine max
  Clone ID: PAT_MRT3847_46901C.1
ggctcgagtcacagcaagtgaagtatctggtttttgagtgggtgctgtgctcctctgtgccactggtgctgccaccaaagccgatgctttcttctcttcttctcagcgcaggttctctcttctctcttatctcttctctcttcccttttctttttttatttattattttttgccttcattcatttctttaaattcttgtgaccatgaaaccctattagactttgttgggtggcatgtgtttctttggcataattttcactaacccatgttttaactttgtctccaatgttacccaaatgcaatcaaagttgtgttataagctcatcatttttttttttaatttctatctcacaccaacatttatttatttatctttgcaatatttatgaattgtggccattcttatgcctaactagttactaaagaatctgcaccatgttttaacttaatttgctcatcaactgttatgtacttatgtctattttaatatttggtctggtgcataagctaatcaagcatgcctattcgaacttgtttcatgttgcatgctttttatgacttatttcattttttttttccatatcatcaaagcatgaaggaaaacatggatccaaaacctgcttatttacattctttcccatttctgaaggttttattcagtgtattatgccctagacctaaccttagagggtagaatttgattcatgaatgtcaactcccaaataatcaacctccgaaaattgttagtacttctacaatacaacgaatacattttctagtaattggtcattttgagacacatttctcatttaaaaccaatctccaaggccacactctgacatcagatgtaattagctagtgtatatttccaggttctttaatcttttggggtcaatcttttttatccca

SEQ ID NO: 84037 - DNA, 431 bp, Glycine max
  Clone ID: PAT_MRT3847_46902C.1
ggaattcggcacgagggagagagagagagagagagagagagagagagagagagagagagagagagagagagagagagagagagagagagggagggagacacgatgctactatgcctatgtgtagccatccggctgtcgctggatcttctcctctgtatcactgtgccatgcggatgatagggaataggcacagatgtgactgctcggtgcctcagatggatagagtcatatgctaacggggtatcgagtctttgagacatgcggttagatctgcgaactctaccgtttaacttaataactcccagccgtacgcacatatgtgtaggtatgcggagcactttgacaggttgaaacgcgtgacccgtgaacaattgtgcaaatatgtggggggcataacgagccactctggaaatcaaatttatgctatgggg

SEQ ID NO: 84038 - DNA, 305 bp, Glycine max
  unsure (1)..(305): unsure at all n locations
  Clone ID: PAT_MRT3847_46903C.1
ttcacaagtgtgctgccgtcaccgagcgtgtccttgcagcatgctacaaggctttgaatgatcaccatgtttggcctggtgccgaattcggcaccagtcgagtttttttttttttttttttttttttttttttttttcgagtttttttttttttttttaactctttaaagncttttntttttttttaattaaggggggttgaacctatatcataacaaaccgattggaacctgtaaaatttttaaataattaatgaattacaaactatacatgacgcgatcatgcttttcaaaaaaaaaaaaaaa

SEQ ID NO: 84039 - DNA, 390 bp, Glycine max
  Clone ID: PAT_MRT3847_46904C.1
gttgggcttgacacaatacactgtcatccacaatcatcttctgaggtcaacttcacaagactaactttccggcaagtgcatttgttggaaaagattgactctgtgggtctccgtcgctaccctgcaagatctcacaattgcactaagcattgatgtcgacgatttcacgatgattaacatccctttacagcgagctttcacagtaagtatgtcagtgagtacgtagattgtcaatctaacgttcatgctggaatagacatatgtacataatcatagtaggtcgaaagggtacaagaattgagaggattagctcgtcttgcgcaagactcacgaagatagcaactacaagcttgctttggatggacttcccccaaaggtgccaattccccc

SEQ ID NO: 84040 - DNA, 429 bp, Glycine max
  Clone ID: PAT_MRT3847_46905C.1
gagcaatctgcaggtgtgaacaatgcaaacccaactagtagtcccaaactgggtaaattgaagtccctatcccagtcaatggatgatactgcaacatctgaaactaggcctacaacaacacttccaaaggatagacatggaaaagagaaccaatcatgtactagttcttccaagagcagcaagcaatccatatgtaaaggtcaaactacaaaatcgccgattaagaaacttcccattgacaataaatcactgcagaaacgtcgggatcctccaaaaaagcagcaagaactaaggctgaaggaccagccaattgcggaagtaagaaatctacgtgaaaatccacaaggggatgaatgtccaaatataatctctgaaaatattcttaagtgtttatcaaacattatcttgagaatgagtgctgcaaaaaat

SEQ ID NO: 84041 - DNA, 420 bp, Glycine max
  Clone ID: PAT_MRT3847_46906C.1
gctgcaagaagacgacgagaggggtatcctaaaacaaaaaccgacatcctagtcctagaatgcagtggaccagtccccatgaatgcagcaagcttaagctagactaggtacattgattcctcaatcgagacatgaatattagtaatgaacatagaaccacattaatatgtccataggcacatttactcagacaccgtaacaaggcctccacaaaccttacatgtatatagtaaaatatatataattagctcatcatgcatttttcgctaatagcttatgagaatgaagtacaaatacattactctctacattgtatacacacacaggccctagggatttaactaggaagaaagtttttaaagagcgggatcggcctaccgagcagacgtgccctgtattaatgatctatacgtacacaga

SEQ ID NO: 84042 - DNA, 278 bp, Glycine max
  unsure (1)..(278): unsure at all n locations
  Clone ID: PAT_MRT3847_46907C.1
ttagtttatttgttttatgtttcctgtctgttgagttctagtcgagtcacccccacagcatagatgaacatatttgttattgatttgagctactgatggcttattcacctaagcaatctttcttgtgagtgtagagtttgagaatacttagctcantaattcttgtcactttttcggacaggattcaaagaaaccatacttcaccaccatggtncttgatncangncatctccgacacaggaggtcccaaaacatattcttcgtgtcatnatcaaaaa

SEQ ID NO: 84043 - DNA, 304 bp, Glycine max
  Clone ID: PAT_MRT3847_46908C.1
cgctatcgggctctcgcccggttttagccttgggcgggatttaccgcccgattggggctgcattcccaaacaacccgacttgccgaccgggccttggggggcgaccgggtccgggcccgacggggcttttaccctttttggcgcccccttccaggggacttgggcccggtccgccactgggggcgcttttccagacttcaattcggacgccgggggcgaccgattttcatggggggcttttcccgggtcgctcgccgtttcttaggggatccctggtaggttcttttcccccgcttattggttt

SEQ ID NO: 84044 - DNA, 766 bp, Glycine max
  unsure (1)..(766): unsure at all n locations
  Clone ID: PAT_MRT3847_46909C.1
cacgcgtccgctgcggaggtgttctcttcaaggtttatatagttggtgatgctataaaggtcgttaggcggttttcgttacctgatgtaagcaactgggaactctcgaaagatgctggtatatatcgttttccaagggtttcttgtgctgcagcttctgcagatgatgctgatctggatcctactgttgctggtaagtttgtattcttgaccaaaagctttctatagacctttaccttttccaaacttaaacaggttttcacattgtcccccctcaagaaggggaaaaaagcctccttagaaagctggtcttggcccagccattcacaaacatatgaaagactagttcctggttggttctcctgggttgataatcttacactcttattaattcaaaaacacttttagtttattgtcataattctcatactatcgttttatgttgatctattttaaacaaattgctatttcacaatctttttgactgtataattcaatttttgtcctggctataatatgggtntagggtgggtgatccaaccttttgactattggaaatctaagctcaactgattaggttgttagtacattcacttttggatgtatatagaaagggtttgcagtatgggttcaggcatttagagctaaatatatgcttctgcagtttgatcagtcctttccaacttcactctattttgtctcctcattttcttcatcatttttctccttgcagagcttcctccaagacctttactagagaaactggc

SEQ ID NO: 84045 - DNA, 279 bp, Glycine max
  Clone ID: PAT_MRT3847_4690C.1
ctccgagcacaagttcgtgctgaaggacaagaagaagccgatcatcttctcgatggcgcgtctcgaccgcgtgaagaacatgacaggcctggtggagatgtacggcaagaacgcgcgcctgagggagctggcgaacctcgtgatcgtcgccggtgaccacggcaaggagtccaaggacagggaggagcaggcggagttcaagaagatgtacagcctcatcgacgagtacaagttgaagggccatatccggtggatctcggcgcagcatgaaccgcgtcc

SEQ ID NO: 84046 - DNA, 439 bp, Glycine max
  Clone ID: PAT_MRT3847_46910C.1
aacaaacatggcttgcaacgcagcaacagacaacagacataggggggattttgaaggagattcttcttaacccagcgacaagtctgggcgttatgaccgacttttgaaattgagacaagatgctttggtgacggtgatatgaagggtgtctcgtgactattgcttggataccttagaaaaagtcatacataatacataacctactaatgagtcgtatgccttattaggcaacagatcttcttttacagaagccaatataaaaaatgttgaacatggaattgacatgtgaaacattcatcttacagggaccctctcaaactaatctacaggtgtaaacactacatgaggaacatgaagctttttttgctaccaagcagggattaagtggctgcataccatgccataatgaggaatcagaacatgcagttgacaagcaaat

SEQ ID NO: 84047 - DNA, 322 bp, Glycine max
  Clone ID: PAT_MRT3847_46911C.1
tattctctctgtgtatttccctacctttcccttcaagatgcagatcttcgtcaagaccctcaccggcaagaccatcacccttgaggaggaaagctctgacaccatggacaacgtgaaggccaagatccaggacagggaaggaatcctcccggaccagcaacgaataattttcgcccgaaagcaacttgaggactgacgtacccttgctgactacaacatgtacaaggagagttctctacaccaagcccttcgtatacgtggtgtgatgcagatctttcattagacactcaccggcgagaccacaaccctagacgttggaagc

SEQ ID NO: 84048 - DNA, 259 bp, Glycine max
  Clone ID: PAT_MRT3847_46912C.1
aagccttccgtggcacctattaatcaagatttgacatttaaagagaattttttttgctgggcaagtatttgacggacatggagggaagagcgctgcacaattcgttcgtgatcatctgccacgggtgattgttgaggatgctgactttcctttggaattagagaaggttgtcacaaggtcatttttggagatcgatgcatagtttgcaagatcatgttctactgagtctttcctgtcttctggtacaactgcactgact

SEQ ID NO: 84049 - DNA, 379 bp, Glycine max
  Clone ID: PAT_MRT3847_46913C.1
tttttaccggctttttacccaggaaacccggaaccgaaggggcccggatcagaaagtcttccaatagagcgaatgaactaaaacaggcgaaaccataggcgaaggagaatcctgggagaaaatggtatcccgttacaatatcgcaaaagacaaaacgaaccagagttgtatgggctgcagccggaggtgcctaaaagaggaacgaaaggacctaagaacgagccagaactactctgccgcgatatcactgacacgaaaaccgtcggggcaagttcacataaaataaaagggcaacacggcgggaaaagacgaccagcactggacaccaaggtcgattttgtatttcccaccgaaacagggaagcacccagagcccttca

SEQ ID NO: 84050 - DNA, 377 bp, Glycine max
  unsure (1)..(377): unsure at all n locations
  Clone ID: PAT_MRT3847_46914C.1
aagagtagtcgcttaaagcaggtccaggagcacctgtgtacattaaattctctttgtttagtgcttggttttgactttaagcagacaattaatggaattcatcccagtttagtggactcaaaaggatctaagagtgtaagtaatgataccattcagcaattagctgttgctatacaagaactgcgggaagttaaattacagagaatgcagaagctccaagatcttgcgactacaatgttggagctctggaacttgatggatacccctattgaagagcaacagatgtttcagaatgttacatgtaatatagctgcttcagaacatgaagtaactgaaccaaanaccttgtccgnggacttcatcaatttggntgaggc

SEQ ID NO: 84051 - DNA, 292 bp, Glycine max
  Clone ID: PAT_MRT3847_46915C.1
ctcgagctgtttcgggacgcactcgctccaaccggacaaggggtgcccaaagcttgattcattgatgcgtgctcacactatgatcactaggagctcttacaccaccatacattgctatggactcaaccataatcccatatcatgcatagggtctggaggcggtgtctacaagttctaccctaaaaggcaccgctgccatatgcaagccagagcttgctaggaacaacaaaactatgtcagctgggacggcattcaattcacataatcagcagacaagattgttgcacatgcc

SEQ ID NO: 84052 - DNA, 255 bp, Glycine max
  Clone ID: PAT_MRT3847_46916C.1
ctatgaaggcgcacgcacgcaagctcggatccggaagaagcgggagccccctcctttttttttgaggaggatctttcccttggaacggcgcccccgactaaaagtaaaaccgagccgggtacgcttaaggggacaaaaacccccggggaggaacctcccaatggtataaccaacaaaccggcagcgttaggtaatttaaaccaaaaaggggggcccccaaagagagccccggggaaccatatgccggaacaccca

SEQ ID NO: 84053 - DNA, 362 bp, Glycine max
  Clone ID: PAT_MRT3847_46917C.1
cgaagaagttaggaaggctgcagtttcaggtattttcttggctctaagaaccaaaacctcgcttatagtttgtttatttccaatagcccttgttggattttcttcaaatatcacctgtctgctttgtttatagccatgccagaactgttgtcctcggcaaaatcagctgtagagaagggacagtcgcaaggtcgtgataagacttacgtaaaacagttgtctgattatataataccaaatttggtggaggctttacacaaggagccagaagtagaaatttgtgcaagcatgttggacgcattgaatgaatgcatacaggtctctgaatcacatctagatgaaaagcaagttcggagcattgt

SEQ ID NO: 84054 - DNA, 448 bp, Glycine max
  Clone ID: PAT_MRT3847_46918C.1
gcacgcttacgctacgctcggcattcggctcgatgttagtatatgagagtcagcttgagagcattatggagttcatggaccaattgctggctgctccctcacctgattccgcacaccccaaatcttctctgaccgacaccccgacgaatagatgggcgccaccgccttctgtggccgtcttggctgcgaggtgaaccttgacaaggtcttcggagacggggaacgttatggggacgaactaagggcacagtaatgatgggctcaaaaactagaggagcaaccacaagcctagaaggacccttcacaactcgatggtggagagggacctgcgcgcgcgcatagacggcaacatgtgggtttgtcttgatacagcgaatcttatccaactctaactcgaagcgctggatctggccatctcctcaaaccggaacatgcctgattgtggacc

SEQ ID NO: 84055 - DNA, 190 bp, Glycine max
  Clone ID: PAT_MRT3847_46919C.1
gcgcagacacgtaaacagacgcctgtagaattattatcctgaatctttccactcatattggaagccttttctttctaaagctgatgctcctaatctcagtctttcatctctcctatcctactaggatacacaaccagctggtacagcacccatcacagatactccattccctcaacgaaaatacttttat

SEQ ID NO: 84056 - DNA, 976 bp, Glycine max
  Clone ID: PAT_MRT3847_4691C.1
ggtttgtttatttttttttttttttttttttttttttttttttgtgttcaaattctgtgtgtacagaatttatttattcaatcatctaattcagaacatacaaaagatgccattatttaatttttgcccattcaaggacaaatgaagtggccgtaaggggcaacgcacttgtttaggcatacatacatatatatagtaaaaaagaaacacactttgaattcaagttcatgtttctccaaaacaagcctggttgaatgactcaagctttaggttgcggttgtggacctcgatttaatagcatggtcagcaacattaccaccatgacagcacttgtaattaacagatgtgacctccatcacacgtccacaagaggcatttgggcatgttatggttgctaggacatccaaagtgttaaattcacatggttgaggagcaggtagatcacgttgtgtgtcataatattcttggaatgcaatgtcaaagccttctttgacaagcactctttctttccacttttcaaaatctgccacagtttgatacataggttggccgtgacccagaatcctcacattggaccctttgctcagaatggcccatccttgtgtatcctgcttgaggcagagcagagacctgataatttcttggatctcacagtccaaattctcggagtgcttcttttgccttttgccttctatgccaatccagaatcgaggaactatcttggggtcatcctttcctaaatggtaatagtctattattgcatctgccctccttattgtatcgtgccttttaattttatccactgccacagtgaattctcgggtccacttgtcgctacctccatatatgaagatatacctatcacctttcacctgtataccatgaagatttgttttcttgacctcatcccgggcccatttccatttctgagcaagtaggtaagcatcggattttctgaaagggctggtgccgaatt

SEQ ID NO: 84057 - DNA, 289 bp, Glycine max
  Clone ID: PAT_MRT3847_46920C.1
agaggacactgccgtgagtgcaatgctggttattcacgccatggccattgaaatcgatgctgggtggagaaaacaagatatatggctgttcgtccaagcaatactctccgcggcctctggtgagaacatcatgtccattaacgacacaggataccaccacaattacatgggccacgaggacgatattcctagctgggaaaatcccggggatatccccatgagtgattatgacgttctcactgctcctggcaagagttacagcattacatggggtgctaagggaccctac

SEQ ID NO: 84058 - DNA, 363 bp, Glycine max
  Clone ID: PAT_MRT3847_46921C.1
gataacagacacatagatggggggatgaatcggacatactacgggtggacatgatttataaatcaaacggatggtgatgccggtcggagtatacacacagacttgtgcacgctcacatacatcacttaggagtggatggcacaaggactatacgcgtgcataagcctgaatatttacttgggaacgtgagagggcacgaatgtttggtatgagaaccactggtggacgcactctggccttatatagagacgctggggtgaattgctctgacagtgacgccttcctcactggaaggaagaagcactgcactcggcaggtgcaccggtccattacgcgctgtccggcttgaatatatgtgtctgc

SEQ ID NO: 84059 - DNA, 373 bp, Glycine max
  unsure (1)..(373): unsure at all n locations
  Clone ID: PAT_MRT3847_46922C.1
attatttctttttttgcatnttttgggattttatttgtgacaaggaaacgtgttggataatatttctgaatcttcgcatgatgttccttcaactctgagaatttcctctgacattcctctccgatctccatagcttgtctttccacacactgggaggatatttttattctctcaatgttggattcaatggagtcaatttgagaagtccttggtaggtgactgtcagagaagttgttacaatttccagtgtagagtaatagccatgaaatattaattgaaaatttgaaatccttccttttattttatttatttttcattttaactttgacgtttgggatttgagtgatccctttcaagcttccattcaaagcac

SEQ ID NO: 84060 - DNA, 497 bp, Glycine max
  Clone ID: PAT_MRT3847_46923C.1
agtgcaaacggtcaggatggcccacaatgaagagttatccacctcatgactgttgttgctactgatgctgcttaccctagcctctttcatcacctatgttcccatgatagggcttcagcagacaatcaatgtcctggtcactgctgatcaaacccccgggcgatactacatggcagcgcgcgcatatcaaaccgcgatgaatgctgcatttgacaacaccaccaccactgcaatcctagaatacaaatccgccacctgcagcaaaaaaaatggacagctcccgagaccaattctgccagtgttgccggctttcaacgacacagccacagcaacagcatacacagctgggatcagaggcctttccaagatcaatgtcttcacaaatgttgatgtgagcttatatttcattgttgggttggggctaatcaactgcacaaatcctaatagtccaagatgccaaggtccaaacggaacccgattcgcggctagcataaaca

SEQ ID NO: 84061 - DNA, 586 bp, Glycine max
  unsure (1)..(586): unsure at all n locations
  Clone ID: PAT_MRT3847_46924C.1
attcattggatgttaatgaggttggttttcttgcttctgttaagttgttggatcaaaactacttgagattaagaatatttaatggattttgtattcgagtacaaggtggctttattaacttccaatctgggaaaaagactttgaaccaaattgttaatcactgtgtatattcctacacccttttttactttatgagattttaatttttaaccttacaagtttcactgattctgaggcctttcatgcctaattagttactactatgaattactgtctgttccatggcatggacagaaaacagaatatgatgctgagtgtgttcagtgaaaatgagttctacagtggctatacttatgggtgaaagttttgtgggcctgtgctgttaaaactgttgttattatcagtagggctaagctgaaatttttttttttattgaatgggaaatagctattttgaatgccctttgctttcccttgtagncttatctattcttcctttcttgtttgtttctggaagggctctttctcaatctgaaatcctagacgggtattacattgatttcattgactggcggtcgcattaaatt

SEQ ID NO: 84062 - DNA, 222 bp, Glycine max
  Clone ID: PAT_MRT3847_46925C.1
ctgcctttcttcttgggatccaaggctcggtcttttatgcttcatcacttagctgtagctgagtttctttacttagctttcgtgggtattcggttatagctcttaatttggtcttttggggaacttgcgtgtggttgcttcataagtcggtagttaaagtccgtgttcctttcacctaccgggttaggtaagaagtctttatgttttcctaacggtttgggt

SEQ ID NO: 84063 - DNA, 446 bp, Glycine max
  Clone ID: PAT_MRT3847_46926C.1
attttcaccttttcacaaatggggatggctgcagagtcacagtttcatgtcttggctgttgatgacagtctcatagataggaaactcattgagaggctcctcagaacctcttcttatgaagttactacagttgattctggtagcaaggctttagagtttctggggttgtgtgagaatgatgagagcaacccaagtacaccatatgtttgtcccaacaaccatcaggaggtggaggtgaatcttgttataacagattactgtatgcctggcatgacaggctatgacttgcttaagaaaatcaaggaatcttcatctttgagaaacataccggtggtgattatgtcatctgaaaatgtgccttcaaggattaacaggtaagaaggagaaatatttcagtactttttttaaaaaaataaaattggaaataaaaacaaaaaaaagggcgg

SEQ ID NO: 84064 - DNA, 135 bp, Glycine max
  Clone ID: PAT_MRT3847_46927C.1
gatagtggggtggtgggttctgaagatattttacgcgagttcaaaaccctattttgtttctatgacctccggaaactaaaactcattcattgggccctattgggtttgctggcggacaaaaaaaaggggttagac

SEQ ID NO: 84065 - DNA, 954 bp, Glycine max
  Clone ID: PAT_MRT3847_46928C.1
gcttttgactgggccagtgttgccagaggaggctgaggggaagttagaagaaaattgggccaattggcttgatgcgtttgcgaatgagtctattgtgtattgtgcatttgggtctcaaatcaatttggagaaagatcaatttcaagagcttttgcttgggtttgagctttcagggttaccctttttggttgctctcaaaactcctagagggtgtgagagtgtggaagaggcactgcctgaggggtttgaagagagggtgaaggggagaggggtggtttcaagggggtgggttcagcaattgttgatcttgaagcacccttctgtggggtgctttgtgaaccattgtgggtttgggtctatgtgggagtctttgatgagtgacaagcagatagtgttggttccacagttgggggaccaagttttgaacaccaagttgcttgttgaggaacttggagtggctgttgaggtggagagagggggaaatgggtgggtctccaaagagagtttgagcaaagccattaagttagtgatggatggagacagtgaggttggtgctagagtgaagaagaatcacatggagtggaagaaaactgggggcagtcctaatttaatgaatggttacatggataggtttgtccaaaatcttcaagattttcctctccatgggtgattgaaggatttttttcagagggatggaattcatcgtttgcccaccaaatgaaaatgaaattgtttagaaaataagttaagagataaaatatctagagtttaatgctcagtctactttatgaatggtgcagtttgactcttatttagtagttgaattcagtagttcatgtgatactttatatttaaatatattttttatttttaataaatatttaatgttatgtttgtttttttaataaaaaaattttgtcatgaaattttaataaaataataattttatttttg

SEQ ID NO: 84066 - DNA, 843 bp, Glycine max
  Clone ID: PAT_MRT3847_46929C.1
agttgaccctggaaattagtgataataaatggcctaatgctgctgagcttccttttctttggagatacaacaaaatgagcatgcttaatcttgtggcaagcctggtgaagacaggagtgcatggaagaatatattcttcaggcgatggaaggccattaccaggctctataactgtcagtggaataaattacacagttagagctggaaatacttttggtgactatcatcgcatactcgccccaagagataaatatgaagtagtggcaaccatgcctggctacaaatcaaagaatacaactatttggttggacgaaggacctgtgacattggattttgttcttgaccccgaagtcagtgtcaaagggagtgtactacaaaatatctataaatgtgactgtaataatgaaagcaaacaagaatttgttcattttctttggggagctcacttggaagttttctttgttgtgattgttattttaggatttttacttttattatttcatagaagagcaaaagtcaaaatttccacaagcagacagtcagcgggggcaaaaagaactgttgaggtctaagtttattgatatgtaacccactaaggtcagtctatgggtagggagttacgatagatgcataaggatttaagtttgattttctttgttgtcattatacaccaaaaaaggttattgatatcttgtttgcattaaattttgttgtatattaaggtgggtagagaagtcaaacctttttccatgtaaagatttcttcagatggctaacgtgaattcatattattgaatgctgttgttaaaagaaattaaaactatttccatatgaatatttctga

SEQ ID NO: 84067 - DNA, 259 bp, Glycine max
  Clone ID: PAT_MRT3847_4692C.1
caagagatctctttgaggtttctcatcaaacacctttagccaacaacaatggcacctttgaacaaagttcttttgctcctcaccttattgttccctgcggtggatgccacatacaaaaacaagaaagacaagaagaacagtgtttttcataagattcccaaatttccaaaatttccagttcctatcattggcggtgaccagaaagttgttgtggatggtggtaatcatgccattgccaagcccgattttggaaacaaac

SEQ ID NO: 84068 - DNA, 678 bp, Glycine max
  Clone ID: PAT_MRT3847_46930C.1
caaaaatatccatatgcaaatagttttaatttctttaaacaacagcattcaataatacgaattcacgttagccatctgaagaaatctttacatggaaaaaggtttcatttttcaacccactttattatacaacagaggggaggacaaacattcccctcccataccttttttggggggcaatgacaacaatgaaaatcaaacctaaatcctcatgcatctatcctaactccttacccctaactccttacccctaggccaaccttagtgggttacatatcaataaccttagacctcaacagttctttttgcccccgctgactgtctgcttgttgaaaatttgactttttgtcttctctgaaataataaaagtaaaaatcctaaaacaacaatcacaacaaagaaaacttccaagtgagttccccaaagaaactgaacaaattcttgtttgctttcaccattacagtcacaatcatagatatttcgtagtacactccctttgacactgacttcagggtcaagaacaaaatccaatgtcactggtccttcgtccaaccaaatagttgtattctttgatttgtagccaggcatggttgccactactgcaatttagattgagaaattgatcacaaaactctaaaactgaaaattgtgtaatttaataacaataataataataga

SEQ ID NO: 84069 - DNA, 381 bp, Glycine max
  Clone ID: PAT_MRT3847_46931C.1
tgcaaaaggaagacaaagtgaagcgtgataaccagactctcactaatttactagcggacggccatagagactacgttttgagtcacactcacacgggactcaaaaaggtacctgtagcttccctagtgggtaaaacaattggactctacttctcagcggaatggtgcgtcccatgcgccaagttcactcccaagctgatttccgtttacgagaagataaagcacgagctagccgaaaagggagaggaggacttcgaagttgtgctaatatccagcgaccgcgaccaagcatcctttgactcctactacagcaccatgccttggttggccttgcctttcggtgacccagagatcaagaacctcgttagacactacaacgtgc

SEQ ID NO: 84070 - DNA, 386 bp, Glycine max
  Clone ID: PAT_MRT3847_46932C.1
ttgcgtccgtttacctctaaatgctcgattcggatctcttgcccaaaataatccggaatgatactcatcttagctcgtactacatgatatgccgtctggcatgatctgagacgacaccaacactatgctttgctcagtaaacaacgcgagcctgctgtttggcttcaccatatactctttcctaaaacgcacgacacacttggtgcaatttatctgagttgccaaggtccactgagttctacgttgccttatgaactaaattaactgacctgtggcataggagtataaacagaccactcatgttattttctcaatactacatcacatttggaaaattaaatttacctagcaaataagacgaattaatgataatcatggcacaaatt

SEQ ID NO: 84071 - DNA, 290 bp, Glycine max
  Clone ID: PAT_MRT3847_46933C.1
ctcacgcctacgctcaggcctggtccttgactcatacgcactccaatctaccgatccggttgccttaacaaagactgcaccgtttcaacggacgccgtcagatcttcccatgaataccatgccatcaaggtctaagggtcttactagcgcacttctcctatctacacttcactggactcactgcctagacttcagcccctctctaaaccaacgtctgcgctgtatcagcgattcctaccttctacaacatgattgctatacacataaatcgtagtagtaatactgattat

SEQ ID NO: 84072 - DNA, 247 bp, Glycine max
  Clone ID: PAT_MRT3847_46934C.1
ggtttgatataatattaacaagaatattccaactaacaagccataccaacacccatcaactaaacccgctagcctcctgtacccaccagaagcaaaacaatccacgattcgaaaacacagtactaacccccctgcccaggagacaacaaaatcccagcccgatacaaacaataactctatactatgacctcacgaacaccctgaacagaccacaataaaaacgcacaaaactgacttgccccccaca

SEQ ID NO: 84073 - DNA, 229 bp, Glycine max
  Clone ID: PAT_MRT3847_46935C.1
gtcttgctgagctggtaactgtggttgcggaagcgcctgcaagcgcggcaacccctcgtgaggctgcatgatgtacccagacttgagctacaccaaagtaaccaccacccgaaccgtgctcatggcagtggcaccaattaaagctcattccgagactgctaactttgctgtttcccctgacaaccatgtctacacatgtcaagctaactactcctgcaacccctacact

SEQ ID NO: 84074 - DNA, 259 bp, Glycine max
  Clone ID: PAT_MRT3847_46936C.1
attatattatccagaacagtatcatatatcaattgatgttgtggatcatattctagtcttttctcagagttagagagtatatcagagtgtattgctgtctttaaaattactccatttggataataccacgcacttttatgagtcagaatgagtactccttagtcgttcatgtcaacttgaatcatatgaaaaatgttgtccatggccacttcgtaaatatgtgtgtgtgtacttttcagggaccattgacgattatgga

SEQ ID NO: 84075 - DNA, 224 bp, Glycine max
  Clone ID: PAT_MRT3847_46937C.1
ctcctacaaccacgctatacactatgatcctctagccaacaccaaaaaaacccacctcatcacattgacattggcataaatcgagcagacatggagccttgccggtcaggtcgccgttgttaccggctcacgccgaggtatcggaaaggcgatggccattgagctcgccaagcgaggaacagatgtcgtcgtcaactacgccaacgccgtctagggagctgagc

SEQ ID NO: 84076 - DNA, 310 bp, Glycine max
  Clone ID: PAT_MRT3847_46938C.1
ccggcccggaatcccggtcgacccacgccccggaaggcttgtggctcaaagccaatagggcatccacaagcttaacttcaacaccacttggaaaaagactgattagcgaaagtgagccacccacagttcccgtttccaatattctaaacctcactctaatcacatctcaggattcccatcagcataacactcacaagttagttgaattctgtttggagctacgaagtacaggctattgagaccaacacaacggagggtgcctgtgggaccttgaacgccaatacccatttagaaaaatcaagaaaagaca

SEQ ID NO: 84077 - DNA, 161 bp, Glycine max
  unsure (1)..(161): unsure at all n locations
  Clone ID: PAT_MRT3847_46939C.1
accatcagtaatggtgatattgacaaaactagtgcaactttgcaattnananagttagcagattgtgagttttctcttgagaaaatcacaatcngctaactttcncnagagnaactttaagcagatgnccaatggtttgtnggtngntncnnnngnnaang

SEQ ID NO: 84078 - DNA, 187 bp, Glycine max
  Clone ID: PAT_MRT3847_4693C.1
ctccttttttttttttttttttaaagatccactgacaacgcgaaaaaattaagggtggcatgggtgattgccatctggttcactacactaacaatacttttggagttcttgttttgtggccgccatatttggcctttttgaggtgggaaaacaaactactattattagggcaaggaccgtggaaaca

SEQ ID NO: 84079 - DNA, 213 bp, Glycine max
  Clone ID: PAT_MRT3847_46940C.1
ctcgaggatgtctgagactgggtagtcatctgtcgtctacggtttcaactccttgggatgaatagttcgaggtgaagaagctagaagagactgtccgcagtattgagatgcctggtctatcgtcgggagcatccaaactggtacctgcgggatatgggagcaataagttgcagatcgtgatgctcattgttattgaccttgaatccgtggaaa

SEQ ID NO: 84080 - DNA, 360 bp, Glycine max
  Clone ID: PAT_MRT3847_46941C.1
cttgatactgctagtcggataagccttgctatgtgaccatgtactgtcacggaaaatgcagacatggctgctcccattatgctacgccctggaaggacatactgtactgattgaaagcccataactcatactatcaaccaccttcaatccgctagggagttatgcacatccatattgaacactacaccataacaaggcatgcacaactgcacgagagacttgcacccagtggttacgcgctggttgctgcatgacagccatgatcatcatcgaacatggagttcgggccaagaacttgatgtgttgatctgcatacacgcatcatcatcaagacctcgcagcagtaccatgctgatgact

SEQ ID NO: 84081 - DNA, 553 bp, Glycine max
  Clone ID: PAT_MRT3847_46942C.1
agattgcatgtcatgaatgggaggccgaatacggaatccatgtatgaaagagcaaagtagcatggaggatattcgattcagtgatcctgatcctgatcaaagtagcatggaggatttttcattcagtgatagtgatcctgatcctgatcctgatcctgatcaaagtagcatggaggatattcgattcagtgatcctgatcctgatccttttagaaagagaaaaatttgtagttcagaggttggggttggggaaaaagcaaagattagtaggcagtgaagttgttgagacacaatttgtagagcagcaacaacatatgggttttttgtcacgcgtgtggaactgggcactatcacttgtaatgtctcgctgctccggcaatcaataattggatgaaagagagaattcaagttcagcagtggcttggtatcaacgctgacaaaagacaacactgtaactagcccctactgattcttgttgtctagtcaagtttggttttagatattgtattttgctttggattcaatgaaaatagatccagcatttcaatctctt

SEQ ID NO: 84082 - DNA, 466 bp, Glycine max
  Clone ID: PAT_MRT3847_46943C.1
tttttttttttttaatgcagaaatttatgtataaatatcatttctctaagtgaagcctactttatattaccaagtcaaactacaaatttgaacagatcaacatgcagcatttttatctgctaacgattcaaaatgattaagtaaagaaatgtaggcttcagcaaaatgtgtttagaaggcagcaaagagagcaccaggaaactcaaaccttaactgggctttgtagcagagatcatcacaaaaagcccatttctaatgcatttaaatccaactagcccacatgccctgcagagatcttcaagttcacgttcagagagaaagatgtagctcccagacacttgccttacattctgccgcagggaacttaaaaatgggataacagaaaaaggcccatcaagtatgtaagtggttgcgacaaatacacctccaggtcgtaaaacacgacttatttcagctacagcagcta

SEQ ID NO: 84083 - DNA, 2301 bp, Glycine max
  Clone ID: PAT_MRT3847_46944C.1
gaggtctaggaagattgaaaccacatctatgaatttctcagcatttggataaatactagattcgcctggataactcttcgagaagctgattgatctcaatacacgaacaaattcccgtgcataattgtttgcattgatacagagttttgctttgattagcttgctatcaacgtgttcattaatgatgaagatgaaagtaatcatgtaagtttggatgttaccgaatgctgcatgggtccttctacagctgtttttcgtcttaaaatggaagattatttagatgaagaactattaaagaatgaatggaaccgtgcagagattggttgtgaatatttgtgggacgaatacgcaatccatgtattgaaagagcaaagtagcatggaggatatgcgattcactaaaataatgttgccaggctggaaatagcttagtcggagatgtcgtgaacagtcagatgagcttattccgctatttctctcatgttttgtaaatgtgataaatttaaagctatcaaggtgtatattcgcagatattcacgaatgcatcaaagaatgccacgttttaactatccttaatgtggatcgttgcgatcgtcttcaagaaattagagggtttccaccaaacttggaagaattctctgcaagacgacgcaaagtcttgacttcctaaagtacaataatgtttctgaatcagacactgtttaagtcacgcgacatggactttctttttctaaagaggcgcgtgaatttgacgagtttaacttaggactagggaaagatggaaaatataacagaacttgacttgagcgaatgtcccataacaaaactcccaccttcatttcgaaatcttactcggcttcaagagttggagttggatcatggacccgaaagtgctgatcagttaatggactttgatgctgccaccctcatttcgaacatctgcatgatgccagaactatatgatattagtgctcgccgtttgcaatggaggctattgccagacgatgctttgaaattgacctcagtcgtgtgttcaagcgttcattctctcactttggaactgtcagatgagcttcttccgctatttctctcatggtttgtaaatgtggagaatttacggctagaagggagtaaatgcacagtcattcccgaatgcatcaaagaatgccgctttttatctatccttattttgagtggttgcgatcgtcttcaagaaattagagggattcctccaaacttggaaagattcggcgcaacaaaatccccagacttgacttcctcaagcataagcatgttgctgaatcaggaactgcatgaggctcgagacattcacttaataagtttgccaatagtaaagattccagagtggtttgagtgccagagtcggggaccgtcaatttttttctggttccctaacaaattcccagtaataactgtttgcattgttacctcaggtcctaagaaatattccaattatctggttctcaacgtgattattaataagaaacataaacatcgacatcaacgtttttatagtaacgccaacgcaataccttctacatcaggaactgtttttcacttaataagtctgcaaatggtaaagaaagaactatcaaagagtgaatggaaccgtgcagagattgtatgtaaccggtcgtgggacgaatacggaatccatgtattgaaagagcaaagtagcatggaggatattcgattcactgatccttttaggaaaagaaaaatttgtagttcagaggaggttggtgttgggggaaaaaagcaaagattagtaggcagtgaagttgttgagacaaaatttgtagagcagcaacaacatatgggttttttgtcacacgtgtggaactggacactatcacttgtaatttctcgcagatccggcaatcaataattggatgaaagagagaattcaagttaagcagtggtatggtatcaacgctgataaaagacaacagtgtaagtagccctactgattcttgttgtctagtcaagtttggttttagatattctattttgctttggattcaatgaaaatagatcgagcatttcaatctcttaatacattcctctgaatgtattttttttaaagaactaaaagaaaggaattttatgcaaatgaataaaaaaccaaataattacatcagatggagcaatgtctattgcatagtcaatcaccatccaatactaataaagatacgagagcattcttgtagtctagtcaagtttggttttagatattgtattttgctttggattcaatgaaaatagatccagcatttcaatc

SEQ ID NO: 84084 - DNA, 336 bp, Glycine max
  Clone ID: PAT_MRT3847_46945C.1
cggatcgaccgacgcgtccgctcaaacgctcgactagatcatccagctaattgtgactgatggagcactggattctgcggctgacgatgcagatgttcaagtaaacttcgaccggcaagaccattgatcgtgaagtggaatactatgacaccatagacagacgtagaagctaagattcaacacaatgaaggatgcctcacctggccagcataaaactagactactatgaaaacaacatgaggatggtcagcccctaatcgattaccgcgtccataaggcatcaaccctacatattgtgctatggctgactggtggtatgcaaatatcatgtgtaga

SEQ ID NO: 84085 - DNA, 244 bp, Glycine max
  unsure (1)..(244): unsure at all n locations
  Clone ID: PAT_MRT3847_46946C.1
ggaaaacacaagagtccttttcccaatcgcacgcgcctcctctcaagtctcaaataatagatagactctaagcnatgatgttaacacttcaccccttttgggctgtttagtaacatcattccatacatttctctctaggccctaccttngngtcggngactctctctancccntccttttntctcacccttttganatttgagcagtagcactgttgctacacaacaacatcatgaacatgaac

SEQ ID NO: 84086 - DNA, 351 bp, Glycine max
  Clone ID: PAT_MRT3847_46947C.1
aaaaaaaaaaccaccagggggttaaaaaaggggccaaaaattaaatacccctttttttgagggcaaaaaaatatccttactttaaaaacccacccatacggggttttttgggcggccaagggaaaggtaaaaaaaaaggggcgtgaaaaaataataaactaactggaccagccctcgattaaaacaacaccacttttggaataaaaaaactgggccttccttaaaacctgttcaaagccctaaaaaacgtccccacttgggaaaccccaccagttttgggttcctcccccaccctcggttccctttttaaaaaaaacacactcgttggttctccccttaaagcgggggaaa

SEQ ID NO: 84087 - DNA, 489 bp, Glycine max
  Clone ID: PAT_MRT3847_46948C.1
gtctaagactaatatacagcgttttcatataatcgatcgcttggcctatatgatgatgatcaccgaaatgccaaccatgaatccagatcgattcatatgcatgcgagccattgtgatatttatgaagttgcatgttgcagatggtgctcaagaccatgttatgtgcattgagactgagagggacgcactcatccaattcaaggctgcacttctggatccctatggcatgctctcttcttggaccacttctgattgctgccaatggcacgggattcggtgcaccaacctcaccgaccatgttctaatgctcgaccttcacggagtgaatcgctcttggagacatgcttattgcacggtcataggcagttgctcagatgctattgatgtcatggcagtcgtgaaagtgttcaagctgcatcacagatgatagctggtgccagcttgatgaggtggaaaatgcgaagagacacttctaatttggaggtgaga

SEQ ID NO: 84088 - DNA, 872 bp, Glycine max
  unsure (1)..(872): unsure at all n locations
  Clone ID: PAT_MRT3847_46949C.1
gcaaagaagcttaccatgggtacttttcataaatcctaacgcgggctctagctattacaatgtcaaccttgtgtgtatttaattaactggcaccgttgaatctgaaatttcttattggacttgttcacatgactttgacatatgcacncctcttgtgtgtgtgggtgtatatattcaagtagatcacttcatcccatctcatgcattgaaagtctcaaaaacacatatattactcagactcgatcgagctgaaatggggaactacatttcttgcactctatcaacagcaggaagcagcaagctgcactggagaggcataaaggtgatatttccgagtggggagattgagaagttggaagaaggagttaaagcagcagaactgatgcttgagatgccaagcttctttgtggtgaacactcggtctctaaaaatcggaggaaggtttagtgcactgaacgcagatgaagagctggagtgtggctacgtgtatgtgatggttcccatgaagaggcttaactctttggtcaaagcatctgacatgggtgccttgttactcacagcaaaaaaagtgaccagagttgttccagagaaagaagaatcagaggagcctaagttcaagttggatgatggcattctagagttttctagccctgagttcatgcataggttgtctatgagcaggtcaaagaagcctttgcttgagaccatagcagaagaacctcatgtgtgttcaagatcatgattcatgattcatgaatggctttcttgtgattcttcattccctgcttccatgtttaattaccagttacgtacgtacacgacatcatttttaggattggaattgtatgtattactagaactaattccccgaa

SEQ ID NO: 84089 - DNA, 273 bp, Glycine max
  Clone ID: PAT_MRT3847_4694C.1
gctgatcatgagcaaggtagaaactagaaaataagagagtgtggattccattaagatcagaccgagagacagagagatgagagtgtttccaaggctcaaatcgctgtcaagagcggtgcacgaggaacaagagcgtgagcatgatgatgaggagaaaaagaaggcagcagaaaagttgtacacatccctaacagtttggagaaaatccttgctaatgagttgcaatggattcacggtgattgattcttatggaaatttggtgtatcgtgtcga

SEQ ID NO: 84090 - DNA, 390 bp, Glycine max
  Clone ID: PAT_MRT3847_46950C.1
attaacggtgcgcctttcagaggcggagaggcccatgcgggtggtttcattttctaataccagggtggagatggaaccaaacatgaattcaaggtttcagcttcagaggaccactaccaatggtgattatgttcaaggaaaagatctcgcaatggtgaaagttaatgtaccatgtgctgctgttggcttgacatcaagttacactccaactccactgatggaatctggtacgcaaaaagacagagggttaattgtggaatattttggaaggatgtataacgttgctcataacgtgaatcagccccaagagaaagatttgttggagggaaatgtttacttcgagagcaaatctcgctatagattggaaaaagtggcctgtactaaagcaca

SEQ ID NO: 84091 - DNA, 230 bp, Glycine max
  unsure (1)..(230): unsure at all n locations
  Clone ID: PAT_MRT3847_46951C.1
aggaacccccggggcgacccacgcggntaaaaccgcagaaaaaggcaggacaaagaggggcaatggcacaggaggaacccccagaccccaccgcaagggaaagcagaacagcaaaggcaagnaaaaaaagacagccacaaacgccggcaacgcaagacggagcaaacaagaacagaagcgaccagcacgcaagaaccgcccgcaacacaaaaggcgaaaagccccaggcg

SEQ ID NO: 84092 - DNA, 578 bp, Glycine max
  Clone ID: PAT_MRT3847_46952C.1
gcacgaggttttgtttctctaatggcatatcacttagattgaatcttcagctattttgttagttttgaaactgcagcatgggtttaacattatttgagcaatttccaatttatttctgagcatacttgtgtgtatattttctttacttgctggttctttgggcactgatgacatctctttgtatgtttgcagttcagcttctaaactcttatttgtgtgttaaatatgaacaatctatagatatcaatctgtttttgcctttctttttctgattttacctaatatttctggtagcaaatgacgaatcgttcttagttgataaaatgccttttctatttgacttttcaatttatatatcattctttctaaatctgggaacagaaatattgaaaactgtccatcttacagtttcaagctcaattcactatactttttgctttggttttttcggttgttgattttttgtctataattactgttagccttgtcttcttttgagttcataattgttgttctatcttgtaacgaaagaataatgagctgcagatacacagaaattcaatattattcagttttgc

SEQ ID NO: 84093 - DNA, 262 bp, Glycine max
  Clone ID: PAT_MRT3847_46953C.1
cgcagtgggatcatattcactccaaagaaaaaaaaaaagcctcagagatagagaatggggcaaagacaaatcccagaccccccgaactttaagaaatagggcgttcattcccacaccgttgcggggattccccaagacgttgtaaatccgcgcaaaatcgaaaccgccgatgagtcctcgaattccgatcacagcacttcgccggggaccgcggcggttacggaccccgcgacggtcgccggtaacaacgtgctgttcgccg

SEQ ID NO: 84094 - DNA, 470 bp, Glycine max
  Clone ID: PAT_MRT3847_46954C.1
gagactgataaggtgccatctgtagataaatctatttctgatcttgagggtatgggagtgataatttatggacttgatgaacccgtaggtatatcaaatgatggtgagatatcatgggacaacattgctggttatgaacatcaaaaacgagtggtagaagatacgatactattggctttgcatagtcctgaagtatatgatgatattgctcgagggactcgtcataagtttgagtcaaacagacctcgagctgtgctatttgaaggtccaccaggtacagggaaaacttcctgtgctcgtgttattgccaatcaagcgggtgtccctttgctatattttccacttgaggcaataatgtctgagttctacggtaaaagtgaacgtcttttggggaaagtgttttcactggcgaacactcttcctaatggtgctattatatttctggatgagattgattcttttgctgctgg

SEQ ID NO: 84095 - DNA, 370 bp, Glycine max
  Clone ID: PAT_MRT3847_46955C.1
aacacgggaggatttccaatttatttactttggcaaggggccaaaaaaaaacaaggggaaaaaacactttgggtagggggggtacctaccgtttttttttccccaaaaaaaaaaaaatttaaaaggttcctggccctttttggggaaaattttaccggggccaaaaaaaacgggttaaaacataaaaatttaaacaaactccccttgccccggttttttttccacaactcccaacagggggaagccaaaccctggttttaagggggggggggggatatagcagctccaggggggaccctgggaatttctccacacacattttgacctttggaaaaattgggaaaatcattttttccccaggttttccccc

SEQ ID NO: 84096 - DNA, 341 bp, Glycine max
  Clone ID: PAT_MRT3847_46956C.1
gatactgaaaacggatggatgagaagtactaagcaacttcttctgcacgagaaattccttcatcgccaaacacaatgaaggaactgggcgtggttgcaatcctgttgtcaatagagttctttgacgtgattgtctacactgtaagcaaagcagccatgaagaagggcatgaatgactttgtgtttgtcatgtactccaatgccttcgcaacttgcctccttcttcccataacttttatcttttataggaaaagagctcttcctccactcacatatttcatagttggccaattatttattaatggcttcttaagttgcagtgttcagatgctcaggtttttt

SEQ ID NO: 84097 - DNA, 1261 bp, Glycine max
  Clone ID: PAT_MRT3847_46957C.1
cccgggttaagagggagaagctgagaagacttaatccgtacatatttttctgcaccagcaaaatcagtgcaaattttctttgtagcctatatgttcatatgaaggagcatacatactagtatgagataattaaaatgggaagttatagctgctgtcaaaattaatgtatctatctagctatagctagctagcttcctctgcttgaataatatatatgcacatctaaatctacaattattattcacttaaaaattaatctgatgtttctttttatttttatttctttccaaacaacaaggaagtctagaaaaaagaagaaagagttttgtaggctaggcttacatttgctgcttcttactactagttgtttgcttgttattgtgcatccaaaccttaaaaacctgtctcttgacacccacttgagaacaaaactgctgtacctcctgctcattgggtttggggatcttccaatcaatcttgtcagcaaactccatcatcctatccttctggggctgagagaacttagtcctgaacctcttcttgctggaagagagtagtggtgcatgctgctgcactgatattaactgggctcctcccagtgttggactgaaacatgttgagatcttcacttgatgactcagctgggcccccaaaggccatcatcactggggagaccaagcttgttggtgtaaccaatctatgatggagggaagatgaagagggtgtagggtagtgaaggtgaccgttgtgcttgttggtgtagtagctgtggtaatttggaacatgtgtttgcggttgtggttgtggttgcggtcgtaattctccttcaacttcttttctgtggaagttgcggtggcactcgcatgctgcgcatcttagtgattctggcgtgccttcccccacttgccatgaactcgccgcagccatccaccacgtggctccccatgctcgccgcgtggttccgaagacattctcggtacctgatcgacggcgtcgaggttgttgttgttgtcgtttgagccgccgctgttcttgagggattcgatgtgggagcaattggggtgcttagatctggatcttacgtgggttgatgaggtgcaagagcagaagtaggaggtggtgatggtgcatatacattatgatcagatgtttcgttgaagattaatgtgagagtttgattagttggttgataagcctgttgatcatgatcactgctacttctttcaacaacagttgtagaagagagcttcggacgcgtggt

SEQ ID NO: 84098 - DNA, 251 bp, Glycine max
  Clone ID: PAT_MRT3847_46958C.1
tggaactggcgcaatcatggccgtcggtgcatcagaaccgacagttgttggtacaaaagacggtagaatcgggatcaagagccaaatgcaggtaaatgttaccgctgatcatcgggttatttatggagctgaccttgctgcttttctgcaaacacttgctaagataattgaggatcccaaggatcttacattttaaaagtccctgagtgattgtttttaaaagttcctgagacattgtttttccttgagcc

SEQ ID NO: 84099 - DNA, 293 bp, Glycine max
  Clone ID: PAT_MRT3847_46959C.1
atcataacacctttactccacaagagattttcttcgtaactcatacaacacctccgatctttgacagattcatttagagtttacagatagagcagctctattctcaccagagttgtcattcatattattcagacaagactaacaatacactaccattttacagtgtattgcatgaccaaaactatttgttacaacttggtacaattctaatcttgtaccaagaatttattaacctttctgctttgctgatttaaattattgcacattttgtgtggggtctactctgcatatct

SEQ ID NO: 84100 - DNA, 230 bp, Glycine max
  unsure (1)..(230): unsure at all n locations
  Clone ID: PAT_MRT3847_4695C.1
caaatagattgttgagcagctacatggtatctatcataacctgaagtgcacctttctctctctgtctccctgtctctctctccctctctctcaatatacctcttttccctctgtgtgtgtgtgnntgtgttgtgtgtttgtgtgccgtgtgcctttgcgaaaagcaaagcttagcaaacccctgattctggaagggtgccaataaggggttatgaaatgaaaacccagtg

SEQ ID NO: 84101 - DNA, 936 bp, Glycine max
  Clone ID: PAT_MRT3847_46960C.1
attcagctctatgtaggtgttgcggctgctgttctttcaagtgctggctacaaggtggttgttcttgagaaaggaaactatttttctactcaggattattcatctctagaaggtccttccatgaatcaactatatgaaactggagggatccttgcttctgtggactcaagagtgctagttttggcaggatcaacagtgggtggtggctctgctgttaattggtcagcctgcattaagaccccacacaaggtgctaaatgagtggtctgagaatcacaagcttcccttcttttcaagccaagaatatctctccgcaatggaaactgtgtgtgaaaggattggtgtaacagaaaactgtacacaagagggattccaaaaccaagtgctgagaaaagggtgtcaaaatcttggcctcaaagttgactatgtgccaagaaactcctcagggaatcactactgtggctcatgtggttatggctgtccgaaaggagagaaacaagggactcaagctacatggcttgtagatgcagttgaaagagatgcagtaataataacaggatgcaaagctgagaggttcttgttggaaagcaacaggagtggaaatggcagaaagaagaaatgtttgggagtgatggcaaaagcattaaacagcagagtcacaatgaagttacaaattgaggccaaggtgacaatttctgcaggtggggcacttttgacaccccctttgttaatctctagtggactaaaaaacaagaacattggtaaaaaccttcatctccaccctgtgctaatgacatggggatacttcccagaatcaaatgattcagaattcaaaggcaaagtctatgagggaggtataataacatcagtccataaagtgccatcaccagactccaattcagattcaagggccataattgaaacccctttgctagga

SEQ ID NO: 84102 - DNA, 584 bp, Glycine max
  Clone ID: PAT_MRT3847_46961C.1
acttactgaacggatatggaaccaaagcctaaatactcgccttcagaaaaaaaagtgaaaactccaaacatttttgagcgagctaaggaggagattgaggcagtgtttcatcgcgacaaatcgccacaccatcacaaagaaactcatgggacaagtgatgacattgatgagggaacttcacctgatgaaatcaaagcgcctggtgtgtttgaacgggtgaaggaggagattgaagctgttgctgaggccattcatcccaagaaagaatctgaatctggcactcgtgatgtgtcgtcaccaaagtgatgtctaggatgtgcctttattttgtaacaaagagtgtgaagacttgcctcaatggtgttaaccatcaaaactatcatgtttgttttctccatttatctaacttgtataaatagtaaattcctctttttttcaattgtttatttgaatgctggtccttttcttttcaaaaaagaaagaacttaattatccctggagtggtacattatcaatgtgaaagtttttattgtagactctgatctgtaactttatctggtatgtcagcaggatttatgattcac

SEQ ID NO: 84103 - DNA, 517 bp, Glycine max
  Clone ID: PAT_MRT3847_46962C.1
acccattataaactttaattttttttttccaaattgggttttagccctcctaaaagctaaaaaatttcatccaagggaaaaaaaatttatggcgggcaccacaagggatactctaccctcaaaaacccggaaagaggggaatttttcgcttttgcaaagaaagggaggggcaaatctttgggggggaaaaaaaaaaattcttagggtcttttctttacgggggaatatagaagggtttcccccaaaaggggaaagaaaacaagccaaggggctcaaaaatacttgggatttccattttactttggggaaggacccccaaaaatttggggggaaagaccctcatggtgcgggggccgcgtaaatgaattggaggaattaaggggttccaaggggggtaaaacttccaccataggggggcaaaattggggggcagtgttaagggattgcaatgcaagggcagctgcaacttgggctcctttttgggggggggggccccccaattttgggtccattattt

SEQ ID NO: 84104 - DNA, 459 bp, Glycine max
  Clone ID: PAT_MRT3847_46963C.1
aattcggctcgagggtgggggaaaaagggatcgagtaggagatctccttccctcactccctcccctatccaaccaacgctccccttcttcaattcgaccaatcttccccatcttttacccttcattcatcgatccataaccctatcgtcttttcacattgagccattgagtcaacatcccatcaacacaaatcttcattgtaacattaattaacaccaaatcattggaatcaagagttcattgtccattttcctatgacgtgcctcatcctctttgacttcaattcaccatacaaaatcatcagtcactacacaagattttatttttgttcgatctcacttgaaaaaagtttgagagaatctagaaccttgggagtcgagaagatctagaatcttcctcccaacttttttcaagaacgtcattctatcatcatatgcagtgacaccaacctatgataca

SEQ ID NO: 84105 - DNA, 280 bp, Glycine max
  unsure (1)..(280): unsure at all n locations
  Clone ID: PAT_MRT3847_46964C.1
cgacgaggttacaagaccaccatcattatgggtctctgcctctactcgcttggtgctatcctcttctggccagtcgccaaattcaccggtaaatcccccaaccaggccatctttggtggtttcgtcgtctgcaccgccgtcatcgcttgtggtttgggcctcgctcgaagtcgccggccaactcgtacatctcggtcatccccaccccaacaaggtgtcnanctncngatacagttcncccagtntttnnacngganccgcctccgttcaaccggncaat

SEQ ID NO: 84106 - DNA, 705 bp, Glycine max
  Clone ID: PAT_MRT3847_46965C.1
tcgggaaccatagtcgtgtctcattatcactcaccattggacaaccgacttcacttctccgttacccactatgagagatacggcatcgtaccaagctcaccgcgtccaagtgcaccgatacgaaaggctgcgaggaagcagttgccgaacaaagtagatcgcgagtcaaccacggcgaccggcggagagaaggaaacccgccgcttaatgccaaaaaggatgactctggagggacattcaaacgtgccacaagatgaccgaacttccgatcagaaaactcacattccgaggatcgccagagaaatcgctcaagattgctgaaccgatctcaggtgtcaaaggagcgccgattcagttcttgaagaagccgtagaggttaatctcggtgaaatcattgaggacactacccactgcgctattctggctaaacgaggtaccactatgtccaaggacatgcccctcgatcggatagtctaaggagagatagcttatcattatgggtgcatgtgatgagacattagaaagaggttactggtgattggactgcgagatatcttcaaatgcctctgaattgaaagatgcaacttatgtcatgcagagtatattcacatagtggagctgcacaactgagatgatgatgcacaacgacatgaatctctactatcatatatccttccgtgacaaagagaaaaggaaaaggccccg

SEQ ID NO: 84107 - DNA, 234 bp, Glycine max
  Clone ID: PAT_MRT3847_46966C.1
atggttgttgggcaattacttaatgcacactcttttgactggcgcaccaacaccattggacctccttctcacttgccacaccattttgtcctgtcgcacctccttcattgtagcaagcacagaaggcgtcacacctcacttacatggatgaatggtctttggtcaggtgaagccaccacaccttcgttcacacttgcaaccctacctctgcctatgaaggcactacatcgttga

SEQ ID NO: 84108 - DNA, 398 bp, Glycine max
  Clone ID: PAT_MRT3847_46967C.1
caaaacggcagcaatgaaaaagatgtcttctgctactagatcgctcaaaattgatgaaatggaagaactagatgaagaagactctgatgtgacagcagaagattatgatgcatcggattagttcagttaaatatttgcttaacatgatacatctaatgatctttacgttgctagcatcatgttgttgtattgtttgattacttagattgcaggttctgtacagaaagagcgcatcaatagttcaccttgcattttatcgtaagtatatatataactgtaatagtatcgcaatgcggagtgaatgaatttcttgtgtgtagaaattactggttggaaaaaaaaaaaaaaagtacataaactttttgggcgatgaactaaaaaagccaggggtctcatga

SEQ ID NO: 84109 - DNA, 176 bp, Glycine max
  unsure (1)..(176): unsure at all n locations
  Clone ID: PAT_MRT3847_46968C.1
ctggtggggcgggcggggaggggcttttgtgagatttcagctggtggggatgcctgtaatgtngtcggtcgcacgtcctcttgttgaatcgactgcggacttttctagctcggtctcttattcgagcttcgtcgcgtgcatgctagtggagctctttattggtccctagatcattc

SEQ ID NO: 84110 - DNA, 237 bp, Glycine max
  unsure (1)..(237): unsure at all n locations
  Clone ID: PAT_MRT3847_46969C.1
gccttggatatgttgtatatttgtaattgatagttactccaataatttgttaattcattgtattgatgcatctctagtttganttgaaatgaagtgacaaccttctagtgacatgccaattttactgttagtaggtatataattatttanntttccaatttctgttgtaaagaaacttcaaatctagtattgtttagatgtgctaaaatctnctattgtttttnttttccnggttca

SEQ ID NO: 84111 - DNA, 450 bp, Glycine max
  Clone ID: PAT_MRT3847_4696C.1
ggaacaaggtaaatttaaaacatatcacccgtttaacggggaccaaggaacccaattaaatttggggggggggcccttacccaaaatatgccggcaaaaaaaaaaaaaattctttagaccccattatggggaaaaacccaactaacaaccaaaatgggtaaaaaaaaatttttataaccccccccccgggcccggtaaaaaattcttccactttttaaaaaaaggggggaaaaaactaaaaaaaaccccccttaaaaaaaaaaggaggccccaaaagggggggccccccaggaaaaaggtttctaaaaaggcccctccccttgacggggggggaaaccgacccccgccctttgaaaacttaaagttaacaaaacccatgtttttttgtttggaaaaaaaaagggttaccttcccgggggggggcggcgacaattttagaaaaaagggccc

SEQ ID NO: 84112 - DNA, 423 bp, Glycine max
  unsure (1)..(423): unsure at all n locations
  Clone ID: PAT_MRT3847_46970C.1
ggggggggggggggggaaaaccaaaacaaanaaagagaggaagangaagggnagcngggaaggganaannannacacgcagacacgggggccnagcncanacaaaggnacnccccnaanggagaanannaaaanccgcagggganaaanaaacaaaacggggggggggnngangaaaaagcncccaggannccaccacanacaaggcccacagagaccgagcacggacgagngacagcaaaggaaagaancaanacagggccaaagcgagagaacgccgcggggccacgaagggggaggnagagcanancaggccncaacanccagccacgagaacgagaaaggggggaacgggaacccaacgcccgcaaaaaacgcgggnggaaacgccacccagggaagacggaacgcacgcaaaaaggca

SEQ ID NO: 84113 - DNA, 1145 bp, Glycine max
  Clone ID: PAT_MRT3847_46971C.1
ggctcgaggtgattgggagaggagggtatgcagaggtttataagggaacattgaatggtggtgatgaagttgcggtgaagaggctcacaagaacttcaacggatgaaaggaaggagaaggagtttctgttagagattggaaccattggtcacgtgcgccattccaacgtgttgcctcttcttgggtgttgcattgacaatggactttacctggtttttgagctatccactgttggttctgttgcttctcttattcatgatgagaacttgcctcctttggattggaaaacaaggtataagatagctctaggcactgcacgtggccttcactacttgcacaaaggctgcaagaggaggatcattcatagggacatcaaggcctcaaacattttgttaactgcagattttgaaccgaagatatctgattttggacttgcaaggtggcttccctctcagtggactcaccattcaatagccccaatagaagggacatttgggcatttggcacctgagtactacttgcatggagtagtggatgagaaaacagatgtatttgcctttggtgtgttcttgcttgcagtcctctctgggaggaaaccagtggatgggtctcaccaaagcttgcacagctgggctaaaccaatactaagcaaaggggagatagaaaatttggtagatccaaggcttggaggggcttatgacgtgacacagtttaatagagtagcctctgctgcctccctttgcattagggcatctgcaacttgcagacctatcatgagtgaggtactggaggtaatggaggagtggaagatggataaagggaagtgggaaatgccagaggaagaagagcaagaggaggaattatggggttttgaggatctggaatatgaatatgacagttccttttcaatgtcactaccagactctgttggaagtacttagggttaaaggagttaggtacaactttcaactacttgtacatatattgttacataaatatagaaggtgcagataagcttcttgtggctgttctgtttaaccaaaactatataacttaagtgtttcttttttgtatttatgtggatgtaaaatatttattaaaattgaactcagttgcttcggcaaatcgcatggcttaaaaaaaaa

SEQ ID NO: 84114 - DNA, 1375 bp, Glycine max
  Clone ID: PAT_MRT3847_46972C.1
tgctgttctaacttctaaacaataataatagaaaagacaatacttgatattattggatgctttactaatctcctctgaaatatgtacgggagccgatccgggttcaacccaatttgattcttctctctatcgtcttcttcctctgtttcgtcagggtttcctttgtctcacttggaccaatttggttcttctcttctctctatcgtcttcttcctctgttccattagggtttccttttctccctcggagcttccaattgaaatccaattcctcaatacctccacactttctcgttcggaaagctcgcgaattcgaaagacatcgacggctccacgtgatacgttttcttcctctctggttatcaatgttggctactagtgcagttgcatctttgcccgtattaccaccagtgagaagaggtggccaccacattgaacagaatgttgtttccacattgagctttccaagacgattactgacaactaataattcaatacctctgagtggtacacagtttccatttggcagaagagctcattctactcacacagcaactataatatgtgctgcagctttgaatgcaagatgtggtgcagagcaaacccaaaccgttactcgccaggctcctacaattactcatgttcctggcaaggagaagtcgccacaacttgacgatggtggaactggatttccacctcgtgatgatgatgatggcggtggtggaggaggtggaggcggaggcaactggtctggtggattcttcttttttgggtttcttgcttttcttggcttcttaaaggataaggaaactgatgacacatacagggatgaccgaagaaggtgaaagcattggccaccacagatgcatgcttttgcttggagtattttttctgctttatttgttgatttcctctcttatatatgcataccgtagattacattggtcaactgaggttctgtgcttgcttatgatcatgtaatgcgcagaattttgtatgttacaaattcaatcccacttgaaagtttagtatggaaggaaatactgtgatatttagtatcaaattacatcagcatagtagttatgttttttgacttagatagtacaaattagcttttcatggtccttgagaggagcactttgtggcggcatacactagcaaatgctctttacctggttaatcttggttgaatattattatgttacaatctaaaaaaaagctaatttaggatacatcaaaaaaatgtttctagaacgaacaaaattattgtcatgattgacgtgggcttaaagcttgctctttaactgccttgcttaaccttgattataattctaagaaacaaatgtccataatatgatcttcaatatagttttaac

SEQ ID NO: 84115 - DNA, 1095 bp, Glycine max
  Clone ID: PAT_MRT3847_46973C.1
ataatctcaggattggtggttcttaggaaattggacaaaatttgaaattagctttctggaatccatttgtttctgaacaggtttataatttgagaagtcagaaagttgtagaagcttttagtcaagaggaggagaatagatgaactgatttgtgaatgtatttgtgattttctgtgccctgtttcaggatgttactatgaagattatgtccttctctcaacaaggatgtcaagcaatttgcattctgtctgcaaatggcacaatttcaaatgttacactacgccaaccaactttttctggtggtactttaacatatgaggggcgttttgaaattctctccttgtctggttcatatataacaactgagaatggattaacaaagagcagatctggtgggatgagccattctttggccgctccaaatggtcgagtaatggggggtggattggctggtttgctggtagctgcaggtcctgtgcaggtgttgtgggctagttttgttcctggtcatcagctggagcaacagaaaccaaagaagccgagagtggagcatatatcaatggctgctccgacgtatgtcaaccctacttctgctgaagaaataagaattggtcttggtggagtaaagccaatcatgacaccggctgcttttcaagtgcaccacatttttggcaatggtcaaagctctgggaactcagcttctgatgattcagctcctttccctgaaaacgagtccaaccctagccatgcagatgctggagttgcatgctaaacattgtttcctgtcaagtatttggtgttctacagagtcaaaccccatttaggctcatgcttgactgatgctgacaattaacatgacaaatgtcttatagtgggatggatgagtatcaggttggttttgacttgagaaattgttctctttggtgctaggtattattagtgttaggaaatctactttttagctttccatgtttctctttggtgttatctaatattgtttattgagttgtagcagttagatgtaggatatatgttatgccacgttcttattagattttatagattgtttgaaatgagtgcatgtgggtgctttct

SEQ ID NO: 84116 - DNA, 473 bp, Glycine max
  Clone ID: PAT_MRT3847_46974C.1
gccaaatcgtgcgctcacactccaaccatgaacatttcagagagcgccaacggactgccttagcgtgttgaccaacccagtacccactgcataaagcaatcttaatactcgcaccactaacactactccaagaagctgttactatcaagaacccttcctagacggtgctagccaccgagcccaaaaggcttcccaataatacgaaacaaggtgaggaagagagagctaacaccaccgaggtctctgcaacctggacgcacactactgtggaatatgccaccttcacatggacgtgcacacatggtggccatctccgacccagacgccttgcgacatgttctccaagcacactacaaccttgttaccaaccgccccaccagcatcgacataaactacctgacctacaaccacccctacatggtcttgacccactacagccccttctggcgcccgatgacgaaactctgaaccat

SEQ ID NO: 84117 - DNA, 456 bp, Glycine max
  Clone ID: PAT_MRT3847_46975C.1
ccaataaaaccttttttttttttttccaggggaaaaatgatcattttttttacaaacaaggggaggcttgtaattaatcccccaagggcggcaaatccagtatgctctatggccaacaggaaaatattggggagggatatggggaaaaaagtaatctggggaaaacaatcgttctaacaaaaaagagagggggctcgctcgttccgcccgagattagaatccggccggggaagccaccacccttgaaaaacgggagatgcccacccacctcgggttaggacacctccaacacccccttgaaggtttggataaccccggccacaagttttttcatctgaaaaaacgccgttccccttcctaaacacaccctgggcccagtctgattaaccggataagcaatggcttccaccccataaaatggacacctacattccaccccgcccctaattagccacc

SEQ ID NO: 84118 - DNA, 283 bp, Glycine max
  Clone ID: PAT_MRT3847_46976C.1
gcagacttcctgagtgaataggatcagagattagttttgtgtattgtaggttaatgcgaattccattgccatggctggtagcagaccaaccagtggtgactagccatccggtagcaacttgcttgtgcgattgttgagaagcattggtggaatcattaggacggtgtagcagtactgaatggttgcgcgagaacgaagcggaggagatggctgaggcgtgctaatgacgtcttggtgtgggtgcaacatagcgagatatggaatatatcacatggtacatgga

SEQ ID NO: 84119 - DNA, 166 bp, Glycine max
  Clone ID: PAT_MRT3847_46977C.1
tgatcgaccgattcggctcgactagtagaatagtagaatagtacagggtgttggctacccttgatacattaatcaagacagaagtgtgagagaaactagaatccgaagaaccatggagaaggagtagaaagacacgccgtggttccgaatgatcgcttctgaacgc

SEQ ID NO: 84120 - DNA, 331 bp, Glycine max
  Clone ID: PAT_MRT3847_46978C.1
gaacactactccacaagggtcatatctttcacgctcttagccctatccgggagagaatctttcccgcgagccccgggtccggtttcaccaactgggaggattcggggtgtttcccatttcagcagcaagagctttacgcgcctgttcgtaataaccccttctgaggagctgtccatgccccttgccaccgtatgcgacgtcactaggctccaatgcacgccgtgcaccttttgctactgctaaaccaacctatacttagccccatcaaaatcctaattctctgtcagaatcccctgctaatcccctatgtgtagccgcctcgactactccg

SEQ ID NO: 84121 - DNA, 403 bp, Glycine max
  Clone ID: PAT_MRT3847_46979C.1
ggtctagaattcccgggtcgacccacgcgtccatacaggcgtcagctgcaaacagacggggcagtgaggagagtgtgagcatctaccacagaggtgcagatattatcatccatgtaccttgtttcacatgctgaacagtcattgcatacatatgggatatctgattacatcttcggaaatcagcttacagttgctgataagccctgaattctgcgtcaccgttacgatattgctgtacgtgcattctcaagattcatatcaatatcattgataagttcatcatctacatcactccgcacaagtctgatcccagttaagaaggccttagggaccacacgatgagatacaatctttcagttgacatccatgcaatctggccaacgaccaatcttttatccatttc

SEQ ID NO: 84122 - DNA, 1073 bp, Glycine max
  Clone ID: PAT_MRT3847_4697C.1
ttttttacattatattcaagtggtatttaaagatttatgaagttcacaaattatatataatcttttttaaaagaagaaaaaaataaagaaaataagcccaaagtcctattttggatcatttcttcaactggttcttcttcctcttgagtaagtaacctaatatcacggtcaccacggatactataccgattcctataagtcccctatgctgatttagcttctcatatggtcccttgggctgattttgctcctcatctgctacctttgattgattttgcttcttgagattgtagcctagttctgagagtttcttatgtgacattgcatattctttgaagaaactattctcatcctttgaatactcttcaacatggcggcggaagctttgatcggttagtaaagcatcttctatgggaagcctagatgataaatccttactcaatattttcttataataggagttatcaaacttcaaagggtcctttggccattgacctttagagtcagaacgatctttaagtgtttccccccaagtgaggcctccacatagggcaacgatgtgtttatcatcacttatacccatacgagaaaatatattccttataatcgatgcaccttgtttgacatctggaagaagcccttctgctgaagattccattgaatcttttctcccaggcaaaaattcaatagttggacccccagagacctctattgcaacaacaccagctagctggtaaaggtctgcgtatgaaacttttttaagtttggccttcacatgctcacataattgagttgcttttaacaatccctcgtttgcttcgtgtttcaactctttatcagtcctgatagaaccgttggggcctcctgctctgtttctggcatcgtaggtggcagcatcgttccacgctaatcgaagcatgagaggagcgcattggttgctggtgatgaaagcgcgaagttcacgtcgagccttgtctatttccttgagatattcgtcgtcaacaacaggttccgccattgtcaaagtttgtttaatttgggattgtgtcgtgggagaggcagcctcctcctgc

SEQ ID NO: 84123 - DNA, 599 bp, Glycine max
  Clone ID: PAT_MRT3847_46980C.1
ttttttttttttttttttttttttttttttttttttttttttttttttttttttgttttttttttttttttttaaccccaaaaaggggcccatttatatattattgggaaaaaaaaaaggggggaaaaaaaaagggggctcccatggggggattaagcaaaaaggaggccgggcaaatccaaaaaatgggggccatacaaagggggccaatttttttggaaaactacataaacaaaaggggggggaaacccaaacccggggccaattaaaggactagggggaacggtttcccaattttaaaaaaaaaaaaaccccgaggcccacataaaaccccggggactaaaaaaccttcctgggggtgggggtttaaaaaaaaaaaacccaaatccggatccggatccgggggcctccaaaagggggggggcccggcccaaaatggagggggaggggttcctaacggcccaaacttggaaaggggaagggtcgaaagggagccacgggtccactttgaactgatcccaaacccaaaaaagggggggcccaggggaggggaccctcacgtttttaagggccccgccggggggagaacccgacccgcg

SEQ ID NO: 84124 - DNA, 437 bp, Glycine max
  Clone ID: PAT_MRT3847_46981C.1
cgcaccgacgatcgaggcccatgtagcaagcagaaaagcggagaccatgccccatcttttgacttggcagcggtgttctcgctccccaattgctctctcgccgccgctattttagctctacgctaaaataggcactagtttagtagttcgcacgcttctgttcagattactagctttccaccacggcattccgagccgttggtgctggaacatattctggaccaaggcgtgtgggaaaagaatagtacatgttacgcggggtttctgagttgcaattccgattatgatgctcgggatatccgaactcactacattgtactaaatagccctagccaactgagttactagtagtatcgatggcttatatgcatctcgctgtaggacaggcgagaggagcgtactgggggcccataagggggctaggccctggcccccct

SEQ ID NO: 84125 - DNA, 778 bp, Glycine max
  unsure (1)..(778): unsure at all n locations
  Clone ID: PAT_MRT3847_46982C.1
gtcactatggattctgaattacttagcatattaccccctatcatgtcctttttcctcttcatgattgtggcactaaaaatagggagcaatctcaagaaaactgagtcatctccaaacatacccccaggaccatggaagctaccaatcataggaaacatacatcatcttgttacatctgcaccacaccgaaaattgcgagacttggccaaaatgtatggacccttgatgcatcttcaacttggggaggtcttcacaatcattgtttcctcaccagaatatgctaaggagataatgaagacccatgatgtcatctttgcatcaaggcctaaaattctagcatcagatatattgtgctatgaatccacaaatattgtcttttcaccgtatggaaattactggagacagctacggaaaatatgcacactggagcttttcacccaaaaacgtgtcaactcattccaaccaacaagagaaaaagagctcaccaatctcgttaaaatggttgattcacataaagggtcgcccatgaacttcactgaagcagtacttttatcaatatataatatcatttcaagagctgcgtttggcatggaatgcaaagaccaagaagaattcatatcagtggtaaaagaagctgtaacaattgggtcaggttttaacataggaggatttgnttccttctgcaaaatggcttcaacttgttactggtctgaggcctaagcttgaaaggctgcatagacaaattgaccggnatactggaggcatcatcaatgaacac

SEQ ID NO: 84126 - DNA, 1241 bp, Glycine max
  Clone ID: PAT_MRT3847_46983C.1
agaggaaagagaattggttcccagttgaaattgattcacaccaaactacaggtccgaatcaaatccaaagttttacttacagcacaactctctttatttctggaagcaatatatacctgtgtgctgaaccagtgtagtgtcctatatgctctcagcttctggtttggcatgcacattaaaagtagctcctttttgccacttcttttctcaacctttgaaaatacgccaacgcgaatcacgtctctaaacacaaacgtccttttctcactcatcatagttcaaaagatgatacccttttaattacttcaacaaagagaaccgcgtgagttccacatcactcatgtctgcttccaacttgtcaccatttccatgcatgacatgaagaagaagaagaggagctatctccgtgcttccctttttctcactcacgaggacgagacagtgtgagtactcatactaaacaacaaacaaggtcccctcaaaagttaatcattctcatttctcatttcctcactgcaaatttaacccttccttgcttcgttctctttaaattgagaaacatgccgcaaccattgtttctgtttttacttttatgtttattgtgctcaagtagtggtttatctcaagttttgtccctcgagagagagactcagattctacttggggtcaagaacactcagctcgaagacaaaaacaagagtctcaaaaactgggtccgcgtccgccgacaccacccctgcagctggaccggcattacctgcgactcacgaattcactcacttgtctccattgacctctccgaaactggagtctacgacgagttccccttcggtttttgtcgcattcacaccctccaaagccttttcgtggcttccaatttcctcaccaactcaatctccctcaactctgtgcgtctctgttcccacctccgtctcttgaacctctccgacaattatttcgtcggagtcctgccggaattcccgccggagttcaccgaattgagagagctagacctctcaaagaacaacttcaccggcgacattccggcgagttttggacagtttccacatctgagagcgctcgttttatccggaaacctcctcggcggaacgattcctcccttcttagttcttaggcaacctcagtgagttaactcatttggaactcgcttacaaccccttcaaaccaggacctttgccttcccaactaggaaacctgtgcaatctggaaacactggtcct

SEQ ID NO: 84127 - DNA, 464 bp, Glycine max
  Clone ID: PAT_MRT3847_46984C.1
aacatagagagtcgaaacactggataggctttcgcaccatttcggacatttacatttggaattcaccatctgatgtccgcatcgtggacaaattttgcatttaaaaggaagttcaattgtatcgcctacccctatctttacaaaaatttggaccatgcctaacactttcttactatactacgtgggaatcaatatgatttatggacacagaatttggacagtatctactggggcaggcgtgtggaacagatcaatggaaagaggactcatataccaatctgatgtcacttcatacagcaacagatgatacacgaccagcgggcgcagctctgacagtggcctgacttatacgctagctcagacaagccgaaccttttgagctcattatgcggcgcatggcatcaagcatatagcggtgtgcacgatgctctggtcgagctacatatctttgatgcgtgcgaagc

SEQ ID NO: 84128 - DNA, 614 bp, Glycine max
  Clone ID: PAT_MRT3847_46985C.1
gctttttgtttggggttttctgattaactctttcttctcataactctgctgccgcaacagccccaaatccaatggcttcagagaagaaactttcgaacccaatgagggagataaaggtgcagaagctcgtcctcaatatctccgttggcgagagtggagatcgtcttaccagagccgctaaggtgttggaacagcttagtggccaagcccctgtgttttccaaagcaaggtacacggttcgttcctttgggattagaagaaatgagaagattgcatgctatgtcactgtcagaggtgacaaggcaatgcaacttttggagagtggtttgaaggtgaaggaatatgaacttctcagaaggaacttcagtgatactggttgctttggctttggcattcaggagcatatcgatttgggaatcaagtatgatccttcaactggtatttatggaatggatttctctgttgtcctggagcgtcctgtctatcgtgtctgacgccgccgaatgtgctagtcctctgttggaattcaggtgcgagatcctaaggatgatgctatgaagtggttgctggtgacgtatgatggagtgattgttaactaggaacaaggactagtt

SEQ ID NO: 84129 - DNA, 1088 bp, Glycine max
  Clone ID: PAT_MRT3847_46986C.1
ggctattgttaatacatgtgcttcatcacataactgaaatgagaaacattgattcaaaacctgcctcaaaattaagatactatcccagaaagatagttgacaaaactgataaaaacactcccctgaaatgaactcaatctaactaaacaatcgcctgagacttgttaaggatcactccctcatatttcaattggcaaacatccaacctttttgtttggggttttctgattaactctttcttctcataactctgccgccgcaacagccccaaatccaatggcttcagagaagaaactttcgaacccaatgagggagataaaggtgcagaagctcgtcctcaatatctccgttggcgagagtggagatcgtctcaccagagccgctaaggtgttggaacagcttagtggccaaacccctgtgttttccaaagcaaggtacacggttcgttcctttgggattagaagaaatgagaagattgcatgctatgtcactgtcagaggtgacaaggcaatgcaacttttggagagtggtttgaaggtgaaggaatatgaacttctcagaaggaacttcagtgatactggttgctttggctttggcattcaggagcatatcgatttgggaatcaagtatgatccttcaactggtatttatggaatggacttctttgttgttctggagcgtcctggctatcgtgtgggacgtcgccgaaggtgcaagtcccgtgttggaatccagcaccgtgtcacaaaggaggatgctatgaagtggttccaggtgaaatatgagggagtgatccttaacaagtctcaggcgattgtttagttagactgagttcatttcaggggagtgtttttatcagttttgtcaactatctttctgggatagtatcttaattttgaggcaggttatgaatcaatgtttctcatttcagttttgtgatgaagcacatgtattaacaatagcccttttaaacgacacttttattgcaacaagaacatgtgagacacttttaaatgcattctctttattgattatttattgaaaatgatcaaattttgtgggtctcaaaaaaaaaaaaaaaaaacaaa

SEQ ID NO: 84130 - DNA, 364 bp, Glycine max
  Clone ID: PAT_MRT3847_46987C.1
cagaattgcatgccattaaggctaattgttagaatccatagcttcacaacaacagaaaacaaatcgatggatttgcacacaccccagcctctaagaaagggagtaccatatttttcacgagcattatggactacatattggcaaactaggagagattgcatagactcatgatacagaattgtggaacttgaggaagggaatattaatcctgtgataactaaagcatatcattgcatttgatttcatgtctcagctgcactgcttcaccggcgattttctcttgctttgcactgttctgatgggaactatgaagtgagatgaaatttccctgatccttggacagagggactggggggcgcttgac

SEQ ID NO: 84131 - DNA, 232 bp, Glycine max
  Clone ID: PAT_MRT3847_46988C.1
atggtttcttcattcacttgcctcaaatccatggctggctttcccaccaggaagaccaacaatgacattacctccattgcttgcaaccgtctaagagtgcaatgcattcatgtgtctccaccaattgtcaagaagaaatttgatactttttcctacctgccatacctttattattcacaattgtctaacgaagtataataccttcttacgaagggattgattcctttctttg

SEQ ID NO: 84132 - DNA, 1359 bp, Glycine max
  Clone ID: PAT_MRT3847_46989C.1
tttttttcttttttttttttttttttttttttaattcaaaacttgccttaaaattagcatactatcacagaaagattgagctatagttgacaaaactgataacacaatcctaaagggaactcaatctaactaaacaattgcctgggacttgttaaggatcactccctcatatttcacctggaaccacttcatagcatcctcctttgtgacacggtgctgaattccaacccgggacttgcacctgcgggggggtccaacacgatagccaggacgctccagaacaacaaagaaatccattccataaataccagttgaaggatcatacttgattcccaaatcgatatgctcctgaataccaaagccgaagcaaccagtatcactgaaattccttctgagaagttcatattccttaaccttcaaaccactctccaaaagttgcattgccttgtcacctctgacagtgacatagcatgcaatcttctcatttcttctaatcccaaaggaacgaacagtgtaccttgctttggaaaacactggggtttggccactaagttgttccaacacctgcaagaagaaaaacagaaattaaaaattaaaaaaaaaaaaaaagcgggagcaatgagtgaagtgaaccttggcggctctggtgagacgtcctcaatatctctgttggcgagagtggagatcgtctcaccagagccgccaaggtgttggaacaacttagtggccaaaccccagtgttttccaaagcaaggtacactgttcgttcctttgggattagaagaaatgagaagattgcatgctatgtcactgtcagaggtgacaaggcaatgcaacttttggagagtggtttgaaggtgaaggaatatgaacttctcagaaggaacttcagtgatactggttgctttggctttggtattcaggagcatatcgatttgggaatcaagtatgatccttcaactggtatttatggaatggatttctttgttgttctggagcgtcctggctatcgtgtcggacgccgccgaaggtgcaagtcccgtgttggaattcagcaccgtgtcacaaaggaggatgctatgaagtggttccaggtgaaatatgagggagtgatccttaacaagtcccaggcaattgtttagttagattgagttcactttaggagcgtgttatcagttttgtcaactatagctcgatctttctgtgatagtatgctaattttaaggcaagttttgaaacattgtttgtcatttcagtttcgtgattaaagcatatggattaacattagccctgtttaaacggcacttttgttgcaaagaacttgtgaacccctcgttatgcaattatgcttggcaaaaa

SEQ ID NO: 84133 - DNA, 874 bp, Glycine max
  Clone ID: PAT_MRT3847_4698C.1
ctttttgggggggtttcaaaatattttaaaaaaataatgttttattgtttgttttttgttttttttttaaataaaaaatattattttatctttgaaaagacatactttttagtgaggtaacaacattttaaaacatcggtggtggcacatttttttttgacaaaatggggacctctccatgggggaaaaaaaaaaaaagggccccctataaaaaaaaaaaacaaccctcttttcttttgggaaaacccgcaaaaaaagtttatccacataataaaaaaaaaaaaagacgccatggccgaaaaaaaaaaaaagggggggggaaaaaacaaaaaaaaaaaaaaccccccctccccccctttaaaaaaagaaaaaaaccccacctcttgggaggctagatttgggccaaaacaaaatggggggggggaaagaaaaaaaaaaaaattttccccccccaaataagtgggggggggggaaaaaacccacccccctaaagagagaaaacaaccccccccccccaaaaaaaaaaagcaattcatttttttttttttaaagaagtttccccggggcagaagaaaaaaaaaaaaaaaaaaggtggggtggtgttaaaaaaaaaaaaaaaacttttttgtggggccccccccccacaaaaaaaagagggggaggcccgtgcgagaaaaaaaaaaaaaagagttttctccaacttcttttttttttggggaagaaaaaaaaaaaaaaaaggggggggccaaacagggggggaagaaagaacccccccaaaagggggggcaaaaaaaaaaaggagaggggcaccccaattaaaaaaaagcccgggggaaaaaaaaaaaacacccccgggggaaaaaaaaaacccccc

SEQ ID NO: 84134 - DNA, 510 bp, Glycine max
  Clone ID: PAT_MRT3847_46990C.1
atctttctcttactcacccaagcactactactactactttctttgtagatatgggttgtggtgctgggcaacctggcctgaccttggggctctaggctagctcatgcttagaccaagccctaagagctgtaccgtcacatccacgcactacaaccccattaccactcaccacccacatcaagacgctacaccatgcacccagcacaccaaaaagcccaccaccaggatccccaccaccagcagtaacttcaccaccaggaggaacttcaccaccagcagcaacaccaacagcagtgccagcaccaccaacggctgcacctacacctggttcctctgctgcaggcagtgctccttaaccttattctacagagacaccaagtccgaactcttctaacacttcaccaggaccctgacccggaccctctcgtggcgccgaggtttcaccgtcctccactgcattcttcgacaagcaggccttcattgctacctctgcactcgctggaaccttca

SEQ ID NO: 84135 - DNA, 181 bp, Glycine max
  Clone ID: PAT_MRT3847_46991C.1
taacatcaccccactcaaacatccgtaactactgcacttgtatatgtttctgcatatcgctgatatcaacgaggtatctctccttataccacacttgaattcacacgccatagtgatactgctaattaatgaaggacatgcggacatgatacttgttctcctactagagcagcgacaggag

SEQ ID NO: 84136 - DNA, 1020 bp, Glycine max
  Clone ID: PAT_MRT3847_46992C.1
gattattaataatttgaatctgctaagctaaattatattgcacttgaattcatatctgaacactctccttcaagatatacaagcatacagacaattgtatagaggacaatgctactaagtttagaccctagtagcaatagagagatatccttttaaggctaatgagggtgtggtgaagcttatatgctcttctataactcttcaaaaccttcttcatctccttcattttctatcctttgaaattctcgtctccatgactccatctgatcatcagaatgtagcagctgttctgcaacaaatagtatattattgtagtgtcctgatacaaaatctttaccacttctctctgcaaaccctttgtagttgataatttccacccgaaaacccttgctcatgaatagtttatccacccattgccttgtattggacttaatttctatgtctgtctcagctacgcaggcaggaagttctcccacaaaaagagatcctttcatggccaaactgcttatcattgacaaaacctcttcaaaatttgccagtgtcatcactggaaatccctgtaagtgccatatcctaggtctactaccattattgccattaaattgcatagcctgctctatgtcagatgattccagtggaatatggtagaatatgcaaactttgggcatcttagcccctacacctttaagtttctcagctgcaattctaaatacactttctggggatatgtcaaatattaggatcgaagagggcaactgaagtctgtatggccgtgtgtccatgccatcagtcaacaaaattagctgctttagtccgtcaataaggctcactgtatgaagcagcttatcatcaatgaacttggttgcaagacaatagggatgcaagtcctgaatcacatccttgggactattatgagggacaaaacaaccagcatatggatctagaaacagaggctctggtcgaagagtttcctggtgacgaagagaagcagaggcagtggcagcaaggagcaatgggtca

SEQ ID NO: 84137 - DNA, 510 bp, Glycine max
  Clone ID: PAT_MRT3847_46993C.1
ggctcgagtaccgattctgtcactgtctcttatctgcagctctacatggagactctccaggacttgctgaatccagcaaatgacattattcctatagcggaagacccaagaagcggggacgtatctatgcccggggcaactcttgtggaaatcacagaccaacatagttctttggagttgttaagagtaggtgaagctaatcgaatcgctgctaacacaaaattgaatactgaatcttgtcgcagtcatgccatgctaatggttcatattaagagatctgtcttggaaaatgaagatatgcctagtcaaaatggtgatgcctctcatttgactaaaccttcacaaccacttgactggaagagcaagtcgcatgtcgctgacttgtcaggttcagaacgcgtgcataagtcaggaagtgaagggcacatgcttgaggaagcctaatctatcaatctttcactgagttcactgagaccatgtatgactgctctagcagagaacaatgctcat

SEQ ID NO: 84138 - DNA, 1046 bp, Glycine max
  Clone ID: PAT_MRT3847_46994C.1
cccacgcgtccgcggacccgtgggttccgagcgtcctcgatttcataaataataaaaaaaaagtcccaagagaaaggaatttggtttggttatcatggacgaatcattcactccagcaccaccacctcctccaatgtccctttctcggcacgatcacgtccaacgaatgataaactcgaagcgctacaagtcaccttcgaaaacaatatactccgacaggttcattccgagcagatccggttccaatttcgatctcttcaatctaccttcgccgtcgtcgtcagaggacagttgcagttgcagcccctacagcaccgcgctgcggagggccttgttcggaccagacactcccgataaatttgaaagccctaatatattccgttacaaaacggagactcgaaagtctatgtattctctctcacccaccccttttacttcccaggatgatcttctccctggttatgacaacaatcataaacctcccaagcgtcctcgcaagattcctccctcctcttttaaggttttggacgcccctgcgctgcaagacgatttttatctgaatctcgtggattggtcatccaacaatatcttggctgtggctctggagaactctgtttatttgtggaatgcttctagcagcaaggtaactaaattatgcgatttggggattgacgattcagtttgttcagttggctgggctccacttggtacctacctgtctgttggatcaaacagtggtaaagtccagatttgggatgtatctcaaggcaagtcaataagaactatggagggtcatcgtttacgtgttggggccttggcttggagttcctctcttttgtcttctggtggccgggataaaagcatttatcaacgagatatacgtgcacaggaggattttgtcagtaaactgtctgggcacaagtcagaggtttgtggactgaagtggtcttatgacaaccgtgagctagcatctggaggaaatgacaacaggttgcttggttggaatcaaaagtcaacccaacccgttctgaagttctgtgagcata

SEQ ID NO: 84139 - DNA, 1979 bp, Glycine max
  Clone ID: PAT_MRT3847_46995C.1
ggctcgagattgacgctgacatgaacaatagagggaaggggcgtctgaagtatctcttgcagcagactgagctgtttgctcattttgcaaaaggggatcaatcttcgtctcagaagaagtcaaggggaaggggtcgccatgcatccaatttcaccgaggaagaagaagatgaagaatacctaaaaggagaagaagatggtctagcaaacacacgtctggtgacacaaccatcatgtatccaagggaaaatgagggattaccagctggctggactaaactggctcatacgattgtatgagaacggaataaatggaattctggctggtgaaatggggcttggtaaaacattgcaaactatatccttattaggttatttgcacgagttccgaggaatcaaaggtcctcatatggtggttgctccaaaatctactcttggaaattggatgaatgagattcggcgcttttgtcctgttcttcgtgcaatcaagtttcttggcaaccccgatgaaaggagacatatcagagatgaattgttggttgccgggaagtttgatgtttgtgtcacaagttttgaaatggcaatcaaggagaagtctgctttgcgtcgatttagttggcgctacataattattgatgaagctcatcgaatcaagaatgagaattccttgctgtccaaaacaatgaggctctacagtacaaactatcgtctccttattactggcacaccacttcagaataatcttcatgaactctggtctcttctcaactttcttctgcccgaaatttttagttctgctgaaacttttgatgaatggtttcaaatctctggtgaaaatgaccaacaggaggttgttcaacaattacacaaggtcctccgcccatttctccttcgaaggttgaagtcagatgttgagaaagggttgccaccgaaaaaggaaactattcttaaagtaggcatgtcccaaatgcagaaacagtattatagagcactacttcagaaggatcttgaggttgtaaatgctggtggagaacggaagcgtctcctgaacatagctatgcaactacgcaaatgttgtaatcatccatatcttttccaaggtgctgaacctggtcctcccttcactacaggagatcatcttattgaaaatgctggtaaaatggttcttttggataagttacttcctaaattgaaagagcgcgattctagggtccttatattttcacagatgactaggctgctagacatactcgaagattatttaatgtttcgtggatatcaatattgtcgcattgatggaaatactggtggggatgatcgagatgcttccattgatgctttcaacaaaccaggaagtgagaaatttgtcttcttgttatcaactcgtgctggaggtcttggtattaatcttgctactgctgatgttgtcattctgtacgatagtgactggaacccacaagttgacttgcaggctcaggatcgtgctcataggattggtcaaaagaaagaagttcaagttttccgtttttgtactgagtatacaatagaagagaaagtcattgaaagggcctacaaaaagcttgcacttgatgctctggtgattcagcaagggcgattggctgagcagaagacggtaaataaagatgaattgcttcaaatggttagatttggggctgaaatggttttcagttccaaggatagtacaattacagatgaagatattgatagaattattgctaaaggagaggaggcaactgctgagctagatgccaagatgaagaaatttactgaagatgccatcaaatttaagatggatgacactgccgaattatatgattttgatgatgagaaggatgaaaacagatttgatataaaaaaaattgtgagcgagaactggattgaaccaccaaaaagggagcggaaacgcaattactcggagtctgaatacttcaagcaaacaatgcgccaggtgtctacaaac

SEQ ID NO: 84140 - DNA, 300 bp, Glycine max
  Clone ID: PAT_MRT3847_46996C.1
ccgcgtcatgcagcagggatccattgcagcattgtgagactgggttgctgctttttgggccattcctgttggcgggctcttgtgactcgctggatgatgctttgacttatgattttgtggggtggactggtgtgatggtgaaggggagaacttgttggtgattgaaatgggttgtagatattggaaattgatgcttgatgcacgtatgattaacattaatgacgcatattgagtttaactgactactgtcaattggtaatgcttgcatgattgctgtgaactttcaattatgacttgacc

SEQ ID NO: 84141 - DNA, 370 bp, Glycine max
  unsure (1)..(370): unsure at all n locations
  Clone ID: PAT_MRT3847_46997C.1
ggacgacccacgcgaccgtatacgcgcccggcaccgagcacacaaagagggggagacaccacaggcaaagacccgggacgaggaagaccggcaaacagacaaccccccgacaccgagaaaaccgctngacagcaaacaacgagaggccggaactcaggcaaaacagacacccagaccgaaggcacgaacaacccaagccagaaaatacacgacaagccaagacagccagacggagagacaccaaccgggcccaaagacaacccggaaaaaaaccgaggaaagccaaaaaaggaggccagcccagacagaaaaacaaaagagggggcccccacaggcaaagaaacggagacaagaaaccccgggcaggaaa

SEQ ID NO: 84142 - DNA, 606 bp, Glycine max
  Clone ID: PAT_MRT3847_46998C.1
gggctagtccacttcttacaagtaaggagggtttgcagaagatcatagacccaattataaaacccgttttttctgtcgataccatggtaaaagttgcagcaattgcatccatgtgtgtgcaaccagaagtcactcaacgtcctttcatgggtgaagttgttcaggcattgaagctggtatgcagtgagtttgaggaaacaagttatgtaagactgaaaagctttcgagaagatgatcttgcaaccagtgttccaggtgagagagtgggaatttcagagtgtaacataacactgcctcagcctggttaagaaccaaggtagcattatcttcgtaagagatgctcagtacatggggcaaggaatttgagttgttcaggttgtttgtgtagagggagcaggaattttcaagtaaactatctttgggtgggggttagcaaatgatgttcatatacctcttttttatcttcgctcatcaagcctggacatattagaatcatatgtcttggcctctacttgtgtgtgaaactttaagtacataaattgactcatacatgaagccatagacaaaacaatgagaaatctcagcaaaatgaaacaaaactaaata

SEQ ID NO: 84143 - DNA, 371 bp, Glycine max
  Clone ID: PAT_MRT3847_46999C.1
gtgcgagagagataggggttgagtagggggacacttttcagtgtcagttgccattcccttcgtgtgttcttctcgtgtgtttcctagttgctgtgtactgggtcgtaggggtcagtcgttcatgattctagtggttgttgcgcgcgtcggaggcacttggtgactaaagctgctcgttggtcagctctggtcacgggctgatgtgatatagctgcagctcttcatgcccggattggtggctctgagggatatcatggtgtacctgaattgcacttttgttctgatccggattctcccattccagaggctcctcagatgagtcgctcaggatttcaggtcagttgttcgtttccagagtgatcgctgtttct

SEQ ID NO: 84144 - DNA, 979 bp, Glycine max
  Clone ID: PAT_MRT3847_4699C.1
atttaagccacaatgagtacatctatgtttacgaacttttaaattacatcttaaatatcaaaagaaagtggatcttcttaacaacatcagcatctcttaattatctctactgaatacagcattaataacctctttcagaacctcgcaacctaaaactttcatctttcccagaccttcggtttctaaaagtttttcagcttgctttggtactacacacattctgtaacccaacttcgccaatgtgttaacccttttatcaattctaggaacctcttcaccagagacatatacaactggaggttcttcatcatcactgcattcttttgctatcattgctgcaatcttccaattcaactgcaacagcagtgtacttttcccaataccaggatcaccaccaactaaagttaaagaacctggtacgagacctccaccaagcacagtagaaacttcatttccaaaagaacccgacaaaggtattctccattgctggtaattgaatcgacggttgatctcttccaatttgagggggcgcaactcttggggtcgttgtgggagccatgagcccactggatcctcggaaactgctaacccaccactggacttggtgccagtgagtttgctctcacgaaactcgttcattgtgccaacgatttggcactcggggcactgcccccaccatttccctgtcgagtgcccgcaattgcagcacacccactgagttttcaccttcccctttccctttatcttcgtcactgctgcgcaactgggcggtcgtagacgtttccgtacatgctccaactgctgctggtttcctttgttggcttcggaggagtagtgggaaaatgcatttggggttgcgcaggtggagcttctgggcgatgaagatcgttctaaggagcctcgtcatgatataagacagcgttagagagaagagaatgctgttattgtagcttttgcataaaccctcgtttctttctag

SEQ ID NO: 84145 - DNA, 336 bp, Glycine max
  Clone ID: PAT_MRT3847_469C.1
gcagcgattccaatgaatcttataaactgggggaacttttttaaattttccgatcttttttccaatcccgccattttcttaacattaaaaaaaagggggcggggctggcgtttacttcagccccccattttcgatctcaaaacacttgaacttgctgaaaggcaatacatgaccacttttttttaaggatgttggtttaacacagaacaccataccgcacctataccatcccatacattttcccaaaattcttagctacacattaatcgaatttttttttgcctgaaagagggctttctctttctgtaacttgcatttccatcacctaccttgcac

SEQ ID NO: 84146 - DNA, 430 bp, Glycine max
  Clone ID: PAT_MRT3847_46C.1
gacgctattccattttatttttatcttttacatggtggttttttgtttaatgaaaaaaaaccccatcaaatttggttttccttgccccgggggcaacaatacatccaaatggggccccaggggggggggggtttcctttttaaggcccccccccggaagaaaaaattattttgggttgtcgggggggaatgtaattataccgctcatttggtgggggggcgcgaataactccccaaaattgagccccctgagcatgtgggggaacaaggggaggtttttccccccgttgggccccccccccccaaatgggcttgaaaggggggggggggcggcccccaattttgtggggctgaaggaaaaaaaccttccaaggaaccaaaggccccccctggtgctgggtttcttgggggagaaatttgcccccccaagg

SEQ ID NO: 84147 - DNA, 279 bp, Glycine max
  Clone ID: PAT_MRT3847_47000C.1
tttttttttttttttttttttttttttgttttttttttttttttttttttttttgggaagccaatgccatttttttaaacaatagtaatgaatccaaaaaatcccggaattaattaataatcctttacaaaaaaagatcgactttaggagccttgtttccaaacaacaactttaagtttttttccaaaggcgttaatattaggtccatttccaagcacatgacccttttgtttttcgatcgttaaaaaacgggaacttttgaaattgcttgttttatag

SEQ ID NO: 84148 - DNA, 1832 bp, Glycine max
  Clone ID: PAT_MRT3847_47001C.1
ctcgagccgctcgatccgaatcggctcgagctttgaataacaaggatgaagttttgctaagaattgactggagagagtcagtacctcaccctgacaacagggttgagtatgagctctggaccaacagcaatgatgaatgtggagctcgttgcgatgaacagatgaatttcgtgaagaattttaagggtcatgctcagattcttgagaggggcggttatactttgttcactccacactacataacttggttttgtccaccacccttcattcttagcagtcagtgcaagtctcaatgtataaaccatgggagatattgtgctccagatccggagaaggattttggagagggatatgaagggaaggatgtggtgtatgaaaatttgaggcagctttgtgttcatagagttgccaatgagagcaaccgttcttgggtttggtgggattatgtgacagatttccatgtcagatgttctatgaaggagaaaagatacagcaaagattgtgctgaggaagtcatgaaatcattagatctgcctatggataaaattaagaaatgcatgggtgatcctgaagcagatgtggagaatgaagtgctaaagaatgagcaacaagtccagattggtagaggatctcgcggtgatgtcaccatcttgccaacattggttataaacaatgtacagtatagaggaaaattggagagaactgctgtactcaaggctgtatgttccggatttaaggagactactgaaccttcagtttgtttaagtggagatgtcgagactaatgagtgtcttgaaagaaatggaggatgttggcaagacaaacatgctaacataactgcttgcaaggatactttcaggggaagagtttgtgagtgccctgttgtgaacggtgtccagtataagggtgatggttatactacatgtgaagcttttggacctgcaaggtgttctataaacaatggtggttgttggtcagaaactaaaaaaggactaactttctcagcttgctcagactccaaggtaaatggctgtcagtgcccagttgggtttcgtggggatggtactaataaatgcgaagacgttgatgaatgtaaggaacgaagtgcttgtcagtgtgatggctgcagctgcaagaatacttggggtagttacgattgtaaatgcaaggggaacctcctatatataaaggaacaagatgcttgtatcgaaagaagtgaatcaaaatttggacggttccttgcctttgtggtcatagcagttgttgttggtgctggtctagctggttacgtgttctacaaatataggctccggtcatacatggactctgagatcatggctatcatgtcacaatacatgccattggaccagcaaaataatgtagttcatgctgaaactcaacctttacgacaacaaggcaccgtgtaagacatacataatgagctgaaaatagtcaagggaacccgttacactgcataatccgcttcagagacggattataaacagaactggctatatggatttgaatccatttgacagcgaaggaagatcagtattttactgtaggataatcatgtgaacattgcaatatataacagaatttttctgcatagaataatttccattttccacagtttgtaaatagagcttttgagaattgagatgtacatgtacaccttagatagagaataaggatccgtgtgatgttggagtacaatttaaggcaacattgataccaaaatttggcaatacaagtatgtcattctggttcaaaaaaaaaaaaaaaaaaaaaaaaaaaaaaaaaagaatcaaatctggtcgaagttatcttga

SEQ ID NO: 84149 - DNA, 285 bp, Glycine max
  Clone ID: PAT_MRT3847_47002C.1
tgggggctcgaagactatcagataccgtcctagtctcaaccataaacgatgagtagaagtctaccgtctatgcaaatactttacagagttagctttatgaattctttttttttaaaaaaaactttattatacaggtaacttggaacacataaaatgcttagagaaattaattactaaagaatttggtgatgatttttttttcatggaggtgttataaagataggcataaataggctaaattgtaattagttcccctataattttgaaaccgcgattttggttctc

SEQ ID NO: 84150 - DNA, 614 bp, Glycine max
  Clone ID: PAT_MRT3847_47003C.1
gcaagagggacgactgtaatggtcgatgagaacaccatgggtgaaggaggtcagctggatgaagccgctcttaggaacctgcaatgtttgatagagacgttgcactcacagactctgcgatacgaatacccgtacatggacgatctgaaaatggactgcgaacttcggcttctcgtgttcagcgaagcaaagagcttgatacccgtggacctgaacgtagcgatagttggtgggctgaaacccttcgatgatgtagacttggaaaagctcgcatcttaccgatcttatctggcgtttcacggacgcgttggttcgaaggtcagcatcccagatgagacggcagaatacattcagacggagttcgcccactataggcagaaagctggacagaacgatattcagcaagccacaaatcagttaaagtgtcggctcaaaatcgccagactccttgcgcagagtcacacggaacacgttgtcaccgttgacatctggcaaagggctgtatgcatacacgaggatattgagagccgttctctaccacgtccgagtttcgagaatcatagatgtatataactttaagcatctataagattctaaaaaaaaaaaaaaacaaa

SEQ ID NO: 84151 - DNA, 569 bp, Glycine max
  Clone ID: PAT_MRT3847_47004C.1
aagactcgatcgcagatcaccgcgcaaagccgggacaccgaccagatcaaggagatcactgatggcccacaagaaactggtcaatcagagcgggttgttgcttacagtgttactcatcacgcgtgttggctcggagcccaaccagtccgtgacgacgcgcggcagcagctgggataacgtgctaaacacacatgacacgctggcctttagcggagcggacggcctgaacgtggtgggctcgaatacgtaaccgcggtccacggcgctacgaccaccgactctctacggcctgaacgccgccggcagtttgatggaagctcccgtcggcgactaacgcgtcccggaaatccgacgctttgtcgtgctgaacatcgtcacctttctgtgatcacttccagacagtgcgtcgcgccgccagttaagcctgtggtcaggcataggcaaaagcgaatccctttaaagcgatcgtcaacgacgactatcgcaaggcccagagaagccggaaacggaccggcgcttccccacatgatgctccggtccctatccaatacgaggaaaaaaaaaagaaa

SEQ ID NO: 84152 - DNA, 423 bp, Glycine max
  Clone ID: PAT_MRT3847_47005C.1
atggggttatgtttcaaatgatgatcggcccagggaattcttcttgagtcttctaaagtgtttgcaacccggggaatatagtgatatgtccgagagaagggagagcgacgaagaactgaagatgaaggtgcgagaatgcttgaataaaagcggaaagtacttggtggtggtggacgatgtttgggaaacccaagtgtgggatgagattaaaagcgcttttccagatgccaacaacggaagcagaatattgataacaagtcgttcgacaaaggtggcttcttatgctggaacaaccccttcctactcgcttcccttccttaacaaacaaaaaagttgggagctacttttcaagaagttgtttagggacgaagaaagtgtcccccagaattagtggaactgggaaaatccatagccgaaagatgt

SEQ ID NO: 84153 - DNA, 442 bp, Glycine max
  Clone ID: PAT_MRT3847_47006C.1
taaaagttgagagaacattaattgaagacacatcatatagaaaggctatttgtactgaaagaacacatacaagtgcacaaaacatagggggaaatgcactaaacaatacagaaatcaggggtacagacttgcgcaacacggaaggacacattgataaaaggagacttgccaccgaataacaagaccccaattgtggaaacataccttgccaaaagagtggggacaccttaaactaaagccggtacccactccccctagagtggattacccactggccaggtaacgacagggatagtatactcataaaaaaggacatatgcatgatgaatcaaacaaccacgacattactacttcctctagccaacattgcgagactgacgaacatcgtgcatcctagagcataaactttccatagcatcgcttaagatcaatctgctggggg

SEQ ID NO: 84154 - DNA, 369 bp, Glycine max
  Clone ID: PAT_MRT3847_47007C.1
gggggcgggggattttaacgtttttttgtgttattattttttattgttggtggctgaggctgaagaacttacggccggaacaaaggtctttgtttaacgaccgggaaagaagaaaaaaaaaattggcaaaaccaaaaaaaaaaaggtttttttacatgagggggcccccggagaaaaaaggacaaagaaagaaaaccctccttttggggaggaagaaagggaaaaacacgtccagaaaaagggcaaaagccattttgctataaaaaaaaggggtgttgtattagccacaaaaatcgacaagagatgtttaggagaggaaaaaaggcctgggggcgggtgccaaaatcgtatgcaccctcgccccagagg

SEQ ID NO: 84155 - DNA, 4222 bp, Glycine max
  unsure (1)..(4222): unsure at all n locations
  Clone ID: PAT_MRT3847_47008C.1
gacttgnagtcgctagccgcgtagcgtggnctcggnaattcggctcggctaacgaatacagcagctgactcagcgggatcaggggaccaactaggagggtccatcacagagaagtgacgaggtaggtcatgacatgcttcatccagcttcggtcccaatctaaaccatttgatgtagaaatgggagatcaattggaggacatgattcatgaccttggtcaattccttgaccctgttgtctgcggagttaagtctggtgaatatataggccaggaaaaaaagatgctggctccgatgagaaatgaatatgaatagaattgtgcttgctcctatgattctagattgtcctggcctgaattctcatgaagttctaacagatcgatcttttggacgtcactttggaagctgatctgtgaagggataattagttatgataactaagtaaaaagatgtcctacccgtaagtttggttcaattggtgttagtttattaaaaatcgatagataaaaacagaatcatacaattatgatggcccgaaatgggaatttgcaaccagacagctgattaaaagaccacagtccattaggagtcctgatagcaatttacaatatgcctcataatctgagcaagaagcgaaatgacatgatgttctctatgatgaaatcgggcccaaaacaagcaggaaatgaaattgacgtgtacctaaatcaattgatccaggacctgaggactctgagagacgtggctttttcagtttttcatgtgcttccggacgggttgttttagatagagtttattagtgtttgactgttttataacactctcccatattgccttgtcaagtaaaggtgagtttggagtcagtaaccgtggcagatgtttgaggaaatgtccaccttgataatgctaactgagtggggcagaaaattctacactagcctgccaggcctacctctccatggttctccttatcgatcccttggagtcgcagctaatgccacattggagcacgggaatgtacatcaatcattgaatggtcctgatgtaagtgagcatgtgaaattcttgaatgatgattttcgaacgccgatgttcgtggaagatgatgaggttggtctattgaggcctggaactttcagacaggttcatgaaaggggttatgatcatttgaggcgtggtgagcatgatcatatttctgttactagttttgtatttgcaactgcacttaaaatgcaaacaactatgtaacccgatctcactctgaggctttgagccttttcatattaattgaattcaaatactagttttgtggcatgcacaaacatatctgtacaagcctcctcatgttctcaatgtaaagctctttgtccaaaaaggagaagataagtttttgtcagtgtcttcgtcaggtgaaggttccacaaggatactcttcaaatattaagagccttgtgcagttgaaggagcttaagcttgtaggcaaagtcgttgatcctgtcaagtttgatgagctggaaaatgaggctgcaattatactgtgccagttagagatgtatttcccccctactttctttgacatcatgattcacttgattgtgcatctggtcagagaaatcaaatgttgtggtcctgtttatttgcggtggatgtacccgattgagcgatacataaagatcttaaaagggtatacaaagaatctatatcatccaaaagcatctattgctgagaggtacattacagaagaagccattgaattttgttcagaatacattgagaaggctaaacctgttggccttcctgagtctcggcatgatgatagagtgggtggtaagggttcaagaggactgcatgtgatcactccaagtctagaagatttgttacaagctcacttgtatgtcttgaacaacaatgaaaatacttcagaaacattaagaaagctagcagatgggcctaaaagaagtgttataacttggcaaggatacgacataaacaagtattcattttacacaaaagcacaagatgacaaaagtacaatgcagaacagcagggtcaccctaagggctgaatctcaacacttcgcaagtgtgcatgacgacaatccttgtgtagcttccatcccttactttgggttcattgatgaaattagggagcttaactatgtgaaatttattgtttgtgtttttaaatgtaaacgggttgatagcaacaccggtgtccgcaccgatgatataggatttacgttggtagacctaaagaaaattggttaccacaatgaccctttcatcatggtagaacaagctagacaagtattttatgtgcaagacccttgtgatgaatggtggtgcatggttctacagggcaaaacaattggtgttaatgtagaagatgatgattcatacatggacacctatgttagtcctttgatcatggcttctccatctgcctcgcctcctcctcctcctcctcctccttccgatgcatcagcttcgctgtctgccaagaagcggacacggaaagcctcacgtctacgatccttgtctactagacctcttggtgttgagagaccaatggtccacgttgatcctgctaccggcaaggccgacggtccccacagaaagaaattaagaacatatttggagattgtggcgcatgataaggtggacgtgacgtacgagaattggaaagaggtccctactgctcagaaggactcgatttgggaggccgatcaggatggtgtagacgacactgtctgtgagaaatacggcataagcaaggaaaaatgggcccagtcttgccagactcacagagacccttcttgggagaaaaaggcacaggccatccagaaacagaacactgccccccacgttttgtctcatgggggttatgaatatttggagcaaaagctcctggctgagaaaaccaagaagaagctagaggaagctgcacagtcaggaagcattgatggcaccattgaccttccatcccccgtcagatgccacgtgaagtggaagatggcccacaccaagaaaataggggagatgacgactgaggccgcaaaagaaatcgttgagaagatcgattcctttgaggagcaagggacacatggatccttcgtcccccatggacgtcaagatgttctcaccgctgctattggacgtctagagcaccctggacgtgtccgtgctgttggagccgatgtccctaactcttcctcgttgcctcctaaagaattgcagcagctgacccagcaaatcagggaccagctagaggagtcgatcacagaaaaagtggctcggcagcttatagcatcgttcaaccagacgcagtcccaggtgcagtcccagatgcaatctcagggactggcactgcctccggagcctctggttggtccctcaagtcctcgggtgagcacaaacgagagttgtgttgatccctcaggaaatgatcctgagacgggtgactcagataggtgcgacttgtacatcgaagcaaatcctgctcgcctggttgccctggggagagtttatgagggatccactattgttcataacactcctttgtttcctggccaagtaaaggtgggtatggaggaggttaaagatccagatgcttcaattcttgtacccactgatgaggtttccatagtggggcaggcaattcacaccttccttgcttggccgacacatctggtcaagtctttatcacagcagacagttgtgtctccaacaaaaccacctccaaagttggatccagaggtcgatgatccactttatctgatgacattgaccatcccagagcttttcttgaggccttaccaggttacatgggatgccaccgtgttcggggtctttaatccagacttcccgctctacataaagcacgaagacctctccgaaatcgcacatggtggtcaatgtctcagcatatcaatgttacagttgtggattctgcatctgactgaaacaagtatgcgagtggggaattctgatatctatggattcctcgagctacagtccattcagagtggacattggcagatggcggtcatcatgcccaaggaacacctagttgtctggttttgtttattgcatatcagtgctttaaaaggtcttgatgatgctccacagcctaaatcgaaggctcctgctaggtggattgtcatcaagtattttaacgatcctagaccattggagccagagagattaaaggcactacggatctag

SEQ ID NO: 84156 - DNA, 377 bp, Glycine max
  unsure (1)..(377): unsure at all n locations
  Clone ID: PAT_MRT3847_47009C.1
ccgcggtaccggccggatttcgggcgacggcgaggcgtaccacctgacactcttttctcgctactcttgacatcgcttagaatgccgcgaagtcacccctccatatcgtcgacgctcgacgcgtaccggcgggagggcgggcgttagctccctcctccggggggggggccccccgncaaaccccagaagaaaaaaaccaaccgcggggggggccggggggacaaaaaggccccgcgcccccgcaagncaccgacagaaccggaggccagggcacggnggnccccccgccggcgcgccgcagcaagcccncaggagcccggcggaccgcaggaaacgaagacaccagcacacggaacacccggagacacggcacgaga

SEQ ID NO: 84157 - DNA, 798 bp, Glycine max
  Clone ID: PAT_MRT3847_4700C.1
agggattccatttggatactacctagagccgtccctttccactgttgatcgatttcctccgtcttcgaagacaactctgtgacccagcgtcccatttggtcttcacccagagttcaatcgtaggaactgctaggggcttttattttgcctttatcgattttcaacacacggacgaagggcacagcttgcttgcggcttcaatatctgctaaccaaacccttagtcatctgggattttgatttttgagtcaaagaccttgtttgccccaaccatctcacattccccgatttccctctttcactgctagcaccggttcgtgttgagcagagagagagagagagatgaacccgctaacactagtgaagcgcactcagaacatcaatgccagagaagctgcactcggcatcggcgagcaagcctcgtggcacaccaagtacaaggattccgcttacgtcttcgtcggtggcatccccttcgatctcaccgagggtgacctcctcgccgttttcgctcaatacggcgaggttgttgacgttaatctcgttagggacaaaggcaccggaaaatcaaagggttttgcgttccttgcgtatgaggatcagagaagcacgaatcttgctgtggataatttgaatggggcacaggttttggggagaattattagggtggaccatgttgataagtataagaagaaggaggaggaggatgaagagacagagcggcagaagaaagggatttgcgttccttgcgtatgaggatcagaggagcgccgatcttgctggggataatttgactggg

SEQ ID NO: 84158 - DNA, 502 bp, Glycine max
  Clone ID: PAT_MRT3847_47010C.1
ttctttttttttttttttttttttatttttttttactatttttttttttggggtcattttgtatggcaaaaacaagaaggggtcccccataccaagaaccctttaccttaaaatcaccacaaacccttatcccccctcaattcacagaataccccccgggcccacgcctctattaaaactcccccctatgagatggaggcccaaacaaaaaaaaccttcgcaaaaccccccaaaacaagggaaggccgaaaggtcattgctggtttgatccatgccctgacaactttaagcttcccttccaagaccatgatgaacctcgcttaataaatgaaatggactacaacatattcctaaaattttgaactggcctcgatcagtacataactacatattccgtggcttttcgtgccaaaccctaaaggctgcctacagtaaagccttgcgccccaaagtctcttgccactggaaaggaaaagacagccaatgtttttaaggtccccag

SEQ ID NO: 84159 - DNA, 244 bp, Glycine max
  Clone ID: PAT_MRT3847_47011C.1
caatcttctctatcgagaatggcgtgtggttctatgtgatctagatgccactgccattggagttctttctataatcctctgcgtgttgtttgtgtataatcccgtgatatttgcattaggtagaaaagaggctcccaaatttgcaggttcatggcccatacttggtcacctacgactattgagtggtgtagagacacctgatagggtgtgtggtgctttggcttataagtatggagccatattc

SEQ ID NO: 84160 - DNA, 123 bp, Glycine max
  unsure (1)..(123): unsure at all n locations
  Clone ID: PAT_MRT3847_47012C.1
acaaagaaacaatggaccccctttctgtnttgtgtgggcctcttgttcaaggaggccacccggcattttacccttctgggtaaccatcaatcctattcaatggggttatgaattattcaatgt

SEQ ID NO: 84161 - DNA, 241 bp, Glycine max
  Clone ID: PAT_MRT3847_47013C.1
ggctcgagcgcaggcactacttgatattgtttatattgtttttgcgacgtaagatatgaacggggatcttgggagtcacgccttgaagaataaaataatagcgaataacatttctatggtaagagatgttgtgatccttgcaggatgatctcttttctcgggagtcctaagttaatcctatgccgcaagataagaccccggagttgtcgtacaccactatcagggatgctagtcaaagact

SEQ ID NO: 84162 - DNA, 243 bp, Glycine max
  Clone ID: PAT_MRT3847_47014C.1
gattgtatatcatttacaatttcaatctctctctctctctatctctctctctctctagacttacattttgtgaagcgctcaagtggaacagggacaggtcaacagcgtggagaccttttatgagtgcactctgctactccagaatgttgaatactccaacaaactgattgtcgtggattttactgcttcctggtgctgtccatgccctttttatcgcgccagtttcttgcaccactatctctc

SEQ ID NO: 84163 - DNA, 1728 bp, Glycine max
  Clone ID: PAT_MRT3847_47015C.1
cgaatctctctctctctctctctctcccccacacacacacactctgatgttttggatttggcttaagtgactgtgttctgtttcttcaattgcacaaattgttggactttctaaattccatcactttgaagaatagtgtgataagtattaggaataagaagctgccactcatgacgaagcagaaaattcgcaacgctcttttggtgcacttggtgattctcttcttcttttctacatcggttgtttcagcgagagttgtgtctctcttgcagaactacgggaacccgattttcagatcaaattttcattctatttacgacacttccaagtacggtgtgtttcaactgagtaacgggttgggtaaaacgcctcagatgggatggaatagctggaacttctttgcatgcaatatcaatgaaatggtcattaaggaaacggctgatgcactggtatcaacggggttggctgatttaggttatgtgtatgtcaacatagatgattgctggtcttctgtgacaagaaatctgaagggtcaactggttcctgatcataagacatttccatctggaatcaaagctctagcagattatgtacatggaaagggactcaagcttggcatatattctgatgctggggtttttacatgtcaagtccggccaggatcaattttccatgaaacagatgatgcagatttatttgcctcttggggtgtagattatttgaagtatgacaattgttacaatctgggcatccctccaaaagaacgatatccgcctatgcgtgatgctctcaatgcgactgggcagaagattttctattcactctgtgaatggggcgttgaggaccctgctttgtgggcagacaaggttggtaacagttggcgcacaactggagacatcaatgattcatgggcaagcatgacaaccattgctgatcttaatgataagtgggctgcatatgctgggcctggaggatggaatgacccagatatgttggaagttggcaatggaggcatgacttaccaggaatatcgtgctcacttcagcatctgggctttagcaaaggctcctctattgattggctgtgatgtaagaaatttgactgctgaaacacttgagattttgagcaataaagaagtcattgccatcaatcaagactctcttggagtcccagggaaggaaagttcaagtttctggagcagatggttgcagacaggtttgggcaggtcctttgtcaggaaaccgattggctgttgctctttggaatcggtgctcaaaagtagctactataacagcttcatgggaagcacttgggcttgaatctggggttcatgtttctgtgagggatttgtggcagcacaaggtagtaactggagatgcagtgtcatcattcagtgctcgagttgatatccacgactgtcaactgtacatttttgctccatttacagtatcccactctgtagagtagctcatacctcacacacctatgactatgttttggttttggtccatcagtgtagaaagtgaacctctgcgtgtttattttctcctattttgttgcatcatttcaggatttctcgagtatcaaatcatgcgcatcaatagtgattagacttaaaatgatgccataagtaatgcatgtccttattatcatttttttcttttttgatgacaaaacaaaccatttcattatcaattggattatcaataactttaaggccataaaaaa

SEQ ID NO: 84164 - DNA, 220 bp, Glycine max
  Clone ID: PAT_MRT3847_47016C.1
tcctcgatgctgcttgttgctgcaaaatctgcgatctccggagtcgttttggtcagcttccgggggcgaaaatgtcatcagctggtgtactctacacttactgtggttcgcactgagcgcattgttgtcacaaaggcatgcactctttgcaattccatcagacttgtctttggaagatagatccattttcatatacctctccttatcgtggtcattgact

SEQ ID NO: 84165 - DNA, 192 bp, Glycine max
  Clone ID: PAT_MRT3847_47017C.1
cggctcgagcgtgaagtgaatgacaatgagaaaaatcccatagaaatggtggtaattagaggaaatagcttggtcactgttgaagtgcttcaaattcaagtatttaagtgtaaattaacaattgttaagtgacctgacaaatgtaaatatggagtaatttatattataattgacatgctgtcatatatttat

SEQ ID NO: 84166 - DNA, 360 bp, Glycine max
  Clone ID: PAT_MRT3847_47018C.1
tttccgggttaactggaggacggacgtgagattacaagactgggctctaacggagacaaacggtacttattacaacagttgatgaatgaaactattatcctacattacttgcctcacaaacatatggcgtgaatttacgggtgtgctgctaatcatgaggaatttgtgctagtgacagaatacctatccaatggaaatcttgctgctcatattcatagcgaaatggactaaaagattacactaccttggcttaaacgattggatattgcatttgatattggaaatgcattgaaccatcttgacaattatggcatcatccaccgcagtgtgaagtgcaggaatatctagctagatgcgaac

SEQ ID NO: 84167 - DNA, 498 bp, Glycine max
  Clone ID: PAT_MRT3847_47019C.1
taagacgacagaaggggcttcacctaataggataaggctcagttgctattgttgttgtaagattaatagtcccatcttgagaccagaacaacagtaatatggaatcaacaccaataactataaataaaatcattacaactaacgtacttccgggtcttcttcttttccttatagcgcatgacagcattgctgcggttagcagaatgcagagaactctcagggcaaggaggacaccagggaggctctcccatgagaagcattgaagaagcaccacaatcttgatagtcaccaacactatctttggtaacaccagagaaagaaatgtttgatagagattgccttgccgtaaaacaaacaattggttcagtttttgtactcatcattgagtctgcaaatgctgcattgctgcatgctggttggatggcattgaccaactcagcagactatccctataaaatagaaagataagtttagatatgatgcaaaaacatttaactc

SEQ ID NO: 84168 - DNA, 531 bp, Glycine max
  unsure (1)..(531): unsure at all n locations
  Clone ID: PAT_MRT3847_4701C.1
ccggnaatttcccggggtcgacccacgccgtccgaaaaaaaaaaaaaaaaaaaaaaaaaaaaaggggaagaaaaaaaaaaaaaaaaaaaaaaaaaaaaaaaaaaaaaaaaaaaaaaaaaaaaaaaaaaaaaaaaaaaaaaaaaaaaaaaaaaaaaaaaaaaaaaaaaaaaaaaaaaaaaagggggggccctttttaaaaaacccaattttactcccccctccttccaaggggttattttttttttggggccccttaatttaattcccttgccccgtttttaacaccgtgggatttggaaaacccttgggtttccccattttattctttttgaaaaaaatccccttttccccacttgggtataaacaaaaaagccccccccagatcccctttcccaaaatttcccccccttatttggaaattggaacccccctttttcgggccctttaacccccggggggttggggttaccccccatggggtccctttatttttcccagccccttaaccccccccttttcccttttttccct

SEQ ID NO: 84169 - DNA, 982 bp, Glycine max
  Clone ID: PAT_MRT3847_47020C.1
gtttctttcttcttttgtaaaattctcttccttgactctgtcactgccaccaactacgagattttgattttccattgacgcgtgaaatggctgggaaaagcaacgaaaagaagggaggaagaagagggagagcgtgcgtggtggttttgggagacattggacgaagccctcgaatgcagtaccacgctctttcactcgccaatcaggcttccctggaggttgacattgttgcatatggaggttcagagccccatactgcacttcttgccaacccatctattcatatttacataatgaagcagtggttaacagccagtcaaagcttaccaaagatacttcgaccaataatgctattgttgaagccattggttcaattttgcatgcttctttggttcctttgtgtaaaaataccatctcctgatatttttattgtccagaatcctccttcagttccaaccctggtggctgtaaaatgggctagctggttgagaaattcatcttttgttatagattggcataattttgggtatactctacttgcactgtcattggggagaaatagtcattttgtctccttatataaatggtttgagaagcattatggaaaaatggctgatgcttctctctgtgtaacaaaagcaatgcagcatgaattggctcaaaactggggaataaatgctacagttttgtatgatctgcctcctgacatctttcatccagcttcactggaggagaggcataagttgttttgcagattaaatgaggacttgtttcggtctctcggtgtcagagattgtgttagtaatggaacctcattggttgctagctatcgccaaaatgaaactctgtttgcaactgagtttggttcaaacatatatttgaagccaaatagaccagcacttgttgtaagcagtatgagctggacaccagacaaagattttgccattctcttggaagctgctgtaatgtatgatagacgtgt

SEQ ID NO: 84170 - DNA, 521 bp, Glycine max
  Clone ID: PAT_MRT3847_47021C.1
cacgattcttattttgtcaatcacggacttgcaccacgagaactgaatctgcacagctcagaggaagcctgccatttgtgaaggaaagctctctctcgaacagaatggctgcacacagctgatcgagcctaccatacaacagattgaagacgctcgtttcatgcagaggcagaggaatgctcctgaggcacatgataatgctgatctaccgtggaccattggttagaggaattgacaaggagccagttaggttttgacagacaagaggggatgacatgatcaggctgtgttggacaacacacatgaatgctccgaaggaaactgtacaggggagactaggttaccaactgaagcgaattggcgatatacagtacgcaaattaccttcagaggctgccgttgcatacgctacacagcatgactggcccttgagtaaaaactggagtggtatcatttataattgtccacatgcttttgttctataaatagattttggtaagtgcatgctaggacatataaact

SEQ ID NO: 84171 - DNA, 221 bp, Glycine max
  unsure (1)..(221): unsure at all n locations
  Clone ID: PAT_MRT3847_47022C.1
gttaatttaaacatgtaattntattatatatctttgttggatcacacatttaataggctttttatttttgcaatctatgatacagaataattgtttcaaaattataaaaatatattataggaataacatatatatgaaactaatcaacaacttggttgatttatctgtgggatctttattgtatatggacctggctttttgaggtcaagttaagcagcaag

SEQ ID NO: 84172 - DNA, 199 bp, Glycine max
  Clone ID: PAT_MRT3847_47023C.1
atcatattcatacttatgttctgaataatccagatctctttctgccctattcttcgtaaggctctgggcaaccgaatctgtatggattcaatccatatctacacgccaatggtggttttagcctgttctttcatagatctatagctaggaatctcatatctacagttctaaggttcaacagagaatctatcacaagaac

SEQ ID NO: 84173 - DNA, 724 bp, Glycine max
  unsure (1)..(724): unsure at all n locations
  Clone ID: PAT_MRT3847_47024C.1
cacgcgtccggttgaggagggaatcaaaggaatcttttgaagggtgaagagagtaaagaggtgaagtgttggtgggttttgctcagatttcttctctgtgttgagggtttgaatgctggggaatgggttatgctgcacttgaagtttctgtttactcagatgctgattacttagacttttaggggatgatattctgattagtgattttgggaggaaactggacatgagtatgcttgtggggatatgctcgaaccgcgagaatctgatatacctgtcctgtttctggtcctggttgtgcttcccttggtggcttacatcttacttggaaaatggagtgaaactagtaagaagagagataggataaatttgcttgcccatttggctgctgaagaagctctaagagctgaagaaatggccgtggctgatgtaattcctccagtgtctgcttcaaaaaatgaacatcatngtgtgtgctaggtgctctgctccagccagaactcgctgctccagatgcaaaattgttagatattgtcaagaaagagcagtgattctgtgttggaagaagaaatttcaaatgtcagttctggtggctttggagtttatattaacagatttgatgcatcaaaaaacatgatccatgagaatgacagccatcanagtcaatatggaaatgcatntggtaacaagacacaaatatggacgctcaaaatgtgtcaagtgctgc

SEQ ID NO: 84174 - DNA, 237 bp, Glycine max
  Clone ID: PAT_MRT3847_47025C.1
ggctcgagagaaccctgatcacactccacatttttactgttccagccgttcatgtcaaccattgggcacagagccgtctgtcctctcccagagctctttgctttagtcgtcgatgaccgagcaccgcgttcagccgaagacgagactctggccgtggctggtgcccaggaaggcacataggctgccgtttagatcctgaacgacccgcccccaggcaggccatgcgaactggcgacc

SEQ ID NO: 84175 - DNA, 720 bp, Glycine max
  Clone ID: PAT_MRT3847_47026C.1
gaagaaggtgtgttgaggagggaatcaaaggaatcttttgaagggtgaagagagtaaagaggtgaagtgttggtgggttttgctcagatttcttctctctgttgaggatcatgaaattgaagtagatatacttgacaggtttgaatagtagggaatgggttatgctgcagttgaagttgctgttttcccagatgcggattacttagacttttaggggatgttattctgattagtgattttgggaggaaactggacatgagtatgcttgtggggatatgctcgaaccgcgagaatctgatatacccgtcctgtttctggtcttggttgtgcttcccttggtggcttacatcttacttggaaaatggagtgaaaccactaagaagagagataggataaatttgcttgcccatttggctgctgaagaagctctgagagctgaagaaatggctgtggctgatgtaattcctccagtgtctgcttcaaaaaatgaacatcatgtgtgtgctaggtgctctggtccagccagaactcgctgctccagatgcaaaattgttagatatttgctctggaaattgtcaaatattccattggaggctaaatcacaagcaagaatgccagcaactgggaacctcctaaatcaagctcatttcctttggctgttttagttgaggaactgggtcgtgggagttacttttatgaaaaattgaacagccagtactt

SEQ ID NO: 84176 - DNA, 262 bp, Glycine max
  Clone ID: PAT_MRT3847_47027C.1
attatttttttttttttttgggagcagacacccaccggtgcaaagcgggacgcgatgcgtaacaataaggccacttttttttgctttcctagacattcttgaactttggggaaatgtgcacccgactatatatgcagaaataagtaacacgcatggccaggagtttcctaaaaagcgctgggataacattcgagaacagaccttaaggaccattatgctgatgctttggtctcactaaggtgctgaggcaaatccttgctca

SEQ ID NO: 84177 - DNA, 391 bp, Glycine max
  Clone ID: PAT_MRT3847_47028C.1
atatttttttttttttttttttttttcccttgtttttttttaaaaaacttttgtttttacaacccaataatcaaattctacatttaaaaaacaacccaaaaacaaaacccaatttcaacctttccaatcaaaattacattaccaacttaataacaaaatcatatttaaaaaaaatataaacaattccaccagggtcctccctcttcacccctcaaattttcatattcccaaggtttaaattctaattttataaaaggccctttaattcactcaaaactatccactcaagaacaatcatgggattatttaccattgtatttttaaacttgcaaatcaccccaacgtggaagagtccctttatttgttcaatcaaaccatttaagtttaaact

SEQ ID NO: 84178 - DNA, 319 bp, Glycine max
  Clone ID: PAT_MRT3847_47029C.1
gggacaaacacaacacattattacacaatggggtaaaattcgttttgccacccactatcaataacccaattctgggaacaacaattgcaaaatgatggtggagacttcaaactttgtccgaaaaacaagctacctttaaaagaagacacaagagttcctaaaagaaaccaacatttattgtaaccaacatcccccttatgaaccagcccttacgaattactttttttttttggcagactttgtgacctttgcttccgtaggatccttttttttaacattttttatgacttccacaacaacaatttgacccattttcctt

SEQ ID NO: 84179 - DNA, 1097 bp, Glycine max
  Clone ID: PAT_MRT3847_4702C.1
tttttttataaaaaacaagacacttgcattctaaaatacaattgatgtttgcttcaatgcaatgagatgcataagatcatcatagcgaatacaacaaatcaacaagcatattcttcttttttggataaaatgaaatacaatgttgtcccacatgaaagaatagtgaacctatacctatatgctatttcaaactcttgaaaatacctatgtcctaattcaaactctcaacattgactcaaaaccaacctcccaaaatcgactcaatcaagctgtacaccaattgcttgtaacatataaaaaatgctatagccgcacacaaaactataatctttcaaaatttctccaagctaactatctcgtttgcaagctcctctattaacaaatttactatctctctaacaatatcttcaacatcttcaactagttctatccacctaatctccccttcgaggatactgtctgctaaccctttactagctttcttttcctgtgcaacaagcaacccccacatctcctcctcaatcatgttctggcttggttcggcattcaaccttcttgacatgggcttttcccacattgggatgtacaaatatggctgcagaatctccagcagccctaagttaatgcaatcaaagagaagtttcctttcagatctcttccaaagttgctgctcgccaaattttttttccaggattttgaagacagaagggctaataggacattctgcagagtgccatgttgaaaagtctgtaaacaagctcctattacttatacctgcctcggttaagacctcaacaatatacgagaaatccctactttcttcagctctaaataatcctgctacatctttcttttcttcggagtcacctacagattcattctcacaatcttcatcacttgaaacattcaaaccatattcttcatcatccacttcagaggaatctgatacgtgcttgccacgtctcgtgctgaatcaattccaatctccaagtagggggtccaggactgggagcggtctcggctcgtgtgccgcctcatagctacctatggaatctgggtcagcctcagagcaaagtgaatgaacggaatcttcttga

SEQ ID NO: 84180 - DNA, 514 bp, Glycine max
  Clone ID: PAT_MRT3847_47030C.1
cgtagccagaatcgtctcccttccaaccagacaacaaacgccaccctcacactctcaattattctcacattttgatttgtttatatattattcccttttcaagactctcaatatcatatcttctacttgaagcaaagtttccttcttggaagatatggtgaatccaggattgttttctgcgaataagtctgtgaattcggtgaaagtaagctttcggataccgtattttacccaatggggtcagaccttgttggtgtgtggctctgttccagtgcttggttcatggaatgtgaagaagggtgtgctgctcaggcccattcatcaaggggctgagctcatctggggtggaagcatcactgtgccaaaagggttccgatgccagtacagctattatgttgtagatgataacaagaatgtgctgagatgggagatggggaagaagcatgaattggtcctccctgaaggaattcggagtggccacgagattgagttccgtgatctttggcagactggc

SEQ ID NO: 84181 - DNA, 163 bp, Glycine max
  Clone ID: PAT_MRT3847_47031C.1
ggagccgaaaccgggccttcgttgtgctactgataccactcgacgaacgtaacttctgataaggggaatacgacgactccctttttgttagcaccgacgtcaattgctaatcacatacatggggatattgcatttgagagcaaagcggaactagattcataac

SEQ ID NO: 84182 - DNA, 245 bp, Glycine max
  Clone ID: PAT_MRT3847_47032C.1
taatttcccagtacctgatagcctactcagtaacctggtgagtaacctctgtcttaatatataatttaattgtgtggttttcctttgttactaatttaattgacctttcattgtttaaccaatgtgattaggtgataattgtctagggtacatatgttattctaaggcttatgatgtctaagtttcagatgctcggagcataaacggagttcttgtgactcaaggtagccattcacaggcacctt

SEQ ID NO: 84183 - DNA, 808 bp, Glycine max
  Clone ID: PAT_MRT3847_47033C.1
aatctacacaatattaccacgacatatttggacagtcattctgaagctggcagtaatctgacagcagtgatctctggtggtaacttggcaggaactagtgctaatacttcatctgaatcaaaccaagctcaacatggtactatgaatgcaacagtcactgaagatgcaaaaaaatgtgcagacagaaggattagagcagagtggcaatagagtctctgaagaaaacctgcctggttctaactcaacagtccctggtaaaggcgaaaaggtaaatgcagctgcagctggatcttctaatctagagggtggtgagttagaaaacacagcaaaatccgtggcatcaaatgaaactgagaaaaatagtaacactgaaatgagtgaaacaaacaagaatcagactatctcacatgtggagaacactgatgctactaagaatgagttcaagggtgacacacaaacagatgaaacatcagactcagttgaacaccaagacactgattcttctgattctcacatcctaaaaaatgtggcagagggccgaactgatctggatacgttgccagatattagaaatgaaggggataaccgtgacgcaactgcaacagactaaaaacatcgtcttcttgttaacgagaagagctagtagagtttttcttctgagtcatgttatttgaacacttttgcttgtaaaaaaaaaatgtttaggcaagaccgtcaaaggtacaaagtaagggttgtggatattcatatcaaggtctgaatatgtattaactgatttctttgttccaccatcaaaaaaaaaaaaaaa

SEQ ID NO: 84184 - DNA, 576 bp, Glycine max
  Clone ID: PAT_MRT3847_47034C.1
cccacggctgcgagaagacgacatttggagggtgacacgcagttgtattgtagaactgaacaagggtttctctttctctttctctgtctgcttcttcactttctctcgtttcaatcgaaaaaaatcatgggcagaaaattcttcgtcggtggcaactggaaatgcaatgggaccactgaggaggtgaagaagattgttactactttaaatgaagctaaagtccctggagaagatgttgtagaagttgttgtgagccctccttttgtgttccttccttttgtaaaaagtttgctgcgccctgatttccatgtctcggcccaaaattgttgggttcgcaaaggtggtgcttatactggagaggttagtgctgaaatgcttgttaatttgggaattccttgggttattattggtcactctgaacggaggcagcttttgaatgaatcaaatgagtttgtgggagataaagttgcctatgcactcacactcggtctgaaagttatagcatgcattggggaaactcttgacagcgtgaagctggtacaacaacggcttgttgtgctgagcaaacaaaaagca

SEQ ID NO: 84185 - DNA, 426 bp, Glycine max
  Clone ID: PAT_MRT3847_47035C.1
ccgctccgagccggccgggccggcttcttcaagtcaagcgtatggccgtcggtttcttcattgccgctctctccatggttgcttcggctgtcatgcagcactacatctaccagatgagcccttgcggcgagtacgccggtggcaaggagatcattgacggcgaggaggttgactgccgccccgctcccatcaacgtctgggcccagtctctcccctacatcctgatcggtattgccgagatcttcgccaacgttacttcctacgagcacgcctactccaaggcccccgagaacatgaagtccctcgtcatgtccgtcaacctgttcatgagcgccatctctgccgccattggccaggccttcacccccatctcgaccgacccctacctggtctggaactacaccaccgttgcctgcattgcattcc

SEQ ID NO: 84186 - DNA, 603 bp, Glycine max
  Clone ID: PAT_MRT3847_47036C.1
ggtgtaacggctgcgagaagacgacagaagggccttcaccaacaaattcatgtgaatatttagacattattatagatcaattgttattaatatagctggtaattaagctgcgctgttttaagtgtcgtacgaaccttgggcttgttaactaaaggccctttaactatatttcttccacaaatatagaaagaaataaattcacaaattacgatgatatatttctttcacacttactcacaatattctctttgttcactgcagactttgagtatcccttacattaaataaggagcaagacttttgtaatttttaataaatttcggcaagtattagagagtgttatatagaatattttgttagtatttctcttgtttgtagttttcttctgatatgtatggctgaaactgaattgtgattttgagttgttgcaggtatcagagagaagaagcaaaaatacaagcttcggtaaacctccaaaatgctaaagcagagtccaggccaagaaagcttgaggtatttcattgccattcatagattatattctgtataacaaatttgtacagtttcttgcacaataagagaaataggtagaaatgtgaaaca

SEQ ID NO: 84187 - DNA, 397 bp, Glycine max
  unsure (1)..(397): unsure at all n locations
  Clone ID: PAT_MRT3847_47037C.1
gaatggcggctcgagtgcactttngaaaaaacatgttcacagagttgtctcatccagcaacaagggaactagaggatcattatatgggatcatagaccatgaactgaccgaattgatcaacacactgaccacaaatgttctcattgtaccctacacgaatcagcacactaaacatgccaaccttgctacaaagcacatcgcgatccatcttatgcaccacatactattgtaagttcataagctacactcaactctaatgctactcccaaatgtaccactctcactccggattaaactaacctcattgaagtgaacttaaaacaaatgtgataaaatccaaatggaactaccccgttcattctaaaacatacattttttacaaagccaattattttta

SEQ ID NO: 84188 - DNA, 256 bp, Glycine max
  Clone ID: PAT_MRT3847_47038C.1
aaaagccaaaaaaaggagtcacatcagtcagaagaagtgatttaataggagaacttgtgttggattctcaccttctgaaaagatccttgggccaactacagccagaatccgcgagtctgatgagtctctgatctagtggattcgggtcatccgtggtctctaacccaagataaaaggagaaccaagaaaattgtgcagcaatgagtcgttactcgttagtctaagtgacatgtggcacagatcggtcaagcaaggt

SEQ ID NO: 84189 - DNA, 265 bp, Glycine max
  Clone ID: PAT_MRT3847_47039C.1
ggggaaaagaaacgcagatttaacactggtggaaaggttaaacgcaccggtgattaaccaataaccatccttttataagctgccctggctttgttttttacaaaaacttctgggggggctcaaaagggggggcattcaaaagggggccatcttacaatttaaacgaaaaccttttttggaaaaaagtttccaagcgctcaaagtggggggggggcaaacacaccattccccaatccgggaaaaacctttgggaactgcctcctaa

SEQ ID NO: 84190 - DNA, 304 bp, Glycine max
  Clone ID: PAT_MRT3847_4703C.1
atataatgccttttttttaattttatatatatttggtttttatgtttttggcttttatcaggagggagaaaaggcctctcctttgtcagctaaaccccccctgggggagagtaaaaaaaaaaaagaaggggtttggttgccccccagctcaaaggcaaaggcgtaaaaaaaaagaaaaccccgggaaataatccatgagcgggaggcccccccggaggaagaaaatgtggctagcccccctaaaacacactgggcatccccggggggggaaaaaacccctgacagggagaaggtactgacaaaa

SEQ ID NO: 84191 - DNA, 648 bp, Glycine max
  Clone ID: PAT_MRT3847_47040C.1
aatgtgcacctttcacctgaagagagggaaaaggcactatcaataaataaatcattgttaagagctaaatcagcagcaggagatggtcaggtgcattgtgagaagttgacaaatttggtcatccaaagtgttactgatgctggtggaaggatcgattatgctgagattgttgatcaaaataatttggagaaagtggaacagatcaagagtcctgtcgtcttctgtgttgctgcatggtttggcaaagtcaggcttatagacaacatggaaatcaacttgtcaatgaatgtttgatctaaccttctgtcatctcaaacatgggccacatgcttaattaatagttcgggccacgtgcttaacaattctaacagttcatggttatagtcatgacaatttttttttctgccagccatacatgattacttgtagatgcattttaccgcatcataaaattctatgagagctgctaccagtggcattgctatttgctaggaataagtgaaccggtttgtttcctttttaatcaagaatttatggatgcattatttatacaagagttcaactatttcccgaataacacctccatgaatgtgcaaggggaggactgaagtttactgattgcaaaacatgggattgaaggttctacta

SEQ ID NO: 84192 - DNA, 287 bp, Glycine max
  Clone ID: PAT_MRT3847_47041C.1
ccaacttcatatatattgtattgggtcaccttgttttacctgtatgttaattccagttcttttcaaaagaacaaggtttcctttaagggcattaaataaaaaatgggggaaatactcaaataagttatcatcttttataaaaggagagcccctaaaaataaccccttataaaagatgcgcagctttaaatggaaaaaaacttgccccctattacagccccataactccaaatagtttgggtttagtaataaaattaactatttcgaggggtataaaaaaattattcc

SEQ ID NO: 84193 - DNA, 214 bp, Glycine max
  Clone ID: PAT_MRT3847_47042C.1
cacaacatgacaagtctaagtttaaatgattgtaataactgttgtgtgcttccttcgcttgggcaactaccatctcttaagcagctctatatttcaagattgaagtcagtgaagactgttgatgcagggttttacataaatgaagattgtccttcttctgtgtctcccttttcttcccttgaaactctagaaatttaacacatgtgttgctggg

SEQ ID NO: 84194 - DNA, 772 bp, Glycine max
  unsure (1)..(772): unsure at all n locations
  Clone ID: PAT_MRT3847_47043C.1
ggctcgaggttttggtgacattcttcttcttcttcatatcatcacaaccaagagagagagagaggagagagaaagcgcattaaaagatcaatttgcccttcgatcttcttcttcgtcttcctctctctcgcaccatgaacgagaaggccaacgtctccaaagagctcaacgctaaacacaaaaagatactggaaggacttcttaaactaccagagaataaggagtgcgctgactgcaaagctaaaggtccaagatgggctagtgtcaatcttggcatctttatatgcatgcagtgttccggaatacatagaagtcttggggtacacatatcaaaggttcgctctgcaactttggacacatggctcccagagcaggttgcattcattcaatcgatgggaaatgagaaggcaaatagttactgggaagcagaattacccccacattatgatagagttggaattgaaaatttcattcgtgcaaagtatgaagagaagagatgggttgcaaggaatgagaaaccaaaatcaccttctagtttccgagaagagaaaagtccttcacattggcaaaagcctgtggaaagaggtgggcatgattatgcagctgtgtctgagaatacttttgaggaaaggaaganaatccaaccatcacatgncattcctgctacaagaattagtgttcccgctccacccaaaggcctgagctggtactactgtggcaaacctcaacatgtgagaagtggacctgttgcacatcaccacagctgaaactc

SEQ ID NO: 84195 - DNA, 464 bp, Glycine max
  unsure (1)..(464): unsure at all n locations
  Clone ID: PAT_MRT3847_47044C.1
aaaaaggccaaaatggggggccaaaaaaccaaccttcaaaaggaaaagcaaaacccccccctgaaaaaaagggtagttagttttgggagggaaaatttttacagacggggccggggaaaaacatagcattacggggagggggggtccctaaaaaaccaaaggttttttttatgacccaaaagtttgggtatggaacgggcttccacttattcaaccttttgggtgggtggggcccccccccccttttgggaggattggggggtttgggcctcggcaaaccccaataccgggggggcgccccccttcctttggcgggggggggcttnnccccccttcccagaggggccattgtttaaaagggggggctgggcattttggaacccgtttttcccatgggggggggggccccgcccccccgggtgtcctaaaaaggccctcttgaaatacgggggggggttttcctt

SEQ ID NO: 84196 - DNA, 284 bp, Glycine max
  Clone ID: PAT_MRT3847_47045C.1
gcttacaaagaattggaaatgaagaggaaaggttacaagaaaagactagatgatttgcaaactgcccttcgcaagcatctcgaacaaattcaggcagatttagtggatcaagaaaagctacaggctacgttggatgatgaacatcttaatgctgcttgttgactgaaaaaagcctgtgaaatggttgctctgcttgaagcacaactaaaggagatgaatccaaatcttgattcaatttcagaatatcgaaagaaggtatcttcatacaatgagcgagttgaaga

SEQ ID NO: 84197 - DNA, 423 bp, Glycine max
  Clone ID: PAT_MRT3847_47046C.1
atacatttcagcctctcaactatcaatttctactccagcctcctggatatatattaaatccaggcagtccttatcaaatttattgacgtcttacttgatagtctttattgaacatctattgcttccactatttctgtgtaaaatgtcagactcctttgactaacccgactttcaattctcatatttgttcaaatttctgctgactttatgatattcttctctattttacgaaaattcttaacccaattttgcttctataccctttccaatatttgctgcactgtactgtattctctttatcctttttgcttaaattgaatatcaattcttcagttcacaaacattaactccatataaaatcttattatcattttactcacacttttccttgaaatatctattcctcaattttttaatcaatac

SEQ ID NO: 84198 - DNA, 511 bp, Glycine max
  Clone ID: PAT_MRT3847_47047C.1
gttccaaggaaggtttcccgtcatcactgtatgacgtcctcctgtctttgggggggggggggggcaaaaatttatgagcgtagggaaaaggtgacactagggtaaataggtgtaagttaacgtgccgagtgttaatacgaaagggtgcgaacctaggaagtgggttggaccgttagcgaggtatcatcaagattatgcctagggaccatcatcagggtaattggagtgttagcgagagagtgtgtgtacgcatacacgtaaaaatacggggcattagagtaatgctggtcgtggtacataagccacgaatagtagttgcgtgtaccgaataccagcccatgaccacatggtagtgccggagtaacaaaccgtagaagaacgcgcccagttacaatttgcaccgtgagagttaatttgtgtagaccaattaatactagtagagcgcaacatatagtttgggttggtaggcggaaacgttatttaaaataggcaaacgtagaagaacccaaac

SEQ ID NO: 84199 - DNA, 338 bp, Glycine max
  unsure (1)..(338): unsure at all n locations
  Clone ID: PAT_MRT3847_47048C.1
tttataaagttaaatttctcaccatnacccgcgtaacatgctcctcactcatgattccaaaaccaaaagtgataatgatccaccatcaccacaccataatgatgtcgatgaagatgacaatcatcatcaacaatctaaagcacatcaatacccaacgtttgttgtctcacatacattataaatcccagatgacgtaaaccttgctcatcttaattacatctttcattgcgaaagccactctttttagatatacacttcacaacattgtcttctcaactattaaaaagaattttataaatattttataaatccctttatcaatagaatcacctatctta

SEQ ID NO: 84200 - DNA, 1008 bp, Glycine max
  Clone ID: PAT_MRT3847_47049C.1
tatgacaccctgccgcgtcgtagctcgtatggggctcgagtagtaatggagaatatgtcaaagctggtttggctgaattggagcattggtgttataaggcaactgatgagtatgcaggttcagcctgggatgagctcaaacatattagacaagctattggatttctggtcatacatcagaaaccaaagaaaacattggatgaaataagccatgacctgtgcccagtaagtaggagaaatctttttcattgaaagatttgctatttagaatagttaccattctgtctctgtgtacaggtccttagtatacagcagctatatcggataagcaccatgtattgggatgacaaatacggaacgcatagtgtgtcctccgatgtaatatccaatatgagagtgttgatgactgaagattcaaataatgcagttagtaattctttcctgttggatgatgattcaagcattccgttttctgttgatgacatatcgaaatcaatggagcagatagatatcgcagatatagagcccccgcctctaattcgtgaaaactctggctttagctttttgttgccacgcccagattgatagcttttggtgcagatttgatccaccggtattcttacccacctccatggtattaccaagtcacaacaagtcagtgcttgaaattgttgactttggttgtgtcaaaaacaagtcagtgtattaaacataccaaatttacatctcagtgatggatgacaaaaggtagatagatcatcacgtcgtgcaagtagatttttgggctgacagtaaaaggaataatattgttatatggcctttttctatgaagttttcactcatttttttacgaaccttgttacttctgagcacaacgctttgtttggaataagattttgtatctagaaagaattataggaatttcattaaattatagtggtgaatgtaagtccgtcagaatatgtggcaacaaaagttcattattttatttggacttgttctgtcgtcc

SEQ ID NO: 84201 - DNA, 418 bp, Glycine max
  Clone ID: PAT_MRT3847_4704C.1
attatttttttttttttttttttttttttttgttttttttttaattaaaaagcggggttccccaaaacattaaaatttattttccaaattcataacataaaccacaggtgctagaacacctcaacaaaaattaacaatattccactgttacccatccttggcatgatccaaaaattaaaacccctttttttaaaagccaacttatttttcctcaagttctggcttttccaaaaatgtctttttcaaccatccccattgctgaataaggtaaaaacccccactggcggtggtaaccccccacaaggcggccttttttacatctgttggttggaaaccgagcctcacttgtaaacccgccattttttctattcttaaagtcaattttcaaattttaactttgccgaccctttggttcacc

SEQ ID NO: 84202 - DNA, 588 bp, Glycine max
  unsure (1)..(588): unsure at all n locations
  Clone ID: PAT_MRT3847_47050C.1
ttttttttttttttttttttttttttttttttttnttttttttttttttttttttttttttttttttttttttttttttttttttttttttttatctatagtgcactatatataaaaaaatattattaataaatataacagttattacatatgtacactatgtaaaaaaaataaaaaagttgttcaatgaaaaaaaaaaaccataaaatactgaaattaagtgttagtaagtcaatcttgatcctatttgtgtagcaagacagatgctctttgagatacatgatgcagactctagttttgctcgcaaacatctttttgaggatgttccatgctcgttttgtggttttgacgttgccaaaagcatggttatcacaatccatagaggcatgcagaatgagttggtcctgtcgtgtccaataatgagtcttgatgatcggatgcgtggcacgtggtcgtgccttcaacgaatccgacgagatcatacccaacgaggagagccgttgagttaactctccaagctagatagagccttttagttagatggaagactgagtgttgaggacaaccagagattgcgagtcattgaat

SEQ ID NO: 84203 - DNA, 200 bp, Glycine max
  Clone ID: PAT_MRT3847_47051C.1
gaatttacagtaaaatgttcaccaatttttattttattatttaaattaatgtgcaaaacagagaattgcatggcaaaacaatttctacacaggtagaaattatgccattggaatgtgccctcaattcagcagtcaattcaattagttacgggttcattgcaaaatatagttataccctgatccccatatatagtactaaa

SEQ ID NO: 84204 - DNA, 324 bp, Glycine max
  unsure (1)..(324): unsure at all n locations
  Clone ID: PAT_MRT3847_47052C.1
cctatcacattattccttatattcttcccttctttaccttctactttccaaatacaaccgtcaccttaacaataacaatcggggttgggnaccattctcaaaacananaacaatactaataaaaaactatacatactaaaacacgaaaaccaaacagttggttctatgatttatttttttcaaccgaatcatcatcaaccactcttttccctactcatctctcccatactttctcttcttaccatcttcctcaatcagtctaaaaagatctacaccattcataattttatcaacaaacactacaaacttacttctttcttttcc

SEQ ID NO: 84205 - DNA, 1072 bp, Glycine max
  unsure (1)..(1072): unsure at all n locations
  Clone ID: PAT_MRT3847_47053C.1
gcataagcatcacttcacgttcatgaccacaaaaactgaaactgtaccacactctttcagtcccccttaggtttccttcttattagcctccccccctcacacctaccctatcatcatgcaccactttgccatggacaactctcacctcctccaattccttcccaacaccaccaccaccaccaccaccaccaacacccccttcttccatgctgcacctcacactcacaccatgcaccaccccctctctactaattcctccaataatactaattactaccccttccacctctcccaaattaccgaaacaccctcccaccatgatagagcccttgctgccatgaagaaccacaaggaggctgagaagagaaggagggagagaatcaactcccacctcgaccaccttcgcactcttctcccttgtaattccaagacagacaaggcttcgcttctggcgaaggttgtccagcgggtgaaggagttgaagcagcaaacctcggagattaccgagcttgaaaccgttccgtcggagaccgacgagatcacggtgctctccaccaccggaggcgactacgcctccggtggcggcgacggaaggctcatcttcaaggcctcgctgtgctgcgaggaccgctccgacctcatccccgacctcatagaaatcctcaattcgcttcacctcaaaaccctcaaagcagaaatggccactctcggaggaagaacacgcaacgttctcgtggtcgctgctgacaaagaacacagcattgaatccatccatttccttcagaactcgctcaggtccattctggaccgatccagttccggcgacaggtcgaaacgacgccgtggcttagaccgaagactgatgtcttgaaccggatactgtttccatagctacacatgcaaatgcatgccttactagtatcactcctaatattgttggttaattcgaaatggtttatgtgtttgcaggttttttgtaatgtaaaaagaaattaagacagatcatgagtttaaggactatgcattatcagttcaaatataaacattttngcactctcaactaatcataaaa

SEQ ID NO: 84206 - DNA, 237 bp, Glycine max
  Clone ID: PAT_MRT3847_47054C.1
cttaagtagatcctgtacttgcaaacttgtggttgctgcgattgcagcctttgccttcagatagcaatcattgtaacaaggccttttctttctttttttttttaaatgtttagttgtttacataaattgtaagcaaattctattattgtaattataataacccaaaagtgaaagctgtaactctatgcaaaagaagtttggctttgtttaagcaaaaaacgagaaataacaataaaa

SEQ ID NO: 84207 - DNA, 336 bp, Glycine max
  Clone ID: PAT_MRT3847_47055C.1
tgccatgctaccacttgtcaattctgtttgacttctcactaattgacttctcccatatatttcctattatgaactatgaagtaagaacctaggaaagataaatgggaaattgctagatacaaggaaatgaacaattttattggatatttgagaataggagaaaaaattctcctccaaggcattctactatcttttaattctttgaatatgccttccatctttattttcctctatttatgtaattaaaatatcttcttctaatactatatttggatgagaggaaagaaaatatagaagagagaaagaaaacatgggtaacaatgtatttttttggtt

SEQ ID NO: 84208 - DNA, 523 bp, Glycine max
  Clone ID: PAT_MRT3847_47056C.1
atcaatatatttcttttcttactgtataatattaattttgtatatgtttttgaagaaaagaagagacaaaaaaaagggaggaggtccacccccgaaccgccctttaaaaactaaaaaaaaccaaataggaaggggctccccccccccctaagaggaaatgggccccaaaggggccgagcggggctaacccccccaaaaaggggaacaaaaggcacgtcctgatggggggagggaaacccccaaaggggctccgcctaaaagtaggggccggcatccaatagaagcttcgggaaggacaatttacggcgggcccgaataaactccccgggaaggcgcgctttcccctgcacagtcggggagacttgacgaaactcaggcggcgacttcttcatgcatttgttggcggaggacttcatgacctaaatgtggggactctgcttacaccgcccgagcggatttgagagaaaggaccggctccagccagttcgggctgtggcaactgcacccacgacgcggaaagcgg

SEQ ID NO: 84209 - DNA, 331 bp, Glycine max
  Clone ID: PAT_MRT3847_47057C.1
gtaagcatgcaacgcggctcgagaattcactttgttcctttctacttctctttttttctcgccttaacaaatgccgtgttggtaccaacaacttttgtggtctttcttcttcttcttgcttttttcggcggcacgggattctgccttacctgcaccacccaaaagctcacacgactccaacaaaaagctcttttccaactgtctggacctttcctcactctatttcttttcctacagtggacccaagaccccgaaaacgtctctctttgggtggcctttggggcggctccgccaaatccggggggctgggtgtcctgggggatcaacccca

SEQ ID NO: 84210 - DNA, 367 bp, Glycine max
  Clone ID: PAT_MRT3847_47058C.1
acgagacaatattggaaattgatagggaagttggactcttataacttattatggccagacttgacatatcctttgttagaagttttgtttgttagtttcttcactctccctattatagccattgagatacatattctcatggctttatctgagatataggttgcactattgctgcatatatagatgcagattgggctgactgtccaagtgagacacaacttcagattattattatgttcttattagaggcagtctcatttcttagaaaagtaaaagagcaaaatgttgttgcttgatcaagtgcaaaggaaaaatattgagttgtgtgcctgtgaactagaatggctaaaacttctctgacttgaag

SEQ ID NO: 84211 - DNA, 262 bp, Glycine max
  Clone ID: PAT_MRT3847_47059C.1
ttgctccctacattaaatgtacagactctttggggattgtatttggaaattcggctgatgacaccattaattctgaggcttttgcacacaagctggtgctagttggagagattcaggaaaaagttgtattgagattctagatgaggaatttcttactagggggcccactcatgtgcggacggatggactgattgtggttgatgggaggacatattttgaggcgttggcgtttgatggtctattgttggcgattgccgggtga

SEQ ID NO: 84212 - DNA, 549 bp, Glycine max
  Clone ID: PAT_MRT3847_4705C.1
gaagacaaattattctactatataaattatttttactcataaatacaacaaacccttaattacactcctacgccaacctttggttatcatattttatttatttaaatgtacaatgcaccttacaattcataataattaatgaataattaatataaaatactttacaacatgagtggatgcaattccccatccatgtatttacaacatgggtggatgcaattccccatccatctatcgacactagaacaatgattctcaaaactattcttgtggtccaactccaactccaactccaacaacaataatgagaaaaatgataggttcggttgttgctgattttgctttgggatcaatagcatctgaatttcaggaagcatacatacataactcctagaaggaatccttcctcatcacctttcattgtcaccgcccactctgtgatctgaaacttctgctgagctcagtgctcaacctctagtgttgttgatatataacttcttttttgggaacaaaattaaatagtgggggtagaaggaaatgaattatttt

SEQ ID NO: 84213 - DNA, 946 bp, Glycine max
  Clone ID: PAT_MRT3847_47060C.1
cttttaatttttagtttctaaacaaaaaatttaacctatgaaagtttcttattttttttagaaattactagttttaagttcctgaataaaagtttgaatcaattacttttatttactttaattgtatttcaaggattaaaattgaatttttcaaaaatttaaagactaataaaaactttaatgaaaaaaagttaaaaaaactttttaagtgatcaaacttctattgaaagactaaaaatcaaattttgaaaaaattgtaggcaccataaaaacttagtaaactcttttcttttttacttggtaaaccctttaaataaatgaccttgataaaatttcaggtgaagatcaaagataaatttctgcttagtcaaatacaactgggcttgcaagacacctgggcagaacattcgactaggggtgttcactacctacactgctctgtttgcaaaattacatgattaatcgttttttttttcctctttttcaaaaccgcactctccagtctccccctccctcaattttctttgaattcaaataccatattttttcccctcaaatcatcaagtaacaaccaatccaagattttgttgaagaatcccagcatgcttcctcgtcatcccaggttttgattcacattctcactgaaaccattcactttgttattctatttcgtgtaactagtgactgattttcgtgtttttcctttcagttttatttaattctcaatattcttacaccatttgtagttctattctaaagtattcttcgcttaaacaacaataatacatggactttgcattgacatttctagttgaaaataaagggcaccaacaagttatcgcgcgcgtgaaaaaaggttaaaagtattattgttattctatcttgtaaagtattgaaaaaggaaagttttgaaaaacaaaaaaataaataaaaaccggacgcgtgg

SEQ ID NO: 84214 - DNA, 208 bp, Glycine max
  unsure (1)..(208): unsure at all n locations
  Clone ID: PAT_MRT3847_47061C.1
gtttganttgagattnaggngtttatttgagggagagggnaatggctaacaangcntcagcctgtgctgagagancaactagtgaacatgctgattggtcctgactgggcaattaacatatagatatgccttattcatctattaagaaatgancaggaaactagctgntgattggccatgnattttcngcccgcaaaggnntgcnata

SEQ ID NO: 84215 - DNA, 765 bp, Glycine max
  Clone ID: PAT_MRT3847_47062C.1
cccacgcgtccgcgcacgcgagaagacacagtagtgttgtatccagccccaggcataggccacattgtatccatggttgagcttgctaagcttctccaattacatgctcattcaatcacaattcttctcaccacgggtctccttgaccacccctctatcgacacctacatacaccgaatctccatctctcacccttcaatcttcttccaccgcctcccccacacatcactctccaccaccaccaccgtgagcatggccgccaaagccttcaacttcatcaacataaacacccccaacgtagccaccaccctcacccaaatcaccaaatccaccaatatcaaagccttcataatcgatctcttctgcacctccgcaatggagccggcttcttcattgggaatccccgtctactacttcttcacctccggcgccgccgttctctcgcttttctcttactttccaaaactccaccaagagacccacgtgtcgtttaaggatatggtcggggtagaactgcgcgtgccgggcaacgcgccgctgagggccgtgaacatgccggagccaatgttgaagagggacgaccctgcttactgggacatgctggagttctgcacgcgccttccggaggcgcgtgggatcatcgtgaactcgtttgaagagctggagcctgtggcggttgatgccgttgcggacggcgcgtgctttccagacgcgaaacgtgtgcctggtgtgtactacataggaccactcatcgctgaaccccac

SEQ ID NO: 84216 - DNA, 319 bp, Glycine max
  Clone ID: PAT_MRT3847_47063C.1
atcaaccacagatgacataatgcttcagagcaccctgaacataataggggtgagtgccctccctgctattgaagaggtcgatatgctttatgatgatcgtgttatccacttttttaatacgcatgttcatgcatacattgatggtaatacttgggttgtctgctgtttacctcaaacaaagaactatcacgatatgctgtgtatcattatccactagtaaggacctcatcactagttatacctgatgaatgtagcctggcaattccagagacaggcttctaatagggccgctggatctaccccatctcaagatgacaat

SEQ ID NO: 84217 - DNA, 606 bp, Glycine max
  unsure (1)..(606): unsure at all n locations
  Clone ID: PAT_MRT3847_47064C.1
ggatgaggtgaggagggaggcgaggaagtgggtggtgagcggggaggtggcggaggttaccgcggtggcgagggaggtgctgaaggaggatgaggaggaggtggtggaggaggagagggcgagggagagagaggaggagagggagaggagggagtttgtggtgcacgtgccgctgccggatgagaaggagattgagagacggctgcgagaagacgacagaaggatctgttgagtaggtacgcgagtgaggggctcgtggaggagcagactgaggccaaggacatgctcaacattcagcgttaggttggttggttcctacgtgctaatctaatatgtgctcaatgaactacgtgcaaatggatcttgggctttactgagaaaattggtgttctttttcttgagtttggaaatttagtggataattggttattacttattatgtgttgaatttgagttagtttagatgcagngtctataaaaataaagtttgataatggaaactactcagcagtctcaaagtactgagcaaaatggaaaacaacatttttccatgcaagaaagggaaacaacaaaaagggggcccctaataaagagatggttatccct

SEQ ID NO: 84218 - DNA, 300 bp, Glycine max
  Clone ID: PAT_MRT3847_47065C.1
acggctcgagggaaagtattgtccaagctggcgcttgtttcggtcgggggaaaaaactggaattccaatggggccttggcgattgcaatacaatccgccaactgcgtgagttgtctaactaggctctgggtcgctgctgctggttgggagtattcaaagattgctgctgggggtcctaacaggccattgagaccatcgattcttttgttgttgtgatgtaccagctcagagcataccttttgatggaacatatttgcatcgaatccgacagtggtctctggccagctatgggagacaaat

SEQ ID NO: 84219 - DNA, 335 bp, Glycine max
  Clone ID: PAT_MRT3847_47066C.1
gtgcaaagtggacaaccatagacaatatgtgtgcatatgggctcaaccctggcatatcaggcactcgacttttgtgcaccagtccatcgtctatttcacagcaggctggttgccatcaagtggcaacagagagaacaccattgcatgttgattctagcacgcagagctacagacaattttctattgaccttcgcggaggaggaatcttagaggacaaaactggagatcggatcacacttatacaaaaaactgcacttagcaactacacgagagttgctgctaggaagaaaggctgtctaatggctaagattgtgacggctggcaatgcaagagcc

SEQ ID NO: 84220 - DNA, 380 bp, Glycine max
  unsure (1)..(380): unsure at all n locations
  Clone ID: PAT_MRT3847_47067C.1
aagacacagagggtagtttntaaanagatattgaaagtaagcatatccagacacataagggaatgattgggtgtggacggcagatccacgtgggcagtactcaacgcaaagtgcttacaatatgttgaggggggaagcaatagaggggatctaggatcgagcctttgaggaactgtggaagttgaaggtcccaaccaaattttcagtgtttgcatggaggctacttagagatagattgccaattaaaataaaccttcacaggagacaagttgaggtcaatgataggcgctgtccattttgcagcacgatggatgttgatgcatgacacttgttctttcactgcaataaaatcaaccctattcgggaggaatccttgtctt

SEQ ID NO: 84221 - DNA, 1167 bp, Glycine max
  Clone ID: PAT_MRT3847_47068C.1
actcccgcgtgggcggacgcgtgggggaatacggctgcgagaagacgacagaagggggaactaataagcaaaacaatcaacagattttttggaaggcaaaaccaaacgcagtgcgtgtgttcttctctctgaagtctgaaccattcgttcctctctcataacatgccctctgctcaggatccattttacgttgtcaaggccgagattcaagattctattgataagctgcaatctacttttcaccaatgggaaagcaagtctggagctgcggaacaaggacatcttacaaaggaggttcttgctggatgcgaaagcatagagtggcaggtagatgaattggataaagcaattgctgtagcgtctagagatccttcttggtatgggattgatgaagctgaggttgaaagccgaaggagatgggcaagcagtgctcgttctcaggttggcacaatgaagaaagcaatggaatctggcaagggctcaagtaccacaagccatgctagtgtaaatgggatgcgccgagaactgatgaggctaccaaattctcatcaaactgatagctccaaccagtatgctgccagagataatgatgatttcatacaatcagaatcagatagacagacgcttcttataaagagacaggatgaggaattggatgagctcagtgaaagtgtacgaagaatcggaggtgttggactcacaatacatgatgaactcactgcacaggaaaagattctagatgagcttggttctgagatggacagtacaacaaatcgtcttgattttgtccaaaaaaaagtggcaatggttatgaaaaaggctagtgcaaagggtcagatcatgatgatattgggtttgttggccctgttcatcttcctctttatcttagtattcttcacctagtcattgagatgggaccagtctctctgctgtttgtacatgaaaagagatctcattttttttgttgagattcaagattaataatagacatgcatttaactattcagttaaatgtaagtcattttgtgctatgtatgtttctggaaggttgtagaaagttctgattgtgatgaaaatgggaagcaaatagttaaggatttatagtaggattttgattcttgacacggttgattacgtgaatgatgctagtgatattcgttgcttaaa

SEQ ID NO: 84222 - DNA, 443 bp, Glycine max
  Clone ID: PAT_MRT3847_47069C.1
tctcgagccgaatcggctcgaggctggagaagacgacagaagggcatgtttttccattgtataagcaaagcaagaaagtaaacaaatgacagagttaccagtttatattgttggaggtggataaaatgacgtcaaaggtgatgtttagttaggaaacaacaacttaggaaatatttgtgcagttaatttgaacatttatcctggtttctttaaaactggacatactatttggatatgggatggagaataaaaagaaatggagtaaagttattgtcttattgtttaagtactcttttgatggaagaagaaaagattagtatgttgcttgagtaccatgtcctccaaattagaaagaaaaggtaaaggagagatgttcgatggaatggaataccgtttcaatcaagttcaattccatttcatttctttcctatacaaaataaaaa

SEQ ID NO: 84223 - DNA, 1913 bp, Glycine max
  Clone ID: PAT_MRT3847_4706C.1
aaaaattcgctaatctctgacctcttcttcacatcttcctccattaatacccttccctctctctcccatggagttgatctacctactctatctggttccaacgttgtacgcgtgtttcctcatatggaagatgttggacgagagaagggacagggagtgttacatcttaaactaccaatgctacaagccccccaacgacagaatgctcggcaccgagttctgtggcaagcttatcagacgcaccgaaaacctgggccccagcgagtaccgcttcctcctcaaagccatcgtcagctccggcatcggcgaacaaacgtacgccccaagaaacatcttcgagggccgcgaggccactcccacgttgcgcgacagcatcggagaaatggaggagttctttcacgacagcattggaaaactcctcgcgaaatctaacgtctccccctccgagatcgacgtcctcgtcgtcaacatctccatgctcgccaccgtcccttccctctcctctcgaatcatcaaccactacaaaatgcgccacgatgtcaaggtctacaacctcaccggcatgggctgcagcgccagtctcatctcaatggacatagtcaaatgcattttcaagacgcagcgcaacaagctcgcgctgctgatcacttcggagtctttaagtccaaattggtatacgggaagcgacagatccatgattctcgcgaactgtctcttccgttctggcggctgcgcgattcttttgacgaacaaaagatcgttaaaggacaaagccatgctgaggttgaagtgtttggtgagaacgcatcacggtgctagagaagaagcttatggctgctgtacccagcaggaagatgatcaaggaagactcggatttcatcttgggaagactcttcccaaggctgccacccgagccttcgttgataatcttcgagtcatagcacccaagatattacctatccgtgagttgctcaggtttatgttcgtgtccactattaaaaaaatcaacaagagtagtaacgctcccaagtccgttgcgagcaccggagcgacaaaatcaccattgaacttccgaaccggggttgatcatttttgccttcacaccggaggaaaggcggtgatcgacgggatcggaatgagcttggatctgagcgagtatgacctggaaccggcgaggatgacgctgcaccggttcgggaacacgtcggcgagtagcttgtggtacgtgctatcgtacatggaggcgaagaagaggctgaagaagggggacacggtgttcatgataagctttggtgcgggctttaaatgtaacagctgtttgtgggaggtgatgaaggacttgggggaggcgaatgtgtgggacgattgcattgatgagtacccaccagagtcattggccaaccccttcatggaggcctatggttggatcaatgaagttgatgatccgtacacttacgaacatcttccagaatttctcaagtgattattgttgatgttgtgtagtaggattatgcatgttggccagctacaaagaaaaaaaataaaaattaaaagggaagggaccctctgattctttagatctctctttacaggtgcatcgatgtaattgtgcattaaatttttctgtaagctatacacttatatattattattattgaacccgggcctctagggttcattacccaataaggtgtgtgctgcttcttgccacaccgtcaaaagggtacgtattatggtttttttttttttaactttggtttgcattatttgtttaaatgtgttataataacgagtttcttcttttttttctgacaaaaagaaaacgacaaaaatatctgtaattgttttggttagctcttgtttagtagattatgggttttaattaattattatattcttgcattaagaaaaaa

SEQ ID NO: 84224 - DNA, 254 bp, Glycine max
  Clone ID: PAT_MRT3847_47070C.1
ataacaaccaaaatattactttttaaattttggagagatccaaacatataatagtaataaaatcttacaaatactaatactactaaatacttttttgttgtttaaaaggcttgaaacatgaattgtcataggggtggccacttgactccaacatgaacttaatatatatttgattgaaaatcagaaattttgttggtgaacaaatccttgacctgggagatcaactgagatgactcggccaattcaggaaatat

SEQ ID NO: 84225 - DNA, 210 bp, Glycine max
  Clone ID: PAT_MRT3847_47071C.1
aaaaagggaaaatgtattgtttcaaaaacttgcactcagaaatgacttcattgagggtgctgcaatgcagaacatcactcacaatactggttgtccaaaaagccacactcgctcacacaaaaagaggtgaagaactctcactccttgaaacgtcactcaataaactacgataacatatacattgtcatgggccaaatactctatacatac

SEQ ID NO: 84226 - DNA, 400 bp, Glycine max
  Clone ID: PAT_MRT3847_47072C.1
actctcctattacactttctctttacatttatcatatatcacatcatccttaggtaagttttaaattttagcaaggcttcactacttaatttctacaaatatcaaatatccccctttctcttttattcaaaccatatttcatattttcaccaaattttttttaccaacatttctaatatcacaattcacaaaccccatataataaaatctaaaataaatcctttaaaatttcattttttacaaatacaatttaatcaaaaatttaatcatataatatctatctctttcaatacattattatatgctattttaaactctttcttcttatatttctttcaaaatttctcttttaaaaatatcaaatactttttcacctaatattacatttaataatttttat

SEQ ID NO: 84227 - DNA, 256 bp, Glycine max
  Clone ID: PAT_MRT3847_47073C.1
gacgcaaagcgataccatactgcttcacccatcttcccaatccgacatcgacgagatcgagaacctcatgaatgacatgggtcaccaatcagacccttcggtgagaccccccagtccacgacgcacctacatcaccgggtacgactccgtctccgctgtgccttccccacattcatctgttacaatattattttgtatgatacgatcggcaaacttgccgtttctcgtcgtgcctccaatcccagcgcagtctaac

SEQ ID NO: 84228 - DNA, 328 bp, Glycine max
  Clone ID: PAT_MRT3847_47074C.1
gttaatattatggcacataccatggacatccctctctctacagatcagcttgctaaaataagtaagttgttgaaaaaacacaaaactctatgtcagaaggtgtcatcatctaaaactactagtgagcattcagaagacagggaacaaaatgaaatgcatggtatggtaagagaaggaactgactttctaaggagagtcaatagaacagcttccatctctactgaagccaaaccgatatctaatcagaagttagacaccaatatttctgatgatgaagaatgtggttccgattctgaaactgaaaaggcacaaagctctttacctttcc

SEQ ID NO: 84229 - DNA, 1058 bp, Glycine max
  Clone ID: PAT_MRT3847_47075C.1
ccacggtcctcaaacctgaaaatgtgttggtccgagatgatggtcacataatgctatcagattttgatctttccctcagatgtgctgtgtcacctactcttattagaacttcctatgatggtgacccttcaaaacgggcaggtggtgcattctgtgttcaacctgcatgtattgagccatcatcaatgtgcatccaacctgcatgttttattccccggttatttcctcagaaaaacaagaagtcacggaagccaagagctgatcctgggttgccgtccagcacacttccagagcttgttgctgagcctactcaagctcgatctatgtcctttgttggcactcatgagtaccttgccccagaaattatcaagggtgaaggtcatggaagtgcagttgattggtggacattcggaattttcttgcatgagctattatatggtaagacccctttcaaagggtcaggaaatcgcgctacacttttcaatgtagttggtcagcaactcaggtttcccgaatcaccggcgaccagttatgccagcagggatctgatccgtggcttgctcgtgaaggagccacagcatcgtcttggggttaaaaggggagcaactgagatcaagcagcatcccttctttgaaggtgtgaactgggcattgattaggtgcagcacaccgccagaagtgccgagaccggtggaaaatgaagtaccagcagggaaggttgttggacctgttgatcctgttggggttggcagcactagtaagaggatagtaggtactgacaacatgaagtctgggggtaaatatctggactttgagttcttttagtttgaattcctcaatctactttttattgtatttgccattattggtcagtttcatgggtgctgcccagcattaccgtgttatctcagcttacctgtgccttttagtaaaactccatttcagttggaaatatgatacctcaactttagattaggtttttctccttgtctgatcccatatttcatttggataatccataatgtagtgtttctatacagaatttaaatacttctcatg

SEQ ID NO: 84230 - DNA, 377 bp, Glycine max
  Clone ID: PAT_MRT3847_47076C.1
gctcctttacagttggattaatacacattgatcatcaatatatttaattaggtttttcttttaaaaatacttttatgcttaaaattaactaattcaaacatataaatttagcattagaaaacgaagggaacaaattttacgtgcattcgttgtcctaaatcaaaggtgacatgtgtagttgaaggcaagcaatcatctaaaccgattacaaattaagcaaaagattaggctacccaatcgtgaaagaaaatcaaaaccttatttcctaataatattgtcagtggggtacaagttgtaagtctatatgtcggcatatgggaccttgaaccatacattacatatacctgcagttaacaagatcccagtattatttatta

SEQ ID NO: 84231 - DNA, 226 bp, Glycine max
  unsure (1)..(226): unsure at all n locations
  Clone ID: PAT_MRT3847_47077C.1
atatattgttgcttataaaataattacttttgggctaaagggaaaaaaaaaaaaaaaaaaaaagaaaaaannncaaccnccaactaataaactcttcaaccctaaaattaattaccaaaccgntacctacaagcttgccacctccccctataattaatcttattaccacctaaataaaatcatacccatacctgtaacctgtcccaaatttctatttggtcacaat

SEQ ID NO: 84232 - DNA, 346 bp, Glycine max
  Clone ID: PAT_MRT3847_47078C.1
aagaataacaagcactgaccatttgggatatcttattctttgttcaaaaatacaagctaataaacttattaaaacatgccaccaagcctctactcaaaaaacaacggttttggaaagtacttcgatttcatgaacaactgtatgcacaatgcgaacctaaaaatgaaaaatggggcagaaacgtggtctaattcctagactgaggagatttgtattcctaaaaattgcttgataaagagatccctggggggattgaggtgttggggaaaaaagtattaaactcttgtataacgtgtgcgccccttcttgtttaagaattcagggttcttatcagggctaccatccg

SEQ ID NO: 84233 - DNA, 174 bp, Glycine max
  Clone ID: PAT_MRT3847_47079C.1
aagcgtgcaataatgcatttatattcgcactttccaagtgaccccgggtagaacacgaaattgagaagttgcataaagcaagtgaaggaatatactctggagttgctctataaccttgttgctacgaacattgacatgtttgctcgcaacatgcgtgtcaaaaaagaaagatca

SEQ ID NO: 84234 - DNA, 475 bp, Glycine max
  unsure (1)..(475): unsure at all n locations
  Clone ID: PAT_MRT3847_4707C.1
tggtttgactcttcccagaataatcgtttggaattttgctttttgttttcctagtgttccttttatgtcaattttagtaattcagtgtatttggtcaaacctgtgcaacagggaagggaatgtaactttgttttcttgaaagacaccaccgtgctgtgaaaaaaaaaaaaaaaaaaaaaaaaaaaaaaaaaaaaaaaaaaaaaaaaaaaaaaaaaaaaaaaaaaaaaaaaaaaaaaaaaaaaaaaaaaaaaaaaaaaaaaaaaaaaaaaaaaaaaaaataaaaaaaaaaaaaaannnnnnnaaanntaaaaaaaaaaaaaataaaaaagggggggcgcctacaaaaaaaacatttttaaacccctgaaaaaaaaaacttaatttttttttttgttccacccataaaaagggagagcccggggttctcccccgtttagggggaaaaaacttttggactttcccccattttttttgg

SEQ ID NO: 84235 - DNA, 263 bp, Glycine max
  Clone ID: PAT_MRT3847_47080C.1
tttttaacaaagcaattgggcagctggaatttctatatcctggaaagtcccaacccaaggttttggaattggacaatcatcttggactcattattaatccaccttaccctttcaggtctttcaaactccccccattaaagtaaccgacttttggcttatttagcaccacttcaaatcgattaaagaaaaaaaaaattggggggttggaatggtgaaaaaggctttacctaataacttaagaaaataattttaaaaagggggaa

SEQ ID NO: 84236 - DNA, 386 bp, Glycine max
  Clone ID: PAT_MRT3847_47081C.1
tttcgtccttctacgcgtacgggagaatgggacggtcgagatgaaagtacaggcaatcgcaaaccaaggtcgcgtgcggtgactccactaatgagagagacctctaatgctatgtcaaacacctctttcttcgttgcacccaggatctggcaactcctggaccaatagcctcattgggactaccgagggtccgttctcaccaactactcctcctttggcgttctgtctgaccctaactgcgtaaccgaactttcttacgatcctaagaccatcgatacctgttgtgatctggaagatgactacattgaatttgccctaggaaagaagcgaagggattggaggagccctgccgcctcacactttgactgcaatgcaacggattcata

SEQ ID NO: 84237 - DNA, 426 bp, Glycine max
  Clone ID: PAT_MRT3847_47082C.1
aattagttctcatccattaatttccattgaagcccgaaaacagaacccaaaaatccggggggaggaaatctcataaggcaaaaccaaaggggaatgtagtttaagtccaacaaacaaagggggggggctacaaaggctttgcaaatttttcaaggacttaaaacccggggggcttgtaggcaataaagctgatgccctggacttggggaacgttgccaaatccaaggatccggatgaagccatgggggtatgcagtcttagccttttgaagctccttaaacacctgaaaagctttagggcagccaaacttaggcaggttccacagggcccagtagcggccatcatagtttccaggggacctgttgggctcacggtacacaaaaccgggctccaactcgaattccaagcagggaatccatcctttcc

SEQ ID NO: 84238 - DNA, 459 bp, Glycine max
  Clone ID: PAT_MRT3847_47083C.1
ggaccaaggggcccaatttggaaggaccaaatccaaaattttctttaaaattaaaccagtaacagcctttttaaaagttttatatacctggttgcccatgctaacaaaaaagaaaaaaaagcccccaaggttaaattttaaaaacccaccaggcacaaaattgatttgaatcttaaaaaaaagggaaaacaattcattttaaaaaaaaccaaatccaggggcgctaaaaaacaaatcttggataaaaaattcaaaaaaagttttggcaaatgggccctcttgttctctaattaaaccaaaaaaacaaccttttaatcatggacccatccatgaccttggcaaagaaaatccaaatatttgggggagcaaggttttcttttttttgccaagcttggtaaccccaaagcctcaaaaaactccaaatttaaaggcttcttttccttcttccaccgaactttt

SEQ ID NO: 84239 - DNA, 382 bp, Glycine max
  Clone ID: PAT_MRT3847_47084C.1
gggcccgtggtccgtcgcttttttttttttttttataacaaaaccctggggggaaccctgggattaacccaaaaattacggcccgaaacccgggggcaaacaaattttctaaatagggggggggaaaaaaagtgggggaaatcaaggtaaaactgtttaccgggggaaaaatttaatcctataaaattgcccaaaaaaaaacgagccgaaattaaaaaagtggacgccggggtgccctaatgggggacccaacccaaatttttggggggggctaaaatgccccttttcaaaaggaaaaacctgtggggccaatattataaaaaaacaggccaacccccgggaaaaggggtttaaggttttcacccccatggtgttttttttt

SEQ ID NO: 84240 - DNA, 164 bp, Glycine max
  Clone ID: PAT_MRT3847_47085C.1
ttgacgtgtgggctattagatacacgttcagctatattcatctaacaggatcaatggaattagggatgactttttatgctaagattgacagttggttttttagtaagcaaggtacacttgctccttacactgtcttttgggtattgtttactaatagtttctta

SEQ ID NO: 84241 - DNA, 467 bp, Glycine max
  unsure (1)..(467): unsure at all n locations
  Clone ID: PAT_MRT3847_47086C.1
atgcagtcttacctaagctgntatattcgggtcnagggctgaagaggggggggagcggggggaancgcagcatcggggacgacgccctttctgagaatgagagaaagcgggagaatatgggggggcgcaacatgggcccgggtgaggggtggggcttnacgcggggcgagtgtctgggagcgcgggggggtaaacatgtggagggaggccggggggactttcacggggaggggggctgagaccctnngggcggtgtgcgccggggagcgtggcccggaccgcgatttcttcatttacaggcggcacttcaaccgcgggggggtgaacctgggggcggacatggggctgctgggaggggcggaggcgggctactgcacanncaggggggatgggctggatctcctcgggactcctncagctctgtggcaccggggggcacgtgggccgcttcaccactctgtatgggg

SEQ ID NO: 84242 - DNA, 2159 bp, Glycine max
  Clone ID: PAT_MRT3847_47087C.1
gtcgacccagcgtccgcgcggaaagcaaatctctgtcatcatcatctcatgtgggtctctcattgctcatattgatttggcatttcttactgaataatacaacgaagggatgagccattcgtgaccgtgaattcgtgctccacattttacccacaacacaaacacaaagacctaccacgatatccgccatcatccatcatcacccacccattaaccaatcgaattaagactcaacaaaaagcaccacccttcactgttcccacatagaaagcttcgaactttggaatttcctagctgaaattcgctcgtttcggttactgggtcggtctccgagctatgcgtggagctgagggtggtgatggtggcttcgccgtcagaggcggtaacatctactgggggagaaaagaggaaactgatttcagaggaatcgttgtaatcttcgcttgggtttctgttccgcagaacctgttacaagaattcgttgatctgtgttcttctttgaagtggaattcccttgtttgttttgcccattatctatcagctttccgtgatgaaagtgccatgccattggcattttgtgttcttgatgaacttattgaggagctgagaactaggtcatgccctgttgtatttgctactttttctgctgggtcaaaagcctgtctgtacagggtatttcagcttattgatggaaaatgtgcaactccgctcaacttggtgaaccttccttcacttgggaactgtctttctggacacatatatgattctggtccaatagatgttacaagtgattttggcttccgcttcacactacacccctccattgtaaaagtgcctggaccatcaaaacttgtttcttgggtagcaaaatctgttacctctggtttggatgctttgtacctaactagatttgaatcccaagctgctgagcattggcaggctttatattcttctgttaattttggagctccatttctcattttatgttctgagaatgatgaccttgtgcgataccaaagtatctatgaatttgctcaacaactacgcaatctcagtggtgatgtcaaccttgtaaatttcagtagctgctctcaccttggtcattacaaacaccatccaattgaatatagagctgctgtgagccatttattagagaaggcttcttcaatatattcacaaaaaatgttgcttgaacgagaaagaactggtatggatggtacacaggatgagatatctgagttaatctgtgacctgcagaaggtggcaatcaattcaaataagagccttagaagagttgcagttgggccaaccgaccacttctttttgcctagttcagcaggacattacagtgatagagaatctggtgctccgcaagacgaacaaaaagaaaaacctgtttttgtacctagcttcccaagcatcagcgctcatagtgtccttggccaatttcttttcgacgtttgtgttccaaagaatgttgagggttgggatgtgaaatcttctgggaatctaaatgggaggtcatgtgcttcagctccaaggcattcactattcaggggtactaaacgcatcggtcggtccaaattatgaagttgttcccatatctgacttgaggagatactttatgataaacctgtttgaaacatcagcagtttccctagacaatacaggaaggtatgatagattttggtgcaatgattggctgttatgtctggcaggggacatgtaatggctgcaatggttcaacaattaattccttggcacttttgagaaagtgatggggtgatgtggataaaggttacttgagttccattccttctaatggccctcagaaaaagaaaaaaaaaaccatgactgttgtatcagaaaaaagagcttctgatagttcaaacaggttgatgcttggctatggtaattactcatttggtaattgcatttgcatgaaatgggataaactgtactgacttatttgtagttagagaaagtaaatagatgtacataatatatttttgagggaataaaacgtctcttgtttgagggtggaagaaacttgtaaatttggcatgcctagcaatgtacagaggaggaaaaggagggatatcatccctcttttgttgttttatttgtttttgtttgttagcaggatttttgcatcttct

SEQ ID NO: 84243 - DNA, 264 bp, Glycine max
  Clone ID: PAT_MRT3847_47088C.1
cggctcgagctgcgagaagacgacagaagggtctcctctccccctccctccaatccttccagcccgtcgaagccatccactcctccgtcgtgcctcttcttccgctccaccgtgttgcttcttcattgtgagatcgggaagcctcaagcccgcggaggccctcttgccactgaaagaaggacccgttggaaccgacggcggcaaccatgactccacgtgcggagatggtaggtggggtcagtggatgaaaggaccactcgtgag

SEQ ID NO: 84244 - DNA, 114 bp, Glycine max
  Clone ID: PAT_MRT3847_47089C.1
ctgtcacatacttttgtattgttacacactttaacaactatggaagctataaagaccggggtctttagcggtaggagtgagttgtctttcgcattatatctacacaatgccaag

SEQ ID NO: 84245 - DNA, 518 bp, Glycine max
  unsure (1)..(518): unsure at all n locations
  Clone ID: PAT_MRT3847_4708C.1
agcttggatcctctagagcggcggcttgnnnntttttttttttttttttttttttggggaacattatggcctcgttcttatgggctgactaaggggccatctttgactgatttacacaatattcgccctgctgatgtaaatggtaagaaaagccactgctcgatatttttactagtcaagattacaatttcagttgatattacaagtttttctcagtcaattcatcaagggggaacaagtactatggtgaatgcattactagctcaagcaaatgtttgaggcccgctaacaaggaagctgctttggacactgaaacagacaaggagaggtgggcaccacctatgcaggtcatcttttctgtcatacgtttttgtttttaactatcattttcaaagccttataactgattggtgatcatgcttgaaatttgatggatatctgaacttggagttctgtcatatgttaatttatattgngttctcctgaccactgttaaattgggagatttttaatgattt

SEQ ID NO: 84246 - DNA, 263 bp, Glycine max
  unsure (1)..(263): unsure at all n locations
  Clone ID: PAT_MRT3847_47090C.1
aagcccaatccacactaccttatactcaatatcataatactcaatatccataattattgtgcctttcacaaaaaatgggaccaaaaaaacaaacaaacaactctcgctcttctctctttcactacatatacctaatttaacccaacttctcatgcaccccgattttatcaatggatcacacaagacctttataaatcacaaggattccttaacaaaccccactnnngtgtccaccccctttcaaacagacaccatcatcattt

SEQ ID NO: 84247 - DNA, 459 bp, Glycine max
  Clone ID: PAT_MRT3847_47091C.1
ccccggttacccgtgtttagaatagagaagcagcgcgacggaggtttatcaaaagtttctcaatttcgcgagggctatgatgaagaaaagggacaagcttagttggcaagttggaatcaacccatactccatggaatggactggttcggccactagattactgagtaagggcaacgatattgtgcgttccgattatgctccatacgatggcttgattaccaagcaagttatcagcaagatggcagacatgataaacaggctttgcggtggtgaccaaaaattgatgcgtgaaaagacacacctgctgttggctcgttgctcaaggatggcaatttgtaagaaagatgtcaggagaggtgaatgtggaatcccttctggatttccgctcacagttattcgcaataacattctcaatgagatgctcattagatatagctatgaagaattactgccccaggc

SEQ ID NO: 84248 - DNA, 310 bp, Glycine max
  unsure (1)..(310): unsure at all n locations
  Clone ID: PAT_MRT3847_47092C.1
ggggcgaccgaggcgtgcggttaatctttccttcctttacctttcttatcttcatttatctcatattaatttcaggcttggttgtattaaaaacgtgcccccctcaccaccataccttcaatttncaaagttccaagatattaataactaggactccatctttcacaatgcaactttccacaaatgtgaatttactgcctcaaatcttcatggttctttattaacatatgcatgccttcacatttcacatctacaagatacttgcttattatactctatcttctgttgagcagatcttcatactgcacat

SEQ ID NO: 84249 - DNA, 270 bp, Glycine max
  Clone ID: PAT_MRT3847_47093C.1
ggctcgaggcaagacctgcatgcgctagtgccgcaagcttgatgcttactaatgggtgaaccctagttgtattgggcagcaccttctgtgtgagtgcttcaacatgctctcagcaatctgcaccgagactgagtattgtgcgattgcacatgcgggcaactgttaccatgatctgggcatgctttggggagatgcgcgagcgaaacttcttactaatcacgcgcttataggtgtgcttactggcaaaccctgtgtgtctggaggacgatc

SEQ ID NO: 84250 - DNA, 742 bp, Glycine max
  Clone ID: PAT_MRT3847_47094C.1
gttaagtctgcagacaggatctcagatgctgctcttgaatctgcggttctgcagtctatcccttgcatccgttctggtagttttgctgacattgggccacggagatacatggaagatgaacatataaggatagatgatttgtcgtctcatctgggatcactatacaactttccccaaccaagtgccttttatggggtgtttgatggtcatggaggacctgaagctgcagcttatataaggaaaaacgtgacaaagttcttctttgaggatgtcaatttcccacggacatcagaagttgataacgtatttttggaagaggcttctaatggtggccaatgctggcgactgcagagcagttctctgtcgcaaaggagaggccattgacatgtctcaagatcacaggcctatttatccatcagagaggaggcgagttgaagaattgggtggctacatagaagatggttatctcaatggggttttatcagttactcgagcactgggggactgggacatgaagttacctaagggtgctccctcacctttgattgcagagccggagttccggcaagtggctctaacagatgatgatgaattcctcatcataggatgcgacggcatctgggatgtgatgtcaagtcagcatgctgttagccttgttcgcaaggcctgaggcggcatgatgacccagaaaaatgtgccaggaccctgttatgggagcattacgcctgacacattcgacatc

SEQ ID NO: 84251 - DNA, 1641 bp, Glycine max
  Clone ID: PAT_MRT3847_47095C.1
gcaccaggacctttccaacagaaaccgcgagataattccccagaaatctcaacacagttaaaacatcaatacaattcacaatatatttttgcgaaagaaaaaacaaaagttttacagcactgtacaactttggatttggagcagtattcgtgagagattatttgagcattgaaacatggtagctgaagcagaggttgcgtgtcaacaaaacgtgggtgtgttggatgtgaagcattttccaaataatggaagcaatgtatcaccatatcggagacgtcagacgctatttagcttaagtgtgcgtgaccgatctcatatgatgcgctcagactctgccgttttgcaatttttaccatgcatccgttattgtggtgttagctgaccttgggccacgcttatacatggaggtttaaagtctaaggatagatgatttgccgtctcatctgggatctctatacaactttccaaaaccaagtgccttctatggggtgtttgatggtcatggaggacctgaagctgcggcttatataagaaaacacgtgataaaattcttcttcgaagatgtcagtttcccacagacatccgaagtcgataatgtatttttggaagaggtagaggattccctcagaaaggcatttcttttggctgattcagctttggccgatgattgcagcgtgaatagttcatcaggcactacggcccttactgctttgatatttggaaggcttctaatggtggccaatgctggcgactgccgagcagttctctgtcgcaaaggagaggccattgacatgtctgaagatcacaggcctatttatctatcagagcggaggcgagttgaagaattgggtggctacatagaagatggttatctgaatggggttttatcagttactcgagcactaggggactgggacatgaagttacctaagggtgctccctcacctttgattgcagagcctgagtttcggcaagtggttctaacagatgatgatgaattcctcatcattggatgcgacggcatctgggatgtgatgtcaagtcagcatgctgttagccttgttcggaaaggcctgaggcggcacgatgacccagagaaatgcgccagggacctggttatggaggcattacgtctcaacacattcgacaatctcactgtgatcattgtatgtttctcttcccttgaccacgcggagccagagccatcccctcctcgccaacggaaattgagatgctgtagcctctctgcagaggctctttgtagcttgaggagcttgttggaaggcagtgcaagcaactgaatgtatgtacatacacagttcatctaataatgtgttgttgggattatacacactgttttcggttgcttcagtttagacattggaaaaagctgccatcatttttttacgtggtcggttgatgtacgtagcctgggttggaggatggtggtgtaaatatgtattgtcgttacattattattttgtactatagtcaatttttactatgactgccacattcatgtcagattcttgtgcgtcaataaatggaatctcttagcttctattccgattgccacattcatgtcaagattcttgtgtgtcaataaatggaatctcttagtttctattccaaaaaaaaaaa

SEQ ID NO: 84252 - DNA, 1386 bp, Glycine max
  Clone ID: PAT_MRT3847_47096C.1
agagatcaaacctaagagaagcatattcaaacacaatcaacagtagtggtcactcctgttttgcagccatgactagtgttttggtgtttggcttttgtgtagcagtaagcttggttctagcacttggttctgtttctgctcaaccaacaagggctttcttcgtatttggtgattcactcgtggacagtggtaacaatgatttcttggcaaccacagccagagcagacgctccaccctatggcattgactacccaacacacagacccactggacgcttctctaatggcctaaacatccctgacttaattagtttggagcttggcttagagcctacactaccctatttgagcccgctactagttggagagaagctcttaattggtgccaattttgcctccgctggaattggcattctcaatgatactggaattcaatttttgaacattatccacattcagaagcaactgaagctattccacgagtatcaggaaagttcaagtttacacattggtgcggagaggacctaaaacagttgaaacagagcactcgtcctcatcactcttggaggaaatgattttgtcaacaattactacttggtgccctattcagcaagatctcgccaattttctctccctgactatgtgcgctatctcatatctgagtaccgcaaagttctaaagaggctttatgatttgggtgcacgtagggttcttgttacgggtacaagaccaatggggtgtgttcctgcggaattagcgacgagaagcagaactggtgattgcgacgtggaacttcagagagctgcatccttattcaatccccaactcgttcaaatgttaaacggattaaatcaagaacttggtgctgacgttttcattgctgctaatgcccaacgcatgcacatggatttcgtttccaaccctcgagcttatggatttgttacatcgaagatagcttgttgtgggcaagggccatacaatggggttggactctgcacaccgacctcaaacttgtgtccgaacagagacctttacgcgttttgggatccattccatccatcagagaaagctagtcgaatcatagtccaacagatcctcagaggcaccactgagtacatgcaccccatgaatctcagcactatcatggccatcgattccaagacttgatcaatgcatcatctacaataaccttccttcgtattctatctatgtgtgtgccccctaattaagtttatttcatcttctcatgataattccttagctagtgtggtttgtgctgcaaagttaattattatgtactggtttgtccctccaattgttattgctctcttggaagtaattttggtctgtcatcagaaataaaatgttctctattcctttgcttgca

SEQ ID NO: 84253 - DNA, 1768 bp, Glycine max
  Clone ID: PAT_MRT3847_47097C.1
cacacgcgttcgcccacgcgtccacggtcctaaaaaatagttcacaatccctatccctcctctcttgttatatatagacacaaacgtaagaccttttgtttctgacttgtaataattcttataacacaacacaacccatggccaccacctccgcattcctcctccttcccctcctcctgctgctccacctcgccatcgccgctcacggcatcggcatcaactacggcacgctcggcgacaaccttccaccgcccgcggcggtggcgaacttcctgaagacgaagacgaccatcgaccgcgtgaagatctacgacgtgaacccggacatcctgcgggccttcgccggcagcggcatctccgtgacggtgaccgcccccaacggcgacatcgccgccttaaccaaaatcgactcggcgaggcagtgggtggcgacgcacatcaaaccctttcaccctcagaccaaaattaattacatcctcgtcggcagcgaggttctccactggggcgacaccaacatgatccgcggcctcgtccctgccatgagaacccttcactcagccctcctagccgagggcataaccgacattaaggtaaccactgctcactctctggcgataatgcggtcatcgataccaccaagtatgggcaggttcaggcccgggtacgcaaagcacgtgttgggcccaatgctgaagtttctgagggagacgagaacacccttgatggtgaacccgtacccgtacttcggttacaacgggaaaaacgtgaactttcttctgttcaggcccaaccgaggcttgtacgacaggtacacgaagaggagttacacgaaccagttcgacgctctgatggacgcggtgcactcggcgatgaatgctttggggtacggtgacgtggacatcgccgtcggcgaaacggggtggccctccgtttgcgacggttgggacgcgtgcagcgtggcgaacgcgcagtcctttaacagggaactggtgaagcacctggcgacggggaagggaacgccattgatgccaaaccgaagcttcgagacttacatcttcgcgctcttcaatgagaaccaaaagcccggcccaatagccgaacgcaactggggcctcttccaacctgatttcactcccgtctacgactccggaatcctccgcaacggacaggcagttacacctgcaagacctacacctacaagacctgcagctcctacaaaacctgcacctgcagtaggaggtcaaaaatggtgtgtgccaaaggcagatgctagcaaccaagctttgcaagcaaacataaactatgtgtgcagccaaggagttgattgtaggccaattcaaccaggaggagattgctttgcagccaacaacgttaaggctcttgccacttatgccatgaatgcctactaccaggccaatgggcgccatgatttcaactgtgacttctctcaaactggtgttattactactactaatccaagccatgataaatgcaaaatctgagcatgtttatttaaaggttataatcagaggcaagaaaggaagatagagaaaagcccattgtcatggtgtcaatgtggcttagtggtatctgtgactctgagattatgcattcatgtactcaaaattatttagtttgtatattgttctggaagaagaatgttggcatggtatttcgtgccttgactagatatgatggtccatcgactactaaataggaactttgcattaatattaacatcattcgtagctgaaaaaaaaaaaaaaaa

SEQ ID NO: 84254 - DNA, 356 bp, Glycine max
  Clone ID: PAT_MRT3847_47098C.1
ttttattttgaataggcttggcccttgctttggttttttcctgaggcgatgcgcccttgggacacctgaggagaatccttaaatttatggatcgacctggatgctcacgaaatgaaacaatgcctatccgtgcggcttcttgccgttattgattagcccaactcaacaccggggggggtgttgggaccaatacttgctcccctattccttcggcgatgaaggaccttggagggggagggaagatcacccgtgaacttttcgtaaccaaaagatcggacctgtctgccatggcattggcgccgacgtcgatctttgaaaattcgagggttgcccaaaaataatggcctcactggaaa

SEQ ID NO: 84255 - DNA, 300 bp, Glycine max
  Clone ID: PAT_MRT3847_47099C.1
ggcacaagttcctctattgctgctcactcataaaaacattgtcgcggccgttgaagtccgatgatttcatcattactatcatcatcgcaagacgcacaagtgaatgctacaatacgttcgatactcaagatgatcactgactacgggacaccgtgggacactggggtctcacacgaagtcgacgcttatcgtcatgtcgcagaatatcatgggtatctcgaccattctacaagacgttgttacaggcacagagtcacgcatgcacagggagtgcttactattagactcgatcacaatttg

SEQ ID NO: 84256 - DNA, 310 bp, Glycine max
  unsure (1)..(310): unsure at all n locations
  Clone ID: PAT_MRT3847_4709C.1
tcgcangcacgcgtacgtaagctcgggaattcggctcgagcngcaancttaanngtngnatgtntngtnatnatnngtatngcnnnnatgngtgnaccaatnttgtgtgcaagncgcgtcatnaantgatgatttctagtanaacctagnaccgnggncnntctnaccngntgcagggtnagagatgtaacnagaatcgnncngtatcgnngtnnngnacantntnggcactgcnngccacnanctgngacngacaaancgtgngcaaatgtcttcagcaagctgctaannnctatggcatcaacgacga

SEQ ID NO: 84257 - DNA, 220 bp, Glycine max
  Clone ID: PAT_MRT3847_470C.1
gagacattggttctacgtttgctgagggtcatgatttcatcatgaagtgtgacgtggaggataatccttcaggacatcataaaaggatgcgtcgtggtatatgtaacgggtcctgcacattctctagtgagaaacatagatgagcatgcatctgagggcactgctaactggctcacagccggtgtacttatatcaatggtggcaccagatattgtgcccg

SEQ ID NO: 84258 - DNA, 303 bp, Glycine max
  Clone ID: PAT_MRT3847_47100C.1
accaaaatcaaacctttcttctcctcttctcatgacacattcatccttttctcttaattcttatcccttcccttttcaaccattataaattaatttttgccttcattaatttatataaaatcttgacaccaacaaaccctattagacttagattggtggcatgtgtttctctttccataattttcactaacccatattctaactttgtctccaatgatacccaaatgcaatcaaagatctgttatcagctcatcactttttctaataacttctatctcacacccacacatattgatttatcct

SEQ ID NO: 84259 - DNA, 803 bp, Glycine max
  Clone ID: PAT_MRT3847_47101C.1
tggattttaccttgcttccatatatgaggattataagctgatttggagtagtgttagaaggaaggtgcatctattttcataatacattatagacagaatccgcaatatgaatttctggaagctttacattgcttcatttatgtcaattctgaaacttttgttgattactgctcttggggcattccttgcacatgatcgatttaatatactcagagagaatgccaggaagcacctcaatgctatggtatattttgtcttcaccccggctctaatttacagcagcatgtcgaataccttaacctttaggagcatggttatgctgtggttcatgccgttaagtattcttttaacatatattgctgggacagttcttggatggatacttattaaaactattagagttcctcatcatctacatggccttgtgttggggtgttgtgctgcaggaaatctggccagtttgcctcttattgtagttccaactatctgtaaagacaaaaacagtccttttggagatgaggttgtttgccacaaaaatggactggcatatgcttctctatcaatggctataggctacacttatgcttggtctattacattcaacgttgtccgcatatattcacccaagatctccaatgaagtcaaagttgatgaaaccactgaaaattcaaagtctgcaacagaaaatgatccagaaaaccttttaaaatgcccttgtggagcattagtcatggctgaggatatagcaaagcctaatggtggcatggatcaacctgattttgaatgtaaagtgcctaatggac

SEQ ID NO: 84260 - DNA, 386 bp, Glycine max
  Clone ID: PAT_MRT3847_47102C.1
cttcttaataccaatttacatatatattcaacttttcatcttcaacttataacaatcataatctgctcaggtgtaataactcaatctggcacaccgaaacttttaatatttttgcatattacaaataacattcctttaatgcatacttgtctatatttctgtatactactacacttatcctatcaactttaataatacaaatcctacttactacaacatcccttctatttcttacctaaccttattattcttttcacaaacccaataaaactttaatttgttcatactacatgattacaccaatcttaatcccttttttacaccctaaacttctaaacaattactacttccctattacgattctctaaaacattttcaacattctc

SEQ ID NO: 84261 - DNA, 372 bp, Glycine max
  Clone ID: PAT_MRT3847_47103C.1
gtttgcttctttctactttagttttccattcaattgtctgtttattgtgctctttaaaatttgattcatgaagttattgtatccactgagttatatctgatcagaaacctcaacatgaagtttccttacttgattaagttgtagtttgagtttggttctctatttgcacgcattctgatgcatgcaaacggataattttgtgactttgtacttcagggcaaatgtcctttgatactgcaataatggaaaaagaaacatgcagataaaacctactgatctattcttactcttttttattacaccatttctactgaagtttttctctcaattatctgcttgttttacacttttaatacttgaataatttctctc

SEQ ID NO: 84262 - DNA, 169 bp, Glycine max
  unsure (1)..(169): unsure at all n locations
  Clone ID: PAT_MRT3847_47104C.1
tacggctgcgaaaaaactacannaaggggaataccatgcagagtggattaatatatggaaaaacaaggataatgatgttttagcggggcaatgggtttaaagaatattcacacatacaccagtggacattggatgggataggaaaaacactactttggtcttggctggt

SEQ ID NO: 84263 - DNA, 547 bp, Glycine max
  Clone ID: PAT_MRT3847_47105C.1
atttggatttcttgaaacatgggaaaggcattaatacaggcttaaaatgggcattattgtgaacacatactcagctacaaagacctgttattaatattttgttgaagaggctatcttgatgacatccagctgatggccaattcgatacgagcatgaggtgcctactgcatttggtgcatgaaaaacccaactaggaatgaacgcccctcagtgaactgatggagtaacaactctaggaatagacctgatgagcaagtctatattctctcgcatgtgtgatgatctgattgcttcaaaaccattagcaagcatactgattatgctagataatctcgtaacaatgatgagtgcttcctgacttcttaaccactagatgctgagctgtcttacaatattattcaataatcacttttggaaattttatgtccataggcatggtaataccaaagaaaccccataacttcggcagagtgaaagctagaactctgtttgcaggaaaacagatggcaaactaactgttctagtaataccaccagactacaagcca

SEQ ID NO: 84264 - DNA, 299 bp, Glycine max
  Clone ID: PAT_MRT3847_47106C.1
ggaaagaaattataatcttccaaataattcatgttaaaaagtagtcgttgctgcatcatcatcatcattgtttttcttttgtatccgatgccaacattaattattattaagataaatatgctaacagaggtaaacattagagttattggtttatctatataaagataagtttagcgacgtttttgaggggaccagctggtccatgttcctttttttcttgtgtgcagtaccaaagaaggcccgtgccccttcattacttgagaagacgaaagaaattaaaataaaaggaaattattatt

SEQ ID NO: 84265 - DNA, 439 bp, Glycine max
  Clone ID: PAT_MRT3847_47107C.1
gcgttttcccgtcgacacagctgcggccagccctaagactctcttctctactgttctgcctatggaggtccatcaggaggtccgacagcaggcgaggaacattgtgaggaacatgatgaagcataggggcaaggttggaagcaacgcaggcatcaacgcatgctccgtggaatgcactggattgctcaataaagtactgaataaggtcagcgataatcaggctagctatgatgctaggattgccaggcagattaccagccaggtggtgagcatgatggccagactgatagacagtgtttgaggagtgaagcaaaaattgacgcacgaaaggacacacctgcggtcgaggaggggatcaaggatggcagatggtaaaagagatgtatgtagagtccaatgtggaatccctttcagagttccgctcacaggcatttgcaat

SEQ ID NO: 84266 - DNA, 362 bp, Glycine max
  Clone ID: PAT_MRT3847_47108C.1
atagcgcagcctgcagcatgatatcatgacgtcaataggatgccaatcaccgtattgaggccatccatctggcgctgatgcataggctatccttatgctgcacgagcatcgagaagcatcggactaatattatacgagctaaagcccgataggattatagcgataccaatgcgatcattgtgcaagcttcattgtgtgctgatctgcctataccatgctgcataccctatacctatgcggcgatcgatgttaggatccatactctcagactactagatcactactgtagatgtgtcagttatcagtaggacgatctattcttgctgacctgactgcacaaaccttctagtcatcatactcga

SEQ ID NO: 84267 - DNA, 549 bp, Glycine max
  Clone ID: PAT_MRT3847_47109C.1
ggctcgaggatcgctgctggaggcggcatgcactagcttccggggccttgcttgcagataggtcttcgtttttttgctgaagattctttgcaaaatggatttggtagccagttgcaaggaaaaattgcaacatttccgtataaaagagctcaaagatgtgctcactcatttgggactctcaaaacagggaaagaagcaggatcttgttgatagaatattagctatcctctcagaggaccaagtttccaaattgtggaccaagaagaatgctgttggaaaacaagaagtggccaaattagtggatgacacgtttagaaagttgcaggtatccggggccattgatcttgcatcaaagggacagggtgcctcagatagcagtaatgtgaaaattaaaggtgaaattgacgattcctatcaatcagatacaaagattcgctgtctctgtggaaatgtattcgatacagagccattggtcaagtgtgaagatacaagatgccatgcgtcacagcacatcagctgtgttattattccagagaaacctatggatgg

SEQ ID NO: 84268 - DNA, 555 bp, Glycine max
  Clone ID: PAT_MRT3847_4710C.1
gggacccaaccctcaaaattaaaaaaaactttaaatgggaacggcccaaaaaatgggtttctttggcaaaaatttttaaacaggcccccctgggggggaaatttggttaaccttttccaaaccaaaaaaaaaaaattccccatccccctcccggggggtagaaaccaaaataaggggccaattttttagccccaataaaataagggaaaaaaaaaacggggtatatccaacccagccccctcccgttaaaaaaaggaaacaatttaatcaacttcctcgatttgggggcccgcccccccgggtccaaaggggggaacatttttatccttgcctccagccctggggggagcccccggacccgggaacatttgggaaagaaaggggttgcaaaggctttaaaactcctttattttgtgttaaaacttataagcccccgatagcgggtttccacccacccactgaataccccccccggggggactttcaattttttttttggcggaataaaaaagctttggagcaactttctcacccttaaggggggccccaaggggg

SEQ ID NO: 84269 - DNA, 245 bp, Glycine max
  Clone ID: PAT_MRT3847_47110C.1
gtgcactgacagagaacacgctcatattgtgtctccgacttgtgatgacattcttaaaatgacgccgtatggatgactacccggattttataaggggattagcacaaacatagaacaaagtgttttagcctctgatgttctactcatggctaaggaagcgcttgctaaagattttatggattgccgactataagagcaaaaaaagtgcatccactattattatgtggctctggtcatttggataa

SEQ ID NO: 84270 - DNA, 376 bp, Glycine max
  Clone ID: PAT_MRT3847_47111C.1
agcgggtctggtggattcaagttggtacatggaggaagctcagaaggaatctaggaaaagaagcaaagttttgacatccaagaaatcctgttcaactacctgccaaaaccttcttgctctcgcccaattcctcaccaaactcactctcatgaacctcaactacgagacctacttcgtttccctaaacaacatgtttcagcacctctgtttagttgtatccaaccaaactttaactctatcgcactatgcttctgcttcttcttcttcttcttgctttcatgttaaacctcaatcccttgataacataccattgaatctcgaccatcctaagtttaacatgcagacaactagtcacaacacaatctctgacctctcg

SEQ ID NO: 84271 - DNA, 214 bp, Glycine max
  Clone ID: PAT_MRT3847_47112C.1
gaagactctgacagggaagaccattaccttggaggtggaaagctctgatactattgacaatgtgaaagctaagattcaggacaaggaaggtgtacctccagatcagcagaggctcatatttgctgagaagcagttggaagatggtcgtaccgtggcagattacaatattcataagggagtgagcttggcttgtggtattcagctttgggggggg

SEQ ID NO: 84272 - DNA, 452 bp, Glycine max
  Clone ID: PAT_MRT3847_47113C.1
tctgttgcatttcatcgttaaattaacagtaattttactttggaatttgagcgtaacaatttctcgtcaaaatgtttggtggcggaggagaccccttcagaaacccatttgatcaaatgcaccaacaaatgagacagatggacaacatgatgaattcgatgttgggcgatgcgtgggacatgctgaacggcttcggaatgatgggccccccgttccccaaccatcctatgctcaccgatggtctgaatcgtcaaaaccaagctcttcgtcgtcagcagcctccacagcatcactttggtcctgatacgatgatgagtccgtttggaggatttggccttttcggcggaatgatgcagcaaatgcaaaatatgcataaccatgcaattagtgatccgaattctgttgttttctccgaatcaacaatggtttcttacgatggaaatggacaaccg

SEQ ID NO: 84273 - DNA, 250 bp, Glycine max
  Clone ID: PAT_MRT3847_47114C.1
attacaactgaagatcaacatctcccactacatagttgatactctcattcagaagtcaggaaaatgattgagaacatacttctgaatttggcagcttttagcacctttcttgctcttattaatcttcccagagcttctggtcttctttttctcgtcttcaagttccaaaaagaaagaggcaagcttaaccaccatcccaaagccatacccacttattggtcactacttaaacctcaaaggcgtgggtaac

SEQ ID NO: 84274 - DNA, 449 bp, Glycine max
  Clone ID: PAT_MRT3847_47115C.1
cactcctacatcagctggtaattctcctcgagcttcagttttatcaacatcggcagcgaagcactatcgggggccgttaaacgctattacaagtagcctaatccatcttgaccacatatcgaccgactatctgactgtactgctcaaacggacaattacattgtactccatcatgaagacactattcgtaacactacacaagatcgcaagtaccctacaacacccacacttatcatggctagttcaacagtcacacgctttgatgactttctcatctgcccatactactaattgtactgctgcatcgtctctgacagcaccacactcttactatgtagaagctaagagggactatatggcaaagacagctatttagattgaaggattgaacgctaatcgctttaatggtattcccattcactttaacctacattgtagtttaaaattac

SEQ ID NO: 84275 - DNA, 1763 bp, Glycine max
  Clone ID: PAT_MRT3847_47116C.1
aagctcgaattcggctcgaggcggcgccctctatcattgtcgtcgatatggttttttcccttctcgtggcagatgaggttggaaggtcagaaaccgaaccgtctaacccacacaaacacaacccagatactataattggttgggttcgaaccatatatttctggattactgctgaaatcctatgtgccactaacagaatcagtctttactatgttgcagactagcacttttttgtttattcctaaatacatggacactgatgccactggagatcctgttgacaagctcaaggctatccagaatgatgatgtagaatatcaagacgaagatgatgattttgatgacgaagaagaagaagaagatgaccctattactcttggtttcgttgacaaacccaagaatgaatggtctcttcgccgtcaatatttcccaagcaaaactggtggagtcccggcttggcttgaccctctgaatataccatcagggagatcatctgtgtgtgacatttgtggagatcctttacaactcttgcttcaggtttatgcaccaactgacaaggaaaccacatttcaccgaatgttgtttgtttttatgtgtccctccatgaaatgtcttcttagggatcagcatgagcaatggaaacgccatccagagaagccatctagaagtgtgaaggttttccgttgtcaactaccccgcattaatccattttactcacctgaatgccctcagtataatgagagccacgaacctgctggcagtggagctgctctttgtgattggtgtggcacctggaaaggagacaagctttgtagtagttgcagacaagcacggtattgctctgagaaacaccaggctatgagttggcgcacagggcataaaactgcttgccaacagatgaaagtttcttcacctgtttttggacccaacaaaagtggaaccacctccttggagtctcataaagttggaagcaagaatctgtggcctgaatttgagatcagcattgaagatgaaagtgaatataatagggacatatctgaggaaaatagcttagctaattccttgatctctaggaacaggaatgatgacacaatgaattcacttatggataactttaagggtgatgatgacaaaaagagctgggcctccttccaggaacgcattgccgaggctcctgaacaagtgttgaggtattataggaatactaatgccaagccaatatggcctgtttcaagtggtcgaccatccaatgctgatatccctaaatgcagttactgcagtggaccaatgtcttgtgaatttcagattttgccacaactgctctattacttcggcgttgacaacgaagtggactctctggattgggcttcaattgtggtgtatgcgtgtgaagcctcttgtgaagcaagtttgccttacaaaaatgaatttgcttgggtacaaatttattcactttccacaaccttatagagaaatgtcttttttttttaatttttttatataaattattatcgtttttaaattttgggctcagaagtatatgttattcttcgtttgacttggtggaagtatgaggaaggattttctttatctacttcaactatcaattttgaggattggctgttgattgtgtaatttataggataggcttgattaggatgtgtacgtttttcactgaaaaaatgataattaattttgctacaatgaacaaggttgtaatcaagtttcaccgtctgaattaaaatagaattaggttgtgagac

SEQ ID NO: 84276 - DNA, 279 bp, Glycine max
  Clone ID: PAT_MRT3847_47117C.1
cctttgcgtccgtttattctacaaggtgttgcagtatggctagatgacctaaaaagaacaatggatttattcacaagatgggtgttgtacgggtaggttgacacacgtgcctgcctcccaagctgtggtgactgataaatgtccctatttggttgctattgtgcatgattatatagcgtcaacaattcctggtgagttttgacttgatgtatagcggacaaccatacacaatttgtgtgcatattctgtcaatcatggtttgtgaggttctttgctttt

SEQ ID NO: 84277 - DNA, 490 bp, Glycine max
  Clone ID: PAT_MRT3847_47118C.1
tcatcatgaatgctgactttcgaagattcttttccttttttcaatggataaattctcatgaagggacacaaacatttattacacagccaatattatgtgccctccatataagtagcttacattagcatgattaagaaaataaagagtcaagaggactgaattgctgcaactttgtgctgatgattcattctatcactcaccaattgttggtgatcttcccaagcaagcctctaatgcagcacttgtgtgagaatgagctattcacaatgtcttgacaaggataaaaaatcaccttgtcttgttcctttggcagagaggcttcccatgtgcttctgaagatcagcaactgaatcacctgttactatctttgccttggagctcttcttcccatcgaccagctttagttccaaccggtataaggcgcacacatcgcacttgctaatttcatactcataaaggtgccactcaaaaaggttcaaaggttgagggt

SEQ ID NO: 84278 - DNA, 394 bp, Glycine max
  Clone ID: PAT_MRT3847_47119C.1
tggcttggaacctttgggctgatttatgtgcttgcatggtcgtgagaagatgatagaagggtccgataaaaattcagtaataagctcgcctaagggggcctcgaagcataggtttgaggataaagtcgaaaagaaggagaggtctccgaaaagggtctaggtagaggtcgaaggtaaaatcgccgaagtcaagaagttcaccgccgcgaagcacggctctaattacgccattcattctactgagtagaataaagtatagtctgccgcgaccgtctatgacgcggattttaccgaaccggccgctcggtccttcgtcccgcgtaggaagaacggaaccttgcatcgcaccgcgaaaggaaaggtttgtccgggaatggcccgttataagaaaatc

SEQ ID NO: 84279 - DNA, 278 bp, Glycine max
  Clone ID: PAT_MRT3847_4711C.1
aattgacgctatgatctgatatgtacctatgtcagctgagatatagatagtggaaattgcattagttagagtgagatcatgacttctgacatgtatgcagtggagccagttacactggttggagtcaatatgaggcacatagtgcatcgagccgaggctctaattccaaccttgttaaaaccttaacttgcagaactaactttacgtcctgtagctacaagtgcctattcgtccaacctgaatgagcgaaccccatgaccacagggacattcacagcc

SEQ ID NO: 84280 - DNA, 1448 bp, Glycine max
  unsure (1)..(1448): unsure at all n locations
  Clone ID: PAT_MRT3847_47120C.1
ggctcgagggaattactattacttaaggaatgcaaacccttcactgtaggatttcccaacttggatggaactgctttagagtatcaccaatttgatatcaataaggatatggatgacagcttctatgctggtacaggtttttgtgaggaaggtcgtgttcctcacatatctagctatctgccaagtgtgtgccctcctccttctgctttcttaggcccaaaatgcgcactttgggactgtccaagaccagttcaaggcttggactggtgtcaagactattgcagtagctttcacgccgctctagctttaaacgaaggaccaccagggatgaccccagttctaagacctgngggaattggactcaaggataatttactttttgctgctcttagtgcaaaggcacaaggaaaagttgttggaatcccaaaatgtgagggagcagcaaccgcaaagtctccatggaatgcacctggtttctgatcttttagtctcttttctttggctgacgtgttaatattattttagaaaagtagtacctgccttgacagactgtcctgatcatttttttttattattgcagctctttgatacttgtgttcttgagggtgagactattagggagtggcttttctttgataagcctagaagggcatttgagagtggaaacagaaagcagaggtcactgccggattacagcgggcgagggtggcacgagtctagaaagcaagtgatgaacgagtttggagggctgaagagatcctattacatggatcctcaacctttgaacctttttgagtggcacctttacgagtatgaaatcagcaagtgcgatgcgcgcgccttataccggttggaactaaagctcgtcgacgggaagaagagctccaaggcaaagatagtagtaacaagtgattcagttgctggtctgcagaagcacattggaagcctctctgctaaaggtagaaccaagcttggcataggaggtggtgtttattcagcttctaacagagttgctctacaactaaatgcaccttatcaatacggcttaacttcttcaccatatgatgactatgttgttgacaacacaagagactattatgtgacatgattgatccctttccttttttttcactttttcttcttaggaacaagacaaggtgattttttatccttgtcaagacattgtgaatagctcattctcacaggaagattgtgctgcattagaggcttgcttgggaagatcaccaacaattagtgagtgatagaatcatcagcacaaagttgcagcaattcagtcctcctgactcttattttcttaatcatgctaatgtaagaaacttgtatggagggcacataatattggttgtgtaataaaatgtttgtgtcccttcatgagaatctatcataactcgataaaagaaacggaatcttcnanantcnnnnnnnnn

SEQ ID NO: 84281 - DNA, 506 bp, Glycine max
  Clone ID: PAT_MRT3847_47121C.1
ggctcgagcatatttttcatacaacacattttttctagacacgcaacacctagaagagttccttagtctttgtggagctaaaccgtagggatatagcaacaacatgttacgaatgaagagacatacagataatgaagggtacaagagcttagatcagtcagaatggcttgtgctgttttattgaccaatacaaagcaagaaggctcactacaaaggttgcggggctgtggaatctgaatgcaagacgtgcattacgaaggtctgattattttaagcactggtagggcacatggcaagccacacgaggcacaagctacgggtggaagaactcaaagaacaagccagaagtcttagcttgtggacaaacacatatatgcaccagtgctccatatgtggactggaatataatctgggccatgctctaggtggccacatgagaaaacacagagatgctctgaacgacgggtctcctagtatggcatatatcgaccaagttattgagaaaa

SEQ ID NO: 84282 - DNA, 437 bp, Glycine max
  Clone ID: PAT_MRT3847_47122C.1
cccacgcgtcgtcccacgcgtcttcccacggaagaggaagaaagagaccgctatctcgccgatagctagcatcatggcgtccaaggcgctcctcgtggtagcgctcctgctcgccgccaccttcctcgtcgcctccgctaacgagcaagcccaggcggccaaagaggagaagaaggcggaggtccaagactggcacggcggcggcggctacccggggcacggcggcggcggcagcggaggctacccggggcacggcggcagcggcggcggcggctacccgcactgccggtggagctgctgcaaccgcgggtaccatggcggctgccggagctgctcgcaccctgatcatataccaaatcccatggaccgttctgagctcgtcgaggtccacaactaaatagtaatgagatgcgcttgttctatatattccggtacgt

SEQ ID NO: 84283 - DNA, 389 bp, Glycine max
  Clone ID: PAT_MRT3847_47123C.1
cgtatgcttgggcggacgcgtggggctaggcatggttcgcctgttttaaatgaagagggtactttggcaactccagatattgacaaaggaagttgggtctctgaatcttcatcttctgaggttcaattctctcatcagattatcctgtgcctccccccatcctttttaattaacaatattttagtgtatgcttgttgttctgagtgaggtttaattataggtgaccatgtgtgtaatatatgatactttggaaaattttggttctgcatggagatagaattaacatgctttgaaagttgagtatcattttattttacaaggatttgaaagaactttatttagttattctttaatgagtcgtgctatgttttaattgctgaatgacaaca

SEQ ID NO: 84284 - DNA, 221 bp, Glycine max
  Clone ID: PAT_MRT3847_47124C.1
aaaaaaaagaaaactttcataagcaactagtgatacaaacaaatgctagaaatttttagctagcctagttttcccctttgcatttttaaagggggccacaacacaaaaaaaaagcttttgatatacagttcaaataaaggaaaattttataaatggtggatgaggaaaaaagttcatgacaggattcttcaatgaccactctttctttttgctggtccaat

SEQ ID NO: 84285 - DNA, 1204 bp, Glycine max
  unsure (1)..(1204): unsure at all n locations
  Clone ID: PAT_MRT3847_47125C.1
gacccacgcgtgcgccctatatatcagttccaggcatcatttaacagacttttcaattagccatgtcactaaagtcagttactgtattgactacatatctcatctatgcatccatagttgctaagtcagctatggatccctacaaggccctcaacatcatcctgaacccaaacggaaccctcacacgcttaagcattcctccacaaagccctccctcaccggatcccactctccccacagcggttctctccaaagatctcaccatcaaccaatccaagcacacctgggcccggatctacctaccccacaaagcactcgattattcccccaacaccaactccaaactacccctcatcgtgttctaccacggtggtggctttctcttctacagcgccaactccacttacttccacgacttctgcgtcaggatggccaacgacactcaatccgtcgtcgtttcagtcgactaccgcctcgccccggagcaccgactccccgcggcctacgaagactccgtggaggcgctgcactggatcaaatcctccaacgacccctggctacgtcacgcggattactcccgttgttatctcatgggagagagcgccgggggcaatatcgcctacaccgcgggtctacgtgcagccgcggaggttgatcagatcaaaccactcaaaataaaagggttgatattgattcaaccgtttttcggtgggaccaagaggactccgtcagaggtaaggcttgccgaggatcagactctacctttgcctatcactgatctgatgtggaatctttcattgccggttggcgttgaccgtgactacgagtattccaatccaacgatcaagggtggtgctaagattttagatcggattaaggctcttgggtggaaggttgcagtgtttggggttgaaggggacccactggtggaccgtgaaagagaattggtgggactgctacagcacaagggtgtgcaagtggttggactattttaccaagggggtcgacatggcattttcgtgggtgacccttctatgtctgttaaagtctttgatctactcaaaactcttcattgatgagttagttattttgtgttatttggatcatgttcacgtgattttatgttccatgcatctaatgtcgttctggtactcaaagtataaaacanattaaattgtccgaaaaaaaaaaaaaaaaagggcgg

SEQ ID NO: 84286 - DNA, 218 bp, Glycine max
  Clone ID: PAT_MRT3847_47126C.1
cacccttaagaagtttagttcactaatcaatcttggtccaatattcacattcacatcatacagagatatgggttttaggtacattgagtacttgtctcttctctagtgcactgtcgccaccaccaccactagaagaagaagccgctcctacaccgcgtggcgctagtggtgattgtgtattgtgattgttatgctcttgtggtaaaaggcgctctctc

SEQ ID NO: 84287 - DNA, 525 bp, Glycine max
  Clone ID: PAT_MRT3847_47127C.1
aaaagaatttcaaggggttggacttgtaaacttcaacaatactgaactagaccattgggaacagcttattcctaatgccacacatgttgttctggagctagagtatgctgcaaaaaatgtgacatgggaatccctatacccagaatggattgatgaggaagaagaaaccgaagtcccggtttgtcattctcttccaagtcttagatctcctggtaataaggctcaatctcatagctgtgaagcttcctcatgtcaatggagggaattggtctagagatgttgctcggttgcacttgcagttagcagtagctaggcttgcaacctctttcaaaggcaattatcccgtgtacgtgctttttgttaccaacttctttccaatacctaatttgtttacctgcaaagaacttgtgggacatgaaggggatgtgtggttatacaaaccaaacttgaaagttttgggagaaaaactccaccttccagttggatcttgtgaacttgcacttcctttgaggggcaaagagctga

SEQ ID NO: 84288 - DNA, 2462 bp, Glycine max
  Clone ID: PAT_MRT3847_47128C.1
cagaatcttatagcgacgatgcgtccgggctcaatgacgctgacatctatgaaaataagaccctttcagcgcagttgatgctcacactgctgctattctgttcaatgactgtgtaatgacggctctaagagaaaaaacagtcattctagtgactcatcaagtggagtttctctcagaagttgatacaatcctggtaatggaagatggaaaagttactcaatcaggcaattacgagaatctcctgactgctgggacagcctttgaacaacttgtgagggctcataaggaagcaattacagagttggatcaaaataatgaaaagggaactcataaagaagagtctcaaggttatctcactaaaaaccaaagtgagggagagatttctaccgagggtaaacttggggtacagcttacccaagaagaagaaaaacagattggtgatgttggctggaagacattctgggattatatttcattttccaggggttcattgatgctgtgttggaccaacttggggttctctgctttggtcgcttaatattgttcgagctggatgaagcttgctctagccattgaagttccaaaaataactagcgccatcttgattggagtttatgcattaatttcattttctagtgctgggtttgtatatgtaagatctctctttactgctcaccttgggttaaaagcttctacagccttcttcaacagtttcacaactgctatcttcaatgctcctatgttgttctttgactcaacccctgtgggaaggattttaacccgagcttcatcagatttaagtattttggactttgatataccttattccatcacctttgtagcatctgtaggacttgaaataatggtgacgatttgtataatggctttagtaacatggccagttctcattgttgccattcctgcaatggttgcatcaaaatatgttcaaggatattatcaagcctcagcaagggaattaatgaggatcaatggaaccacaaaagctcctgtcatgaattttgcagccgagacatcacttggtgtggttactgtaagagcatttaacatgacagaaattttttttaggaattacttaaagcttgtggacacagacgcagcactgttctttcattctaatgtggccatggaatggttagttttaaggattgaagcacttcaaaatttgacggtcattacttcagctttgttactgatcagtgtccctccgggagttgtgacctcaggccttgtgggactgtctctctcttatgctttctccttgacaggatctcaaatattttggactcgatggtattgcaacttattaaactacattatctctgttgaaagaatcaagcaattcatccacctaccagtggagcctccagccatcttggaggaccaccggcctccatcttcatggccttcaaaaggcaggattgatcttcaagccttagagattagatatcgtcccaatgctccattggtgcttaagggcatcacttgtacttttaaagaaggtagtagagtgggagtcgtaggaaggactggaagtggaaaaagtacactcataagtgctttgtttcgcttagttgatccagcaaaaggttatattcttatagatgggattaacatatgctcaattgggttgaaggatttgagaatgaagctaagcatcatccctcaagaaccaactcttttcaagggcagcattaggaccaacttggaccctctaggcctgtactcagatgatgaaatatgggaggctttagagaaatgtcagctcaaggaaactatcagccgtctaccaaatctcttggactcttctgtgagtgatgagggaggaaattggagcttgggacagcgccaactgttttgtcttggaagagtactacttaagaggaacagaattcttgttctagatgaagctaccgcatccattgactccgccacagatgccattctacaacaaataattagacaagaatttgtagaatgcacggttataactgtggctcacagggttccaactgtaatagatagtgacatggtcatggtcctctcctatgggaaattggtggaatatgaggagccttcaagactaatggagaccaactcctcattctcgaagctggtagctgaatattggtccagctgcaggaagaattcttcctcaaatcttagcagacagcaacattgaataatgaataataacattatggaaaatcacgtgcagacttactttttcactgttttacttttaaaataatctacctgatgcagagttatatatctttataaactccccttcaacatttgtcgatttttttcttggtttgttaagccatgataatttgaagaactgcagcatttttaactagaaaaaaaaaatgtttttacatataaaattaaaattccatagcccttcaaaagggggggggggggggggggggggggggagg

SEQ ID NO: 84289 - DNA, 283 bp, Glycine max
  Clone ID: PAT_MRT3847_47129C.1
gcctttttatttttctctctattttcaatttttctaccctttaaacatcaataaggggggttgtttttaaaaaaaaattcatctcataacacaagcgatttactttgagtgatgccaaaggatcatgttttcccatgacaataagccatatccctaccagttgataagattggcccacgcatatccatccatataacatggacgatccaagaacaacaatcaagaaactcaaccatgcattcggcttaacctatgtttcaaacaacccctcatttttatttac

SEQ ID NO: 84290 - DNA, 306 bp, Glycine max
  Clone ID: PAT_MRT3847_4712C.1
tttttgtgttttttttatttaatattgcggttttccctcaatatgttaaccagtatttgccataccgcaggaaaagccagaacaaaaatgaaacttttgtttctaatctcaaggtatagcccaacatgcttgagctagatggaagctgttgaaatagtattttataagggcaattacaacacaaaaccaatgccgaaaatggacgggggcatccttgggtacaccgagacaaatcaaagccacatagaggggggaaggaaacaaatacgcaaggaatgacttaacacttcagcacttatttttagc

SEQ ID NO: 84291 - DNA, 285 bp, Glycine max
  Clone ID: PAT_MRT3847_47130C.1
gtttctgagaatgccctttctgcctctgatggaattccaaatgatcatgttttgtcagtcatatctgttttatttcttgagcttggagaattctcatttgtgttgatgaggaatattgtgcttaaacttgctgacttgatgactcaaatttctggaggcaaggttcataatgagcatcttgagaaatgcattgggtctgctgtttatgctatggggatagagagatttcttacacttgtacctatatctcttaatgaacacagctatacttactcaaatatttgg

SEQ ID NO: 84292 - DNA, 269 bp, Glycine max
  unsure (1)..(269): unsure at all n locations
  Clone ID: PAT_MRT3847_47131C.1
tacggctgcgagaagacgacagaaggggatcgatccaagcaatgaatacccaaagtgcttctctcctctgtctgtatctctctctcgctagccatccggctagttgcactgctggcagtgcaagtccatgaagcgcactgccaagccagcatgtatcaacattcatcagaagcctgcctccttcctttcanctctctggaattggttcgtccgcttaccaggcaggcagaacaaccagtgtatataggtgaggaccaagcatatgggtc

SEQ ID NO: 84293 - DNA, 287 bp, Glycine max
  unsure (1)..(287): unsure at all n locations
  Clone ID: PAT_MRT3847_47132C.1
acgttgcangcgacgcgtacgtgnngnncggnatncggatngagntcagnnttcntnanntttcntncntnatgtanggnnagtntgagcctcggcntgnntcctnnganctgacaatacgcngnngagangggnntcccgatatcagngcgnggtccgaagttntgttanntctnctngnnngnaaannnanaacgccnttaaacntgaacatcttgntgnananagagncgnaagnncaagcaannggcnannatanagcnngcggnnatgggtancgnctntac

SEQ ID NO: 84294 - DNA, 355 bp, Glycine max
  Clone ID: PAT_MRT3847_47133C.1
aacctaattctaatattatatcttgatttgggttccccaaaggaacaattctccaaatttcataacgctaaacaagggtccccaccccccaagacatatgcttctagcgcaatacactatattttttcaaccaaaaaaaaaaatttgaaaagacatttaacttaaaaatttatacaaaaacggttgaatgttaataaatactatataacttggcccccaaagaagcttttatagaaccctccccctccatttcttttgaagcctacgttgttacaacagatcaaaaaaatttaacttctccttaacgctttttttttgcaaaagatttaaattaaaatgccacaccaccaaaaac

SEQ ID NO: 84295 - DNA, 442 bp, Glycine max
  Clone ID: PAT_MRT3847_47134C.1
tacggctgcgagaagacgacagaagggggtagtaaagagagtactagtgagactgtacgaaagagagtatgagtgggagtgtttctaacatttgtcggcatctcataaggctatcctatattcctattttttatgatactggacacctagtatctatatacacctatagagagaactgtaactgtcacacgtctgctccatctgtagatgaattttccagagtgtttgatggtgtacttgtcccatgctcattcactttaattgttgcttatcctcctttttgaaacagtactcttttgatacaaattcctccccttattgcaatatctgactgtgactctcacatcattccacatctcattctctttccttaccatagttctttccctattgtcctcatctcaacttttcctttttcttttcctcctccctttattcttct

SEQ ID NO: 84296 - DNA, 418 bp, Glycine max
  Clone ID: PAT_MRT3847_47135C.1
atcaaattgggggaaccttcaaaaaagggcacccataataatgaataaatatacctgatttacaaattcccaaagatttttccttaatttgctccagatttcatttacctcgggaggaccttaatgacagactcattaccaattgtaagactttacgaacctaacaagacagttgctcattttccccctgccaaggtttcttttattgaacaaaagggataaccgctaaaatgtaaaaaaaatcctgcccatctgaaattttccataagacccatctcaaaaacacgatgggctcagacctcttatttcccccaaagtaccatttcaacttgattgagttttaagcctgtaccctcttttctttgctctctgcttaggacccttttacttaaatatatttttaggcaaaaatgggttt

SEQ ID NO: 84297 - DNA, 190 bp, Glycine max
  unsure (1)..(190): unsure at all n locations
  Clone ID: PAT_MRT3847_47136C.1
cttcctcnaaactcatactattccnccatgcatcatcatcctcttcccttaattccacacnnttcngnncntngacnacnaacacccacaaactaacccctctctcctcctccttccnccaccccaccaccgtcctccgcngcaccccttcttccacnaccaccccgcgtngcaccttcaccgtccgcgc

SEQ ID NO: 84298 - DNA, 535 bp, Glycine max
  Clone ID: PAT_MRT3847_47137C.1
ggctcgagaaccaactcaccagcacgtaccatctataactaccaccaaaaccaaacccggacaaatgacagacaaaatggctgaggaagtcaaggccaccgagaaccccgccgtcgaggcccctgctgctgaggagaagaagccagtcaccgagactgtcgctgagaccgccactgctgccaaggagaacgtgttctccatgtttggcggcggtgcgaagaaggaggccaagaaggacgacgacgaggagaacgaccgctctggctccgcaaaggcacataaggagaaggccgctgaaggctgtgatgatgatgacaaggtccaggaggaggaggccgatgtgcacttcgagcccgttgtgcacctcaccgagaaggtcgacactaagaccaacgaggaggccgaggagcagactttcaagatgagggccaagctcttcaagttctaccgcgagagcaaggagtggaaagagaggggcacttgcgacgtcaggctgctcaagcacaaggagaacggctagactcgcctggttatg

SEQ ID NO: 84299 - DNA, 459 bp, Glycine max
  Clone ID: PAT_MRT3847_47138C.1
ccctcgggctctccgggtccgaggtggcggagaaaatcatgagtttgtatgtgggaaccaatgccggcgagggtggtggcgttgcggcggtggcggaggaaggtggcgcaaagacggtgtacaatcacaaaccacgtgggaaacgagtgagttttagcccaatggaaaatgaagaaattcatgtagtaggagctgctcaatagttactatagtcaataagggtactttcttccttgtaattatttaagtagaagcaaaatcgtgaccaagggaagaactcagaagcaagaggcaaggcagagcaataacaccctcatagtttcgttctggtgcttctgaagtatgttaattttgttctgtaatgtgtagcctacttcactatgagagcttagatatgtatatacatgcatttatttgtagtgatatggttagaagattattgcttcgaattttatcctc

SEQ ID NO: 84300 - DNA, 664 bp, Glycine max
  Clone ID: PAT_MRT3847_47139C.1
atatcaaagtattccaccaaacaaagtggaggcaaaaacaatccactcgctctgctgagatggtatagtataattgattcaaagcgggtaacgtagtttacttatttacataagcagcatttgctcaactatttattatcaatacttaaaataaaataaaaagtactttgaccaaacacgatgctaatgtcattcaagcacaaactatatcaaagtattcccccaaacaaagtcgaggcaaaaaccgaaaacaatgaactcgctatgctgagttggtgtaatgtgggtgacgcaataaatttataattttcttctaggaaatttcaaaatccagtcagcatgtttcataaaaacaatagtacgtttgttaaacgtagaaattgcttttgaacatagttacaccttactggctactgctcaatacattgccttttactaacctgcaatattaatcaacacttgtcttgacttgaattataccaataatctaaacacaaaatcatatttatctcaaaatgacttaaatttttgttttatcttcttttaaataatttgtatatcttgtttttaattataacaattaaaactaatgtcttttaattttctcgtttgcatagccttattttaaaatttaactttcaattgtaacatgcattaccttgtc

SEQ ID NO: 84301 - DNA, 422 bp, Glycine max
  Clone ID: PAT_MRT3847_4713C.1
aaatatgtgaatggctttttcttattccattccaaccaaccaggtcgggtgttcataagtctaagtaaggatatggttgggttgttattgctatggctgggatatcttccaccagatcgagggctttggtcagctaaattagtcaagaaccggtcatagcacaaacaattcaaagagaagattttcatgaatcttggtgcatgtgtgccaacgtggaaagatagggtgtatgtgtgtacaagtggaatttttgtggaatttttgtgtggctaggtagccagaaatcacaaggaagatgttcaactcgacaaattgtgatactgatgatgccaactgtgcaagggcattgctatctatatccgaaatcacttttgggagcatcctttgagtcttgggaagtccagcgtttggaatagttcttc

SEQ ID NO: 84302 - DNA, 475 bp, Glycine max
  Clone ID: PAT_MRT3847_47140C.1
tatcagatgagttgtgcaacacgaaagacacctgccccaggtcaggctgtatactctgcttctaaatatgcgctcaatggttacttccataccttgcgtgcagaggtatgttgagtgtgtatattatcttcagtagaaggaatgcaatttaccatgataaaccatactatagtgcataactggaagataaaatgcagtagttttcctccaatgagaagaaaaaatgggtacaatggatgctgaactgttctaattatcatgcactactaatcatttaatggtggcagctttgtcagaaaggaatccaggtaactgtggtctgtcctggtccaatagaaacatcaaataatgctggatcaagggttccatctgaggtttgtgtatttgctaattcatcatccattactactgtaaagaaagacaaaacttgagtgtattttttctttactttcttcccaccataatacacagtaca

SEQ ID NO: 84303 - DNA, 1089 bp, Glycine max
  unsure (1)..(1089): unsure at all n locations
  Clone ID: PAT_MRT3847_47141C.1
agcagcccaggaacatcagttcagaagcaaagaaaaacattcctttctatatgtttattgatgaagaaacagaaatgtatatgaagaatgccagtattttgagtagcagcaggagagttggattatggagaatcatcattgtccgtaatattccttatgctgattctcggcgtaacggaaaggttccaaagcttcttttacacaggatcttccccaatgtccgatattcaatatggattgatgggaagcttgagcttgttgtggacccatatcaagttcttgaaaggttcttgtggcgccaaaatgctacttttgcaatttcaagacactatagacgctttgatgtatttgttgaggctgaggctaataaagctgcagggaaatatgaaaatgcttccattgatcaccaaattcaattttataaataccacgacggtttaactcattattccaggactaagcttcctataactagtgatgttcctgaaggttgtgttatcataagagaacacattccaattacaaatctctttacttgcttatggttcaatgaagttgatcgcttcacttccagggatcagttaagcttttccacagtaagagacaaaataatggcaaaaactgattggagtattagcatgtttttggattgtgaaagacgtaactttgtgatacaggcttaccatagagacatattggagcaaatgcctcctccagctgctgtaacctggcgtcctggtccacccacttatactaatcggcctcagatgaggaatcatcctaggcgtgggagaggagacaggagatcaggttcaaagcatcatcatagagttgtaggcactgttcatatgaaccacattttgatttagtgtcatcttcttgctagaggtttttttggttcctttaagtgtaaatgcatgcattctttgttgcaaattatacttcaaagagcccccaacagttttgatattgttgctggatgaattgtaaatatctttgctataaccgacaagatccttaccaccttttttccaaaagggaaagaaaacaaaagggggttctcannnngtgcattttgcacactnnaat

SEQ ID NO: 84304 - DNA, 789 bp, Glycine max
  Clone ID: PAT_MRT3847_47142C.1
ggaccaaattcctttccagttttaatgggacccgaatgggaaaaataggcttataatcccagaaatgagaagccattccctgccaaagaagcattgcttaaaaccactccctcggttcttcactcacttacccacatatttgaaggggaaaaaggtgttgaaagccaaaagaaatcaacatcactcatgcaaagaaaaaaataataaagtaggactaaaaatagacgctgaaaatccagacataaccatatgttatctatcaccaaccaaggaagggatctcttttctcaagaatcatttatccaactttttgacaaaatatttcaaatcttgaaagtagaagggttcatttccccaagcaacccatccagctatatagcaaatagctctatacatcaaggaggtttgagcccaaaaatatgcttcagtaataaatctgcaattgggagtttccttgagtaatccccaggaatgctcataaccacaggatcattcttcacagatttgaattttaattggttatcagtattatttaccttcccaggactatatcccaaaataaagcattcatatgccctgtgatggaagagatctaaatcacaaatccaggatccgttttctttcagcttgatttctggtgggaactagcattttccctaggtggattcacatctatgaggttgaaaccagaatcagcatgggcaattattgtcatgccaaattcaacaatagacaatcaacgaactggcacaaactgaagcatcacccatgagtatttaaactcgagcc

SEQ ID NO: 84305 - DNA, 4915 bp, Glycine max
  Clone ID: PAT_MRT3847_47143C.1
atggatgggaattgtataagcagtagcataagcaggagcattagcagatcaagttggaaaatggaggaagtgtttacgagtggaaggtattgtcgcaggacttcatatgttgaagaggatgaggaagatctcaaatggactgccaactagttactttacacttatgatatgggaaggataagtataaacgaaatcttttctgagtgttatcaaaccggggtgcacaaggaaattgatgttcggaagctagatgtgaatgataggcaacaaatcattgacaaaattttcagggttgctgaagaagataatgaaaagttcctcaaaaagttcagaaacagaattgacaaggttggaatccgacttccaacagtagaagtgaggttccaaaatttgactgttgaagcagattcctatgtcggcagcagagctctaccaaccctaccaaatgttgcattaaaccttcttgaatcagctcttggcatttttggcattagtacagctaagagaacaaagctcacaattcttaagaatgcctctggcattgttaaaccagcaaggatggcccttctactaggtcccccatcttcagggaaaacgacccttttgttagcattggccggaaaattggaccccgaattgagggtaaaaggagaaatcacatacaatgggcataaacttaatgagtttgtgccaagaaagacttcagcatacattagccaaaatgatgttcatgttggagaaatgactgtaaaagaaacactggatttctcagctagatgccagggagttgggactcgatatgacctattaaccgagcttgctagaagggaaaaggaagccggcatattcccagaggcagatgttgaccttttcatgaaggcaactgcaatggaagggacagaaagcagtctcattaccgactacacgctaaaaatattggggcttgatatttgtaaggataccatagtgggtgatgaaatgcacagaggggtatccggtggccaaaagaagcgtgtcactacaggagagatgattgttgggcccacaaaaacactattcatggatgaaatatcaacgggtcttgatagttccacaacatatcagattgtgaagtgcttgcagcagattgtgcaccttaatgaaggaactatcttaatgtcccttctccaacctgctcctgagactttcaatctctttgatgacatcatcctcatatcagagggccagattgtgtaccaaggcccacgtgaccacattgtggaattctttgaatcctgtgggttccgctgtcccgaaagaaagggaaccgctgatttcttgcaagaggttacctcaaggaaggaccaggagcagtattgggcagacaaaaacatgccataccgttatgttacagtgactgaatttgcaaacaagttcaagagattccatgttggaataaggcttgagagcgagttgtctgtggcatttgacaagtcaagtgcacacaaagcagctcttgtatacagtaaaaactctgtgccaacaatggaccttttcaaagcatgttgggacaaggagtggctgctgatcaagaggaactccttcgtctacatattcaagacagctcaaataatcttcattgccttcatagccgcgacgctgttcttgaggactgaaatgcaccggaataacgaagatgatgctgcactttacattggtgcaattttgttcactatgatcatgaacatgtttaatggttttgctgagctagcactcacaattggaaggcttcccgtgttttacaagcacagagaccaccttttccaccctgcttggacttacaccctccccaatttcttgttgcgtattcccatttctgtgtttgagtctcttgtttgggttggtgtcacctactacatcataggatttgctcctgatgccagcaggttcttcaagcaattgttgttggtgtttctgatccaacaaatggcagctgggatgtttagggtaatttctggagtgtgcaggacaatgattatagctaacactggtggagccctcatgctccttcttgtttttctacttggaggcttcatccttccaaaacgtgaaattcctgattggtgggtgtgggcttattgggtgtcaccattgacatacgacttcaatgccttggatgggaatgaatggtttgcttggaatttgatgcatggcatggccagtgtatggattaattgtctctcaatatagagatatagaggacccactttttgtgcctgggagtactactcaaaatttcactgtcaaaggatatattgaagaccactacgggttcaaatccgacttcatgggtccagttgctgcagttttggtagctttcactgtcttttttgcctttgtattttccttctgcatcaaggcactgagactgtccaaacaagataaaagaacttcatcaatgttggaagtacaagttatgcgacggcatgttgtaacggtctaaatgacctgtgaaaataattcaagagaagctcaaggcaatgcatgggtagccaagctaccagtggattaagaaaagttgactcggcaaatgattcagctactggagttacccccaaaaaaggaatgattctacctttccaaccacttgcaatgtcttttgacactgttaattactacgtcgacatgcctgcagaaatgagagatcaaggagtgacagaagataggctacaactgcttaggggagtaactagttcctttaggcctggagtcctaactgcactaatgggagttagtggagctgggaagacaactttaatggatgttttagcaggaagaaagactggtggctacattgaaggagatattagaatctctgggttccccaagaaccaagaaacctttgcaagagtctctggttactgtgaacaaactgatattcattcaccccaagttactattagagaatctttgctttactctgccttcctccggttaccaaaagaagttagcaaggaggaaaaaatacaatttgtggaccaagtgatggatttggtagagttagataatctcaaggatgctatagtggggcttccaggagttactgggttgtcaaccgaacaacgaaagaggctgaccatcgctgttgagcttgttgctaatccttcaattattttcatggatgaacccacttcaggtcttgatgcaagagcagcagctattgttatgaggactgtgagaaacactgtggacactggaagaacagttgtctgcacaattcaccagcctagcattgatatctttgaagcctttgatgagcttttgttgatgaaaagaggaggacaagtgatctactcaggaccattaggccgaaattcccacaagattacggaatactttgaggcaattccaggggtcccaaaaattaaagagatgtacaacccagcaacatggatgctagaagtgagttctgtagcagctgaagttcgtcttggaatggactttgctgaatactacaaaacatcatctttgttccagcgaaacaaagctcttgtaaaggagttaagcacacccccgcctggagctactgatttgtatttccccactaagtattctcaatccacattggggcaatttaaatcctgtttttggaagcaatggctgacatactggaggagtccagattataatcttgtcagatattttttcacattggcttgtgccctcatgatagggacagtattttggagaattggcaaaaacagggagagctcagctgacctgacaatgattataggagccatgtatgctgctgttatttttgttggaattaacaattgccaaactgttcaaccaattgtagccgttgaaagaacagtgttctatcgagaaagagctgccggaatgtatgctcctttgccttatgccttagcacaggtcttttgtgaagtaccatatgtgtttttccaaactgtttattactcactcatagtgtatgctatggtgagctttgaatggaaagtggagaagttcttttggttcttctttgtcagcttcttctctttcttgtacttcacatattatggaatgatgactgtgtccatcacaccaaaccaccaagtggcatcaatctttgcagcagcattctatggactctttaatctcttctctggtttctttatcccaagaccgaaaattcctaaatggtgggtgtggtattactggatttgtccagtggcatggacagtgtatggattaattgtctctcaatatagagatatagaggaccatctttttgtgcctgggagtactactcaaaatttcactgtcaaaggatatattgaagaccactacgggtttaaatccgacttcatgggtccagttgctgcagttttggtagctttcactgtcttctttgcctttgtattttccttctgcatcagggcactgaacttccaaacaagataaaagaacttcaatgttaaagtacaagttatgctatggcatgttgtaacggtctaaatgacctgtgtatgtaaataactgaggctggagtcaatgctcaagatttatgcaacattataagcttaatagatggccacgatagttttgctggcggagtgttcttcagcaagtgtaaatccacatcaatcgttctattattagtttggtttgctacttagaagaagttaggtgcttattcttgcaacaatattatttcttataagtagcagtttattcttttacattaatttagaatatttatccatgatagatgcattattttttatttcctctattcagcccggcaatagattccttcgcaggatactcgataacattacttttgttggtccatcatggtgcccttggttcaacggcctgacattatgttgattccacctcccatggggacacgcatccttgagctcctatt

SEQ ID NO: 84306 - DNA, 661 bp, Glycine max
  unsure (1)..(661): unsure at all n locations
  Clone ID: PAT_MRT3847_47144C.1
tccctgattcacaggaaaccaaatatcatgtatttatgtgtaattaatgctgtaagcctatataaactcacatctgtagtgtactctaacacacaattttcactctattattcctcaatattttctctaattttacatggtatctagagctaggttgagggaataagaaaaaaccgggtccccgatgagcccttttgctcactacctttcttctatcattcttcttccaatttctagtggaccattccactcattgcccttcttccggaaaactctttctgttttccagcgagtgctcttatccggtgaaccatattccgctgagcagaagttgtcacagctagcaccactggattcgtctcctccttgccagtcaagcccagctttttctctagcgccatcagagcgccacgtgccgccaccttctccaatcatctcttttaatctttttcacatttgtcctcctctccggtgaaatctaggtgcacccactaccgccatggtgctcatctccctccagcgagtctgaccatgtaatcagccaccatcaccgctgccgccagnnatttcgctgtttgactgtttttggctcttttcgcctgcagattccatttctgcttttcttttattctcaatccccctatggagtctccacaattga

SEQ ID NO: 84307 - DNA, 646 bp, Glycine max
  Clone ID: PAT_MRT3847_47145C.1
agctttcctacttggaggcttcatccttccaaaacgtgaaattcctgattggtgggtgtgggcttactgggtgtcaccattgacatacggctttaatgccttgtctgtgaatgaaatgttagctccaaggtggatgcatccacagacttcttctgataaaaataccacattgggtctatcagtactaaggaactttgatgtttatgctaaaaaagattggtactggattggagctgctgctcttcttggtttcacagttctgtacaacgttctcttcacccttgcgcttatgtaccttaaccctcttggaaagaaacaagcaattatttctgaggaagatgcaagtgaaatggagtctggaggagacaccaatgaagaacccagacttgtaaggcccccatcaaacagagaatcaatgcttcgatcattatctactgctgatggaaacaattcaagagaagtggcaatgcagcgaatgggtagccaagctaccagtggattaagaaaagttgagtcggcaaacgattcagctactggagttgcccccaaaaaaggaatgattttacctttccaaccacttgcaatgtcctttgacactgttaattactacgtcgacatgcctgcagaaatgagagatcaaggagtg

SEQ ID NO: 84308 - DNA, 177 bp, Glycine max
  Clone ID: PAT_MRT3847_47146C.1
tcgacacagctagactaggaatgcggccggatctcttaatttcgacaagagttacggaatactttgaggcaattccaggggtcccaaaaattaaagagatgtacaacccagcaacatggatgctagaagtgagttctgtagcacctgaagttcgtcttggaatggactttgctgaat

SEQ ID NO: 84309 - DNA, 426 bp, Glycine max
  Clone ID: PAT_MRT3847_47147C.1
acgcgtgcgaacacctgcgagaggactaccgaatgacgttgacacattgtagtgggcactctataactaattagaagccagcatacgccaaacatatgaatgctcgaactatgctctcagatactgagcattacgctatacacgagcgacactcatctagctgaggctaacacaagaagcagtaggcaaacggatgatatagcgcacaagaccgggcttgacaccgaagtcaggccctcaccgaaactcgctatggaggatgatccctctacgtaccgagccatgatatttatagaattcatgcagcttcaacagagccatgagcatcacagcaagacatgcttgaagacgatggacatgggcaatcaattgagctgctaccatagcttaactaggaaacagtagacacatgcattatttgcatct

SEQ ID NO: 84310 - DNA, 1221 bp, Glycine max
  unsure (1)..(1221): unsure at all n locations
  Clone ID: PAT_MRT3847_47148C.1
cggtcttgggataaagaatccagagaagagattatagagtccatagaatgctgctgcagagattgatgccacttggtggtttggtgtgatggacacagtcatcattccataatatgtgaagtccaagaaagagaagaagctgtcatgtaagaaccaaaagtacttttccactttgcattcaaagctcaccatagcatacgctatgagtgagtaataaccagttcggaaaaacacatatggtacttcacaaaagacgtgtgctaaggcataaggcaaaggagcatacattccggcagctctttctcgatagaacactgttctttcaacggctgcaattggttgaacagtttggcaattgttaattccatcaaaaatagcagcagctgacctgacaatgattataggagccatgtatgctgctgttatttttgttggaattaacaattgccaaactgttcaaccaattgtagccgttgaaagaacagtgttctatcgagaaagagctgccggaatgtatgctcctttgccttatgccttagcacaggtaagcagattgatttacttcaaagaataattttattttctagtgttcattgcttgttatgatgtcattgccttgttacgttatccttatgccaatgcattttcaattgcaggtcttttgtgaagtaccatatgtgtttttccaaactgtttattactcactcatagtgtatgctatggtgagctttgaatggaaagtggagaagttcttttggttcttctttgtcagcttcttctctttcttgtacttcacatattatggaatgatgactgtgtccatcacaccaaaccaccaagtggcatcaatctttgcagcagcattctatggactctttaatctcttctctggtttctttatcccaagaccggtgagtaccattctaatttcgttattatattgaaacaaacatatcttacataatctttactaacataactcttctaccaactttggcttttcagaaaattcctaaatggtgggtgtggtattactggatttgtccagtggcatggacagtgtatggattaattgtctctcaatatagagatatagaggaccatctttttgtgcctgggagtactactcaaaatttcactgtcaaaggatatattgaagaccactacgggtttaaatccgacttcatgggtccagttgctgcagntttggtagctttcact

SEQ ID NO: 84311 - DNA, 797 bp, Glycine max
  unsure (1)..(797): unsure at all n locations
  Clone ID: PAT_MRT3847_47149C.1
acgacccacgcgtccgctttgacgtcaatctttctcagtctgtctactctagtcacaatgacagaggacagaccacacccctcacccaactctgatagtaccctctcaaccatttctcctcctctcaaatgtgaaacaaagaaatacgcccaacacattattccaacctgaatcttacccttacggacaaaatggccaagagatcagattttgcccagaagctactggatgatctgcgcctaaggaaagaacgaatggcttcatctcagactctgagctcaaaccaatcccaccatttgcctatagatgcatatgcttacaccaaacaaacatacagaggatccagaaatacaaaggctactgaaattgtcagtaccagaactggggagatgctgaatagttctagtagaagctacagatcagtaaacaacgggcaaatttccaatcagatggttccatatgggaaagctcagagctcaaggcaaacgggtgatctgtcccttgccctggcttttgcatttgagaatggagggaaactaagaaggaatgattcaattatgggtttccttcaccaaattaaaaggggaacattggaattcagcatgtcagaaagacaatttgcttcaactagcaactaccctatgcagataaacgagatatccaaaggtgcacaaaaactaaatcagatattgagagccgggctcaatggtcttaacatggactcatattcaatacaatttgcanaggaactattacagggagctattgatttggaagaagtccctcagatgctagta

SEQ ID NO: 84312 - DNA, 363 bp, Glycine max
  unsure (1)..(363): unsure at all n locations
  Clone ID: PAT_MRT3847_4714C.1
aaaaaaaaaaccggccacgcggacggcagganaaaaataaanatnaaaaatttctttttccagcacccaacccacncncctgccctgctttttttacatcaanncccctcccccacacannncaaaannnaatacactcccaaactcacacccatccaaagcacccaacctcactacatacattaataacaaatcttaaacaactcacattaccatatangaccataaacccctatcaaaacttcacaaaacacaaacatttaanccataaacaattattcaaacccctccaataaataaaattntcaatatnncacatatcaaaactcccaaagttctccaaacatttaacactatattacc

SEQ ID NO: 84313 - DNA, 695 bp, Glycine max
  Clone ID: PAT_MRT3847_47150C.1
ccacgcgtccgcggacgcgtgggttgaccagctcgaagaacacttttgttttaccaatctgcagcaattaaagagaaccagtaaaaaaaaccacaaaacaagtcttgtatagaaaatctgcagttacctcatgtaacagtaaacattcatggtagtgggcatagatgagcataaaatagcaatttgagttcattacacacttgacaaagatataaaatagttctcattcccaaaccaaaactatatttgcaagattactgcccacacaatggtagtgaaaggtgaagaaggaagaaaaggaaaggctattgcttatcccaacaaaaactccaaagcagtaacaaaatacacccaaataacttatatgttatgagtttccaataagtgtaaaacattattagagcttgggagaatatagattaggaagttttgccaatacttaggtcaatgaagatttctgagtacatagcaattttcttatccaagtaattcaaagtaaatagattaaaaaaatgttattccccatttcaaaaacaaatatatcctaaactccattgatcaaactcaaattgaagagtaagtctctcaaagaattaaaggtctgatcacatggtaatagttacctgatagcccttaagtccaaccttttccagaatccttttgcaagcagtgacctcatcagaactaacataatt

SEQ ID NO: 84314 - DNA, 915 bp, Glycine max
  Clone ID: PAT_MRT3847_47151C.1
aaatatacaatggcacgggaagacgacagaagggggatctatcatgtaccatttttatgaacaattggatttatttgagcttcacaatcttatactacaccctaattccctccacaaccactttctgctgcatgccactaccgatggtgatttccgaccgtgccactatttggtgcagatctggtgctccagtgccggtagttctccaacgtcgatgaccccaccacgaggaaaaccttattttgccatatttattttgttctgtaattgcattcttaaaatcctttatagatctgtaatattagcttgcaacaacaatgggttccgacggttggtggtgtctccgatggggcggcgaacttgatgccaaagacactgcgagaatgatggcagtggtggcaccgcgggatgctctgtcagggtggtggtgaaagctacatcagaggcgttgaggttgttgatatcagcaaggggttcctccgatggtagttgttagggaatgatatgaagaaggagaaagaaggggtgccaatggcaaggtccaacagaaagagcacaaggccagaatacctcaaagactacttgtaacggctagagctgacctgacaatcttgtcccctgcttgcctgccaattccatagtgcagaatccattttattatgagcatatcctgcaaattccaaattttgttactgtaataagctatatatatagcttccatgtaataaggcaaagggatatgaatgaaattagcaattacctttctttcttttctcctacagtagtataaggacttcggttatgttgcactgaaaatgcatttttctcctaattttaataaaaggttttgctttgaattgggtttagactaagcataaaaataagtaagttgctccataagagtctattatgacc

SEQ ID NO: 84315 - DNA, 170 bp, Glycine max
  Clone ID: PAT_MRT3847_47152C.1
ttggcattcaggaccgtatggagacacttactgtcggtgaaggaattgcatggtagacggatgatgcagaaagaactggcaattatttcacaagggactcatcatcccatagggtatctgtataggagctgttagaggagtcctaatttgcagcacgttgaaaggttgtc

SEQ ID NO: 84316 - DNA, 693 bp, Glycine max
  unsure (1)..(693): unsure at all n locations
  Clone ID: PAT_MRT3847_47153C.1
agtttcttaagncctgaaaatattgtcaaagagaaccaaagggtcacgtgcacaaccatatatagttgtgagaatttctcggtatgtcttgtaacctcaaattttagtcattgttcaccaaagcaattcctagttagatgtgtgtacttaattttaaagggcatttttttctcttttgtgcatgcagctctgcctctttttcctacctgcaaagggagtcattcccctccacaaccacccagaaatgactgttttcagtaaacttcttttgggtcaaatgcatattaagtcctacgattgggttgattctgaggtctctcataatttgttgcaccaaccatctcagtgtgagtatcatatctctatcaaaattaaattaaatggtaaaatatgtttttagtccttatatatatatatactgtctagttgaaaatcttacttttagtctccaaaaaattagctagtaagctcaggaactaaaaatattttttttataaagttcataaattacgcaaatatcaaaatgttcaggagctaaagacaagattcataaaaaatatagagattaaaaacatattttactctaacttaaatgaatctgaattcatgggatatattagtattttaaatttgaccaatcatgcacttgctgtttttgcagtcagattggcaaggttaaaagctaataatgtg

SEQ ID NO: 84317 - DNA, 333 bp, Glycine max
  Clone ID: PAT_MRT3847_47154C.1
tcgcctacgcgtccgcccacgcgtccggtggataggggggaacaaagcaaaagagaaaggctttggcaccaccccaagtggatgctagggcttgggggtattctccttgggttccctaccatttggttgctttggttcccaagggtgggtgaagaaaagaaaattccctttgtttttgattggtttgtggacccattggatgctattggggttttttttaagcttggtccttctgggggatcttggttcccgtaaaagaaaaccgcttgttaaaaagtcttgggtgaccaagtggggctatcgggggtttcttgcggactcttgatgattggc

SEQ ID NO: 84318 - DNA, 144 bp, Glycine max
  Clone ID: PAT_MRT3847_47155C.1
ggatcacatagtttccaaggtagcagactacgacctaaacagggaactcttatctatctagaaggaggaccccttccaaagcgaccgagtcttacgagaatggcgcatgctgtactattaatgtgctgatagaaatggaggaga

SEQ ID NO: 84319 - DNA, 204 bp, Glycine max
  unsure (1)..(204): unsure at all n locations
  Clone ID: PAT_MRT3847_47156C.1
ccacgcgtccgcaaacaagcaggcaaagccacaaaacacagactcagaatcatttntctcttccttcttnnttcttttgtgttattcnntatcatatcanntatcataaatttcatatctttaccgtttgttaaccaaaaatcctttttcacattaccccttaccaatactattaaaatacaatttcaactctctggccgcttt

SEQ ID NO: 84320 - DNA, 131 bp, Glycine max
  Clone ID: PAT_MRT3847_47157C.1
aaatgatcttggcagcagagctctcagtacagctatcaagacgacgattaatgatgacacattcgtcgatggatgctccactaagagcatacgagcaatataaaagcggccgctcgacacgatacaggctt

SEQ ID NO: 84321 - DNA, 241 bp, Glycine max
  unsure (1)..(241): unsure at all n locations
  Clone ID: PAT_MRT3847_47158C.1
cttacgcgtggggttaaatatgtgatctttcaaatcgaattttgtttcgggtcgaacacatgatggattgatgagtcttgctaaaagcaaattaaagtggtaaagctgcctgttttatactnttatttggacactacaactttatttttctttgttctttgctcgtcccttcccatttctataacatcagtttcttaggcaaagttagtatgttcttttataaagaggatggtatttttaa

SEQ ID NO: 84322 - DNA, 305 bp, Glycine max
  Clone ID: PAT_MRT3847_47159C.1
ctccaagaaccacggctccaaggcctccaagcactccgaggagtgcgagtccacccaccggcagtcggactccgagtcctcccactctgaggagtctgaggagtaagcggctcctttgtcgcttctcccgcgacggctccggccgccaggcgagttttcttgtataaaatatgcttccgggggatcggcgacggtcccctagaacacccggttttcgagttcgctgtttggaggtgttggataggactggatcatagacaatttcctttgagtgtagcgatttgaattgaaagattattatgttc

SEQ ID NO: 84323 - DNA, 865 bp, Glycine max
  Clone ID: PAT_MRT3847_4715C.1
ttgccttcgcgtccgcccacgcgtccgcccacgcgtccggcacagcacagcactcttcaaccatcaatcatccatcgccttcttcatttcaccaccgcgcgcacaattgcaattacatttccaccccccaaatttccctttcagaagaaaaaaccaccaccacctcacctctgatccgtgcacctcacgtgcccatggctcctgctacctccgagcgcgtggagttggccaggctctgcgcctccaaggactggtccaaagccattcgaatcctcgattccctcgtttctcattccaacgcaattcaagacctatgcaaccgcgcgttctgttacagcaaattagactccacaagcacgtgattaaggattgcgacagagcgcttcagcttgaccctacgcttcttcaagcttatattctcaaaggttctgcgctctctgtgttgggaaggaaagaaaatgctctattggtatgggagcagggctatgaacatgctctgcatcagtctgctgacttgaaacagctgcgggaacttgaagagcttatagcgactgcaaaacaaggcaacaatacactgtgtgaaagtgaaacccataggtcgttgccacaaaccaaatcagtttctctgagtaatgggagctctagtgaaacttgtaagatccaagatacattgggcactcgggctgaattatgtggtgatgctactggtgataaatcagagacatgcctaaagtctgctgataattccaacttaaagcatgaatcacatgatgaatatagagagtctaataaatctgatggccaagtgaatggaagccctgatgttcttgatacacttagttacaattctgaatcatgtaatgac

SEQ ID NO: 84324 - DNA, 553 bp, Glycine max
  Clone ID: PAT_MRT3847_47160C.1
gttccaagttttcaaatccaatattgtcaaactcaaggatcgtttgaggattggaagggtgggtggtgaaagattgtaagtcaaggatcgtaaaaagattgatacagatcataaagtccttcttaaaatgcaaaattatatttatatacataaaaaataccatagataagaaaaataaataataacttgtaataagtcataaataacaaagaacagaaaataatagaccccgtcaaaacaacatccaacaggcccaaacacacaagaattgaggataataggcccaaaccgaattgatgctcttactaaacccctttctcctaccaggttcctttttctgagaggcaaactaaaggtgcttgatccttgttccaaggctctcccaccttcaatttgagggtgtgtgtgagtatattgtatagggtcagtctggactgcatccaaggagttagtaagggtagtcctacaactgtcactaggacagcagtgtatagaaacactttttcgtttctgaaatctctattctttctctattattctattccgaataatg

SEQ ID NO: 84325 - DNA, 174 bp, Glycine max
  Clone ID: PAT_MRT3847_47161C.1
ctcattctggtacccattggtatttgcctgctgctgctgtcatgtttcgctttcgatttcgatgattatgattatggtggttgtaaaccgtatgatttttgtaaaaccgacctctctttcgtttaaatattaccgcgctgtccctcaaaataaagctaacaaagaataataggg

SEQ ID NO: 84326 - DNA, 745 bp, Glycine max
  Clone ID: PAT_MRT3847_47162C.1
aaaaggagatctgttactgagttagaaaagattggtgcagattatatgccgccaacaaaacgccaaagagggggagggggagaggttggtttggcaaatatcttggagagcgttgtggacaccattgtgaaagataggtatgatctatcgtatcttttcttgaaaccggtgtcgaagaaggaggctcccgactacctggacgttatagagaggcctatggatctttccagaatcagggagagagtacggaatatggagtacaagagccgagaagatttcaggcacgacatgtggcagattacttttaatgcacataaatataacgacgggcgaaatccaggaattcccccgcttgcagatatgcttttggaatattgtgattatttgttgaatgagaatgatgatagcctcactgaagcagaagctggcattgaaattagagatttctaaaccatttcaaattcagatcatgatctggaggtctgtttggtagagctaaatgatttttcaaatgttgtgtaaatatggttttaaaagataccaaaatgcctcctgtatttttattaacgatatgcaaagagggttgcaagttgtaaacaagggtgatgtatcaaccatgtagctcgttaaattttcagcgtgtaacaatgtagattgagaccactaaaaagaattcttttagatgataaacaaacaaaataaaagcagaatagcagtagttatggacaaaaaatatatatatggg

SEQ ID NO: 84327 - DNA, 147 bp, Glycine max
  Clone ID: PAT_MRT3847_47163C.1
gcctcttggggcgtatgatatagaccctgctcaatacctcgatggctctgaagcatatccatccccggtattctgactgggggctgaattgtggcatcagccaccctgccctccaaagacccatgaactcaaagcccgtgatatgat

SEQ ID NO: 84328 - DNA, 1078 bp, Glycine max
  Clone ID: PAT_MRT3847_47164C.1
gtttgatcctactgatcaggagattcttgaacatttggaagcgaaggtgcgctctgatattcataagcttcatcctttaattgatgagttcatccctactcttgaaggcgagaatggaatctgctgtacccatccagagaagttgccaggagttagcaaagatgggttgatccgacatttctttcacaggccttccaaagcatacacgaccggaacaaggaaaaggagaaaggtgcacacagatgcagatggcagtgagacacggtggcacaaaacaggtaaaactaggccagtcttcataagtggcaagttgaaagggtacaagaaaattcttgtgctttacactaactacagaaaacaaaggaagcccgagaaaacaaactgggtcatgcaccagtaccaccttggcaacaatgaagaggagaaggaaggggagttggtggtctccaaagttttctatcaaacacagcctagacaatgtggctcactcatgaaagactcatatcctgcaaaactaaagggtgaaggcgtgcatgaggtaactaatcataagaacactggctatgttgagtactacaataattcttttgtatcctttgatcaaggggaccagcataggtccagcactgcacaattagtctcccatttcccagtccatggtggtgctactttcattccttgaaagtagcggtggagggtatgaggaaaggtgatatatgtcatgcatggaattggaacattgcaattgtattctgcaatgaagaaataagttaataaccaactagaaatagttaggagggaaaaaggtggcacagaataaggagaaactgcttcatctgaaagctagtggtcagatacttcaactgaggaaaaaaaaggagggggtgaggggggcaacgtaaagaaaaaaacaaaatgatttggcttgtaactttgttttctttcttttattcttttgaaatttttgaatggtagctgttatcatgctttgtacagtgacacgaaaacatatctcaattgtccttacttgggtaaatactaaccatcaatctgtgccaacatgactttcatctaaaaa

SEQ ID NO: 84329 - DNA, 403 bp, Glycine max
  Clone ID: PAT_MRT3847_47165C.1
gccagtgccttttcttgctgccaagcacaggaggcacccaccgggaaccccatgggtgacatggattatcccccacaatggatttggtccgtacggtgtcgtgcgacatgcatgctgatagcgcttgagaggggctactgaacactctactactactcttgctagtagtcgtctacaggacgagcttcttactatgagtcctctggttgaccctgtccactctgacaagggatagggaacctagggtacttgctatagatacctagctgggcttgttcaagtcaaccctggccaggactgagggaatgctagcgactcgattcccaagccccatgcacgggtgcctgactatatctgcgccgggtggcaagtactttgacctcccagtggcaatgacaagaaa

SEQ ID NO: 84330 - DNA, 342 bp, Glycine max
  Clone ID: PAT_MRT3847_47166C.1
ggaagatacgctggctctgagaaaacagattcatgatcttatgacaagtgatggactttttcagttcatcaagggccctgtaggcaccttcactccttgatttgcctgccgagcactttatgtgcatgggctctttccacctgagcggccttggtgataatggaaaagaatgccgccaggggccaccctaatataagacgtgcttataaatgaaaaataatttagaggcaaattctaaagatcccgtcacactgtttcaatcagttatcacctctcttaataggccttttgtcgtttttgaatatgtttctaacagggatcatcagcaatataagcaaagga

SEQ ID NO: 84331 - DNA, 368 bp, Glycine max
  Clone ID: PAT_MRT3847_47167C.1
gggtattctttttttttttttttttttttttcacccggagaagggaaaaagagaaatggtcattgcttaacggaccattttgctcaaaacagagagaaggtaattagaaaaaattttgaaggaaaaaaaaggggggcagatctttcacctttgggcaagaccttaagagagcattcgaattttgaaagggcccccaaccacagtccttattggcggggtccaaatccattggtagaaaatggcctttttgggagacccttaaatttcggactatggaagcacataaaggctcaggctcaaaagggttggttctttcaacttttatgcgggcctgacccccattcttaggcaaattaaaggtccaaaaa

SEQ ID NO: 84332 - DNA, 316 bp, Glycine max
  unsure (1)..(316): unsure at all n locations
  Clone ID: PAT_MRT3847_47168C.1
aattttttggtttggggatagatagagtgatacacatcacattttctgcaaagtnnnnnnnnnnnnnnnnnnnnnnnggcggnggcggcggcagtgcacggtggctaactgcccacctagggattgccgatccggccaccaacgttaacccggctngctgctggctnttggccttgctnctggcctgccctgcggcgggtcanccaancaactcaaananccaactttttggcttcttgatgctgtgcnccttcanacccaactntgcttccagtngttccccgggaaaattctttgcttctnggctntgcaggag

SEQ ID NO: 84333 - DNA, 293 bp, Glycine max
  Clone ID: PAT_MRT3847_47169C.1
ggcgctcgaggcgccttgcagctctacctcaaactcaagctcggcctcgattcataacgggttacagggaacctgtccgtgaaatagcgccacgtttccctcctcgagcttctcaacagagaaaccaccaagaccttccactatgtccagtacccgtggaaactggtctgccaacacgttcccgcgaggttcattcatcaggactccttccactccttttctaaaatccgaggttccgttcttcgagctgtgatttcacacgaagcataatgacatggtactctctgagtacc

SEQ ID NO: 84334 - DNA, 2251 bp, Glycine max
  Clone ID: PAT_MRT3847_4716C.1
agtgactgattttgcaacccaatatcaaggcattactcccagcccacggtattgcccttcaaaacctacagcaccattaagcactactacaagtatacatgctgaggacaattggagtgtttcaaacttcaagtcaccaaagtcgaggtcttcaacactgaggatgaagctagctgaagatgatgacttcaatcaaaatggtttgacccatgatggaattggaaggaattctagatttaaggctatttgcgctattccaacccaacccaaaaaaatgcttagtaagttctggtctactaccaatagaactgctgctgccacttaaaagaattgagtgaaatatgtttggaacataagttgaaacaagttccatagagcttcatattctctggagggaagtggaagctagtagtccgtttcagcgtgtgtgatactttcctttcatcttcttcttctctctgcgataaaagcaaaacctaaaatttggtttaggcataggaatctgttgtagagttgatctacctggaatggagggagcatcgtggaatagtagtgtttgtgtggcaccgtttctgagcaagacctacgacatggttgatgatccttccaccgacttagtggtgtcgtggggcgaaaacaacaactcctttgttgtttggaacgttccccaattcgccacagacatcttgcccaatcattttaagcacaacaacttctccagcttcgtcagacagttgaatacttatggttttagaaaggttgacccagatcgatgggaatttgcaaatgaaggatttttaagaggtgaaaaacaacttttaaaaagtatcagtaggcggaaatctgctcatgtaaatggtagtcaacaagcatctcaagtgcataaatcagctgctggagcatgtgttgaagtggggaaatttgggcttgaggaagaggtggaaagactgaaaagggataagaatgttcttatgcaggaacttgttaggttgagacagaaacagcaagggactgataaccaattgcaaaatgttgggcaacgtgtgcagtcaatggagcagcgtcagcagcaaatgatgtcattcctggctaaggccatgcagagcccaggcttcttagctcaatttgttcagcagcagaatgaaagtagtaaacatatccctgggagcaataaaaagaggaggctccagcgacaagaagaagatagtttagccaccaaggatctccatagttctcttgatggacacattgtcaagtaccagagttccataaatgaggctgcaaaagcattatttcgccagatattgcaaataaacaattctacaacacaatcatcaattaagaaccctgatgttttccttattgatgatattccttctgccattgcatcagatagcagtagttcatccactcaggtttctaatgtgatggttccacctatatctgagctgacgtctatggaagtaggatcacagtttcctctcagttgtatgcccagtaacatatctgaggtgcagtcttcacctgctgttttgggtttctgtagaagtcaggggatggagacagaaagcagtttattgaatcatgagctgaatgttatgggggctgatactaggaacatgggggagatagatatgatgtcaactgttttagatgaggcagacgaagctgatcatttttcacctgacacagatggaatttctaaactcccagaaatcagtgatgaattctgggaactgtttttaaggccaagcccacttacagaagacacagaggaaactaaatgtagctctctaggatgtggtttgactgaagatcagggtttgccttcagaaatgggaaataagcaggaaaattttgatacaatacaacatgttgactgtcttactcaacagatgggacttcatgcattggagtactgattgtgtgtatatatgttactcacaactgaaggttgaggtcccctttgctactgagcagacaaagccatcttacttatacaacaaagaaacctgacagatccaacaacttgatcggtgcttttatccgcttgtaatgtcgtcgtgtgttctgtttgtcattgggggcttaaaaacatacaagttcacgaaacttcatatatctccatgtattttgaattttaataactatgcccccgtttccaatgcgatgatatttttgtggggatgttccgtataattggatcataactcttgaattgctgttgaataactactgtttactgaaaaaa

SEQ ID NO: 84335 - DNA, 114 bp, Glycine max
  Clone ID: PAT_MRT3847_47170C.1
ctgctgtttccggtgcttcctctgctgccttttcggccacttccggtgcttcctcggtcctttccaagcccacttttgttgttggcggtgtcacttgtgagatcgcctggcccg

SEQ ID NO: 84336 - DNA, 375 bp, Glycine max
  Clone ID: PAT_MRT3847_47171C.1
gaagctatgttttatttagggtgggtgcttcttatattttgagaggaaggaaacaaaacaaaacttcttttttttgtttgctaaacctacaaatcaaaaacctttcaaaaattctcccctgttttgggttcttgccctactccccccaataacaaccccaagttctgacatataggtggagggaacactaaactaactctggcaccgtatcaaaaaaaggtagtttgtacccctcattttttacataaattgacccttctacaatttaatcctcatattgccctgggttgcgaataatgggcggagaggaccacatgattttttgggctcacctatggcttgcaaaaacccgggtctgttctacccaaaattttt

SEQ ID NO: 84337 - DNA, 750 bp, Glycine max
  Clone ID: PAT_MRT3847_47172C.1
atattgggaatgacttcccctcgcttttattcacctcctcttcatcccattgcagccatgggtagaaattgtcaaagttctgtaaatctgtctctcatcaacagatttgatgaagatttggtctcttctcagtcttctcactcaattttcactcactgcaagtgatgatactggtcatatttctcttttttgcataaaagaggagtggtgctttgggtttgttctgaattcaaagcaaggttgtctagatcatgatttcactccagacttctggtttttgtaggaccagcagtcttgatcacactcactgacttgcattggtgagattggcataagattgccaagagtgtttggttcagcgtccactacctatatatgcgcgtaaatggtgcagatctcagaagctatataaagctgcttatatgttaaattaggtagtgacgcgattttgcttttacatggacaagaaaccaaacgcgcatttaatgtttttgtgaggtgccattttggtggcgggtcaaaaaccaatttggaggcagaaaaaaaaaatagatccatctgaaccgcaatttcttgtttggtgtcatctctcaatatgtgttctgtaattggcctgtggttggtttgttcttgttgataacgggtgatgacatgtgggctggtggcagagtggtgattggaatctgtttgtgtatcagtggaggttgaacacttgtctcattcaaacttggttgtggctgactactgggt

SEQ ID NO: 84338 - DNA, 861 bp, Glycine max
  Clone ID: PAT_MRT3847_47173C.1
ggtggcgggtggtggcggcagtggtggtggcatgagctcaagggtccctggtgggatgtttggtgatgatatgtttgcatcttttggggaagggggaggagtacatatgagtcaaggtgcatctcggaaagctcctcccattgagagcaaattgccctgcactcttgaggagatatataaagggactacaaagaagatgaagatctctagagaaattgcagatgctagtggaaaaaccatgccagtagaggaaatcttgaccattaatgtcaagcctggctggaagaaaggaacaaagatcacattccctgaaaagggaaatgaacagccaaacgtgatgcctgcagaccttgttttcatcattgacgaaaaaccgcatggcgtcttcgctcgcgacggaaatgaccttgttgtaacccagaagatttctcttgcagaggcattaactggttatacagtgcacctcactaccctagatggtagaaacttaaccataccaatcaacaatgttattcatcccacttatgaagaggttgtcccaagagaaggaatgccacttccaaaagatccatcaaagaaggggaatttgaggataaagtttaacatcaagttcccaactaggctcactgaagagcaaaaagcaggaatcagaaaactcttaaatgcctaagcgtgagatagtatagtatttgtcagatttccccctgggaattactttttttttttttttgtgaagatgtaagatataccattaaactttggttgtttccacatggattgtaaacttagcgaaaaaattttgatttgattcttttgtgttgtttatcagttaaaaatgggcaaagctttttaatccttttg

SEQ ID NO: 84339 - DNA, 453 bp, Glycine max
  Clone ID: PAT_MRT3847_47174C.1
ccccccccaaaaaaacccccaaatttttccttacccaaaaatttaaaaaaaaaaaaaaacccccacctaacccgtggggggggggcccatccccacgggccaaatttattttataccaaaaaaaaaaataacccaaattccttggccaaatcccttccggggaaaattaaaattaaaattaaagggcgcaatttaaaaaaaaaaaccccaaaaccctttccaaaagaaaacccattaaaacctttaaaatttttaaatttcctaagggggggcaaaaaccacaagggaaaacagggcattccctgaaaaggggaaagccaaaaaatttttcagggaaacaccgtcattttgggggaaagggctccgttaaccctcggagaagggggcatccgcggaacccccggggggagtctttcccgttgaacccggaggcaatcccgaaagcggaaaagg

SEQ ID NO: 84340 - DNA, 402 bp, Glycine max
  Clone ID: PAT_MRT3847_47175C.1
aaaaaacttgcccctgcccccaccagtgggttcctgaaagtgtggtaacccttgtagggatggtgaacgaggctagtgctaacatcccaaattgggacacatcgtaaatattttccacctcatcatgatgatatcccaagtgcacattttaaaaagaaaaaaaattgacaatgagtcttttttttttttttttttatcacgagtttagtcttattagatggatagatgaatgtaagcaataccattttatatgacaattaaatacaggataaatatttatatttaaaaaaaactacaaaaaatgactgaatattgaaaaaataaagattataaaaaataaacaatggggcggccggtctttaggacccaagtttacttacgcgtgcttgccacgttatacct

SEQ ID NO: 84341 - DNA, 232 bp, Glycine max
  unsure (1)..(232): unsure at all n locations
  Clone ID: PAT_MRT3847_47176C.1
ttttcctgaatcanaaactgaagtgcctggtgctgttcctgatatgtagtatggatcatagactattaaggtactttatgatattgctagtgctaactacaccggattattctctgttccatgtctgtgagataagaatctcatgaaatttggttacctcgagagcgtatatattaaccggatgtttatctctgaattcaacagttttgcagaaaatccccaccttgacctt

SEQ ID NO: 84342 - DNA, 405 bp, Glycine max
  Clone ID: PAT_MRT3847_47177C.1
ggggcccaaaacaaaaaacaaattttcctttgggggaataaaagggctttctttttacaacaatgggataagaagcgattccttttcccccccaaaaagtaacttttaacttgtaattttcccgcttttaatttccctaacctcagcaatgcgtgggtttaaaaaaacctgcctttgggggataccccctttctttctttggggggtaatctgcaagggtttttttttttttcccagttttttttggggagatttttcccccaacccgattttcccttttcaaggggtgggggccaaaaaagggtttttttttaaaaatggccccatttttttcccaaagggggtaagggtttttttttaaaaaccccccaattggaaaactttggggggggggggagaaatttt

SEQ ID NO: 84343 - DNA, 167 bp, Glycine max
  Clone ID: PAT_MRT3847_47178C.1
actgaaaagaagaaactgatgtggggtggcggggagagtataacgactgtagagtctggacaaccatgggataccgggatgttttctgatcgtgagaggtaagagaaatttaacatacttatgggtatgagaggcgaagttaaggtggtgcagaatttcaacaatca

SEQ ID NO: 84344 - DNA, 822 bp, Glycine max
  Clone ID: PAT_MRT3847_47179C.1
atgtcgcgtgggcggacgcgtgggcggacgcgtgggcggacgcgtgggcggacgcgtgggatcgatttatcgctcttttatgtggttggcttcctttcgctctcttctctgcaaatgcttcattccaagatagttaggactctgtaggctgataaagacaacactcataccgttggaaagaaggatgctgctggccatgttgcttaatttagttcttgcttcctttgtcttcttgagttttatcagagacgggagtgcagggatcactagctctttcattcggtcagagtggccggcagttgacatcccccttgatcatgaagcatttgcagttccaaagggttataatgcacctcaacaagtgcacatcacgcaaggtgactatgatggaaaagcagtaatcatctcatgggtgaccacagaagagccagggcacagccatatacagtatggcacatcagagaataaatttcaaactagtgaagaaggcacagttacaaactatactttccacaaatacaagtctggctacattcatcactgtcttatttgttggagatctttcttatgctgataggtaccagtacaatgatgttggtttacggtgggatacatggggacgatttgttgaaaggagtacagcatatcatccatggttatggtctgctggaaatcacgaaatagactatatgccttacatgggagaagttgttcctttcaaaaactatctttaccgatatactactccctacttggcctccaatagctccagtcccctctggtatgcagttaggcgtgcgtctgctcatataattgtgctat

SEQ ID NO: 84345 - DNA, 244 bp, Glycine max
  unsure (1)..(244): unsure at all n locations
  Clone ID: PAT_MRT3847_4717C.1
ctccaaccttaatttcattttttaaaattccantattcaacggtctggggtgcacatcgatgagctggcacgagccccacaaatctctcatataacgctcctcactgcttagaatccttatctttcttcatcaacatatcttttatcatcgctcactctaatacctcctactgaaccaagacttcttttttataattcaattccccaaaaacatcccattcaccctaaatttaacattcttctt

SEQ ID NO: 84346 - DNA, 217 bp, Glycine max
  Clone ID: PAT_MRT3847_47180C.1
gcatattgtcatgaagactcttacgggtaatactattacccataatgtggacatctatgacaccattgacaatgtgattgccaatattcaggacaaggaaggcgtcccaccagaccaccaaacgctgatttttgctgtcaagcatgttgaggatggaatgaccgatggtgactacctcattcactacgaattacccattgaccttgtcctccgtctt

SEQ ID NO: 84347 - DNA, 460 bp, Glycine max
  Clone ID: PAT_MRT3847_47181C.1
ggctcgagctttatctgaatgggatcaaataggcaccataactcacgttcccacaatctacttctaccgtcccacctcacaagacaaagacaacgttaacaccgttgcttccaccttgaaagacgcattaagcagagccctagtgccgttttatccactagctggtcgtttacattggataaacaagggtcgtttagagcttgattgcaacgccatgggggttcatttcattgaagctgaatcctcactaaccctagaaaatctcggtgacttttcaccctcttcagaatacaacaaccttgtccccaacgtagactacaccctcccaattcacgagctacccgtggttctcattcaactaactaacttcaagtgtggtggttttagcattagcttaaatacttcacatgctgttgcggatggaccaagtgcattgcacttcttgtgtgagtgggcaagg

SEQ ID NO: 84348 - DNA, 2415 bp, Glycine max
  Clone ID: PAT_MRT3847_47182C.1
ggctcgagggaccctagcatgtatattgtctattgtccaaagcatcagtcttcagcttgtggacccgcgttcgtccatggcggcccattaatacacgtgcgcaccaacctcttccctccccttcaactgcaatcaatcgatttatcgctcttttatgtggttggcttcctttcgctctcttctctgcaaatgcttcattccaagatggttaggactctgtaggctgataaagacaacactcataccgttggaaagaaggatgctgctggccatgttgcttaatttagttcttgcttcctttgtcttcttgagttttatcagagacgggagtgcagggatcactagctctttcattcggtcagagtggccggcagttgacatcccccttgatcatgaagcatttgcagttccaaagggttataatgcacctcaacaagtgcacatcacgcaaggtgactatgatggaaaagcagtaatcatctcatgggtgaccacagaagagccagggcacagccatatacagtatggcacatcagagaataaatttcaaactagtgaagaaggcacagttacaaactatactttccacaaatacaagtctggctacattcatcactgtcttattgaaggccttgagtatgagactaaatactactatagaattggaagtggtgattcttctcgagaattttggttcaaaacacctcccaaagttgatccagattctccctacaaatttgggatcattggtgatttggggcaaacgtttaattctctttccacccttgagcattatatacaaagtggagcgcagactgtcttatttgttggagatctttcttatgctgataggtaccagtacaatgatgttggtttacggtgggatacatggggacgatttgttgaaaggagtacagcatatcatccatggatatggtctgctggaaatcacgaaatagactatatgccttacatgggagaagttgttcctttcaaaaactatctttaccgatatactactccctacttggcctccaatagctccagtcccctctggtatgcagtcaggcgtgcgtctgctcatataattgtgctatccagctattcaccatttgtgaaatacactcctcaatacatgtggcttaaagaagagctgaagcgagttgagagggagaagactccttggctcattgtgctcatgcacgtgccgctctacaatagtaatggagctcactatatggagggtgaaagcatgcgatctgtttttgagagctggttcatcgagtacaaagttgatgtgatctttgctggccatgtccatgcttatgaaagatcatatcgatactctaatgttgactacaacataacaggcggtaacaggtatccattacctaacaaatcagcacctgtttacataacagtcggagatggtggaaatcaagaaggtcttgcttcaaggtttttggatccacagccagaatattctgcttttcgagaagcaagctacggacattccacactggagataaaaaataggacccatgctatctaccactggaatcgcaatgatgatggcaagaaagtaccgactgactcttttgtactgcataatcagtactggggacacaatcgcagaagaagaaaactgaagcattttctattgaaagttattgatgaagttgccagcatgtaatttgaagttgaagcactagcatatttggcgttttgaaaaggataaaaatgtgccccttgattaatatatgcagttcaatagtgtctcgagtgagtgaaatgcagcacgttggaaatggttctatgtactatttggcttgtatgcttgtattacaacgctaatacgagtattaaatgagcttgctggagaaaaataaaataagaacatattatctattgattggaaatggtgttttgaaaaaaataaaaatgtgcctatatattgtaatgtatgtagttcaatagtctccgagcgtgcgaaaaggttccattccatgtacttggcttgtattatacagctagcgctaagaaatattaaataaacgcgcttttagcaaggagaaaacaatcgagaccaagatattatctgttcacatctgtgtataatttttgaagcgtggattattttgctgctatttgagtgctttagtgggtattattatatcatgtcaaccttcagcaaaaataataataataaattatatatatcattcccacaaaaagtaagatgtcacgaatgatgtcatcgacatattctccgctacatgcatttcctcatcaattttggttgtgttatattttcttctttgtatcatgttgggaacctccgtaagttaattaatctctctcgtggagactcagaactgctatcccttatatcataaaccgccggaaatttcttgc

SEQ ID NO: 84349 - DNA, 477 bp, Glycine max
  Clone ID: PAT_MRT3847_47183C.1
gtttgtttctgacccttccaacacaagaatttcagcgtcttcaagatctacataccggtccgtattggcagatttcctccagccacaaaatgtgaagaatctctgttcactttttgttgttctctcacaagtagctgctaagacaaatgcagaaatgacaggcaaagtagaccagcaaacaaaaactgggaactttgaagcttctgttgcttcatcatctaaatcactgcaagaaactagagatgtccaccagcttgtttgtgatgatcacgtgaataaagatgaagcagatgcagttgatattgctaattataataggccattgtcaccagaaacactggcattgatgtgtgatgaacaggatgatatgatttttggaaatagttctgcaaatggagttgcatgcaacagcactttgcaaaacatgattcaaaagtcatctaattctgatggatgcactgatgtttgcagagagca

SEQ ID NO: 84350 - DNA, 239 bp, Glycine max
  unsure (1)..(239): unsure at all n locations
  Clone ID: PAT_MRT3847_47184C.1
cccacgcgtacgtccacgcgttcgtacggttgcgagaagacgacagaagggggcaccttcatctccggccgctaccacctctacgttcgctgcccggcgttcatcaactctggaccccgcagcaaaggaatcctcgtcctatagaagggggtcaagnaccagangatccaacggagcaccgatagcgcccaaacgggggggcaggcaggaaaaaagcaaataacaaacccacaaagaca

SEQ ID NO: 84351 - DNA, 333 bp, Glycine max
  Clone ID: PAT_MRT3847_47185C.1
atatatcgaactttatttctacatgattttttcatattatttacgggggtattgcgatctaaatacaccactcgttgaggcgctattgggcacaaaacgtaccggatctactgtacatcccgctaaaagacggactgggactgccttggggactgaatgacccacctgattccatttgaagaaaccgggccaaaacaacggatttgtatttttaaagagatgctccgaataataagcagaagcagagcctccaaaaaataacgttggcccccaaggggaagttggtcttaggaaaaaataatggctagtgaaactttatgggcctggcttttt

SEQ ID NO: 84352 - DNA, 376 bp, Glycine max
  unsure (1)..(376): unsure at all n locations
  Clone ID: PAT_MRT3847_47186C.1
attaatttatcaagacctccttacagataataagcttctctcgaactccttccattacaatgaaattaagaataaaatgctataagaanttaaaggaaantaaattattaaaggagcagttaatattaacattaatacagacccttctactgaaaataaagaagataagaaattcaataacgcaactattaagattatgaacattagtaatacattcggacttcgaaatcaacccacttttgataaaaaacaggtgattaccttcataaagaaattgatcaagaattgaactcccaagctcgatgcatagaaacaagaattatggaagaggcacgtangaagancgactaggtacctgggctctaaaattaagaat

SEQ ID NO: 84353 - DNA, 263 bp, Glycine max
  Clone ID: PAT_MRT3847_47187C.1
cctcagtagtgtcatttacgcttctcttctctgcagcaactatgcctaaccctaaggtcttcttcgacatgaccatcggcggtcaatctgctggccgcatcgtgatggagctctacgccgacgtcactccccgcaccgccgagaacttccgcgcgcatttcaccggcgagaagggcgttgggcggacggcaagccccgtccacacaagggctcgtcctccaccgcgttagtcccgagttcatgtgtcaggtggcgacttcccg

SEQ ID NO: 84354 - DNA, 624 bp, Glycine max
  Clone ID: PAT_MRT3847_47188C.1
tacttatggccaagcaattaattctcatatttattctacttatatatgctaataactcaagtttttgttattttacttccttaatactaagctaatgaataataagttaataaccacgaaacagttattgggggatgctttaatttggtcaatttcacttttgagaatattaaattaatataattttaacactttgtgattattgacctcacatcctccacttttctggtctctgtcatttgtatgtcacaaccaggggaacctggcaacatttgacaaaattatgtctgaaaaaatgtacataaaaaaatttcaataaaaaataagataattccgagaataaaattcataaatattattgcttatttatcaagattgcactagaaatactttatatgtttacaggtttttatttttcctcctaagttctcaaatgacatacagggattggtgatagaaaggatccaaaattcccttgcagcagcaggaaagaagaaaataatctatcttggagatggaaatggagatttttgcccaagtttgaggctcaaagatagtgactatttgatgcctagaaaagacctttcattgtgtgatttagtttccaaaattctaatagataaa

SEQ ID NO: 84355 - DNA, 492 bp, Glycine max
  Clone ID: PAT_MRT3847_47189C.1
cttctgttcctggaatcatttgggtgtctggacacaattgcttaattatactttctgttgattgtgttcacgcacgactgaatgaactaatggagtctaaaggtgggaaaaagaaggctagtagtaaccgtagtaaataattgttctactaaactcccctcggatacaggattgaggacgttagaccaaacggtggaatcacgaaattcaaatctgctgcttactccatcgtatattttctttctgacgcaatgaattctgggatttgctttggttgattcaatacccagtctaacactgttgatcatgttttgtatgcagagcgctcgcataaccttcctgatgtccatccaaactgatagctcattgcatgcaaccatattttgattaggatatatcttctttgatatcaattacgtttcagctgctctccttcaaactgcgtcattccgaatcctctctttgtgattgcggtctgaacagctttctact

SEQ ID NO: 84356 - DNA, 558 bp, Glycine max
  unsure (1)..(558): unsure at all n locations
  Clone ID: PAT_MRT3847_4718C.1
ggctcgaggttgttgttttatttcattccattcgattcgattcgattcgatgtagcacagtctacctttcaattctgtggcgtctcattgattggtattatgaatctcgaatttgcaggttcaaatataccaattcgtgtatgaggaaaccgagattgatgacctttgataaaaatgctttcgattttcccctgtttctgcactgggatttagttgtttaggagttgaagtccggtaagggtttcagaaaggttgacccagatcgatgggaatttgcaaatgaaggatttttaagaggtgaaaaacaacttttaaaaagtatcagtaggcggaaatctgctcatgtaaatggtagtcaacaaccatctcaagtgcataaatcagctgttagagcatgtgttgaagtggggaaatttgggtttgaggaagaggtggaaagactgaaaagggataagaatgttcttatgcangaacttgntaggttgagacagaaacagcaagggactgataaccatttgaaaatgttggcaacgtgtgcagtcaatgagcagcgtcagc

SEQ ID NO: 84357 - DNA, 291 bp, Glycine max
  Clone ID: PAT_MRT3847_47190C.1
ccacacttacgcccacgcttactccaaaacccaaaatattaatttcccttaaattcccaaaatccaaaaggatagatccaatatcacatgaatcccgctaacccataccaaaaccaatagagataaacaaatcgccaaacacgataacaagaataatactaacaaacccaatctcatcaatctcacttcaaaacatccatactaaccatccaaaaacgtattatcacaatcaaaactataacaagctaaaatcaacttttttcctatcaatcgcatcaaaactatgattaa

SEQ ID NO: 84358 - DNA, 547 bp, Glycine max
  unsure (1)..(547): unsure at all n locations
  Clone ID: PAT_MRT3847_47191C.1
ccctcctgtcactggtaaacaccnacagcncagnngacngaacgaggggcacctatggaaagccaaggacccaacccccatcacgaatcaaataagccaacaataccacacaagtcagagggacatatccaggcctatcatgaaggaggtttgaaccaacaaaagatggcgagaagcgatgcaggagctgatgcaaagatactgaatgctactctggcgagcccataccatgaactgaatcctgtatggcgagacacaagcaccttcatggatagatgtgacgaggatcatagcatagaagtagtgaaggatgaaatatctacagtcaaagaggggcccagcgaggtcgcctggaccacaaggcagtaccatggctggactatgcgagaaaccagagtcaaggcggcacctgtgcatgcatcagcctactggtatctggagaatgaatcgccagccctacacagatacggaaatgccgcaatctcaacagaagctcacccacagagtctagacaactcgcctgtggatattcaacacctacgttgta

SEQ ID NO: 84359 - DNA, 535 bp, Glycine max
  Clone ID: PAT_MRT3847_47192C.1
acgccctcttttttttttttttttctttttctttcctttttttttttttttttttttttttttttttttttttttttttttttggaaacaaaggtttggggggaccccccccctttccttttttaataaaaaaaaaacccatttaatttaggtttcggggaaagtaaaacccattaaatcattagcaaccccctaaaagttttttatagttttaaaaaattttataaaggggaatcaccccccccaataaatcatttttaaccctttaaaagtttaattccttaagaacaaggctaaaatttttttttttaggggcaagctttgatatttttttaacctaattgggggaaaaattaattaaccctaaaaattttcaggggtttcaaaaaaagttagaaaaagctaaggaaaaacgtttcccactgaatccaaagctttgggaagccccaatgatctaaaacccaaaggggctgttttttgccctaaaaaatttttgctccaaaggtgggacccatccttggagcaccataaattt

SEQ ID NO: 84360 - DNA, 516 bp, Glycine max
  unsure (1)..(516): unsure at all n locations
  Clone ID: PAT_MRT3847_47193C.1
ccacgcgtccgcttatgaactcaaggcttgaaagaatggaactgtgaaaatctgtaattattgatatcaatgtatacatgtttctgagcttaactagctaactctagccgttactaacttactaactccctctcagcctcatagtctcgtacacatgtaatacacgtaatattccccatgctaacattgtgaaaatttcctgtcacgtttgcatttcaatgaaattttattcatatttgattgccttgaattatgaggtgaatggattcttttgaatgcctttatgcaggactttgatccaattaggcatgttttagagcacgttccagttgaagagaacgagctaacatattttgaaaaacaggctgcccttagattggcacaactagatagagtagccgagcgtttatctcgccatgttatggagcatcatgaagtgatggtgaaggggatgaatttgnncagagaattggaaaaagaattaagaattggaaatgtnatttgtatgaatggaag

SEQ ID NO: 84361 - DNA, 395 bp, Glycine max
  Clone ID: PAT_MRT3847_47194C.1
acgttgtgagtgtttttgatcctcaatcaatctaattctcccatttctcttccaatggcgtattgtcttttcaccaaaccatactcagccgacgctctatccgcctgagtttctgtcaatgacgatctacgatccctctgccccgactacctacgactctcactccgtactcgtcttcccaagagactttgcatacaggcggttgggagtacctatggaaaatactttcgcgtacaaacatatggggaatcacatggaggaggtggtggttgtgttattgatggatgacctccgttggttccgatatatgaaggtgatatgtgagtggatgatcgacagcaggaggctctgaacagagccgaactaccactcctagaaaggagacggattcatgt

SEQ ID NO: 84362 - DNA, 135 bp, Glycine max
  Clone ID: PAT_MRT3847_47195C.1
gaatttccagttcgacccacgcgtacgcccactcacacgttccactacacgacgacttctgaactatgtcaagagatgtgaaaacctgggtcgggtatattgcctacctgtgataacacatggcctattctaggc

SEQ ID NO: 84363 - DNA, 351 bp, Glycine max
  Clone ID: PAT_MRT3847_47196C.1
ttgtttttttttttttttccaacaccaacgattccattcggttctttgcgcatgaagttgatcgacaaaatggcacgtttacatattacattgcctgacgacgctgctacgctagatcactagacactcaccaatggagttggtgtgtcctagtaaaggagaaatgccccaggacgaggagcaggggaaggaacgcacgcatcttactacataaacaaaacaaacaaacaatgcgcttcccctgttccagacagcaccatctattccagttccaccctcgcctcattgagacgacggatgacaaacaacaactttgcagatgcagagcaattcatactcaaaacaactgtc

SEQ ID NO: 84364 - DNA, 406 bp, Glycine max
  Clone ID: PAT_MRT3847_47197C.1
gggaaaaagggggcataattttggacccctggggggacccggggggggcccccggggttcacccgggaaatttggaacgggtcctgggggggtaacaattttttttttaggggggggttttaaaggttgggggaaaaaagggaaaaggttttttctgggggaaaatgtttttcccttaaaatttcccaaaaaattagagccggaagaataaaagggaaaacctgggggggctaatgggggggctaactcaaattaattgggggggggttaattgccgcttttgagaggggaaaactggggggcccattgtattaaaaaaatggccaacccccggggggggggggttttttttttggggcccaggggggtttttttttttaccaaggaaacggggcaaaagtttttg

SEQ ID NO: 84365 - DNA, 229 bp, Glycine max
  Clone ID: PAT_MRT3847_47198C.1
caacaagacgtctagaaattggactgatcctttctcgctctctttcttcccaactcaactcaggtcctcttcctgtcactttaatccaacaataataattattcgcaaaaaaaaaaaaaaaaaacacgttgaacagataccatcatcattcatcttcataacccacatcatcagattttcaaacctcagttttggactcactaggtaagtggccaaacaatttcgcggg

SEQ ID NO: 84366 - DNA, 1746 bp, Glycine max
  Clone ID: PAT_MRT3847_47199C.1
gggcaagaaggaataaaactttctttacggagttccctcaaatttacatttgttacagagcttagcaataaagtaatacaaacaaaaatatggggcctaggttagagctcctaaagaatgaaaggcagcaaaaggaaaaactaatatacaaaaagaatgacactaaaccacagtagctaatctacaaatttggtatgtatgtatttttggaggatatacaaaaaagggtgaccgacttaataatttcccacccctcgagtagaaaaccgcatgttattgcaaataaagtcaaagaccttacacagaattgggaggtgttgttgaatgtgaagaggaatcctcctcctctgggcctgataaatccaatgccgtttcaaggttgagcaaaggctttagtcttctgtaaacctcgtcactcaaaaaatttaatctcttcaagcatcatggataaagcagactttgctagtctgcctcattcctgaacgcctgtatccacaaattcatcgatatagcgcttttcgtctttcaatttaaccctgggcctgggcgtgggcgggtaaaaaagagcaacgactatggtatttgccaaatctttgatcttgactatccttaagatgcaacaaagtaagtagagagaagtgacaacaccactttgcatgtcattagcatccactactctcagggaaggaagaagtaacggaaaaatcagaagcatcaaaatgctgtctgttattagcctcgcaacatcaggaattccagcagagataacatcgctaaagtaatacaggttatcctcaatttcatctacagcagcaataattgtagaagttgaatctgggcatggatttttgagtgtttcagagaccagtctatttaaatccatacattgattcctaaaaaatgaaaccaggttcgagaagtaatcggtgtgaggtacactggttatatatctattaacgcattcatccccaacatgataaacattaagggtcacagtacgtacagcagtgcgaatcatgttctcctcatgaaaggcaaagcgtattgcctcaacatacagtggaaatgaaactacttcatcattgcgagtcttcacaagcagagaaattgtattcttgttcaattttccacttattgctcttaaaaaggatatgtagtatgacaatagctcttcgttgtgaaagtcgaatgaatatgtaattaggtagttcatatgttcattactaaacatataatatatagcgtgttcacttcttaggttctggatcataatgctcactgtctgtagcaactgaagtggaatactaacggttctgctaagtttaagaacacgtacaaactctgccacaacttgcttttccatgaagaattcaaaaaagcttgggtcatgttggtcgccatatgttatcaactccgcaatagatctcagtgcctcaataacaaaatccttattaacctcattaactatttgaactttcgccaattgatcagttaagtacctaagcaccataaggcagcaggacaacactgagatgatccaaggtgaaacgatctctggatctccagaaggaaaaccacatggctgcggatcacagcgccgaattgagctcactgaaattcatgctggaatcgaatgcgaaactgctcgatccttcttccgagcagcttcagaagagagagagagagagagtagggttttcgaaagattgcgatgagagagactgttaccgaaagaagcaggaacac

SEQ ID NO: 84367 - DNA, 556 bp, Glycine max
  Clone ID: PAT_MRT3847_4719C.1
accaaagagatttcccctcgtgctggggaaatcttttcttattattataggttacatcaacaattcacatttagattcttggattttcctagaagttacaaggcgtttttgcagaaagaaaaaaaaaggagtagatgttaccctctatagtaccattaccaacttgaaaagtaaacatatttcactcaattcttttcagtggcagcagcagttctattggtagtagaccagaacttactaagcatttttttgggttgggttggaatagcgcaaatagccttaaatctagaattccttccaattccatcatgggtcaaaccattttgattgaagtcatcatcttcagctagcttcatcctcagtgttgaagacctcgactttggtgactttgaagtttgaaacactccaattgtcctcagcatgtataccttgtagtagtgcttaatggtgctgtaggttttgaaaggtcaataccgtgtgctgggagtaatgccttgataattggttgcaaaatcagtcactttgccaccagcttgtgctgctctagcttgctcaa

SEQ ID NO: 84368 - DNA, 440 bp, Glycine max
  Clone ID: PAT_MRT3847_471C.1
ggctcgaggatacgatgagatatgctttgatattggctgttttacgatagttgagcctggtgaccttgtataaggaatccatgacattgataaatgtgctgagaagaccgaacgatgccttaaatcttgctacagagcgttgactgatccaccattacttgttaatggtgcactgtgggaacaatgcatcgtcgcctacggattctatattgcataggcccctgctcaaggggatgcccactacactgatatacctcgatagagaactgagcctggtggagctaatgctatcgattgtttgtatggagcacccagtgttgaggaagcatgcgtagacctcaatgctgcataacatggcaaaggacaagaaccaggtcaacatggtttctcaaatagagcgccaatacatcagagcttccttggtgcatgcatttgtcaag

SEQ ID NO: 84369 - DNA, 2002 bp, Glycine max
  Clone ID: PAT_MRT3847_47200C.1
tgagaatagtggacactaatgacatgcaaagtggtgttgtcacttctctctacttactttgttgcatcttaaggatagtcaagatcaaagatttggcaaataccatagtcgccgctcttttttatcccttagagacctttacaagattttctaggggtaaagtcaatggctatatatctgatcgtggtcttacatccgtaagccaagaaccagatgatgataatattgccaagtgcaatgcagaatgcttgacagtgaatgtcccacagtcttctagttcttcaggtttagacacagaaagtattatgtcagaagataattgtagcagttcaaatttggctttaagggaggttttgcttgcatatgttactaaaggggatgatgtacaagttttgggttctttgagtgttcttgccactctactgcaaactaaagaacttgatgaatcaatgctagataggcttggaattcttccacaacgcaaacagcacaagaaacagttattgcaagctttggttggtgaggcgtcaggtgaagagcaacttttttcttctgaaaatagcttgatgagggatggcagtggatgtgagcctggtgtctatcttgaaaagatcaaggagcaatatgggttatcttttctgccttctgattttcttatgagccctcgtgtgcctagatttcaggtgctcgatgcattagtgagtctcttttgccgttctaatatatctgcagagacactgtgggatggtggttggcttttacgccagttgcttccttacagcgaggcagaattcaatagtcatcacctggaattgctgcaagtttcatacaagaattctgctactgctcttgtaaaggaggttagaggtttctggcccgatcttcttattacagttctttgcaatgagtggagaaaatgcaaaaaagcaatggagtcatcataccctcctaaagaaccaaagtgcatactttttccttctcagatgctatcttcagaagaagatatacctgagggctcatcatttgctgctggagaaaaaatgcatgaactagtgaaggtatttgtagttctgcaccagcttcaaatattcactctaggtagacctttgcctgagaaacctcttatttatcctcctggtgatctcccagcaaattctcgtgcccaaacttctggacttgatgtttcaggcccaaaaccaggaactgaagtcagccttgttaatgctgtgccttgtagaattgctttcgaaaggggcaaagagcgccatttttgctttctagcaatctctgcaggaacatctgggtggcttgtgctagcagaagagttgccaatgaagaagctctatggagttattcgggttgctgcacctttggctgggtgcaatcccaggattgatgataaacacccaagatggttacatctgcggatccgaccatcttctttacctgttctggatcctgccaagttcaaccccaacaggaaattaaagacaaaagcttttgtcgatggaagatggacattggcgttcagggatgaggagtcttgcaagtctgctttatccatgattcttgaagagattaattttctgagtgacgaggttcacagaagactaaagcctttgcttaaccttgaaaccgcgttggatttatcaggcccagaggaggattcctcttcacattcaacaacacctcccaattcggtgtaaggtctttgactttatttgcaataacatgtggttttctattcaaggggtgggaaattattaagtcggtcaccctttttttgtatatcctccaaatagacataccaaatttgtagattagctactgtggtttagtgtcattctttttgtatattagtcttttccttttgctgcctttcattctttaggagctctaacctaggccccatatttttgtttgtattacattgttgctaagctctgtaacaaatgtatatttgagggaaccccgtaaagaaagttttattccttcttgtcca

SEQ ID NO: 84370 - DNA, 318 bp, Glycine max
  Clone ID: PAT_MRT3847_47201C.1
tttggagagattcaggaaaggggtgttctgatattttaacaccaggaattccttacagctgggacaagttaggtgcgtactgcaacaactctgtgggctgatgggtgtacatatttgtttgctatggtgtatgatagatcagtgtctacagtaccaggtgattgtggcattggtgttaagttggctaccataaacattttgtgtgcatatgggctcaattctggtatttcaggttgttggttttagggcaccattatctaatccatttgacagtagattgtatggaataaaatggtctccgggagaacaccattgaat

SEQ ID NO: 84371 - DNA, 132 bp, Glycine max
  Clone ID: PAT_MRT3847_47202C.1
cgaggccttccgccgaatccgcgagggccccgccttgatccgcaccaagggcaaggccggaaccggcaccataatcgaggccgttcgccacgtccgttccgtaatgagcgacataagggttttccgaaccat

SEQ ID NO: 84372 - DNA, 414 bp, Glycine max
  Clone ID: PAT_MRT3847_47203C.1
gccacgcgttcgaaaaaaaagaaagaagaagatgacaacagccaagccttattgatcttacctcattatatataataccccatcactactgaacccacacacgtcaagctcacatcggcatatcacttacgcttaactcaaacgtacgctgacaagcaacttgacttgcaagagtatattctattatatatagacttgcgattctttaacattccgcagccggagttacaacagttatacttacctgtatataaatttgatattatgaattttatataatacacatgacagttataacgtctgatccgccaaaattgatcagatattctaacgatattgatcaacgatcttccggatgtatatttatatcacatatcaccgagagagacattggacaatcgccacacacccgac

SEQ ID NO: 84373 - DNA, 908 bp, Glycine max
  unsure (1)..(908): unsure at all n locations
  Clone ID: PAT_MRT3847_47204C.1
ctaaggacttgtggtcctggaaaaatgaaggtattgtattggcagcagaggaatcgaatgtaacccatgacctgtacaagactaatgtgcttgagaggccaaaagtaatttacaacgagaaaatcagaaagtatgtgatgtggatgcacatcgacgatgccaattatacaaaagcttctgttggcacagcaattagtgacacacctgatggtccatttgaatatcttggtagccaaaggccccacggatatgaaagcagggatatgacagttttcaaagatgaggatggtgtggcataccttatctactcttctgaagaaaacaacgtactgcacattggacccctgaccgaagattatctgaatgtgattcctgtcatgagaagactttttgtgggacagcgcagagaagcaccagctgtgttcaagcaccagggcacatattacatgatcacatccggctgcacgggatgggccccgaatgaagcactggttcatgcagctgagtcaatcctggggccttgggaaacaatgggaaatccatgtgttggagggaacaaaatgtttcgaattgctacctttctcgctcaaagcacttttgtgcttcctctacctgggttccccggttcatttattttcatggctgatagatggaatccagccaacttaagagactcaagatatgtttggttgcctttgatagtggaaggacctgctgatcatgcattggagtacagttctggattaccactgtggtcaagagtttctatctattggcatagaaaatggaggctgcctcaggggtggagcacattcaagtaattcttgttgtacatttgtttttttgataaactttngttgtacatttgtggccctcaaagaagtactgattcttccgactttaaaaaa

SEQ ID NO: 84374 - DNA, 287 bp, Glycine max
  Clone ID: PAT_MRT3847_47205C.1
gtcctggtgctgttgctctgcctggtgacatttccaacctgtgtcctgtcccaggtgcagctgaaggagtcaggacctggtctggtgcagccctcacagaccctgtccctcacctgcactgtctctgggttctcactaaccagctacaatgtgcactgggttcgacagcctacaggaaaaggtctggagtggatgggagtaatatggactggtggaagcacagattacaattcagctctcaaatcccgactgagcatcagctgggacacctccaagagccaagtttt

SEQ ID NO: 84375 - DNA, 413 bp, Glycine max
  unsure (1)..(413): unsure at all n locations
  Clone ID: PAT_MRT3847_47206C.1
tagcaaggacggggaaacgggccacttaaataccaaagacccatcaacagttacagatcttggcgacacatggggcacaaaaagtcagctgtatgtgatgctggtttgaaccgcctatcaggcacagatgtctatgaagccgaagaagggatgaaggattttctctgtnagaagtgtcccaggaaagagcgacgctcanggcccagaaggccaccanggggggaggcacaggaggaaccaagagaataacctcactcaatactgttctagacggcaagactgcaacagcgcgaaacaaaatcagagcttatatcaagagagaagcacaatcgcccacttatataccacctgaactgaggcctcgcatgacagggaagtaatcgaagaccctaaccattcaggggcgaaacatg

SEQ ID NO: 84376 - DNA, 674 bp, Glycine max
  Clone ID: PAT_MRT3847_47207C.1
tcgagcctgcgttcctgtgaacagcggaagaatacaccgccacacgctgcaggccctttaccttgtgcttcctgcgttcctgtgagaacccacgttctctaacgcgcttctccttcaaagttcaaattcctatacatttgcgtaatcgcttctcaaatctcaacaaaagtattcccaaaaaaccctaattattattattaaacatgaggccgattctgatgaaaggccacgagaggccactgacgttcctcaagtacaacagggacggcgatctccttttctcctgcgccaaggaccacaaccccaccgtctggttcgccgacaacggcgaacgcctcggcacctaccgcggccacaacggcgccgtttggtgctgcgacgtctcaagagattcgggtcggctcataacgggaagtgcggatcagaccgccaagctatggaacgtgcagaccggtcagcagttgttcaccttcaatttcgattccccggcgaggtccgtggatttcgcggtcggcgataagcttgccgttataaccactgatccctttatggaattgccctctgcaatccatgtcaaacgcattgctaacgatcctgctgaacagactggggaatctgtgcttctcattaaaggtcctcagggaagaataaatagggctatttggggacctctc

SEQ ID NO: 84377 - DNA, 497 bp, Glycine max
  Clone ID: PAT_MRT3847_47208C.1
gagtcatttactatgatgagagtgacctcgccttggcctatcttatttcgagccacttgaaatggggaatgttcgtacgttgaaccccatacaccacaccatacggtggctctaagcccctgatacgtgtgcccctgacaccatcatccatagtaccttgaagcttgtagagagactttagactgaccccaaaaatgaggatgctcactaccattgtactctttatgactttacactatgagggtggatgaacccaatgctcatgctaccgggacaatgatagagaactatgctgatgtgacgtgagactatgccactactttgcacggaattgcaaggtgtgctaatacggtgcaatacttgcaagggttggctgaggctgcagagggaaatgagctatagtgggctgcttaaaccataaatgggcctgctgatgcgattgcagacgatgtgatccatggcccaaccgggaatgcgtattctagagatggaggtgc

SEQ ID NO: 84378 - DNA, 472 bp, Glycine max
  Clone ID: PAT_MRT3847_47209C.1
ttcctcttaagattgttcccgagatttacactgcctacgttacgacttccataatttaacgtgatctgcctcatggctgaccgaaaaggctgatactcacttgtgcgtggctgcacttggggaccctgatgaccaaccaccgttagcgagctgaagaaggctgtggagcaagaaagaagctccagggcatgccatatgaagacacgcacatgcagtctcagacgggaaccagaaaactatgatagcaaaataatctggaaccctattgcatcctcgtcatcatcatggtgccctgtaagctagctgtgccatggtaacactctttgagaggagagccatgatgaacagataccattctgatgtattgctttccttgatagtgcatgaaggcttcactatcttccgtgtaggaggaaagacatctccgttcccatgtgcgcgtcccttctataactagcggaccccccgctct

SEQ ID NO: 84379 - DNA, 460 bp, Glycine max
  unsure (1)..(460): unsure at all n locations
  Clone ID: PAT_MRT3847_4720C.1
aattcgggtcgaggctgcgagaagacgacagaagggggaacacttagagaaaaaaagaaaacaaactcttccggtcccttctctctcttagtcacattcattccctctctctatctctatctatctcccagcttctacaaataacaagtaacctttttcacttacttttccttcaaaccaccatccccaaaaaactctgaatcctttctctttctcttcatttttttattatctgactagtagtgacaagtggtccctggaaaattaattactcgatctctcagtctctcaactttaattttttttccctatggcagtgttctttcaaccctagtggggatcctactaaaaagcctactattgccttaccaacacaaatcataagtcactcatgatataatcaaagcccttaataaaacccttccttttcacctgtntcaattcattcctttcattcccc

SEQ ID NO: 84380 - DNA, 447 bp, Glycine max
  Clone ID: PAT_MRT3847_47210C.1
agcggaaaagaaagcgggcgcagggaaacgtttaccaccattatgggcgggacctttaaccaaaggattttttttttttttggaaggaaaaagacgtgggccgggttactaaaatgcctgggaaacccaacacccaataaaaaccccagttgctcggtttttaccagggggcttttttaaaacaataggcccatctgcaaaaaaattattttcaaaggggaagccggtcttgattttttgccccctgaaaaccatcagaaaaaggcccaagatcccggacaaccaaaaatgccggggaaaaatcccacaaaaccaccctttttatggcccgaccctgcaaagggaaaccctgaacttcccttccgccggggtgttttgaaaaaaaaaggtttggacccaaaagcttccccccctggttggatatcctcctttggaacttggaactcc

SEQ ID NO: 84381 - DNA, 1046 bp, Glycine max
  Clone ID: PAT_MRT3847_47211C.1
ggctcgagcaatgatgtcaaacatagccttcagattaactcttgtctttcttttattttctgcggtgctctctactcctccagaggatccaatcaagtgcgccacttcagagaacacaacctgcactatcacaaactcctatggcgccttccctgatcgaagcatttgcaaagctgctcaagtgttgtaccccaccaccgagcaagagcttgtgtcagtggttgcatcagcaaccagaaacaaaaccaagatgaaagtagctacccgtttttcccacagcatccccaagctggtgtgcccagaaggcgaaaatgggttgttaataagcaccaaatatctcaacaaaatattgaaggttgatgtggaagcaaggacaatgactgtggagagtggtgtgacaatgaagcagcttataaatgaggctgcaaaggtagggttggccttgccatatgcaccatattggtggggtttgaccattggagggcttatgggaactggtgctcatggaagcactttgtgggggaagggtagttctgtccatgattatgtggtggagcttaggattgttagggctgctggtcctgaagagggttatgctaaggctgagagcctcaatgaacaacatgaagatctcaatgctgccaaagtgtcacttggtgtgcttggagttatttcacaggttactctaaaactagaacccctcttcaagcgatccatcacatatgtggcaaaaaatgattcagatttgggagaccaagtggctgctttcggacatgcacatgagtttgcagatataacgtggtaccctagtcaacgcaaggctgtttaccgtgttgacgatcgtgtcccatttaatacttctggcaatggtctttatgactttatccctttccgtcccactccttctcttgaattggctatcttaagaaccacagaggatcttcaagaatccactggtgatgccgatggaaagtgcataggttctaagaccacaacgaatacccttatcactgcagcttatggacttactaacaatggtataatct

SEQ ID NO: 84382 - DNA, 550 bp, Glycine max
  Clone ID: PAT_MRT3847_47212C.1
gaagatcttttgaagcttccaaacagaggaaaggcgttagaagttggttacgagtattttgatgatttagttctcgaaccgttttttcaacgttctagtaatctaacttggggcaattattttgtaatgcatgacctcgtgcatgatctagcattataccttggtggagaattctatttcagatcagaagaacttggaaaagaaaccaagattggtataaagactcgtcatttgtcagttacagagttcagtgatccaatctcagatattgaagtttttgacagactacaatttttgagaactttattggcaattgattttaaagattctccattcaacaagggaaaggcaccaggtattgtagcgtcgaagcttaagtgcttgagagttttatcattttgtggctttgcaagtctggatgttttgcctgattcaataggtaaattgatccatttgcgttatttaaatctctctcgtacaagaataaaaacactgccggagtcattgtgtaatttgttcaatctacaaactctagtgttgaagcctattc

SEQ ID NO: 84383 - DNA, 609 bp, Glycine max
  Clone ID: PAT_MRT3847_47213C.1
gcgttccattcaccgtttaagcaattggctgcgtaaaactaatcgaaagccattgcttgcagctctagagaagatgaaagaagagttgatgttactcggatttatatcactcttattaacagctacctcacgcatgatagccaatatttgcattccatcaaagttctacaacagtgcttttgctccatgcactagatctgagattgacgaagaaatggaagataatggctctgaagagcgtaaattattgatggcttcttcttatccacacttagttagaaggatgttgaatggaataaatagcagcacctgcaaagagggttatgaaccatttgtttcgtatgaaggcctagagcagttgcaccgattcatttttgtcatggcggtaacgcatatatcttacagttgcctaactatgttgttggccattgtgaagattcacagttggagagtgtgggaggatgaggctcatatggatcggcataattcattaactgaaattacaaaagagttgaccatgcgaaggcaatcaacctttgtcaagtctcatgcatcaaacccattgatcaaaaacagttccctcatttgggtgacatgctttttccgtca

SEQ ID NO: 84384 - DNA, 402 bp, Glycine max
  Clone ID: PAT_MRT3847_47214C.1
aggaactacaacagaatctaaagatgacaggaccacactgttatgaccaatgattgatgaacgaacattgtgtgaacgatgatcaatacacggactgcactatatagccgtataaaccgaatacttacacactttacgaacactaaacgaaaggccacccttgggacataccgaatacaacacttaatcccagcgtcgccgacaccgcttgacggaaagattactcctttaccggagaacatgcgtcggactacaccgctatacattccgatcgcagttcgcattctgatgaatattccagctcctgatgaaggtagccttatcgcgagctacacacctaggaagttgttacggtagccagctccacctacgtggtcggagatacacataatgacagtgctg

SEQ ID NO: 84385 - DNA, 372 bp, Glycine max
  Clone ID: PAT_MRT3847_47215C.1
gccaatggttcgctgatgtcacatcacccgactgtgattagatacattggttcattggtagagatctgccctagaaaagcataattctggatgcggaccaaattatgaacatgaaataaacgacccctcttcacagtcttgatatgacttacgagtagaggaacatcaagaagatgccgcctaggttgatgacatgactgactgagagaaggcttgttaaacaatctgaggagatgctcagatggagacgaaaagaaagactgtgctctatagggtgaggctagatctgactgttgcctgacctgatctagaaaatgataagatgctaaaaaagtttgctagaagacaactggcagcattagaacctgaagt

SEQ ID NO: 84386 - DNA, 467 bp, Glycine max
  Clone ID: PAT_MRT3847_47216C.1
ttgacgccttgttggacgcgtgggatactgataaaccgcgatcacaggttgacgcaccttaaaaccggcaacaaaagctatcgtttcttgatttcaagaatcttccaatctcttcgtactactaggtgttcgagcaattaagggaaagaaaatcactctctgcgcacgccacaaactatgtgaattactactcttttgcactcttagtgtactcgctgcacactcttctatgtgatataggactaagtgacagatttaaactttttctgtttctttctcagttctctgatgaacatgctgttcaagctggtgaaaatttgtattactgctcccactcttctatgaggtatgggacttcgcgggtagactcttctatttatgtgatttatttcactctattgttccactgagccgcattggcgtcaaagtgggattatactaaaacacttgtgcgattgtgcgaatgt

SEQ ID NO: 84387 - DNA, 284 bp, Glycine max
  Clone ID: PAT_MRT3847_47217C.1
aaagaaaaaaaaaaaaaaaaaaaaaaaaattttataaaaaaaaaaaaaaaacaaaaaacagcagaaggtattttaacaaaaaaaaaacacacttacacacacataaatacaaaaaaccaaaaggccgcccgccttaaaataccaacacttacttccccttccttccaacaatatacttttttataatgccccccaaaatccaatccactgcccctatttttacaacttattaactgaaaaaccctttctttccccaacctaaatcccctttcaacaatatccct

SEQ ID NO: 84388 - DNA, 384 bp, Glycine max
  unsure (1)..(384): unsure at all n locations
  Clone ID: PAT_MRT3847_47218C.1
ctgacgttggcattctaccttttcttgattgttccatagaagatgatgacacattgggtgggaatgaaaacaacagcattgaggtgagacttgtttggtttactatggaaagagaagtgagaaataaaattaaaaccatattttatccctaacaataacactcaacacaaacacacataataaaaattccaactaagaaaattgattatcaccgatgaaaatcaatttcctagtatgatgcaaaaattgtttataaaactatacaattgattatataagattacaaaatcgattggaagactacaaaaattgattntttttcagttttttatgtaatagatgaaagagatagatataacattccaaactattttttttatcaca

SEQ ID NO: 84389 - DNA, 537 bp, Glycine max
  Clone ID: PAT_MRT3847_47219C.1
agcgtcagaactcaagccgagtcggaatatgccaatcgtggtaatgcagcctttgctctatctctatcgggcatggatgctcatgctcactgatcaagaacaactcctccagcgctgctgctgcagcacttttcaaacctcgagcaaaacaagctgacactatcatcccccagattataggggccccacaaactctacaaagccgaggaggaaatggaggacccgatcccggcactaaaataccaagtagtgaaggtgactcaaaccatctcccaagctgaacaaagtggccgccattgacgaggctaactcggtatacgactaccgcatacgcgtgaaggaccgggcaccatgaaagtttggagaagggtacattccaaacaaaggtggatgctgacaactgatggtgactggatctatcgacaaggccactctaacattccacaccaaaaactaagcaccactctgatatgcagagcgagataaaacatacgccagcggtcctggaatactaaaggccactgaaggctactggtt

SEQ ID NO: 84390 - DNA, 760 bp, Glycine max
  Clone ID: PAT_MRT3847_4721C.1
ggctaattgcatacgatccctttgtaatgctgatgtgaaagaaggatttgtttttgggaaggatgcatctcttcccgagacgtatgtccgcgatgctaagatccccactaaggatctcagcgggaattcagcttcgaagaggacaacgcttgcattttttgcagggagcatgcatggttatgtgaggccaattttgttgcagcactgggaaaacaaagaccctgacatgaaaatctttgggagattgccaaagtccaagggcaacaggaactacatccaatacatgaagagcagcaagtactgcatttgtgccaaaggctatgaagtgaacagtccaagagtggtggaagccattttctacgaatgtgttccggttataatatccgacaattttgtgcctccctttctcgaggttctgaattgggaatcctttgcggttattgttctggagaaggacattcctaacctgaaaaatatactcctttccatcccagaaaagcagtatcttcggttgcagatgagggtaaaaaaggtgcagcagcatttcctttggcacaagaaccctgtcaagtatgacatatttcatatgatacttcattctgtttggtacaacagggtcttctctgcaccagctaggtgattaacttgaagaaaagggtatgagtagagttttagaatcttctttttcttggttgctaagtttagcaattttggtcaccaaatgaaatattgataaggtcatttgttgtgtacagctaaa

SEQ ID NO: 84391 - DNA, 488 bp, Glycine max
  Clone ID: PAT_MRT3847_47220C.1
ggcccggggcctgactattaagcttcctattatgattgggtaaggggactctttatcttccccttgtctggtcctgggaactggggagtgctgtccatcctttattagtaacctagttttgttgagagagaggtgcagcatttccctcaagtacctgcatgctcataggtatgcatgcttataggtatgcatgcacaccagcaccttgacttccaccaggacagcgaatctgtagtccccattaatgatactctcagaatggtctccaccaatgtgcacaacttcatgcacacaattgtattcctctttaggagagacagtgaccatgccaggctcttgaaatacacactcctgtattttcatctctgaactccctgaagcttcacccacatatacatggcactgaatcactgttctgcccaggctggagttagaagaaccatgggttgaaggcctttgcagaagaggtggtaaagaactacctggtt

SEQ ID NO: 84392 - DNA, 365 bp, Glycine max
  Clone ID: PAT_MRT3847_47221C.1
atccgatcccatactatgtgttttaaattgggaatattccctcccattgggtgtttctgaaccgaccgtggtgggcgacgcatcgaattcaataaataaaatttccccatgcatagtgaccggagctacatgtccatataaatggagacgccacgaattatcgagtttgcgcataggaatatggacatcatgccaaggaagaagcaacgctgaacatgggacatgcacgtgcctcctcctcctgctcctgcaccacctgttcctccaaccaagtagcaggttctttctacaatgtattgcaagcaggaagttgggaatggagtggttccaaaatatgcttattcatctttgttttacaggggaat

SEQ ID NO: 84393 - DNA, 264 bp, Glycine max
  unsure (1)..(264): unsure at all n locations
  Clone ID: PAT_MRT3847_47222C.1
caaaagtattttgttcgcttattaccacaaaanacgagtgcaacaaggtgcctgcgtgcacatgacgtagcgctagatcttggcanagttgtataaaactcaaacagctttcaacatttgcctcgacaagcgttttatgctcgactcgcntaaagcggccacaaacccagccaatacacgtccaacacccgacagcgcactcgcgactgcagctggcgttgatcccaaagtccgacttccacaagcgcggctggantgagagtt

SEQ ID NO: 84394 - DNA, 257 bp, Glycine max
  Clone ID: PAT_MRT3847_47223C.1
ctcgacccgcgcgtagaggcatgcaccgggtaggtttccgcggtgcccccgcggcggcctgaacggacgctccctgccccatcccggctgttgggctgggccgctttgcctctgcttcgccctgtgctgtgttctccagctttgtagcagcagccttgacaaacccaggcgcactgtaccaaggcaatgtaacttttgattttcggtcaatttaagttcttttgtcaccacatattaataaacagttttgacttcac

SEQ ID NO: 84395 - DNA, 1069 bp, Glycine max
  Clone ID: PAT_MRT3847_47224C.1
ggggaaagtgacaaaacttgaatggaagaaggcatatctttaaattgaattgatggccgcgcgagacctggtcaactctcgtagtgctgttgtgcaaacggttaatggtgtcaaccgcaagtacaatgatccaagagctggaaggaaggggaggatttctagccgtgctaatgaaatttcaggaactggtgtagatgattttgagtcaaggagtcttgatgctgatgatttaaagatagaactacaggctaggaaacaacgagaggcagctctggaagctgcattagccgagaaggaatttgtggaagaacagtaccggaaaaaaactgaagaggccaagagaagagaagaagccttggagaacgatttagcaaatatgtgggtccttgttgctaagttaaaaaaagacgggggtgctgttccagaatcaaacatcaatataaaaaaagttgatgaggaagcacatacaaatgatctgaaaactaatggcattgaaagtgatattgtccccaaggagcagattttagatgtatcaataccagaaaatgaaatagccaatgaagaccctttggttgttcgacttaaggcacgcatgaaagagatgagggataaagaattcaagcatcttggcaatggagatgccaattcccatgtttgtaaagtatgttttgaatcttcaactgcagcaattcttcttccatgccggcatttttgtttgtgtaaatcttgctcacttgcttgttctgaatgcccaatatgccgcaccaatatttcagataggctttttgcttttacttcttgactcttcaaaaaaagggttttatctcattgaactaatatatccgtgtggccacaggtgcaattctttcattgtatgtaaaactgtttaaaagttatatcgataatatctttcttttactctaccctggaaattgtataatagggggagaccaaggggtgggaaaaaggaatgtaaaaaggaaattgaaagggtgttaaccaccctgccgaagtacatgtgcacatagtgtgtttgttttaatgtaataaagcagattttttgttgaaa

SEQ ID NO: 84396 - DNA, 861 bp, Glycine max
  Clone ID: PAT_MRT3847_47225C.1
ttctagaagaggaatgcattaaaaaggttgaagaggcccaaaaaaaagagaagcctcgttggagaatgatttggcaaatatgtgggttcttgtggctaagttaaagaaagaagggggtgccgtcccagaatcaaacatcaatataaaaaaagtggatgaggaagcacataaatatgatcggaaaactaatggcattgaaagtgatattgtccccaaggagcagattttagatgtatcaataccagaaaatgaaatagccaatgaagaccctttggttgttcgacttaaggcacgcatgaaagagatgagggataaagaattcaagcatcttggcaatggagatgccaattcccatgtttgtaaagtatgttttgaatcttcaactgcagcaattcttcttccatgccggcatttttgtttgtgtaaatcttgctcacttgcttgttctgaatgtccaatatgccgcaccaatatttcagataggctttttgcttttacttcttgactcttcaaaaaaaggtcttttgcaattttttatacatacgagccatattctgtacaagtacaaatttataacatgttttcattttttggctgttgaaaatttccagggttttatctcattgaactaatatatccgtgcggccacaggtgcaattctttcattagtatttttgtatgtaaaactgtttaaaagttatatcgataatatctttcttttactctaccctggaaattgtataggccaaggggtgggaaaaaggaatgtaaaaaggaaatggaaagggtgtaaacaacactgctgaagtacatgtgcacatagtgtgtttgttttaatgtaatacagcagattttttgttg

SEQ ID NO: 84397 - DNA, 225 bp, Glycine max
  Clone ID: PAT_MRT3847_47226C.1
aaaatgatataaaaaataataatcaatggtaccttagaataaatcacaaccgggggaggatgattaatttttttttttcggcaaacaaagggtagaaaagggaacatcaaaacactgtaaggaaaaacaccacatgccgcatgaacattcaaaggggaaaagcaaagaagaaccggaagcttggctaaaacccttgacagcaccagccgccctttgggggcagta

SEQ ID NO: 84398 - DNA, 300 bp, Glycine max
  unsure (1)..(300): unsure at all n locations
  Clone ID: PAT_MRT3847_47227C.1
annnnnnataaaaaattacaaacagtaacaagaaacaactcataaattgaaaagaaaatacacttntttttcacaacaaacaacaaaaatattactatgataacaccatacaataatgctctcacaaacgcgaaagaaatcaaactatatcgatctattgcatgcatgcaacttggcagagatataccaagtcagagggcgtaggtagcccaggatgaaattatgaaaggtattttaaggagtggaaggtggtggggagaggaatgggatggagggcatagtggttggaattgagctggt

SEQ ID NO: 84399 - DNA, 445 bp, Glycine max
  Clone ID: PAT_MRT3847_47228C.1
ttcactcgtccgctcatctacatgcccaagatgcatcacccttatcattactgtatgattttgaggaactcgagggagagtgggatttccttactcgtgtagttgcgctaaccttttatccaactgtttctggaaggaaaccattaacgcttggcgagattgaaatccttggagtttctcttccgtggagtgatgtatttactaatgaaggccctggtacaagattagttgagcatgtcaagaagtttgaagaggagcttaatccctttgtatctgattcggatacgaatccatttaactcttcatcctcagaaaaagcgtcaccacccaaacaaggaggcacttctgctgaccttttattgacctcctgtctggggaggaccccgttcacacccacttgtgcaaccaggtactgaaaatattgtctaccacgaaaatgacccac

SEQ ID NO: 84400 - DNA, 361 bp, Glycine max
  Clone ID: PAT_MRT3847_47229C.1
caaggacacacatatcactttcccggcctctatcatgctgtctaccggtcgtgaacatggtcaacgtcccaacgacagttactgatgcacaaatatgagcctaccttgcatccaacttccacatacgctcacgagcaatactttatcgtaactgatccattccctgctcgaaacgctcttgctctctggcatcttgtcgagatccttgcgaattatcccactcatccagagggcactacagctgatcttgagaattcaaccgctcttccatgtgctcaagcgctaggtgctgatacaagtcacatgactcatactgatgggtaatatctatcagcgcctagatcaaagaatgtaattataa

SEQ ID NO: 84401 - DNA, 2391 bp, Glycine max
  Clone ID: PAT_MRT3847_4722C.1
ctgacatctatggaagtaggatcacagtttcctctcaattgtatgcccagtaacatatctgagttgcagtcttcgcctgctgttttgggtttctgtagaaatcaagggatggagacagaaagcagtttattgaatcatgatctgaatgttatgggggctgatactaggaacatgggggagatagatatgatgtcaactgttttagatgaggcagatgaagctaatcatttttcacctgacacagatggaatttctaaactcccagaaatcagtgatgaattctgggaacttcttttaaggccaaggtgtgatactttcctttcatcttcttcttctctctgcgataaaagcaaaacctaaaatttggtttaggcataggaatctgttgtagagttgatctacctggaatggagggagcatcgtggaatagtagtgtttgtgtggcaccgtttctgagcaagacctacgacatggttgatgatccttccaccgacttagtggtgtcgtggggcgaaaacaacaactcctttgttgtttggaacgttccccaattcgccacagacatcttgcccaatcattttaagcacaacaacttctccagcttcgtcagacagttgaatacttatgtgggcatcacatcactttttctcccatcattatcatcttatcttatttcttcttcttcttcttcttcttcttcttcttattattattattattattgctttttgcttatgctaaacccctctttttctattatggggtgaaaagggattgaaggattgttgttcttttctattggggttatatctgtgctttatgggaagccctatctgtcttcttgttgttttatttcgattcgatgtggcacattctacctttcatttctgtggcgtctcattgattggtattatgaatctcgaatttgcagggttttagaaaggttgacccagatcgatgggaatttgcaaatgaaggatttttaagaggtgaaaaacaacttttaaaaagtatcagtaggcggaaatctgctcatgtaaatggtagtcaacaagcatctcaagtgcataaatcagctgctggagcatgtgttgaagtggggaaatttgggcttgaggaagaggtggaaagactgaaaagggataagaatgttcttatgcaggaacttgttaggttgagacagaaacagcaagggactgataaccaattgcaaaatgttgggcaacgtgtgcagtcaatggagcagcgtcagcagcaaatgatgtcattcctggctaaggccatgcagagcccaggcttcttagctcaatttgttcagcagcagaatgaaagtagtaaacatatccctgggagcaataaaaagaggaggctccagcgacaagaagaagatagtttagccaccaaggatctccatagttctcttgatggacacattgtcaagtaccagagttccataaatgaggctgcaaaagcattatttcgccagatattgcaaataaacaattctacaacacaatcatcaattaagaaccctgatgttttccttattgatgatattccttctgccattgcatcagatagcagtagttcatccactcaggtttctaatgtgatggttccacctatatctgagctgacgtctatggaagtaggatcacagtttcctctcagttgtatgcccagtaacatatctgaggtgcagtcttcacctgctgttttgggtttctgtagaagtcaggggatggagacagaaagcagtttattgaatcatgagctgaatgttatgggggctgatactaggaacatgggggagatagatatgatgtcaactgttttagatgaggcagacgaagctgatcatttttcacctgacacagatggaatttctaaactcccagaaatcagtgatgaattctgggaactgtttttaaggccaagcccacttacagaagacacagaggaaactaaatgtagctctctaggatgtggtttgactgaagatcagggtttgccttcagaaatgggaaataagcaggaaaattttgatacaatacaacatgttgactgtcttactcaacagatgggacttcatgcattggagtactgattgtgtgtatatatgttactcacaactgaaggtaaactttttagcttgcagcctctcacttatgcataactttataagcatactggctcaattagttccctgaaatgaaaccagtgtaaaatctcctttcattatcatcatacccaattgctgccattaaagagtgagaacagtgagggagtaaatcaggagtgtttaaaacaattacattgaatgtctacaaaaatgtctgatgtattatgatcatacatacacattattaagatagaaatttactacgtaac

SEQ ID NO: 84402 - DNA, 360 bp, Glycine max
  Clone ID: PAT_MRT3847_47230C.1
tcttcttcgtcacaaacctcttcggtcattcgattcactccacttcttcaaaaatggccagatacacagttcgcgttctcgtcactggagcggcaaggcaaattggatatgctcttgtccctatgattgcgacgggagtgatgctgggtcctgaccaacccgtgatcctccacatgcttgagattcctccagcatcagaatcgttgaatggggttaaaatggagattggtggatgatgcattcactcttcttaaatgtgttgtcgcaataaccgatgtggatgaggcatgcactggagtcagtattgcaatgatgggtggtggattccctagatcagaaagtatggataggaaagatgtg

SEQ ID NO: 84403 - DNA, 1020 bp, Glycine max
  Clone ID: PAT_MRT3847_47231C.1
aattcggctcgagggaatattgaagagaacaaaggaagtgaaagcaacatgatgcaatgagttacagtgagatacgaaaatggtgttaatgggaggagttggagtaccctcaatctcaatctgttttttgttccaaacaagacccaccagacatttgtgtctcaaattcagattgaaacattcactttcatattcaatcactagcatggcattgaccaacaacaccaccaccaacgaaaggaagcttccaattctgctgtttgatatcatggacacccttgttcgtgaccctttttaccaagatgtccctgccttcttcggaatgtctctgaaggagctcatagattgcaagcaccccactgcttggattgagtttgaaaagggtctcattgatgagatggagctagcaagaaaattttttaaggacggaagggattttgatttagaaggccttaaaacttgtatgagaagtggatattcatacatagaaggcatcgaacagttgcttctttccttaaagctaaataactatgagatgcatgcttttacaaattatcctatatggtaccagttgattgaagacaagttaaaactatcaaaatatttatcgtggacgttttgttcgtgggcttttggtaagaggaagcctgatactgaattctataaggaagttgtcaggcatcttaaagttgatccaacaaattgtattttcgtagatgacaggcaaaaaaatgtggaggcagcaattgaagttggcatcagaggggtacatttccagaatgtcaattcactgtgtgaaaaactgccattgatggggattgacatctcaacaaatgaagatagatagcttattttatttgattctgtttcttaactaaaccaatttatttttattggtagaaaggggaaataacaaactcataattttacattccattcatgccaagctattgaacttgtagaagtgacttcttattttttaccctcacaacaatacatatttatcttcttagctgtgct

SEQ ID NO: 84404 - DNA, 430 bp, Glycine max
  Clone ID: PAT_MRT3847_47232C.1
gccatggaacgctgtgcgacgaggcaaactggacgtggcgcgaacctccgttgcccgactgcgctctgctgcccctgattctgaagaggtcgaggccaatctcgcctacgtccgccacgtcaccaccttggaagccgaggagacgtcgggcgcatccttcttcgactgctttaggggcaccaaccttcgccgaaccgagatcaactgcgtggtatgggctgcccaaattctgtgcggcaatgccattctcgggtactctgtcgtgttcttgcaagccgctggttttggcgagacccaggcgctggacctcaacattgctctatcggcttgttacatcatcaggggggggatctgctgagtcctgttccctccaatcagccgatcgacgatctacatggcccggctggctatcatgctcatcggcttgatc

SEQ ID NO: 84405 - DNA, 712 bp, Glycine max
  Clone ID: PAT_MRT3847_47233C.1
atctttgtcactgggactccaattcactccatcccaaggcctggtcctcataccgcctgccttcagaggatcagattgaggggctcctgtctctctaaccagcccagcccagggaaaagagaggacttattcttggctgcagtccctagcacgtgcccctaagatccgactccggctcaggaagcaatcatggtgctctctgcagatgacaaaaccaacatcaagaactgctgggggaagattggtggccatggtggtgaatatggcgaggaggccctacagaggatgttcgctgccttccccaccaccaagacctacttctctcacattgatgtaagccccggctctgcccaggtcaaggctcacggcaagaaggttgctgatgccttggccaaagctgcagaccacgtcgaagacctgcctggtgccctgtccactctgagcgacctgcatgcccacaaactgcgtgtggatcctgtcaacttcaagttcctgagccactgcctgctggtgaccttggcttgccaccaccctggagatttcacacccgccatgcacgcctctctggacaaattccttgcctctgtgagcactgtgctgacctccaagtaccgttaagccgcctcctgccgggcttgccttctgaccaggcccttcttccctcccttgcacctatacctcttggtctttgaataaagcctgagtaggaagc

SEQ ID NO: 84406 - DNA, 575 bp, Glycine max
  Clone ID: PAT_MRT3847_47234C.1
gtggtggttggcttgagtgtgtgcagcagaagcagctggttctctgctggatgatggaacgcattttgtgcttcatctacttggtttctctcattctcttccaagcaaatgcagcagaacccatctcagacaagcaagcattgcttggcttgttggaaaagttgcctccttcaagatccctgaattggaacgcaagctcttccccatgtacctcctggaccggtgtaacctgtaatggagataggtcacgagttatagccattcacttgccaggtttcgggtttcacggaaccatccctcccaacacaataagccgcgtcacggggttgcaaacactcagcctcagatccaacttcataaatggtcatttcccttgtgatttttccaatctcaaaaacctttcctttctctatcttcagtataacaacttcacgggtcccttaccggacttctctgcttggaggaacctctctgttgtcaacttgtccaataattttttcaccggcaccattcctctctcgctctccaatttggctcagctcactgccatgaatctcggcatcaactgactctgt

SEQ ID NO: 84407 - DNA, 1106 bp, Glycine max
  Clone ID: PAT_MRT3847_47235C.1
ggcttgtctccgtaggctcaagcgtccgcagagaagcaaggagtaggaggtggagtgcgggcgagggtaacttaccaaccctaaggagttgttgagtttggtacatgggcggagaagtgttgacgatggcggacgtcacggccaacttgcaagcagcaaccaccgcatccaccccttacgcgcttcccaccaatctccctctcctctccgcttttctctccttcgctctcgctcagttcctcaagatcttcacctcctggtataaggagaagagatgggattctaaaaggttgcttgattcgggtggaatgccttcgtcacattctgcaacggtctcggctctggctgttgctatatgtctccaagaaggggcagggtcacccgcctttgctattgcagtggtcttggcatgtattgtgatgtatgatgccacgggagttagacttcatgcaggtagacaagcagaattgcttaatcaaattgtgtgcgaacttcctccagaacatccttgttccaatgttagacctctgcgtgattcacttggtcatactccacttcaggttgttgccggtggcacattgggatgcattatagcatttttgatgagaagatcaagttaagatgctatgtgatgtgactgatactaatcctctaccttgtaaaaattgtcggtacatggctgaaatgagatcatcatggaaagggcataaaagccttctgttgcaagtgagtaaagtgcgttgaaggctcaccttgaagatcctgtgtcctgacttatggacattcagacttctcttgtacacagtaattaattggtttgttaattctgtcttaattgatcgttcaacacattttgagatcacacttttgacttattttttcacctattgttgcaaatcgaaacttggaaggcaattgacacttgaatggaggttgcatttttgtgtttcatcctcaagtagattaagaagattcttgtttctccatggttataacagtttgactttcgagctttttaattatacttgtttgagtttgattctcacccgttgtacgtgatttatggattagtagtgttaaagcctgtttggttttgtgtccggttc

SEQ ID NO: 84408 - DNA, 369 bp, Glycine max
  Clone ID: PAT_MRT3847_47236C.1
atttaataatatacatacgtacagtacgtatcactatatatagataataagagcaccaaaaataataatattgtccttttaattcatgatttcccgaacgatccaaaaatggtcatcaatgtatatacagaatagtacattactccacatgcatgttatccaaatcacgatctaaatgtgtcttcaggaccgtagaaaggaaaatggaattagctaacacaaccttacgattttaacactatgatccaccaatgatctttacaggggggaaattagccacatagaaaggggctggccccctcgattaccgttgctcaataccaaggaatgctctttcaaaaaaattagagccatggctccctctaagtt

SEQ ID NO: 84409 - DNA, 592 bp, Glycine max
  Clone ID: PAT_MRT3847_47237C.1
catgtcgatccatacgagggacgttcaatatcttactcgcgctcgtactcgaggaggtaatagtttctctaggagggctaaggataattccaaggtaggtaaaaaaagagaataggtagatttcttccttcccttatatcattttcttttatctctaggctgtagcatttgaaagcctttacatcagtcccaggctctttgactattaagatgacttcgcccccggagttgtattttaaacaaatgagagcaggctcttcgcatctttttctagctagcaagtgaagtcagtgagcaggcttaggaaagtagagagcaaggaaaagcatccaaccaatccagtttcaccaatcctgttaggctgcttaattattctattgagttgcctaccctcaggtcattcgctgccttaagccctacagtttcttcgctagccgttgttgggacttgacttagttaagagttagcctagaaaggctttgaaagcaagtcaagcattccaatcccagcggattaatcaatagcagtagagtcgtaaacaagaacagcagaggctgaacaagtcacttccttagagcgtgaacaaaacaat

SEQ ID NO: 84410 - DNA, 264 bp, Glycine max
  unsure (1)..(264): unsure at all n locations
  Clone ID: PAT_MRT3847_47238C.1
tcgagtttgacacgcccggcctcaccatgggtttctctttccagggtctgactaccantgcncctggtcaagggcgctgtccctgacnagcatgctaccgagaaggatgttgcagatggtcctgntgctgccgatggctcccgtcttcctgatgagaagaatatcggcgctcctaggacaccgtcctccattcgagtgacgcagcgtccgacgaggagatcaacagggtcgacaccaatgncgagcagggtgtccaggctatcc

SEQ ID NO: 84411 - DNA, 255 bp, Glycine max
  Clone ID: PAT_MRT3847_47239C.1
ctcgctctaacggtttgctctatctcataggaggcgcggtgatatttgagaattgcctacaaatgacctggttcaggagctcggaggatagagctctcacgaagactgccatggccctcctccacattgtttgtctttagccatggaactccacagaggcgcttctatatggcccctcatagctacagtcatggcagccctacattcctttaagtgacagggcccaccatgatggtgtccagatggccaactggt

SEQ ID NO: 84412 - DNA, 459 bp, Glycine max
  Clone ID: PAT_MRT3847_4723C.1
gctgagcaagagatatgtcaagtgggttgagtttcttgaataatttccctacatgatcaagcacaagaaaggtatatctaatgtgaatgcagatgcactttcaatggggtatgatttgttctctactcttgagactaaattcattggttttaagcacattgaggaattgaatgaacatgatctagatttttgcctctaaatattctaattgtgtgcaaactgcttgaaagggttacttttggcataatgattattcgttcaaagagaaaagattatgtgtgcctaagggatccataagaaaattgcttgtgaaagaggcacataacggaggattaatggggcattttggtattcaaaagactttagacttgctgcatgagcatttatttttgcctcacatgaaacatgatgtaaataaatttttgtgacaattacattgtttgtaagaagtccaagtct

SEQ ID NO: 84413 - DNA, 469 bp, Glycine max
  Clone ID: PAT_MRT3847_47240C.1
acgcgcgcgtatacgcgcccgaacacttgcaagaatatggtgtgggacttacaaatagcagggggccatttttgcggatactaaggccacatctggtaattggtgagtgcacacaattgccacatgactttttaaatgaggctaaagatctaggatacataacacgatggcgcccccaagagcatgtgctgtctcatccatcaattggtgctctcctaactcattgtagctggaattctacactagaaggtatatgtgggggtgctcctatgatacgttggcctaactttgctgaacaacaaacacattgcaaggacatatgcgcactttgggggataggcatggctcttaaagacgatgtaaaaagggaggacgcgacatcacttgtgaaagaaatgatcaccttagaaaggtggaaagacttgagacactagtgacttgagtggaaaaagaaagcaatagaagccac

SEQ ID NO: 84414 - DNA, 226 bp, Glycine max
  Clone ID: PAT_MRT3847_47241C.1
cttatgcgtaccatcaacttcttctgacttctaaactctgtgaccttcctactctacatgccgatcctagtggccggagtgccgctgatctattatgacaccaccgaccgctaaccttatctgaaaaaattcttgatttcacttcgacacttactaatttctcgatcattcatcgatctcgttcatacatgcttactacacattttattactctagctttaccttc

SEQ ID NO: 84415 - DNA, 268 bp, Glycine max
  Clone ID: PAT_MRT3847_47242C.1
gctcctctctctctctcttgctctctctagttattcattctctccaccaagccataatgaatagtaataaagtgctatagaaatacctattgaaattgaaagtcgcaataagcaacgatacaacaaacctcaaagcttgtcatatatacttactcttgtttggtggtggtttttgtgttccgatgggaaacggcatagggaagctaaaggtgtgattcaccggaaacggtggagggggtcgtcggaagcaggatatatcctttttaat

SEQ ID NO: 84416 - DNA, 394 bp, Glycine max
  Clone ID: PAT_MRT3847_47243C.1
caactttcttctgtcaaaacagatatgaggtacccaaggagagcttcacttctaaaatttcttgagaaaagaaaagaaaggtaagcttctgttttctacttgctacacttttatttatggaaaatgctgatctgtgccttatggaggaggataccggataaagaagtgaaattagaaagcttttattgcaaaatattaatgtattttcaacattgttttgaataaaactttttattaccaacttatggtagatctaagtggatccgaacacaaattctttaagtaagatattgagttcgagtctttttgaatgaaaaaaaaaatatttggaaagagaaacctcacttaacttgatcggttagttttttcgataaagattagttccagacaaaac

SEQ ID NO: 84417 - DNA, 793 bp, Glycine max
  unsure (1)..(793): unsure at all n locations
  Clone ID: PAT_MRT3847_47244C.1
tttttatcttttcattttcttccngcctatttctaccccccaaaataaggggtaaacctaatttgtgatttaaaagaactgaaataataatattatatatatatatatatatatatatatatatatatatatatatatatatatatatatatatattgaaatgatatagtattaacatggcattgctcaattatatatctagttatatcaatgacataaaaaagtgtgtttgaactatctacaatgacatatctagttattttttaaaaattaaaatacaaataaattattatattgaagtgaaatataaatataaaattataaacatatgtgggagaaactcagtttaagttcttaatgaattcattattaattgaagaaaaaaattgatgaagttcttaaatttaatgttacaatgtgagattcagaaaaagcaacttaagaatctatgtccttttcaacttttgaccacaatttagagtgcaaccgtgagttgcttatattgaaccacacaaaatgtattagtttctcctcctttgtctcaattttttctcgaatcaaaacaataattccacataatatgatatttttacannaaatcacgttttttaatataattcccatgaaccgcccaaataaaaatggcttgtgtgttatagaatatatgaaaataattttnnnnagatagaataagttgnnngtgttcnnnncgcgagagttagagnataaaaatttaaaaatannggnattctctatactatncnnatttannnnnnnnntttttcatttcttt

SEQ ID NO: 84418 - DNA, 464 bp, Glycine max
  Clone ID: PAT_MRT3847_47245C.1
aaaagacttctgcatacccgttgatggaggaatggatgcattagcatttgaagatttcttgcttgaggagaaacgtaaagaattagaagaacttgcttgggcacaagctgaaagggaaagacaagctgaagagcaaaggcgaatggaggcagacagagctgcaaaggaagaggacagggcacgggcgaaggcggaggttggaagaatgcgagaaacattgccacaattgttgaaaaatgctgtaaagtccattgataatgtttggtatattgaacctagtgaattcaaaggcaatgaattgatcagattatattataacagaagctcaggtcctcttgcaaatgctaatgaaatatggattcatggggggcacaataattggaagtatggattatcaatcgttgaaaggcttgtcaagtctgttctaaaaagaggtgaatggtggtatgctgatgttgttgtac

SEQ ID NO: 84419 - DNA, 367 bp, Glycine max
  Clone ID: PAT_MRT3847_47246C.1
agaaaaaaagaaacccaaccttttgttctataattgtctgggtacaggaaaagctcatgttactacattttactttcagcataaaaataacaatatgatttctgcagagtaacatacctgctgcaaggacacaaacacagagggatttgttaagatgattgacaaacttatcctgacgctatgcaatgattcatcagttgatattgaccgcaaattataacactaaatggcagagacaggctcatctccatatgcatacacgaggtgctattatgctgattacacacattgtgattcgtcttcattcagaatccgatttcggaaatcattaaccataagaggcaacccttttctcagtgggattttt

SEQ ID NO: 84420 - DNA, 107 bp, Glycine max
  Clone ID: PAT_MRT3847_47247C.1
aaaatattttattcaagcacaaaacttgaagccttattccatgtattggggggaagttatggctggccatgtgggtagaggtgtcttagaggaggaggtatggaggt

SEQ ID NO: 84421 - DNA, 782 bp, Glycine max
  Clone ID: PAT_MRT3847_47248C.1
ataaaggagaaaaaaacgacgacaaataaagtgtgaattttctttctgattctccaattttctacgtcgatcgtatctttggttattggaaaaattgctccaatcgggtacgtatcgatcatctaatactgattacaagtcttgtatctgggatcttctgcgtatcagttgctccgtttgctattataatatttgaaacgttttgttttcattacttttgtgatccgtggatgtgttttgagtattgatatgtattgcgattcatttgggtgctttcaatttcctattttttcaaccgggtatgctcctttcgctgagattactgcatatatgttttcgggtagttgattaatttattcattgcttttcctcctttatctggaccattcaggacgtttaatattgcttgtggcaatactgaaattcataggtgattaaatgcatgccaatctgcaatgccacataatacagtttattgcaaatttcattcatttaggagaacaatatttgcactcttttctgaattttcctcatcaatgttattcacatatacatatttttgttttcaaattcatggaatttgattctggaataagtaaataatggatgtttgtgaatagatgcaagataaaacttaacaagtgtgttcatcctctatttttcttcttatttttggattgcagctaaaataatttctttgcttgccagttgtagcagtcaaatgtctccttcagtttcttctcaggaaaaagaagtaggaaatagcgaaattcagagctgat

SEQ ID NO: 84422 - DNA, 934 bp, Glycine max
  Clone ID: PAT_MRT3847_47249C.1
ttgatcccctgtatatataaccactcttcctctcctccaaattaaaacacttatcatggatgttaagaaaggtgggtctgtagtacaagcacaagtgaagttgcagaagcataacgaaaaggagatgggcatgagaaaaggtccatgggcggttgaggaggacaccattctggtcaattacatcgccacacacggtgaaggccactggaattccgtggcacgatgtgcaggtctaaggaggagtgggaagagttgcagattaaggtggctaaactacttgcgcccagacgtgcggcgtggaaatatcacactccaagaacaaatattaattctcgaccttcactctcgctggggcaacaggtggtcaaagattgctcaacagctaccaggaagaacagacaacgaaataaagaactattggaggaccagagtgataaaacaagcgaagcagctaaagtgcgatgtgaatagcaaacagttcagagacacgttgcgttacgtttggatgccgcgcttgctggagcggcttcagcccacatcacaagcactggagccaaaccaaagtggacttgtgttacacgcttcatcatcactgcttccttcgaattccgaccatagtattgaaagggggtcggatctgtggccaggtttcaataaccaaatgttgttggaacaggggagtggcggtgacttgttggaaagtttgtgggatgacgacaatatgtgctttttgcaacagctttcttatgacctccaaatgaaataaaatacaattcccttccgtcacgcattctgcaatgcacagtgctgaaagttgagcatgcgttcaatgaatattgttttcctcactttcatgtacatattaaatcttagagactaaactagtcacgtgcctaaaagttgataccagttgaaataatatggtttattaatc

SEQ ID NO: 84423 - DNA, 367 bp, Glycine max
  Clone ID: PAT_MRT3847_4724C.1
aatgatgaattacttgtcaccaatttatgtttaataacagagtataccagtttattctatgacatgttcacaaataaagatattcgtcatagacgcagggggcatggttaataacttaaggacaaggaactgaataccaagttgacccaccaggcatctaatcgggggggggaaaaatacaaacgttccttagcttaatgacagtccaaagagcgctgttatgctgcagccacagtctcttaggcttatttgttgacgagcggactttggctgagatgctggatggatttcatctgaaccctggtgttccatagaagcctcacgacctggctttgttactaaggaaaagaaacttttatcagaagga

SEQ ID NO: 84424 - DNA, 1267 bp, Glycine max
  Clone ID: PAT_MRT3847_47250C.1
cccacgcgtccgtacggctgcgagaagacgacagaaggggaagtgaaaccatcaatcccctgtatatataaccactcttcctctcctccaaattaaaacacttatcatggatgttaagaaaggtgggtctgtagtacaagcacaagtgaagttgcagaagcataacgaaaaggagatgggcatgagaaaaggtccatgggcggttgaggaggacaccattctggtcaattacatcgccacacacggtgaaggccactggaattccgtggcacgatgtgcaggcatgcatgcatcttaattataatttaatttctgcatgtgccaagtaataatggtatatatgttaattatgagatttatcaattacaggtctaaggaggagtgggaagagttgcagattaaggtggctaaactacttgcgcccagacgtgcggcgtggaaatatcacactccaagaacaaatattaattctcgaccttcactctcgctggggcaacaggtatggtataaaaatattccactctctctctctctctatatatatatattaatttgttttataaggttggatgtacacatatataacatagtatgaatgaatgaatgttttttgataggtggtcaaagattgctcaacagctgccaggaagaacagacaacgaaataaagaactattggaggaccagagtgataaaacaagcgaagcagctaaagtgcgatgtgaatagcaaacagttcagagacacgttgcgttacgtttggatgccgcgcttgctggagcggcttcagcccacatcacaagcactggagccaaaccaaagtggacttgtgttacacgcttcatcatcactgcttccttcgaattccgaccatagtattgaaagggggtcggatctgtggccaggtttcaataaccaaatgttgttggaacaggggagtggcggtgacttgttggaaagtttgtgggatgacgacaatatgtgctttttgcaacagctttcttatgacctccaaatgaaataaaatacaattcccttccgtcacgcattctgcaatgcacagtgctgaaagttgagcatgcgttcaatgaatattgttttcctcactttcatgtacatattaaatcttagagactaaactagtcacgtgcctaaaagttgataccagttgaaataatatggtttattaatccttaattgaaaaaaatagtctatgcctttgtttatgtagttatcataagaattactccctccactacatattgatt

SEQ ID NO: 84425 - DNA, 257 bp, Glycine max
  Clone ID: PAT_MRT3847_47251C.1
agaaactaaatctacgagggggggtaatttaatatcaacaaagaatagaatctaaatttttgtgggaatctaataaactgttagatttaataaatctaaaatacctgtatacactgaagtgcatttttaagacaatcatgatatgataaattataaaacaaaatacatatatagaaaaagaaaaaaaaacttattctgaaaattgcacatcgaaaatctattttgatactaagagtccaaacaacattttaggccaa

SEQ ID NO: 84426 - DNA, 915 bp, Glycine max
  Clone ID: PAT_MRT3847_47252C.1
ccacgcgtccgcggacgcgtgggcggacgcgtgggtggtgagggagaagatgtatgtttaaaatggcgacattatctttcctttccgaggagcagaagcgacctataattataaaagtggcatagcataacgtaacaatgttgtcatatggttgccacattcgacatctctctgtcttaaattccactcgcctccgacaacattcttcttcaatcgctaagacagcaatgggttctctctctgctctctaccaacctatccaatatcccactgctcgcagagacgactccgtccttgacgacttccacggcgtcaagattgctgatccttaccgatggctggagaatccggaggcagaggaagtgaaagagttcgtgcagaaacaggttgcgctgacggattcggtgctgcagaggtgcgactgtaggcccaaactggccgagaagataaccaagttgtttgataatcctcgttacaacgctcctttcagacgaggcgataataagtatttttacttccacaacacggggcttcaggcgcagagcgtgctctatgtgcaggacactctggaggctgaggctgaggttttgctcgacccaaatgccctcagtgaagatggcactgtctcactcaacacgctatccgttagcaaagacgctgagtttttggcttatggacttagttccagcggcagtgactgggtcacaataaacttgatgcgtattcgggacaagactgtccagcctgacactttatcttgggtcaagttttcctctattagttggacgcatgataccaaaggtttcttttacagccgctatcccgcaccaaaggatggagaactagtagatgctgggactgagactaatgcaaacctttatatgagctctaatatcattttttgggtactgatca

SEQ ID NO: 84427 - DNA, 270 bp, Glycine max
  Clone ID: PAT_MRT3847_47253C.1
tgttttgtaacaggagcgagaatccaggcatgatgcatcagacatggaaaaatgctgacatatgctaccagtaatgacaccttaccaccaccaccttcatcatgttcttactcttcttaatggctataatgacagagccggtgggctaacttgccatacgagtggcttttaaacttaatccagggggtggaagccagcgaaacttcttggcctgcacggagatcacttgaggcatgtgcctcagtcagtaagatgcggagtgagagaaca

SEQ ID NO: 84428 - DNA, 171 bp, Glycine max
  Clone ID: PAT_MRT3847_47254C.1
gacatagaataagcttgtaaattcatttcactagaaaacataaagctattaattgtctatggtttttcaaacactaatagtatacatctgaagttaaaaatattcaacagaagactaatgaaataatgattaaaccaaataaaatggccgccgctctataagaatcaagct

SEQ ID NO: 84429 - DNA, 591 bp, Glycine max
  Clone ID: PAT_MRT3847_47255C.1
cccacgcgtccgcagaaaacgattatttttgtgcatatatatatatatatatatatatatatatatgttctactaggtcctggcaaacgcggatacccctgaggatgcattggctgcacggaacaacggggcagaaggaatcgggttatgccggacagagcacatggtatctgtatttgttttcaatattagtactcttggttacagttactacatcggacatgttttattttccttttgatttatttgttctgggcgagggaaatagtttcaagtttcttttcttttcttttcctcacctgtacttggggcagttcttcgcttccgatgagaggattaaggctgtgaggcagatgattatggctcccacagttgagctgaggcagcaggcgctggatcgccttctgtcttaccagaggtctgacttcgaaggcattttccgtgctatggatggactttcagtgactattcgacttctggaccctcccctccacgagttccttgcagaagggaacgtctaggaaatcgtgcgtgaactgtgttctgagacgggagccaaccaggaggatgccctcgcacggatcgaaaagc

SEQ ID NO: 84430 - DNA, 451 bp, Glycine max
  Clone ID: PAT_MRT3847_47256C.1
ggaagcaccaaatttgaaccaaggagcacaaagcaagcacaagcagaagctcacactcaagaagaaagagaactcagtaaggagaaatgcaagcgtaaacaataaagactgaacgctgcaacccctactgcaagcctacccatctttttcagactgaacactgcaaccccacatgctagaacgtgttcgcgccaatggcgggactgcccagatgcctagtcagcatgtcccgccacgccagtttgaatggcggtatggaccctgtcccgctgctgtcaatggcggcatccatggttttgcaccctccgctgtttcacagcttttatggattttgtggtagtggattcagacaacggaaatgaagcagaacatagctgtctagaagagagtataagtatatttggcggagttgaagttcaagagccatatgtgggcatggaaattgattctg

SEQ ID NO: 84431 - DNA, 378 bp, Glycine max
  unsure (1)..(378): unsure at all n locations
  Clone ID: PAT_MRT3847_47257C.1
gttcgcttcctgccgcggngaacaacccggaagacgcgcacgagttgaaagacacagcaancccaaccgcacngaaagaaagcaagccggngcacacaagcaccagccagaaccggccggggaanccncaccccacngncaggcgagancccgnnccnngangcgcaccgccaagaccgagaaacaagacggggccggaggccgcagcggaggcagcggcagaacgccccaacaaggcagcgaaaccagagccggcgggaggacccaaaccgagggaggcaacggcacccgaagcccccgaagaaccggccgaagcgcgcggccacgcgcacgccgagacgccaccggccaaagggcagganccagagcaccaccccc

SEQ ID NO: 84432 - DNA, 225 bp, Glycine max
  unsure (1)..(225): unsure at all n locations
  Clone ID: PAT_MRT3847_47258C.1
gtcttcttcttcttcttgtgcatggcaactgaaccgagtgatagaatacagagggacacgcttgtcgttagaaagccatgttttggcctcctaacgggttgcccgcaatgcttatctgcttacatttctctcagattctctcaatttgccttcaacttggacctccgntctaantaccctgatgcggatcaggttgcttgatttgaggttggtgattctgtgacg

SEQ ID NO: 84433 - DNA, 357 bp, Glycine max
  unsure (1)..(357): unsure at all n locations
  Clone ID: PAT_MRT3847_47259C.1
tcaagagctcaaccaatcacgctgcttccatcattctcgaccctttccctccctctgaggcttacttaaaccaatccctcgattcccctattctacctctacttgaaatnctttcacgaaccggtttccctctcatgataaaacattacccctactactttttcatgcaggacaaaagagcgggtcctctctacaaagctctctttttacacctcactgctgataaggaaatagacgaccccaagggggggcttnactataccaacatnctcgaggctatggaaaacaccgcttatttttctctgaagaaccttaatatcaccgatgttgttgttctttgtacacaaactggctggc

SEQ ID NO: 84434 - DNA, 1559 bp, Glycine max
  Clone ID: PAT_MRT3847_4725C.1
ccccgtccgcgcttccgttttgttctgtccgcctgtcctcccccctctggtggtcccccgagcttcctcaccgttggccctggtcctccaatcggtcgaggatatggtcttacagagacttgtgctggtgggacattctctgatgttgatgatacatctgtatggccgtgttggaccacctcttccgtgccacatttattaccctaatagactggcctctgggtgggcagctgtaccagcaattcttgatcgtgtacgtgacggagtgctcaagaaggtaaattcaaagggaggattgtcaaagaagttgtttcatttagcctattcacgaagattacaagcaattaatggttgctggtttggtgcctggggcttggaaaaagctctatggaattttctcgtgttcaaaaaggttcaagcaattttgggtggtcgcattccgtttatactgtgtggtggtgctccactccgcttgatagttgatattaaatataatcatcactttattgctccaataggtcaaggatatggtctaacagagacttgtgctggtgggtcattctctgattttgacgatacatctgttggacgtgttgggccacctgttccttgctcatatattaagctaattgactggcccgaaggtggatattcaaccagtgactcaccaatggcgcgaggtgaaattgtaattggtggtccaaatgtcactcttggatacttcaaaaatgaagaaaaaacaaaagaatcttacaaggttgatgaaagaggaatgaggtggttctacactggtgacatagggagattccataaagatggttgccttgagatcattgataggaaaaaggacatagttaaactacagcatggagaatatgtgtccttgggaaaggttgaggcagctgtttctgccagtcccttcgtagacaatatcatgttgcatgctgatccttttcatagctactgtgtggcactcgttgtagtttctcattctgctttggagcaatgggcttcaaagcaagggattgcttattctgatctttcagaattgtgcagcaaagaagaaactgtgaaggaggtgcatgcatcacttgtaaaggaagcaaagacggctcgtctggagaaatttgagattcctgcaaaagttaagttgctttctgaaccatggactcctgaatctggcctagtcactgcagctcttaagctcaagagagagatacttagaaagacttttcaagcagatctctcagagttatatgcctcgtagactagaccaaaattggatctggttactcgtcccaatggaagaaaccacttttaattctttttcctttatttttgttgggagggttttatctttttatttagaattatttatccattttaaataatatttataatgcataacgaggcttatcacgagtagaaggccaaaatgttgaattacatgaattcggggggtgttgaaatttatcgaacgttttattatatttcatcaatttttcaatcataaatttatctgctgagaattaaaaaaaaaaaaaaaaaaaaaaaaaatt

SEQ ID NO: 84435 - DNA, 391 bp, Glycine max
  Clone ID: PAT_MRT3847_47260C.1
acgaccacattataattaatattacatacattatgctgcttggctgagcaaggtactacttgtacatgttgatgggtatgtggcaaccattgtaacaatggtaatcataatggtgcctaaaaacgtgtgtgctcaaaccatcggatcttacatctgaacacaagactatttaaacagcataatctggcaggctgactatggttgtgcatgtaagaaattctactcacgagatgcttgacttaatgcatagaataactacaatgagttagattggctaggtaatcaagatgacttcaagcgtgatgaagcagctgatttcgaccattttagccatgaaacaagacatgtctgctacatagcagagattcacggtgcatcaggcgactactgt

SEQ ID NO: 84436 - DNA, 1734 bp, Glycine max
  Clone ID: PAT_MRT3847_47261C.1
cattaccaccctttctctgtctctctctctctctcgcccccaccaaaatctcaaaggaagaagccaaagaccctcttttgctcttgtttgttcccacataccaacctgttcctattttggcatgaacatatcttacacagtgtgaacttgttaattagttggttatctatacacgtgaatttaaagaatggcatcaccctcagaactaagtctggattgcaagcctcaaagctattccttgctactcaaatcatttggagatcaaactgatcattcctacaagcttgaagaattcctcaatcgcttggaggaagaacgcctcaagattgatgctttcaagcgcgagcttcctctctgcatgcaacttctcaccaatgccatggaagcttcaaggcagcaacttcaggcctttaaagtaaaccatggagcaaagccagttctggaagaattcatacccatgaagcacttagcctcagagagctcagagaaggcaacaaacatgtctgacaaggcaaattggatgacatcagcacaactatggagccaagcatcaagcgaaggaaccaaacaacaaccaccaatcacaacccttaaagaatctgatataggcttcagcataagcccaaagttggctcttgacaacaaacaaaggaacggtggaggagccttccttccattctccaaagagagaaactcttgccagggctctacattgcggcctctccctgaacttgttcttgcctctgcggagaaagaaatggaggataagaaacgtgcagaggtagaaattaagggagtttcgtgtcagagtaggaaggagaattcaggaagtgatggagctgtggttgatcaaggaaaaggtggtagcccagttgcatcgtctcatgcacaaacaaccacaaccactactagtgcacaaactcataggaaagctagaaggtgttggtcaccagacctgcaccgaagatttgttaatgctcttcaaatgcttggtggatcacaagtggcgaccccaaaacagataagggagttgatgaaggttgacggtttgaccaatgatgaagtaaaaagccatttgcagaaatataggcttcacacaagaagacccagtccaagtcctcaagcgggtgcagcagcaccacagcttgtggtcctcggcggaatctgggtcccaccggaatatgccacggcagcacacacagccacccctactctctacggcgcccaccctacctcccacgcgccgccgccacattactgcgctgccactcccatgccacaagacttctacaccacggcgccgccacagccgctgcttccgccgcctccgccgcaccacaacgctctgcaccacctgcacatgtacaaggcggcaccgcacggccaaggctcgccggaatccgacgttcccagcaacggagagcgatcggagagtattgaggatgggaagtcggagagtagcagctggaagggggagaatgaaggggagaggaaagggattagtaaagggagcaatgggagtgagatcactctcaagttctagggttttagaattagggttttgcttgcatcccataaccgatgcatgttcaactactattcattattgttcaacaaaaatggggaaaaaaaacaaactaagtagaacaaaatatccttggtggtactttttgcctatatttctgtggtaaaaaggcataaaactggacatttgttttgtattttttgctttac

SEQ ID NO: 84437 - DNA, 313 bp, Glycine max
  Clone ID: PAT_MRT3847_47262C.1
gcactggccgaagggtgcggggaaactgacccacgcgagattggtatcaaggaactgcgagagcggaaaatacggtttacaatggctggctgctagcctgatggaagctatcaatatgggggaggagatgaactgattgggatagactcctggaagaggcatgtgggcggcgattgatgatagaactgacaagagaggggaggagtaacacgccctaatttcatgactactagatgcatacatctgcgaagtgactgaggaaaatactgatctatgaacccacgcaccacaaaactatgtgtacagcgatgaa

SEQ ID NO: 84438 - DNA, 670 bp, Glycine max
  Clone ID: PAT_MRT3847_47263C.1
caagtcctcaagcgggtgcagcagcaccacagcttgtggtcctcgccggaatctgggtcccaccggaatatgccacggcggcacacacagccacccctactatttacggcgcccacccaacctctcacgcgccgccgccacattaatgcgccgccactcccatgccacaagacttttacaccgcggcgccgccccagccgctgcttccgccacctccgcagcaccacaacgctttgcaccacctgcacatgtacaaggcggcgtcccacggccatggatcgccggaatctgacgttcccggcggcggggagcggtcggagagtattgaggatggcaagtcggagagtagcagctggaagggggagagtggggagaacgaaggggagaggaaagggattggtgaagagagcaatgggagtgagatcactctcaaattctagggttttagaattagggttttgcttgcatcccatcatcacatactaagttaccaacccatgcatgttcaactactattcattattgttggggaaaaaaaacaaactaagtagaacaaaatatccttggtggtactttttgcctatatttctgtggtaaaaaggcataaaactggacatttgttttgtattttttgctttaccgtatggaaggtattgatgctgttaaatgt

SEQ ID NO: 84439 - DNA, 124 bp, Glycine max
  Clone ID: PAT_MRT3847_47264C.1
gatgagagcgcggttcccattactgccgctgggagccgtactcctggcatcagctgctgtctcatttgacattgcgtattgcgataagcagaaccccagtcacaacaagtgcctgcgaagttgc

SEQ ID NO: 84440 - DNA, 440 bp, Glycine max
  Clone ID: PAT_MRT3847_47265C.1
tactcactagtcgcccttcgtcctttttttttattatgtattaataaaaagtatgtgaggaaagacgtaaaatgatttttgtttactactattttgaatttgtttgtggttttagcgttataactattgcaccaaccattgctaataataatataatggatgtaattattaatcatattgaataattaccatacaatatgtttcctatacttgtaatatgagaagtttctgccaaatacccgtctcatgagacagatgttacattcgttaatttttttttaatgctaaaatggtaagataaattattagtcattaccatgtatggtaaaatattattaacaaaataattaaagaaactaccgactaaaatggctaaaggtgtactgttaatgctatctattaatagttcagatattctaacatttatttacatcaaattt

SEQ ID NO: 84441 - DNA, 1015 bp, Glycine max
  unsure (1)..(1015): unsure at all n locations
  Clone ID: PAT_MRT3847_47266C.1
gcagccgccaccacgtaaatgtggacaattcagatattgtccagctcatgacacatgttgttgactctatcagttcttttatttgcttagtctcatgggattttcaaccatatattgccgtgtgttacgatggagattgctcagggattgaagatgatattacacatgcaattttggtggtgggtaatggctcagagggtgatgaagattactggattgtgaagaattcatggggaacctcatggggaatggaagggtacatttatattagaaggaatactaatttaaaatatggcgtgtgtgcaatcaactacatggcctcttatcctaccaaagagcctactgcaccatccccaagtagtcctccttcaccaccatcatcaccaccgccttcaccattaacaccaccggcactaccgccaccttcaccaccggcaacaccgccactttctccaccattaccgccagcaacaccgccacccctcccaccacctccacctagtaaatgtggacaattctcatattgtccagctcatgagacatgttgctgcctttatgagttctttggtttctgcttagtttatggttgttgtgaatataagaatgctgtgtgttgcatttggaccgagtactgttgcccaagtgattaccccatttgtgatattagagatggactctgtctccagaagcatggagatttaatgggtatggctgcgagaagacgacagaagggaaggcacaagttaccatggactaaatttgaacaaacagaaaagacatatcatcaccttcagacggggaggaatgcttttgctgcagtgctttgaatttaattttttctcctcagctgttagtatctctaatgaaaaatattttatgaacatccaatgtgttatatgacacccagtgaaaaaggaaaaagagtaaaaatatatgtattagaagttatattatatgatctaatgggaggaaacagataaagaaaaataataaattgttaacgtagtgttcanna

SEQ ID NO: 84442 - DNA, 412 bp, Glycine max
  Clone ID: PAT_MRT3847_47267C.1
gtggatgatgtgccggactagattaacgggtcgacgcgctgagtatactgcgggcgggctgtccttttttttttttttaggttgactgcatatgatggcttttatattatggaaacccttttgagttttagaaagtgggcatgaaagacataacgtgaacaatggggctggagagaaactttaacgggtaccgagggaaaaagcatgaagagcaaatcccagagctcatacgtaccatacacgcaaacatagagagcgccttatatagcccgcagtttgctaagatctaccattgtgacaaacggattggatgataggcaacgaggtgatactttaacatgcaacttacaacagcaagtacactgccttgagaaactcaagctactctgggacagactggacctggactatg

SEQ ID NO: 84443 - DNA, 177 bp, Glycine max
  Clone ID: PAT_MRT3847_47268C.1
gctttgctgacaaggaaggggttctagaataaaaccccacatttgtatgatctgatgcagcatgctcttctgctctcatcatcaatggcgacactaattcctccccattctagcggtactactactactgtcgtctgctgcgaccactatggagactccttggacctcccacgtaca

SEQ ID NO: 84444 - DNA, 440 bp, Glycine max
  unsure (1)..(440): unsure at all n locations
  Clone ID: PAT_MRT3847_47269C.1
agaacaaaaacggtggaacccagataaaaaatcggagatacaacaaccataccggacgggaacaaccatataaaaagagacaccaaaaggaaaataataggcgataaaaaaacatggcatagcatggaaaaccctggggaaaaccaaatgaaacaagattgatgcaaaaacaagtataagacggttagggaaatacaaaagggcaatgaaaaaaagaccctccaaaaaggtcgggaatgacaagaggtaaagggaggggctccagggggggtgtaaaatgagcaaagaaagttggaattgaccctanaaggaatttaatgatttgaggctttgtaaatgagtttgtcaacaatgcaggatttgacttaaagagacccttgggcggaatcacaggactataggagctaagaggaaaagtttagggatttccagggggcatt

SEQ ID NO: 84445 - DNA, 494 bp, Glycine max
  Clone ID: PAT_MRT3847_4726C.1
tcaaaacccaaaggcttgaggaactggctattaagcagtcaaggcagttgattccagtaacaccatcaatgcctaaggctttggttaacaattctgagaaatcaaaacccaagacagcagtcagaaatgctgagatgaatatgtctgtcaagagcatgccgcaacaaccctctgctctgcacatcgttaatcattctgttcgcagtggaaatgccaaagttgatgctccgaaaacatctgggaaatttactgatctcaaatcagtggtgtgggaaaatggtgtttcccctactacacctaaggatccttcaagccaaacaaatcactctaacattagaactggaaataatcttgctgttgcttcagcagctgcttctacacctttgaagaagaccaacaacatcaaatctcccacagagcggaagccaatttctttggatcagaaactagggtccactatggataagaaaaattctatttctcaagtgcagagc

SEQ ID NO: 84446 - DNA, 153 bp, Glycine max
  Clone ID: PAT_MRT3847_47270C.1
ggtcgccatcccctttcacattttatcttgtgcattgagcatctgatgcggctcgcgccatggtggctaccatcatcaccacatgcgagccgtcactcgttgtcggtcttctgtcagtttcacgtttgctgcgtgttgcgtctgatacccttc

SEQ ID NO: 84447 - DNA, 172 bp, Glycine max
  unsure (1)..(172): unsure at all n locations
  Clone ID: PAT_MRT3847_47271C.1
ggacnaccnnnnncnncnnccactaancaccanagagagganaagcaggcaagnacccancgagagcnncaaaccacncaaagcggggaaaaancccccggggccccacccnnnnccaancanaggaaacanannggagcncggcaaccagccccaccaagcacnngccaaa

SEQ ID NO: 84448 - DNA, 706 bp, Glycine max
  unsure (1)..(706): unsure at all n locations
  Clone ID: PAT_MRT3847_47272C.1
aggaatactaaatataaaaaaaggaatactaaataaagtaaagttgttacgaatgggtcattggggtgataagtgagtatgtctgcatttacttatttaaatattcatagagaaaattgtaaacccctctcgtctccccaccattgcgtattgttacttatcgggtatagaataaatctgtttctttttatttctacaaatatgattgttccattttacgagaaaatctaatgaaaggctagagtccataatataaatttttcaagtgcaataaagttacatagtgtctattttttgttgatataaggggtattttcatgggtttaccttggtatcgtgttcatactgttgtattaaatgatccaggccgtttgctttctgttcatataatgcacacagctctggttgctggttgggccggttcgatggctctatatgaattagcagtttttgatccctctgaccctgttcttgacccaatgtggagacagggtatgttcgttatacctttcatgactcgtttaggaataaccaattcgtggggcggttggaatatcacaggagggactataacgaatccgggtatttggagttacgaaggtgtggccggagcacatattgtgttttcgggcttgtgctttttagcggctatttggcattgggtttattgggatctanaaatcttttgtgatgaacgtactggaaa

SEQ ID NO: 84449 - DNA, 240 bp, Glycine max
  Clone ID: PAT_MRT3847_47273C.1
ccccgcctattcaaccgcccacgcgttcgcccacgcgagggctcatggtttaattttcttcttccccgtctattttacgcccctcctctgatctttgctctctccactctgctttcactgagagaaacaaaaaaaaagcttgaagaaaatccgtaactcgaacctacttttattattcgtgccggcagactcggcggagggttcattcgcagagcaaaatactttccgctgcttaccacc

SEQ ID NO: 84450 - DNA, 173 bp, Glycine max
  Clone ID: PAT_MRT3847_47274C.1
tcgtactgaccaaaatatgaccattttattgaggtgtatcttttaaaccactggctcacagctaacacttcttctctttctaacaaaaatcgattctgaacacacgcggattctcgaaaagatccaattttattgtatcgttcttaggtaataaataaatttatttatatgtt

SEQ ID NO: 84451 - DNA, 178 bp, Glycine max
  Clone ID: PAT_MRT3847_47275C.1
gtttgtgctagagaagaagttagcatcttctcaagtaccagaagatgaacagatcaatctattgaaggatttagagctcaaggaaaccgagtatatgcggttaaaaagacataaaatatgtgttgatgattttgaccttctaaccattattggcaggggagcctttgggaggttatgc

SEQ ID NO: 84452 - DNA, 203 bp, Glycine max
  Clone ID: PAT_MRT3847_47276C.1
gacagaaagagaaagcaatggcttctgtggcaagctgagctgatgctcaaccatctactgtcaagggcctcgctggaactaagctctatttcaagccctttcgacagaactttatacccaagactatcaagagtggtgccgatgaaacaaagtacggggacgagagagtgtacttcgatttggaggatctatgcaacactact

SEQ ID NO: 84453 - DNA, 259 bp, Glycine max
  Clone ID: PAT_MRT3847_47277C.1
gtagtactgcagtgattgtatgatatccttgtcaaaatggttttgttttcatttacaatagccccaactccagtagctgatgatcatgagcatccagaaagtgccaaaacagtaagctcgaacacagttcagatgcgaacgtacaggcaatcccaacctatacacacagcctgaggatcttcattcttttttgagaagatgtttcatagcttcacaacaggcgcacaacatatttccgaggccatcagaattatatcca

SEQ ID NO: 84454 - DNA, 227 bp, Glycine max
  Clone ID: PAT_MRT3847_47278C.1
gtggttaggacctaacggttttggacgatttatttggtccgaaaggccatagctctggggggatagtcttattacgaatcctccttccatttagcgctggatctccagacgttgactacgtccgtgaatgctttcgtgcactacgcgatctacttcaaccgcgtctgcatctgctccaagaaatactgccccaattccatgagaagccaaagcacattcccggactg

SEQ ID NO: 84455 - DNA, 1729 bp, Glycine max
  unsure (1)..(1729): unsure at all n locations
  Clone ID: PAT_MRT3847_47279C.1
tcgggacatgactctcggcaacggatatctcggctcttgcatcgatgaagaacgtagcgaaatgcgatacttggtgtgaattgcagaatcccgtgaaccatcgagtctttgaacgcaagttgcgcccgaagccattaggccgagggcacgcctgcctgggtgtcacacacactgtgtctctcttgtgcgcctcttccatctgcaacaaaggttgttctatacccattgggttcgattaggttttccctttttccgaaactttgctttctttttcgttgtttttttcatcttctttcatttttgtatatcgatcatgtgatgagaaaaaaactgcaacaatatgattggattcgttccctgattcctagtatttaagtctctgatgattaactctcctctgtttttttttttaaattaattttcgagttctttttcagttttctaaatttccaattttttctcagtgttcgattagagcaaacatcaaagagagatgatgatgtttacattggtccgtgtttctgaatcaccgtgaccgacaacccttaccaatttctgatctcaaattgcaattttttgttgttgtatttgtcaatgtttttggttaaattttttcgtggctttgtctcagtgatttaattgccttagtttagtatacatcagtgattttttttgcttcagtttcgttttttgaatctcaattttggtttttaaactttggattttgattttgagttctgcggtgaagaattagaatcaaattcacatgtcagacttcagagattttcgaatcaatgagaatgacaattctgttacagagcagaatgtgcaacttaatttgttgtttaatttatgaatttgttttgtattgacgggagatttctgagaaggagtctcatgcttttatgtagagcaaacttatattatgtgtttgcatatttctcaagtaaccgtcacaaatcaatactcacggcgtcgacggcgcggccctcgcgggttgcatctccgccggagtagtctcatattccattgccttgtgaagcggtgtcgccgcctttaccatttgggactggccatgagacgaacattacaatccgttttttcaatttatcttttttagaacatagggtagtacttgctctgaaatttgaaataatattttacttattttgtttagggaggttcattgtgtatatcaaatttaaactcaataaattgttagggtttttatgctggcgggaatggaacagtagaacttatgttctttgttctttttaattgctttctgcagacaattaattcaaagacattttgataaacaactgttccaatatcgactcttgtggatgagtagattgcttgtaaataaaaggagctgcaagaaagtgtggcaggggagttcaatttggagaaatggaacgccacaactgcttgtacatggagctgcatatcttctgtatgataggttgcacacttgatatgattatcacattgctgatgtttgttcaatttgtggaagcatgcttacaacaacattcatcaaaccttaaaattggccagttcgtaagattggtgggcttccccctggaagagttccagaaaagggcattagtcatacaaaattanggtttatgattccttagtctctgtttcactttcgaattttgctttcacattatgcttcgctatctggtcgatgtggattaacttgattcccatttgattcgtt

SEQ ID NO: 84456 - DNA, 298 bp, Glycine max
  Clone ID: PAT_MRT3847_4727C.1
cccctaagggcatttagagttttaaccttttaattttttaccccaattgcttttttttgactcaaattccaaaccacaaaaacaattctttgataagttatcccttcaggggaaaacaaaaaaaacttaaatgttcactaattttatttgactaaggttaaaaaattcaaaaaatgggtagaaactggttaaaaaaactggcttgataatttatttatccataacaaagggttccagtttacaaaaaacctcctacagctcgggtgtaaatggaaatcctttgcaaaagctttttttt

SEQ ID NO: 84457 - DNA, 1470 bp, Glycine max
  Clone ID: PAT_MRT3847_47280C.1
gagaaaactctaaagtctacactccgccgaattggaacaccacacacacagtgctgtcgtgtaattcccaaaataaataacgaacaagaaccctaattttcattgcaattgtgttggtagggagtgtagggcagattgcgtagaatcggaagatggaagaggaagagcacgaggtgtacggaggagagatccctgacgagggagagatggaaggagacattgacatgtccgccgccgacgatgaagccgccgtcgacgatgacgccgccgtcaaggagctcgacgagatgaagcgccgattgaaggaaatggaagaggaagccgcagcgcttcgcgagatgcaagccaaggtcgagaaggagattggcagcgttcaagatcctgctaatgcagctgcttctcaggcaaacaaggaggaggcagatgctcggtctgtttttgttggcaatgttgattatgcatgcacaccagaagaagtgcagcaacactttcagtcctgtggtactgtaaacagggtcactatcctgacagacaagtttggccagcctaaaggttttgcttatgtggaatttgttgaagctgaggctgttcaagaggctctcctgttgaatgaatctgaattgcatggccgtcaattgaaggttttgcctaagaggaccaatgttcctggaatgaaacaatatcgtcctaggtgctttaatccttacatggcgtatggcttcaggaggccatatactccttacttgtattccccttatgggtatgggaaggttcctaggtttagaaggccaaatcgttacatgccgtactactagaagtctcattggaacgtgttacattgggaagatggtgcatcctggagcagaagttttttcatttgggcatttgacactatcttcattcagtattatatagtgatggagaatattaccgtgaatttgtcttaggatggtcttgaacctacatttttcttgcgtagttcttggaagatggtttacaattgccattgaatattatgttagtgacttttcggtctttatagtttatactaacctaagatgtacccttcggtaaaatttgatcaaattagagattgaaatatttatggcgttttactggagcatttaggtcgtaagacaatttcgatctcccccccccccatagcagggtgtttagggaacagaaaggtgtaaggtggagtgtatgtgagaatgtgccctcttaaatacaaacatgtttatccaaacagagaaggaggagaccgaggaaaacttgcttaaagtgatttgaagctctaattctaggctggcttttgtgctgtatcaatgtgtctatgtccaaatatttgttgccacttttgatgttattgactgtcgatatgatctattaagctaagtgacagaggaaatgatttgtttctattcaggtgaggctgagaagaaagatttgagttgacttttagttaaaaat

SEQ ID NO: 84458 - DNA, 351 bp, Glycine max
  unsure (1)..(351): unsure at all n locations
  Clone ID: PAT_MRT3847_47281C.1
caaggcgngagcaagccggcgaagacaccgagcgggcaaggaacacaggggcccgggggcaaggccccagcgcacaggcggnacagaaaacagagggcgggcaacgcgcacagcggaggacagacatggcaaaaggaccagcacgnccacgaaacgactgcaaggggaccgcatatcacgggcactgcttgttactatgcaactgttgagcacatcacacagcgagtcagaatagccaaacagcctgagtattgatgcatatgttagcggtagcttaccatccttatttaccacagacagagaccaccaggtgcaccacctacggcaaaataatactattttgctgccatg

SEQ ID NO: 84459 - DNA, 382 bp, Glycine max
  Clone ID: PAT_MRT3847_47282C.1
ctagggtcaatatttatttgactaaggtaacaaaatgttggtaaattttgaacacatactgtctgtcgccgtttttaataactgcatttcggttgcttcttctgtctcttttgctttcttttgtttgtatttcccatcatcctcattctctatctctactcgagtgtgtcacactggaaccttttcttgttctttggtgtcattagtaggatgtatatctgtactccgtccttccaaattaggatgctttatattcgcgttctcctggttcttcacttcaatcagggtttcagctggctgcgcattttctacacttgtttggtctgtcacttggcgttgaccaaatgcctattataacatgttgcgtctcagctcaaacatg

SEQ ID NO: 84460 - DNA, 116 bp, Glycine max
  Clone ID: PAT_MRT3847_47283C.1
actaacatttactaaacaccacaccaattgtagtaggtgctgtgatatatgtctggtgtgggacagggattggtccctgagctaacaatcactgtagcaacagatatgctcccaca

SEQ ID NO: 84461 - DNA, 358 bp, Glycine max
  Clone ID: PAT_MRT3847_47284C.1
gggggggggggcaactttttattttaaaaaccccaccccatacacccttgttttataaaaaaccctaaacccagaacagattggggggtgacccaaaagggagggaaccctatacaaaaaaaaaaggcaccccctgaaagaaaaaaacccctgagcaaaaaaaaaaaaaccccattcaaaaaaaaggtgatggtgtataaacaaaacccccgcaaaaaaatgatgcccaattttttgtattaaaaaaaaaaaacaccccattttttaaggtgtgggactaaaaaaaaatccttctcggggggggagaagttttaaaaaaatatctccggggctgggggacacatttttacttggaaat

SEQ ID NO: 84462 - DNA, 509 bp, Glycine max
  Clone ID: PAT_MRT3847_47285C.1
aggaaggtttgccgtcatcactgtatgacgtcctccttctttggggggggggggggggggggggggggaaataagaatggggatagtagaaaggtggttaaaagaaggagataaaacgcataaccgcaaaatttcagtgcgttacggcttgatggaagaaaaatatatagtaggatgagcgcgagcctagatatctaggattgggctgcacacaggcactaaggcccgttgggagcttgttggaagttggaggttataaaacgtgagtagtttggcaaacggcgaaggctggtggtaaaaagccagggagataaaccgacgcgtaagagtgaggcgttaaatgaaaaagcgaacgatttggtggtttaagttgacgacgcgtttaagcggagggataaacctccgataaaagagcgagagataacgataagtagagactagaacggaataagaagtagatgggccgtgggatccacgtataggataccaaggaggaggtatgcaaattt

SEQ ID NO: 84463 - DNA, 482 bp, Glycine max
  Clone ID: PAT_MRT3847_47286C.1
cccacgcgtccgggggaagtgacggaagagaagaaggaagttgaagtgacggaagagaagaaggaagcggaagtgatagtagaagagaagaaggaagttgaagtgacggaagagaagaaggaagtggaagtgaccgaaggaaagaaagaagtggaagtgatcgaagagaagaaggaaacagaagtgacagaagaaaagaaagaagtggaagtagaagtgagggaagagaagaaggaaagtgaagtgaaagaagaagaaaaaggtcgggaggttgttccagaggagagtagcaagagtagtaaggtgactctgtctgggttgttgaattttatagatgggatttggtctgcttgtggaggtgagaggatcattgttttcacgacgaattatgtggagaaacttgaccctgctttgattaggagagggaggatggataagcacatagagatgtcttattgttgctatgatgcattcaaggtgct

SEQ ID NO: 84464 - DNA, 122 bp, Glycine max
  unsure (1)..(122): unsure at all n locations
  Clone ID: PAT_MRT3847_47287C.1
gtcagaactgttaccatttacagtaataatactgaaattctaacagagataagcatgcatttgccattatattatcttanaacaaatcctgttgatttagttatggtccccaacccccataa

SEQ ID NO: 84465 - DNA, 514 bp, Glycine max
  Clone ID: PAT_MRT3847_47288C.1
agaaatatcaactagtttacatggaattatttaaataaattgtgttaatttatgatgtgaaaatggactaatttgataaaagatttcattcttgtctgattatttgtcaaatttcacatttttattggagtcatcttctagttcttttttgccaatgtggatggtgctgatgaaaatgtctatgaaagtggataatgaaatcaatgtgaattgtaacaatttgaaggatattttactgttaattgggcgcaaagcataaaattgaatataatgaggaaaaattgtgattgacagttaacataatcatcaccttaactgcaatctcctttgctttcaactgcatcattatcaatttaattatgtattcacaagtttcccgtttaatttaaatactgtcatattcaaatgtagcttcctaccagataataacattggcaaatcgtacgaaaaattcattccattattccttgtatcaacacaaaaggaaattgtttttcttctcaactcctcaagt

SEQ ID NO: 84466 - DNA, 314 bp, Glycine max
  Clone ID: PAT_MRT3847_47289C.1
acacgtaccgaaagaactcttgcctgtttaggactctcaacttctcccacgagatcggctctctctggctatcgtgtaatctgtaagaaggagattgctacttcagaaacagccttaactctacttgcaaaagttcttcatctatcatactgcaatcgttatcgtccatggactagcagcaaaccctacactcctctactgctactactactcaattccataatctatttgactcgcactctactgactttactactgcagctgcttcttcctcaaatccctcactcttgaagtctccctacttaagcgcactc

SEQ ID NO: 84467 - DNA, 369 bp, Glycine max
  Clone ID: PAT_MRT3847_4728C.1
ctgtccaatatgtatcttctctgttacggtgcggtctaaaaaccatcggctggtctgatcaacagtggtggatacaccatctatgtttaaattcataataggccgtacaatgtgattaaaaactgcaattacacttaatcgattgattcaatccacactcgtgaatggaattgctcaactgccaatgttttctgttaagagtagctatatcaatcaattgccacatccacatttcccaaaataaactccttatccttcattgaagttattgttcataaagattacaccactcaagattttgcttgaatagtgctcatagatttcttcttccaatatccaaccctccaatccctcataatcttcaaaatt

SEQ ID NO: 84468 - DNA, 529 bp, Glycine max
  Clone ID: PAT_MRT3847_47290C.1
aatgtccaggtccgtcacagcgggtgggccggaagcagagcgcagagcatggcgaggttagaaaagcggccgccggaataataataggtagatcttgggggacttaaacgatcgcaagattgaagggcaccggccaatttgcaacgcaacaccaaagaggggtgcagccttgtggttataaaaaaacgcaaaatgagggccaggctagtaaaagccgccccgtggctaggtagaataaaaaaatggggcaggcgggcgcgcgctggctcgagctagcgcgtagcgcgcgaaaccaggacacggacattggccgcgacccaacccgagctgggacgccaaggtcagttacccggaaataagtttgccaaacaaggccacgtctggcactgaaacgcagcgtgctgaaacacgcgcggacaggcgagggatagcgtggtttagggctaggggtagactttggctgggtgacgggtaggcatggagcgcggtgttgggtggcaaggagtgtgtggttacagaagtagcatac

SEQ ID NO: 84469 - DNA, 630 bp, Glycine max
  Clone ID: PAT_MRT3847_47291C.1
ctcacttttgaagcatacaatgagaagtaactccacatgtttatttgttattagttgaagttcatgcagatgtggtaaaccccaatagatgtagaatgagatccacttcatttgatgggatctacatgcatattcaactaatagtgaagtagcaacaaattaagagagcccgagtgagcgaccttgctaaaagcttttcagcagtcaagagtgtgattggttcagaatcgtgttagaatatccaataaactaattttaggttgaaatcaattggaagattagttggaagaaggtgaacaagtatatactatatggatgcttctaagctatgttaattcatgtgctgtcctttaaatttccaaggaactgagtattcctttctcaatttcattctcaaaggttcagttcagaaaaagaaaaagtgttttctttgacgagagagaaagccatagcttaaaatgggaccaggcagtctaggcccaggaggccctcctggttggggtgcacctggcccaccaggcccaggacatttcggtgggttttgcgatatcattagcacttgcctcaacagcaaagaagatactatattaatatggatataagaaacacccagaagtttacaacggactg

SEQ ID NO: 84470 - DNA, 321 bp, Glycine max
  Clone ID: PAT_MRT3847_47292C.1
tcgcgatctaggactagctagttgcagcagctcaaaccttggcaatgtgaagccgttggcaaaggcgcagatatcattcacattccagcagtctagtgacgccaaacagatcttctagttgcagaagcctaaagggatggattgtgagagaggaacaatgttcggaggcgtgatttgattggggatccacgtaacttgaaaaggatgagagaagcccattgtcccatgggagctgatataactcactcactacaacaggctagtaggaagatgttggatgggggaggtgttgcaagcgggtgtcttatagaactaatacct

SEQ ID NO: 84471 - DNA, 376 bp, Glycine max
  Clone ID: PAT_MRT3847_47293C.1
tttatttttttttgacggggaatttctcatgcataaatgattcaaaatgcgggggggtttatacagacattgtacaaaccggtgcatttatctataattcactatcaatttgctcacaaaataattattaacatttcacaaagagatcaaatacagctacacagtttctaaatcaggaataatcatacactgatttgcactagtcatatgatacactagcaagtctaccacctagcacataactccctgcaggtggtataaatgcaacttcccatacctggactgaaagattgctcatggtgtgaacatatgccctcatgttaagatcccataaacttacagatttatcacttgaacctgtcgctaagggtgcaac

SEQ ID NO: 84472 - DNA, 283 bp, Glycine max
  Clone ID: PAT_MRT3847_47294C.1
ccaatgaaaggataagttgaaagctagtactcccattaccaaaacatggctagcggggacatgtcacatacaaccatttctatataacaatatacaaccaacttgttgaaagaaacaacatgcacaattcctgcacaaggggggcgagctaaatgtatctgacccattgttgagctgtgctttagggagccgatggcggagaagttgcaggtatcattcccaatagctggtgcatggtgatcccacagactgcacgctgctttggatactagttcatcaccca

SEQ ID NO: 84473 - DNA, 211 bp, Glycine max
  Clone ID: PAT_MRT3847_47295C.1
gtcttctcttgcattcgtatggagttatagactctggaggagccttattcggatccgagtgagcacactaacggcgggcaattcaacttgtttaagcttgatggggagtgcctcttaattttacccagggcttgcgcgttgccataaatttcctgatactatcatgctattgtatcgaaagggatgcgggactttatgccctacatcgtag

SEQ ID NO: 84474 - DNA, 332 bp, Glycine max
  Clone ID: PAT_MRT3847_47296C.1
cctaattatttgaattatctatatcaatggacagtgccctttggaagtggctaaatttggaagggggtggcctacccctcgcaaggactttatgatacggaaacagcactgcctaatattagaaagctgacaggttttgatcatgggaattcgttcactaatctcttgtcgtggatccacatcaaatgaggaatcttgcacacaagcttctcaacaagtattgtttattgcaatattattttaaataacattcttggcaacattttttattttctgtaatttatgaaacactacatcttgtatcaattattgttaatgtggtgggggtaaat

SEQ ID NO: 84475 - DNA, 414 bp, Glycine max
  Clone ID: PAT_MRT3847_47297C.1
cccacgtgtccgcccacgcgtccgtctgtgtccagtatagtaacatgtatacgtgagtaaaatcatttcagtgtacagttttcaccatcaaaaaaaaaaaaaaaaaaaaaaaaaaaaaaaaaaaaaaaaaaaaaaaaaaaaaaaaaaaaaaaaaaaaaaaaaaaaaaaaaaaaaaaaaaggtttaaaagagttgggggggcccgttttaaagaatccaagtttacaacccctttattgtgaaatctaaatttttttatagggccccctatttaaaattccctggcctgggaaaaccaaaacccctccgggaaaaaccctgttgtacccaaactaaatttccttaaagggcatcttctttaaaaggcttgaggcaatagccaatagccccttccaaaaggcccttaccaaaaatg

SEQ ID NO: 84476 - DNA, 233 bp, Glycine max
  Clone ID: PAT_MRT3847_47298C.1
gattaatcaatggcagattaaagggttggtcccccgtagacgtcgtcttgtattgtatcatagaatcccgatgttttggtgcatagatgaatatcatagcactgaaaactcctcttttcaatacgttgtgtctttatttgcttgttgaatgttgagaaaccaagctatgcatccaaaacaacacaatatgttgagtagtaatcagcatcgagaaacaaagcttgaatattgaa

SEQ ID NO: 84477 - DNA, 350 bp, Glycine max
  Clone ID: PAT_MRT3847_47299C.1
aaaaaaacgacaaaaagttgttttgaaaaacacgcaaaaattttacatttggttgtttattcttaaaatggttcggatcctaataccggaaagacgattatatatacttgacaccacacttgttatacgtgaacttcaataaattgcaactcgcatcttgattgtcaactaccataaatgatgtatgtaatgttccctattcaaactggaagatattaaagttttattaacagatctaaattgctcaattgtattattaacttattgtacaccatatattgtatcctccaacttaaattttattttgtgccagaaatttttatcaaaacttaacctattatttatcaaaa

SEQ ID NO: 84478 - DNA, 602 bp, Glycine max
  unsure (1)..(602): unsure at all n locations
  Clone ID: PAT_MRT3847_4729C.1
ggtccggnaatttcccggcgtcgacccacgcgtccgcggacgcgtgggctgtaatactacagaatggggcgcaaagagaagcagaacacgaaggcaatagaggaggaacgcgaccaagacaattttaatggcgcttcaacgccgccactcgttttcagcagcgacgacgacgaagccaaccaagatctcagcctcaagatcatcaaaaaggccatgcgaatgcgcaccgccaagcacgccccaaacgacgacgtttcgtctccgttttcgcagaaacctgatctcgcattgcccccaagcggcggtgtttcggatgggcccagcgcaatcgctgattcagaagtgatggaaaagaagaaaacggcgaagttgaaggtggaggctggggatcaaagtgttgttatagcggaggagcaagagatggaggagacaatcaatgctacagagaatcatgtggaaggaagaccagagataggtgaaatatggttctgcgaaagctgcttcggggtccgaggtattttgatccaccaataatagttggggagcatgttttaattgcggtgaggaaggtcatgctgctgtgaactggtcaacggtgaagc

SEQ ID NO: 84479 - DNA, 364 bp, Glycine max
  Clone ID: PAT_MRT3847_472C.1
gaagattggagcaagtctctgctgtagaaacgaagcccaataccacgaatccgagtcttggttgtttggataagacgctaaaaaacactaggaacatgcaagtggcgagatataagtgatctcaaaggaactgggcaaatgcatgatgataaacaaatcgagtgtgcatgaagatgctaatgaagatggctaacttggtgcatgggccatgggtcttggaaataagaatattgatgacgcggatatgcagagaggaactgcgccagactgaaattggaatgcgctggccagtgaaaaacgagtagtgtgatttgattggagcggcagaggcaaccgaaaggcagtggagagagataaacttgta

SEQ ID NO: 84480 - DNA, 630 bp, Glycine max
  unsure (1)..(630): unsure at all n locations
  Clone ID: PAT_MRT3847_47300C.1
tgaggattttcttcatgtttcatgcttgatgcctcttgcttttaataagatgacttctttgtgcctttagacatagggtgtgtttgggacagttgtgaaaattagaatacttcaataattgatcataatttggatcagtttttgttgggtaagtttgctgaaaagtaattttaagatattgggggggatatcctcatttaaaatctttacatagtaaattatgaaaaatggtattatgtgaaagggacacacacagcttttgggaaatttagagggcacaatattattggattatggaagtcctgctggaataaaaagattactgtgataaaccttagattctttaaataatataccattaccttatttgttgagctattattactttgaatttgggattacttctcttgatctaactattgttttaaatattattttatgattatattgntttctttaaatgcctactgtagtgattcaaaatttgtttgaaattttactgacatcggtttgctattcagtatttataaaattaaaagcagtaaacttacaagatacaaaaaattactttgcttaaacagtttgagtgtgaagaggatatgtatatgtatgtgtgaagtgtctgtctgt

SEQ ID NO: 84481 - DNA, 316 bp, Glycine max
  unsure (1)..(316): unsure at all n locations
  Clone ID: PAT_MRT3847_47301C.1
naancacacncacacgnacgnaancacaaaanncagcncnancaaacacncacacccaaacnacacnacnacaaaaannccaacnanancaanancnacancncncnacanacanncnnaanacancaccncccananacccnaacaaanannacccaancaannccccacacaaaanacaaaaaacnacncnacccnanaacnncacacaannccacacnaaanacnccaaaccncnacnanaancaananannnncnannanannnancacanaaccncannncanaancacaccanacaaanccnancaaacg

SEQ ID NO: 84482 - DNA, 102 bp, Glycine max
  Clone ID: PAT_MRT3847_47302C.1
gacgactctgcacgcgcacccaagctaggaatgaggctcgattttgacctcaatgccttcaaagaaaatgtcttatcgagcctttacctcagagatggaacg

SEQ ID NO: 84483 - DNA, 485 bp, Glycine max
  Clone ID: PAT_MRT3847_47303C.1
cataatattaaaagctccccaaggcaccgaaatggaggatgtacaacaagagccagctcagactcctaagaaaagcaatgtccaagaaagtgacattcaatttaggtgcttagaccaagtggattctttaggattgattctcatcactaaccggtcaaggtacctgataaactggctggtgaactcaatgttgaagcttaagcatcccaacacacaaggggtttctttggtcaagatttatggtccaaaggtgaaatttgatagagggcctgctttggcattcaatatatttgattggaaaggtgaaagggttgagcctgctcttgtccagaaacttgctgataggagcaacatatctatcagctatgcatttctgcatcatatttggtttgcagataagtatgcacaagagaaaggaagagtcctacataccacagtggttggagaccaagaagtggtgacaacaaccaacaagaagaaagata

SEQ ID NO: 84484 - DNA, 916 bp, Glycine max
  Clone ID: PAT_MRT3847_47304C.1
ttgtttattgttccgatatatttattatatatagttacggatccgaaatattagattcatataatgatggcaaatacaatctttactcaaacgattacttgcttagccgtagggaaatatccagcttcaaatgttgatcatcccaatattcatccccttcgattcaactccaaactcaaagaaaataatcgcttttcagttcctgaaaagaacctagccttgagatttcaaaatggttccacaagaaagatgaatatggctgtctacgctagcataataccaggagaccctattgatccttctcctggttctcctggttcttggaaaatttggattattggcacaatattcacgatacttgtatcctttacgaggggcaaatggggacccttgctacaattgaaagagaaagttgaaacaacaatagacgaagcacaacgagtagtagacattatagaggacgtggctgagggggtagataaggtggcagaagaggctgtgaagcatcttcccgatggaaaatttcgtgatgctgttgaatttgttgaaaaagtagctgaagatatagataagggtgcagaacgtgcagaagatgcattagaaaaggtggagaacatggaaaaggagtttgagtccttcattgaatcaaccactcatcatcaggaaaattccgtcacaacgaccgcagaagcaaaggaacagaagtagaaaaagacaccgttgctgaccatggcgacaattcatgtactaaaaaaattcaacacgacatttcaatatttttttaaaccatacttgtacaaatttcccctcctaagatataattcttttctcgcgcaaaaaaaaaaaaaaaaaaaaaaaaaaaaaaaaaaaaaaaaaaaaaaaaaaaaaaaaaaaaaaaaaaaaaaaaaaaaaaaaa

SEQ ID NO: 84485 - DNA, 478 bp, Glycine max
  Clone ID: PAT_MRT3847_47305C.1
ctaattcatccaggaatatggctgtctacgctagcataataccaggagaccctattgatccttctcctgggtctcctggttcttggtaatttatttcctcaccaatctctcatcatatatgtgacattatttacttgtgtttttttttatatagtttaatttgacttggaaatagacaaacttaaaaaatgtattctctcccaggaaaatttggattattggcacaatattcacgatacttgtatcctttacgaggggcaaatggggacccttgctacaattgaaagagaaagttgaaacaacaatagacgaagcacaacgagtagtagacattatagaggacgtggctgagggggtagataaggtggcagaagaggctgtgaagcatcttcccgatggaaaatttcgtgatgctgttgaatttgttgaaaaagtagctgaagatatagataagcgtgcagaacgtgcagaagatgca

SEQ ID NO: 84486 - DNA, 274 bp, Glycine max
  unsure (1)..(274): unsure at all n locations
  Clone ID: PAT_MRT3847_47306C.1
ggcggcggcggcggtggcgcctcctccgccggcggtgagcttgatgaacccgacggagaattcggtgaagttcgcgcctcctccttctttggctgcgtcgcggagtgaagagaaagagagcaaaagcaaatcgtcttgccataatgggttgtgtaagcaaaacatgggagcggntgctggggttgttactgctgggggcatttgtttgggcttttttgctggggccctggattgggtttaactctaaaaagttaaaccgtgttaaaaagttgga

SEQ ID NO: 84487 - DNA, 277 bp, Glycine max
  Clone ID: PAT_MRT3847_47307C.1
acgctttcgcgctctttttttgctgggacagtgagaatactttggcacataattcttctgcagaattgctctcttgccaattaggttactagttatctggccaatctttatttctggacggagctccaattaattgaggagttcttcgtcaaccaattcacatcactgaaggatattatgtctgaaagcaagatgtcagcattgaatatgatgcatgtacatttgcaaatgattgtggatcattgagtgttggcaaggttgtaaatcacattcatat

SEQ ID NO: 84488 - DNA, 1601 bp, Glycine max
  Clone ID: PAT_MRT3847_47308C.1
gggtagagcaaggcgagagcattgccgccccgcgctcgctgcctctggcttcccggtcgggccctgcctctggccctgttccggcgcccagcgctgtggccgtcgtcaccgcaagtgcgccttggccttcgccggatccttccagccccggaatccggattcccttgggcgtgctgtccttccctgcccccccccccccctcccttgcttcgggtgttggtggttggggcgttccttttccccatctgtccggcttaggtgcccctatgcttcgtggccttggtcagttcaatagacacttgaagtggcatgccacaagagaaagcgaagaaaatggtttaattagtgcatctagatggtatctgaagtcaaatgattggattcttggcaaggctgagtatccatctgagaatgagtttactgattctgtagatacatccacgcgtccggcagacaaaagtcaagaggatgctatggttctagcagatgaaaaacaatgcttgtgtgtgttgtgtggtgagctatttgaagatttttactgtcaggaaactggtgagtggatgttcaaaggggctgtttacctggccaactctgatagcaaaagtgagatgggaattagagatgtgagtactggaaggggtcctatcattcatgcaagttgcttatcagataactcagtttccagtgtcctcgagacgggacaggattaaagcaagtgtagagcattggagctctgctgtagcaagaacttggaagccgattgaacccaggtttactttgcattttccaaatttgatggctcttgatgctaaatttatttctctaattggtttctagagctgtcaaacaaattttgtgcactttttttgttttccttagtttcttttgtactcaggaagaagaggaaattccttagtgttcaaagtatataaatgcgatagtttttgcagctcaacttttgctcattgatgtggttgcctaacttcattttaaatgaagtggatttttgttttctgaacagcatctggttgtaatatggagcaaagcactatggccatagttatcgcaaatgttggatggcattctctgtatcattggaatcgcaacaattctgattccctagtatgtgctttccttcccttcccccccccccccctcctttgctaggggttttggaatttggggctttcctaatatccaaatttcagttttatgaacaacaatggatcttggttttagtttggccgagtactgagattttccttattggtggtcaatgaagaaaaagatgtacattgccgagccattattgtttaatgttgattctgccaagtacaccatttagttggagaattaggtaccctgatgaatgatactcgcacaacgtttgtttgtacaagaaatttctgcaacgcgtagtttgcgttttgatttttttgccatttacttttgctactgtcacatttctccctgttccttgttaaagagttgatatgaaaaggttttttttgcattactttctgcacattataatttgagacgtactcgagtgcgaggttatgtgtttcttgtcgacgtgcaagaagcattttttttttgta

SEQ ID NO: 84489 - DNA, 443 bp, Glycine max
  unsure (1)..(443): unsure at all n locations
  Clone ID: PAT_MRT3847_47309C.1
ccgcgtcgtngcttgtttctcgtgagcggccgctcgcgtcctttgtttgtngtttggttgtggtttgtttcggctcattccttttgtgtntgattgggcccggttttttgcnnttnttctctgcttacgagtgtccattgcttcgggttgcggtttgcgtgccttccgtgcttcncntgctgcgggtggttcaggactccatttgctcgcctcgcgggtngtttccttaccttcacgagcgggatcgcgtccttcctttcgagcctgcgcacntgcttcntgagcgtctcggttggctgcggcgcctggtgcgtttccccgggggtggcctggggttcctccgccgngttggggggcggggtcgtgcccgggggtctcggtcggggcgggcgtgtgccgggcgtgggtgcctcccgacgctgcaggcggggcgcctggggggg

SEQ ID NO: 84490 - DNA, 233 bp, Glycine max
  Clone ID: PAT_MRT3847_4730C.1
ataaacccggtaaaattggggttggttttttccctgcgggcccggggaaaaacgctggtaagggccaaaatggcttgggggggttttgttaaaaagatggtttttcccaaactttttcccctaaagccccctttggcacttaacaagttggtgtggggggcggaaaccccccccacccacttttgctttttggtcacaaaaaaaccgcgcatttaatttttttttttcccaaa

SEQ ID NO: 84491 - DNA, 348 bp, Glycine max
  Clone ID: PAT_MRT3847_47310C.1
cgcttcgggcgaccactcacccagaccatcgagtgacgagctattctatggaagtactactccataactaattagtcgtcttcctgctttgagctcttaaattacggagactccaatacctctagtaaatctcctacggttaggttggttggctataaacagctccttcgttttccttgggagggcgtgtatgaaagagggaggagcggggtattgccaagcgaccaccgtgctgtatctttctgaccaggacatggttgccagagatagcgtcatcaaagctccaaggtatgccctcggcaagatatgggaggctcttatggccgggggggtcatcggaggagtgcc

SEQ ID NO: 84492 - DNA, 312 bp, Glycine max
  Clone ID: PAT_MRT3847_47311C.1
ttttacatgcgcaaaaagaaagaagccgttatatagaacgcaatttaacagacacatttattcaagcggaggcattaattcaagttgggtggatgtgagctaatcagcgacacccatctatgattccgcaatggcagccatcagactttattcaacaagcgtgggatcggcgtgcatgcttggaatcttatctaaaatgatcgcaacccatgtgcccatattttgataatctgactgagattgggacctttatttagggttcaatgtgcaaactcctaacaaataaaaggaagctgggttggattcccaatc

SEQ ID NO: 84493 - DNA, 322 bp, Glycine max
  Clone ID: PAT_MRT3847_47312C.1
ctcgagccggtagacccaagttacctgaaaactcttggtcaggttcattctggatggaattttggtggaataggtgagcttgttgataattcccgagatgcccaagcaactaaaaaggacatttttgtagatctgatccacctaaaaaaatctgggaaggatgtccctatgctgtcagttattgatgatggtaatgggatgaaccatgccgagggtattaaaatggtatcttttgggcacaaaccatcttattaagatgaccaggatcacattggccagtttggtggtggattcaaaactggagccatgaagcttgggaggg

SEQ ID NO: 84494 - DNA, 400 bp, Glycine max
  Clone ID: PAT_MRT3847_47313C.1
ttggtgatggttccgacctaattggccagatttgcaatgaaaacccagagaagaagattgaatgcacgaatattctaagagcagatcctacagtcctgggtgcaaaaaatcttcttcaactttcggaggcaatcttgaacttggccgtgaataagacagaaaaagctgaagattttctaaagggattggcgaacacaacagatgttccggccattgcaaattgtgcactttattatgaaaatgcggttgaacgctttatgaattctttgcaaaagttgaaatgccaagatcttaaagtggctaactatttggccgccattgctggtgatgaaccatcgtcatgtgagacagaattgagtgctgcacatattgttaaccatgcaatttctgctgttaacca

SEQ ID NO: 84495 - DNA, 739 bp, Glycine max
  unsure (1)..(739): unsure at all n locations
  Clone ID: PAT_MRT3847_47314C.1
cacgcgtccgggaaagtaaaactagggggctaggatgtcctccaaaagaaaaggacatcataaacaagaacaaaatgcaccaaggtttagtcataatgtaaaatggtcactactcgaataaaccatgagaagaatgttatgtcataaacctaatcctatcccataatgagttgaagagatcaacaaggccttaaagatgtgagcattcagcttcaactaaatgcaccaaagtagaatttgcatgttttctgccaaaacctctttaacaaataatcaaatcattttcttttagaaacataccctgaataaaactaatgaatgtgtctgcttgcacttatttttttacttaaaaacatttcaattttatatggatgataattatctttaaacttttactattgaaaaagggaatacaataaaattaggaaccatctaacattgaattcctacaatgattttttgttccacgatcaaatgtatatacaatacttttaaaatatgtaagccatacatttggcgcaaaaaataaacaagaaaattgttatacttaaccagatttgataaatcttggcactcattcaactttgaacatatttggtttgctgtcctaaatcctaattgttttaggcaatgtacacaaacgtcagaatcagataacaaaggggagatgggaagttttaataacaataacaccaactttttccctgaagatttatatatanatgattttcatatgtat

SEQ ID NO: 84496 - DNA, 2198 bp, Glycine max
  Clone ID: PAT_MRT3847_47315C.1
ggtccggattcccgggtcgacccacgcgtccgatcgttcttgtttttgatttgtcagttccgtgatgctttgggtatatttgtcatttaattttcattgagtgtcagggtttatccattttcggggaagtgtgtggtgttttgttgattttgttttgttcttagatgattgatttttgtgtttaaaaatggcagattaagtttcagtagtaatgggtaaggaaaaggttcacattaacatcgtggtcattggccatgtcgactctgggaagtcaaccaccaccggtcaccttatctacaagctcggaggtattgacaagcgtgtcatcgagagattcgagaaggaagctgctgagatgaataagaggtctttcaagtatgcctgggtgcttgacaagctcaaggctgagcgtgaaagaggaatcaccattgatattgctctgtggaagtttgagaccacaaagtactactgcacagtcattgatgcccctggacatagggatttcatcaagaacatgattactggaacatcccaagctgactgtgctgttcttattattgattccaccactggtggttttgaagctggtatttccaaggatggacagactcgtgagcatgctctccttgcattcactcttggtgtgaggcagatgatttgctgctgcaacaagatggatgccactacacctaagtactccaaggcaaggtacgatgaaattgtcaaggaagtttcttcctacatgaagaaggtcggatacaaccctgacaaaattccttttgttcccatctctggttttgagggagataacatgattgagaggtctacaaaccttgactggtacaagggtccaacccttcttgaggcccttgatcagatcaatgagcccaagaggccatcggacaagcctctccgattgccccttcaggatgtctacaagattggtgggataggaactgtgcctgttggacgggttgaaaccggtgtcttgaaacctggaatggtggttacctttgcaccaactggactaacaactgaagttaagtctgtggagatgcaccatgaaactctcactgaggcccatcctggtgacaatgtgggattcaatgttaagaatgttgctgtcaaggatctcaagcgtggttttgttgcgtctaactctaaggatgaccctgccaaggaggctgctaacttcacatcccaagttatcatcatgaaccaccctggacagattggaaatggctatgcacctgttcttgattgccacacctcccacattgccgtcaagtttgctgaactcttgaccaagattgacaggcgatctggtaaggaacttgagaaggagcccaaattcctgaagaatggtgatgctggtttggtcaagatgattcccaccaagcccatggtggttgaaaccttctccgagtatcctccacttggtcgttttgctgtgagagacatgcgtcaaactgtggctgtgggagtcatcaagagcgtcgagaagaaggaccctactggagctaaggtcaccaaggctgcacagaagaaggccaaatgaattgtgctggatggtttatcaaggaaactctattattatgactacaataaatggtttcttgttcgtagtacttcattttttcgtgtagggaacttgtttatcagattttgtgtcaggtttgctccgtcatctcgcaacttttgttcccagaactgggttcttgatcgacggtggcaaggctatttctttttcattgttatgctttgtttctattacaatgtgtctctgtaagaacaataagctgcatagtactagtcctatgctgcaggtttggcttttgaatttcaagtctatattgtgttgttataattattcttattttaaatcttttgtgggtcattcatgtggcggtgaaagatattctggagccagaatgttggaagcatttcaaatgtgattggtgagatctttaaagcttaccgtgtttgcttctggatcataactcaaaacctgcaacaaaatatgaagttatatggactagcccttactttgtttgtgagaatgtgaagcatgtcaaccaaacatgctatacggatcatttggtaatttatatggtaccaagacagatgtataaaaagagcccttattcaggttccctaattctaaaggcctagtttgctctaaaaaaaaaaaaaaaaaa

SEQ ID NO: 84497 - DNA, 271 bp, Glycine max
  unsure (1)..(271): unsure at all n locations
  Clone ID: PAT_MRT3847_47316C.1
cttcatcttttaagagnagtttaattttaggtacctcagaaaaagaggaggaattagcccaatcatgtgaagctgcgctcaaatcctctcccgattgtgctattaaaaagaaagatgtttatnccgtctccatatcaganagacaatgtgatgtggaacagnatgattctgctaagaaatcngtacnagtcaaagggaaaatgagtagagttactgcnaatgatgatgcttccacttccaatttagatcctgccatgttgaagagaaattc

SEQ ID NO: 84498 - DNA, 834 bp, Glycine max
  Clone ID: PAT_MRT3847_47317C.1
gcagtattgatttatattttgaaaattaagggaccagtgaaagtaatgcacaaaatagttcatttcatttgtatttctgcattttctacatattcaggtgcggggtcccttgcttttatacatttgaattgacaggatcttttgagatattagtgtcaaatggcctatgctattaggattacatacttgcaattcaacagctgtatgacaatctttgtcgttgtttgtgcagctttgaatgagactttggatgccttgaagtccggcgtttgaggcgtgctgtttccgaacttggcagggaatcccttcacgagttgcatggatcggcaacttgctattaaccaacaaatgttccagttacaacatcaacagcccagccagcacaaacattttctaactgcaaaatcaccataatcaggaagagatacagtcttggtcacaacagattcaaggcaatgaattgcatccccaggcacagattcagtaacagcagattcaacgcaatgcattgcatccccagccttaaattgcatagcattattgcctactaatggtgccaaatagtggaagcagaatacctttttttttcaaaccaatatcaaatacttttggacgtggagctggtgaggtatgagtataatcaatcgtacataagcagtgatctagcattagtttgcttgtagtttcataagatttgttcatcatctttatttaatttgttattttgactgttttacccgcatataaactcgaactattctattcttgttagtaaaccttattgtcatgaatacaacccacctttctctattgagagggtccatgttgttgcat

SEQ ID NO: 84499 - DNA, 354 bp, Glycine max
  unsure (1)..(354): unsure at all n locations
  Clone ID: PAT_MRT3847_47318C.1
cattgacaatcttcaccgacaccaccagcggagccagcagggcaagctcaaagagcggaagccaaccnngaccgccccccaggggaggacgacagacaagagggagccgcccacaccggggacaagaaaccgggagcccaggccccacggccaacacaaacgaaaagggcggcaacccccaaggaacggcaaccggagcnaccgggcgacaaaannccaagaggcgcgactacaacngacgagagaaggggaggcacagaacacgagggacatgaaccggcacccgggggaacncaaaaacatgccacgcccaagaggcccccagangaagaaaaaccgaccaaggcagcacaa

SEQ ID NO: 84500 - DNA, 538 bp, Glycine max
  unsure (1)..(538): unsure at all n locations
  Clone ID: PAT_MRT3847_47319C.1
ggctcgaggcattgtaggtggaattgatggcttcaggtttccaactcttcctcttctaataattctaatgttagctgtcatcttatccattgaatgctagggaaaactaaattttaaacaaatcataaatctacatacgttatttgtgcattattctttctcatttatattgctgcttgtgcatattttttgtggcttgtttcatgtctagcttacctagtggaataaagttttgatgttgttgtggtattaatttctgtatggttcttttttgagcaaactgtcaaaacctttttagcaactccttctatagctgcaatgagtcaatgactaacatgtggaagaagatatgaatgagtcatgaacacatttggtggatgtaacaggggtggtaactggaatactggtggtggttgtcacttggaaacattacctgatttaggctccttgccaccagtatctgacatccatttcagaaatgtcgctgatatcttgtcagaacgcatgaatanatcagaagttttgaatctggacttgc

SEQ ID NO: 84501 - DNA, 466 bp, Glycine max
  Clone ID: PAT_MRT3847_4731C.1
tggatgggcaccgccacgggaactgataccacatcgggtacactgcattttgagtgacaccatgcgcgatgtggacagctctccattaaccttgacgtggacgttaaaaaatgtgactccacagatggacttctcacacttttggtgcatctgaaccccacctgcacatgacggacattgggctccacacatgcaactagaggctttcgagaaaaatcatatttccgacaagggcctacaaccggtgagagtgaaaatacatgtatgtaagctctttagcgatgttgacccgcccaggactatgagaattccaatgagtttgcacagtcttgacattggccatgttaaacactccgtgtcacttcatgcataaacactctgaatcatcaaggaccaaatttttacaacgttacattccattactcagacaccaccaatcgtctttgtcagcaaaatatacatatat

SEQ ID NO: 84502 - DNA, 462 bp, Glycine max
  Clone ID: PAT_MRT3847_47320C.1
gttaacaataatatccctgccactcataacaccaaagaaaaacatgttccttagctacacaaaaaaattcatattctactgcaaagagagacaggtatactaaaattgagggacggcgcacaaaaatagcaaaaaaaaacactactaaaatcccacccagagggttggacagaataaattccaaaaggaggcacaggaaaatgcagtggtggtggaacagctcccccacaacctcctcctgtagtagaaagtgcccctgcaggggcctttcaaaacacaccacctcatgctgaaactggtagacgaacagcttaactccatgaccgatcaacatgaccaggccactgttcataaccatccatgggaaaggcaccgaaatcccatatggcagaaggaaccgccggagctccctactcctagggttccccacccggatatggacctctacagtggaccagacca

SEQ ID NO: 84503 - DNA, 347 bp, Glycine max
  Clone ID: PAT_MRT3847_47321C.1
cggtccggccggaattcccgttcgactccagcgccttaatattgataaccgcatcaccgtcgccgcaccttatatcgaacaagcattcgttcttgacaccaagaatcttcaagttttcctcttgctggtgccgattgctaagggaagaaaacactctctgtgctggccacagacttgtgaatcattttctgtcactctagctatctgctgaacactctcctatttgatataggacttcgtgtcagattaactctgactgctctttctcactctctgttaattcaagatcaagcgggagaatctagcattagcgctccactctcatctggataggacttctggatgac

SEQ ID NO: 84504 - DNA, 194 bp, Glycine max
  unsure (1)..(194): unsure at all n locations
  Clone ID: PAT_MRT3847_47322C.1
cgcccgcnngcgtacgtcngctcggaattcgggngtgctccagtactntttnnatgaggntnnngtantcncanccactngctcgcttcttgtgatcananactcgaaaggngctctccatcagngctgaatnnggaagcgtctgctnccaagttcgacggcnggaacctcattggnttngacccnnngggggt

SEQ ID NO: 84505 - DNA, 185 bp, Glycine max
  Clone ID: PAT_MRT3847_47323C.1
cttccactgcgaccccttcttcggttcgacgagattttaacccatttgggtggactggtgatccgctcctgtgcgaggcttacattaaccacgtccacaccggtgaaaggtacgatgtgggatcgcttttcaacgttactgcaaacatcatcaagcgtgctactgcacttgctgaccgtgttgct

SEQ ID NO: 84506 - DNA, 543 bp, Glycine max
  Clone ID: PAT_MRT3847_47324C.1
agaatattacgcagtgaaagattcccgaaacccaaatttacgcagtgtgccttgcatgcccatcaaggctgatttgaagtggccgaaagaggcatggattctgggtcaagatgtttctgccgggttcactcctagcatgtatattattcttttccctcacttctggctcccgctgtgtgctctgcttcacactactgcctctcatccactccctatcgctgcaattttatatttgtcattttggttccggccttgcctcttaagcctcttaagagggacaggctcatgagtaaaattggcgtatcttaatgtcctgtgcttatttggagcccattatggcttgcacaagttgctcacacttccatgatctattggaaatgaacttgcctagcgtttgatgaaagtgtggtgacataacagacgagatctaagaggtccttggaaattcaacaattgagggagcgtaagaaagagtatgacttgaagacagcaatatctttggttaaagagacagctaaaaccaaatttgtagaaacagtagca

SEQ ID NO: 84507 - DNA, 668 bp, Glycine max
  Clone ID: PAT_MRT3847_47325C.1
atctgaagtgaaaggtagaacatttgcatcttccccattcgatgatcctattttatccacgctagctcccgaaggtgctagttctttgggtatgtttgatgttcataaccagttgggtagttcacggccacatgaatcagtgtcagcattgagaagcagtcaagagttggtttcctcatgtaaaagtagttgcagactctttggtttttcattgactgaggacacacatcttgcaaagaaagaggcgtcagcctctaccatcactttaccattgagttctggaccttcctttactagacttgttgaagatgagttccatcccggccattcccttccgagtaagggagttggaagtaactgcaccaagggtgtattgcagtattgaatttagaatcatgcgtgcgcaatatatgacactggaatgagatgagccgaaaaacgggtccttagtatgctctggttatgtgctttggatttaagtaaggaggaaaattgttattatttgtgtgtcatatttgttggctatgaccaagttgaagtgcttgtgtattaatggtttgctcataggcaatgtgacctgtaagagatacatactcgagtaaaaactaattctgtaatcctatgcatattaatcttctatttggcacgtaaagttgaatgtatttgtt

SEQ ID NO: 84508 - DNA, 1949 bp, Glycine max
  Clone ID: PAT_MRT3847_47326C.1
agaatattacgcagtgaaagattcccgaaacccaaatttacgcagtgtgccttgcatgcccatcaaggctgatttgaagtggccgaaagaggcatggattctgggtcaagatgtttctgccgggttcactcctagcatgtatattattcttttccctcacttctggctcccgctgtgtgctctgcttcacactactgcctctcatccactccctatcgctgcaattttatatttgtcattttggttccggccttgcctcttaagcctcttaagagggacaggctcatgagtaaaattggcgtatcttaatgtcctgtgcttatttggagcccattatggcttgcacaagttgctcacacttccatgatctattggaaatgaacttgcctagcgtttgatgaaagtgtggtgacataacatcttactgaagcatggcttcatgtagcgcacctccctccctgatgctggtccacccttcaggaccatggcttcatgtaccgcacctccctccctcatgctcgtccactctcaagacctttctccctctcttcgctccttctctcacaggcccatttctagaaccaccttctctctctatcctctccttttgaagccctccaaatggctccacatagagcccaaatccaggacttgccatgccctcgtcgccgctttgtctgcagaggtccaagtgcccgaaactttcgacgacacggaggaggacgacggtgctgatggctccaccgccaccaacaccgtccccaccaccaagcctaagaaaggcaaggccgcattgcctctcaagagggacaggacgagatctaagaggttcttggaaattcaacaattgagggagcgtaagaaagagtatgacttgaagacagcaatatctttggttaaagaaacagctaaaaccaagtttgtagaaacagtagaagcccatttccgcctcaacattgaccctaaatataacgatcaacaattaagagcaacagtaaatctgcctaagggaaccggaaaacccgttaaagtggctgttcttactcaaggtgaaaaattcgatgaagcaaaaaatgcaggagctgatttggtgggtggagaggatctgatagaacagataaaagcaggattcatggagtttgataaactaattgcttctccagatatgatgcctaaggttgctagcctagggaagattctgggaccaagaggactgatgccaaacccaaaagctggcactgtaacacccaatattccccaggctatagcagaattcaagcagggaaaagttgaatacagggcagacaaaactggaatcgtgcacttaccttttggaaaagctgactttccagaagaggatcttcttgtaaacttgcttgctgcagtgaaatcagtagaggcaaacaaaccttcaggtgctaaaggtgtgtactggaaaagtgctcacatatgctcagccatgggaccttcaatcaggttaaatatcagggagatgcttgattacagacctccatcagaatagaaccctcacatgtaaatgttcgtttggcctcagtcagctatcccgggtgccattgtgagatcttgccaaatatttattcaaagatgttaccaaagttacatacaggggatgggatctctctgttccaaatgtttgcacactgctacattacataatctttgaccccggctgaggattttccttgtattactttgtaactaacaccagagatctaattatattttctttcgtgggaataaattttcatttttacgttttgattattagtagtaggtatttcactcttcaactgcctgtgttcgttgtactcaacacaattgctatggtatgtatggcccagtaaaatgtcagtcaaggattgctatggtatgtatggcccagtgaaatttcaggtaagtgtaggattacagattatcttataaaaaaa

SEQ ID NO: 84509 - DNA, 218 bp, Glycine max
  Clone ID: PAT_MRT3847_47327C.1
cttatttgcgacgtgtatcaggagaggaatatgggatgggctaatgcattggttgttctcttctgaaacgttttcaccgaactgtgagaatctagtattagaggttatgtcatccgtggtgtaaacttggtgcgttgaaatgatcaatttaaagccttagtcgtatatagcacagggtattctggctgagaaattgctaatccacaacagttatctgc

SEQ ID NO: 84510 - DNA, 380 bp, Glycine max
  Clone ID: PAT_MRT3847_47328C.1
cccccccaaagcccaaagggtttgggccccggggtttaaaaaaatgaaaggcccgttgccttgcaaaaaaaagttgcccccattccgagactccccgtgcctgggggttaactttggggcaagggtttttgggaaacctaagaagggggggtaattcacatttaagggggattccgggttaaagttaaacccgggcaccccaaaaggttcgaagtttgttttgttaaaattttgggggggggggtgggcccccggcctctttcttcccatttttttctttaaccctaaagttaacgggataacccctgtttggggcccttgggccttgaacaaaaggttggttttttaggccaaggcctaacatccctttatttgggggg

SEQ ID NO: 84511 - DNA, 1078 bp, Glycine max
  Clone ID: PAT_MRT3847_47329C.1
cccacgcgtcccagcgcggcctcttgaaagaacagaggaggaatgcctgaaaatggtggagaataatatggacaaaaatccagagcttgccttgatgggatcatgtgttttagtgatgctgatgaaggatcaagatgtttatgttatgaaccttggagatagtcgtgcaattttggctcaagaacggccaaatgatcgtcattctaatccgtgtctcatcaaagatgatatgaggcataggaatcggtctagagagttgttagtgggcatggagctggatagaatttcggaagagtccccagtgcacaatataaacaagcatgttaacatgataaacaaaaacagagagatatccgtgtgcagattgaaaatgagggctgttcagctttccacagaccacagcacaagtattgaagaggaagtttctagaataagagcagaacaccctgatgataatcaggccatatttaatgatagagtgaaaggacaattaaaagtgaccagagcatttggtgctggattcctgaagaggccgtcttttaatgaaccgctactgaagatgtttcgagttgattatgtggggaatgctccttacctaagttgtgcttcttctgtccttcatcaccgactttcctcaagtgaccggttcctggtgctctcctccgatgggctttaccaatttttcagcaatgaagaggtagttgcccatgtcacatggttcatggaaaatgttcctgaaggtgatcctgcacaataccttatcgcagagcttctcttccgtgcggctaaaaagaacggaatggattttcatgaattgctggatattcctcatggagataggcgtaaatatcatgatgatgtttctgttatggtggtttcgttggagggaaggatttggagatcatcgggataatttatttattttaaatgactctttcatttttggctaggtgccttcaaatttgcatgttgccttgataatgtaacaattttgggctagaagtaaaattgttttagaaatcaaaattaggctctgaaatattttgaaatggaagcttttttcctttaatatcctttt

SEQ ID NO: 84512 - DNA, 420 bp, Glycine max
  Clone ID: PAT_MRT3847_4732C.1
catgaagcagtctttgctgaatcaacggttaatgcttggtcctcatcttcaatttcaaggataatccaaaaatatcaaaaggttaagtcggacaaaaaaaaatgaaataggaaaattaatgaaaagtaaaatattcagaagctgagcccaccaaagaatgcaatcaatttgatcattagataaggattagtaattagtgatttagtatatagaaaaggattagtaattagtgatttattataaagaaagattccatcattcgagggtcaagaaacaattaaaacaaaatatccaagtttctatgacaaattagaaacaatttgtgtacaaaaaatgttaatttgtacatgttggggtttggaggttagctttataatatacttttgtagataaggtattgtacttgattgttgtgttgat

SEQ ID NO: 84513 - DNA, 456 bp, Glycine max
  Clone ID: PAT_MRT3847_47330C.1
ttggcttggaacctttgggctgattgatgtgcttgcatggtcgtgagaagatgatagaagggcatggtcgtgagaagatgatagaagggggagagggagagagaggagaaaggaggaaagacgagcagcctactaaggttggcgttgaggagagagagcttacggggagctattggagagaactacttcgaatttaaagtctattgtcgtaacgattgcgctgaggatgccacctaggtccgtcccgagggaaatttacctaagatcgccttgggattccctaagtctcctcggtagcgtacgtgccttaaatttggcgaggaattaatagttttacccatccactcggacccggagttctcaaagagagaaatggaattcgcgaaattcgagcagcgctatccccatccataaacgtttcactagtcccggtatcgtacggcttcccaacggccc

SEQ ID NO: 84514 - DNA, 368 bp, Glycine max
  Clone ID: PAT_MRT3847_47331C.1
gactcttcagtctttttttcatgtccagttcccgctccatttgctctctctgtctctgtgtctctctaaacctggtctcatcgcagattcgcagacacacacacttcagatccgaatctccatccatggcggagtccgaattcgaaccaaacgttgacctcgaagagaaatcgtggcacctcctcgcgctcctcctccgaattggccacgccgtttacccgcaacgcctcgccgcgcagtgtcgtttgttcgctgcctcgccgaacttcgtctgccacgtcggcactctccgcggctcgccgatctccgtcaccgacaacggactggtcacgcgctccgtcggcaccgtcttccccctcggaagcttc

SEQ ID NO: 84515 - DNA, 1316 bp, Glycine max
  Clone ID: PAT_MRT3847_47332C.1
accttgactatcaactacggattggttgaaattgaaaccatttaagttgaaagccatagtgctgatacctaaagcggtaaaccaaatacctactacaggccaagcagctaagaagaaatgtaaagaacgagaattgttgaaacttgcatattggaagatcaatcggccaaaataaccatgagcagctacaatattataggtttcttcctcttgaccaaatctgtaaccttcattagcagattcattttctgtggtttccctgatcaaactagaagttaccaaggaaccatgcatagcactgaatagggagccgccgaatacaccagctacacctaacatgtgaaatggatgcataagaatattatgctcagcctgaaatacaatcataaaattgaaagtacctgaaattcctagaggcataccatctgaaaagcttccctgaccaataggatagatcaagaaaacagcagtagcggctgcaacaggagctgaatatgcaacagcaatccaaggacgcatacccaaacgaaaactaagttcccactcacgccccatgtagcaagctacaccaagtaagaagtgtagaacaattagttcataaggaccgccgttgtataaccattcatcaacagatgccgcttcccaaataggataaaagtgcaaacctatagccgcagaagtaggaataatggcaccagaaatgatattgtttccataaagtagagatccagaaacaggctcacgaatcccacgcgtccgcggacgcgtgggcggacgcgtgggcggacgcgtgggcggacgcgtgggctggcaggaaaggaaagggaaagggcgtttaccagtttgtagacaaatacggtgctaatgtcgatggttacagtcctatctacgacaccaaggactggtctccaaccggtgatgtttacgctggcggtacgactggcttggctatctgggctgtgactctacttggtcttcttgctggtggtgcacttcttgtctacaacacaagtgctttggcgcaataaactttgcaaatcgatgttttaagctcaaacttagtccatgtaactatctaaaagtgaagaattattcatgaagtacaaaaaaaaaaaaaaaaaaaaaactcgagactagttctctctctctgtacgttatggctaatgatgcttgcaactctatttatcacttgaaatgtcaagatgtgaagtgttgaagccagaaatgggatgtataatcttcccttatttcttaagagtgtaaacacatcctgaaatttactattctttttttctctgtctcttcaaaaaaaaaaa

SEQ ID NO: 84516 - DNA, 328 bp, Glycine max
  Clone ID: PAT_MRT3847_47333C.1
aaatatttggttggtggtgcaaatgggtgcttcggtaattggcgctggggacaacacgctcaccgagatgtcagcttttggtcgcagtgatggggacataggggctggctattaggcaacagcaactcaattcagaaaacatctaccggattacattaggtgggatatgtacacctcgccgatctacattgtcccatgtttgctcactgctggaattaaatatatgcggcatctgagtgatagtcatatttccggcttatctgacgacggcagatacatattccggactaatcacgtgagaaacctggctatagcagaagaggaaaag

SEQ ID NO: 84517 - DNA, 764 bp, Glycine max
  Clone ID: PAT_MRT3847_47334C.1
gaaagagagagagagagagaatgggtctcatctcaatgcaatttatgttctgaaaaccaaagcttttcataggaaaagttgtgctaagatgccagggaaacctgacactgatgattggcgtgtagagcgtggggagcagattcagtttcagtcttccatttactctcatcatcagccttggtggcgcggagtgggggaaaatgcctccaaatcatcttcagatgatcagttaaatggttcaatcgtgaatggcggaggtgttcccaaagaataccaaaacatcaaacatgccatgttgtcaaccccatttaccatggagaaacatcttgctccaaatccccagatggaacttgttggtcattcagttgttttaacatctccttattcagatgcacagtatggtcaaatcttgactacttacgggcaacaagttatgataaatcctcagttgtatggaatgcatcatgctagaatgcctttgccacttgaaatggaagaggagcctgtttatgtcaatgcgaagcagtatcatggtattttgaggcgaagacagtcacgtgctaaggctgagattgaaaagaaagtaatcaaaaacaggaagccatacctccatgaatcccgtcaccttcatgcaatgagaagggcaagaggcaacggtgggtcgctttctcaacacatagaagcttgaaaataacaattctaattccacttcagacaaagcaacaatactcgtgcaaacgcctcaacaaactcgcctaacactc

SEQ ID NO: 84518 - DNA, 447 bp, Glycine max
  Clone ID: PAT_MRT3847_47335C.1
acttcccccacaaaaaaaaagcacaaggacaaacaagctgaacatgcatgggaagggatatatcctgggaacatacttccaagggatacggattgccaaaaaaaaatgcccgcccggctaaagaggattaccacttaaccaaacgcccctagacatgtaactttatatcaaagggaccagccaatttacgtttaaaaccatttttccctacaaaggggagggcaccccctttttgaaggcccccaatcttttaatcttaccaagcaaatgttttagggaaggaaccttattaggcaaagtcccggtcacgatgaacttctagaccccggggccctaaaagctccctgataaaataagatacctgataaactacgggggtgcttttattaccgggaacatttgcccaaagggcaatttttacaataacgctggcttttgggccaccct

SEQ ID NO: 84519 - DNA, 415 bp, Glycine max
  unsure (1)..(415): unsure at all n locations
  Clone ID: PAT_MRT3847_47336C.1
aatgtagaattaatgggagtactggtcaaatctgatacccagggaagcaacctagcacatacagtacaaggggaaatctcccaggacataaatatccgggaagtttaccccgcattaataaatgatgccacagaacttttttgcacaggtagccggtggcaccaaattacaggaaccggtaacagattaattctgaaaagggggattaatcaattattattggaataaattaattcaccttcccttcttccgaagtcaaaccatggctctttggtccttccttttaaacaattaaactgagacccttgcagcaaaaacggggaacactttccttctanccacttttgctttagcttgcagacacnagttctgaagaagttcaaaatcctcctcccaaaacaacaaggatgccttt

SEQ ID NO: 84520 - DNA, 1433 bp, Glycine max
  Clone ID: PAT_MRT3847_47337C.1
tcatgcgtccggcgagaagacgacagaggggggtctctcttgaggttgcagacttagagagagagagagagaatgggtctcatctcaatgcaatttaggttctgaaaaccaaagcttttcataggaaaagttgtgctaagatgccagggaaacctgacactgatgattggcgtgtagagcgtggggagcagattcagtttcagtcttccatttactctcatcatcagccttggtggcgcggagtgggggaaaatgcctccaaatcatcttcagatgatcagttaaatggttcaatcgtgaatggtatcacgcggtctgagaccaatgataagtcaggtgaaggtgttgccaaagaataccaaaacatcaaacatgccgtgttgtcaaccccatttaccatggacaaacatcttgctccaaatccccagatggaacttgttggtcattcagttgttttaacatctccttattcagatgcacagcatggtcaaatcttgactacttacgggcaacaagttatgataaaccctcaattgtacggaatgtatcatgctagaatgcctttgccacctgaaatggaagaggagcctgtttatgtcaatgcgaagcagtatcatggtattttgaggcgaagacagtcacgtgctaaggctgagattgaaaagaaagtaatcaaaaacaggaagccatacctccacgaatcccgtcaccttcatgcaatgagaagggctagaggcaacggtggtcgctttctcaacaaaaagaagctcgaaaataacaattctaattccacttcagacaaaggcaacaatactcgtgcaaacccctcaacaaactcgcctaacactcaacatttgttcaccaacaatttgaatctaggctcatcaaatgtttcacaagccacagttcagcacatgcacacagagcagagtttcactataggttaccataatggaaatggtcttgcagcactataccgttcacaagcaaatgggaaaaaggagggaaactgctttggtaaagagagggaccctaatggggatttcaaataacacttccctcagccatacagcaacagttaggtgaagatgaagggctttatctcatccaacttgtgatgctgtatagaaggcaattcattcttggcttagttaagtggtgagaccagtgacatggtgtacactatggccttgtttggtctctcccttgcttttgtttctctctacaagtccatatgtaaaatggataacagaaagaaaaagaaaaatcactttggtttgagaactttttaaagtttatattaactgtgttaaggttcataaaactgtagactgatttgtgtgacatgctccacagaaccttaaattttcctctattttgtcctatatctccttgcacatttttattctaaattggtgcatatattctaatgt

SEQ ID NO: 84521 - DNA, 457 bp, Glycine max
  Clone ID: PAT_MRT3847_47338C.1
aaaaggaaaaaccggtatttcttcttttttcttattcccaaactctttaaatttacaatggggaaaactataactttatttcaaaagaaacattttctatattcaaagcatcgtccatttttgggggccacgaaaaaaggaatgccggacctaattaattccgaggtgattacgatacctttagttttggtaccaccctgaacgggggggttcccgctgccctgaatatttgcatgaaacccataaaagggaaaataaaacccacttgcaaaaagtaatgaaaatcacgaaccttcttcaaataaatatatacaaaattacaggtcctcgtcactttcgtcactgaacaaaacagggccagttagggcaacaactggggacttatcagcttcaccattcaagggcgtgactgtttccaacgacttactcttatcattcacaggagtgtttcctgcct

SEQ ID NO: 84522 - DNA, 1435 bp, Glycine max
  Clone ID: PAT_MRT3847_47339C.1
ctgtatactattgtgtttgcttgcaacttttgggtatatagttttgcaagtttcaactgttagctcttcctagcttttgctacaaacgctgattgaccacttttctatgcttgatttgtgtgattgttttgtctatttagcttgtctattattaaataacacaagggtatggatgctgctgcaagtcaaagtctctatccattgcaccgttgcaaaactgttcacctggttaggcatgcgcaaggagttcataatgtagcaggagagaaaaaccatgatgcatacaattcttatgagttttttgatgcacacctaacctctctcggctgggaacaggttaataatctgcgaaagcacgtgaaggcaagtggactttccaaaaatattgaacttgttgtcatttcccccttattaaggaccatgcaaacagcagttggagtctttggtggtgaagcatacactgatgggattggtgagccacctctgatgacggaaaatgtcggacacagtgatcatcctgcagtttctagtatgaactgccctccattcatagctgtggagctttgccgagagcaaataggagttcatccttgtgataagagaagaaccattagcgagtaccggaatatgtttccagcaattgatttttcacttattgaaagtgacgaggacattttatgggaatctgatgtcagagagaagacagatgaagtttctgctaggggcctgaagtttttggaatggttgtggacacgtgaagagaaggagatagcagttgttacccacagcagttttctgtttaatacgctccgtgcttttggaaatgattgccacccagatataaagagtgaaatatgcacacactttgctaattgtgagctgcgttcaatcgtcatcattgatagaggtatgattggatcaagtgaatcaactaccaactatcctggcaagattcctcgtggccccgatgttcccagtgaagctgctgactaaaaccattcagggattatccttaccaaataatagctcctctttgtgatcattggtcgtatattggaattttcattggtataatagggttatttcttaattgcatttacaggcaagtgttcaatattttgttttacccgaacaaactaatccgtaggagcagtttcaaaattcctttttagtggcttaaagtagattggtaacatatgtaggtgccaatttttaagatgataaaaaggatgtcaacaatgattataccaagtttagctacttccacattcatgtatgaacaattgacactgtctttccattttatccaagtatattataagcatgtacttcctatgtttgccagagtaatggtagagtgaattaaatcaaattgatcctgactaggagctgtgatgagaatgaacagaataagagttcaatatctcaaaacaaa

SEQ ID NO: 84523 - DNA, 179 bp, Glycine max
  Clone ID: PAT_MRT3847_4733C.1
aaaaaagggtttgagatgtgaacaatcatggaagaacatcttacactttgaaatcccaagaattgtcgaagcagcacaatgtagagcccacctattgtcattacatctaccaggtagggattaaacattgcagaccaactccattcggtacttcccagaatcttattgcgcacatacgt

SEQ ID NO: 84524 - DNA, 549 bp, Glycine max
  Clone ID: PAT_MRT3847_47340C.1
cgagatgtcaccgggatcgggatagcggtcctgcccccaacttgtttattgctcctacgtatgaaacctttgcgtgcaccgaaaccttgtgggataacgataaaaagctttattgtggcaatgtttgactgaacaaacccctcaacgattaagatatggtcagcggggcgggcgaccaggaaaacatatcacgctagggctaaattctcactgctgaatgctaattcacgtcactaaacaactgccctgttgctgcactgcagcagatagtagaaaacccagatgctgcattactgccttcatgatatcgacggagctatcatcagacacttcctcctctgctgctacacgaaccatgacacacgtcatgcccttgacggcgatcacgatccgcaaactataatacatgtgctcgactgctttgtctgcggctccagatctgatctaacaagatgacaaagtctgccgcatactaaggaccgcgtctactgtgggatatatatctgtccgggatctggctgcgtgccgtctccaccctccaagagtcgc

SEQ ID NO: 84525 - DNA, 278 bp, Glycine max
  unsure (1)..(278): unsure at all n locations
  Clone ID: PAT_MRT3847_47341C.1
gagacagtcagtctgcttctatggactcctcancagcttgtgttttctagggagctgaccaagtcactgcttcccaggtaggagctgcagatatgggggcccttctgtggtcactcctgctgctgcttcatgaagccaaagggttttctggagatgatgaggaccctgaggaagtggttgctgtccttcaagagtctgtcaacctctctctggaaataccatccaatgaagaaattgacaacattatctggttctctcaaaaaaaccttgccaccgtg

SEQ ID NO: 84526 - DNA, 249 bp, Glycine max
  unsure (1)..(249): unsure at all n locations
  Clone ID: PAT_MRT3847_47342C.1
taccggnccggannnnnnnnnngggngcgcgtacccgctcaacttggaacccacaggtttgagggtttaaaaatgggaattcgatggattggccttgcttgaaccgacaatgacccttttcaaaaacaaggttggatatttggtattcaagattccgtcaagaagggaattacattttttggtactggcggtggttattggggccatggttattgacttttgggttggaaagctttgaaacaactggcc

SEQ ID NO: 84527 - DNA, 275 bp, Glycine max
  Clone ID: PAT_MRT3847_47343C.1
gcacgcgaacagcagctaggatgcggcccgattaagagagagcgacctcacctgcaatcccattccagaaccgctacttctccttatgattatgtataagacttatctctttctctctattctatgccttttggttctctctaataccatgtaaagaaagaacaaaatacaatctgtcagtcagcgaaatctacagtttcaggcttacagatcttggggctgaagagtgtggatccttgcatcgagatcctgtactcaatcctcatactggggcg

SEQ ID NO: 84528 - DNA, 452 bp, Glycine max
  Clone ID: PAT_MRT3847_47344C.1
aaaatcgtgtgccttctcagctgaatgatggcaacagaatactattatctcttgtttcttctttggttcctctctagcttaaccttcttattggacaaccacgttgtgtttctacgcgtgaaaatactactcctattgggtgacattcactcctttgcctacagcacaaatgcttgggcttttcattcctagttggtaccatatgatacaaaaggttgataatctattttacttttttggtacattctgttgcttagtttgtatttcgggttgaatgccatccataccaattgtaagaaaaaataatagtgtgtaaatgacaaaacttcctctcaatatgagagagaccaaagattgatcacactttccattcattatcacattttatatattatatacccaatgattttaagctggactgcagtgtgctgctggcgcattttatttctggc

SEQ ID NO: 84529 - DNA, 302 bp, Glycine max
  Clone ID: PAT_MRT3847_47345C.1
cgaaaagccggatacataaaggtttggaagaaaagaaaaccctcaaacccccggtgggtggagagggggcctgaaccgtatggaaacatcctcaggcgacgaacaaggatggtgactcccactgagacgcgcttattattgcatgacgagtcagattatataacctggaggccaccacgctgcttttgacgagcataaggagaaaagctcctggctaggcgtaggactcaaggtcatgagattgattggaacaaaatggtactgaaaagccacaggttcttggcaagcgtgaagctcattgg

SEQ ID NO: 84530 - DNA, 1832 bp, Glycine max
  Clone ID: PAT_MRT3847_47346C.1
gagggttcaaatctcgaacccccatcgtgtccgtaatccttcttccaaatttccaacttccctctgcctcttctaatggtatcgtatctttcgatggaagggtttgtaagggtttaagctcaaccaaaccctaaaccctaaatttcccaatttcttctttcgatcttccactctctccctttccatctcataaatttcgaatccatacactctcacctcatgccctcagatccaatccgcacccttttatcactgaagtgagtggcgttgttgaggtgtggttcttggtggggttttgagatgatgaatgatagtgatttggggaatgtgcgctgttgggttttcaagtgatatgaagtgctgaatatgagcaatggcggtgggaagactggaagacagcttgaacagcctggcacatgggggaggaggaaagttggtggtggtgatgactatgcccgggcgatagcgaagattgcggtagcacaggtgtgcgaaagcgagggatttcaggcgtttcagcagtcagctcttgaggcgctgtctgacgttgtggctcggtatattttgaacgttgggaagtctgcacattgccatgctaatctttcaggtagaactgagtgccatgcttttgatgtcattcaagggttggaagatatgggatcagtgcaggggtttgcgggcgctgcagatgttgatcactgccttgaaagttcaggtgttattcgggaaattgttcattttgtaaacgatgctgagccggttatgtttgcacaccccattcctcggtttccagttgttaaagaacgggtgcctaatccaagctttttgcaaaaaggagaagagcctcctggggagcatattcctgcttggttgcctgcattccctgatccacaaacttattctcagtcacctgcagtgaatggaagagggacagaacctcgtgcggtcaaatttgaccaagaaagagagagtggcaagggggagtggcctgcgttgaatttgcagcagcagatggtctcaaatatgtttgaaaagtctgcctcgattgaccctgcagatgctaaggcaaaaagagtagcagcagaaggtaacccgttccttgctgcacctttgaaaattgaggacaaggaagttgcttctgttccccctccggctaagctttttaatgatgaagctcttgataatcctgttgtggaaaatcttgttgaaaatgaaccgatttcagcattggagacatttgctccagcaattgaagcaatgaaaagcacaatctgtgattccaaggaagatcagacaaaattttgtgccaatgagaagcctacggtgcgttttaagattgggattaaaaacaaattattaggaaaatccattggtttgatcccacaaaaagaggagcatgaaaagactttgccatggtttgcaatggaagatgagaaggatgacagaaaaagaagggctgagaaaattttaagggaatttttggaaaacccagatcagcttgttcagttgtaaattagattgctttaattagaatctgtatacttgatcaggagaatgtcaggatagctagttttgggatattcaaatttaggtaactgtctgtttatgggcattataggatggatattactattttgctctgacattatctccctttaacaatctttcaggtatgtgcatgtcaattgtttggtagatcaatttatgattctttctattgaagtcttttggcactctgtatgatcttatgctaaatatagccatataaaaacatctcaacttctgacttgtggcagttaaaaaaaaaaaaaaaaaaaaaaaaaaaaaccaag

SEQ ID NO: 84531 - DNA, 263 bp, Glycine max
  unsure (1)..(263): unsure at all n locations
  Clone ID: PAT_MRT3847_47347C.1
cgacccagccgtccgattctgccatggttatggtgattttttttcccccacactcaacgcctagtttgttgtatagctaataaaaattcttattcgtttatttttcctgaggattttatactttttattggacgtggtttcattttcnctaaataatgnccgtaatgaaaataaaagcacactaaagctttcctggctggacccgatattaattacgatccggagggctcggccgtaccaacgtttatatatcaataaatagg

SEQ ID NO: 84532 - DNA, 545 bp, Glycine max
  unsure (1)..(545): unsure at all n locations
  Clone ID: PAT_MRT3847_47348C.1
agaaaggagagggtccagtggtgttgttcctccacagcttccctgagctctggtactcatggcaccatcaaattctctctctcanctccctcagctaccacaccatcactcccaatctccatggctacagtgacaccaaaacaccaccttcaatcagcagctacaactgcttccacatagtgggtgatctcattgcacttattgactctctgggtgtccaacaaatgttccttgtggctcatgactggggagccatcataagttgatatctatacatgtttcaccctaacaaaattaaagcctatatctacctcagtatccctctcctccacagagacccaaacatcagaacaataaataacatacatactttatataaagacaactactatatctacagatttcagaaaccaagaaaaataagaactcagatgactaaagttagcactaagtatattctcgaaaacatccttacaactcacaatcctagtcctgcaattcttccgcgaagaaaatgtcaattcagtgcagagattcccaacagc

SEQ ID NO: 84533 - DNA, 311 bp, Glycine max
  Clone ID: PAT_MRT3847_47349C.1
ttctttttcttctcttttttttttttttttgcaaggttaaaaaaacactttaattttcctggggggccaaaagcatttcagccccgctatacaacactatatttttaaaacataaagttctgggtctcctatggctctttaggagatttattatccttgaatgaagacttaggctctcttgcacccttctccgattttcttaggcaacacaatacggctattgtttttcttcacaccacttttttcattggtgtaaccaattagctttttccccaactccttattgctcctaatagtcaatagcatctgtt

SEQ ID NO: 84534 - DNA, 540 bp, Glycine max
  Clone ID: PAT_MRT3847_4734C.1
gggaaaggccccttttaattaactaaccattaaggggggggttggaacagccccgctttcccacccgaaaaaaaaaaaaaggggggggtaaaaaaaaccccaatttcccaaaaaaaaaaaaagggatttaaaaaacaacaaaaggggtcggacccttgggaaaaagaaaaaaacccaaaaggccggggggggggaaaaaacgggcccgacccacgagttcctaaagccgaaaattaaacccccagttccttttgggacgagccactttaagccgagccaaaaaaatttttaaaccaaatccttttttttttaaccgaaaccacgggccggccacggaaaaccggttcaaacccaaggggaagcttaaaaccaaaataatggctaacccccttggggttcgttcccggttcttccggaaaaaaaaaaaaagtccccggggtctcccccaaaagaatgcttttgttttccaccgaattcgccgcctccgacggggggctcagggtaaaatggggacttccaaaccggttaatcaccttttgg

SEQ ID NO: 84535 - DNA, 441 bp, Glycine max
  unsure (1)..(441): unsure at all n locations
  Clone ID: PAT_MRT3847_47350C.1
gttttaaatctgttttatcttttaagcctttttaacaagaccccctattaattgttgtcggttgttggtgatggttacttttccctttgtaacttacaaaactgacctaataatgttcttttcttcccattttaagtcccagtcttttatgagaactcaacatttttaagtccctctattaattccccgtattaattatgtatgactatgtcttttactttttaattgtgtatttttctattttcagtatttttgtgtgttataaaattataaatgttatattctagactttgcaattgtggtcatcccactatctgctattctgctatggcattttgggggggggggggggggggggctgctctncgggattgactacttagattttggggctccagttcgttgtttgtgttgtgttacaaagactcatgtcttacaaag

SEQ ID NO: 84536 - DNA, 369 bp, Glycine max
  Clone ID: PAT_MRT3847_47351C.1
aaaaaaactgttcgcagggcggcaacttttatacaattactttgataaccgtttaaaactttacacgatgtaagacacaacatggtggatctttcaccctcaaaaacatcatttggggcgcctcttacttagaccgtctaaacatgcattgtgaattatctgcatcttttggttgccgctcccgaaggacctctgcttcaccaatgggcaaattcaaacttgactgttacttttgtacatgaggggtccccctctgatctgacgaagaggatcggttccaagaacttaatcgctcggcggtgctgtgctcccacccccagagttctggagcctgttaaacagattcaagtcatggttcttgccgctttt

SEQ ID NO: 84537 - DNA, 1253 bp, Glycine max
  Clone ID: PAT_MRT3847_47352C.1
cagaaacagaaggaaacctagaggcagcgttgtcgccctccagggaggaggatgagggtgtgttttactcgacttgcctcattcgtctgcgattgcgagcctttgacaggaggatgatctggaagccatccgaagcctctctttccaataacaaaaaacgtccattcaacgatcacactcacactcctcgtcgtcgcttgcccaaatcgcttatcgctcttcaacacccaaacgcttcttctttctcgccccatccccgtccatgcgattcaagaatgacattgcctgtaatgaagtttagtggtcaaatttcttatagcaggacttttgatgctgtagagaaagctgcaacaaagctcttacaaattctccaagaaaaaacgaccgacatgatgcaaactgcaattggatttgacattgagtggaaacccaccttcagaaaaggtgttcctcccggaaaggtagcagtgatgcagatatgtggtgacactagacattgtcatgttctacatctaattcattctggaatccctcaaaatttacagcttttgcttgaagatcccacagtcttgaaggttggagctgggattgatggtgatgctgtgaaggtttttagagattataacatatctgttaaaggtgtgacggatctttcttttcatgctaatcaaaagcttggtggagatcataagtggggtcttgcatctttgactgaaaaacttctatcaaaacagcttaaaaagcccaacaaaataagactgggaaattgggaggctcctgttttgtcaaaggagcaactagagtatgctgcaacagatgcttttgcttcttggtgtctttatcaggcgattaaagatctcccggacgcccagaaagtcactgacagaagtggccaagttgatgctgtaccgcaagaatgactacatctttagtgtgtattgaatttcatttctattaaatattaatcatttgtcatgtactaattatctgttgtaatctgtaaaaataaaaaatctgttgtaacattttatttttgctgcttggacacccataggagagtgaaaatccccttttgggagtatgataagaaaatagaaaggaatagataaaatggctgatgtgattaaaaaacgatggacatgatgtctattgggcgtagaatttgaggtgtataaaataaattttttggaataaactagttgaaacttaaaagttaacaagttaattcccaataacaaaaatgccataatctc

SEQ ID NO: 84538 - DNA, 395 bp, Glycine max
  Clone ID: PAT_MRT3847_47353C.1
ctcggaatgagattcaagctctcctacatacttcgactttctactcttggccgcctacctcgatcagatatgcaacttggcttagccatgctctgcgccagatccgttcgagccaagaacactatgaacatgatgctaaccaacgagctggacgctgccgacagcggcctctactactacctatgcggcttcgacttcgctaccgatgcacgtgattcagattctggtgatcgctgggtgggtgagagcgaccatggtacccttgaactgggggtcagaataaactgaagctgtggaggatttgttcataggatgagcttgctgagatggacatgactcggcatagaggctctgcttatgcttaatacgatcatgagacacacactcatgggatg

SEQ ID NO: 84539 - DNA, 526 bp, Glycine max
  unsure (1)..(526): unsure at all n locations
  Clone ID: PAT_MRT3847_47354C.1
gaattttnggtcgaccacgcgtccgattgggttcgcggtgttcctggtccaccttgccaccatcctttattactggcactggcatcaacccagctaggagccttggcgctgccatcatctacaacagggatcacgcctggaacgaccattggatcttctgggtcggccccttcattggtgctgccctggctgccatctaccaccacgtgatcatcagagccatcccgatgacgagcaggtcttaagctgccgcgtccgttccgagacatgccagctctaagaacgggcgtatgcctgtgatgtgttgttggatggccacgcctagtgcatctggcaatcactatacgctatctgttcacggatattgcttactgctgcgaccgtactggtgaccgaagcaagagctctgtgatttcctgtaccgagctgtgcatgatgattattcttaccatcgcggagatgtgaaaacattatacgtctgtggcaaggcttgacagctcattatatgcgacgacatggtggaaca

SEQ ID NO: 84540 - DNA, 1467 bp, Glycine max
  Clone ID: PAT_MRT3847_47355C.1
atgtgttcttcggagacgatcaacatcgctgcgagtacacagaaacttgatgttgataatcgaattgctcttcgcttctactacagaattgccgataatatcctcaaacaggctgatatctttcgtgcagagacaaatatagttgatctgtatatcatgctcctaagattttccagtttggtctctgagacaatacctcgtcaccgagattatagatcatctcctcaaggcaagaaagaagctttgagaaagaaattgttacattctatgaatgagctagagaaattgaaaccgaaagtgcaacagaagatcaatgagtttaacagcaggcgagcatatcaacccaatgggtgggagaaatgtcattcaaataattttatggatttttctccagcaaaaaagcaaactttgactagttataataaaaaaaaggcagtcataccaaccactggagagtttgtttaccaaggatcaaggggccaacagttttctagtgtaaggcctgtggaagagaatatgaggagactatctctaagtctcctacgcccaaaggaggaaactctctccagacattcaattctaggtcccaatgggctgaaagggcagtggcgaccacctgcaagtgataaaggggtcaggtatccaaccatcatagatctgtctccagttgaaattccaagccttcaacaacccttggtagatggatctctgactaaaaaagataatagcatttcagaacaacataaatcagatttagaatcaattcttacccagagtgatgactgcaaggcaaagcatgctgatgaagctccttcgcttatctcttttgaagcaacagaaattcctgctcaaatagaagttaccagacagccttctcctccacctgtacttgctgaagtacaagatttggttcctgcaatgttacctcatgttattgaggaaggatgtaagacagagattccaatgtcggatagtattgttcgtgctgagtctccgctgcaactacacatatcaacttctatgatggagagttttatgaagcttgccaagtcaaacactgacaaaaatttagagacttgtggaatccttgctggtttgcttaaaaacagaaaattttatattaccactctaataatcccaaagcaggaggcaacatccagttcttgtcaagctacaaatgaagaggagatatttgaagtacaggataagcagtctcttttcccccttgggtggatccacattatgctgccagaagctgttgcaatagttatggcaccaaccgacagttcaagaaaccatggcatttttcggttgacaacccctggtggaatgtcggtcattagacaatgccagcagcgtggctttcatccacataatcaacctccagatggcggtcccatttacgatacatgtacagatgtttacatgaacccagatttaaaatttgatgtcattgatcttcgatga

SEQ ID NO: 84541 - DNA, 276 bp, Glycine max
  unsure (1)..(276): unsure at all n locations
  Clone ID: PAT_MRT3847_47356C.1
catttccataancttagtcancctcttctttcatctttctccctaacggtatcgagggaaaaatatggcggaagaacacagatgccaggnaccgtgcttctgngccaacaattgaggtttctttcggcagnctgncacgcagaatatgtgctccaagtnctaccgcgatttcnanctcaangagcagcaatcttccaaggccaaantggttctcaatcngncgccggnttcttcacngcnacggcgtgattntcagcgtgncttcttctngggccg

SEQ ID NO: 84542 - DNA, 675 bp, Glycine max
  Clone ID: PAT_MRT3847_47357C.1
aactgacgaaaaaagacaaccatgaattaccaattttacccttgggagaaaccaaaatgacatgatctgatctgtgcctaagtcgccattaacgacgactcggctaagctgaactgcgagaggagctgcgtccacagggaaacgcatagcatattcgtattccggggaagaaagaaagaaacatcatgtgttcttcggagacgatcaacatcgctgcgagtacacagaaacttgatgttgataatcgaattgctcttcgcttctactacagaattgccgataatatcctcaaacaggctgatatctttcgtgcagagacaaatatagttgatctgtatatcatgctcctaagattttccagtttggtctctgagacaatacctcgtcaccgagattatagatcatctcctcaaggcaagaaagaagctttgagaaagaaattgttacattctatgaatgagctagagaaattgaaaccgaaagtgcaacagaagatcaatgagtttaacagcaggcgagcatatcaacccaatgggtgggagaaatgtcattcaaataattttatggatttttctccagcaaaaaagcaaactttgactagttataataaaaaaaaggcagtcataccaaccactggagagtttgtttaccaaaggatcaaggggccaacagttt

SEQ ID NO: 84543 - DNA, 1959 bp, Glycine max
  Clone ID: PAT_MRT3847_47358C.1
caattttacccttaggagaaacgaaaatgacatgacatcctctgatctgatctgtgtggcgaagtcgcccttgacgacgactcagcgaagctgaactgagagtggagcttcgtccacagggaaacgcataagcatatcggaattccggggaagaaagaaagaaacataatgtgttcttcggagactatcaacatcgctgcgagtacacagaaacttgatgttgataatcgaattgctctccgcttctactacagaatcgccgataatatcctcaaacaggctgatatctttcgtgcagagacaaatattgttgatctgtatatcatgctcctaagattttccagtttggtctccgagacaatacctcgtcaccgagattatagatcatcttcacaaggcaaaaaagaagctttgagaaagaaactgttacattctgtgaatgagctagagaaattgaaaccgaaggtgcaacagaagatcaatgagtttaacagcaggcgagcataccaacacaatgggtgggaaaaatatcattcaaatgattttatggatttttctccagcaaaaaaggcagtcataccaaccactggagagtttgtttaccaaggatcaaggggccagcagttttctagtgcaaggcctgtggaagagaatatgaggagactatctctaagtctcccatgtccaaaggaggaaactctctctagacattctgttctaggtcccaatgggctgaaagggcagtggcgaccacctgcaagtgataaaggggttaggtatccaaccatcatagatctgtctccagttgaaattccaagccttcaacattccttggaagatggatctctgaataaaaaagataatagcatttcagaacaacataaatcagatttagaatcaattcttacccagagtgatgactgcaaggcaaaacatgctgatgaagctccttctcttatctcttttgaagcaacagaagtccatgctcaaatagaagttaccagacagccttctcctccacctgtacttgctgaagtaaaagatttggttcctgcagtgttatctcatgttaatgaggaaggatgtaagacagagattctaacatcagatagtattgttcgtgctgagtctccgctggcaactacacatatcaacttctatgatggagagttttatgaagcttgccaagtcaaacactgacaaaaatttagagacttgtggaatccttgctggtttgcttaaaaacagaaaattttatattaccactctaataatcccaaagcaggaggcaacatccagttcttgtcaagctacaaatgaagaggagatatttgaagtacaggataagcagtctcttttcccccttgggtggatccacacacatcctacacaatcttgtttcatgtcatcaattgatgtacacacccattactcttatcagattatgctgccagaagctgttgcaatagttatggcaccaaccgacagttcaagaaaccatggcatttttcggttgacaacccctggtggaatgtcggtcattagacaatgccagcagcgtggctttcatccacataatcaacctccagatggcggtcccatttacgatacatgtacagatgtttacatgaacccagatttaaaatttgatgtcattgatcttcgatgagaaggagaaggagtttgttgtttcttgatctagccatatataattgttcatattaccattgaagcaaccgtggacatcataatgcatgtcttgtctggctgtgtttgtaaaaagatcggaactattcacccacgcatggtcattcaccaggtttggtccaatcctgtgcagatatctatgattgtttcttttcattctgtattatattgccatcaattcaaagtacctagtagctccaatctatggggtgaatcaaatatagagcttcagcttttggactgctatttttt

SEQ ID NO: 84544 - DNA, 2932 bp, Glycine max
  unsure (1)..(2932): unsure at all n locations
  Clone ID: PAT_MRT3847_47359C.1
cttgaacttaattcctttttccataaaaaatggtgacaattatgtttctaatccgatgcctcattcatgacatgttttctttatttcttataaaaaatttctttatttatattgatataaacgttaaaagtattttttatgcctatctattgtttttttcccactcagtgtctaaattttctaaatcctgcacctgtctcttgctatggcataaacaccaaattatatatttatcatttgtcattatccacaaacatatcatggggtgaaaaatatatacttttgtatctctacaatacatgccttaggcagggatttggtctattttctttccaatgagtaaacataaccttagcctaaaaaataggaaattaaggctagtcagtatttatttgaaatttcagagctccttttttgtgtgtgtattagataagcagattgacatattttcttcaatatatttctttccatctcttcagacaagctttcccttgtttccatatgctcatactctattctcctgcaggagcaatctttgcttctattcctaaactcttgaaactgttcccatgtanaagtaactcaactcttaaagagaggattgatgcaccttttcgcttttaaaacatttttgtggctacgcgtccgcaggcaatgatgaagaacaatactactacaagggaaagaagcagttatacaccctcgagaatggtgaaattccaggcaaaattataaaaccattttttttctctctctgtccaaacggcagatcagatccattcttcaacaaatccccttttcagtttcagtttttctcgaggatcccgtgaaacgacatggcgatggtggaccagcctctgtatccgattgccgttttgatcgacgagttgaagaatgaggacattcagctgcgcctcaactcgatccgaaggctctccacgatcgcgcgcgcgctcggcgaggaccgcacgcggaaggagctgattccgttcctcagcgagaacaacgacgatgacgacgaagtgctcctcgcaatggccgaggaattaggtgtcttcattccctacgtcggaggcgttgagcacgccaacgtgcttcttcctcccttggagacgctctgcaccgttgaggaaaccagcgtcagagacaagtcggtggagtcgctgtgcagaattggagctcagatgagagagcaagacttggttgaatacttgattcctttagttaagaggctggctgctggtgagtggttcacggcacgggtttcatcgtgtggtttgttccatattgcttaccctagtgcacccgaggcggtgaagactgaactgagagccatatatgggcagctgtgtcaggatgatatgcccatggttaggagatctgcggccacaaacttgggaaagtttgccgctactgttgaagctcctcacttgaaatctgacatcatgtctgtgtttgaggatctcacacatgatgatcaagattctgttcggctacttgctgttgagggttgtgcagctctggggaaattgttggaacctcaagattgcgtggcacatattcttcctgtcatagtcaatttttctcaggataagtcatggcgtgttcgttacatggttgctaatcaactatatgagctatgtgaagctgttggtcctgaccccaccagatcagaattggtccctgcatatgttcgtctgctgcgtgataatgaggctgaagtacgtattgctgctgctgggaaagtaactaagttttcccgcatattaaatcccgatcttgccattcagcatattctaccatgtgtgaaggagttatcaactgattcttctcaacatgttcgctctgcactggcttctgttataatgggtatggcaccggtgttagggaaggatgccacaattgagcaacttctgcctattttcctttctcttttgaaagacgagtttcctgatgtcaggctaaatattatcagcaagcttgatcaagtgaaccaggttattggtattgatttgttatctcagtctctgttgccagccatagtagaactagctgaggatcggcactggagagttcgacttgcaatcatagaatatatacccttattggcaagccagttgggtgttagtttggagctctttgcatgcaatggctaaaggacaaggtatactcaatccgtgatgcagccgctaataacatcaaacgcttggcagaagaacgcggaccagaagaatttggaccggattgggcaatgcagcacattattccccaggtttttcgacatggttactgatccacattatctgtatcggatgacaatcttacaatcaatttctctactagctcctgttctgggctcagagatttcttcttcaaaactgctccctctggtcattaatgcatcaaaagatagggtacccaatatcaaattcaatgtagctaaagtgttgcagtctctcatcccaattgttgatcagtctgttgttgagagtaccattcgtccctgtttggttgagctcagtgaggatccagatgttgatgttaggtttttcgcctcacaagcactacaatcttgtgatcaagtcaagatgtctagctagatcagtttgcatgtggtctttagttttttttttttcttataagatttacattttcttgtgtaattgacatgacgccaacttgccccatcctttgtatcacataattgttgtgatcctgctttgctttcattttatccgtatctatgctaccgggttctttgtagtgatgaaacattgttcagaattgagatgggttttgacgaccactaattatatggtttaccaatgtgaagattttgtatgaaattttgatttaccaatacaatgaatatattccattatctgcttaaaagataaacgtttataaatttctggtgcttgtttgtgttatg

SEQ ID NO: 84545 - DNA, 429 bp, Glycine max
  Clone ID: PAT_MRT3847_4735C.1
actttgattatctgttctctagtaacgctctgaatcgcgtatcgtcttatacatgaacttgatcagtgatagattgcaccaggcagagcatcatttgggtccattatagaatgactgaatctcttttatgaccgaaaggatgctaagcacctggctcccggtaagactgcgaaaaccagagcaccagaatccgagaacaggtcaagaaagaccatcacaagcctaaatgacgcatccattgctggctttgtggaactagaggagtccatgatgaccttgaaggctgacaatactaatgcgaaggctgtaccaagtggtgataatgctctaggatatatatgcttatacttgtacagtgctgagatagctccatatgaagcctacgctgcgaaaaggaaagctgaacttgaaaaacttatcaaagcttat

SEQ ID NO: 84546 - DNA, 966 bp, Glycine max
  unsure (1)..(966): unsure at all n locations
  Clone ID: PAT_MRT3847_47360C.1
gttatcaacagattcatctcaacatgttcgctctgcactggcttctgttataatgggtatggcaccggtgttagggaaggatgctacaattgagcaacttctgcctattttcctttctcttttgaaagacgagtttcctgatgtcaggctaaatattatcagcaagcttgatcaagtgaaccaggttattggtattgatttgttatctcagtctctgttgccagccatagtagaattagcgcgtccgcggcactggagagttcgacttgcaatcatagaatacatacccttattggcaagccagttgggtgttggtttttttgatgataagcttggagctctttgcatgcaatggctaaaggacaaggtatactcaatccgtgatgcagccgctaataacatcaaacgcttggcagaagaatttggaccggattgggcaatgcagcacattattccccaggttttggacatggttactgatccacattatctgtatcggatgacaatcttacaagcaatttctctactagctcctgttctgggctcggagattacttcttcaaaactgctccctctggtcattaatgcatcaaaggatagggtacccaatatcaaattcaatgtagctaaagtgttgcagtctctcatcccaattgttgatcagtctgttgttgagagtaccatccgtccctgtctggttgagctcagtgaggatccagatgttgatgttaggtttttcgcctcacaagcactacaatctagtgatcaagtcaagatgtctagctagatcagtttgcatgtggtctttagttattntttttttcttataagatttccattntctttgtgtaattggcatgacgccaacttgccccatcctttgtatacatataattgntngngatcctgctttgctttcattttatccgtacctatgctaccgggttcttttgtagtgatgaaaca

SEQ ID NO: 84547 - DNA, 256 bp, Glycine max
  unsure (1)..(256): unsure at all n locations
  Clone ID: PAT_MRT3847_47361C.1
aaaaaccggccgaccgacgcgtacgcttacaattntcaaagcccttccttacatttatactttcctgtccaagctgttattcacctgctctattcaaaagaccacatagcaaaccttcaaacacaacaatcaccagaagttcaagcacgacatacatacttacaaatcaaaaaaaatcccaaaaacagattcacacgactaaattaccttcgaaactattcttgagggcacgaaatcaatttaataacaatcctta

SEQ ID NO: 84548 - DNA, 550 bp, Glycine max
  Clone ID: PAT_MRT3847_47362C.1
ggggaaagaagcagttatacaccctcgagaatggtgaaattccaggcaaaattataaaaccatttttttctctccgtccaaacggcagatccgatccgccctacaatcccctctcagtttttctctcgaggatccggtgaaacgacatggcgatggtggaccagcctctgtatccgattgccgttttgatcgacgagttgaagaacgaggacattcagctgcgcctgaactcgatccggaggctctccacgatcgcgcgcgcgctcggcgaggaccgcacgcggaaggagctgattccgttcctcagcgagaacaacgacgatgacgacgaagtgcttctcgcaatggccgaggaattaggcgtcttcattccctacgtcggaggcgtcgaccacgccaacgtgcttcttcctcccttggagactctctgcaccggtgaggaaacctgcgtcagagacaaatcggtggagtcgctgtgcaggattggagcacagatgagggagcaagacttggttgagcacttcattcctttattaaaaggctggctgct

SEQ ID NO: 84549 - DNA, 195 bp, Glycine max
  unsure (1)..(195): unsure at all n locations
  Clone ID: PAT_MRT3847_47363C.1
cngcacgcgtacgtaagctcggaattcggctcgagccctcctataagttcctctgcagagcntgtgagcgtttgataagagaaactgcgttttctncttcagtctgctttctcttccatcaacacatggactgattttgcattgtttatctcagttgaataataaagggttgttaattgaaaaaaaaaaaaaaan

SEQ ID NO: 84550 - DNA, 256 bp, Glycine max
  unsure (1)..(256): unsure at all n locations
  Clone ID: PAT_MRT3847_47364C.1
gaagtctctaatctacacgttgcgatcggcaaaaacgtgaatgctcactaagtacacgaaatgcaggggaaacttcaactgcatcaccttgcagtaccttcataanctgcctgccaccaacaacatagtcacctacaactacaacacacacacgttcaattacctcatgcgcgatgagtacacatattgtgggagtgcagataaatcaatgggaagacagtggcgcatgactttgctggaacatatcaaagatgaa

SEQ ID NO: 84551 - DNA, 739 bp, Glycine max
  Clone ID: PAT_MRT3847_47365C.1
ttccaaaagagaaaaggcaattatggaataaattataaatattcccaaactaaagaatataaataaatgaacacttgctactagccaggtttcatgagcagaggcctgaatttgactaatgttatcagtagaaaacactacagaatcatagaatcaaactatgacatgatcttgaaagcaaaatttagtccatttgagaccaaagctttaaacaatggcattagatagttttagtagcaagaagataatatctttaagaaagcagaagactttataaagcatcagtaaccgagggaggcttgtggcttatgaccaacggaggccgtagagctctgtgtgcttcctccttctgcttgcgtgccttgtacatttcctctgtctcgataacaactaacctcttgacctgttggagcattcccctaactgtaggtgtgttccatcgcatgacagttcgattgcatttgcgcaagcgaagtgcttccaaagtgcgcctatggagcctcctggtccccggaatacccctaactagagttatatagatattggggctccaagcaattggcacacaggccttatatgccttgaacgcattcatgccttcagcgtaacgcgtgcgtgggtgagcgaagaagaacaatcacccgaaaaggttatgggcaggaaccactgacggaagtgattgggataaaaaataagaaacccctaacgcacccaaccaacaaaacgcaccggacgcgtg

SEQ ID NO: 84552 - DNA, 325 bp, Glycine max
  unsure (1)..(325): unsure at all n locations
  Clone ID: PAT_MRT3847_47366C.1
aaagaaaattnattttttttnnagaatgnnaatnnnttntgagaggnagatgtnttttnaaaaaggaaatggntntggtgattntgganttgttntntnaantgatgntaagnntagattgaaatggaaanntgatnttnatgnaaggtttatagaagttgtgnagnaattaggaggagntganaagggaantnnaaaaaaggtaatgaaanttatagggattnngggtnttannttatattatntgaagagnaatttnnagaaataaagattgagnaagagtntggatggaaaaagtaaaaatatgaaanaaaaaataaanata

SEQ ID NO: 84553 - DNA, 265 bp, Glycine max
  Clone ID: PAT_MRT3847_47367C.1
ttttattttattattattttttttgtttttttattatttttatttttaaatttgtggtttggaaccatttttttttatagttcttttttattacatgggatagggggataaccctgggcagaacagcgcaagtcagaggccataaggtacggagcataactaacttaactctaaaagagtgaggggacgcaaaagaccgaagtactccaaacatacaactacttgcataaacaaacctaacatgttataagccggagactacagg

SEQ ID NO: 84554 - DNA, 1526 bp, Glycine max
  Clone ID: PAT_MRT3847_47368C.1
gtaagctcggaattcggctcgaggaacaagagagagggcatcaccaaagaacacgttcactctcgattttgccttgcaaactgcgatttctctgcagtttcttctaccctccaactctgacctttcttgacgcgattttggctttcatcaacttcttattgaaatccttcttcagtcttctcccattttccagagttcttaaaaattgatgcttccttacaagtctttctgagcattccgtttccttcctccagggaaaagttagcgtgtctttaggtcacaggattttgagagatttactttttaatctgcctctgaatcaattctgcaagaagatatataatgtttggttcaaagaaatctcctttgaaggttgctaagcctagctctgttgagtcttggacgaatccatttgattctgatgatgagggaaaggataccaaaaagtatagttcctctagaaaaacttcttcggagcgcgcacttgctacactgggagttaacaccaacccctttgatgatgatattgatgccaataagaaatcttcatcaacttcgtatgcctttcaatctgccaaccggaacaggtataagaatgattttcgtgattctggtggactagagaatcaatcggttcaagaattggagagttatgctgtttacaaggctgaagaaactacaaattcagtcacaaattgtttgaagatagcagagaacataagagaggaggctacccagacactagtcacccttcatcaacagggtgaacaaattaccaggagtcaccatgttgctgctgacatcgatcatgatctaactcggggagaaaagctcttgggaagccttggtggcctcttctccaaaacttggaaaccaaagaagacacgtgcaataaccggccctgttattgttggagatgatccagtcaggagaaagggtaatcacttggagcaaagagagaagttggggctgacttctgcacccaaagggcagtccaagctacggtccccacctcaagaaccaacaaatgcatttgaaaaagttgaggttgagaaaaataagcaagatgatgcactatcagatttaagtgatctgttgggagagcttaaaggcatggctgttgacatgggatccgagattgagaggcataacaaagccctgaatcatctctatgatgatgtggatgagttgaatttccgagtgataggtgctaaccaacgtggacgtcgtttgctcggaaaataagattgattgatttcatcgttgtgtttttctctttgtatccatcatctggtttaatgaagacaatcttttcatttagtttacacttgtgttgcattatatataaaatatgcaacagattaaacttgtcttggtgtcatactacataattcaatttgttcatttatcttgctggttttataagtagagcctctatcaagcaaattgggtgtccatcattgaactgtatctctgtgattgcgaaagtgctgaatgattaatacacagtttaatttttataaaaa

SEQ ID NO: 84555 - DNA, 206 bp, Glycine max
  Clone ID: PAT_MRT3847_47369C.1
accgctgcgagaagacgacagaaggggactaagcagagtatctaactaacttaaagagagtccaagtgtgtgggacacaaatagatacatggctaagtggtgtatgttagtcttggatcttgctctgactaaggctacaagtgccagagatgttcccaatcccaacgatgctggtctcaatgaccagaagaactccatcaactatg

SEQ ID NO: 84556 - DNA, 1049 bp, Glycine max
  Clone ID: PAT_MRT3847_4736C.1
ctggtctaccaattgaccattctaacatggtcgatctttcaactcaaacttctggcactttgaccagggattggagcccaatgagtatatgtcctcctcatggaagggtgtcatcatcagtcatttccttattggaagcagttctagtaatgctcctgtagatgttggaggttttcataatgaatttggaactagtagaaatcctactgctcctcaaagttttcataataatctgactcaaactgcaagaggagttcacagtaactactctcaaagatccactccaacttttagggcttcttctagcttacgtttgggacgtgtggcaccttctgatgatggattgcatatggtgtccgaaagttactcttctagacagccaaggccattgaccaccgttggctggcagaacaataatagaaatggaagatcaagaatacctagtgacagatatcggtcattggatgatgagggtttcatgattgttgatcgcacttcactgtatggacctaggaatatgcttgatcgacatagagacatgaggatggacatagacaacatgagttatgaggaactacttgcacttggagagagaataggccatgtgagcacaggattgtctgaggatttgatttccaagtatttgacagaaacaatatactgttcatctgagcaaagtcaagaagaagaagcttgtgcaatctgcctggaagaatacaagaacatggacgatgtcgggacgctgaaagcttgtggacatgattaccatgtgggttgcattaggaagtggttgtctatgaagaaagtatgtcctatatgcaaagcttctgctttgcctgaggataagaagggcaaataaacaatttattcattatactttagtttaacgtatatcatcattctgtacatatatttggatattccttgaagtggagaaaacagacttccatttggatatgttgttgtaatagctaatgctatactctatctatatgtctatgaattcgttctctttggcttcactcttaatttcgtgaagccttgaaatt

SEQ ID NO: 84557 - DNA, 1619 bp, Glycine max
  Clone ID: PAT_MRT3847_47370C.1
ctctcgtgcagacatctgttctcgttaactctctatctgtatgcatatctttgctagaccccaagagacatacttttggcgcttattatacatataaccgccaaatgactaatggatctactgtggctgcaaatcctgagactgttgaaggcatgcttgaaagcctaggtgatttactcaagctcttagatgtttcttctgctgaaaatctcttgctaactacttttggcaagttacaaccacctcttggtaaacatcgtttaaagattgtagagttcatatcagttttagtaactgttggcggtgaagctgctgagaggaaattgattgatcttggagctgtacaaagaattattcacttgttctttgagtacccatacaataactttttgcatcacctcgtggaaaacattataatgtcttgcttggagagtaagaattcttctcttctggaacaccttctccgtgattgtgattttgttgggaaaattattcaagcagaaaagctattcacgttagaagctgatacaaacaagccaacaatacctgctgaaggtaaatcagcacccaggataggatgcattggacacataacccgtatatctaacaaacttatccagttagggaataacaacagtgtgattcaggaacatttgcagggaaatagtgactggacagattggtacttgagtgttttatcaaatcgcaatgctgtggaaaatgtctatcaatggtcgtgtgggagaccaacagcgttgcatgacagaaatagggatagtgacgaggatgattatcaagatcgggactatgatgttgctacattagcaaataatttgagtcaggccttccgttatggcatttacaataatgaagacattgaagaggttcatggctctcttgaacgagatgatgaggatgtctattttgatgatgaatctgcagaagttgttatatcttctttgcggttgggagatgaccatgaaagtgggtctctattcacaaattccaactggtttgctttcgaggagggtagagatcgggtaggcaatgaacgctcaacaggttcccttgcttctccatcacctactgctgatgaggtttttgtaaaagccagtggggatgatgttattgctggtgaagatgaggagttagctgacactgcaacatctccagaagcaggactaaaattagaacatggtgggaccgataaaccagttgagtgggttgagtggagggaatcttcagatgccaatgacccttctgatgttcttcccaacggagtacttgagatagaacctgggagcaataatcctggtgtagctgaatcatcatctccatcatccagtgttgcattaacaaaggatgagcagatagctactgatgagccatcagcatctctcaatgactcaagcattgaaacctctgacagaaacaaggacaaaactgagccaactcaaggagttgaaactccaagcacacgtgcatctgccacttctgtggatgacccagtcaccgaggttggaggagaccgtaacaaggacacaactgacaacaaaaaagctgtggataggcctgtcactgcagtggaaggagacagtaaccaggacacaactaacaac

SEQ ID NO: 84558 - DNA, 256 bp, Glycine max
  Clone ID: PAT_MRT3847_47371C.1
gttttaggattgcaagatgagtcttctattgattccgtatatctagtatgaaagtccaatgggtaaaaccttgggcttttatccacaaggggacgggttacttccaatcaaacactacaatgaaaaccaccatcactatcattatcataaacatcattttaactaccaacattcctttcctatatactcttaaccataaaccaacacttgccaaaactctctcctaaaacttccaaaacactttctccgctcaaca

SEQ ID NO: 84559 - DNA, 549 bp, Glycine max
  unsure (1)..(549): unsure at all n locations
  Clone ID: PAT_MRT3847_47372C.1
aggacctccaacatttttgcaatattattgagcatactatccatgcagacaccaattttgttaggtttgcctttcctttgaactaatgtccacaatttgttaatgttgagactaagattactaatctacacgtcataattatcatttttaacagtaatgaacgtctcttaccacttcttttcgtatgaccaagcatgacaatgtctaataagagtgggaaggtctagtaattcgttcattttgatttcaacatattggcgttcaatgttaaagacttcacacacctgatgacgggagctttaacatatgctaacttgcctttcctccccaacaattgcaaatatctcattcactttgggagggacatgttcacctctgcaagccatgttgttaaataaacctgtaaaacctcgggattgggttgggttgtcaaatcttaaagcatcaatgccagatttcccatcccttaatcttggnggaactggcccatgagtcactacacagtacaaattgcaggctctcaaatctttaaattcatcatcataaagc

SEQ ID NO: 84560 - DNA, 215 bp, Glycine max
  Clone ID: PAT_MRT3847_47373C.1
agttattgtttactctaaggaaatctagaaatcttaccttattataggaatgaagatgactagagaaatatttgtattttatgtgtacaaaagaaaaacagatgagacgattaaagaattactgcatgactagccagaatgggcagaaagcatggggctacaaaatggacctacaacatctggtccaagcccaagctttatgcaaaaggccgaag

SEQ ID NO: 84561 - DNA, 348 bp, Glycine max
  Clone ID: PAT_MRT3847_47374C.1
cccacgcgtgcgcttcgttgcgagctataagctagttgatcgtgaggagaatatgacgttgtgagctgtctttggagctgcagtagttatggtagcatggccatgccatgtcgcaagctaccaaagggtccctctacgaatgaaaactgcctatggtgagcgatctttacatgtaaaatgcacaagaagtaggcttgcttgagaagctcacaacatgcgagcctttaaaaccattcctgaagagggcgttgaaccagcagacgactacattaaaggctaacaatttacatccgactattaaccagtttatcgacaagcgctctagtatgctagtgaacgcgaagtcca

SEQ ID NO: 84562 - DNA, 538 bp, Glycine max
  unsure (1)..(538): unsure at all n locations
  Clone ID: PAT_MRT3847_47375C.1
ttttattagtgatacataatgagaaataccatgcgctcataagatatttatttgaaagaatttgccaaaggaaataatttttaaaaggtagacattggaggtgcatctcgcaacctcatcattgtcgaattaagatgagaatggaaattagaaacaattgtgatgcgaccgctacaaaggtcgttggaattctacaattgatgaaaagttctgactgtgaaggagataaggataaaaatatgtgcccattagaacacactggttttcactctgccattgaagattagaggagccagaaaaccaaacaaaaaagaagaaggatttgaaaaaaaaaaggtgccaaaagcaatgatagggtaaaaattgaaaggtgttgattcaagtagaattagaatattaaagttacaggaaaagaatgcttgggggaagagagtgtggcctaaggacatagtcgtgcatgagataaggataaaaaggaaaaaaaaagtgaaatatacggaaatagaggtgtgaaaaacaaaangaggtaatgtaaata

SEQ ID NO: 84563 - DNA, 310 bp, Glycine max
  Clone ID: PAT_MRT3847_47376C.1
accggggcggggttaattttaaattccctttgctttcaaccacaggaaaaacttacacaatggaaggaggtgcaaggaagaagaatggagagtttccgagtgatgctggtgtcatcccaagagctgtgaaacagatttttgatatattagaagctcagaatgccgagtatagcatgaaagtgacgtttctagagctttacaatgaggagataacagatcttttggcccctgaggagactttaaaatttgtggatgacaaatctaagaaacctatagctcttatggaggatggaaaggggggtgtattttg

SEQ ID NO: 84564 - DNA, 671 bp, Glycine max
  Clone ID: PAT_MRT3847_47377C.1
ccccaatggcatggcttgatccatagatctgatctcccctagtagaaaatgaagtatggagttcattccttaatgcccctattcttctaatcaaattgtagtttcaactcaaagtcaatatgcctaacagcttaatcttttaagatgattgtttgcttacaaagatgattaattattgttattgctagatatgaaaaggtataatatcaataaaaccttaagaggcttcactgctttaatctttaatttatgttgaaatcatattcataggtgaacattagaagtgttgatgaagctgtagtgattggtgctgcactctctctgtcttcttctgcatttgttctatagcttcttgcagagagaggtgagcttcctacgagatttggttcagcaactctcagaatacttctttagcagatttgggtgttgagaaaggcattaaattggaaggtttgtcagaggcgcatatctttaaggcacttgaagatttggtggaaatctccggcggagtaaacattccaccaataatatttactatacaagtgaaagaaggaatcacttctaccttgtatggatcaagaaatcttattagttacttttttggtcctttattgtagaattaaattgatatattttttaggtgtaattataagaaatatagattcattttc

SEQ ID NO: 84565 - DNA, 506 bp, Glycine max
  unsure (1)..(506): unsure at all n locations
  Clone ID: PAT_MRT3847_47378C.1
tcgaggtctgtttgtcgttggaccagagagcgcaagcgcacacccaggcccagcatgttaccgcaaaggtggtcctctgaccatcaccgacgccaacctgttcttgggcagactactacccgacttcttcccaaagatctttggcaagaacgaagacgaagggcttgatgagcaggcaagcaaggctctttttgaggagctgacgaagcagatcaatgaggatactgctggtagcacagacaaggccatgagtctggacgaagtggcgtacggtttcatcaagatcgccaacgagaccatgacgcggcccatccgcagcttgactgaggcacggggacacgacacctcgaancatagactggctacctttggtggcgctggtggccaacatgcagtcgctatcgccgaatcacttggcatcacccagatcctgggccataagtactcttctgagctttctgcatacagcatggccctggccgatgtggtcgacgagaggcaagaac

SEQ ID NO: 84566 - DNA, 164 bp, Glycine max
  unsure (1)..(164): unsure at all n locations
  Clone ID: PAT_MRT3847_47379C.1
tcncgcttcncgtnagctgcgnaattccggnccggtcacnntnccaggcgtgaccagtgctntaccntcatgagtagagtgcgtnatnagaggcttgggccgtacgtncatnggtacatagactgtttgcntgtgngaantnggttataccggctgcagcaatt

SEQ ID NO: 84567 - DNA, 568 bp, Glycine max
  Clone ID: PAT_MRT3847_4737C.1
tttacgcgcgagaattaagagagataggcatacgatgggttctgaaggaaaacctatgcttcctgttctagatttcaccatagaagatttgaagccagggaccaattcctggttatcaacatgcacaagtgtgcgccaagcatttgaggagaatggttactttgttgctgtgtatgataaagcttctattgagctacaaaatggtgtatttggctccatgaaggagctgttcgatctcccaacagaaaccaaacgaagaaacatatttgagggcatgcccttgaaaggctacgttggacagcaccccaagattcccctccacgaaagcatgggcatagatccgggaacaacactagagggaattcaaagtttcgcagaaaaaatgtggcctcatggaaatgattcaatttgtaaatatatatttgaatatgcaaaggtagctgaagtattgaatcggatggtggtgagaatgatattttgaagttatggtcttttggagcactatgacacattcatagggtctaccaattatcttcttaggcttttggcgcacaaagcgcctcggaac

SEQ ID NO: 84568 - DNA, 816 bp, Glycine max
  unsure (1)..(816): unsure at all n locations
  Clone ID: PAT_MRT3847_47380C.1
ccacgcgtccgcagttttgtaccgttgaacaccgattaaacattctctctacttctgctctaaatggagatcaccggcttggtccctctcgtgggtgagaactacgccctcaagctgaaaaattccatgcaagaccttttggccgagattcctaaagaatccccaaatttttctcctttcgtcgatgcgttttacgaattgatgcaagcgaaggttgattcatcctttgaggtgatatgggtctacgctgcaattaactttcgtggtcgtaactcggagaaaggtgatgccttggatcgaatattggccgcaaaagacttgtttaagttgctatctgcgtgttcggcctctatttgtgcttcgaagagcatcgctttgctggctcctgttgttttcgcgatgcacggagtgattgtggagctgtttgggagggaattgatattgaagagagagaagaaagcaatgagggaggtgaagtctttggtggatgtagttcttgggtatataagcatttgctgtgataacaaggtttataaggaggaaactgattccgtgaatttgattttgccttttactgatttggctcgtgtttcggtggacatgaatggtgatgatgaagggtttaaatctttgttgcctcttgtgagcggtgatgtttgtggctggatttgttctagagagtttcatggtggctacttgggtggtgctgtcatcatggaagcgtttttcatgaaactttgcctttcttttcatttggtaacgtcaagggatgagttggnaatgaatctcaagaagtgggctgttggctcaatatct

SEQ ID NO: 84569 - DNA, 289 bp, Glycine max
  Clone ID: PAT_MRT3847_47381C.1
cacacactaatattccatactctcgtcacacatcacaaccattcttaagccaacaacaccttctcagatcttacaacgatattttaatcgtgttttatgatgactgtatctctgctattatgggtgatagcacaatgtgttgtgggagtgaagggacttctacaagctgatcagataaggagtggggcagggcacccaccagtcaaaatccagcaggtgtgcaggtttcattacattgaacgacatgcagatgagagccttgtcttactacgtttgtgggatctgaagt

SEQ ID NO: 84570 - DNA, 152 bp, Glycine max
  Clone ID: PAT_MRT3847_47382C.1
gaggagaaggggaaatgagataaagggcagaaacacaatagaagttcattcaagtttgaaataccaattcggacttttgaggatctgtggaatctcacaactgtcaccagtcgccagtgtctatgcattcggatcattcccgagatctgatc

SEQ ID NO: 84571 - DNA, 255 bp, Glycine max
  Clone ID: PAT_MRT3847_47383C.1
acggtacaggatgaccataatgcccaatgtcatctatctctgtcgcggcattctactagtatgtgcttaggatcatgctcaggagtatgacctgcatgatgactactgcactgataatgcacacattgctcgttatggacatacgtgtcgtgactgagctcatgtagctcactgatgtagacagatgcgtcgacactagcttctcttgtgcatacgaacctgtacgtctcagaggtgctgaaacaagcagagatc

SEQ ID NO: 84572 - DNA, 1078 bp, Glycine max
  Clone ID: PAT_MRT3847_47384C.1
ggcgggaaagcatgctgcgattcggtcgttctgagggaaaaacaacccatcggtacgacccacgcgtccgcccacgcgtccgtacgacagctagaacacgacagaagggggatcacaaagaaacagcaagaggttttgagggtgaaaccactcttaatttgaagccatggtctcgtttcacaaggcgctggccgagagtactccaaagccagaaattcatgcagaattcgaagcatcatcaaagaaaagaaagtgggaagagccattaaccgaaggtttcttcaaggatcaaatagagaaaaggaaatccgtctttgatatagagcttcaccctgagacccctttttcttcagataaatggcgtcaatacctcactattcagtcagggcagatacagttgtgtaacacaagaacaacaacagagaaccccaaaaaaagctccgaagaaccaccttcttctcatcacatgagtttaaaccttgagctaaatttgatgtgtgaatcaccgaggaaaaaagaagaaggttatggttatgaaatgaatgagaaaaagagttctggttcttcccctgggggtttgagtgaacgtgaggatctgtgtaaaaaagattcagatggtaaaattctttctccctcgtggttgtcatcatctgaagatgattacaaagagatggttgcaacagtttgcatgcgctgccacatgttggtcatgctatgcaagtcatctccttcatgtcctaactgcaaattcatgcacccaccagatcagaacccttcaaaattcttaaagagaagatgcagtctcttctgctagtttaatttaattattgggaacgtcgatcaaatactacataagttttcacctttcaccatctttctacttttccctctgaatagcctaagttcttcaaatatagctcaagtgtatgttcaaaacggtggggtgatgattaatcttgctctaagtaatatggtacttaatttcattgttagaacaaatgcgaataagtgagtaccgtagaagctaacctggaatatatcatcatcacatatttatgtgtatatagtattctcgagt

SEQ ID NO: 84573 - DNA, 528 bp, Glycine max
  Clone ID: PAT_MRT3847_47385C.1
ccctctcgtccggggaagctcatcctatataaaggcctcagtctcgtattagattcgatcacaaagaaacagcaagaggttttgagggtgaaaccactcttaatttgaagccatggtctcgtttcacaaggcgctggccgagagtactccaaagccagaaattcatgcagaattcgaagcatcatcaaagaaaagaaagtgggaagagccattaaccgaaggtttcttcaaggatcaaatagagaaaaggaaatccgtctttgatatagagcttcaccctgagacccctttttcttcagataaatggcgtcaatacctcactattcaggtatctttgtattggaaattaaagccacaaccatggcatgatcttcatgttaattaatctttgatccttttttttttctgtgtgtagtcagggcagatacagttgtgtaacacaagaacaacaacagagaaccccaaaaaaagctccgaagaaccacctttttctcatcacatgagtttaaaccttgagctaaatttgat

SEQ ID NO: 84574 - DNA, 245 bp, Glycine max
  Clone ID: PAT_MRT3847_47386C.1
acacgctccgaagagaagtggatatggcggaaactcggtgtttggcaattatcgacgaagaggaaatagaagtagacgacgatgacatctacgagaacattgaagctcccaagttcgtcgacctcaccgcacctgattgtcgccgccccgaccatgaccgccactggttctgcttccgcgttgggtgtgaccaaaagcatgagcaagagttggactctgaggcaatttacaagaattttgttctt

SEQ ID NO: 84575 - DNA, 993 bp, Glycine max
  Clone ID: PAT_MRT3847_47387C.1
ttgcactcgggctcgaggttccagcggcggtggtggcggttttagtggtggtggaggtggtagcgggagtggaacgaagaagaggtttaggacgaagttcacgcaggagcagaaggataagatgcttgcatttgcggaggagctagggtggagaattcagaagcatgacgaagttgctgtggaacaattctgcgctgaaacttgcgtcaagagacatgtgctcaaggtttggatgcacaataacaaacacactcttgctaattctgagcaacgttcagctgggaatggatcgaaccacttgaacagcacaacaataattgagaattctcaattatcctaagggagattaacgaaataaagagaaaagaactgaagttggaagaagttcatggaagggtttgcaggtgttcatcttatttatttatcaggtgatggtgaggaggggggagtatgcaatggaagtatgcggatgagcacagagaataaactccaacttaaagttgtattcaattaacgtgcgtggaatgcaagtgcaaagctgagttttgctgtgttccttcgcatttgtcgtctttttttcctccctaacaccgccctagtttagttttattatcgtttctctctcatattaatgtcgatctcctcttctttctttgcttctggacacattagacctgaaagttcacaaacgatttaatgagtccaagagattcatgacccgaaactgaagtgagacaccattttcttttggtctgattcaaccatcgccatattttatgttcttttttacgttgttttcagttgtttgtttccgggttttgttcaagactaggtaacgcgtcccccattattaattgctctacggattttcagttcatttcttctcgatctttatgtgtttggtcgctgttgggtaattttagtatttttttcttcttatctctaatgaaaattgagaagagtgtttgttgataaaaaaaaaaaaaaaaaaaa

SEQ ID NO: 84576 - DNA, 1356 bp, Glycine max
  Clone ID: PAT_MRT3847_47388C.1
gggacacttttccggtgggcggtttcagcctcgagcctcgcgcagacccctcaacattaaaagcaaggagtgagggtccagcagagatcattaggcatgttttgtttgggtactttagccagaaaacaggactccttgttcacttggaggactcccatctgacacgcattcagaacaatggtggcgaggcagtatattgggagaccacaataaattcatttcttgacgattacaggcctgtcgaggggataatgattgctcactcgggtcgatccgtggtgacgcttttccggtttggggaaacagcgatgagtcacactaaaaccaggatggaagaagcttggacgattgaggaggttgcgttcaatgtccctggcctttctgtggactgtttcattcctccgtctgagctaaggtttgcttctatgagtgaagcctgtgagcttccccaaggtcagagggtgaagactgctgtggcagcagctgcataccatgccaaagtcactcaactacaaaaatcgcacgatagccacacgaataacattagctggacagtggatgtttagctgagaggatgtttgtggattagcgtaggcgtctagtttttatacctttggtggactatctgacaaattactgcaggtaaaatggtaagattgcagcgggttgtcaagagttttctgctgtgggtcattgcctcatcaaatttgtaaatagaaatgatcagtcatggatcctgataagtgaatttctattctctgggtttttggtggatgattatgtgcatcaaggtttgtttttcccacttgctttccgtaaatgtgaaattgggaacatgctgatccgttttatattctataattcctgtagagttttttttttcttcctgtgaaagcattaaccataatgcttggagatcacagttataaccttgatttcgtcactgaaaagttttggctgagtttcaaggagcagcatttgtcagatttaatattgatgttatcgttggtatccgtaaggaaaattcttccatctttgaaggaaactatataggattgaagaactctagatgcttttagtgctggttttttttattatgaattgtaaaccaagtagccagagtatgtagaagctaaattattcctaggatttttatgcttttaaggacatatatatattgacaattatcacaagcttgtatcaatatttaattgtagttgttagaaaaatgtcaagatttcctataaaaaaaaaaaaaaaaaaaaaaaaaaaaaaaaaaaaaaaaaaaaaaaaaaaaaaaaaaaaaaaaaaaaaaaaaaaaaaaaaaaaaaaaaaaaaaaaaaaaaaaaaaaaaaa

SEQ ID NO: 84577 - DNA, 713 bp, Glycine max
  Clone ID: PAT_MRT3847_47389C.1
gctcaactacaaaaatcgcatggtagcaacacgaaataacattaactggacagtggatgtttagctgagaggatgtttgtggattagcgtaggcgtctagttttttatacctttggtggactatctgacaaattactgcaggtaaaatggtaagattgcagcgggttgtcaagagttttctgctgtgggtcattgcctcgtcaaatttgtaaatagaaatgatcagtcatggatcctgataagtgaatttctatactctgggtttttggtggatgattatgttcatcaaggtttgttttttcccacttgctttccataaatgtgaaattgggaacttgctgatcattttataagctataattcctgtagagtttttttttttcctgtgaaagcattaacgataatgctcggagatcacagttataaccttgattttgtcactgaaaagttttggctttgagtttcaaggaccagcactttgtcagatttaatattgatgttatccttggtatccatgaggaaaattcttccatctttgaaggaaactacataggattgaagaactctagatgtgtgtttagtgctggtttttattatgaattgtaaaccaagtagccagaagtagaagctaaattattcctagatgtacgatttttatgcttttaaggacggacgcgcgcgcatatatatatatatatatcgacaattatcac

SEQ ID NO: 84578 - DNA, 898 bp, Glycine max
  Clone ID: PAT_MRT3847_4738C.1
gaagctgggatcggctcgagcaaagttttcgtaataatctgactcaaactgcaagaggagttcgcagtaactactctcaaagatccactccaacttttagggcttcttcaagcttgcatttgggacgtgtgataccttctgatgatggattgcatatggtggctgaaagttactcttctagacatccaaggccattgaccactgttggctggcagagcaatgatagacatggaaggtcaagaatacctagtgatagatatcgatcattggctgatgaggttggtctcaatgaacgatttaactctgagggtttcatgattgttgatcgcacttcactgaatggatctaggaatatgcttgatcagcatagagacatgaggatggacatagacaacatgagttatgaggaactacttgcacttggagagagaataagccatgtgagcacaggattgtctgaggatttgatttccaagtatttgacagaaacaatatactgttcatctgagcaaagtcaagaagaagaagcttgttgtatatgtcctcctcatggaagggtgtcatcatcagatgcaaatgcttttaatcacgaggcaagtcatttccttattggaagcagttctagtaatgctcctgtagatgttggaggttttcataatgaatttggaactagtagaaatcctactgctcctcaaagttttcataataatctgactcaaactgcaagaggagttcacagtaactactctcaaagatccactccaacttttagggcttcttctagcttacgtttgggacgtgtggcaccttctgatgatggattgcatatggtgtccgaaagttactcttctagacagccaaggccattgaccaccgttggctggcagaacaataatag

SEQ ID NO: 84579 - DNA, 405 bp, Glycine max
  Clone ID: PAT_MRT3847_47390C.1
gttttccttaagctgtttattgctgctccctgcagctctaattctaggccctcatgttcttgcaaactatgagaatcccccagtgttcatgcctcccactgataaaccaccagtttattagcccccaattgagaagcctcctgtctacaaaccctccagatgaaaaccccccaatttataagcctccagttgagaagccaccagtgtccaagcccccagttgagatacccccagagtacaagcccccagctgaaaaaccaccagagacaagcccccaattgataaaccaccattgtacaagcccccagctgaaaaaccctcagattacaagcccccaattgaaaaaccccccaattgttcaagccccccaatgtgaaaaatccacacagtgttcaaaacccccca

SEQ ID NO: 84580 - DNA, 338 bp, Glycine max
  unsure (1)..(338): unsure at all n locations
  Clone ID: PAT_MRT3847_47391C.1
tnaattttttttttttttttttgttggtttttttttttttttttttttttttgggaaaaaaaagctgtaattgggtttatttaccgggctctcaggtgctaaaactggaagttggatacaaaaaaagggtttcataggggggggttaaatcttactttttgaccgtgtgatggcgtacccgggggtcatacataaccaaatgggaagccttaaatgtgtttgggggcgaattccatgggaggggttttttgccctttaccaaattgttatggggggtgacaaacctagcatttgttatatttttgggggttttgttaaggcggtaaacattactcttc

SEQ ID NO: 84581 - DNA, 1239 bp, Glycine max
  Clone ID: PAT_MRT3847_47392C.1
atccatagccagtggaaattgaagagaagcttgaatacaaggatcaaattgatgaaattgataaagtttacaagagctatgcagagaagatgaagaaacttgatatcttgaataccagaccatgcatgcattaggtctgcttcaactaaaagaccctctaaaattaatttcatttccaaaatccgcaatccaaggtgcaaagcctgtaatctctcagaacttgtggccacgcaaagcttcaaagaactcatcagatccattggtaaagcttgttcatgaactgcagagagatttggaattagtatatgttgggcaagtttgcctctcttgggaaatcctttgttggcaacacaagaaagcccttgagttacaacaatatgattcacaagggtctcatagtcataggtataaccatgttgctggtgagtttcaactttttcaagtcctagttcagagattcatagagaatgagccatttcaaggccctaggctacagaactatgtcaagaaccgttgtgtgattcgcaacttgctccaagttccaggcattaaagatgatagtaaaggggatgaagaagaggatgctattgcaagtggaaagttggcagatatcatcaaggaatcaatgagggtgttctgggaatttgttcgagcagataaagattatgggaatgtgatctttaaagcttctcagcacaacagaattgatcttaaagaccctataatttctggtcttatggtggacattaaaacacaactacagaaaaaggagagaaggctcaaggacatagtgagaaccgggaattgcatagtgaagaagttccaaaagcaccatgaggatgaacttgatcatgagcaattggttgctcgggtggggttgagattgatttcaagggtggtaaacatgtccaaattgagaaaagaacagctaatatggtgtaatgagaagttactccgaatcaagtttttgagcaggaagattgttcaggtggaaccttccttcttgctttttccatgttgacaatttgttctcaattttagaggaagagaaatgctagaggaatagagatagggataccttttcacagaaaatgatatcctagcttacacagaaattgagacacacgccacagaattctcagtgtatatatataagttatatatataagcttgttgcttatacatcatggtaatataataaatggcaagcttggttagttcaaaaaaaaaatttttttt

SEQ ID NO: 84582 - DNA, 417 bp, Glycine max
  Clone ID: PAT_MRT3847_47393C.1
tttcatgcatggtcacatggcactaagagccggcttccgccactcgtggtggcattacaagaggccggcgtgctcgtgtcacggtggcaacatgccgcacaccaccgggcaccatataacaataactattgtatagtgagtggagtgtggaatgagtttttggataagcataaggtctttgaagccatggaaatggtattgtattttaaaacaggagttaggccaaggtcatggagtgaacctgcccctgagtgggttgaggagattgagactccttctcaaatccaaatccaaacccaatgaatgatgtttattctcttctccatttatttttaaaccatttataacacacatgtgtcaatgtagcttttgggtaatgtaaattacattatatttaaatattaagcttgaaaggtt

SEQ ID NO: 84583 - DNA, 523 bp, Glycine max
  Clone ID: PAT_MRT3847_47394C.1
ttggggggggggggggggggggggggggagagggaacggaataatcgccgaagaaaataaacgaagtagaagaagataacacataaggtatataggagaaccaaggaaacgcgaagggaggttaaagcaaaacatgtatagggcgctgtatcgaccacataggtaatgaggtaaacttaaccacaaggagcaagaccgcggataatacagggaatggcgaacgatggcgcaacccttgcgaagtttaaagtgtggttaaagttctgtagtggagatttgttaaaaccaatagtatgtttgatccgaaaagactacggcagttaaataagcttgctatcaagccattggcatagacgcgggctacgagttaaaggtggccggataaggttgctgctgaccttagatggccgaggcggactatggggaaggctggttgttagccgtggaaatggtagtactctgacgatacccttaaagagggtagtttcgctgaggactagcgttgttgggataggccacaaaa

SEQ ID NO: 84584 - DNA, 254 bp, Glycine max
  Clone ID: PAT_MRT3847_47395C.1
ttctatgaggttgatgatcgggagcgggccatggatttattaaatctagagaagccaccaattttggtttttgaagatcgtggcagaattcaatttaaaggactacgtctggttcttgtgaaatccattgctgaatgacataatttgtactcctatgcatgctgtgcactgaatggagctcccaaaaaaggaggatgtgaacatgttcgtagaagccacatgggattaattgtccatatcttttcccaaaatgg

SEQ ID NO: 84585 - DNA, 331 bp, Glycine max
  Clone ID: PAT_MRT3847_47396C.1
gtttatagcgtgcggatcaaagagctgaagcttacttggactttttccctgagtaggttgatagacactaggtagttgcttcacattggtgaatagaaatgaggcgagtatggaaaaatgcctacaaaaactaaattggaggaaacttctatggaatggcaacttggatctactttgtgccaaaacgcctagtgttttgactacaattgatgagagattggttggtacagaacatgagggatatgagctcatggttgcaggaattgaaaaaaatgccaaagtcatgatgcccttaaattaagaacttctttgtaaggatgcacaagacatg

SEQ ID NO: 84586 - DNA, 132 bp, Glycine max
  unsure (1)..(132): unsure at all n locations
  Clone ID: PAT_MRT3847_47397C.1
gggccgctctagctcgaacnctggcgnaaatcttttgggattcacagcagtctggttggcccatatatggtcaacatagggaaggtcattgcgaaaatgggctgtttgaacagtcaactattaccctttagg

SEQ ID NO: 84587 - DNA, 263 bp, Glycine max
  Clone ID: PAT_MRT3847_47398C.1
cagttgcccaattacactatcactattgtctttagcttttcttccaattacaacactgttattttccctcactttaagttctttcaaaagttagttcttaacatttgttcggaacaaacaaatgaacacacgtacagaatgaaaaactaggttcaaatctagtatgctattaattaaggcctaggaaagcagtatctcgctgtgtttccttcgatcaaaagaaccttccaggaaggttcctactggcataacaagtacaatgt

SEQ ID NO: 84588 - DNA, 277 bp, Glycine max
  unsure (1)..(277): unsure at all n locations
  Clone ID: PAT_MRT3847_47399C.1
tctanggtncgtangtnagctcggnattcggcncgngattnaattgattatntttaattataattgattnngtnnntcttngntaaatntgggntntnntatncatcnnggaatgngattacactgngnangtgaagaagatagntccncactcggaanaggcncgagccaaagatnangaagcngtngagaanaggcnanagnncnttgagaattacacggncaggaaggtnctgctggggcagancnacgnngcnatggcaacnntngctgnanc

SEQ ID NO: 84589 - DNA, 575 bp, Glycine max
  Clone ID: PAT_MRT3847_4739C.1
gggaaagaacattttcttttatagcagtgcccttcctgggaagcagacagacaagtctacatataccagcttatggtactgtaattcaagcaaaattttatactattcaaacaacttacgtagaaagctcataatgaatttttgcaagatcaaaatcatggtttatttaattctctgtttgaaacaattcatacaatttatagaaaattgtaggtaaaaaatgctcaagcatggcataaaagtgcaaaaactcaagatagttgaatctaatgttaacagagatgtattgaaattcaagcagaacaactgattaaattaataccacattagcatccaaggggggtggatagttttcatttaaagggtctatccaactgaagatcatgttatggtaaccatatggtttttctgccatgctcagtgcatacttccatgcagcagtctcattaaacctggcacgcaaagcaggggtgcattggaagcagagcaatatggggattggaatcatcattattcagttcaaaggcccacccactcttcccatgggatgacacgaattatatcttctccctttt

SEQ ID NO: 84590 - DNA, 576 bp, Glycine max
  Clone ID: PAT_MRT3847_473C.1
cggccgctcaggcggcgggcgggattccccttttccctctctcttccttctctttctctttgctttaccaaaacgcagatctggttacaccttctcaaccgcgaggccatgattaacgcggtggatcatctccgccgtttttttccaacgatcttgtttccttccccgacgacatccgcaacacgcaaaacccagtcgcgacccttcaactccgcgctggtcaccgccgccgtggtgccatcggtggtcgtgggatacggtaaaaggatgaataagaaaagcaaaaggatgaaagtgaaaaaaaggaaaagcgataatgcttttcgcggcggcgcgtgctgatcggagagaaaggaggaaggaaggagaaaatgaaacgccgccaccggaaatcccctccggcgacggtacacggtgcttcgcggcggaagatgttcccctttttctctctgctgcgtatcatgttacagggtcaattcccaatcattctgaattccagttttgattttaaccttagctcatttcacatggaatgtgaacaattcataaatttaatatttatagttatttcaaaaa

SEQ ID NO: 84591 - DNA, 477 bp, Glycine max
  Clone ID: PAT_MRT3847_47400C.1
gcgcatcattcgtttccatgtccttgaaactgccaattttttcctggaagaaagtgcaacagcaaaatgaatggaaaaatattgaagaaagggaagacggatagagatatctatagagaagaagaagaagatagtgaaactggacctgtcctgatccaaactcatacaacacactgccttgattgtggcctatgttgtgtctgaagacagaataaagcatgctttaacacgtgctttttcagtcccattggctccaacacttctctattgatttttgtacactttcttcctgagctaccttgttcttcagagagagaaaagaaagagttttctctcactgatcaatgaaaggggaagggagaatgaactctaagatgacatgggttggactgatccggcctgggctctgatcgttatacatattgattcacttcctacttgctagattcactcaaacgggtgtggcagactatgagt

SEQ ID NO: 84592 - DNA, 498 bp, Glycine max
  Clone ID: PAT_MRT3847_47401C.1
ggctaatataattgttaccaatgaggttgttaacctgtgtattttattttaactcactatttactattacttttgctatttcaattgttatcatcacttcattcctttcctaaataaggtcaaatattttcttcaaccattgcccttaatttttgtcaaactctaccaaacaaattatttagcattcgttcgttttcaattacccttgtttttaagatctaaaagaatcaatatgaattactgggactaaattcagggatattctggacatgaaaactgtctttgtcatttgtgataacagaaaagtgtaaaattaatgtatgatatgacatttgtctgagtaatctggaaatatttggtttccgaaagccaagattagaggtgtggccaactctacagaatgaagaaacaaaatgtgtggaaggattctgttatagttttaactagtatgtgtagtgtagctgactccattttattagcatttcttatggagctcga

SEQ ID NO: 84593 - DNA, 519 bp, Glycine max
  Clone ID: PAT_MRT3847_47402C.1
tttgaccgctgctagcatgtgtaggagtgccacctgcttggggggggggggggggggggggggagtgaaaaacgtgcaacgcgagtaaaaggaaagacatagaaacactacgacgcataaagcgacttaggaataaaatgaacaagataattagtgctataagggctactgtagatggtaagtttagaagtacatggtaatacgcccttcactgaaaaaaggcggtccgtggtgagactgcctcacacccgctgctgaagaatgtgaagcccatggaataagagtaggcataaggggggggacaaaagcaaagagcgacttgcaacaatgcaagaattaaatataataaatgataaatccgtggtcagcatctatggtgagtggttagaaccagcagagtcattacggttgctattattcgagtttttgtgacgtttagaaaaccacttgttactactccttttagagttctttttgaactgcctagtagactgctgctggttcgaactctgattacaa

SEQ ID NO: 84594 - DNA, 138 bp, Glycine max
  Clone ID: PAT_MRT3847_47403C.1
cgcccgtgtacggtgtacaccattggcattggatctggtgaaagattgatgagcgctcatctgatctaagcagctggtgatgctaggaagaaactgctgccaagatccggatgaaacgatgtgtgcacctggtttctt

SEQ ID NO: 84595 - DNA, 169 bp, Glycine max
  Clone ID: PAT_MRT3847_47404C.1
tagcacaagccgacactgtacttcgttctttaactgctttgcatgtggtatctactctttgccttaccatacgttccatttcctatacgacagtgtcaacatgttgaccctttcacagcactgaacctaccacaacgaattcaccgtttagattccaattccttacaac

SEQ ID NO: 84596 - DNA, 436 bp, Glycine max
  Clone ID: PAT_MRT3847_47405C.1
tttacgcgctcgttgcgtatgcaattacttttatttagaacagtaaatgtgaagtaaacgaaataaccataaacagtagtgttaattaccaatattgaccggtcctctctatgtgtgttgataaatactatgaaacgaatgaaccctatctgaacgctctgtttcttctccggcacaccgcaatggactccactactccgtcgatcgagagactattccaccgtcgagaaggtctctacgcagaggcttttcctacacctacgatgacgtaatttgactcccgcactacatcgactttgccgatgaagcctgggacctctgcactcgcctgacgcgccatctacacctagccaagccgtttgtggcctctcctatgagacaccgtgtcggagtccgccatggtcagacccatggcctagctaggcagcatatgcgt

SEQ ID NO: 84597 - DNA, 165 bp, Glycine max
  Clone ID: PAT_MRT3847_47406C.1
acctaatctcccttgcaccttgcttctgccaatggccatcttcaggtcgtgtttgagctcttgaaagtggaccataatttgttaggagggaaggcttgctcttcattgtgccgcagtcgaaggaagaattcatgttatctcactgttgaaaccaaaacgtctaga

SEQ ID NO: 84598 - DNA, 551 bp, Glycine max
  Clone ID: PAT_MRT3847_47407C.1
gtggcctacttctaaccatgacagccaaactgactgtcaaaagcaagaatctaaaactgcacaacagcaagatcaaccttcatctggggtggagctgaagcaacatggatctcttgcggaacaactacatcatgttacttctcaggacataaataatcctcatttatcacagaaacaatctcaagatgaatgtcaccaagcaccagctttacaagtttccctccacaattctcaagctattggaattcagaattctggaaaagatccagttcttaataatgaggtagtaaagaatcataaccccagcagtgaatctcagtatgcaaagttgcagcagatgagtaatcaacaggctacagtctctgagcagccaagtagtcaaggaaatcgtagtactagtaagcaagtaccatttggcatgttgctacccatcttgcttcctcaacttgccaaagacagagccatgcaacttcaaactttatttgctaaattgaagaaagaggaaataccgaaagacagttttgtgcggctcatgaaaggtatcgtaaggg

SEQ ID NO: 84599 - DNA, 299 bp, Glycine max
  Clone ID: PAT_MRT3847_47408C.1
cgacccatgcatccacgcgtcagcgggtagatgtgacgacattcacaaactccaatggcactcaagatgtacggggcatgggctgtcaatgcacggagagtctcttataccaccccacattatatgtagcattctctcccttactctagacgactcgtctctaactctctgatggaaattcgcatcaagatccacacgaatgcttcctgcacaaactctgcgtcgacaaggtcgtggaatccgtccagagccgcatggacctcggcctaggcaccggctccactgctgccttcgtcgtc

SEQ ID NO: 84600 - DNA, 472 bp, Glycine max
  unsure (1)..(472): unsure at all n locations
  Clone ID: PAT_MRT3847_47409C.1
gtcgcangcncgcgtacgtnagctcggaattcggctcgagggaggaagggctgttccagggcctcagtcacctttgggacctcaacctgggttggaacagtctagtggtcctgcctgacacagtgttccagggactgggcaacctccacgagctggtgctggctggcaacaaactgacttacctgcagcctgcgctcttctgtggcttgggcgagctgcgggagctggatctgagcaggaacgcactccgaagcgtcaaagctaacgtctttgtacatttgcccaggctgcagaagctgtacctggaccggaacctcattacagccgtggcccctcgtgcctttctgggcatgaaggccctgcgttggctggacctgtcgcacaaccgcgtggctggcctcatggaggacaccttcccaggcctgctgggcctgcacgtcctgcgcctggcacacaatgcgatcgctagctt

SEQ ID NO: 84601 - DNA, 273 bp, Glycine max
  Clone ID: PAT_MRT3847_4740C.1
aaatggacattttcacttatattggatccgccaggagcagagtgtacatggatataggcacactgtatctacaacgagaagatttggccaaagagagaattgaagcactgcatagaacttcttttttcataggaacaggccttgaatcctttggcatgacttaacaccaattttttccgtatgaatacaatgttgtatatcctaggttgatgggggccgcacaaccttgcaggcgagccttgaaacatgtgatgaactccctgaaagacaaat

SEQ ID NO: 84602 - DNA, 945 bp, Glycine max
  Clone ID: PAT_MRT3847_47410C.1
ctcttacacatacatagctagcttcaattcctcccatggcagacccacagcaacaagacaactacatgaagcgaaagccttccaattccaatgttctcgtcctcgccgccctcgtgcctttcggcgtctctcttctcatcctcgtcggcctcaccctctccgccaccgtcatcagcctcaccgtcgtcaccccactcttcgtcattttcagccccgtcttgctccccgcggccctattcatcgctctcgccgtcgccggcttcctcacatccggagtcttcggcatcacctccatctcttcctttgcttggttagccaccaatctccgccgctcacactcaccggaacacccgcaacgtcctcgggacgacgcggaccgcgtggcccagaaaaccgatgaagccgtgcgtcaggcccaggaaacagtccatcaggcccaaaaagagaccgcaaccaaggcccagaaagacattagtgaaacaagaaaagcccacaaagaaagcgtagcaacctcgtgagtgagtttgttcggttatgctatggccacgaaggagtcatgttcatgagggaggcttttgcttaatgcactcccaaattgtttcctgcacttcctatttcattatgaaaagttcattctgaaatgcaactcctattttggaataagcttttcataatacaacaggaagtgcagggagtaacaataggagtgcggaaagttttaacccatgaaggaaaagagggtttccttagtgtaactattctaaagcctgctttactgtggattgtgatgtcaaagtgttggtattagtatgtagtaaacctaaacctagtgtgttgtatgcaatagagtttaaatgcaatgcaatgcttatgctttccaattactgttacttaatttgtaaagtgtactacacttcaatttcaattttagttgattgggatcaa

SEQ ID NO: 84603 - DNA, 538 bp, Glycine max
  Clone ID: PAT_MRT3847_47411C.1
ctcgagccgattcggctcgaggtggtggaagacaagttcatttccctgttacggacatgcggaacctgcgtgcggctgcaccagatccaagcccagatagtgacccacggactcgagggaaacgattacgtcaccccgagtttcatcacagcatgcgcgcgcctcggtggaattcgccgcgcgcgaagagtgttcgacaaaacggcgcaaccaaacggcgccacgtggaacgccatgttccgagggtacgcccaagccaattgccacctcgacgtcgtcgttttgttcgcgcgaatgcaccgcgctggcgcgtcccccaactgcttcacgttccccatggtagtgaagtcttgtgccactgcgaacgctgccaaagaaggagaagaggttcattgcgttgtagccaaacgcggctttaagtcgaacacgtttgtggggtgcgcgttgattcacatgtattcattgagagggggagtgtttgttgctgatgcttacaatgtgtctgctgaaatgcgcgacaagaacgtgttcgcttgga

SEQ ID NO: 84604 - DNA, 617 bp, Glycine max
  Clone ID: PAT_MRT3847_47412C.1
caaaactgaatcaaatttgactttcattcatgatacatggtagaggtagatgcctacataattgattatttatatttgactttcgtaagaataacaactttaatacatctcccaaagttacaaaaaaatattattataactacaatcatcaatccattttctggtttgcaaaaaataaacctagaaactcatgcactcatgtacagtatgtattaccgcaactcaatgccccctatataacaaacactcacaccaactactatatttgtatatacacacaacaatatcaattaggtggttatcttccaatttcagtaatcatttataagccttgctccttgtgcagaattctttattgtcacaatgatcgtgtaaaatggtacttcttagaacatatcctttgtgagttcttcaaccagatcatcagttattagacattctatatctctttccaaaatattgatctcatcatttattaatccagaccaagggatggatcctaggtgttgagccaccaaagtatcaagtgaattagtagatatgtcagatggaggataaaaagaaacacggataatgtcccacactaacttcaacagttcctttccagaaggtggcaa

SEQ ID NO: 84605 - DNA, 432 bp, Glycine max
  Clone ID: PAT_MRT3847_47413C.1
ttcacatcatgtcttttaagaaaaattgttcatcttctttagggtttagggttaatgattgatttttcattgtgatactgctatgattggtttgcactactatttttctcaaatggacacccccctgttcatgatataaacatgaattaaagcaatgctattttaattgtgtagggttttttttatcagatcgtaaacaatgtttacattgttcccctctagatttcagattttttagaagggaaggtgttagactctctggtttagaggaccagaaacctcccaagaagaagagaattaagaaaactcaagtaatttcattgcctctgccttattacattgttcatctatttatagtgctatgagaataactgaatctgtctttttgtgctagcataatcctaacgaaattgcgaaaaccaaacgcttatg

SEQ ID NO: 84606 - DNA, 588 bp, Glycine max
  Clone ID: PAT_MRT3847_47414C.1
cccgcgtccggaacgagggctcagcttaaagtttgttccttttttctcaatcgttttccctcacggcacattcttcttcttcttcttcttccaaaaaacaggaacatggatcctccgattaagaaaaagacattgtctcgtgctagcttgagtcctcagaggaaagacaagtgcatagtttttccccttgtgaggtataatgaattccgggagcctgtttgccaggcttgtaatgtggttatgttggagtctatacgtgcacacctagcttctccggagcataacgagtttcaaaagtaactgaaacgatggatcctcctaaagaacaagaacaccaggaatccatagtttcaccttccacagatgaagttttgacatcttcgaaacgtggaaggccacgaaaaacaaagcctaccaagttcgtaatcaacgagaaatccaatcccacatcaacaccccgaagatctaaaagaataaagcatgtagcagataaaactgccaacaatgttcccgaagtatcttcatccgaggaattattgaaggtaaaattaattacattactgaagggacgttctgcagaaaattcac

SEQ ID NO: 84607 - DNA, 168 bp, Glycine max
  unsure (1)..(168): unsure at all n locations
  Clone ID: PAT_MRT3847_47415C.1
cgcgtacgtnagctcggaattcggctcgagtcacgancgangccatntccgatggntcgancaagcgggcttcgcnnaaacanacgacanactgnagctcntccgggcctcctncagnacaaaangtnccaggacctngtcctctgntcatnaanaaacaccaacaan

SEQ ID NO: 84608 - DNA, 2414 bp, Glycine max
  Clone ID: PAT_MRT3847_47416C.1
cggaattcccgggtcgagcgtccgtccgacaagggtttaacaattttctgggtgtgtcgaacgagggctcagcttaaagtttgttccttttttctcaatcgttttccctcacggcacattcttcttcttcttcttcttccaaaaaacaggaacatggatcctccgattaagaaaaagacattgtctcgtgctagcttgagtcctcagaggaaagacaagtgcatagtttttccccttgtgaggtataatgaattccgggagcctgtttgccaggcttgtaatgtggttatgttggagtctatacgtgcacacctagcttctccggagcataacgaggtaatggaaaaactgaaagctaatgctgctggatcaactgaagataagaatgcaaagccagttactggtaccaacaactctcccaaggctaatccagaacaacctcaagacacagcatgccaactgcctgaattttcacaagatgtgcctagacatgaatcaccatctgcgcttccacgagatttttgtgatgacagtggtaaaataaggacaagatctgtttcaaaagtaactgaaacgatggatcctcctaaagaacaagaacaccaggaatccatagtttcaccttccacagatgaagctttgacatcttcgaaacgtggaaggtcacgaaaaacaaaggtaactcccatccaaattcactgcattgtctttgacatctttgaattacataaaactcactacattttgacatctttgaattccatcaaactcgctgcattgtcttttgttgaatttcttcttcctcacagcctaccaagttcataattaaccagaaatccaataccccatcaacaccccgaagatctaaaagaataaagcatgtggcagataaaactgccaacaatgttcccgaagtatcttcatccgaggaattattgaaggtaaaattaattacattactgaaggtaaaattacttacatcactacttgtcaagtacctctacttgttattcactttaacattccttttgatcataacagggacgtacagctgaaaattcacaagtagatggcaaagaagtctcttcagatatcgatgccttagtaatctacaaaagaaaaagactacctcgaaggaggtcttctggtcaaataggcaagtccccaaagaaaactgttcctacagagcctccaactgctgcaatttcaagctctactactgcatcacctcctcatcaagatcctcctgcagctgctccagccaatgctgatgcttctcatattgaaaatacaaacactgctgagccagtattgagtaaaagccttgtcgaagaggtcgggaaagtgaaccctgctccagccaatgctcaagaacaaattgcttccagcaagggtcaagaatctccagatcaagttgactcaaaggctgatgaagtctctactgggaacaccccactcgatctagaagccattaacaaaatgattgaagatgaccctttgagtgctattgaaaatattctgacagggaaggtttccatttcttccaagactccacaatctatcactcaggcagaacaaccaaaagttcaaggctcccctgcagatgttctgtctaaagagctaaaagacttaatgcagacctttagcttaggtgattttgttactgactatgaacaaatgtcaaaggtcctacttattcttgaagagttgcagaagaatgagaagtttctttctcatgaacagcaaacattcataaaggccttcagactcttcttcaacaatgctgttactcaccgcaaagaatgtgatatggctagaataaagaaagtcgacttgaaccgagctaaagaagatatccttcggaaactgcaagaagttaaacatacacaggagcaaatcacatcgtccatttcaaatgccaacaacagggtcaatgaaatatcttcttatattgaacaacttgaagaacggttatccaaactgaaggaagagagggagacctttcagttggctattaaggaaggcgagaaacaaagggagacattgaagaatgatagcatcttatgggctcatcagactaaggacctggtttttgatcttgcagagattgaggccaaagaaaaaatccttggacagcaacttgaaacagacaatgatgcatatgaccaatttaaagcatcctttcctttttaatttctgtttgaaaattggtagttgtaattactctgttatgttcaattcatgtatggtttagttcatgcatgtttagtttatgttcctttaagcaatttaaggatttagacccagttaagtgtagaattataacctttgattacaaaattaatggatgaaattttaacaatttcataatggttttgcaagtatactatctgcttgtaataatttatcaaaaa

SEQ ID NO: 84609 - DNA, 1779 bp, Glycine max
  unsure (1)..(1779): unsure at all n locations
  Clone ID: PAT_MRT3847_47417C.1
cccacgcgtccgcccacgcgtccgaacgataggagataagggaagaagaggttttcgtttggttaagcaagatggatttggaagcagagaaagagcatgaagctgcatttgcagtggcctcactctccctctctctccccaccattttccccttcgtccaacccaagaatatcccatcaaccacccttcaaccaaccaagctcaaagtcccaacccaagcctcatccctcacacacctttctctctccaccaccactcctcctccttccaaaacctccttcaaatccaccgtctccgccaaccccctccacgcccctctctccctcgctccccaccgcccccgcgacccttccaacgccgccgccctccgccgcgccgccgtcgtctggttccgcaacgacctccgcctcctcgacaatgagtgcctcaccgccgccaacaacgactccctctccgtcctccccgtctactgcttcgacccctccgactacggcaagtcggcatccggcttcgacaagaccggcccctaccgcgccgccttcctcatcgactccgtctccgacctccgccgcagcctccaggcgcgcggctccgatctcgtcgtgcgcgtcgggaagcccgagacggtgctggtggagctcgccaaggccgtcggtgccgacgccgtgtacgcccaccgcgaggtctcgcacgacgaggcgaaggcggaggagaaggtggaggcggcgatgaaggaggagaatggggaggtgaagtgcttctgatgccttccaattacggagggtttagggatagggttcagaaattggaggtaaggaagacaattgagggcattagatcagcttaagggaatgccttctcgcggtgatgttgagcctgggttgattccttctttaatggtcccttaacgtaattagtccgtaatccagctgcaacattgatacagggtggttagtgcgttgccaatgcttctatggtaggaggggagactgaggcactgcagaagctcaaaaaatttgcagctgagtgtgcagctcagccaaacaaggggtttaaggatgggacacagagtatatatggtgccaacttctcctgcaagatttctccgtggttggcaatgggatgcctctcccctcgcacgatgtatgaagaactaaagaagactaccagcagagccatttctgcttcggcggacaagaatgatggtggtaatggctcgtccagaaatggtacaaattggttgatgtttgagttgctatggagggacttctttaggtttataacaaaaaaatacagttctgcaaagaaacagctggaagctgctccggtcactgcatgtgctggagcatatgcttaagctggaagttctagtgggcattaaagagtttgtttcagggtgtgggttggttccctacgcagtcatggcagtagggtgctggatgaacaagatttggttccccttctgaagttctgttgtaactgacagatacattatatttcaatatggaagctttacattattttctcgaaggcaagtgttggtattcttagagtaacatttcgtctgcatcgggcatcttttgagtagatctttgagtccaaagttcatgtctttgtctctcccccagtaactcgatattgtgggtgaaatttgaaaattaaaaatggatgtaattactacggcatctatatttttaataataccaggatgaattctctgggttttttcagatttcaaaaaaaaaaaaaaaaaaaaaaaaaaagaaaaaaaataaanaa

SEQ ID NO: 84610 - DNA, 210 bp, Glycine max
  Clone ID: PAT_MRT3847_47418C.1
ggcggcggaaaaaacatccattacatttgcaaggggtctccatcgtcaaacaagggcaaacccaacccaagacatgggaatgtaaaattagctttttagagaaagagggaacagtcttaaaacactcatttgaagatagcacagacgtttttaacctaacagccccaacatttcattgtttttttcccggacccgtgggcggacccgtgg

SEQ ID NO: 84611 - DNA, 1373 bp, Glycine max
  unsure (1)..(1373): unsure at all n locations
  Clone ID: PAT_MRT3847_47419C.1
gggccggnnttcccgcggtcgggctcgcgcccggagagtgagagagaaagagcttagcttaggaatggaagcagagaagcatgaagcagcattggcagtggcctcagtctccctctctctccccagagttttgcccttcttccaacccaccacccctcagccaaccaagctcaaagtcccaacccaggcctcatccctcacacacctttctctctccactccttccaaaacctccttcaaatccaccatctcctccaccccccttcacgcccctctctccctcggcccccaccgcccccgcgacccctccaacgccgccgccctccgccgcgccgcagtagtctggttccgcaacgacctccgcctcctcgacaacgagtgcctcaccgccgccaacaacgagtccctctccgtcctccccgtctactgcttcgaccccgccgactacggtaagtcggcctccggcttcgacaagaccggcccctaccgcgccgccttcctcatcgactctgtctccgacctccgccgtaacctccaggctcgcggctccgatctcgtcgttcgcgttgggaagcccgaggcggtgctggtggagctcgccaaggccgtcggggccgacgccgtgtacgcgcaccgagaggtctcgcacgacgaggcgaaggcggaggagagggtggaggcggcgatgaaggaggagaatgtggaggtgaagtacttctggggaagcacgttgtatcacgtggacgatttgccttttcaattggaggacatgccttccaattacggagggtttagggatagggttcagaaattggaggtaaggaagacaattgaagctttagatcatcttaagggaatgccttctcgcggtgattttgagcgtggggagattccttctttaatggacctaggccttaatccatctgcaacaatgtcacagaatggaaagtgcgttgctaatgcttctatggtaggaggggagactgaggcactgcagaagcttaaaaaatttgcagctgagtgtgcagctcagccacacaaggggtttaaggatggaacacagagtatatatggtgccaacttctcctgcaagatttctccgtggttggcaatgggatgcctttcccctcgcacaatgtatgaagaactgaagaagactgccggcagagtcatttctgcttcgtccaaccggaatgatggtggtaatggctcgtccagaactggaacaaattggttgatgtttgagttgctatggagggacttctttaggtaactattttttgtgcacatcttttggctttgcttgaaacttcagtgtacatttttctttgcatgagatatatggaaatggcaatggtgcaccactttgggga

SEQ ID NO: 84612 - DNA, 268 bp, Glycine max
  Clone ID: PAT_MRT3847_4741C.1
ggatttggatgagtttggggtcgagctaggtggtgggcaccgtgtgtttgtgaatctgcatgaaagggaaagtgagaaataattgattgattggtgccgagtatacatgccgcaattctttcaagtcagtatgtttgatgcatttgtacttgggtatctagtttttcaggtttggtttgaagacatgcacatagatacaggtccatctgcagtttagtttgttcccggtggggcaattcacacgctacccatgaattccattttgatt

SEQ ID NO: 84613 - DNA, 220 bp, Glycine max
  unsure (1)..(220): unsure at all n locations
  Clone ID: PAT_MRT3847_47420C.1
cagggccagacttcacaatgaaatgtcggcgacttatggcaatcataaccactggtgnaccggcggtgctaagccatgcctgcaatttattgccactctgttctgcgcagtccttgttcgtaatagtgccaggggtataacctcgaaatagctttgtctctgaaacataatactcacccaccgatgcgactccaaatgatccaagaatagcagaagtgat

SEQ ID NO: 84614 - DNA, 472 bp, Glycine max
  Clone ID: PAT_MRT3847_47421C.1
gttggggagggaagagaatttttatgaaattaaaagagacaagaacgaatttgacggattgaagggacaaaaaacactaacattaattgcagggaggggggaatggtttgtttttttgactatactggccgggcggtcagaaaggatttaaaggattgtaaaaaatggtttaaactttattggattttcggggagaggattgagaggatatggtccagcaaaaccaaatacttgaaaagggtggggtggggtctgggctacttgagtttgacgggctgtaccaaatataatataattcgttccactaggaggggggggagggttaagttaaatcaccttttttttttttatttgagcaagacaaataaaattgtttcctttttccgactaaacaaatccattaagatcaacaggaaccacagttggttcagttacattggaagctttgctcactctactcactctgataaaa

SEQ ID NO: 84615 - DNA, 193 bp, Glycine max
  unsure (1)..(193): unsure at all n locations
  Clone ID: PAT_MRT3847_47422C.1
gagcgttctcttttatctactattttattttttttttttaccaaagactccaacggtatatcagttcttaggccgcntaacccggaagggaaatccactcggactaacctaaagcaacagcagttgcgactacaacaaaaattaaaaggcttgagcaaaaaaataaaataatatttaaaccaccgaaacacga

SEQ ID NO: 84616 - DNA, 284 bp, Glycine max
  Clone ID: PAT_MRT3847_47423C.1
aaggaacgggtttattgggatggttggaaaatattaaacaaatcaggtcaccaagtctaacacacttaatcttttttttaactgccaaaagaaaagattgaacagaagttagtgtttttatacattcgatagaactggtttttccattttttgagcatttccaatggtcctcccaaagtaaataatcaaaataaaatgaaagactttagttgggttttgttacaataaactaaacctgctattgtcagttaaaaaaaaaaaaaaaagattgaacaaaactttta

SEQ ID NO: 84617 - DNA, 980 bp, Glycine max
  Clone ID: PAT_MRT3847_47424C.1
aaatggaagaatcgaacccatatcctcttatagcaactcaacacgtattgttaattgagtcacattaggttctaaaagaatagcttttactcagcatatatcaattcctctttacaagagttgccattttttagtacataaacatgctttaaaagtcactgattttaatggtatagtaaattgacaaaaaccttgccatgattacactatagaaaacttatgcatactcatgaagattttttgggttgcacagccatgagttaaacaataaacaagacatctaaaacagaagattattgtcatcacctaaagtacaggtcaaacaaaccaggactaactaaaatctttaataaatatcactgaggaaattgaggtaggaacctaatgctataataattaaattctcacaatctcatatgcttgctattttcaacaccaagagggaggtgattagaacttagaaaaatgctctactaccataaaacacacgtgatccatcctttttcttcttatcaatttctaatttgctgttgtcaagattctgaatcacatcaacatcaccatgatccactttttcaggtttgtcaaggtccattggtagcttcatttttgccaaggactcagtgaactgcttcatgctcctcatatacatgtccactatttgtttttgcatagcagcttgctcagcttctaaattgatgttccctagtggagctgaataaacttgaccaaactttgaagcttctgtgttgttattattgatttttttgctttccttttccttgcttgagaagtttgcatctttgttacctctggcctcaccttcttctttcttggaagttggggtatctggaccagcaccacagttttgagtaccttccacagtgattgacacagtgacagaatttgatgagtcgccagtgctcaaatggttctttttctcaactgaatcggctgagtttatatcatcactactcaag

SEQ ID NO: 84618 - DNA, 667 bp, Glycine max
  unsure (1)..(667): unsure at all n locations
  Clone ID: PAT_MRT3847_47425C.1
ctccttcatggcacatggtcgcgaaccccatttctcaatccacccttccccgccactacaacactagcaacaaacaaaaagcatcggcaaacgaggtggtttccaaatggcattccatttggaaattatcatgctcattctcatcttcatcgctcttgcgcagccgagtgagcgagtcaacgcggagccgactcaagacaaacaagccctcctcgcattcctctcccagaccccgcacgcgaaccgggtccagtggaacacctccagttcggcctgcgactcctggttcggcgtccaatgcgactcgaaccgctccttcgtgacttccctccacctccccgccgccggcctcgtgggccccatcccttccaacaccatctcccgcctcacgcgcctccgcgtnctcagcctccgctccaacgcgctcgtgggccccatccccttcgacttcgccaacctcacctccctccgcaacctctacctccagaacaaccacctctcgggcgagttccccacaaccctaactcgcctgactcgcttgactcgcctcgaactctcctccaacaatttcacaggaccaatccctttcttcctcaacaacctcactcgcttaaccggcctcttcctaaaaaacaattccttctcgggtagcctccccagcattacg

SEQ ID NO: 84619 - DNA, 1634 bp, Glycine max
  Clone ID: PAT_MRT3847_47426C.1
ttcatcttcgagtccgcattttcatccctctcggtgctgtgtttagcttccttcttcttcttcctctttcttcttcttctgctgcacccacaaatcaaaaccccccttttccaacccaatttttctccataaaccctagattcaacgaacccgccgaccaagctcgaacctcacgtcgcaaaaaaacacttcttttcccctctccgaggttgtcgtgtcggagcatagccatgttgttccctcgaggaaattgatgatttttcataacattggggtctcgttttgcttgtggggtcaccttgaaggagggaaaagtaacgagctttggggctgaatcgtggtgggtctgttgagtatgcatagatctggagctacgatggcgtggaacgtgttcaagttctgcactgctctgcgtggattgggctcgatcatgatcctgttggttcttggcgttgttggtgccacttactatgctgttgttttgaccaattatggccctgctttgtatgctggaggacttgattctcttgttgccttggcagtgttgatcttgtttcatagcttgttggttatgctgttgtggagttacttttctgttgtttttaccgatccggggagtgtccctccaaactggaagcctatgattgatgaggaaaggggagaggctgatccgttggttgggacagagtttagtaatctgccgtctgatcccaatccacgggttcggtactgtcggaagtgcaatcagctcaagccgcctcgatgccatcattgttcagtttgtgggcgctgtgttttgaagatggaccaccattgtgtgtgggtagtcaactgtgtcggggctctaaatcacaaatttttccttcatatcttgttctacacttttcttgagttgctacaacttttcgtgcctttgctgtaaacctagcctgcattctgtagtgtctgaggatttcctggcatgcctatctctcttgctacaacttttcttgctttcgttttaaacctggcctttgcactgagcgtcttaggatttctcatcatgcacatatctttggtggctgctaatacgaccactattgaggcatatgagaagaaaactactccaaaatggcgttatgaccttggtcgtcgaaaaaattttgagcaggtttttgggatggacaagaagtactggttcatccctgcttattcagacgaagatatacgaaagatgccagctctacaaggtcttgactatccttcaaaacctgacttcgattcccaatagttctaacagctaatatatatccacatcatgtaacaaaagtcatggagactctccacaaccctatacttcactctctaacacaatgtagcgtgtaagtaaatgtgcccccctcgcaattcatctgcaatgactcctagaatgatgtctttttatttttatttttttttaaattgttttttaaaggtgcttgtttcatgtcgaaatgaagggagcaatggggggcagggtggtgtgatgctggtttgaggggctaatgtgtttatgttcccttaatgataacaatgcaatattctcacctttcctttttattcaaattttgagtgaaatagcaattattttagtgcaggaattaaagaaagcgtgg

SEQ ID NO: 84620 - DNA, 1119 bp, Glycine max
  Clone ID: PAT_MRT3847_47427C.1
gttgattttgtttcatagcttgttggttatgctgttgtggagttacttctctgttgtttttaccgatccgggcagtgtccctccaaactggaagcctatgattgatgaggaaagaggagaggctgatccgttggttgggacagagtttagtaatgtgctgtctgatcccaatcaacgggttcggtactgtcggaaatgcaatcaactcaagccgcctcgatgccatcattgttcagtttgtgggcgctgtgttttgaagatggaccaccattgtgtgtgggtagtcaactgtgttggggctctaaattacaaatgtttccttcttttcttgttctacacttttcttgagacgactctagtgactgcatccttgctgccacatttcataacattctttagcgatggagaaattcctggaacacctggctctcttgctacaacttttcttgcttttgttttaaacctagcctttgcactgagcgtcttaagatttctcatcatgcacatatctttgggggctgctaatacgaccactattgaggcatatgagaagaaaactactccaaaatggcgttatgaccttggtcgtcgaaaaaattttgagcaggtttttgggatggacaagaagtactggttcatccctgcttattcagacgaagatatacgaaagatgccagctctacaaggtcttgactatccttcaaaacctgacttcgattcccaatagttctaaaagctaatatatatccacatcatgtaacaaaagtcatggagactctccacaaccctctacttcactctctaacacaatgtagcgtgtaagtaaatgtcgcccctcgtaattcatctgcaatgacacctagtatgatgtctttttttttcttttctttttaaaattgttttctaaaggtgcttgtttcatgttgaaatgaagggagcaatggggggcagggtggtgtgatgctggtttgaggggctaatgtgtttatgttcccataatgataggaactgttttttgtcaagcaatgcaattttctcacctttccttttattcaaattgagtgaaatagcaatttttagtgctggaatttattctctagttggaggccagtctttgta

SEQ ID NO: 84621 - DNA, 127 bp, Glycine max
  Clone ID: PAT_MRT3847_47428C.1
ataaaaaccctcaataaaagcccattaatacaggggcccagatgttgaaaggagtcatatacaggaatttttggggggacccactaaaataccccagataacaaggcccattgttttttaaaggggg

SEQ ID NO: 84622 - DNA, 386 bp, Glycine max
  Clone ID: PAT_MRT3847_47429C.1
aaagaataagggatgcatttaatatctgttcttatcaacggactaaacaagaatgtgaggggtagttgcatcgaccttaccgacctaccattatctttctgtgtagttacaataatataatttctaacggaaaaacaaaaaataaaactcgggcaagcaactttacatttaaaaaaataataaaaggaaagaaaacccgattagttatatccgacccgactctcaatacgtggaggctctttctctatgggccccgaataagactcctccttcctcctacttcccaaacgcaaaagcccatacagcttccggaactccctcaccgtgtgaacactctccctacatataaccgcacccggttcgttatcatcgctattccgacccga

SEQ ID NO: 84623 - DNA, 365 bp, Glycine max
  Clone ID: PAT_MRT3847_4742C.1
gcttttaagtttgaaaatgccccatctctttgggtattaatgtgttggcacgatctctgatttgttttgttgtttttgtttttgcaggaaagaagcagagtgtttcttttgaaatcagctagaaaagatgtcagggtatgccatttccccccactaggagaagttcctttttttctcttaaattttgaaattaatatttagtagaacgaccttttcaaaatcatgttactgttgcctgagaatggttccttcagtacgaaaattttggtagcgaggacacatttactaattacaatgtctgtttgtgggtatgcgctgccttgaggttagattttggtgggttcaagtttcgtttttttaacata

SEQ ID NO: 84624 - DNA, 249 bp, Glycine max
  unsure (1)..(249): unsure at all n locations
  Clone ID: PAT_MRT3847_47430C.1
tatcntatcnacnaacncacaanccanncaannnnnantcncnaaccnannannanacctanntcnattntnncncnccnacnacccntnnactaaaanaaatcaatanacaataaanaataacatanacacactcanantnncntcangcntcttnntntnctnntatncnaatcnngtacannannaacactnccnacatntnannttnncanttannnccacnnacnnaagtnnaaccncttaann

SEQ ID NO: 84625 - DNA, 348 bp, Glycine max
  Clone ID: PAT_MRT3847_47431C.1
ggcctcgggaaggcacaggcaagagaagccggtttgatttaagcgacaggaacccaccctgtgagtacggcccgaagaggggggggagcgccgacggcgcccccgccagcagcagatagaaccggcggcgacagcaaaagcacacgctgaaagaacgctgaaaagaaaagcgaccaaactgctctaggagccgtgggcagagtggataacctcacgaacacgattggggaagagtactaatgctctaacaatgaaagaggcttgacaaataccttatattggctaacatagcaaaactactaaataaaggaaatagccatgtgcacaaaacaaaaacagagaaaacaa

SEQ ID NO: 84626 - DNA, 585 bp, Glycine max
  Clone ID: PAT_MRT3847_47432C.1
ctcttttttttttttttttttttttttttttttttttttttttttttttttttttttaaaaaaaaaaaacttttttttcaatgccactaccaattacaacaattccactcactggctaaaatgcttatgacataagctctggcaatgatccaaacaaattcgaaacataaccctacaaaacttccaagttataacttatacccccagcaacgcattcaacatataaataagacctaacaaaacaaatggcaagatttgagcaagtaaccaaacctcaactatgttgcaccggcaataccaacaaagggggggacaaaaatgatgggggaaataatggtaaaaaataatctcccttcattaaatcactgaaaacttcagagaaaaaaaaaagaagagccgacccctctagttaaggccccctaaattttcaatttctatttcaaaaaaattaaatatcccttctgaactctgaatgacaagcatatcctttggccaaagtcttctttcaagactcaactgaacagatgtaaaagagatttcaaaggcccaccatttatctcatacttgaggagccttggtgatctc

SEQ ID NO: 84627 - DNA, 218 bp, Glycine max
  unsure (1)..(218): unsure at all n locations
  Clone ID: PAT_MRT3847_47433C.1
atcttcctgatgttctgtgtattcttctcttgtctttttgntgagcgagaaacgccgcgaaaaatctaacgctgtatatgcaaaaggcaaaaacccctggccctggttttaaaaacaagccccgctctaaaacccccaaaatatggtgggcctccacccccggggaagcggaccccaaaagggaaaaagaccccgccctggccttgggagcccccccc

SEQ ID NO: 84628 - DNA, 437 bp, Glycine max
  Clone ID: PAT_MRT3847_47434C.1
tcccgggtgcgacccacgcctccgcgttatgctatgcaagatctagttacccagtatttctatctatggaagaccacctaacaccataacatcatgataaatttgcaaaaatggcaactgaaatatttgctaaaacgctttactttcctgagacagatcattacacagacttcccctcaccagaatcattgaaaaaacggatgattatgacaaccaacccaccaaaggaatggcgaacatctgctattatcagtaaacctgtgccaaatggaacagcaccatctgcaaaagaatcacgacgtcttgaattgccaggttctgctgcctaactgaaaactggagacatgaattctagtgatgaagatctggaagatgctattacacgtgaataacaaaccacaccaacaagatgcgcgtcaatacaaacacttcgactg

SEQ ID NO: 84629 - DNA, 298 bp, Glycine max
  Clone ID: PAT_MRT3847_47435C.1
ggctaacactacttgtagaccttgtactggttcctccaggaccgtggtcgagggagaacaagccggcgcccaggatgatatgtcgggtggtacagtcactgttgttccgacgaatccagggagagaggtcgctaaagagtgtaagctgggtatgtataccaacttatgttctaatggtgggctgaattatataggatctagtgcccgagaacactgggaggagagctttgaactttgggaagtcagagtgtgaaaaagggcatatgtcccttcaacgggggtgcttagtttacctaga

SEQ ID NO: 84630 - DNA, 358 bp, Glycine max
  Clone ID: PAT_MRT3847_47436C.1
gcccacgcgttcggccgtggaaagtgtttttagttggaacacacttgtgcgtccgtgcaaatgttcgcttggttaatttgatctggggacaacaggctcactgagaaaacaatttttacttgccgagattgggacatcttgggtgtttattatacaatagcacctcaattcagaaaattcctaccgcattacattaggtggcatttgcataccttgatgatttacatgcacccatcttttctaactgctgaaagtaaatataagcggaattctgagtagtattcttatttccggtatattttacgacagtagatacaatattctggactaaacacgagaaataatcttgttttgacag

SEQ ID NO: 84631 - DNA, 475 bp, Glycine max
  Clone ID: PAT_MRT3847_47437C.1
cccactcgtccggaagctcctatgcaatggcggaacgggaagcgatcggatacgccggtttgaatgagtcgagcttggagatggcggcgaaggctatgcgacacggctacaaggtgcaagctatcgagacaaatgagcccggcattgaagaactcgtaaagctcgtaggagttaaatgtccaagccctacggaagcagggagagaagtatcacattgagttgtcctgatctatgacgtggatcaaactaatcacctgatagtcaatgacaaggaggcgctgaaagatctaaaatcagacacagttctggacgtgcgggtgaacatagcaccgttattactccaaaaactggaaaaggatctggcagaaattcacacaatagcttatgtacatgactcggaagacgttaaggggagagccgatgatctgaatgaaaaagtcactattgcatcatcaggaagactagatgccattgt

SEQ ID NO: 84632 - DNA, 300 bp, Glycine max
  Clone ID: PAT_MRT3847_47438C.1
aaatgggaatagggggcacctaaatttccttcaatatgtccttttagcgtggacatgagggaacgaaaaatattgaacaggacacatcatgtcggtatatccaggcattacgtgacaaaggagaatctgctaataaaaagggaaaaccttactcttacagctaaagaatgcctcgccagcccaaaagttaaatatcctagccaattttgaaaggtctatttataaaacctccaccttccctatacttcgacgtgaaaggcttctaagtacctaaaattttgtgccccacatcgaaaaatg

SEQ ID NO: 84633 - DNA, 418 bp, Glycine max
  Clone ID: PAT_MRT3847_47439C.1
ctttcttttgagaaatcaaatactcccagtacttattattttaaacacagggaccctaatataactaacgaatgcccatgacttgctaatactcatgtggcccttcttaaagaaaatgactgaacattcatggcgaatgttgccattctgtgcatgctcgattccagctaggcccagctttgatcatagcagcgtcgaagtagacgtggaagattttactgctactagcacatgcattaacagtgcccttgcatcttgagtccgcgaacagaactggttctgacaagaagaggccctctccttgctgaagattctcgcaataaacatcgtcgcatgaccggggagcgcttgggtgcatatctatcgcggtcctggaatccacattccttgggcacattgactgcagctgaggcgcgta

SEQ ID NO: 84634 - DNA, 468 bp, Glycine max
  Clone ID: PAT_MRT3847_4743C.1
acgaggttcaacacatagttcaacaaattttttaaagctttgccagttcccacttcattttttttatcagactctatcattgataggatgaaaattgtgcattgtattgctttggcaatatcttatagaactacaagctgagagtttgtatttggtacttgtttataaatgccattgccaggagcatggcaacgaggatatgatggttaactttgcatatattcaataaccataatcagtttttgtttacaatcaaaatcattgtattgagtgtcactaaatttttcactttgcgaagaatgtttgaattcatttatcatgtggtgcatccaaccaatttgcgctttaagctacctagctttgtgagctgaggaacgggctttgattaggtaaggatttcattgtcagttcctgacaattcactttgcaaggaatgtgctaatttcattgtcaatagacccacagtct

SEQ ID NO: 84635 - DNA, 527 bp, Glycine max
  Clone ID: PAT_MRT3847_47440C.1
tcgactcgaccacccggccggagaaactctgcactgcgataagattagttatcacatggcgaaagggaaaagtataggtcgctgcactggctgcactgcttgcctcgtgtcatgtatcaagactacactcctagggaattgctgtgctcaccacaccactatctgacctgacccaagacgaaagagagatgttccttacctaactaacctacccatcccatacgctaagctataaaatactcatacgctgatctcacccaacccagaaagatccgatccatcaggtaatggatgtgatggaatacaccacacagccactccaattgattttgcacgaaccagcctagggagaccaaaccagccatccatgaacgctcgctatgcgtatgaaggctgcctcaaagcacagacagagggagggttcactctcttgtagtggcccacccttccttaacttgctaaaaagaaagatggatgagatgagatggagtgagtgaatatgctatactaatgaaagccagcctttg

SEQ ID NO: 84636 - DNA, 615 bp, Glycine max
  Clone ID: PAT_MRT3847_47441C.1
cggacgctggggtccagatgtaaggcttgcccgcagaataagacgggatactgttgagaggggtagagatgttcactctgtactggaacagtatgcaaaatttgttaagcctgccttcgatgattttattcttccatccaaaaaatatgctgacatcatcatacctcgcgggggagacaatcttggagcaattgacttgtttgttttacatatccgcactaagcttggccaacataacctctgcaagatatatccaaatgtgaatgttatacagtctactttccagactagaggcatgcacactcttattcgtgacagggacttatcaaagcatgattttgttttttattcagatcggctaattcgtgtggtagtggaacatggtcttggttacttgccctttacagagaaacaagttatcacacctacaggctcaatttatactggagttgatttttgtaagaaattatgtggagtatccattattcgaagtggtgaaagcatggaaaatgctttgcgtgcttgctgttaaggaataaagataggaaaaaatctaattcaccgcgaaagtggggatgaaaccccccttatttatgagaaacttcctaaagaaat

SEQ ID NO: 84637 - DNA, 177 bp, Glycine max
  Clone ID: PAT_MRT3847_47442C.1
gtgaaagctcttggggtaatgttctgttgataccggaaatgctagaaccgcgttaccggggacttaaaacgcgaaagtgacaagatacaagccataatcaataatcaaagggcttaatgcgctgttataacgaaaactccatgtgggccactacagtcatgagcctaaggggcccgt

SEQ ID NO: 84638 - DNA, 652 bp, Glycine max
  Clone ID: PAT_MRT3847_47443C.1
tttttacaaaaataaacttgtataattcattagcaatgggaagctcaatacaaaacggaatataattgaaaacatggaaactagcataagatatgcccttgcaatgagcaattacataagatatgcccttgcaatgagcaattacataagatatgttcctataggactcaacactcaaacatctaaagtgggctggtgcattctatcaaacactttgtagttgtagcaaagcaaaagcctctccctcatgcatctacataacaaaatctccccaaccaaaactcccttttcatcccttaaacacatgccaaagccaccaatcttgtgttgtaaattaaagaacacaacatttacattacattttagataaaatgtaggtggaggttgccaagccactgaaatcacagttcagcactacatacatacaccttagaatctggttccatcccataatttcccattacacctcatccaaggttgttacttccagcacttcctaagttgcttcctacactcttttcagaatattttttgaccttccagattggtcattccataagcaaaaaagggagtgcattcccaaatgtaatttaattacatttcggattggccattttaaaagacaaagagagagcccaagaagcaactgaac

SEQ ID NO: 84639 - DNA, 234 bp, Glycine max
  Clone ID: PAT_MRT3847_47444C.1
ttcgacccactcttgtcgaacgcgatggttgacgttgactttggaacctctttctcgcctaatcgccacatccacaacgggtttatctgaacaatctcggcgatcttgtctctgttaaaaaatctcaaatcttcaattatatctatcaaatataattaatttaataattcgtctcggcctaataagcttcttagcaacataatcatcatatcgcttttcgtgcacaataataat

SEQ ID NO: 84640 - DNA, 365 bp, Glycine max
  Clone ID: PAT_MRT3847_47445C.1
atcgttcctattttgatttttttatttttggcattagcaactaaagtggaataaagaacatctgtatatgtacaagctaatcaccaccacccgcattggttaccaacacgactgatatgaggagaaagggctacacatatcgcgccctatagggtcggagctctatataaatattcaaccaataaattctcatgtaacataattatgcaggggtaggggtatgggttaccgtgacttaatctacagctcttacatcgtgagagatacagcagcagatgccagtctctaatccctaagggacagggtgtcatacttggtcaaggtatgcattgaaaaatgctccctacttgacccccatgacattg

SEQ ID NO: 84641 - DNA, 507 bp, Glycine max
  unsure (1)..(507): unsure at all n locations
  Clone ID: PAT_MRT3847_47446C.1
cgccgcctcccccgccctcccggacgccctcgcccacctcctctcccgccacgccacctcctccgctgcctggggcgtccagtccgccgccggcgggctccacagcctcctcgccgtcgtctccgagttccgccccataatcacctctaaacccgacatcatccgggccctcgtcggtataatcagtcactctgattccccgacgaggtccataaaggatgccctcaaggcatgctttggagtagccctccacccgccgagccggattgtactaatccggctcggcgcggttcctgcgctcttcgctctcgtagccaagggcaaggacggaaataggagggctggcataatcgaggacgccactgctgtgatcgcgcaggtggcggcctgtgaggagagcgaggaggcgtttcggaaggtgtcggnggtttcggtgttaacgatgatgttgagttcggagagtgggagctgcagtttgaggacgaaggagaatgctgttgcggcgtt

SEQ ID NO: 84642 - DNA, 518 bp, Glycine max
  Clone ID: PAT_MRT3847_47447C.1
aatggggaaaatcccctcagtatgaaaggaaaaaaccttgggaccaagtccaaaacaaatatctccactatgaagtaggattacaatgatctcaatctcacccaataggatgatttacaatatttctcaaacactcaccaaatatgggggaaatataactcttttctagaagaggattacaaaaaactatctcactctcactcttgaaggatctcgcttgcttgcaataacttcttacaagcccccatttataaagtggaggaatatgacttctcccaagagtaataaacggatgtaaattaattttcatatttccaagaacccttgaaaatcttatctccatttttctaaaatgaatgtgatatcatcgagagtcaaagatgaaattccaaaagcttggaatctccaccttttatttttcatgcatttgatgttatcaagatttgttgaatgtggggctccataattatagtcgtacttcatagtggagatattttgttggactgggtccggggggg

SEQ ID NO: 84643 - DNA, 1477 bp, Glycine max
  unsure (1)..(1477): unsure at all n locations
  Clone ID: PAT_MRT3847_47448C.1
cccacgcgtccgtacggctgcgagaacccgcgagtaggggagttttgagtttcgagatcgagagagagagagagaaagcgccatggattcttcttcacacatggcttcgcttccggaagatatcatcaccgacgagcatttacaacagcaaactcaacccgcctcagcctctgctttcgcttccgttcctcagcgcccgccaactaagagctcttcagaaaaatatgcacctttagattggtccgtgtattttgacaaagaagacgatgttgcaattcccgaatcgaacgatgtttttcatgtttacacggcaggaactgagggtcccgttgtattctgtttacacggtggtggttattctgggctttcttttgctgtctcagcaagtaaaattaaggagaaagctagggtagttgcaatggacttgagaggtcatgggaaatcattgacagaagatgatcttgacttatctgttgagactatgtgcaatgatgtattggctgttataaaggaattatatagcgactctcctccagccatcattcttgttggtcacagcatgggaggatcaattgctgtgcatgttgctgcaaggagatcattgtctgccttggcggggttggttgttgtggatgttgtagagggaacagcaatggcttcactaattcatatgcagaaaatcctatcaagcaggatgcaacatttttcaagcattgaaaaagctattgaatggagtgtcaggggtggctctttaagaaatattgattctgctcgtgtatcaatccctgccacattaaagtatgaccattcaaagaaatgttatctttaccgaactgagctggaaaagactgaacaatattggaaaggctggtatgaaggcctctcagataaatttttgtcatgtcctgtgccaaaactgttgttattagccggaacagatagattggacaggtctctcacaattggtcaaatgcaagggaagtttcaaatggtagttgtaaggcatacagggcatgctattcaggaagatgtacctgatgaatttgcaactctgattgttaacttcatttctcgtaaccgaataggccctcatggaattgagatacctggccttcgcaagccagccttttccaaaccttgaatctggtattagataaaccaagaatgaccaccactgcaagatgaagatgatgaatttcttactttgacattcctttagttttataccgtgcttctatgttttgacgggggaggagggtaggtgaagcgattatatattatatattatatatttcagactattatcaaatgtaatgagcaatgggtaagatgggattggacatagattttcgctcatagctagcaacgttaggtgtcccttgctttgagtgtttttggttttcatctttaaagaaaataaaaaataaaagtaaaaatacgttcgcttaaaatttagaaattatnaaaaaaaaaaaaa

SEQ ID NO: 84644 - DNA, 561 bp, Glycine max
  Clone ID: PAT_MRT3847_47449C.1
atttgtaatctaacaatttctaccctaatatttttaggaagatgtacctgatgaatttgcaactctgattgttaacttcatttctcgtaaccgaataggccctcatggaattgaggtatttctcttgctgatatctttacaactgtcctcactgtaccatgtgctttacctttaaatagatattttagatttaatttgattattacaccacttagtatttggttcgtatgattgttgataaaattcttttgcagatacctggccttcgcaagccagccttttccaaaccttgaatctggtattagataaaccaagaatgaccccccctgcaagatgaagatgatgaatttcttactttgacattcctttagttttataccgtgcttctatgttttgacgggggaggagggtaggtgaagcgattatatattatatattatatatttcagactattatcaaatgtaatgagcaatgggtaagatgggattggacatagattttcgctcatagctagcaacgttaggtgtcccttgctttgagtgtttttggttttcatcttt

SEQ ID NO: 84645 - DNA, 335 bp, Glycine max
  Clone ID: PAT_MRT3847_4744C.1
tcggccacgcgtgcgatcacgcgtccaatcgagatatctagaaacagcgtgatgaaaatgaaagtccgcgatctcttcgttgctacaaggttggtagcatggcaatgccattcgtacaatatgtatcctctccgaatgaacactggctatggtgcccgtactccggaggtgaaatgcgcacgttagaagctttctatgctagcacacaacatctttggctatcagaccattactgaaaaatgcgttgaagcatcataggaatacatacatggcgaacaatgttcatcggactccaagacaagttaccaacaagcttacttttatgccacagacct

SEQ ID NO: 84646 - DNA, 836 bp, Glycine max
  Clone ID: PAT_MRT3847_47450C.1
gagtcgattattatcgactagcgaaatgagaggaacaaggtgcaagtatctgtcattttcactctgagccttcctgaactgataaacaatgttccatcccatggccagcaaataaagatagctgcggtcctgacaactattgaccaaaatgtaagaccttctaagggcatcttctagctgctccagaggctcccgggtttcggggtacttcttaagctccgagatcttgagctggtccagcaagttccctatcaacttcagatgctgcgcaaattgcctgcaattcttcttgtgcatccgtgctgtatttgcagctttcacaatcatcccaattaacttcactgcatctatgcccgttagctgagccacatttgcaatctccccaaaatattcccatgaagaagatgccatcctctcctcaaatcaacctttgattatgcaaataacattggcatctcaagcctttgaaatcttcccctgcatggcgttctctttactcagaaacaacattgcctttcaagatattggcgctgttagaatattcaaggcttcacgctcacaatgcgtaacggaatgcaaggcttatgctttaaacaaaaagagaaaaaaatcattaaaagaaagaagaaaaaaagactaacaagctacacaactacgtcaaaatcagaagggaaaaaaaggaatatagagttcaagtaattgcaggtattgctttccgtggagggccttttgttgttgtgtagtaagaaagaaagaaaaaacagaaacgtgccctgagaaactgtttctttctctctctctctctctgttgttggttttatgccttacagtttcgg

SEQ ID NO: 84647 - DNA, 689 bp, Glycine max
  Clone ID: PAT_MRT3847_47451C.1
tttcgtgagtctcgtatctctaaaagctcattaaacccaaggcccttcctaggtgagtctcatttctccaaaggctcgaaaaatccaaggcacgtccttaatagtcctcacaaaaaccaaggatgaacacttcctttgtccaaagcttgttaaacccaaggtccggccttggaatacaagaaaccgaaggtccagccttggtaagcgctcctacaaaaacccaaggtacacccttggtaagctctctcctttagaactacaacaaggatagtcaaaggtccaggttccacaaggtaaaaggacataccactagactagttggcaagaccttcaactaggagaaaatcaaactaactcctcacaagcatcaggggagaagctccataaaccaaaaggaagcatcaccaagatgattaacaagacctttaacctgtttgaaattaaacttgagatgatcttatgtcatttagttctttatttcacacaaaactgcctaggtaagtcttgcttcctacgctgccaagattatactctcatcaaggcaacttatccttactaccataagaaccaaagaatcatatagacaaaaggaaaaaacatccaagccaaaataagtttcaacaacaaacaaggcaaattcattataaaaagaagaatcattgctagaattacaaagctatttcgccccc

SEQ ID NO: 84648 - DNA, 508 bp, Glycine max
  Clone ID: PAT_MRT3847_47452C.1
catggttcatgagcctaatccctctatagttagcaaacttttgcaaatctcccttgttctcaaaaataggaattaaagtgctccctttccatctagcattttatatgatttcattatctcattaaaattttcgaaagccaagttataccttgctcccctagacagtagacacttccaaacttcagaagaataaagaaactataggctcaaaaaaatgaaacattcatgcatttcctcaaaagggaaaggcctaccaaaaggaagggtgcctgcaaaaatctaattttaacttgaagagcagggagaggctggaaactttatcaactgctttggtttatgttcaaaacaatcactttacataacaatataacctgtttttggtgtcattttaggtctaacctgttccctaggaggccttaatggccattatctcgtcaaagaatgaagaaaggaaaacatggggggaaaactatatatctatttaagtgcttgaatcactcatcacact

SEQ ID NO: 84649 - DNA, 379 bp, Glycine max
  Clone ID: PAT_MRT3847_47453C.1
ctttttgtttttttgttttctattttttttcttctatttttgtcttttctaactttatgacggtgggattataaaagacaacccttaccttgatgatggaaaaggaacacctatggacttatggcaagacgccattgaagatgaattttgggggtaaaaaaaacgtcccagagtgccgacacacactggaaggaagggatccctgccagttgaaaaaaaattgtatatcacactttaggaagggccttaaaggacgatgccttatttttcaagttgaataaaatgcatggccccactgacagaaacaagaccataaagtttatgtacctggtaccccccatccgcgcctgggtgagttgcgggggccatgagaaaatgg

SEQ ID NO: 84650 - DNA, 325 bp, Glycine max
  Clone ID: PAT_MRT3847_47454C.1
gaattccagggtcgaccgactcgtgcgtaaagtcgactaaatgcttcagaaagaattttttgaaaagcttgctaacaacaacgctcgggctatactcacagacagtgctctcagaaatgtcaagattcctactggacctacacattcgattcttgaccatataccaagagactcggatttgaaacataagctcagacacctacagagactgatatgaagagtaagctgtctcagaactttgaactccatctaacaattgatagtaagaagcttcagatccaaatgaattgtgcatatcattgatagctagctctgatcaattgtt

SEQ ID NO: 84651 - DNA, 2071 bp, Glycine max
  Clone ID: PAT_MRT3847_47455C.1
attgtctgtttccgcttccgtttcctctctttgtattgatgaggagacagaaaacttaatcaaaaatataaacttttggtgctacctgtttgaaggtgtttgaagcttgtgcttggaaaaacgatatatgttgacatatatttgagttgttatgttctgtctctgttttcgtgagatttacgtttcactatgagaagttaacacaaactagttctgtcctagtttctcggaagattttctaagatggaatctgttaaaccatcagcagtgacgccaagcaagagcaaattggctcgcacttttgccaaagttcttcacgttagagcagtgactggaattgcaccagttgatggactgaagaatgttaaagtcgatgcggatctcaacaatgaagcaaataaatgtaagagtgcactaaacaatgaagaagacgaagagcttcaggaaagaaaggccacagaagctttgcttgcaaaaacttttgctagcatttcaactgtgaaagcttcatatgctcagctacagaatgctcagtctccttatgaccctgatggaattcaagctgctgatcaattgatagtctcagagttcaagaccttgtctgagctaaagcaatgttacttcaaaaaacaatttgatcctttgccagctagagcaattcttgccgctaaattaaaggagctgcagagtgtcaacagaacctttgagatcatggggaagaagtagaatcacaggcgcggctcaaggaatctgagattatatttctccgagaaaagctagaagaagctaatgtgcaccgcgggtcaattgagaagaggttaaatcaaagtggatcattatcagttcttgataatctccacatgtcaggactaagtcctagccattttgtcactgttcttcgccacacggttaggtccattcggagcttcgtgaaattgttagtgaatgagatgagatctgctggttgggatattgatgcatcagtcaaggccattatggagcagaatgtggtttactggaaagaagatcacaagtgttttgcaattgagtcctttgtgtgtagggagatgtttgattcattcaacttccccaacttctccctaccaaatgagtccctaccagataggaacaggaggcaactgttctttgggaggttcaacgagctaaaaccagagaaagcaaaggactttcttgcagggaaaccaagatcaccctttgcaaaattctgcaggatcaagtacttgaggcttgttcatcccaagatggaggcatccttcttcggcaacctgaatcagagaagcctgctgaatgccggagagtttcccaacacaaatttcttcacctcgtttgctgagatggcaaagagggtatggctcctacattgcttggccttctcctttgagcctcctcaagcttcaatctttcaagtggggaagtggtgcagattctctgatgtgtacatggagagtgtgaatgaaaatgatgaagaaatgccagtggagtccgagacacaaattgctttcactgtggttccagggtttaggattggtaaaactgtgatacagtgccaagtctacctctcacagcgccaagtaaaaaatttcacatccacaaagcaaaggtagtagtaactagtaagtggtgcttttgatcagagactgaccccaccatgcaacaggttttgtgttgaagtggaagacaatgttttgagttgaaacttttggggagggacatggcttgtggtgcagtgcatggctgtgccttgtggggactcaccttctgccatggttcaacggggcattttttttcttgtccatttgtattttggccattttgaaaaggaagcgcgtgaaccgttgcattgggaagtgcccctcttgttcggaatgttttttttaaaaaaaaaattatttgttatgcagtttaatcaaatgcttgcccccaaattttgttgatattaggccggtggcagggatggtctagctggaatgcatcttttccagacattgcatatgttatgtacataataatgttgttggcgataattttattctgctctttttagttcttt

SEQ ID NO: 84652 - DNA, 591 bp, Glycine max
  unsure (1)..(591): unsure at all n locations
  Clone ID: PAT_MRT3847_47456C.1
acgacccacgcgtccgatttcttattggagctttagctaagcttggagctactgttgtaacctatccgatcctagttgtgaaggtatatcatactagtttaatctcctgattgtgaagatatcatatagtgtgtttggttataagttgaaaacttgaaatgaactaaacttacgttcagcatgaatgacggagatatttgcttctccattttatactctggaatttgtgaactttagtttgcatatttggaaacagatatccaggcatgcttatattagctttcttaagatgtaggttttatttggctaaatgggggaccagtctaataagaataaaaataataatatactgcagagctggagaaaaacagtaaaaactaccattaaaaatgtacatttcttaaaaacacaaatgcattgcttacattacatgtgaaagataaagaagaaaaattctgagctggtcactgcctattntatattatgctgntacagaaaacanaanagagcaaggatcaatttgaagatttgaaagaaattgggatcacaaatgctgtatatacatatatttgactttggtattttctagga

SEQ ID NO: 84653 - DNA, 525 bp, Glycine max
  unsure (1)..(525): unsure at all n locations
  Clone ID: PAT_MRT3847_47457C.1
cactgagcatcgtctagctatctcgatcgaactgtccaaggtcctgtcactaaaaggtgttgtgtatagggcataaggatatatctaatttcgaacgaatgggttatcaacgggtagtgtagtgtagggggaagcgtggagagaagttaatatgaggcaggttggagtaaaggggtgtaggttacgtagtattgctgtgcaagttaaggtaggtggtggtggcggtgggcggacgtaagataatagggaggatctagatgtaaacgagtggtcaacggtcgagggggaggcgtagagtagccacaagaagaagtacgtcggggcctaaggtacgcattagtgcaacggatacgtagtgaaggccgtcaattgggtgtgaaatcaggtcagggccagtaatacggatagtgttacnacgtcgcagcaaaccaggaaggggcatagtaaacgacccccgcgacagtaatgtgggtaacgtaaaccacttactggcgcaggataagcaaaatagcaagccagtgtggt

SEQ ID NO: 84654 - DNA, 1135 bp, Glycine max
  unsure (1)..(1135): unsure at all n locations
  Clone ID: PAT_MRT3847_47458C.1
aaaantcgctcgacgtttacaactacacggcgactccgccggcgccagcctgtaagccttggtgccatttgtggtctgacaagctgccgcacatggtgaataagtgtggctattttcattatattttaaaaaaagacattattatctacatatagtactagaaagttataactttagctttgtcttttaatatattcatccttgctcctttataaaatgccttgtgattattatagttatgtgaccaattgatagaaggtcaaaccatattattttttatcagtaacatataattgatactcaagctaacaatacattgggatatcgatgagatgtcttgctaggtggttgcccacggtgctctgggcttggtttcggggctaccacagcttggacagtgcatcacttggtatggagacttttagatcacgtgtgtctgattccagaaactcaacacttgagaagattcctgaagtgattgagaagcctcaggtaaaggaatcatcgaaagggttgagacggctgttaaaatttggaagaaagaatcacaactcgcctactgctggacgtgacatggaatcggataataccagtattgatggttccgaagcaaatgagattggaactaatggttcctcgaatgaagttcatactctgaagaatttgatctctcgagatgatactctcacagccagtgcaactcctccaaagtcttctcgctctttctccttgttatcgccattccgaaaagcaacaaaggaaaaaagataatgatggcttgacagaatatatgctgctgcttgaggttgacacagtgaccatttacttgattcttttaattttatttttcctttttggggacctcaatggtcctgtgtgtctagtactctagctgaaaatattttgcttttggaatccagctattaacaaaagcaattttaggcccttttttgacagcccttttgagcttaccttctcaaatttattggaaatctagatggggagattgattctgaatccttaaggaattggttggttcagcatctggtaatgtaaattatgccactatgttttgacattaggaaaatcaattatcgtacttttncatgaaaaagaaaaacaaacatttcaatgt

SEQ ID NO: 84655 - DNA, 537 bp, Glycine max
  Clone ID: PAT_MRT3847_47459C.1
cccgcgtccggaagatcaataatatattatatcaaattatggacaagcttactggcaaggaactagtttctacttttgaatttattgaaagtggagtcgtgaaatcacttgttaattgtttatctcatgggcagtatatcagggaaaaaaagagagtacatggggtttgtaattataatcctgtcatagaaaaacgatttgaggctttggctagtgtatgcttatgtgcttctcagcctctctcaggtgaaacacccctttctatgttaatcaggaacttgcagactgcactggcttcattggaagcttttcctattgttctgagcaatggaccaaaactgagaaattcatttgctactgttcctaatgggtgttccattccttacccttgcctgaaagttcgttttgtcaagggagagggagagactttcctgaatgactacactgaggattttcatactggtgacccattttcttctgggcattccattgaaagatatctatgggcaaagggcagtgcaaaagcacagagcatgc

SEQ ID NO: 84656 - DNA, 461 bp, Glycine max
  unsure (1)..(461): unsure at all n locations
  Clone ID: PAT_MRT3847_4745C.1
actgcacagnnntaagccaaaagaaaattcagtcctttacataatactactactgcctacgcttcaaagaactctcgcgtgagcataagtgtatgtgcttccttggtgctgaaagttacaacttacaaggatgccaataatgcacagccaatagctaaatgctcgtgttttggaaaattatttactaacaacaaagttgcaaaggaggagcccaatgcaaccttaccttcaagttaaaaaaccaattcgttgaacttaaagctgttctcgtgtgtatcaagcgctgataatgagtccaagtcaatactttatcacatgttctttccacatgcactctcaggcacaagcataggaatcccataaggccataacagcagacagcttaatttagttgtgttccataagttaatcagcatgaagatgttgctttctcctttgacagcgattaaccggacgcgtgg

SEQ ID NO: 84657 - DNA, 279 bp, Glycine max
  Clone ID: PAT_MRT3847_47460C.1
gatactcaactcactttcgtcgtcgctcacgctcacttccgggtacgagcgtcacggttcattagcctcagccaccagcagttcaatttgagcagcttcatgcactcatacagccgctcagacaatgacgtcatcatctgacaaagtgtctatctctagtccgtatcgcccctatattatagctccgccttgcaccagccgactactcatcctcaattcctcacgcttttcttaacctcacaggcggttgccggtggtgttcgtgctgctgtcaagcct

SEQ ID NO: 84658 - DNA, 357 bp, Glycine max
  Clone ID: PAT_MRT3847_47461C.1
cactaactgtatggctggctcggcccgcctgtcacggtcccggccttacttgctggacccacccacgcgttcttttctaactattcatacatagttggcgatcttccctgtccggaaactaggctgttcacttacacttcattcattgattattaaaacattacatgaggtcaccaagaatcatcggtgcttcgaggtcctacggattcctcggtggatgcaagaactgcttaactgatgatctagctaatgcttacaggaaagcctgcgtcagaaatgaccctgacatgggcggtcatcccgagaagcttaaagagctggctccagcatgtgaggttgtgggttaccctgagaagc

SEQ ID NO: 84659 - DNA, 613 bp, Glycine max
  Clone ID: PAT_MRT3847_47462C.1
ggctcgaggcaggatgaaattactgattcaagtggcaatagaagttctggtattgtagccgataatgaaactgtacttgtcaatattgctgttagtactcagtcaaataaaacaacttcatttcctgcggttattcctgaagattgggaagagagtgctcaatcagtttcaaccaaagaaaatcttgacctgaacaacatgccacaggtcttacaccagtcatccttggcagagcagagcttttcagaaaatgacctgtttacaaaatcatttgtttcatcaatcgatgcatttttagacgagcaggttaaaaatgataataatgaggttgatatatgtagatctgaaacttcaaactttggtgctttttactctgctcctggtattcctgccccatcagcagtttcttcagttgtacaggtgcttactggaaaggttttggttcctgcagctgtcgatcgttcagggacaagcattagctgctttgcaagctctaaaggcatttctttgatgttatttgcatattatgtgggatagtagtatgatcattatttttgtgatgctaaatgactgcatattgaagaacttatgaaagatggacttgacatcatag

SEQ ID NO: 84660 - DNA, 139 bp, Glycine max
  unsure (1)..(139): unsure at all n locations
  Clone ID: PAT_MRT3847_47463C.1
ggatcataacaacaggttcttcactacatttaccaacacttctctcttctncaaccagaaaccactatcaacatggctgaccagtacaagcccactgagcacggcggattgaagcaggacggcacccccgacaagcgcg

SEQ ID NO: 84661 - DNA, 387 bp, Glycine max
  Clone ID: PAT_MRT3847_47464C.1
cggccggaattcccgggtcgacccacgcgtcgccacgcgtcgtctgcgagagacgacgaggggacacacagacagaccgctgcgaattattatcctttcccaagccagccagcgagtgaaattacttgcatagatagagcatatggcatgatgaacggctgcttctttcggtcgtcgtactttctatcctccacttaccagaaaccttatgcctcagtgaaaagaaaaaattggggggtgtctacaagggatgagtatgctaattgacccaatttcgggggtgtgtgaggacattggtatacgtgagtggctggatcacgggtcatcagacattgcactgatgacaagaagaccagatttgaactgaaaacacatccagatgcccat

SEQ ID NO: 84662 - DNA, 274 bp, Glycine max
  Clone ID: PAT_MRT3847_47465C.1
tctatataaataccctaaccttattccactcccttcgaaaactaacttatgggcctcttacaaaggcggcttccattaacaaccttcaatacctcatccacataaactacttctttttcataagcaatcctcctccgcctttgtatttctacactttcttctctttcgactattaaaacaactactcttcatacctcaaagagcttaaccatcttatacaaaaatttaactcctataattaatactccattctttaccctctccattaattcac

SEQ ID NO: 84663 - DNA, 380 bp, Glycine max
  Clone ID: PAT_MRT3847_47466C.1
tataataccaggctattgggtcattcttattgtgccatttaccataaaccatgtgtgtgcatatcggctcaatcctggtatttcaggttctcgtctattgggcaccattcctcagttcattttacagcaaactgtccggacacagaatggcaacagtgagaacaccactacctcttcctactaggatgcacagcttgggacaaatctctatctgcctaaaggtaatgggaatcttagtggacacaactggacattgaatcacactcatacaaaattctccaattagttacttgctgagagttgctgcttggacgaaaggctgtttaatcgggaagattgcgatgcttattactgcagcaacccaaaagagtgactgttcc

SEQ ID NO: 84664 - DNA, 301 bp, Glycine max
  Clone ID: PAT_MRT3847_47467C.1
atcgattgcagcgagaagacgacagcacgggggggggggggaattaaacaggcgccgggggaccaggcaaccaccagcggcgggagggcggaaaaaacaggaagaaggacaccgcaccaggacacgacagaggggaggcggcaaagaaaaacaacccgaacgaggagaaagagaccagaaggggcactcagagcgtgcagctcagcagagagcccaacaatctctactaacaaccaacacaggggccacccccggcccggagaacaaggaagccggaacctgacaacccgccgaaaaagac

SEQ ID NO: 84665 - DNA, 275 bp, Glycine max
  Clone ID: PAT_MRT3847_47468C.1
gttaaacatgtatatacacacaaaatacagacctgtctggcggacgccttcccataacactgaaaacacacgaccgacgatgcacaagaccatggggaagtcctgcgtaggcggcaaggacgcggccgagaacgatggcacgacccatactggtgatgtctgtaccatcgaggagaaccgtgactcgatcgactctgaactcgccgcgatgccccctcaagagcgcgtcgcctacctgaaagaattcgaagactcagacaagcacgacacgccaa

SEQ ID NO: 84666 - DNA, 461 bp, Glycine max
  Clone ID: PAT_MRT3847_47469C.1
gaagagaatgaagagcaagggaggtgtagaactgagtggaaggaatgtcttacataggaaatgggctcttctgctttgtgtggcaagcttctgtgctggaatgttcttcaccaataggatatggtcaatggctgaatataaagaaatttcaagggcttctactgagattgaaagaataaaattaaactctgagggttgtaatctaaatctagtaagtatgtctgttacacttttacttatgttgtattttggctatgattctgtcttggactttccccctatcccataatatagacaatagtctgtcattgactgctactagcattaacagccttaaaagtcccctccccatggaatgatcaggaactactactggttagttcattatttgtatacacttgcataatggaatgggggaaatgtcactaatagaccctttgtttcagtaactgtattcattg

SEQ ID NO: 84667 - DNA, 276 bp, Glycine max
  Clone ID: PAT_MRT3847_4746C.1
gaaccgctcgtttgcgggaacaacaaagcacactatattcaccatttcgtctcgcgttctttctcttcttcttcagacgcgacgacatccagggaagacactcgcgcgaggaacggagtgaaccgagcgactctgacccaacggacggacctcgtagcgctacaaaacaaagagggatctaaggccgcgacagggaggtccgaggatcaccctgcggacagagtgtgagcgatcaagccatggaaagatctcttctgggctagcgggagaaaggac

SEQ ID NO: 84668 - DNA, 726 bp, Glycine max
  Clone ID: PAT_MRT3847_47470C.1
gtccttgtaagcccaaaaatttcagacgttatacacgcacaaagcaacaaacttggttcattttctcatggttttacttattctggacaccctgcagcctgtgctgtggcaattgaagcactcaagatctataaggaaagaaatattgttgaccaagttaacaagattgccccaaggttccaagatggcataaaagctttttctgacagtcccatcattggagagatacggggaactggcttgattttgggcactgagttcacagacaacaagtcacctaatgatccgtttcctcctgaatggggagtaggtgcctattttggagcccaatgtgagaagcatgggatgttggttcgtgtagcaggggataacatcatgatgtctcctccatatattatatctcaaggagaagttgatgagttaatcagcatttatgggaaagctttgaaaaaaacggaaaagaaggtacaggaactcaagtctcagcgcaagtagcttaggcctatgatggaataataaactatgctgcaactacctccgggtgaaaaggaaatattcattgtaataacttgataaaacttggttccacccttttcgttattgtaaatgtctgtaaattgattgcctatttgcctcctaatttatgttgtcgttttacataaaaaaaaaaaaaagggcaggccctccagctctatacgatcctaggtatgcgtgcatgtgacgtca

SEQ ID NO: 84669 - DNA, 370 bp, Glycine max
  Clone ID: PAT_MRT3847_47471C.1
tttttagttgcgtcgttgtgcctgggctccagatcactctgtacgcttttatcgacggttatgcttgcgagcgcctgataaatctgtctgaaaccatcagctgttcaagaaatactatgatcctggacgatatactgctgaggctcccattgtcaggctcgaaaatgttgacatattacctgagccttctgcctgctaggggtcactggatgagttccaaactctctttactaggatgttcctaatgaaccagatcctttcatgaatttaggtaccggacagattaaggccccacttgttgcttacgatatgcgtgaaccctatgccactcacctcatgagtgccaaggatcagatttttattgatgaat

SEQ ID NO: 84670 - DNA, 177 bp, Glycine max
  Clone ID: PAT_MRT3847_47472C.1
gttgtgagttctggcaaacagaattaactgttaatggggatccgattcctactgatggggaacaagccgggccaaactctgcttgctcaatactacaaatatttgaccctagaacagcgacgtgcgctgacatgctaaatcgttcgcacatgccataagccgcaacccacagaaaat

SEQ ID NO: 84671 - DNA, 172 bp, Glycine max
  Clone ID: PAT_MRT3847_47473C.1
ttaatacgtacccagcagaggacagatttgacacgggttttgtctctgaaaaaaaaagccatgtttatctgtatgcaaaattgacacggcgagcagataaagatcggcccaggaatcatgagggcggaaaatggtaaagcacgttgccacgctagccttaaaacactatcaa

SEQ ID NO: 84672 - DNA, 541 bp, Glycine max
  unsure (1)..(541): unsure at all n locations
  Clone ID: PAT_MRT3847_47474C.1
gatgtaccagttcnagtctgagacgctaagccttacgtagctcgcaattcgctcagcaacattgaagaaccctgggctattttttgattctgtggaaatcttgtatacgctgaaataaggtaagccaacagtgttgattggaacatgaggacaatgaagaacatttactatataggtgattggggcaatgggtcttattaacgagagacctattattcttgctctttacaaccctacgatacagggagaatgctctgatgaacaagcttactagtggagccagcgacgtgccattatcgcaagtcggagcccatttactcccgactagtatgaggggaaagtgtatgtgcctggccaggaccaaaacgcatacatattatctggattctgtcttggcataataatgttgtgggaccattcaaatgcatgatgatctgcttgtggctgtctctgacgcttttgctgcacaagtgagccaatagaactttgtttagggactcatctacccaccatttaccaacataagagagatttcagcaca

SEQ ID NO: 84673 - DNA, 412 bp, Glycine max
  Clone ID: PAT_MRT3847_47475C.1
gtcacgcgtacgcataggctctttgccggacacaagggaaactataaagcaggatcgtggcgaacacctacatacggacactcatcatatacgtgagcatcctcttactaatactcgacctcctacttatttacactctttccagccatcatcaccacctgaagatcttctacaactgggagaatcaggtccgacagtccgccctgagtcgtctgaccatcggtatgtaggtgcttgtcaccggctgccgagtgcttaagagattcccactgattcctcattttcaataagcgcgagaaccgcgtcctcattctcgacaactttagtccatactactacctctcgctaaaactcgcactacagcacgtcgtgacgaaacaacgaatccgtatcatcgaagccgacctgaacg

SEQ ID NO: 84674 - DNA, 381 bp, Glycine max
  Clone ID: PAT_MRT3847_47476C.1
cgcatggggtgtatttttttgccccggggtctcccctctctgtgtctctttctctgattgttgttctcggtcagatcttactcaggattctggagctcatccattcagcacgctatatcgccgtcggtgagaggtataattaaacatttttatagaagtatttatttaatttaatctatctgaattctcaaagcatacccaactttatttaatttgatccatctgaattctgaaagcctacccagcttaccatgttcacttaaattgcttgacgaatcaacttaccgatttgaattgagagcatatcactacttacgtatagctggctagttggttctactgcgtgttaatatttcaatttggtggagtttttagctttta

SEQ ID NO: 84675 - DNA, 2320 bp, Glycine max
  unsure (1)..(2320): unsure at all n locations
  Clone ID: PAT_MRT3847_47477C.1
cacgcgtccgctgtattctgaggttccatctcctcctatttccctctcccatccaagttgacctttcattccactttttcgaatcccaagactcaggcctggtaaccttttgaggttgttgggtgcagaagggaacgatggctgcttcagaggagaatagtgcactgttcccaatattcattttgacgataatggccattcctattgtgccatatacaataacaaagttgtgccgtgctgccagtaagaaatcaaagagcattcactgtcattgctctgagtgctcgcggtccgggaagtaccataaatcgatattcaagaggatttcgaatgtctcaacctgtagtaactttacattgttactactttgggtggttatgattgttctggtttattacataaagaccatgagtcgtgagattgaaattttcgatccatttaatattctaggattagagcctggagcggctgagtctgaaataaagaaaaagtataggagactttctattcaataccatccagataaaaatccggatccagaggcacacaagtacttcgttgagtacattgccaaagcttatcaagctcttacagatccaatagctcgtgaaaattatgaaaatattagatagcttctcggaaactatgtgatgcatcaaacactttctacttactattaccttatgaagccttctttggcccccagcaaagtcatggatgtcttcatcaaggctgctgaatatatggaaattccagttcgtagaactgatgacgaacctcttcaaaagctttttatgttggtaaggagtgagttgaatcttgacctcaaaaacatcaagcaggagcaggctaaattttggaagcaacatcctgcgctggttaagacagagctgttagttcaagctcagttgacccgtgaatttgcagctttgtcgccatctttacaaagtgatttcagacgaattttagaaacagcaccccgcctacttgaagaattaattaagatggcagttataccgcggaatgctcaggggcatggatggctgaggcctgcaattggtgttgttgagctttctcaatgtatcgtccaggctgttcctctcagtgctagaaagtctactggtggatcacctgaaggaattgcaccatttctgcagttgccacatataagtgagactattacccttaagaaggtggcccgcaaggtgagaacatttcaggaacttcatgacatggactctctggagcgagctgacctgcttattcaaacaggtgggttatcttctacggaagtgcaagacattgagacggtactggacatgatgccttccttgacacttgaggtaacttgtgagactgaaggtgaagagggtatacaagagggtgacattgtgaccctccatgcttggataaatgttaaaaggggtaatggcctgattggtgcccttccacatgccccctactacccatttcataaggaagaaaattactggtttttgcttgcggattctgtttcaaataatgtgtggttttctcagaaggttagtttcatggatgaagctgctgctgtaacttctgcatctaaggcaattgaggagtctatggaggggtcaggagcaaatgtgaaggagaccagtaaggcagttgcagaagcagttgagaaggtgaaagggggctctagattagtattgggcaagttccaggccccatcagagggtaactacagtttgacttgctattgtttgtgtgattcttggttgggctgtgacagaaggacaaatttaaagctcaaagttttgaaacggactcgggctggcaccagggctgctgttttggctgatgaaggacctatcatggaggatggagttgaggaggatgaggacaacgaggatgaagagtatgatgatgactacgagagtgagtacagtgaagatgaagaggatgatcagaacacaaaaaataagcaacaagctgccaatggcactgtgaataaacatggtaaagctgcagaaagttcaggctctgaggaggaatgagaagttttttctaacatgatagaaccataagtttcatcttttcccctcttggatggtagaattattaacttgtagcagtaatagtctataatgtccattttgtttatcagttggactgcgttgatgcttggatttctgttcgtatcctagttcagctgatattgtgattaaattgtaatatcatctgaaaatctcaattatggtaaatgagtaaggatttaattttgatttaaaaacggggtataacttttttnnaaaaaaaaaaaaaaaaaaaaaaaaaaaaa

SEQ ID NO: 84676 - DNA, 364 bp, Glycine max
  Clone ID: PAT_MRT3847_47478C.1
agagaacaccacagaggggctggcactttgtcactgcaaagggaccccgaggtcggggaggaatggatggccacaaggaacctatgttactgactatgccaggtgcgaacacgactgaacgtgcaccaaccacaccatcacgaagaatctgtacatgatatgccacaaggacatcaagctagctctgaaccccctgaatgcagctaggctcagcaacatactaatcatctacggctaaagcacaaagtctgatctgcccaaaagagcgctaccaaatataatcaaactctagctcctgcctatgacctgaaaggaccaagtgtacatgtacttcagagatactactggggatatacttaatccc

SEQ ID NO: 84677 - DNA, 683 bp, Glycine max
  unsure (1)..(683): unsure at all n locations
  Clone ID: PAT_MRT3847_47479C.1
aaggnaaaatgaacttttaaannaannataaagannaagttgagaaaaaaattagtaatttataaactagtttatttttcataaactacttcaaataacttatcaaaataagttatttcaaataatttataaaaaataagttactaaaatatgttatttcaacctagcttaatgcttattgggaaatctattcataagagactcactcatttttttcatacaattgaaatgaatgtactcgtaaagctacatttattggtagaaaatgcaatctctaaaattacaaacacaaatagtatcattatatataatcagcacttaaattaaaattaatttaactatttgcattgttattgatgaattaattatttatatagaataaaaagttggtgaagtagtatttcttaatggtttctctgtgtctcttctacctctgaaaaaagaaaaaggtactaatggcacatctgtcttctttgcaagaatacaagaacaaaactgaacttccttttctattcatgcagagaagtaatccgttgtgaatcaaagaacaagttaaaaactacctcaactgatcatcgtnnncatttgnnnatgaaatagctctttcaaaaatcgctgggttggtagtgacacctctgatcccattggcnatnnatggangcaaatctgaaacnnnncgacag

SEQ ID NO: 84678 - DNA, 962 bp, Glycine max
  Clone ID: PAT_MRT3847_4747C.1
aataaaaaactcatctataaaacatttcagatataagatatgtacccgtaatagttacagcagcaacagaaagagattggagaagggggaatatacgtagcaagctacaacagtgaatggaaacaatttacttctgcaagtaagaaataaggattattcaagcagtctgaagccagaagctttgttctacttaacccagaaagaaatggggaactagagagctaaagccagcataaccaaccctttttcttatcaatttttcttctttctatttagtgggaaatgggagacctgcaccactcaaagtagaagagaagctacaagcagagacagagtggacataaagaagcagacagcgaccttagtctgtgcatttcgtggtggttgtgctactggcccagttccagcaatagggctagatggggctattttagaaacagaacgcaaagggggttctgtcacttcatcttcagtcagggcaggggcaggagccacagccggtggcaaggaatatttggctatttgtttgaaaaggccacctacttgaactggtttcatgtatggaggtgtgttctcacccaaatttaagcatttgttccttctgtatctattagctgtttttgggaagtctgtgatgacaccatcaatttcagcatcttgaacaaatgtgttgatctccacggttgaatctgacaagaaatcccatgcagaagatacaaactcattgctgaatgtttcaacgtaaacagagatattagaagatttgaactttggcacaatctttgtagagccagtcaggaagaagtcgttaaggggatatacagaggacttatggagaatcacagaatgagcaaatcttttgatatcccgaatagctgaatcaactgcatcaccaactatctcatcaatcctgtagacaagttcataattggttttctccttgaatttcagtagtactgaac

SEQ ID NO: 84679 - DNA, 282 bp, Glycine max
  Clone ID: PAT_MRT3847_47480C.1
ctaacacaaacccgaaccctagccccaaacacctcgccttccccttcacggacaccgcacgtctgggccctcaccctcgtcacgcctacggctgtccagatgcttgaatgcctcaccatcctcctcgccgacggtggcgttcgctcgtacttcgctctcactcctgattatcaagacatcgccctgcgcactctgcatgtcgctcaccgcatctgcgtccacgactactcatagagccgctgccgacaatcgaaaaaacggtgatagatactgcagtcccag

SEQ ID NO: 84680 - DNA, 182 bp, Glycine max
  Clone ID: PAT_MRT3847_47481C.1
tacggctaccaaatggtaacgctccggtactgctgctagatgtttacgttccggtacggcttctataggttacggcttcgctattgctgccatcacgttgaggttgggggacaacaaccttacgttactgcggtgagtttgccactcaccgtcatcgttcttactctatgatagctgcttcc

SEQ ID NO: 84681 - DNA, 536 bp, Glycine max
  Clone ID: PAT_MRT3847_47482C.1
ggaaaaaaaaattaccactattgattacacacaaactatgctagggacgtatctcactattgatttttttgtatacaaacaactcagcgtcatcaccagcatggtaatacaagaataagggtataagcgctgggagcagaaaataaaagttggtcaaactcgtgtaacagagtcccatttcctccggaataacaacaaaccctaaattatgccggggctgtacagagtttccctttgagctttcatcgaattctacacgattcaatgacctcactaacagctttatgagtctccggcgaaatcatgttcaatgatagatggaattcctttcaggggaaagaaatgctaaaagcagcgcaaaataagcttccacaatcattttctcagcttctttttcaccttgtagaacagctgcctcatcattcagttgcaaatgtttatcttccccagctccttcactttcacccaggttagccaagaaaatggagcataataattgaataacatccttccgaacctcctggtgcaagcttact

SEQ ID NO: 84682 - DNA, 3275 bp, Glycine max
  Clone ID: PAT_MRT3847_47483C.1
ccgacgtccgtcgatttcaaaatcgcacggaatttgataacaagaaagaaaaatccaaagtcacccttcacacaaacacaccactcttcttcgtcgattcaattcaattcttcttcctcgttttctttttacagttcttgaactaactccagttagttgaattctacaaaatttcaaattccgaaaaagcccttttcttctaccgaaatgccgaacccttcttcttcttcttcttcttcttcttctgtgtagccgccaccaacccccaccacccgccgccgatctccgtttaagatgatcgtccgcacctacggtcgccgcaaaggaaccctctcgggaacgtgctcgggctcctcttccttaaacggcgacgtttccgagccattcagggattccttatctcaggagattgacgaccctgtctgtggctctcgcgttctcctcgcaggactcgtcctcgcagcattggtccttcttcgattcggagatcgacgacttcggcggcggcgcaagcggcgtcaagggagtcgaatagggcgaagtgagcggtggcggaggggatttcggctccgcctcgagccgtggaagcgcaggagttcggagagatgatggagcacgtcgacgaggtcaatttcgccctcgatgggcttcggaagggtcagcctctgcggatcagaagggccagcttggtgtcgctcttgacaatttgcgccaccacgcaccagagaaggctcctcaggactcaagggatggcaaagacaataattgattctattttgggcctcagtcttgatgattctcccagcaatcttgcagctgcaacccttttctacgttttgactggtgatggccaagatgatcacctccttgaatcacctggttctattcaatttctgatgaagttggtaaaaccaattatctcctcagctattaaagacaaagcaccaaaatttggctataaacttctatcattgcgtcagaatgatgacatgctgaaaaatacgaatacaacgggaagattggactccagttctgcagaagttttttctagagttcaagaaattctagtaaatttcaaagagctgaaaacatgtcagaatgacagtagggtggagaggccagagttatgcccaaaatggttagcattgctgactatggagaagggttgtttgtctgccatttctcttgatgaaaccagtggtgctgtacggaaggctggtggaaatttcaaggaaaaattaagggagcatggaggacttgatgcagtctttgaagtcaccatgaattgtcattcagatttggagaattggatgaaggatagttctctgtctaccaaagattcaagaaatgacaaacgaatcaagagcctaactttgcttctcaagtgcttgaagataatggaaaatgcaactttcctaagcaatgacaatcagactcatttgcttggaatgaaaagaaaattgagtcctcagggacccccaacttcttttacggagctgattataactgtcataaaaatcctctcagatctatgtttacatcgaagtgcctctgctgcatccaatgataacaagccttatgatcccttctctatgaccagtcatgattctgaactggatcagctcagagactataaagagaatgagactttatccatcagttccactagaaagtaccacggtgtggagagagcctcttctgttaagagttctaatgcttctcagatcaaccgaatattgacatgtaatcggttggaaagttcgctatccatttctgaaactcccagcacttcaactactgatacttattcactaaagatgagggtcagttcttccatgtctgggtcttgtagtggtgcatctaagagttcatactgtaaaacatccacgattcaaaatagttctgggaagaatgttcgctttatggaaggtaccccagttgtaatattggatgatagccaagatccctttgcatttgatgaggatgactttgcaccctctaagtgggatctattatcaggaaaacaaaaaaaatctcattctaaaaagcatctggtagcaaacagagagtttgaaaatgaatgtcaatctcacaccaaaagattccagccttcttgctgactgtcttcttgctgctgttccagttctgatgttggtgatgaaaaagattccagccttctagctgactgccttcttactgctgtaaaggtgctgatgaatttgaccaatgacaaccctgttggctgtcggcaaattgctaactatggaggattggagactatgtctatgttaattgctggtcatttcccttctttcagttcatcgtcatcctttgctcaaataaaggaaaatggtgcaggaacgacaaaagatcatcaatccgataggcatctgactgatcatgagttagatttccttgttgctattctgggcctgcttgtaaacctggtcgagaaggatggtcataacagatcacgacttgcagcagccagtgttctgctaccttcctcagtaagcttgcaccaggaggttcggaaggatgttattcaattattatgctccattttcttggctaacctgggtgaaagtgaaggagctggggaagataaacatttgcaactgaatgatgaggcagctgttctacaaggtgaaaaagaagctgagaaaatgattgtggaagcttattctgcgctgcttctagcatttctttccactgaaagtaagagcatacgtgcagcaattgctgacaatcttccagaccagaacttagcaagtcttgtacctgtgttggacagatttgtggaattccatctatcattgaacatgatttcgccggagactcataaagctgttagtgaggtcattgaatcgtgtagaattcgatgaaagctcaaagggaaactctgtacagccacggcataatttagggtttgttgttattccggaggaaatgggactctgttacacgagtctgaccaacttttattctctgctcacagcgcttatacccttattcttgtattaccatgctggtgatgacgctgagttgtttgtatacaaaaaaatcaatagtgagatacgtacctagcatagtttgtgtgtaatcaatagtggtaatttttttttcaatattcttgtttattcattcattttcttgtattggactttgtttcaagtgcccaagtccctttgtttcggaagctagctagctggattagtcagtcttgtttaatgttaaataccagtggagatttgtgcgttatcaattctcattct

SEQ ID NO: 84683 - DNA, 666 bp, Glycine max
  Clone ID: PAT_MRT3847_47484C.1
gaaaaaggaaactaagatttttctcagctatcattgtttcaaatttattagtggttcaatcctttctgcaatttacattaactaagaaaactcacataacacaagccaatagcaaaagggtcaaccttattggtttgaacaagccatctgattcttgatcaagtttaccacatgttgagccacccataatgagccagcctcagtacaacagaaaccatgggtgtggttttctctttcaatatatgtggccataccgggaacatgctttgaaatctcttcaagcaaatgaagtggtccccagtgatcgtcaacaccaaataaaaatgccaattgagccttcctttctctcataaatatccaatctggtgcctctgaaagctttctgaattcagtcatggccatatagaggacattccgcatggtatgatactgtgacaagtgagagcatgctgcctcaactgcattggctgaccatgacttcccaagggattttctgacaagaaacctcaaagcctggacaagtaacaatcctaatgatgctgtcaggtaactaagagcagcagctagaacttgggatttggcaatttttccaataactaactgtgttgttgagtgtgggtttaacgtcaaaaatggataaagtccaatgcaatatttcacctacag

SEQ ID NO: 84684 - DNA, 277 bp, Glycine max
  Clone ID: PAT_MRT3847_47485C.1
tcgagaagacgacagaaggggagaaaagttttcatatatattaacaaaaacaaatagtagtagcgttatattaggagttgataaaattttctctttcaagaaaatgtcgttcggcaagaaactgttcctccaaattctgtggtggttttccttgatcggtcttagttcccaaatacggagtcattacagttttgttgtgagagaggccaattatacgagactctgttcgacaaaaagcatattgacagtgaatggaaattttccaggaccaactatc

SEQ ID NO: 84685 - DNA, 274 bp, Glycine max
  unsure (1)..(274): unsure at all n locations
  Clone ID: PAT_MRT3847_47486C.1
caaatctccacctcctccatcaccagttcctaacccaccatactcctancagtctccacctccaccatcaccgattcctcaanccccatactattaccactctccacctccaccatcaccttctcctcctcccccatactattataaatcactccccccaccttcaccatcgcctcctcctccttactatcataaatctcccccaccaccttcaccagttcctccacccccatgttatctagactctccacctcaaccatcaccttctcctcct

SEQ ID NO: 84686 - DNA, 482 bp, Glycine max
  Clone ID: PAT_MRT3847_47487C.1
ggctcgagacggaaagggtccatgggatctacccggtgcacgatggtcatctccttcgagaaggggagctacaacttgtttgcgaatatgcaaacgagccccttattgaggaggcaaacgtgcagcctgttaaccgtccagaggctgcttgtggtgatatacatggacagcctcatgagcttgagcaacattctcacactgctgctgatgtgacacaaacacatttcgttcatatgggagacgctgttgatcggagccactataggaaagaagcctataccctccttttactattaaaagctaggtacccaactcatattacccttctacatgggaaccatgctggatcacaacttacacgagtctctggcttttataatgaatgccgacactggtatagtgatgctaatgctcggcgaacttgaccggaagatgctgactatgctactactggtgacgtaaagcataggactgtgctttgt

SEQ ID NO: 84687 - DNA, 290 bp, Glycine max
  unsure (1)..(290): unsure at all n locations
  Clone ID: PAT_MRT3847_47488C.1
acgnaagcncgcagttgggctcgaggcaggcagctcctaccacttagtctactttcatgcctgccaaagcgtagaagcttgatgattttcaaaacgggaagtcatagcaaatgacaggtctgttctggatcaaatcatatatacttcaactgctattgcttatccaactgaaaacgatccaaattcaaatctagacacaagtgataattcactataacacatgcaaaacatgaacacaaaggcgtaaattaatagagattgatcccaccaaagaaactctcgctcaattt

SEQ ID NO: 84688 - DNA, 170 bp, Glycine max
  Clone ID: PAT_MRT3847_47489C.1
aattcccggcccgacccacgcgtccatccaggcgtcagtacacgagtcagtggggttgcgaaaagactatagaacgggggcttcgttgattgggttgtgactcctccctttcctcctttgcaattaacaataaagggttaatgaaggaccacttaaagatctcgctccgg

SEQ ID NO: 84689 - DNA, 178 bp, Glycine max
  Clone ID: PAT_MRT3847_4748C.1
ttttattttgttttttttacatttttcttagggcggggaattctatgtttgtgttcaattgttttggctagaaacaaaacttgacttctttttatcacacattttgtcgtttagaaaactttttagaagccactgcgctcccctgttattgaaacccccagctccgaatcgccttttt

SEQ ID NO: 84690 - DNA, 242 bp, Glycine max
  unsure (1)..(242): unsure at all n locations
  Clone ID: PAT_MRT3847_47490C.1
atcccgggtcgacactcactatcttggcgcccttttttttgggtgtgggtatgngccactctttttagccattggacttgcaacaacttggttttaaagatccctacctaaattttacattgttcatgtggcattgggtgtggcaagattgatgtcgtttgactgaaactggcggccggctacgttgccttcttttttgcccagggggcttttaattgtgcgggggggccgtttggggggtt

SEQ ID NO: 84691 - DNA, 307 bp, Glycine max
  Clone ID: PAT_MRT3847_47491C.1
gccaagcgtccatacaactcaatcaacagattggtcaggccaaaggacagcattgcgttgcgaggtagggctatgcgaaacgctatgagattaggctcaagcctcaccatttggcacagccgtttgcacgtttcgtcgacgtcatacctcgacatcgtcggcatcatctttatcatcgtgctcaatgacgtcaagctcgacgctagctacgtcaccatgtcattcaccaaccaagattcctacaacgttattaaaccgtctacagtagacgaggataaaaatgatgaggatctcgtattggagttac

SEQ ID NO: 84692 - DNA, 321 bp, Glycine max
  Clone ID: PAT_MRT3847_47492C.1
agagaaaaaattgatgaatacctgagactaaatggagtgaccaaaaaacatatggcccattgaagactagcaataaaacagggttaccttaacgcataacatagactgttcacatggatacacaagacagccatgtggaccaattggaaaggatatacagtaatgcatccaaccctgggatgtgagctataaagaccaaagaatccagcgccttatccttggggaaagcgcagcacaccatggattcagaagatcaaccaagaaccatagcttccttacggccaattgctggccgcctgtaaagagcgactgaaaatgctt

SEQ ID NO: 84693 - DNA, 741 bp, Glycine max
  Clone ID: PAT_MRT3847_47493C.1
ccacgcgtccgctaacgtcgcctttatccgcttccccaccgtgcttttcagattggtcaagctccttttactccccgcaacaaaacaccacctagttgcagattttttcttcttcaaaaatttgtttatctttatcctaatttgatttggctttaaggttttccattatagcggttttctttttattatttgttgttattattatgacgtaatttcaatccttttcataatgactccataatggcgattagtgaagtttctgagctgtgtgagcgatttagtataaagtatacgatgcatcgtttctggttctggatgttcatgttcgagcaaagatcttctgtgtgtgtacggttactgctttgacgttttggattttcagtaagtcaaatctcggaagtcctcagtgaagttcttcagcttagttagggtttggaagatacttatgaaaaagaaaaatcacttagtatagggattagtattttccctggatccagggttagttttcaataatttttaaggttggatttgaagtgaatggttttagaaagggatactctgctcaccagaaagggttttttgtttgagagtgctgtggatatatggtcagggcatttgttagtcttactttatagttggattggtcttattattttcttttaactgcatatctagtgatttgcagttgaacttgggttggggttcctggggattattgcatgtgctgtttttctttggatg

SEQ ID NO: 84694 - DNA, 568 bp, Glycine max
  Clone ID: PAT_MRT3847_47494C.1
aaatctcaactactcacaagcaggatttgatgaaattaatcacaagtgcctcactctagcttattttacttcagaagtggcacctggtacggcgcaatcaccataggaaaaaaagaacatttatttgtctatcgcccgagctaggtgcgaacatagaaagccagaaattcgttagtattggtgacaaatttaattaagagtcatcaaatccaagaataattgaccttcgtgtcctcttctcttgctccgatcgtctagttcattgaagatatagtgggcacgtcatactgtcatcacacttaacttctttcatactcctttgaaatatgggtgcttaacaccatcttcagatgaaattctataatgcggacacaggcaaaccattatggagagtacatcaagaccatctggattgagcattgcaaactcttttgccaagaccttgggctgctgtggaggtccccttaaagcacacgatccgcatatagaagtcactccaggccaggattcttctgctggggtaccaaccaaggtaaagatgtcatacagcagccccacataacttgga

SEQ ID NO: 84695 - DNA, 394 bp, Glycine max
  Clone ID: PAT_MRT3847_47495C.1
gggaatcggtttttttttaaaaaagactcaacatacatctttggtattctcacaataatagtctatgaatacaggtaacttgcattaaatgaaatgaacaatatcaatagaaatcataatactcttgtcacataattaagaatggacattttgtggctcccggggggtagccgaccccgaattatgcccagagaataaaacccatactacaggggtgctggctggtgcaaatattgtatcaatacatgccttgacatgaagatcatctggagggaacatgcctaccttatcatcggacaccaagatcatcatatccgattttcttaccataagacttagtagagccattatcaatacaatgcatgctctttccatgtactttctgagcaaagct

SEQ ID NO: 84696 - DNA, 201 bp, Glycine max
  unsure (1)..(201): unsure at all n locations
  Clone ID: PAT_MRT3847_47496C.1
acgtcgcacanacgncganacgtcngangcacgcgtacgtnagntcggnattcggctngaggntagnancaaaaatgtcgtngntaatcttcgtgttccttgcantaattnntacttatcggnagcnccttcttcgccanagnaaccctcagatgcngcgaatccnngttttggtcgnngacttcggcannaaatccncgc

SEQ ID NO: 84697 - DNA, 374 bp, Glycine max
  Clone ID: PAT_MRT3847_47497C.1
cccatgcattcgggcatctgtataccttcgttgagcgacgagtttcctatcttttttcactgctgaaataaaatataagcggaatttgtgtaatattcaaatttccggcttattctacgacggcagattcaaattggggactaaacacgataagaatcttgctttgacagaagaggaaaagatggaggttattagaaatagaggcattcctgctgatgctcttgcgaagcgagctcatgaatttgaaaaacatgttgctcatgaaagccttaaggatcaatattcctgctggttgacaagctggtgttctactaaggttaaataatcccgcaaaaattatgaactcttagacaaagtgttgttggtgatcttaa

SEQ ID NO: 84698 - DNA, 200 bp, Glycine max
  Clone ID: PAT_MRT3847_47498C.1
gcacgcgtacgtaagctgggaattgggatttaggtcaagagttttcttttaggtgaaaaggctagaatatccgagatggtgcgcattctgaagtggctgaacaaattcatgctagctgggctaataagccttggcaacagacccgttttggcagtcttctggatccacctgaggtcctacgcgtcaaacaactacacacg

SEQ ID NO: 84699 - DNA, 238 bp, Glycine max
  unsure (1)..(238): unsure at all n locations
  Clone ID: PAT_MRT3847_47499C.1
taaattctnacaaattcaaactgcttttattgacataggtcagcgagttgcattcatggagttatgggctcacaccccattctcttgctagaaaaggattccttctttcctgtgggggcgcgagggggcggctttatcggactctttgcacctgtgcagcctctacaatcatcctgaggttggcaaccaccttacataccttggcctcgtgctccgttgagtggttctcttttggcct

SEQ ID NO: 84700 - DNA, 1180 bp, Glycine max
  Clone ID: PAT_MRT3847_4749C.1
ggggggggaagcaaataatagtttcacatgcatatgtacgtgccctaaacattcaaaaccctacgtacgtcaacatctccgaaaaataaaaatggcgaaaaggagcatgtgtgtttttttgtgcgtgactttgttcatggttgggttttcggagtgttcgagcacgagcacgttcctctacagcgggtgcacgcagcaacggtacactcccaactcgccctacgagtggaatatcaactcgctactcacctcgctggtgaactcagcgacgtactcggcttataacaacttcactgtggtggggtccactcagcaggacgcggtgtacgggctctaccagtgtcgcggcgacctcgccatgccggactgcgccgcgtgcgtggcgcgcgccgtcacccgcgccggcgacatctgccgcggcacgtgcggtggctcggtgcagctcgacggctgcttcgtgaagtacgacaacgcgacgttcctcggcgcgcaggacaaggcggtggtgctgaagaagtgcgggccgtcggtagggtacaaccccgatgccatggggagtcgcgacgccgtgctggccggactcgccgccgccggggggaactttcgcgtcggcgggtctggcggggttcacggcgtggcgcagtgcaccggcgatctcagctacggcgagtgccaggactgcgtggcggaggcgatctcgcggctgaagagcgattgcggcacggcggattacggggacatgtttctcgggaagtgctacgcgaggtactcagtgggtggggcccacgatgagtccaaggcccacggtaaggcccagcatcgtcgcatgcttcctcttctcttactacctctcatgggtttcaagttttaaattcgcttgtagattgaaattgatgtaaaaaaaatgaaagtgcgactttctttgtgaagtaaatgaacctggagattcaaagtggcatgagcacatgtcgatcagttttcactagttgccctcccaatctcctgtattggtttgcttttgtgcctcttttacttttttcttttatttttctttctttattttacttactctttttttgtttcaaatttaaaattcaattcgaaagagaactttgaaccttgaggaggataccatatgaaaaaaaagaatgtacaatgaacatttgtatttgaaattttg

SEQ ID NO: 84701 - DNA, 267 bp, Glycine max
  unsure (1)..(267): unsure at all n locations
  Clone ID: PAT_MRT3847_474C.1
atcaaattagttcattctctttgcgcagttccctacctctcctttcaagatgcagattctcgttcaagnaccnncaacggnaagnacnannaccntngagntgnaaagtnctganaccatccgacaacgtcaaggccacgttccaggnccnagganggattccccccggacnagcaaggtntnacnttggccgnaaagcagccnnggnacggtcggaaccctcgccgantaaccagcatcncggcaaggnattncaacccntnnagc

SEQ ID NO: 84702 - DNA, 189 bp, Glycine max
  Clone ID: PAT_MRT3847_47500C.1
ggggttaaccctttttttaaccaacctaatcaattgccgcttacatgcaatacctttcttcaaatatacaaaatacaacatccccattccttcatcttcagtgattcaaattttcaataaaccctcccctcctgccattacttaaatattcatacattttcctataccttattaattacacgtttcttt

SEQ ID NO: 84703 - DNA, 307 bp, Glycine max
  Clone ID: PAT_MRT3847_47501C.1
gcaaaaaaagtttaatttactccatttatacaactttttttttaccaggaaaaagataaattaccaaattttcctcttctcttttgaaaaaatcttgaataaactaactttccccaacttactttaggacctaacagcgggaaaacgcaaaccaactcccccttagtccatacgttgcccgcacaaatgtggaggtcaaaatccccagaaaacaaaatcgcccatcttgttttttttcacaaccactgggttgtgggcccttagtgcccaaggttttcacaaaccgaaattgggttaaaacaacaac

SEQ ID NO: 84704 - DNA, 155 bp, Glycine max
  Clone ID: PAT_MRT3847_47502C.1
tttttgttgtcaaatagtaatatcgcttatttccctcccccttcgctaataggtttttatctggataaaacgggcatggacctattagtacacacacgtattaataagttgattgtaaccacaaaggtttatatactacactctacaatgaggtt

SEQ ID NO: 84705 - DNA, 289 bp, Glycine max
  Clone ID: PAT_MRT3847_47503C.1
tcaatggggatgcgatatctctacatactggcgtccacgtccgtccttctaccaacatcactactctcatttctagctatatgctggtctatggggcgcactggctataattctcgtggcttcgcactagttcctccatactttatcctcacatcaatttacactgtttttgggtatgattccacatcttttgcttgtcttcttatgaggctatctgtgatgccggtccttcaaaatcaatctgattctactggatctcaaatcgtcaaaattacctccgagtttccta

SEQ ID NO: 84706 - DNA, 446 bp, Glycine max
  Clone ID: PAT_MRT3847_47504C.1
gagaaagcgactggagaggaaacaaacctttttggacatcaagagaactctgagactttcggtgtagaaggagagacccaatcgcaaaaagaagatgctaatcctattaagagatgctggtgaaggaccaaagattgtggaaaattcagatcttggagaacatgggaaggtggagcttgttgcagatccttaagaaaaccctgacgaagatcctgaggcacctccttaagaaacttctgcattggaggaagaacatacggaatcggaggctgttgctcatcaccgaaagattaaagacgaacatgggatttttgttggtggattgtgtcgtgaagctacagatgaagatctgagaaaggttgttcagaggatctgtgagatagttgaactcagattgcataagtattctctcacagataagaacaagggctatgcttttgagaagc

SEQ ID NO: 84707 - DNA, 744 bp, Glycine max
  Clone ID: PAT_MRT3847_47505C.1
gaaacaccaaaaaattgtaatatacaataattaaacgcgttacacgtacgaatattctctatgttgtattcttgtcctgattctactcactcaggacaatttctagaactttaatttaaatctacaaatgaaaatgaaaataaaaataaaaatcgggggaatatgacgccatcaattatcggcgacttctccaacttcaccgtcgattagagcgatgggaagacgacgtcgttgacgaagagtgtgacgagacactgcccgaatctccattacacaaaatgttagacaggtatttccctatatcgtcgggtaaaaaacccctaacggattccgacccgacccgattcttctcgtagaactcgctgtacttttgcaccagcttcgaagctatcgaccctttgatttcatcacgaaatttcgggtcggatacgaaccacgaggcctgttttctacacgcttcatgaaacgcagcgtcgaacctcacgaagcacgccctggcctgctccgccgtcaactccgccgcgggattttccggcaacgcagaaaacaccgcgctccacccgactcgctcgtacttggacgcgtactctctaaccttcaacttatgcttgtccaaccactcctcgccgagaagaaaccctaggttcgacttgcgcacctttacgacgacgtattgcatgttattcgcgaggaacaggtaagaatgcgccacgtccttgtagagttccgctttgccgtcgagcc

SEQ ID NO: 84708 - DNA, 196 bp, Glycine max
  Clone ID: PAT_MRT3847_47506C.1
cccaccgcaagcgaagagcgccaccgggggctactttaacaacaatgacccaaaaggcccgaatccccctgaagccaacactcccccagccgcaaacaacaccatgccaagagccaacaggacagcacaagaaccgcccgccccagcgccgccctggcgccagggaagcccaccggacacagcaccagggccgacc

SEQ ID NO: 84709 - DNA, 366 bp, Glycine max
  Clone ID: PAT_MRT3847_47507C.1
gctattactagatgtggctttagattttaaacaacttgcttggtgagggtccattctttgatcagttttctgtggcaatatatgttacttttatgtcccatcttggggtcagctaggtaaaggtggttggagccttgcctctatcactggtgaatttagataatgttgatgagaatgattttacagtttggttgaaagtcgtgatgctaacagattggaagggaaaaaagggagtgtttgtgattgactgcaagataacttggcttgaagaatcatagtaggcatgctgcatgcatggcactagctgacctaatgtgtctgaaactttgtgcttaagatacataattataatgaaatatttattcc

SEQ ID NO: 84710 - DNA, 1009 bp, Glycine max
  Clone ID: PAT_MRT3847_47508C.1
ctcttcattcaaatcgaaagcttccctcttttttcttctctttctgtttgttctccataaagttcctgaatttaaactcaaaaaaaaaaaataaataaacaccccaaagtgagttgcagtactaacatctctttgatgggaatagaatatatgctttttttttcctgttgaacaaaattaacaagagggagcagaggcaattcagttaccctgacacagtttcagatcaccacttctttttttggctgtgtctcaaattcttcacactagaattctttatttcctaaaaagaaccctgaacctcaagtgtaacaaggccttaatgctgctgagaaacagatcaagagctgtgacgaagccaagtttgatgggtgatcacagctcctcccagccatgtccaaatcagagttacaaaagaaccatcattccttctctattttcaccaaaattccgagcgtgggctgccaagtgtctctcagctggagctgaggctttgagaagtcccacatcgattcttgacaccagagccttatcatccccatttgggagtcctttgtcacatgaagcagcagcctcagaaaacacaacctcttgggactccaaatgcattggccttgctcttgttggtgcactcaaagatgaaacttttcctcagaattcaactaaaccaagtagtggaacggttctgtttggaactaagcatagagtaaaaatcccacctttgcctctgtcactgccaccaccttcatttgaatccaaaacatgtgcttctgctgctgctgctgattgtgctgccaaaaccaaggattctccattatctttgcaactggtgttctgagtttgagtgagatggagctttctgaggagtacacgtgtgtgatagcacatggacctaatgcaagaacaacacacatattcgacaatggaattggggaaagctactggggcctggcaagtgcaccgagaggtgcgtagctgggtggggcttacgtgggggggggctgggggg

SEQ ID NO: 84711 - DNA, 398 bp, Glycine max
  Clone ID: PAT_MRT3847_47509C.1
aaaaaaatggggctgaaggtgctttgccttggatgcacagtcatgtgaaggtgcagtcagtgcaaaagaatttttatcatcaggcaataataatgaagaaatggtattaattactagccactttaattactagtgccatttcccctatttgttaaggagtcacaagggcaggctatcatttgcacatgattgacaaaacttgacaaatatgaaacattcaattgaataaattaaaattagagggattatttggtagctcctataatatgagggattggaagtatatgtgttgccaaatatcaactatcttaaaagctttagcttttagatagaggtccatcgatgttgttatatctctagcatttatctgtaattctctggttacaggctagctattt

SEQ ID NO: 84712 - DNA, 111 bp, Glycine max
  Clone ID: PAT_MRT3847_4750C.1
aacgagcgtccaaaacatggcgcccccgatgggtggtctaattacggccgctttttggggtggtccctttggcgcgcccaaccggcttgttttggtgcgtcttgccgatgc

SEQ ID NO: 84713 - DNA, 236 bp, Glycine max
  Clone ID: PAT_MRT3847_47510C.1
tctacgcgtacgaccacgcgttcgggcacgcgtgctggcacgcgtgcgaccactctttcgttcaaatcaatgcggtgtgctgtggcaaggggtgcgtatttgctccaagagacgaggacgtagtagaatacacatgatgtgtgacaagaaggtcttccatatcaaggcgggatggtgaggccacgaaggagtggtttatagcgtgtgaggaatgagacacgaggacctattgtgat

SEQ ID NO: 84714 - DNA, 235 bp, Glycine max
  unsure (1)..(235): unsure at all n locations
  Clone ID: PAT_MRT3847_47511C.1
gcaaccagaaacaataggggagcatatgggcncaaccccggcaaagcaggcncncgncannagggcaccannccncagaccannncacagcaaacagcncggaaccaaacggcaacagagagaacaccacagaacnnngaccccagcaagcagagcnnnngncaannnncaatngacccccncggnggaggaaacccagcggacaaaaccggagacnggaccacacnnatacaaa

SEQ ID NO: 84715 - DNA, 120 bp, Glycine max
  Clone ID: PAT_MRT3847_47512C.1
ctcgagccgaagtcggctacgaggccgatcgcagatctatagggtatcaattttgtcattctactggagccccactggccatagccgccagccagagaagcgtagatgccttcgatccta

SEQ ID NO: 84716 - DNA, 1029 bp, Glycine max
  Clone ID: PAT_MRT3847_47513C.1
accgataccttcgattctcctttctatcctcagtgttccgttaccttcgattttcctttctctcttgcaaatttcatatctctctttctttctcagccaagcatttctccctttttcgtttccaatttccccttctcttaactcacctatttcgcctccttcgtgtccctttctcttcaaattaaggctcggtagggttaggttaggataggttttcggtgaggcgagagaaagagagagagtatgaggttgagggaggaggtagcgtgtaaaaacgacgacgtttgtgagaaagaggaagtggtgatagagaatgacgtaaccgtggcccaaaatcattggtgtcccgtggtgaatgctgggttttcttcgcccaacatagtggttgtggttgattactactaaaaagatgcaaacatgtactacattagagactgagagtgaaatcaaaataataatcactgaagaaggatacaagaatttttggatctcatttctcactaacacctataacaaatgattttatacataaacaattaaaatctctctctctctctctctctctctctctcaagtatacatagatcaacatcaacgcgtaataatcatcactccgtaacgaattacagtataaatcaacaacaataaacgtctatgtgtagaacgaatcaataacgctcacacgaaatccacagcaaaataaaaaatcggcatcgtgacattcagtgcttgaagatggcgagcattgacagcacaaccgaagctccaatcacggccaccgagctcgaaacggatccggctgctccggcatcgggtcccggtgccggcgccggagacaaatcctgagcggaggcggcggcggcggcgaagaaaagcgccacgatgataacggtggcgaaggacttgaaggtgattgcttgagatgccatgctgagagagagagagagaaagtgaataataatttaagatttgaaggtgttagagagagatttttttctttttgggtccccgccgccggcctcgagcgcg

SEQ ID NO: 84717 - DNA, 501 bp, Glycine max
  Clone ID: PAT_MRT3847_47514C.1
agatgtttgacactccagggctcttgcacccatatttaatgtcaatgagattgaaccgggatgagcaaaagatggttgagatacggaaggaacttcggcctcggacatacagaattaaggtagggcaggctatacacattggtggcttgacaagacttgaccttgttgaagcctctgttgaaacaatatatgccacagtttgggcatcactaaatgtttctcttcacatggggaaaatagaaaatgctgacgaggtttggagaaatcatgttggtatcagactgcagcctcccactggtaacgaccgtgccgccgaactaggaacatggcaggaaagggaagtcaaagtgtctggaaccagttgggatgtcaacaccattgacatagcaatagcgggtttaggttggttctcattgtgtctcaaaggtgaagcaaccacaaaactgtgggtcttccatggagtagaagtaaccttgagagaacctttggtgcttgaccggg

SEQ ID NO: 84718 - DNA, 519 bp, Glycine max
  Clone ID: PAT_MRT3847_47515C.1
gcataatataatccaatttgactagaaatataactatgttcacatccaaatgaaagtcgagaggccaatcaagttgcagtggcaaatattggagaataaatggagatgtcatagaccaactcttctaaaacattatttgttaggtgaaggctcatgaatggttttaatcttacacccactcactcaggagccctttaggctacaaaagtccaccctacctttgggcagagatgatcaaactctttaggctttaatactatgtctcagatcaactctcctaaaagcacaatatattcaatgaggggtcatgaatgattttatatctaactggatgtaaagggggaaaatcagttgttttagtcgaaaacagatgtggctatgaataaagatcatggaaataacatgataaagggagctttgacttctggattgtgagtcacacacaacagataaattcagatcctgtttttagggtttttagaccagaatacccctttatattagatatcattggctact

SEQ ID NO: 84719 - DNA, 137 bp, Glycine max
  Clone ID: PAT_MRT3847_47516C.1
atacattgttaaataacagaatacaggtggggatcaataacaggaaaaggacctgaacaactcaacccgacataaaccaggccatgatacacaagcagcgaaataaaacagcaacatatacgagactgactacatgg

SEQ ID NO: 84720 - DNA, 264 bp, Glycine max
  Clone ID: PAT_MRT3847_47517C.1
gtgaaagcaagcaggctgttgagaactccccattcttggagaaattgaagtatagagggtatgaggatcttttcatggttgatgccattgatgaatatgctgttggccagctcaaggaatttgagggcaataagctttctctgccaccaaggatggtctcaaacttgacgagagtgaagatgagacgatgaagcaagaggcgttgaaggagaagtttgacaacctatgcacggtgatccaggatgttttgggtgacaatgttga

SEQ ID NO: 84721 - DNA, 306 bp, Glycine max
  Clone ID: PAT_MRT3847_47518C.1
aacaaaaatttcccacccccgggggggcaatttttttttgttttttggccaaaaaaaaccggagcaggggggggaaccgcagacaaacttcaaaaaaaagaatttttttgatgaaaaccgcccatttaaacagggaaacttttttttttttaaagacccattttccgtaaccgcttaaaggggttgctccaaacaaagggttttttggagttccaaaaaataattgggggtttttcgggtaggggggggctcaatttgggtgggggctggatcaaactggaaaaaattttggtccatgttttttcc

SEQ ID NO: 84722 - DNA, 411 bp, Glycine max
  Clone ID: PAT_MRT3847_47519C.1
gggaaatcagaccataatgaagaattgataaagtaatattttgaacttagttgtgcaataacatacaaacatacatatatgtgtgtgtgtgtgcatatattcctacaaaattaaaaaacataggttcaactgttttaaaagagccatgatatagtaaaataaaggaacttggataaaaagtaatatacacaaattaaaaaaaaatatcaatttaaatatttttttacaaaattaaaatctaaatataccttaccaatgcactaaaccaggaatgtttcttcaaacttgcaagatacataaccagccctgcagtaacagatgccacatctgtgttatagagaaaagtgaagaaccactgaagggggttcaaggataggacccctgcgtgaagcatcgccctcctatcattaa

SEQ ID NO: 84723 - DNA, 236 bp, Glycine max
  unsure (1)..(236): unsure at all n locations
  Clone ID: PAT_MRT3847_4751C.1
ctctctttctcttcgaaggtttggagatctcttcctccctaggagcatnaagtcgagccaccgctgcgacgcagatcgtgcatttttgaggagcagctgacatatttcggcgtcgtggaccaaagacaaatgatcactccacatattatgatattctcgggatttccaaaactgccagagaagatggaatcaaggtggactatcgaaaggcggatctggagccccgtccagtcggg

SEQ ID NO: 84724 - DNA, 668 bp, Glycine max
  Clone ID: PAT_MRT3847_47520C.1
ccctcgcgtccgcccacgcgtccgcccggttttaacatgaggaaacaagagagtgaggtggagagtgaaaatccaagaggttcggctgagtggggtggtgatggactcattggtttgcctggcttaggtcttggcagcaaacaaaagagccttgcagaaatttttcaggatgatttgggacttaacgcttctgtcactggctttccatctcgtcctgccagccgtaatgcatttgatgaaaatggcgatatcatatcatctgttgaatcagaactggctcatttacgtcgtgattccttggccactgataccttaagatctgtatcaaatgtccctgtgtcatctgctgcccaaaatactggcccacaagcttcctattcttatgctgctgcactaggttcttccttgtcgcgtagcactactcctgatccacaacttgttgctagggctcccagtccctgccccacacctattgggggtgggagagttgtagctgctgagaagagaggtattaacagtcctgatgcttttaatggtgtttcatctggagtcaatgagcctgcagatattgtggctgcattgtctggcatgaatctgtcagctgatgatgtgttagatggtgatagccatttcccgtcacaggttgagtcagatgttgataatcatca

SEQ ID NO: 84725 - DNA, 689 bp, Glycine max
  Clone ID: PAT_MRT3847_47521C.1
tgaaggtgacactgctaatttcattgaaactgaacagttgcttgaaactgaagaattcaagttctcatttttgcaggctcgaggttcaattccccttttgtgggagcagattgttgatctaagctataaaccgcaccttagggttattagtcatgaggaaacacccaagattgtggagcgtcatttccatgatctcatgcaaagatatggagagatagtagcacttgatcttactgataaacatggtgaagaaggtcaattaagtgcagcatatgctgctgaaatgcaaaatcagcaaaatgtgagatatgtgccttttgattttcatcactactgtgggagctcaaactttgataatctgaaaatcctctatgatcaaatctcggaggattttgaaaaacaaagctgagcagatacttcttgatagatagacaaggaaatatactagaggagcagagaggacttgtcagagtaaactgcattgattcccttgatcgaacaaatgttactcagtgttatctggcccagaagtcattaaatcttcagttgcagaggattgaagcgctgacttcctctgagtgcatttccatgtttgaagaggaatatggaaaatttagaatatttgtgggcagaccaaggtgatgagataagtctcgagtttgctggaactcatgcactcaagggggact

SEQ ID NO: 84726 - DNA, 263 bp, Glycine max
  Clone ID: PAT_MRT3847_47522C.1
ggaagagtgaaatctataactagtattaatttttaaatgaaaaaacggggaacataaaaaaccgatagcatgaagtgacctacttcctaaattagtttgaacacttgaaacgctttttacacttatgcaacaacttgcatatgctcgcttgaatgaaacaagagctttaatgagaaaaaaaacgtaaaaaccaaagggggggcaatcaacatcaccttttgtggcattaatccaaacagttgaaaacaagtcttgactttgca

SEQ ID NO: 84727 - DNA, 414 bp, Glycine max
  Clone ID: PAT_MRT3847_47523C.1
tacggctgcgagaagacgacagaaggggaactagttgagaaaccacataactaccccattataggaacaaaatgggtatttagaaataaactagatgaaaatggtatagtaattagaaataaagctagactagttgcaaaagggtacaaccaagaagaagggatagactatgaagaaacctttgcacccgtaactagattagaagccattaggatgtttttagcttatgattctattatgaactttaaactatatgaaatggatgtcaagagtgccttcctaaatggtctaatccaagaggaggtatatgtagaacaacctctcgggtttgaagactcacaaaaattagatcatgtctatagattaaagaaagcacttatgggttaaaacaagcacctagggcttggtatgaaa

SEQ ID NO: 84728 - DNA, 771 bp, Glycine max
  unsure (1)..(771): unsure at all n locations
  Clone ID: PAT_MRT3847_47524C.1
agaaagttgcatctgaattttaacccaaaagttgcattccgtgtccgttttgtatcgttgtttcggcgatgattgatgactttcgtatttatcatcaattacaataatcataataaatgtataaaaagcaaaaaacatttttgcaatgtgaacggtcccgtatgacctcatattctcagacatgggtccctatgggctatcgttttataaaggggcggctaacaaccaagccaccttgatcagtgcctaaaacaatttataagcaaaataaataaataaatgttaaatgctccaagattccaatttggcaattttaaatggtcgacttatacttttaagtaacagttgccgccatcaccaagcaaatcgtgccataaaaaaaagatgagagtgggatcaatttgcagagtaaataatggcgtaaagaaagtcttccattatcctcgttcaatccttcatcattatggttattgtctcccactccaattctctgacatgtcatcataagtatatttgatgggcaggttaaattaaaaaaataatttttaatttatctcgcgagacttttttgccgtgtccnnatttaaattaaaaaaataatttttttaaaaaaaatattaaaaaattgattttagaataaataaattaattgttaaatatttatttttaaatatgttaataaatttattatagcacatgtgtctacaaaaatcattaagaaaataatattaaattatataaaaattgtaaaataaaattaacaaataataa

SEQ ID NO: 84729 - DNA, 775 bp, Glycine max
  Clone ID: PAT_MRT3847_47525C.1
cctcgaggttaaacttttccctacaccaaaatcatctcttcactaatggaaggtggactaaagggaagctcattacaagatatgaagcttttgtttgttgaaatgggtgttggctatgaccttcatggtcaggacataacagctgccgcaatgagagcatgcagagatgcaatttctgccaattcaattccagctttccgtaaaggtagcatccctggtgttacatctgatcacatgaaattacatgtcaaactgggggtgcctcatcctctgcaacaaaacttgaacaaggataaaattaagtctgtgtttccatacggacaaatcatgaactttgaagtagtggatggtggacttgtgtgctcaactgaagaaatggccgaaaagaacgatgactgctacattgttaatgctgctgtatatgttggctactaggcttttggtatcttagatccctctggaatcttaatttccatggggaacttgcatgtgtgttggagttttgttgcttcagtaaagctgcaatgagggcaaagtttgcattttagcttttttatatgtattttaattaagagtagttgtgttatcctttcattgtttctgcatgaatgtacctagtacctttgtcagttaggttgaatttactatgtttgtttgtaataatggatcaaagatcatctgaagttcatttttgaactgcatacttctcaaccattgatgtattctttaccttaaacaaaatattaatagaaaaataaaataaattaatgtaggg

SEQ ID NO: 84730 - DNA, 178 bp, Glycine max
  Clone ID: PAT_MRT3847_47526C.1
ggagacagacaaaggttgccaacgccaaagcaaaaagagcagaaatggcattgatgagaccatttgcacaatgagactttgccaaaacatggtcaaaaatcattacctgacatctacaaaccttaaacttgtaacattacaaacggcaccaagccttgactttccaagcctttgggtt

SEQ ID NO: 84731 - DNA, 200 bp, Glycine max
  Clone ID: PAT_MRT3847_47527C.1
ggacaacataacatacaggaggtgaacaacgagcgagtgagtgatttataacccccggagtggcgaacgagaaccgcttatcaggcttaagaatattaagaggggcttgtacttgtgcatattgaacaacaacgatttcaaatggtgtatagagcatttacatcgaaacggagacaaactctacattgggcacatgatgc

SEQ ID NO: 84732 - DNA, 274 bp, Glycine max
  unsure (1)..(274): unsure at all n locations
  Clone ID: PAT_MRT3847_47528C.1
ctcatacaccatgcagggtccacgcttcccatctcacaagtcgagcacgntcataacatctacaccgtnccagaccaatttcccaaaaaggaacgacacgaacgcaacaaggacgagnnnnnnnnnnnnnnnnnnnnnnnnnncaaccgcgaccaagatgaagagcaacaacagcagcagcgttcaccagaggactcaggagatcagagaccacctgatacaccacctcctctgtcacaagatgtgatagagctgatagacttgctggagatcc

SEQ ID NO: 84733 - DNA, 269 bp, Glycine max
  Clone ID: PAT_MRT3847_47529C.1
gctccccctacgattcgccgattgttttgcagcaaagctccacagaagaagaattatgagaacttctatcccaaggaacagaaggaacatccgagaggaaacgacaaaaaatacgagtccacagataaatcgaacgcaaacacagaggatagtggaaatcttcaggaagccttcatgaagccagttcaccatctagtcagcccagtatcgtcgatagggctattgcttacatcctcttcgtttggtcctcgtgcacagaagcagattag

SEQ ID NO: 84734 - DNA, 460 bp, Glycine max
  Clone ID: PAT_MRT3847_4752C.1
agttggaggagcaaaatcgagctttgcaaatggaaaagatgaatacaatgatggcgagccaggcgagagcttcgtttcagaaggtcacgagtaatggaatgagaaggccaatgcactcaattttggggttgctttcgatgatgcaagatgataatttgaagagtgaacagaaacttattgtgaattcaatgctaaggaccagcactgtcttgtcaaacttgataaatgatgccatggactactcaactagggatgatggaagattccctttggagatgaaaccttttggattgcatgctatggtgaaagaggcagcttgtcttgccaagtgcatgtgtgtctatagggacattggctttgtggttgatgttgacaagtctttgccagacaatgttataggtgacgaaaagagggtttctcaggtgattttgcatatggttgggaatgcaataaatggtaa

SEQ ID NO: 84735 - DNA, 380 bp, Glycine max
  Clone ID: PAT_MRT3847_47530C.1
ctccggggaggagacacaacggagggctgacccactaactaatatggcttggtattcaccactctctttctcgagcgtattcgtctgtggtggtgttgaccatgctcagggcgcctcgggggctgtggtatattggttcttttgtgataggtgttctagaagtgactggagggtgcttgctctcctcttcgtgggtatgcactagtctaatgtgcttcggagatagagagcgtaaactacctgaaagacggaagatctttcttggatccctgctcccctgtccatctttgcttgacccagctcttccttccgactcctggcctggagtgtgttggcttctccttctaactaccttacttgggaccgtcccgctgggtgcg

SEQ ID NO: 84736 - DNA, 239 bp, Glycine max
  Clone ID: PAT_MRT3847_47531C.1
ccactgcgcgcgctagcttactcagccttgcaaggatggcactatgttgtcatcggcgtgtgcgtttcttatcagcacgcgctggatcaacttagggatctgccacaacaaaatacgatcagtgctaattactaccacggatctcctatagggcacgcgattgagtcgcaaagtgcaaagctaaatccattggagggttataacggatcggactaactgcacaggagtattcgacgatg

SEQ ID NO: 84737 - DNA, 444 bp, Glycine max
  Clone ID: PAT_MRT3847_47532C.1
gagacgcacaattgagggcttctctgagtctctctcgtcttgtgctgattccagcggagccgtcacacttcccctcttctacgtcgtcgttttgaaccccattgctccctctctccaattcaaggccaaaggtatgatgagagaaagtttcaagggcaagggtggatcttcttctcttcaatccatgaaggagaaggaaaaacacctggtggagaagattcaagggattttcaacagtcttcagtgtgcaagaaaggagggcaggggtaatgacattgtgatatttgaggagcagatgcatcagttgctccgagagtggaaggcggaactggaatctccggccaactccttagctgatggaagctttggttcatttcccagcgaactagcccaaatgttgctagggagtgaggataaagatgatgctactagtccattaacaaa

SEQ ID NO: 84738 - DNA, 2007 bp, Glycine max
  unsure (1)..(2007): unsure at all n locations
  Clone ID: PAT_MRT3847_47533C.1
gtatttctctacttccatagngcttttgataaagtattatatatgccacttttttattaaaaaaaataataaattcctcacccatcgtttaagtacatgtgccacacttccacttaactactctcctttgacttcattccccttctctatttaacccattattgtttttctcgcaaactatcatgaattctaattgccttttcttttttctatagttcattatcttagttcaccaaactcttataagtagagccaagccaaaccaaccacaccaagtacaagcagagagttacaacacatatttctttttcttttccctttttcctaggcacagcacacgccctctcaaatagaaactgagagatgaattctgatcagtttcagaagaacagcatgttcgtagaaacccctgaagatggtggcaaaaacttcgacgatgatggacgagtcagaagaacgggtacatggataactgcgagtgcccatatcataacggcagtgatagggtcaggagtgttgtcacttgcatgggcaattgcacaaatgggttgggtggctggccctgccgttctctttgccttctctttcatcacttacttcacttccactcttcttgccgactgttatcgttcacctgatcctgttcatggcaagcgaaactacacctattccgatgttgtcagatccgtcttaggagggaggaaatttcagctgtgtggattagctcagtacataaatcttgtcggtgtaactatcggttacacgataacggcttcaattagtatggtggcggtgaagaggtcgaattgttttcacaaacatggtcatcatgttaagtgctatacgtcaaacaaccctttcatgatcctctttgcctgcattcaaatcgtgcttagccagataccaaatttccataagctctggtggctctccattgttgcagcagttatgtcttttgcttattcttccattggcctcgggctctcagtagctaaagtggcaggtggtggagagcctgtacggacaaccttaacgggggtgcaagttggggtagacgttacaggatccgagaaggtctggaggacgtttcaagctattggtgacattgccttcgcttatgcttattctaacgtgctcatcgagatacaggataccctgaaatcgagccctccagagaacaaggtcatgaaaagagcaagtttgattggcatcttgactacaaccttgttctatgtgctatgtggctgcctaggttatgcagcatttggaaacgatgcaccaggaaatttcctcacagggttcggcttctacgagcccttttggctcatagactttgctaacatctgcatagccgtgcacttggttggagcatatcaggtcttctgtcagcccatatttgggttcgtagagaactggggtaaggaaaggtggccaaatagccaatttgtaaatggagaacacgctttgaactttccactatgtggaaccttccctgtgaacttcttcagggtggtgtggagaacaacatatgtcatcatcactgctttgatagctatgatgtttccattcttcaatgacttcctaggcctgattggttcactgtccttttggccattaaccgtttacttccccatagaaatgtacattaagcagtcaaagatgcaaaggttttccttcacgtggacatggctcaagatactgagctgggcttgcttgatcgtttctattatctcagctgctggttccatccaaggcctcgctcaagatctcaagaaatatcagcccttcaaagcccagcaataataataatttgttccaaagttctaaattgctttcttttctaagtaactttttttagtaagtttcagcatgttcatggataatttattgttatcaagtgcttatgaaagaaagaatataacacccagctgcattgtataactgtcaagaataattctaagatgtatgaaagtgtgcactgtcatttaaaaaaaaaaaaaacccgcc

SEQ ID NO: 84739 - DNA, 2632 bp, Glycine max
  Clone ID: PAT_MRT3847_47534C.1
aatgaatgagacgacggcccagtagacttggcggacaggtaagcatcctggggcattgacattacatgttcttaataagataaaacttcaatgcaagatcttactaaggattggttcttgataagaaaagggaatttaagcacctctagatggagatggccttaggatcatctagtacttgaactagtatacgtacagcagaggaaatgctctttccattatcttctttctagagcacagcaaatgctattggcttttctctttctgttggcatttttttgggggacagatagggtcgtacaagtccaatgataaaagcacatatgcatggaagaaccagatgattaatattcttacatgtcaaagaagaggagtaaagcatacaccaacttgcttgagttaaagatggctctagcttttttttctctagttcattatcttagtccaccaaaatcttataagtagtgccaagccaaaccaaccacacgtacaacgcacatttctttttcttttccctttttcttaggcacaccacacacccactcaaataatagaaactgagatgaatcctgatcagtttcagaagaacagcatgttcgtagaaacccctgaagatggtggcaaaaacttcgacgatgatggacgagtcaaaagaactggtacatggataactgcgagtgcccatatcataacggcagtgataggttctggagtgttgtcacttgcatgggcaattgcacaaatgggttgggtggcaggccctgcggttctctttgccttctctttcatcacatacttcacctccactcttcttgccgactgttatcgttcacctgaccctgttcatggcaagcgaaactacacctattcagatgttgtcagatccgtgttaggaggtaggaaatttcagctgtgtggattagctcagtacataaatcttgtcggtgtaactatcggttacacgataacggcttcaattagtatggtggcggtgaagaggtccaactgttttcacaaacatggtcatcatgataagtgctacacgtcaaacaaccctttcatgatcctctttgcctgcattcaaatcgtgcttagtcaaataccaaatttccataagctttggtggctctccattgttgcagcagttatgtcttttgcttattcttccattggccttgggctctccgtagctaaagtggcaggtggtggagaacctgtacggacaaccttaacgggggtgcaagttgcggtaggccaaacaggctcctcataagtctcgtggcctgcattcgcttctggttatattgccttcgcttatgcttattctaacgtgctcattgagatacaggataccctgaaatcgagccctccagaaaacaaggtcatgaaaagagcaagtttgattggcatcttgactacaaccttgttctatgtgctatgtggctgcctaggttatgcagcatttggaaacgacgcaccaggaaatttcctcacagggttcggtttctacgagcccttttggctaatagactttgctaacatctgcatagccgtacacttggttggagcatatcaggtcttctgtcagcccatatttgggttcgtagagaactggggtaaggaaaggtggcccaatagccattttgtaaatggagaacacgctttaaagtttccactatttggaaccttccctgtgaactttttcagggtggtatggagaacaacatatgtcatcatcactgctttgatagctatgatgtttccattcttcaatgacttcctaggcctgattggttcactgtcattttggccattaacggtttacttccccatagagatgtacattaagcagtcaaagatgcaaaagttttccttcacttggacatggctcaagatattgagctgggcttgcttgatcgtttctattatctcagctgctggctccatccaaggcctcgctcaagatctcaagaaatatcagcccttcaaagcccagcaataattaaatttgttccaaagtgttctaaattgctttcttccctaagtcactttgttttaataagtttcagcatgttcatggataatgtattgttatcaagtgcttatgaaagaaagaatatagcacacagctgcattgtataaaatgtcaagaacaattctaagatttatgaaagtgagaaatatcatttcttcaaagcccagcaataataataatttgttccaaagttctaaattgctttcttttctaagtacctttttttagtaagtttcagcatgttcatggataatttattgttatcaagtgcttatgaaagaaagaatataacacccagctgcattgtataactgtcaagaataattctaagatgtatgaaagtgtgcactgtcatttaacactgtcgtctacagtacatgcacaatatataccccctcaattcagaggagcatccaagagacgttggaagcccttttgactgctgcttatcttctacaagcttcaaaacagtgctgatcttggacatgacgaaaatccaaatagagtgatcaaacctggtttcccacagttgttgagaaacagactgaagagctttcctgacaacttttacacttcctgagatctgaactatctcat

SEQ ID NO: 84740 - DNA, 864 bp, Glycine max
  Clone ID: PAT_MRT3847_47535C.1
tgtcaagacagttccagtaatagtactacacagttttggaggactgttccaaagggaacttttgtgtatgtggatcctgaattccttgcttctggtgaacttacaccaaagtcagatgtttattcatttggaatcattttattgagattgatgactgggaaaccagccctgggaataataaaggaagtgcaatatgcattagatgctggaaagttgaaatccatcttggatcctttggctggagaatggccatttatgctggctgaagagctgattcgcttggctttgaggtgttgcgagatgaatcggaagaaccggccagacctttattcagatgtttggaggatactggaaccaatgagggcttcttcaagagtcacaaacacctctcaactgggttctcaaaggctatgccaacctcctccttattttatttgtccaatctttctggaagtcatgcaagatccacatgtagcttcggatggttttacttatgaagctgaggctatacgcgaatggctggaaagtggtcgtgacaattcaccaaggacaaattccaagcttgctcatcgcaaccttgttcccaaccacgctcttcgccatgcgatccagaactggcttcaaagtcactgatcaagtttctcattttttgattaaattgtagctctacttctttatattaagtttataggagaatttgttatcataccagtctttaaaatatgtaaaccccgttttgtatagccatcatgttgtttaggttctatttgtgcgcttctttctaccttcagttattgtaacaaggtagcataccatgtatatatggataaaccctatcttatgtagttatctttagcagttggt

SEQ ID NO: 84741 - DNA, 476 bp, Glycine max
  unsure (1)..(476): unsure at all n locations
  Clone ID: PAT_MRT3847_47536C.1
caaggctaaaaatatacagagtaatcaacatgtgtcaacatctcaaatgaatgactcaaggcttatctaataaccctggggacgacatacctgctggccgaggagcatctcatataacactggattttccaaaaaaccgatctcgacgagctatcttcactgccacctcttataaatctatcactcccctaaactgacccaacaccatatttaaataacctctctggagaacatgatcttaacgttcttttgttcattgctgaccaatcttcatcagggaggctgccttactttgttgttaaaacagctacagatactcattatctttgtacatacccacctttgctggttgtaaactctaccccagagcacgacccatctttattgccccttttntgtatctgactcttctaaccttctaggtcaaagtccaaaaaagcttcaacggatcgcattgaaatgcatccctatcacgc

SEQ ID NO: 84742 - DNA, 418 bp, Glycine max
  Clone ID: PAT_MRT3847_47537C.1
gaaaaaatatcccaccgggaaaccaataccaaaacaagaggaaataacccaaaaggttttttacccccaaaaaaaaacttccccaacaaaatttaaattttttctaaaaaacgaaaacggggggggcccaaaacaaaaaaaaaggaagggaaggccccccacctttttaaaaaaacaaacccccttggaagctggcaagggcccaacccctggggggggcattttaaaccacctccagctttaaaaagcccaaaaaggagccccccaacccccaacaaggtccaacgggcccaagggaaggaccccattatacgggccaaaaaaaaaatttttctgggcgaaaaaaaccctgggggaggctaacagggcgggcctgcagaaaaaaaatccggcccaagtcggttttttcagcccaaaa

SEQ ID NO: 84743 - DNA, 171 bp, Glycine max
  unsure (1)..(171): unsure at all n locations
  Clone ID: PAT_MRT3847_47538C.1
ccttattcataagatctcattcgatangggatggtanncntgaaccttcgganacacgnttgcngcggttcatgagngggngtggtggtagaacgtcggaacagannagaagcttctgcctactcgcgattccaccgttaaatcactcnagataaaantctccncgttgan

SEQ ID NO: 84744 - DNA, 421 bp, Glycine max
  unsure (1)..(421): unsure at all n locations
  Clone ID: PAT_MRT3847_47539C.1
gatgctnncttaccataaaataacaggtattctctgagaagaggtgcaaaacacttgacagaagctggcagtaacttgtctaaggcatctggatgtaaaaaacgaaacactctagggattagagagagaaacgaccaaccctttaagagtgagctgcccaccactaaaaaggcgcccaaacgatggaaaaactaataaaagaccgccactgttaagcacttaaaggcgaaaaactggtgcaaacactttatgcccttcatccatccaaaggttgaaggacccggacttgcggaccatatatcaaacggctacgcccattaaaaggaccaaccattcgagaggctccctccctaaagaacaccgatgcacactgtccgtaaaggggaaaccgacacttaaaccccaccacaaaataaagatc

SEQ ID NO: 84745 - DNA, 374 bp, Glycine max
  Clone ID: PAT_MRT3847_4753C.1
gtccctggggcggactccttcgcggagggggcatttgttttgcagctactcacctgttgttttccgggctccggactatctggaaagaattcctcttgctacgccctgagggggctcctgagtgtgctttcacggcaaaacatggcagcaaaatggcaccacggcagatctgctccctgcagagggcgcaagagatcacattgattccggcaaccagtgttgaagaggcttacaacaagctgatcgttgaactagagaaaagtgtgcctacattgcctggcattgcctgtcccaaggttgagaatctccctcgtggcaaaagacctgtcagacctaagacgcgctgcttgactattctccctatggagtttaat

SEQ ID NO: 84746 - DNA, 452 bp, Glycine max
  Clone ID: PAT_MRT3847_47540C.1
aggaactctttggcatcgatgcttattggcgtcctcactatctttgctcaccagaaaaaatttcactgattcaaatcgcaacaacaaagggccgtttttctggtcgatgtcctcgtgttggaagagagtcggacgatgactgaaagtcaatggttaaatttcttcgacgcacttttatgcactgacgtaacgaggaaaattggctacgactttcgcaatgatatgcgtgtcttgcgcagcactttccctttcatcgcaaagcttttcccgacggtgagaaaggtcgtctgtatgtatcggctgctctccaaagtcgaccaataccccgaggcgtcccgaatcgttttcgaccgcacagacgtggccaagccgacgctgtccctgtctggagtgtccgagtatttcttgaacattaaattagaaaaaactgaacgcgaaggcaattggagtca

SEQ ID NO: 84747 - DNA, 399 bp, Glycine max
  Clone ID: PAT_MRT3847_47541C.1
agaacacgtacgagagcactaagatggaaactcagatggataagtaaatgatttcttcaacgattgctaccactgctaacagcactggcaaccgcatgggtgctggattgactggtctaaagactatggttaacttcatgactaggatgaccaacagtgacactacctatgtcgttagctacattggtagaaaccaatgcatacagcagtggacaccagtttggacaacaaatgtcgagactatgttctacattctatactatgtggatgaacaagatgatgcagaagtggaatacgttgttaagaacctattgatgactggatggaaatcttacttggaacacgagttcgagcaccgttagcactaccgggcacacagatagtaaccaggacactact

SEQ ID NO: 84748 - DNA, 302 bp, Glycine max
  Clone ID: PAT_MRT3847_47542C.1
ctgcaattccgtaagtatgttgaccctgggatttctttatcggtaattgcacaacttgcgtgtaagaaaaccagcccttcattctttaaatgatatgggtgctgagcaaaattcagctacacctgcttatagatctattaactcttttgcgaatgcgatattacccaagttcaaaggcgtaccaagtattataccccccaagattcattaacctttgatgaaactgcactcctcactgaggaggatcctctcactagcaatatactgactggaaacagaggtgaagatctatatcatcccaa

SEQ ID NO: 84749 - DNA, 697 bp, Glycine max
  unsure (1)..(697): unsure at all n locations
  Clone ID: PAT_MRT3847_47543C.1
tnnnnnnnnngcacacttaaactaatctcccgacnnnagtagacagaaatgaaagcactattagaacaatacaattaacaggacataaacatggaaagtagctattcctctggtgttttattcctttaaaagaaactaaagcaaacctcaaagtaaagggccctccaaaccctcacgtcatggtacgatcttgcaagctttggtcttatctatccaattcataaacgatttcttggagtccctaaatccaaaaaacccgtgctccctcgccttgttcatgctatccaacacagcctccattctcagaataagatccgcaaaccaccaatccccaacatcttcaagcttcgttctctgcaacccattcttcttcacaatctcttcctacactgcacccttttccttcatcatctccgacaacctcaaatcctcaccttccaaaaacccatactcccttatcccaaacctctccgccaacaccttccaaacatgcttccacttgaacacgtccccgttgctacaattaaacgcctcgttcttcgcgcgtggatccactgcaccccaaatgtgctgctccgcaatcaaatcagcatccgaagcagtgttataacactcccacacagctttcgtccctggaaaccacaacggaacaccctcatgcttgcaaatagcnncgtnnnnacnnnnnntcccaacc

SEQ ID NO: 84750 - DNA, 526 bp, Glycine max
  Clone ID: PAT_MRT3847_47544C.1
ccccccatgaaaagtggggctagttaaaaattgtttcacttgctttaatgaaaaagcaaacctttttaaatccgtttaatttccatccaaaatttcgccctttttttttacccctcaccccactggggagggtttataaaatttttttaagccgggacggacaaacacattcaattcatcatgggtgggattgtttggcaaaaggtaccgcccattgaaaaagggaaaaaaaagaaatcccggttgtttaacttcaaattgggggaaccgagtcctaatcactgccttaactataactatgggtgttactcccactaccattttcacttccgttttaactactggtactaccactactgttgttaaaagaaaatgtttgttcatccctccccagggcattcacctggttttaaaaagcttttgcagcattgggtcctttgtccaccttatcaccattttaatccacgtgggggatttcataataaggggggggaacatttttgttaaatccaacattttttttttt

SEQ ID NO: 84751 - DNA, 2476 bp, Glycine max
  Clone ID: PAT_MRT3847_47545C.1
gaaacacagtgagttaagtgttcacaaaaaacaatggatgatattgtaggatacggttttcgtccaacagatgaagagcttgtgaagttctacctcaaacacaagttgctcgatgatgatccctgtgtccacttcatcctcgacgttgacctttgtgaagtggaaccttgggacttaccattgttattagcagattcagctgtgcgattcaatggccgtgaatggttcttcttcagtcctgtcgattacaagtattcaaatagtaaaagggttaacaggacaaccaagtgtggcttctggaaacccactggaaaagaccgtggcattaggagcaaggacaccaacaatgtcatcgggactaagaaaactctagtttactatcaaggccgtgtttctagtggtgtcaagtccaattgggttattcatgaatatcatgctgttacctttcatgaaagccagaggacttttgttttatgtcgcttgatgaagaaacctgggaaaacaactgaaggtggaactgatgcactgatctgtgatgaaggggggcccagtagaagcatggtttctgactatgaaaatcaggcaacaacacaaggaattccatctgtaagctgaagcatccttcatggacatattttacactctgccatgtgaaacatgctaaggagatataagggtggttggatgattaagatagaagggaatgggggaaaggtcgcgggttcgattccccagctaacaaattaacaactaacatttgccgataaaaaaaaatgtgaaacatgctaacaactgattcttgattgtgtgtatattttttttttttcagggaggtacttttacaggaatggaaacaacctttcagggaatgcatctggctgagaaatacttctccccaacacaacagtctcccactggtattgagcaggaagaaccatcctttacaaactatccatttaacaatgcctattttagaaatgaagacaactttatgcagactccatttgaaactaaggaggaagatgcgttcctgaattcaatttttgttgatgagaatttagttatcaatgaagaaagtatgcatgcttttgtcaatagctccacccaatcagagtcattgagaagggtatattgtgaaagcagtgatacagatgctgaagtagtctctgaaagggtaaagaaatattgtccaaagtccaaataatattggggagcagatctccatttgtttctgaaccgtcatattggtttattaagttaaaattgcaatgtgcattgtggcgatgtaaatttttgctacattttttcaatgtttagtgattttctactatatagtctgaaagggaactctagtgaaatatttggtttgagttggttttgatgctttgttgtgagtcatgattgattcacggaacattactgagttagtgaatgcttggacaaagggaatatttgggataggaaataaaatgtcgataaagcaatctctttctataccaatttttacccttccttgcatctcttccctaaaataaactttaggtcttcaaaactactcttttcttgggtttgtgatatttttttattttattttgagcacttcaagaattgaattcgtctgtttgtcttctgaaatgatcacaggatgataatattgttgatgtttcaacaatgtgcaacgaatatcctaattcagacggatactattcatcagaaaggtttgaatcatcacatggtgctgtccaagatagcttatgtcttctatctactaaccacgaagcaaaccaagagacaatggaaagtatactccaaaataatttctggggaatggagcaatcctattgtgactctactgcaaataaacctttggagatcaattatactgaaatttctagttctccttccactcggaggagatggataaatcagtatcatccaagaccagactacttcacatcccaaaagactgatgaagatctgagacacagaggaaggtttcaaacaatgcagtatcgcatgtagaggctcagaaggaattgctcattgtaaaatcagaaaaatgctcaaaatactagttcaagagagaacttagaagccagaagccatcatcctctgatgacaataggaaaggttctttcatctatgtgaagactgaagattacttcatcaagccagagcctatttccatgcttactatatcttgtcaatttaatggtagggattttgttgttaatagtcataagattggagtgggaagtattatcatgttacaacttcgaaatacaagtactatgcatgaagggcttgtgagtgtgtcaccatggttccttttcatgtagtgctactacatggcaagctctgttttaggaatttcatcattataagataggtgaggcttatagttcatatgtattttgcaatgagttatcctcattgcttctttcttatcataatgaaatatctctgcttaccattt

SEQ ID NO: 84752 - DNA, 255 bp, Glycine max
  Clone ID: PAT_MRT3847_47546C.1
gatgctcagttcattttcttctccactctcgctctcatatggttagggttttctcgcgtcatcaatctctgtgtcacacggtttcaatggctcagcaagactctcaaatcggctggtcagagaatggcgctgctgctgctacagtgtcgtttgtcactgtaaaaccgcagctccacatcaaatctccctcagccaatgacgccattctgttcttcaaggctgcgtttggcgctgatgaagttggccgtacgcaca

SEQ ID NO: 84753 - DNA, 250 bp, Glycine max
  Clone ID: PAT_MRT3847_47547C.1
cccacgcgtccgcttttcagttctcttctcttctctgcgcgacacagcacttcgggactgggcctttttttccattctgatagcgtttttgtgttttcaagcaagcgagtacggaactcatctgttgataaactgctacctcaagcagtgacaagaaaagtggtggaagtttgattgacttcattgttcatatttgtctgaatactccttataaaaataggttttacatttgttgctttcacttgatgaa

SEQ ID NO: 84754 - DNA, 1731 bp, Glycine max
  Clone ID: PAT_MRT3847_47548C.1
gcgcccacgcgtccgcccacgcgtccggttgaaaagcaaataccttagcacattgctttcagcaacttcttttgatgctgatggagggttgtttccacttgcttttggtgttgttgatgtagaaaatgatgacagctggacatggttcctgtctgagttgcataaggtacttgaggtgaatactgaatgcatgccagagtttatatttttgtcagatgggctaaacagtattacagatgcagtaagaaggaagttccctagttcttctcatgcattctgcatgcgtcacttgaccgaaagcattggcaaagagttcaagaactctaggcttgtccatcttctgtggaaggcttcatattccaccacaaccattgcatttaaagaaaaaatgggtgaaatagaggaggtttctcctgaagctgctaaatggttacaacaatttcatccttctcaatgggcccttgtacattttaaagggactcgatttggccatctatcctctaacattgaggagtttaataaatggattcttgacacccgggaattgccaattattcaggtgattgagcggattcatagcaagcttaaaactgagtttgatgacaggcgtttaaaaagcagctcatggtgctctgtacttgccccatcagccgagaagctaatgactgaagccattgaccatgcatctacatatcaagtccggctcgatgatgaagtagagtttgaggttctttcagccgatcgatcagatattgtaaatattggcagccatagctgttcctgccgggattggcagttaaacggtattccatgttcccatgctactgctgctcttatctcttgtcgaaaggatgtttatgcatttacccagaagtgttttactgctgcaagttacaggaatacctacgcagaagctatacaccacatcccaggaaaacttgaatggagtaaaacagatgataagtcttctatggatgataatatccttgttgtaaggccaccaaaattacgacgaccaccgggacgccctgagaaacagatgtgtgtggatgaccttaatcgagagaagcatacagtgcattgtagtcggtgtaatcaaactggacattacaagagaacttgtaaagctgagatgattaatagtatagagcagttttagttgtctgattatgtactaagtggttcaccaaagaactagtttagttttaacatctagaggccctatgtttaggacattcctatgatgcagatcatgtagaagttagatatacatcactgtattaaatccgcggtgtaatagaaatgaagtttacaacattggcaggtttgtaatcgccctgagaaacgaatgtgtgtggatgaccttaatcgcgagaaacatacagtgcattgtagtcggtgtaatcaaactggacattacaagagaacttgtaaagcagagatgattaatagtatagagcagttttagttgtctgattttgtacttagttcaccaaaaaactagtttagttttaacatctacagaccctatgtttagggcatacctatgatgcagatcatgtaaaagttagatatatatcactattaaatccgcgggtgtaataaaaatgaagtttacaacattggcaggtttgtaatccaaagcccctaatagtgtctgaaccatgtgaacttggagagagaaagagggtgaaaaaataaatcctcccatgcaatgtgtccttttatgat

SEQ ID NO: 84755 - DNA, 694 bp, Glycine max
  unsure (1)..(694): unsure at all n locations
  Clone ID: PAT_MRT3847_47549C.1
aaaaaataaaaaatttacctgaaacgtttttgctgttcgcttctgcctcatttctgttctgttctcgtcacagattgtggtgattctattatgcgttggctgggttcaattgatgagagacaattgtggggatgcttgtttctgtcaattggctctgttttctttgttgggtatttctctattgctgttctttgcaagcttttcccaccttcacacattcccctcatttctgcactgcaaaatgactggtactactgcttcttggtgccattgactctccctataattgtggttgctgtgtactttcattggctcagcatgaagctgttcaagcatgcttaattagcttaactttgccagattttgaaggcagaaagaaatacatgtatgctgttggagcaagcaacaactacctatgacaattgctgcactcctctctcctaatcacctcaaaaagagttcaaggattggtgtttgtgcaaatcatttagtagtatcctgccttaagatgttaaatgtgattgcatacctgtcaaagaccattcatgtttattgtactatggaaagttatgtaacatcattcagtccttctagcagcataacttgttttggaggctcatttttgtcttattaatctttcttcatatcaatgatatctatgtgattaggtgtaaaanaaaaaaaaaaaaaaaaa

SEQ ID NO: 84756 - DNA, 658 bp, Glycine max
  Clone ID: PAT_MRT3847_4754C.1
cttagaagccggaattgctgaggaactaaggatggggaacagtgggtttttgtattacaatcaagcaagtggaggaccctcttcttataagagtactcttgggggtcatcaccaccaagcattgttggcacagacccaccagggacatgttgggtttggggcagcatcatcgtctacatcatccttaggtgttgtgaatgcgttgaggaattcaaaatatgccaaagctgctcaggaattgcttgaagagttttgcagtgttgggagaggccagttcaagaagaacaagttcaataggcaactctcaaaccctagttccaatcttcgaggtagcggcggcggtgcttcttcgtcttcctcaaaggatgttcctcctttgtcagcagctgatagaattgagcatcaaaggaggaaggtcaaactcctaaccatgcttgacgaggtggatcggagatacagccactactgcgagcaaatgcacatggtggtgaatgcattcgacatggtgatggggtttggcgccgcggtgccatacacggcgctggcacagaaagcaatgtctcgtcactttaggtgcctaaaggatgcgataacagcacaattgaagcatagttgtgaggtattgggagagaaagatggtgcagggaattcggggttg

SEQ ID NO: 84757 - DNA, 269 bp, Glycine max
  Clone ID: PAT_MRT3847_47550C.1
cccacgcgtacgccggtatcgaccatggaaggattggcgctaccagttgcgcagttgcggtcacaacagttggcgttttcaaggccaaagctgttcggcattgacgaaggcacagcttatggatatgtctctctcatacgacaccgggtaagcgggcttcgttatcgcactagcttatgatcgcaggcacaggcacaagcacaggcacaggcacaacgcgatactgttgccgagcaagtcacagtgacagacctatacgactctgtgag

SEQ ID NO: 84758 - DNA, 1148 bp, Glycine max
  Clone ID: PAT_MRT3847_47551C.1
ctcgagccgaatcggctcgaggaaaggaacatggaaagtgagagagagattatgatgattccatgttttgattttggcaaggcattagaagaagggagtgaggagtggaaagaaatgagcaagaaagtgagagaagcatgtgagagtcacggttgcttcctcttggtttgtgatgagatgattcctaagggtgtacgtgaagagttttttagtaatatggaagcattgtttgatttgcctgaagaaagaaagatgaagcacataagtccaaagccttatagcagctacagtggcaagagccctgtcattcccctcagtgaaacctttgggatcgatgatgttcctctctctgcttcggctgaggccttcaccaacctcatgtggcctcaaggaaacccacctttctgcgagacactaaagatcatgagctcaaagatgttaaaattaagttctctcatcctgaaaatgattgtggaagattatggcattcaacaacattacatctcagatgttgaaaagatgaaaagctctagcaattcacgattgatcaaatacaaaattcctgaaaataataatgactccaatactggcctggtgtctcacacggacaaaaatgcgttaaccattatatgccaaaacgaagtccaaggactccaagtactgtccaaaacagacaattggattgaattggagatggctttgtggtcattgttggtgatatactaaaggcgtggagcaatgggaggcttcatgcagctacacacagagtgatgatgagtggagacaaagaaagatattcatttgggctttttacaatgccaaaggaagagatggacattgaggtacccattgagttggtggatgagaaaattcatccccttcgttatcatccattcaaatatggagagtacatctcttactttgtttcaaatctcaaagaaaatgctcttgaagtgtttgcaggtctttgaaagccctttatgcattatactagttgtttatgaataaatacaggagcaaggcaaaatatacaagagattgctatatatagaactccttttaattgtgtaatgcagaataatatttagatcgactttacattaataaaactctccgtatgtgttatacatatttatttttgtcaaaaa

SEQ ID NO: 84759 - DNA, 775 bp, Glycine max
  Clone ID: PAT_MRT3847_47552C.1
gtacgacaagagagagagagcgggagagaggaattcccaggctcgacccgcttatccgacttaagattatcctatctaagaatcatcatgaccttgaaatattttatcacatttctcctaattgctgcaatggcaattaatattccacaaaccctagctcagcttggaattctcagtggtctccttggttcggttagtaatattcaaggaactgtgttttgcacttccaaggacaatatgggagtcaaaggtgcctcagtccctgtttttccaaatgctcaagtgcaactggtttgtggaggaaaggagctttctaatgctaaaactaatgatgatggaacattttccatgatgatggatccattgctattggatcttgcttcacttctcagtggttgcaacttagtggttgccactcctctctcgaactgcaatgccaagcttccttctactgggggtctcatttcaaccctaaactttgctgggatcactagtgttggcactcaaaccatggctaacatcattccatcagggtttcatttcttgccatccatttaagtattacaagatggaaaagatatatttatagcatgcatgacaaaattattatgaaataaagtcatgcaatgtcttgtcttattattgtactactttaaattgccacgcctgctatatctaaattaattggcgtttggataaattaatagatgtcatccgtgtgactataataaaagtgtttatgttttttcgaaaaaaaaaaaaaaaacattttacg

SEQ ID NO: 84760 - DNA, 361 bp, Glycine max
  Clone ID: PAT_MRT3847_47553C.1
caacccaaaccccgaaaattccaaaatacttttaaaaaaaggggaccagaccccactttagtctgaacaacaaaaaggctcctacacaacaatttttttgtacaaaaggcaaaatgttaaaaatttcaaacaaattttttttgtttaaaaaaataaaaacctatttatatggataaaaataaccgtggcaaaacaaggacctaaaaattcaatgttgttgacacaactgtgacagggcttacacttgcacctgagggagtggctcgtccttatgcgaatccaataggggaaaggccctttctaccttaatttattgaacgagattttattgatcactaaaggaatgagcgaacgaattttc

SEQ ID NO: 84761 - DNA, 445 bp, Glycine max
  Clone ID: PAT_MRT3847_47554C.1
cttacgcgttcgcccactctggcgtagtgttacgagaattgatgccgttttcgatttggctggtgccactggcgatgctacttatgtcggtacgcattatgatcggcacgctactctgccagagttgccacaatggacgcaacaatttgtcgaccgaatgccaacgaatgaacgtgcatctaatgaaaacgagtgaaaacaagtcgacatagggcacagaaaggtggaggtggcaaacgcgcaaagaattgctgagctggagcaacagttggttacacaaaaaggaatggaaaagcaaaaaattgcgcaagcggtcgaagaacagcggacattgtgcgaaagtgtttccacaatggcgttggaaactgagcggtgaccgtacagagaaatgaccactggcgcacacaaactgatacctttttggtttaacgcaacgcaatgagtc

SEQ ID NO: 84762 - DNA, 260 bp, Glycine max
  Clone ID: PAT_MRT3847_47555C.1
gcgagtcctcgggttgttctttctttttctccactccctccaagcagggcgcatcttaaagtaccgcgcgctgctgtctttcaaagccttctgctaaaccgacgaccccacccatgctcttttctcctggaacttacacactccatatacctcctggttagggctcacgtgcgactatatccgtcacgtgagcaggcacaacttagcctagtcatctctatccggggctatatccgatgacctgtcccaccttacgttac

SEQ ID NO: 84763 - DNA, 337 bp, Glycine max
  Clone ID: PAT_MRT3847_47556C.1
caggaaccgatacgtgctttggaggatgatggcttgtgcttcacagacgctgattgctgcggattcatgctcgtttccgagccatagagccatgagaaagtcgcagagactcttcagtcaaaatacttccaatctagttttaacggtcagagcttcgtctgaagattccgactgcaatgtcgacgaatgtgccccagataaagaggtcgggaaaataagtatggaatggctagctggggagaaaactaaagtggttgggacatacccaccgcggagaaaaggatggacttgctatgtagaaaaggacactgctgggacaacaacatatattcattga

SEQ ID NO: 84764 - DNA, 456 bp, Glycine max
  Clone ID: PAT_MRT3847_47557C.1
tacccacgccgtgattcacaaaatggctgaaccaaggcaagacggggcttattaactggaactggcgtaccctgcccaaggcccagaaccctcactcattcacaaagatagctaaaagggcggaaagacacagatgccaccactcactacacagacaactccatcaatgcacccaacatcacgaacgaagccatctgcacaggcttctaccaagcgggctacgcccaaacaaacaacaacatgcagctcttcctggccagcttcagaacaaacggttccaggaccttgtctatgctcatgaaaaaacaccaacaaactccattttccgtcaccagcttgggtacgactcctttattccgtgggctcttgacgcggccaagcagcatggccttcacggagccgcctttttcacaaacttatccgacgtatgcaacatattctggcgcattcatcatg

SEQ ID NO: 84765 - DNA, 525 bp, Glycine max
  Clone ID: PAT_MRT3847_47558C.1
cttccccccccccctccctcttccccccccccccccccccccccctgttaaaaactgcaaagaaatagtttcaaaaacaatatattctgacatcccttgggcatttttttcttgccccgccagttttcccttttttttggggggttttttccataccccacaaaaaataaatgtttaaaaaaatgggtttccccctttgtatagaagaaaaaggttccccctattgggaggaatccggggagctactttgctattttataccttctggggggtttcttaaaaaaactctttgtggtttgaaaaaaactaggcctcttcaaaagaaaattaacagtggaacaacatttgaaaccaaatacccgggaaaataatttttttatcaacctttgaccccaaataccaaccctggggattttgaacagaacaaaaaggcgcggataaaaaaccctggggcgaaaaaaaccgaaaaccgctcgggtaatttgaatccagcaccaggattccccaattttttaaaaagggggg

SEQ ID NO: 84766 - DNA, 315 bp, Glycine max
  Clone ID: PAT_MRT3847_47559C.1
cccactcatcctcacctacactcttcctcaactatctaatttctttcactatcgcacatccaacatttccgctcgttttcatttattctatccccaactatactcatatcactaccaaaaaaactaatctaatcaccacctattatgaccataaaactacaaactccatccaaaatttctaactccagactaacataacaactcattacagccttataccaaaatatcacatctactcaattactacagcctacatatacactcatcacatcattcataccttctaagacaaatccaaccactttactaaacata

SEQ ID NO: 84767 - DNA, 383 bp, Glycine max
  Clone ID: PAT_MRT3847_4755C.1
accagctagtatggatgcacggaagagttatggatcaggccggtgcttactctttttgtctacatttatgcaataatgtatgctggatatgctctcacactgcgatcatatacatcaactctggtgaacactgcacaagctgtgaaaggacaacagttatgcatgttgatcaccttcagtaatgatataatcacaagatcacagaacaatgtaaatctttatagtgagcggcacatcatactctattcggtaacaccggtcattggtgtgtaggaaatactggatagtcacgttgcaaacgagagtgacatcgtggatctagtcttaatatatggtgtcgagtcgcacgtcacactagacaaaaaaaaaaaaaaaaaaaactc

SEQ ID NO: 84768 - DNA, 376 bp, Glycine max
  Clone ID: PAT_MRT3847_47560C.1
cgggattcatggcaatgttcatggccttaatggcatgcaattgttcaacattggtctctgcttccctacaaaccatgcatgtttcaaccaggggatcagcaccatcaacatcgttaggtccccctctatacaactctcctaccatgtcaccacatattgagcctttgtttccaactcctgcaggttctgcattctctccaacagactcctcatgatcccacacttcattcaattcttaaccctcccaaccgctgatgtcaccagtaatccatagtcattattggcttttccaccttcagagtctacgtaagttaaggccacatcttccaagggtgaatcactgccactttattcatttttacatcatgccattctg

SEQ ID NO: 84769 - DNA, 2086 bp, Glycine max
  Clone ID: PAT_MRT3847_47561C.1
tcggatttcagcattttttcagtatcttgagataagcaagccaaatctttagctcttctgaaccaactttcatataacaaccttgcagcagtcatttgattcaaaaggaatcataatggaagaggagcaaaaactggttaaagggaccacaaatttggagggaagtgaaagtgaggccaaacttgagctcacagtggatgaagtggtggaggagtatgtggggtccttagggttctctcagatggtgcatgtgttcttggtgtcattggcatggatatttgatgctcagagtactttggccacaatcttcagtgatgctcaaccacctgcttggaggtgcaaaactggattgtgtcatggtaacaacaatagcactgggtctgtctgtgggttggtgcctggtacttgggaatgggttggtggcaacacaagttccatcatagctgagtggaatcttgtatgtgatagaaggtttctggctgctgttcctgcttctgtctacttccttggctcgctcataggttctggtgtctatggccacctctctgattcatggctaggcagaaaaaaaacagtgcaactttcctgcatcttaacctccataacagcctttgccacatctctctctccaaacatttggacctatgtcttcttccgttttgccaatggctttacaaggtcaggaattggcatatgctgccttgtcctaaccacagaatcagtaggtcgcaagtggcgtggccaagttggccaatacggcttctttttcttcacaatagggttcctcacactcccccttgtggcctatccaacaagaacatgttggagaaacttgtacaaactcttgtcacttcttcccctagcatattctctcctattactccctttggtctcagagtccccacgttggcttctaataagaggcagagacaaagaagcccttcaagttttggacagatttgctaggctcaatggcaagaaaaaactccccaataacctcactttggttaacccttgtggatcatcatgtgatgaaacaagtcctaataacaacaaagagaacctttggaccacaaaatgggcagctattaggatggtcactgttatgttagctggctttggagttggttttgtttactatggagttcaactcaatgttgaaaacttgaacttcaacctctatgtctcagtggcaatcaatgcacttatggagattcctgctgtggtgattggtacctttctattgggatttactaatagacgtttgttgttatctgtgtcctcttatatagctgcagtgtcctctatattatgcacatttttttcacacaaaggaggcacatcaaaagtgcataacaacaatagttatggtggtaactggggtcaattgattattgaggcaattggattcatgggtgcttccacagcatttgacattttgtacatctattgtgtggagctttttcctactaatgttaggaactttgctgtgtcaatgctgcgccaggccattatgttgggggcttctgtggcacctttacttgttgtcttgggccgtttgagcccatctctctctttcctagtgtttggtgtctttgcaatttcaagtggtgttttgagcatttggctacctgagactagaaatgctcctctctatgagaccctgaagcagcaagaggaggaggagaaacacagttggatgtctcaaaatgattgtgccctagagatgggaaaataactcaaaatggtcttcattttaatttatatgcactactaatctaaaatgtttttgtgtagacatttgataagatttaaccattttgccatgtcatatgatgggatgataagctaaattcttattgggtgtgtgtacaaatattttagattgagaatgtgtgtaaattaaactctaatagaagtagggtaatgtgacccaaagggaatggaattaggggaaatcaaaattatcatgttggaatgaccacatgttgcttcctaatgtaatagattgatgattatcataacgataacatctgattagtaatgtatccttacttcttgtgctgtcaaagaggcagaatataaa

SEQ ID NO: 84770 - DNA, 235 bp, Glycine max
  Clone ID: PAT_MRT3847_47562C.1
ttttaaactggaaacattgacattatcattatgcaggcaataaaaagggccacgttacaaactttttacatggaaacaaaaacgggatcatatgaaaatgttctatatcaattccatggccctaacaaattgccaactattttattattcgaagtatacagatcaaagaaaattacggagacacatagttttctgcaccataattaacgtcttattactaagcgagactgagggc

SEQ ID NO: 84771 - DNA, 305 bp, Glycine max
  unsure (1)..(305): unsure at all n locations
  Clone ID: PAT_MRT3847_47563C.1
ngnaagnangcgtacgnaagcncngaattcgncacnanagaagangaaggntggnttgatggacnaanaaacananaanaagaaaannagagnaaanacangcaagannaaagaganaanaanananaaanagncangganaaagcaganatnaaanangaaaaangancaaannnaanngcagcanangganaancaanncannngngtaaaacntanngnagactgnaantgcatnaaagnaantacgcaganaaaaagannaacnnaanngagnnnanaaacaagnnaaaatnnnnannanc

SEQ ID NO: 84772 - DNA, 249 bp, Glycine max
  unsure (1)..(249): unsure at all n locations
  Clone ID: PAT_MRT3847_47564C.1
cggtccggnaataccgggtcgacccacgcgtccgcccacgcgtccgtacggctgcgagaagacgacagaagggtccaccatgtggtgttcttctatgcacttgctaattcactaggaaaaaaacattataagcctaacccaccatctcactgcatacacacaacaataatgcaaaccccacaacaaagttcatcgaatcaaccccaaaaaaaaaaaaaaaaaaaaaaaaaaagcggccgctctagagga

SEQ ID NO: 84773 - DNA, 576 bp, Glycine max
  Clone ID: PAT_MRT3847_47565C.1
gtttggtttttttgtgttttttttttttttgggaaaaaaatccttattggagcattggatccagctctttcattccatggggttagcggcgaatctagcactttcttgggggactaagggcgtcatagggagaacatccttcgactgggggacatacaacgctggggggttttgggttggggggaggtgaatggattctctttctcataagctttttcttgggggggggggtccaacaattcttgatctcattatttgtgtgattggacaagctgggaaatgtggggattgatcatttgggtccaaaagcgtggaggattttaagggggtgatatatcttctgctaaactaaaggttcctcattttatctctgggttgaggggggtaatccacctcaggctggaggtccgggccttctacatctggtttttggggggaactgagcaccaggttccatgggcatgcgtttcaacattagccacaaggtctggggtcttcttcatcccttcctatatgggacccatgggttgggcgcatccattcattataggggggaaaaggaaactaggggggaaa

SEQ ID NO: 84774 - DNA, 299 bp, Glycine max
  Clone ID: PAT_MRT3847_47566C.1
cttctgtgttgttaaaacaaatttctgtgcttgattccctcttctttcaaaaaaaaaaaagaaaaaaaaaaaaaaaaaaaaaaaaaaaaaaaaaaaaaaaaaaaaaaaaaaaaaaaaaaaaaaaaaaaaaaaaaaaaaaaaaaaaaaaaaaaaaaaaaaaaaaaaaaaaagggggggactttttggggaacccaggctaacgcccgcgggggggaaaagccatggcgttttctaaggggaaacctaaattaaattaacgggcggtgttttaaaaaacgaaatggctgaaaaaacccggg

SEQ ID NO: 84775 - DNA, 694 bp, Glycine max
  Clone ID: PAT_MRT3847_47567C.1
tccgccgcaaggtccgcagaaaacagacttctagtgaagaggtggccgaaaagataattctagtgaagagatggatagactaagacgtttgtggatgtctcttcttccatttggatttctgttgttctttagttcagctttcatcggagtacctggtgcccttgcctggagcaaagagggtcatgttatgacatgccaaattgcacaggcacttttagagcctgaggcatcggaagccgtgtaccaattgttacctgaccatgtcaaaggtaacctatcagccctctgcacatggcctgaccaaattagacactggtacaaatataggtggacaagtccacttcatttcattgacacaccggataatgcttgttctttccagtattcaagggactgccatgatccccatggcgtggaggatatgtgtgttgcaggtgctgtgaaaaatttcacttctcaactcatgcattacaaagaggggacatctgatcggagatataatatgactgaggcgttattgttcttgtcacacttcatgggagatatacatcagccaatgcacgttggatttacaactgacgaaggaggaaacacgatagaactacgctggtttaggcccaaatcaaatctgcaccatgtgtgggacagagaaatattctcactgcattacagactatatgatagggtgtgagtc

SEQ ID NO: 84776 - DNA, 409 bp, Glycine max
  Clone ID: PAT_MRT3847_47568C.1
aaaagccaaattagggtttttagggaaccccaaaaaatttgccccctttaaaaaaacaagcccctttgcttgctaacccctggggggacacccaggggtttctccccctttgcaaagcacccaatttcccgggaaatcttccccctccccccccctttaaaaaaacttttccataaccctttttggtcataaccccccaaatcgtttttttgggcccccaaaaagtttctgggggggggaaggatttggggggggtttaagggaaaaaaatatggaggggggcctttttaaaaggttttcctaaacctatcccccccgaaatggttttgttcaagccctaattaaaaaggtctcccccccccggcccttggggggggaagctttttaggttaaaaccccaaaatttttg

SEQ ID NO: 84777 - DNA, 168 bp, Glycine max
  Clone ID: PAT_MRT3847_47569C.1
cgctaatctaatttatgtgtcccctgaagcgtatatgtccaagcgcgacgtagcttgcacatcgacaatgatggctgtcatttctttttattccataccaaacgatgatgtgctttccatataacagattgaagagttccattcaatgcagatagatgactaaatgct

SEQ ID NO: 84778 - DNA, 288 bp, Glycine max
  Clone ID: PAT_MRT3847_4756C.1
tttacgcgtgtggcaccagggaaggggacttgacagtcagtagttggaaaagctgatacatcatgtgctgcaactgatgatcgggacaactctcattgggtcgtgttatctaactgacccgctgttttcatcgtacgaaccagctgatcctattctaggtgggggggttactatacctgtgaacaggaaacggatcctcaatctatgtcgatggcagttgcttttgaattggcttaagataggaaaattcacttgtgactctgggccgcatacctggtgatgctgcaa

SEQ ID NO: 84779 - DNA, 445 bp, Glycine max
  unsure (1)..(445): unsure at all n locations
  Clone ID: PAT_MRT3847_47570C.1
caaagtgttttctgagtctgaacggaaccccacttaaaagtcgttctccttcctcttcgcaactgctataaagtactattttcatattcatatgtggatgcatccctatatatacatacgcacacatgtaaatgattgcaaacaaagataagataggtaccagctagcatatatagtttattaatcagttacatatatatacatatataccacctgatatataggcatatagccagttaggtaggtaggtaggtacatagtagttaagttaattcaatcatggaagaaagagatcaccgttgttccaacaattcaacgatgatcacaacaacaaagaaaaaaacgagcagaagaagtcccacatcggataagctgaagaatcaacacccctgtgagaagcangcgatgaaaccgtacagaggaataatgatgctaaagtggggga

SEQ ID NO: 84780 - DNA, 268 bp, Glycine max
  unsure (1)..(268): unsure at all n locations
  Clone ID: PAT_MRT3847_47571C.1
agggtctaacaatgcggctcatgtcatcctgcggttaaagaagggagagggaattactattcaccgatttattgtgcccatttgtgcaggatactgccatgctcacgaacataacttggaaatgtaccaacataaatctaaggcgttaatgcctaaaaaaaagaagaacccatgcgctatgatcccttagggcatatgataatgttgtgtgacgcacacacgtcataatggctatcttacgatccttatcnaagcatggaactttctc

SEQ ID NO: 84781 - DNA, 347 bp, Glycine max
  Clone ID: PAT_MRT3847_47572C.1
gtcattgttaaacgaccattaacgtataattaactcactatttattatgaacacgatccaatacgtggtggggatgaattggtccctacgcgggaacgaacaagtacgcctcataaactgtttaaggatgactttcattaataataaatttaggaaatattaaaagaagatgcctgtggtttgtacaacgttaacattgtagtgtttagcaaagagatcaaaaattttaatactacaaaacatgggagaaaaagaaaacgaaatttacaggagaaaatacaaccaattgattataaaattaatgttgttgtaaactgatcatatactgatgagtttacaaattataa

SEQ ID NO: 84782 - DNA, 511 bp, Glycine max
  unsure (1)..(511): unsure at all n locations
  Clone ID: PAT_MRT3847_47573C.1
gctgaagcgatgtgtaacgagagaaggtggattttgtatagtgggagtttggataagtcggtgaaggtgtggaaagtgtcggagaatattaatgcgggtgcgcagaacaacaaccaccagccaccgaggcttagtgttgatcagttccccagagtgtcttccttaaggaaaatggggtcaaggagatactagctgtgtgcacaagagaatatataatcatatcactcaccgttttaaattgggggttatagtgagtcaaaaaatatgtcactgatgccatcttaatgcaattctggagtttaaaatatgttgatgttgcggactgtaagttaaaaccatgatactactcattggtttgggtttcatttgctaggttgttggtggtgtatatatgtttcgtgttcaagtgtgtgtaatatgtattgatacattaatgagttagaggaggaatgtatacctcttgacttctaacaattgtttgtaatgtttggataccagattgnnaattatg

SEQ ID NO: 84783 - DNA, 273 bp, Glycine max
  unsure (1)..(273): unsure at all n locations
  Clone ID: PAT_MRT3847_47574C.1
attgaattaaaaaatgcagnacagangatcgagtcacagagtctncannatgggcaataatcgatcccgnattccngcgctcctnatctccatgttcgctgttnngcttctatctacgtgnaaagggctgaggcgggangagagaatcgcgatatctcatcaaagagcttgatangatnacnggcnagggacaatctgctatatctgnggatgatacattnaagatcatagnntgcagggaanaacataagaagcttgatgcncntgagacng

SEQ ID NO: 84784 - DNA, 347 bp, Glycine max
  Clone ID: PAT_MRT3847_47575C.1
ggctcgagcccacctccaccctactactacaagtcttctgcatcaccaactttctatcacaaataagctggtaactcatccccaactccctactatggtagagcgaattgttgctcgaaagccactagctacgacgacagacactgaccctcaccacataataagtacaaatcttgatgcattctgctgcacacatcaatatagcacattatgtcaaggctatattcgcccactcctatctataacctgaggatacttacgccatacaaaacttttaactactacgtgaggctgaccatgttctcactgacccaggcacgcgcgcggcatatgatgagcatggaagg

SEQ ID NO: 84785 - DNA, 2959 bp, Glycine max
  Clone ID: PAT_MRT3847_47576C.1
cggattccgggtcgacccagcgtccgggacgcacgagagacaaacaaaaacagagcaactcctcctctcagagaaacagaacactctgttttctttctctgagctcatttatctctttccacacccaatggcggtggcggctaagagcagcagcacacacgccgagaaggcggcgaacggagaatcttcggcggagcggtgtccagagaacgaggtggctctgcagtttcctgagaccgacgacccatcacttacggtgatgactctcctagcatggcttctgagaatagcctcatgcgtactcctgattttcctcaacactttcttcaccttgaggactcagccactcaccatatgatgccattctgcatgcacatcgcggttcttcccataggaaggttcatgggctccactcttcccaccaaatagtaccgttttctcgggtggagcttaaccttcaaccctggacccttcaacatgaaggagcatgtcatcatcaccatcttcgctaactgtggtgtctcctttggaggaggcgatgcttactccattggtgccattactgtcatgaaggcttactacaaacagagtttgagctttctctgtgccctcttcatcgtcttaactacgcagatgctggggtatggatgggctgggattctgaggaggtatctggttgatcccgttgaaatgtggtggccagcaaaccttgctcaagtgtcgctctttagggcactccatgaaaaggagccgaaatcaaaaggtttaacgaggatgcagtttttccttattgccatgggtgcaagcttcttgtattatgcactccccggctatctcttcatggtcttaacattcttctcatggatctgctgggcatggccacataacatcactgcacagcaaattggatcaggttatcatggactcgggattggtgccttcacacttgattgggcagggatttcagcttatcatggcagtccccttgtttcaccatggtcttccattgttaatgtgggaattggatttatcatgttcatctacatcattgtacctgtgtgagactggaagttcaacacttttgatgcccacaagtttcctatattctctaaccagttgttcacggccagtggacataaatatgacaccaccaagatcttaaccccagagtatgaccttaatgttgatgcatacaacaaatacagcaagttatacctcagccctctgtttgcattatctattggatcaggttttgcaagatttacggcaaccctcactcatgtagcactgctttatggaagagacatttggagacagagtagatcggcaatgagtaacgcgaaattggatatccatggtagactgatgaaagcttataagcaagtacctgaatggtggttcctcagtatattgtttgggagcatggcgctatccctgctaatggcttttgtgtggaaaacggatgtgcaactgccatggtggggtatgctctttgcttttggtttggcttttattgtaacccttcctattggtgtcattcaagcaactaccaaccagcaacctggatatgacattatagcacagttcatgattgggtatgtccttcctggacaaccaattgcaaacttgctcttcaagatttacgggagaatcagcaccgtccatgctctctctttcttgtcagatctcaaacttggccactacatgaaaattcctccacggtgcatgtacaccgctcagctggtgggaactctagttgctggtgtagtgaacctggcagtggcttggtggatgttggatagcattaaggacatctgcatggatgataaagtgcaccatgacagtccttggacatgccctaagtacagagtgacatttgatgcatcagttatatggggtctgattggaccaaagaggctatttggacctggtgggctgtacaggaaccttgtgtggttattcctgattggagcagtgctgccagttcccatttgggtgttgagcaaaatcttccctgagaagaaatggataccactgatcaacataccagttataacctacggctttgctggaatgccaccagcaactccagccaatattgcaagctggctagtgactggaatgatcttcaattactttgtgttccgctacaacaaacgctggtggcagaagtacaattatgtactatcagcagcactggatgcaggcacagcttttatgggtgttttaatattctttgccctgcaaaatgctggccataatctcaaatggtggggaagtgaattggaccattgcccattggccacttgcccaactgcaccaggaattgaggttgagggctgtccagtattcaaatagacaagaaccataatgataatgggtttagctttttctttcttttttgtatgttttggggggaccaagttaggctgagagtatagctatagggtgaaaggaataaccaattgttcagcaattctgtaaatgactaaatgcttgcttgtcattgtggagggttttcgtttttttaaccgatgttcaatatgtttgataaccacaagtacaatcgctggtggcacaagtacaattatgtactatctcaagcactggatgcaggcacagcttttatgggtgttctgatattctttgccctgcaaaatgctggccataatctcaaatggtggggaagtgaattggaccattgcccattggccacttgcccaactgcaccaggaattgaggttgatggctgtccagtattcaaatagagaacagccataatgataatagctatagggtgaaaggaataaccaattgctcagcaattctgtaaccttttgtgtttggatcataaatctcaaaatttcaaggaatttgaaatgtctataatttgaattgctttgattttaatttactttattatttaaataaaaaaaaaaaaaaaaaaaactcgagaccc

SEQ ID NO: 84786 - DNA, 240 bp, Glycine max
  unsure (1)..(240): unsure at all n locations
  Clone ID: PAT_MRT3847_47577C.1
aangaatctgctgagntgancaagaggtctttcaagtatgcntgggtgcttgataagcttaatgctgagcgtgganagaggaattcacaattgatatggccttgtggaagtttgaaaccaccaagtactattgcacagtcattgntgcccctggacacagggatttcatcaanaacatgatcactgggacatcccaagctgactgtgctgntcttatcantgattccactacnggtgggt

SEQ ID NO: 84787 - DNA, 216 bp, Glycine max
  Clone ID: PAT_MRT3847_47578C.1
tgggaacctaaagatgctaaaatataattaatacctagttaacatccaattcttctgttgcgtatatattttacaactacaaagctccgatctaattcattgacaacataaccgatagaataattaacctcatctcacagtctttcgtagcggctaactcttcatacttcaatatctccgtcaaagccgataaccctaacgacaagatcgggatcc

SEQ ID NO: 84788 - DNA, 562 bp, Glycine max
  Clone ID: PAT_MRT3847_47579C.1
aacgaaggaaatacaatggacagagataacagaagtaatgtttttttttttacatcgataatagtgatactattccctacacaagtaacaaataatatcattgctaacaacctaattttgatactgccaactggtttcatttcagaattgcaagtttatctacgtttatcgttctatgtggtactaatacattcagagatcccctaccatattcttttcttctaattttagaactcttattcattttttcacctatccttgtaacactggtaatttcttctgtctccagcgttaaaccttcttgcctctcactttttacaatgacaacctgtttaggtagcttataaacaggctcgggtggagttgatttagcaaaagccactgtggtttgataaaggaggtcatcatccaaaaattcatcgtctaaaactagtgcactgcctttctcaacagcttgctccaacagtgataaaattccttccgtgcagagtgcagatcttgaggtctcactaacatctgctgctcctggaaacttgtcagaataaggatctactatgttact

SEQ ID NO: 84789 - DNA, 433 bp, Glycine max
  Clone ID: PAT_MRT3847_4757C.1
ataacactcatcgtacttatacttttcacttttatctctatctatccattccattttctaattctgaaatttgttgatccagggtgttttcactggccgatgtgggacaaacctagaccatggtgttgtagcagttgggtatggaacagaaaacggcactgattactggctagtgaggaactcatggggctcagcatggggggagaatggttacatcaagctagagagaaatgtgcaaaatactgagactggcaagtgtggaattgcaatagaggcatcataccctatcaagaatggtgctaaccctccaaaccctggtccttctcctccatctcctgcaacaccttcaattgtttgtgatgagtactactcttgcaactctggaaccacatgttgctgcctctttgagtacagagggttctgctttggatgg

SEQ ID NO: 84790 - DNA, 469 bp, Glycine max
  Clone ID: PAT_MRT3847_47580C.1
ctcagtccacatcagtctcgtggccgacagtagaaggtccactgacaccgtgagggaagaaaggcgcacagaagattcagattcctcactccactggagggtgccgtcaacatctgcatgcacttcaatcctagttcatccgcgagctcgcgcttgctttcaatcaggatctccttggacgacgacttcgattaccaagatcgtcaccttaatctgcccttctacattatcgtactccaagaacctcccatacctagaccttgtcaaaatcttaagctgctcaaagccaattacatgaaaaacttaacctttctgagacatgcccaacacactgttgatcccaacacgagcttgcttgaactgtcatatctgcaacagatggaagatgttgctaggagatcagcccaagctcaagctgacaggatgtgccgttgatgttaccagtgaggcacacagcatctttgatgct

SEQ ID NO: 84791 - DNA, 181 bp, Glycine max
  Clone ID: PAT_MRT3847_47581C.1
ctcgagccgattcggctcagatttaacatagggttcttggaatttcatataaagggaaagagggtgcaaagcgcatcttctttttgttgttctctcaaactttaacaatctccataaatacataatcgagaacgaaagaacaataataattgaatctcgaaaactcgtagctgtaacgttg

SEQ ID NO: 84792 - DNA, 876 bp, Glycine max
  Clone ID: PAT_MRT3847_47582C.1
ggctcgagcaaacaagtacctcccaagactcacagcaaagagccctgaagttgttgtggtgttccgccatacccaaattcctcaatcaggacactaattgtcctaattcaggtaattgctagctactttatggctattgtgtttgtgtccacattgtggcggtagtagcaacaagtttctcagaaccaaaaaggtttcatcttttcaccacccttatcccaaagcttttttatttttggtggttttttctcgttctcatcggtagcagattttaaggttggattgaagaggttttagcagccgttaataatcgtattgtcccatttggaggaccaacaggacatacaaaggttgttctttgttgttgtttaaaagatgccaactttgatttcatctaggtttcttttgcttgttggagagtcactccacatgagaagggctttggccacttctaggtctgttttattgcacactagtgtcaagtgtatgagccaggtggaaccccatcatggttccctaaccgtctctggcataggtttacaaactgaaactgaacccagaaacagaagcaaaacaaataaggttaagccattgggttcaccctctgagaatcgcaagagcaaaggaaagcccttcggcattaatgagaagaaaaaaacttttagggttgtagagaaacagcaaatagagtctgccccttttgctgcaaattcattttcagaacttggcctcccacttgtgttgattgagaggctagagaaggagggtttcaccgtgctaaccgaagttcagtctgctgcagttcccaccattctcaacaccatgatgtcataattcagtcttacacgggttcgggggaagacgtggcttatctgc

SEQ ID NO: 84793 - DNA, 1271 bp, Glycine max
  Clone ID: PAT_MRT3847_47583C.1
acccttaccgcttattattatggttgacgttgcatttgcagaggacagggaaagcaaaatatctgatctttctccctcccttgcactgagtaggcaatggcggaggaagcacagtactcatcgggacccgattccgcgcccctcaagcgcaagtacgaagaccaaccctccggcatcgagcttgccaagcagcgtgctcaggaagtcgccgcacgcctcctcaacgccgctcctcctccgccactcgacgccaagcgtcccaaacccgacaccggcttcgattctctcgatttgaagcctctgtattccgcatctcctcctcccgtctcctacggtcaccaaggttccagcaagaagattgatatccctaatggcagggttggtgtgattattggtaaaggcggagagactattaagtatctccagttgcagtctggtgccaaaattcaaattactcgtgatattgatgcggaccctaattcttccactaggacggttgagcttatgggcactcctgaagcaatttcctctgccgagaaactcatcaatgaagttcttgctgaggctgaatctgggggttctggcattgttactcgaagattcacgggacaagctgggtcggatgaatttgtcatgaaaatcccaaataataaggttggccttataattggcaaaggtggagaaactataaagaatatgcaagcttctactggagcacggattcaggtgatacctctgcatcttcccccgggtgacacatcaactgaaagaacattaaaaattgatggtactcctgagcaaattgagtctgcaaagcagttggtttatcaagtcatcagtggcgagaatcgtgttagaaatccagcaatgtctggtggttatcctcaacaaggttaccaatctcgaccaccatgccaatctgggcgtggccttctgcaaccacgcggcaacctggggtccaccccagtataacatgcaacctgcaacatacttgatcagcacgctatgccacccaggcataaggtggatattctgtcaccaactgggatcagtccactgctccacagcagcagtcaacaccatgcagggtatgattactatattcaacagcagcagcaaaatcctggaccttgatctgatgggactgcttacaattacagccaggcaccttcctctggttataaccaaccgggacagggctatgctcaggatggctatcgtggatatgaatcgccaccacaattagggtatggtgagccaccatcatatga

SEQ ID NO: 84794 - DNA, 314 bp, Glycine max
  unsure (1)..(314): unsure at all n locations
  Clone ID: PAT_MRT3847_47584C.1
gttattggttttaatttcaatcacaccattttgccgatttggtatgcgcttgttttttggttgagatagtgggggggaaaccattttagtaggtgcattttgactcccgccaaatgggggttttcgagggttttaaattttaaaagaatttgttttaacaaaagatgattgttgcccccaccataaatttttatttttngcgccctttttaagggaaaaaaatttctgcagaaaatttttttccccccggaaggaagaccctcttcttattttttgaaatgggggggggaattcttctttaaaaaatttttttt

SEQ ID NO: 84795 - DNA, 361 bp, Glycine max
  unsure (1)..(361): unsure at all n locations
  Clone ID: PAT_MRT3847_47585C.1
gatgttgaagtacatagcacgtgataaagagtttcgcagaatccctgttataatgatgcccgcacaagatgaggtatccattgttgttaagtgcttgagacttggagcagcagactatctagtaaagcctttacgcactaatgaactattaaatttgtggacgcacatgtggagacggaggcgcatgcttggacttgtagagaagaacatcttgaattacgattttgatctggtagtatctgaccctagtgatgccaacacanacagtaccaccttgttctctgatgacacagatgacaagtccaagagaagcactaatccagaggcaggaatatcagtccaacaggaacaagagtctact

SEQ ID NO: 84796 - DNA, 492 bp, Glycine max
  Clone ID: PAT_MRT3847_47586C.1
tacggctgcgagaagacgacagaagggctcacatctaataactccagaaacagcacaagcatctggcaacacggctgaagcagtttcctgcttagcataccttgttttcaaatttgattctccatccaaattcattgtctgaatataggcaatcccacttggatcactcgtccccaacaagaccatgtcagcaggaatcatctcatcagcagagattttaatgacatcaccagcctgtatatttttccatttcttggggcagaactgagccgattgaagaaccagacactctcgattgttttcattgcgatcggacctgtgcctgcgccaatcctcataggcatccttgatagctgtgacgcaaagcacaaacaagagggggaaaagggagacagttcgcccaaaaacagcgagcggaggaagctgattgagagcggccatggcaaggaaataaacataagcaaccctgtgaaattgaatgaaatattcttg

SEQ ID NO: 84797 - DNA, 307 bp, Glycine max
  Clone ID: PAT_MRT3847_47587C.1
ggtcgggcacctggattaaacctgtaattcctaacctgaaccttaaagtagaactattttttcttttttatagccgcatcagaggtgaccctaataatcgccaaaaatgccacctgggagaaaatcctttcccctaaaaagtccacacaaaaaagcagcccgaaacataaagactaaaccccggggggccaaatgagtgagccaactaaaattaactaaaaatgcctacctgcccctttaaaaataaaaaaaccgggcgcccaaaaggcattaaaaaattcggcaacgcggggggaaaagcggtttg

SEQ ID NO: 84798 - DNA, 269 bp, Glycine max
  unsure (1)..(269): unsure at all n locations
  Clone ID: PAT_MRT3847_47588C.1
gaagcataatttttacatgcgaggtagctttagctgagacattgttgtntgatataacggttttatcctatgttgttcaatgtatatatgaaaatatttaaccctattaatcatttagaacaattttgttggatatattcttcattattcctaaaagtgagagcctttttattgttactaaactctttgttctaattttttctttttcttgttttgatttaaatagcttttacggatcaagattgtttaatacaagttagcttttgaaa

SEQ ID NO: 84799 - DNA, 185 bp, Glycine max
  unsure (1)..(185): unsure at all n locations
  Clone ID: PAT_MRT3847_47589C.1
cgtagatagagccgtgattgcaaaagcacaagggaggccctaggcaaagangatccggnnagccccaaccgnnncccgcgcccncggccacaaagccaanngcaaacgccaaccaaaccgagagganngnacccacacggacncgagcacagaccncggagccggcacaaaacgacaacagacga

SEQ ID NO: 84800 - DNA, 233 bp, Glycine max
  Clone ID: PAT_MRT3847_4758C.1
ggggaaaaagccttcgtttttatttaattttaaatggggttcacaaccccttggaaacctagccggttccaacccaaaaggccttcatgggaaatagggccctacaacgggttaaaacccccataataaaaattcataacccatccaacccaaaaaaaaagggggggccccttttttttttttatgggacaaaaggcccggaaactttgcttccgggggttcccctcgagccc

SEQ ID NO: 84801 - DNA, 228 bp, Glycine max
  unsure (1)..(228): unsure at all n locations
  Clone ID: PAT_MRT3847_47590C.1
ggaggaagcanaccactgcatgctcatccattcattgccggcccacaccagacagagcaagcatagaaagaaatagcacacagagagagagagatagtttatagagagaactgactgaaggagaaagggtttgtctgtctgtgtgaaagagagagagaggatgcatactgagtgccagcccgaccagttagttggtcatacttcggtgaggcagcccgtcctttacca

SEQ ID NO: 84802 - DNA, 235 bp, Glycine max
  unsure (1)..(235): unsure at all n locations
  Clone ID: PAT_MRT3847_47591C.1
aactgaaatggccaacaaggatctagacagatactacagtgcacttgataaagcactgatgcgcttncacacaatgaaaatggaagaaatcaacaaaatattagggaaattggggcagcaacctattgaggccaagatntagccttcattagttttcattcaaactcccaaaggtgcaaggacccgttcctccatttcaagggttcaaatgcaatcggtaattccaaatttggaa

SEQ ID NO: 84803 - DNA, 172 bp, Glycine max
  Clone ID: PAT_MRT3847_47592C.1
cacaaggaaacacacttatactgaaattacagaaaatagggaaggaataaaaataacttttcttgagtgtacgtaacacgccataaacacatttaagacgaacggcggctactaagatgacacaagatctcaacatgattggaaaacacatatacgctttaaaggggcccgg

SEQ ID NO: 84804 - DNA, 305 bp, Glycine max
  unsure (1)..(305): unsure at all n locations
  Clone ID: PAT_MRT3847_47593C.1
gttcgagnangcgtagtaagcncggaattcggnnngaggtttcnttcctcntgntcnaagagtncntcggatgnntggattggnatctgggganaatggnttnatggatgagancgangantnagttnaggagcngtcaaattgnnctgannaangantgnagngtnataggtacnngtagananagangganagatttntttnagtatantnggnatctngnctatagggaaagttgagatagataaggtnagtggngtagtttntgggagggtncagaaatgagtagtggagtgtcaaatggn

SEQ ID NO: 84805 - DNA, 577 bp, Glycine max
  Clone ID: PAT_MRT3847_47594C.1
ggattaaggaaaaggaccccattaacggaaaaataactggggggggatgggtaccctaacagggcaattcacattaaatggaaaaccgggggaaaaaccatttcctttttaaaaaattaaaggaacaaaaaataaagaaactttcatccccatcaaaaagggacaaatgggtcaggccccggcccctttagggcacggaaggaaattctaattcttataacaagggacaattcggagaattcatgggtttaccccaaggacgggtttatcggaacccaaaccaaaggggcgtgaaagggcccggggccaatcttttggacaaattaaattttaatggccgggccccaaattttgggaaaaaaagggaccactatccttggccccggaaaaacggacacattcgggtgggctgggggaatggggcataaaacgggacgggttgaaggctaaacccaaagggccaaaaattccttccatccttccacggggcccatttttccgatccaaggaaaaaaaaatcggggcggaatggccccaaaaaacggggaaaaaccggggcccacaaaacgggggaaaa

SEQ ID NO: 84806 - DNA, 441 bp, Glycine max
  Clone ID: PAT_MRT3847_47595C.1
ggctcgagctcaaacccaacgcacaacgaaactttaattaccaaagccacaggaccacggaagaccggacggggcataatgcagacccaccgcccagcagacagggagacgacaccgacaacacggctcagacaacagctaggaacgcacagaacataggcaagaggaggaaacaggcgctatgaccgcgctcagcgcgacactagcgaagatagagggcacatcgacgggacaagacggcatagctaggcgcatacgcggcacagggacaaaaccaagtgcgcagaccacaaactagactggaccaagacaacagacggctgcagcgaaccatactgagaaacgctaaggtgccacaccggccgcggaacctgaaagacagctgatcgtagtgatgagcaatacaggagtcctaagtgatacgcacaacacggaaaacga

SEQ ID NO: 84807 - DNA, 604 bp, Glycine max
  Clone ID: PAT_MRT3847_47596C.1
taaaattagtgtctttttccattcataaccattattcctaaatcttctccccgtgaccaacgaaaccctcttccggaaacttaattttgtggcgcaattccagagttcaaattcgaccaagaacagagccctatcagagagcaacagaagcttcctgaactcttccatcaccaacatggactcgacggtggcatcgctaacccaaacagttctcaggaacgagagctggcgcaaaatgatgtcgtcattgtcgttgtagtcctcagcaaaaaaggaaaatagggttccggagtgagttcctttaactctcgactagttaattaattcacactcgctcttttgtgatttcctttaactccatatagctagaaagaaagaaagaaataaagaaagaaggaaatggttatttccttcaacggaaccaggattggatttggtacgctagtttgggtttcacgatttctgcatacttggaatctcaaattcctatctcgaatgctaatttttcttttttaggttttggcgtatgttgcgcgttcggtatagtagggggtttcggaggtttatgccttatttctgaaccattttagacatttctatagat

SEQ ID NO: 84808 - DNA, 1281 bp, Glycine max
  Clone ID: PAT_MRT3847_47597C.1
cacgcgtgaccacggccttcttacgactacaaaaagacggagttatgacctgtgtagtgtgcaaaagtaaaaatgtggtttcttggttggaaaggggcatcagggttctcagcctcttccacagccgaacaagtcactcaagggattgatggaaccgccctcaccgccatcgtcacaggagcaacaagtggccttggtctggagaccacccgggttcttgcattgcgcggtgtccatgttgttatggcagtaaggagtctggacagtggtaagaatgtcaaagaaacaatacttaaggaaatcccctcggctaaaattgatgtcatggagttagatctaagctctatggcatcggtaaggaaatttgcagcagattttaattcttctggtcttccactcaatatcctaattaacaatgcaggggtgatggcgactccattcacactttcccaagacaatattgaattgcagttcgcaaccaatcatttaggccattttctcttgacaaaccttttattagaaactatgaaaaaaacagtaggggtatgcaaccaggaaggaagaatagttattctatcatcagaggcacacagatttgcttatcgtgaagggattcaatttgataagatcaatgatgaatcagggtatagcagttattttgcttatggacaatcaaagcttgctaatatcttacatgcaaatgagcttgcaaggcgcttgaaggaagaaggagtggaaatcactgtcaactcccttcatcctggatcaattattacaaatattctgcgataccatgattatattaatgcccttgctaacatggtgggcaagtacttccttaaaaatgtgcaacagggagctgcaactcaatgttatgtggcattgcatccacaagtcaagggaatatctggtgaatactttatggatagcaataagggaaacccggcctctctggctaaagattcagagctggcaaaaaaactatgggaattcagcttaagcctgactaatccaaagtagcttaaaggtttgactagaggaagcttcataaatgccaacattattgtattggaaaacaagtttcagcgaattagaaatttatagtggtgtaagcttacaacttgaaggtttttattaattattacagctcagactactatccattacagtattgttttggtaccgttattgttgaaaatcaagcagtatacataattagtttcaaactctacggagttttaattctatctgttttagatatctttaagtaatattttttgt

SEQ ID NO: 84809 - DNA, 276 bp, Glycine max
  Clone ID: PAT_MRT3847_47598C.1
attcattaaaacatcacactgattaccgaacggagttaaatggaagacgcttgctcacctttatgggttgtattgggattgcgagcttggtgccagtggtttatagagcttatgtgcatgcgaacaatgatgtgctccactccagatatgattatactgatgcaaagacgttcaatgagtaacataaagggagtgtctgttcagaaaaaaggattaacaatgcatacaagtgtaatacaccagaatgcagaatgaagaatgagtgattgttactga

SEQ ID NO: 84810 - DNA, 595 bp, Glycine max
  Clone ID: PAT_MRT3847_47599C.1
gaattgcagttcgcaaccaatcatttaggccattttctcttgacaaaccttttattagaaactatgaaaaaaacagtaggggtatgcaaccaggaaggaagaatagttattctatcatcagaggcacacagatttgcttatcgtgaagggattcaatttgataagatcaatgatgaatcagggtaatggtctggttggaatgataaatcaatgataaaccttttccctatttggctattttctactaagctcttgctataaaaattcataataaatgtatattattcatgtccaatgttttgagtccccaaaattgcataatttccttctctatctgagttttatacaggtatagcagttattttgcttatggacaatcaaagcttgctaatatcttacatgcaaatgagcttgcaaggcgcttgaaggaagaaggagtggaaatcactgtcaactcccttcatcctggatcaattattacaaatattttgcgataccatgaatatattaattgccttgctaacatggagggcaagtaccttcttaaaaatgtgcaacagggagctgcaacttcaatgttatgtgggcattgcat

SEQ ID NO: 84811 - DNA, 448 bp, Glycine max
  Clone ID: PAT_MRT3847_4759C.1
gaaccaaataagccatagccataaataactgttaaaaatgcttctaactcacattcacgttttctctcccttcacacgtttcacttatgcacttcatgcctcgcccgtccgtgcctcttccgctccaacacggcgtcgtttggtcaaaaccgccgctcctcaggaaccgaagaatctccggcacctcacttcgcgcattgttcaactcactcgccgaaaacagctccgccagattttggatgaggttgaggttgcgaagaagcatttcgggaagctgaactcgattgtgatgaacgcggtggtggaggcttgtgttcgatgcggcgacatcgattcggcaattagaatattcgatgagatgaaaaagcgcgatggttgtggtgtggatactgtcacgtatgccacgcttttgaagggattaggtgaggcacaaagagttgatgaggct

SEQ ID NO: 84812 - DNA, 464 bp, Glycine max
  Clone ID: PAT_MRT3847_475C.1
tcagctgagaaaaatttagtgttagtagctccattgactttgtgggaaaagttgaatatgacacagagtttactacttccatcacaagaaagatcaccatcataataatgttgctatattattatcttttctataaagggatttaactcaatatgattgaatagtatgggggtgagttattatcatcttttgacctttcacaaacaacacttaagaggttgtgtttgacttgaactctttgcagcaaagagaaaaaagagagaaatcaagaagagcatatggtggtgcctgagtctcagatgaattcccaaaacgaggtagaatcgccgctacaattggaggagcagcaacaacaacaaaacaacaacaacaacaagaaccacccattctcatcactaggaagacaatcttcttcaatatactcgctcaccctcgacgagttccaacacactctatgggagaat

SEQ ID NO: 84813 - DNA, 470 bp, Glycine max
  Clone ID: PAT_MRT3847_47600C.1
gttttcttggttggaaaggggcatcagggttctcagcctcttccacagccgaacaagtcactcaagggattgatggaaccgccctcaccgccatcgtcacaggagcaacaagtggccttggtctggagaccacccgggttcttgcattgcgcggtgtccatgttgttatggcagtaaggagtctggacagtggtaagaatgtcaaagaaacaatacttaaggaaatcccctcggctaaaattgatgtcatggagttagatctaagctctatggcatcggtaaggaaatttgcagcagattttaattcttctggtcttgcactcaatatcctaatgtaagaacttttaactctatctgttttagatatcttaggtgatattttttgtctctgcgtctccaagtggatgaatatgactggctgatgtcatatctttctggaagggggttgttgccaattttactactttctt

SEQ ID NO: 84814 - DNA, 235 bp, Glycine max
  unsure (1)..(235): unsure at all n locations
  Clone ID: PAT_MRT3847_47601C.1
nggggaannnnnnnnnnnnnttggggnttgctgtgtgctacgactgttgatgctcgcgtgcgcacgctcgtaatctggctcgtgcgctgcgaggggggacccgcttgtagcttcagtgtacattgactcttggggcctaaccttgaaaaatgtgtgcctataacagtctttgtcgcattcttgaatccatcgcaacacccagattgccctgaccagcaggggattggatttccac

SEQ ID NO: 84815 - DNA, 317 bp, Glycine max
  Clone ID: PAT_MRT3847_47602C.1
ggtcgtgtttttgatttgagaattgcgatcgagtcttttgacacatggcatcctcgttggcaccatctaccagcgccgccactgggttgcggctcacacactctctccgcttctctcctaagcccaacagcctacgctttgccacctcgcctggtgttactctgttatgcacgagggttactgcccacttagatgatgttgatcttgattgatcgcctactgcgacttctcctcctatggatcccatctctacggagcttcactcttaatttccttagcattaccatcctcttccctgttggaatcttattgcctgt

SEQ ID NO: 84816 - DNA, 278 bp, Glycine max
  Clone ID: PAT_MRT3847_47603C.1
ggaagccaaagacatttttttaaacaataggaatgaacccaaaaaatcccggatttaattaataatcctttacaaaaaaagatcgactttaggggccttgtttccaaacaacaacttcagggaatttcccaagggggtaaaattaaggtccatttccaagcacaggacccttttgctattggaacgtttaaaaactggaactttggaaattgcctgctttaaaaaaaaaaaacaagccccgtgtattattctcactgggggcccccctgggttttttt

SEQ ID NO: 84817 - DNA, 187 bp, Glycine max
  Clone ID: PAT_MRT3847_47604C.1
cctctttagattgctcctcttctccaattttgaacgaaacggcgatatctttgttaaatttagtgcatcgtattgctcgtggctaaggagctccttgatgcagaaatgggcaacacctagcaagccaaagaagattctcataacaggagtagcaggcttcattggatgccatgtatgcaacaggata

SEQ ID NO: 84818 - DNA, 319 bp, Glycine max
  unsure (1)..(319): unsure at all n locations
  Clone ID: PAT_MRT3847_47605C.1
cncacgcacacgaacgnnaancacaaaaccgcncgaacccgagncccccagacanaaaacanagacnanacagnnaantgncgatngtncacngcnanggacangatgacaataaactaccggcanggaggtgnanncannaccnaananaccaacccacnaacnaacacaaacnanaccacaanaanccaananacaaaagccaancncnaancaaaanangcnncccaanancanancnanaaaaacccacngnaancgacantaaacaaaaaangngntcccaaaagagnnggctaganaggnnnccnnncnnccn

SEQ ID NO: 84819 - DNA, 266 bp, Glycine max
  unsure (1)..(266): unsure at all n locations
  Clone ID: PAT_MRT3847_47606C.1
ggccgagcagaaggaattcgagctcatcatctcttaaccaaacttttcgcttgttctctngcangagagagccttgtttttgcatcgctaccagaggagagaggactgggaagccgtnaggccaaacactcccattcccactgcacagcgagagctgccaaagcctatccctgcaggtgtcgaaatcgaacaacaccctaagcaaatggatgatacacaaggacccaaaaacattcaactataaagaaaaccatcaaccaggcaaa

SEQ ID NO: 84820 - DNA, 432 bp, Glycine max
  Clone ID: PAT_MRT3847_47607C.1
caggacaattgacatgtgaatggcctaaatttacacgaaaggatcatgcgaataacctgagaacatcatctatgctaagggattgaagattgtcaaacttcactcgacaatcattccaagctacatcagtagtgtgacttatgaaagggcaaataaggaacaagtgaaaatccacgactagtctctcaacatgcgagtgagataacaattgcaggaattggaacacatccattaactcagacaacctttagaccaagctacttgctgtcaccattcgaacttggcacaagcacacgactcatgccagaaggaaataaaaccttcctcatgccctgtggctatgcatacaaattggcgtccggatcttacatgcctgaaagctccagattctcttaaagaccaaaacatgatgctctggatgctccatgtctt

SEQ ID NO: 84821 - DNA, 488 bp, Glycine max
  Clone ID: PAT_MRT3847_47608C.1
aaagggggaatcaccctctctcataatggacatatttacatgtggctttatggaattataactccgaaaaaaagctccctttcttttttttaaaagtaccaaaacgcttgttactaaacacttcacccgcattaaattgcgttattcagaccatcctaaaagccactgaccaacttatgcctaacatgaaatacgagggacctaaaaaacgcccctatagagctcatacttatacaggagcatgttttctttccccgcgcaatgtgcgactcaaaaacactattttctaccttgtgaccatcttacatctacaatcttcttgcttgtttatattaaagacctgctcattcaacctctgccattttttttattagctacttagaagcttccattgtgacttcacaggactacctccaaagggaacgtattgtttcatacttccctacgttcggccgaagtccacattgccaaaggggcatgttttaaac

SEQ ID NO: 84822 - DNA, 259 bp, Glycine max
  Clone ID: PAT_MRT3847_47609C.1
ggaaagtaaaaaaggttattcaaggaatcggggatttctacaatattgctgttgtttttgcaaggccccacccagcactacattgggccttggggacgtactaccaatattattaattttaacatgcctaaactgcccctttggaattttgagaattaaaacctcccccagatttcccaaataaaatttggtgaataacttccaactttgttggcaagggggagggctttacacatatcctccaatggaaacaaccttg

SEQ ID NO: 84823 - DNA, 475 bp, Glycine max
  unsure (1)..(475): unsure at all n locations
  Clone ID: PAT_MRT3847_4760C.1
acggctgcgagaagacgacagaaggggtagtttgaatggtatggaatttctttcatttactcttccctctgcacctgaattaaaaataatgtgtctgtcttgcatctgtgcttccttctatattatgatttcatatagtacgtcatgtgtttcaaaactcattgcttttgcacatgattgcattagaggatatagaaagacaggtattgacttatggaaaaaggtatttaatcaatcagaggnnttctattttttctctcattcttcaatcccaactttttttacttttcacttaaattctcctgttgctacttcaattcaaggagcatcacttaaatcatgaacttaaattgtaatatgagaatttgtgacttaattcaagcatggggatggtaataatcaattaattactttgaatcactntgagtgatggaatcactttgaatgatatcactaaaatttctcggaagattat

SEQ ID NO: 84824 - DNA, 483 bp, Glycine max
  Clone ID: PAT_MRT3847_47610C.1
aaagggaaccccatggcttcattacacccggggaaacaagcatgaaaaccagggcataaaaaaacacaaaatgggtgggttttcaagaataaaatccaaaaaaacaccaaacaaaaaaatggggcaaaaggggcccccttccattctttaaaacaaggacggggcccttttttttaaacccctagaaaaaaaaattttcatttctggacccaaaaaaaccccccacaacgggggggggggccccaaaaaacataaaccgaaaaataggggaaaaaccacctccaacgcctaaagttacacggggacccggggcaaaaaaaaaaaagggaaacccccccccccccccgtaaaagggccccccataaccatagccatagccaccaactagggggggggccacccgaggaaaaataaaaatattgggtcgggaattggggaaccttggggagaaccgcggacttttaacttaaaggcccggccccc

SEQ ID NO: 84825 - DNA, 179 bp, Glycine max
  Clone ID: PAT_MRT3847_47611C.1
gggccaaatattttacccagaaggatgtaaaaggaaataaaccatgaattttacaactggcgaactgatgcaatttagcagggggggacgttcaaacagaaaaaacaaaatttcccttctgaggcgcctcggtcctacataaattataacccggacatctgggggtttgttgctatagg

SEQ ID NO: 84826 - DNA, 195 bp, Glycine max
  Clone ID: PAT_MRT3847_47612C.1
ggggaatgggatacctcaggtcacgctgggctacccgctgagtttaagcatctcattaagcggagcatagaatgatccataaaagtgactgatatcgtggatgtacaatgggatccaaacttacatgtgcatgcaggcaacgtcatcactcgtcaatacagtaacgaacattcacttcactgcacgtcgtgatta

SEQ ID NO: 84827 - DNA, 350 bp, Glycine max
  Clone ID: PAT_MRT3847_47613C.1
cgtgagtgaaaaaaaaaagggtttggcaaaaaaaacaagaagaaaggcaaaaaaaaaaaaaaaaaaaaaaaaaaaaaaaaaaatttttagaaaaggaaatggggaaggtttggggcagataacggcgcgctttgggtaggaaaatgcggcccaacgtgtggatgcaaaaaaaatggaaagacttaaatttgaaagaaaaaaaaatttgttaagggggaatttggaaaggttgaacagattccagagatgttaaatgagagttaagacaaattgcaacgctgaaaatttgaaacactacaaaatgtttaactcggtcaggtcaggccagggagggggggggggagtcaact

SEQ ID NO: 84828 - DNA, 258 bp, Glycine max
  Clone ID: PAT_MRT3847_47614C.1
tttcacatcaaactgtttggactcaaatggcaatggtgttctcactgttgctctttgattccaaacagtttgcgtgaaatagtacagaggaatggtacccaaaagacgagaaccccattgaattatgatactagcaagcagagcttgtgtcaattgtctattgaccttctcggtggacgaatttcagtggacaaacactggatattcgatcacacttatacgatattctccaattagtaacttgttgagagctgctgc

SEQ ID NO: 84829 - DNA, 254 bp, Glycine max
  unsure (1)..(254): unsure at all n locations
  Clone ID: PAT_MRT3847_47615C.1
aatattttgtggtgcttcatattatttacaaatatttagagggatcaagtttcttaacctgtttgtattgcttcaacaaaatggtaagaggtctctgtcattattgatttattttctgactcccattacgttnagaaaaaaaaaaaaaaaaaaaaaaaaaaaaaaaaaaaaaaaaaaaaaaaaataaaaaaaaaaaaattaaaaaaaaaaaaaaaataaaaattaaaaattataaaaaaaatatatanaatggg

SEQ ID NO: 84830 - DNA, 493 bp, Glycine max
  Clone ID: PAT_MRT3847_47616C.1
tacggctgcgaaagacgacagaaggggcccttggaccttttgttgaattccaactgggtccgttgtacttccacgaacaagtttattgtactacacgttacgtagaccgtgtctcttgttccaaatttccgatgcaacttgcacattgcgtgtgtccgcgagaaaaaatattaaaaggaaaaatggaaaattgaataaattttggtattgatgatttaataacaaattaacatttatatgataatggttgttaattttgataacgactaccttaaaggctactatatatcaaacttgattttaattgattgatagtaaaactaaaattaatattgatagtacatatccattcacattgatgataaagaaactcatcaaaaaggttaatgataaaaaaaaagtgatatcttttttgtcattggttaattaactctcacttgtttccttagtttcttcgcaaatttagagagaaaaatcagatatttccacagat

SEQ ID NO: 84831 - DNA, 454 bp, Glycine max
  Clone ID: PAT_MRT3847_47617C.1
ctcgagccgttaaactcaggagacaatgaaaacgatatggacaacgatacatccaaatgataaaagagatttggaaaagtcaaagaacatattgctttcacctgtcagtcaattgtgctaattgcgaactaatacgagcatattgcgttcaattaccatcaaattatacattggatgaagaaattagatatatcttatcatcatgtgaaaaatgttagctgcacaatctgtaagaactaagaagtattgtttaactgcatttgatgttgttcttcataagaacaaatattataataacttgtgcatttaaaacctatatattgctaaaacgaaatttcaattttaactagaaaaataataaaaaagttacctataattgtgcgtctaaattttgtactatattaatgtggataatttcggtggttggaggatgtcacatgttatcacatgtgct

SEQ ID NO: 84832 - DNA, 160 bp, Glycine max
  Clone ID: PAT_MRT3847_47618C.1
aaaaaacaacgaagggggaaatccaaatttgcgtccttccttggcatctgtgatctcttctcctcacactgagcagattaaggcaaccaccggacttgaacaagtacatggagacaaagctccagatcaagctgaatgcaaatcgcatggttgttggtac

SEQ ID NO: 84833 - DNA, 254 bp, Glycine max
  Clone ID: PAT_MRT3847_47619C.1
gtggagggagcattcatgataaatggtgatacctaacttagcgatatatatatgtatattcttcagaggcatatgcacgtgaacaaacacaaattgttcggaaacttgtttctgagcacaatggctcagattttgtattcgcagaagaacctgaagcaaaaaaagaactttggaaggtaaggaaagaggcactctgggcttgctttgcaatggaaccaaatctggtggcaatgactacaggggggggggggggg

SEQ ID NO: 84834 - DNA, 1009 bp, Glycine max
  Clone ID: PAT_MRT3847_4761C.1
aagtccatatcaaaaacccttgaattctgccagacctcctttaattccatcagaagatgaatcggataagcaagaagaaagtttctttggatccattgggaagcttcttactaatgctggggcatcagtagtggaaataatgggagccttatttcctggtttcagaaaaaacccaccacagagctatgaatttcaaagcccaccactgttccagcaacctcaaaagcaagtaaatgcttggcctgtgcaagaaagctttgtgattccagatgaagatgagcctccttcaattgaccctagaacaccaacaccacggaaaacgtatgctttcatgtcgaaggatgcagaaaagatgcaacaactttggcaaagtcgcgcattctatagtggatgggacggagatcttcagcagcagcaacaactaaaacaccaacagcaacagcagcaacaacaactaaaacatcatcgccatcagtaccattcatcagtccctcacacttactatgagcaaagccatgaggaaaccaatgagatagtatttggggcagtgcaagagcaggatgggaagaagggcactgtggttattaagcctgtggattatggtcaatctgtctatgatcatcactatattcgacctcgaatcagttctatgggtcatatcaacaagtactaagtatatacaaccacaaagactaggatttatgaatccccaatccagctttaattagagaggggaggatgaaatgaagtacaggaagtataattaattattacttttaaaaagtgttatccttataaggaaaagctggtcatccgaattgttcaatcagttttgccaaattgtagggtcactctggccacatttgagggtaagattaagaaattttggcatgctatttcttattgtgatggtgtttaatgcccagcagaagttctctgccataaaatataagaaatattatatgtaatatatatactccactctttttgtccttgttccgctgaaaag

SEQ ID NO: 84835 - DNA, 378 bp, Glycine max
  unsure (1)..(378): unsure at all n locations
  Clone ID: PAT_MRT3847_47620C.1
ggctcgagtttcattgcaggactgggtttttcctcttttcacacagcttcaaaatcctctgtggagcttcactcacaagaagaggaagtagtgattgctttgggaagtaatgtaggtgacaggctgcataacttcaaggaagccctggaaattgatgaggaactcaggcattaacatcacangacatgcttgctngtatgagacagacccagcatatgtaccggatcaccttgctttaataacctaacaggtagaggttgtacttaacttgggccacatgaactattggctggacttaaaaaaattgagaaggacttgggccggacagggtggataccggatggtccaagggccattgacttagacattttattctat

SEQ ID NO: 84836 - DNA, 231 bp, Glycine max
  Clone ID: PAT_MRT3847_47621C.1
attccggtcgacccactcgccacctcgtttttttttttcatttcaccctgctttcttgtgtcgggggcaaccacaacatatgttaacaggacaacctcaaaacataacatctacgccaaacaaaattgacctctaactatccctcttcttttgcttcttttatttaaatctcatatggcacgggttctacgcacagatgttacccaccatggtgttcacgctggctttccg

SEQ ID NO: 84837 - DNA, 428 bp, Glycine max
  Clone ID: PAT_MRT3847_47622C.1
caattcaacatctcattctcaaatccatatatgttgacaagtgaatatgcatcaaaattcagctgaagggcaccacatgggaaattttccccccaccaatttcctttctttttttggtccacttatccttgtttggattggaggagcaccactcttggtactagctagcatagcattgtgcacgtgtatgatggcgccacaaaattccccaatctcaaatattcatgtgtataaatcaactttaatcaatctcttctctataatctctaattgggccaaaaccaaattaaactcaaactctatcatgaattggattgtggcacattaagtgagagagaaaaagaagtactatgctttgctttccaacacctttcaatatcctcagctattctcttggcatccattgatgcaccaagtagtccacgctt

SEQ ID NO: 84838 - DNA, 247 bp, Glycine max
  Clone ID: PAT_MRT3847_47623C.1
ttgttttttttttttgccaaaatggcaatacaaagcattggatggatttataatttggtaatgttgtagaacatatatctatgagagaaagcatggataaaacttatgcccaccctaaagagttatgtgaagggtctaattcctaaattgtatacattcaccaatttaagattaaaggcttcctgctagttttgatccatgcatgtaaaactttttaatatatactactggaaacttctgttgttgg

SEQ ID NO: 84839 - DNA, 215 bp, Glycine max
  Clone ID: PAT_MRT3847_47624C.1
tcgatctatcgctagcctacgtgtctaggagtcgtaccctacatgggcatcgggcgtgcattgcagtaagaagctacgcaggaagagctatccgcgctaggtcccaatgtcgcaggaggaaagaggattgtaggatagaatatacatgctgtagaaccaaatagcgattactgaggcccatgcaggctaacccacagtgaaggaggtagtgaatg

SEQ ID NO: 84840 - DNA, 440 bp, Glycine max
  Clone ID: PAT_MRT3847_47625C.1
tatcattctgggctcattcctggaatgggccgctatgctaacccgctggtttcggttaaggcggattttggatcggtcatggatgttctcaaggatttcttgcacaacaagtcccccgactttaacaagtcttgacggttgccaaatttggtccaagtattcgaggattttgatttcaacaacatgcttctggtgacgcaatgcatattttcgtgcataacatcattgtcgaagatggatctcgatcgatgaatacttgtgtggcaagtaaatgagaagaaaaatagtgctacttgtacaagagatttttaaatgttttattttcaagtgtaatcacatcgaataaatcttgaattggagctattaatgtagcttagcgttgcatgaaatgaacaattgagattgaagtttaagattttatgcaacggattttttgttca

SEQ ID NO: 84841 - DNA, 235 bp, Glycine max
  unsure (1)..(235): unsure at all n locations
  Clone ID: PAT_MRT3847_47626C.1
accaaacncaagggcggacgagccgaaaccganaagggaaagcgcacagcgcaacggaaaaangccgcaaagaaggacagcgacgaagagagcagaagcgcgagaacaccagcaacgacacgaacggagcacaacggcgacacagggaacgaagaagngcacaaccagcaagaaggaccgcaccaacaagcacgcgacgcacaggacaaaaaaaggggaaccacaagggagagag

SEQ ID NO: 84842 - DNA, 622 bp, Glycine max
  Clone ID: PAT_MRT3847_47627C.1
ccccccctggggtggctctggcggcgcctattaagctgaggaatcgtggggttatcggtgccggtgaaagggttgtggtggtgagccctgcacatggattgaagtttgcccagagcaagattgattatcattctgggctcattcctggaatgggccgctatgctaacccgctggtttcggttaaggcggattttggatcggtcatggatgttctcaaggatttcttgcacaacaagtcccccgactttaacaagtcttgacggttgccaagtaagttttagttcggggttttttctgattaagatgtttttaacatgtttgtgttcactttcggtcgttattattggatttgtaagatttggtccaagtattcgaggattttgatttcaacaacatgcttctggtgacgcaatgcatattttcgtgcataacatcattgtcgaagatggatctcgatcgatgaatacttgtgtggcaagtaaatgagaagaaaaatagtgctacttgtacaagagatttttaaatgttttattttcaagtgtaatcacatcgaataaatcttgaattggagctattaatgtagcttagcgttgcatgaaatgaacaattgagattgaagttt

SEQ ID NO: 84843 - DNA, 118 bp, Glycine max
  Clone ID: PAT_MRT3847_47628C.1
aataccttcagtctatcctatgttttttcctgtgccagatataggtttgtcaatcattgctctttatgcttatttgcccatgaacctgaacccctttatatgaacttccataaacaat

SEQ ID NO: 84844 - DNA, 251 bp, Glycine max
  Clone ID: PAT_MRT3847_47629C.1
gttacattttcattatggtgaccaagatattatctgttatcagtatatattcagtgtcatacacagtcctgtgtgctagacctgagtttaaagcgtcagatcacaacagctctaccattcacgtcaccaatttcgcttcagaatgcagatctttcaagatgacgtagtctctgaagtcgatccagtgtcttgtgaatttggaattggtagtgtttttagaggcgataaagccatatcaatgtcttttatcg

SEQ ID NO: 84845 - DNA, 634 bp, Glycine max
  Clone ID: PAT_MRT3847_4762C.1
aggactggtgtaatgtgatgtaatcttttggtttttgatgaattctttggtagggtataatagatagggtttactatgcattcgaaccaatagttgacacatgaaaatgataatgaatggacaaatgtgttgtgttaatggtgcccatctaagaattagtcttgttttccaacttttatggggattgaaaaattctttacttccacatttggttccgaatgatatgtcaactattaatatttcagttggaagcacagttggtccattaatgtaaaggaagataaaatatagttttcatgagaaagctaatataaactgttgttattggacctgtttgtagagagctgatgggtgcatgcatgtcttgaatcaatgtaagatgcagttccctaaaacagcatactttcaaaatttatatttttctttaatctgacagacttcttctggctaagtgtgtcgatgaattcagaaaatgtaaattttgtaatgtcttgttttacctgtaatgcttattttgaaaattttggctacctttcatgtctagaaagattaaatgttgttagaggaaatatataatggatgaatataattacccagggtaagaagtaaaataaattcaggcactccgttctct

SEQ ID NO: 84846 - DNA, 229 bp, Glycine max
  Clone ID: PAT_MRT3847_47630C.1
cttactttttttggggggtttattttgtctattcctcccgttctttcccccaaaacaaaatcctatcgacctctcagagcacaaaacacggagcaacccggggggtaaagggcctcaacgcccccgcctataacaaccgggcacgaatctattattcaaggggggtggggcctggcccaccctgcctataaacaacaatgccaaggggccgaagggggcaggcgcaccc

SEQ ID NO: 84847 - DNA, 490 bp, Glycine max
  unsure (1)..(490): unsure at all n locations
  Clone ID: PAT_MRT3847_47631C.1
ccacgcgtccgcggacgcgtgggcaaatccccgtagccagaaacgtctctcttcttctctttgttttccctctcaaattgcagtctatacttttccactcaaaatatctgctttcgaaccagacaaacgccacccttacactctccaatactctcacattttaattatttatatattatattttattcccttttgaagactcgcaagatcatatcttctgcttgaagcaaagtttttggctagaaatttagtgtttttgctctgtcactatccttcttggaagacatggtgaatccgggattgttttctgcgaataagtctacgaattcggtgaaagtaagctttcggataccgtatttcacccaatggggtcagagcttgctggtgtgtggctctgtaccagttcttggttcctggaatgtgaagaagggtgtgttgctcanccccgttcatcaaggggctgagctcatatggggtggaagtatcactg

SEQ ID NO: 84848 - DNA, 749 bp, Glycine max
  Clone ID: PAT_MRT3847_47632C.1
accacgcgtccggttcaattcccgaaggctaaacaatcagtaagaacattttgcgtgctcttttttcttcccatctaattagggtttccatgctctccaaacactcccttctctagaagcgatttagattagattttacaacaatgaacaacaccaacaacattaacaacatcaacaccaacccaaccaagaatgccgcaacaccgtcgtttttcaccaaccccggagcaccctccatccccatgaaaccacccacaaccccaccttctctcacagacgcagcctcaaccacaaggtgccacgtcacactttcacggcaactttcagctttcacaaccccaaacccacgtcgtcgcacagcaacaacatcaacaacaacaaccacaccctcacccacaagtgcacaacaatgccaacaccaacgcccacgtggcagcacccacaccacccaagcgtgcaaatcagaaacccccttcacgccctcaaggctcctccaacgctacccaatcctctgcgttcaagaccatggaactcaccgttgcgccgccgcggaaaaagagaagctttcccggtaacctgattccagaaaaagtggccaagcttgttccagaatccgcaatctacgccaagttgctcgaactcgagactcagatagattctgctttggccaggaagaaaattgatgtgcaggcgaatgttagaaaccctcgctgcgttaggaaaacgcttagagtttatgtttataacac

SEQ ID NO: 84849 - DNA, 344 bp, Glycine max
  unsure (1)..(344): unsure at all n locations
  Clone ID: PAT_MRT3847_47633C.1
aaaatttctgaagcatttgtctgcctagaaagagaagggttganataatggaaaaggtcttgtgcttcaagcacccctcagctggaatagttataatttgtggagttaaagtgggttgtctttgcatgaaaaggccagcccgggatattatccatccaaaagttagtaatcttttccattcattgattgatatatcattatctttttcctttcacctttgggtttaaaattgaatgatgagacaaagtcattatgtggttaatttatatataantaggcaccgatgtatgaatatgctagnaaataaanttctacatccgccgtaaaatgaccgatgtagacat

SEQ ID NO: 84850 - DNA, 249 bp, Glycine max
  Clone ID: PAT_MRT3847_47634C.1
cggtttttcagattcaaagcaacaaattgttttccttttctcttcaattcattttcctaagacaaaaaaacaaaccgaaatttcgagcaaaatgagagacattgtttctgtcatggaaaactagttttcctcttcttttggcacgttcattccggcttctccgaacactcgccggcctaacatcccccggaatttcgcttcgcctggtaaaaatcgcgacctctgaacagcaggtttccaaatcgggtg

SEQ ID NO: 84851 - DNA, 3231 bp, Glycine max
  unsure (1)..(3231): unsure at all n locations
  Clone ID: PAT_MRT3847_47635C.1
ggctcgaggtacttggttggcattatatacgaaatagcacttgctctcttccacttcttgttctgtccttatgttcttcttctagttcttctaccctcttcttcactcttgttccatcactgctttcagagcttcctatttctctttgaagaagaggggcacagacccatgaagaggctcgtaagctgtgcttttactcataatattaagcactgctctggaaggcaatggagaagatgatcatgaaccgtgtaaagaaaaagtgttggatcctaggcctcacagcgtgtcaatcttagagtttggggcagttggagatggaaaaacactgaacacagttgcattccaaaatgcagttttttatgccaagtcatttgctgacaaaggtggggctaaactatatgttccatctggcaagtggctcactggaagttttaaccttaccagccacctcactctctttcttgaaagaggcgcaaccatcatcgcatcacaggattatgcacactggactgcaatggatcccctaccctcctatggtcgaggtattgatgttcctgttgggagataccgcagtttgatttatggacagaacttaagtgatgtggtgattacaggtgataatggaattattgatgggcagggttctgtttggtgggacctaatcagtactcattccttaaattatagccgaccacataatagagacatggatggttctgataatatcataatctcaaatttgacatttttaaactctcctactgctctggaacatcccgtagaagacgagtacaagtggttcatgtttgaagcactgacttcttggatgcaactggtctcatttataagtatcttcttagcacaatgtggccagttggagatggaaaaacaatgaaaaaattcagattccaaccaagagtcctttcacaagaggtataggtccagattcttcggaccatgtttgaagtgacatctggaaagttagcacctgtcatgatgcaactgtcctgacgagtggctgggatgaataaggagtgccctacggcaatccaaccctcaaacgtccacatcaggggtgtttatctacaattgtcatcttgtgctggcctagtggttggtagcgagatgtatgtaggcatatctgatataattgcagagcagctccatattaccaactcaacttttggcattgaactgaagacaactaggggtagaggtggctacatgaaaaacattttcatttctgacgcaaaattggaaaatatttacttgggtatcagcatgacgggaagttctggctcccatccagatgacaagtatgatcctaatgcagttccggatgttggtaatgttacttttgagaatgtgattggtgcaaatattgctattgctgggaatttttcaggaatagttgattcgcctttcactcctatctgtctttcaaacgtgactttttctaccagttccgagtcatctccttcatggttttgttctaacgtaatgggaatctccaaggaggtgtttcctgagccatgtcctgatctgcagaacacgtattcaaacttttcctcttgcttttcttccctacatccgtcatctagttttgtctcaagcgcatgagatagccatctctaaggatctagtcattcctttgattcaacctgtacatgagacacaaaattcatattccatcaggaacttcattacaattttccaataaaaggaaattcttgatgtaaagatgttctttctcttcaacatttcaatgaaccttcctcttgtctgtgcatgaaaagtccgtctctgaatagtatattttatgtacagcctcaatttgttcattcatgtactagaaaattttgatgttggtgtacagcccaagatattgtccgcggcctaccatgcggacgcgtgggcgcgaccttttcttccagttctgagtcatcatctccttcatggttttgttctgacataatgggaatctccgaggaagtgtttcctgagccatgtcctgatctgcagaacacgtattcaaacttttcctcttgcttttcttccctacatccgtcgtctagttatgtctcaagcgcatgagatcgccatctctaagaatctagtcatttctttgattcaacctgtacatgagacacaaaattcatattccatcaggaacttcattacaattttccaataaaaggaaattcttgatgtaaagatgttctttctcttcaacatttcaatgaaccttcctcttgtctgtgcatgaaaagtccgtctctgaatagtatattttatgtacagcctcaatttcttcattcatgtaaaagaaatttttgatgttggtgtacagcctaaagacattatttgctttcaacttaccatgtataatatggagtgctacattgatttgttgtccatggctgggctttgtgagggtgtgtggtgtggtgtgcagcttttgacaaaattacggttttctttgcatagttctctttatgttatacctctggattaatctagactatctttgctcgttgtttcttgacattacattttgttttttggattgataaaatttagaggaaggggatggtgccccaatacaagataaggaaagcctttgggcttaaagtgtgcttaattgggtttgaatcgttttgttgtcatgacatgacaagtactaccaatctttaactaattaaggtaggagccatgggagtgctgcatggtctaaagttgaaagattgctgtcctaatgtcggggtagtgttttggattcatctcaagcattttgtaattgctagacagagctacatggtgacagtggtaaaggctatttccttgtcaccactaagtccatcaatggtagttaattgtaccactcttacccatcttgggaacctataacaactcgtgtcaactttcttatgaaagtaccgggattggatcgagcggaaggagttagtcttttacagcgtggtgaaccaaggtttgaaaccctattgaaaggggtttatatttagtgtttgatggtgctcaaagaggatttggagactgggaaacaaaaaaactttcttatggaagtagcactaaactggcatatgacatgcaaaacatggtgatcattatcatcaaatctacgggtgacactttccatcaattagtgtaatggtacctgaattatacaaacaacttttaatttgtaagggnaaaaaaaaaaaaagattt

SEQ ID NO: 84852 - DNA, 476 bp, Glycine max
  Clone ID: PAT_MRT3847_47636C.1
ggccgtcctttttttttttttttcctttttttcgggcccaccctaaatattatatttaagcagcaatacgaaatacaccatgcgcccaaaaccaattcatttacaagcccggatgcataaaaggagctagccgtcatatttacaacttccccataacgcaaaactggaggaaaaatgtgagcaacctggccctctcgggacacatggctaagacgcgcttggccaaagaaactggcccatattcatcatcacatcacgttcatgttatgagtaggcgctctagcaaccatgttgagagactaagcccgtccccggggcctatgaggccacagggagcccaaagccctcaggcgaaggaaaaattcccccaaagcaagcaagcatcgaaccgcctgagggatgggtagaatccgagacattagctccaaggctactcgcggaaaatggtcctcctgcatcacaaagcctagcaaatc

SEQ ID NO: 84853 - DNA, 254 bp, Glycine max
  Clone ID: PAT_MRT3847_47637C.1
tttgttttttttttttggtaaactcaaggatattttgaggaaacccaaaaatgttaacgatgtactacatacttcctcagttgaaagaatagaagaaggaaggggaaaaaaaaaaaaaaaacaaaagaaaaaaaagcgggctttataaatggtgcactttttgtaaccctagtttataaaatcgtatccttttgatggtgacacctacatttaaactgctggacttcgtgctttaaagtaaggattggtaaaac

SEQ ID NO: 84854 - DNA, 390 bp, Glycine max
  Clone ID: PAT_MRT3847_47638C.1
agatctggaggagcaagaacctgatcttgccaatctcgtaaatgtgttacgagatgtgtttcttcacactgcatatgaagcccgacgattgataaggaatgctctatctagtatcgaatgactgcataacgctgatgtgcctaccatagcacacattgtatagctccattccctgcaaatgatgatgactgctcctgggacaaaagaaaatatggacctactgttgctcctctcaagaggctgaagacaagggcatcaagacatattacaaactatactgtttttgatgataagcttgtgttggctaacacacaagaattctttgatggaaattttacagaggatccttggttaccaattaacgtgaatcgcctatatcctatcaaacac

SEQ ID NO: 84855 - DNA, 377 bp, Glycine max
  Clone ID: PAT_MRT3847_47639C.1
cacgcgcacgcgagctcgggatccggattcagcgagagatgcgtattttcactttcacacacgaagctcgccaatttagaaggaaagcgctctctcgcattgaatggcaaccaaaagctgttgtacctaccccatcacatattgcccagatccatatgcatccattgatgttatacgctcttgagtcagatgataatattgttctactcacccccatggatctgttgttggaacaaccagcgtgtttagctcattacaaacatattaaaattggaaaagccccaccttgtagcgcacacacaactattcttttacggaatttttagtgaccaactttgtttaccgcttatctctaaaaatcgatcattcgttcaatt

SEQ ID NO: 84856 - DNA, 153 bp, Glycine max
  Clone ID: PAT_MRT3847_4763C.1
gactttgaatacaacctctagatggcataagtgttcatgccatgtggaactatataccaatatatcatcaaaaaacactaacacatatttccttaaagcatgttggaaaatatggttcatcaaacactgaaaagaagtcggagcattggttaa

SEQ ID NO: 84857 - DNA, 566 bp, Glycine max
  Clone ID: PAT_MRT3847_47640C.1
ctttttttttgtttttttttttttttttttttttttttttttttttttttttttttttttttttttttttttttttttttttttttttttttttttggggccccgaaaaaaaaaaaccttgggttaaaaggggaaggggggtttccctaacaaacttagggggggggagcccctcagggggggggaaaaaaaaagaaaaaattaaaagggatttttaaagggggttaaggggcccttttaagaaaaactttaatttggaaaaaggggaaaaaaaaaaaaaaaagggggggttttaaaattaagggacctaaaaaaaaaaaaaattccaagggggggggaaccttaaaaggggttgggggggaaaaaaaaaaaaaaaaaatcccccggcgcccttggggaccccccggggaaaagagaaacgaaaccaaggttaagttaacaaccgggatttggtaaaaccatccctaaaaaagggggggggggttaaggggaaggcggaaatccccaacggttggggtttgtcgtcgagtcgacccttttttagggggaaagagggatttttttgg

SEQ ID NO: 84858 - DNA, 1179 bp, Glycine max
  Clone ID: PAT_MRT3847_47641C.1
catccacgtagctggggtttgagtaagctcttgaaagagtttgtgactgttggtggaaagttgttgcgtggtatgcttgtttgctacgactatggtccttaaatttcatctgcataaatgtcttgtcctcttcatttgctgtgttttggctcaatcaaatttactatttttattgatgttggtggaaagttgttgcgtgaatctttaggaggaattagtgatgacactttgctaaattcacttgggctagtgaatgatttgagttcagttgatatcgtcaacttttcccttccgaatttgccagcacctccaaatgccttcaggggaattcgcaggaagagttcttcattaagacgatggcttgctatttgcactgatgatttaattgggaatgggaagtaccaaacaacttctaatcttctgcgcaagtatcttggagattttctaattgcttcatatttaaatgttgttgaagagtctggttatgatgagagacatgcaaaggaaattgagagagctgttcttttgcaaactcttgattgtttctggagagatcatcttgtaaacatgaataggctcagctctgcggtgaacattaggagctttggccatagaaatcctcttgaagagtataaaattgatggttgtcgattttttatctcaatgctgagtgcaactagaaggttaactgtagaagcactgttgcggtattggacatctccaatggaatcccaagaactatttttatcatgaaagtagataattcaagaaaattctgcaagacctatttttttttgcacaatgttattggtgtttcaactagtcaattggtttgcatggtgtagatataaaccaaaaagctacatggctttaggggctcaggcaaagcgatcaaaggagctgctcctatttattttaatgtttttgcttagattaaaatgaggtttacatggtgatgatgtccgttgtcgaaaaggtttgcaagggctatgcctaacacgatggaaaaatgtgccaaggagtttaggactgcaacggaagtcagagtggatcatattttttttcatgcttgactgtaattttattgtcttgttagtttgtacaaaaaatacagaatgtaaaatatgaaggatgtataatatattattatatataatgaattgcatttacaattttgtt

SEQ ID NO: 84859 - DNA, 483 bp, Glycine max
  Clone ID: PAT_MRT3847_47642C.1
atcttccatttgaattacttgtcccaatggatcctcttttagtcttgttctgacttgggtgacaacatcttggagtctattatagcattctcaatgaggtgctacctactctgactttctcccaagtacatttgttcctcttcttttcctgtttcaggaatcacgcactacaatctgatctctcctactgcttttttgctcttgttggaatcctgcccaacattcagtgcctctatctcttgcatgttctaaaatatctaagtacatgatttgatgcttcatttttcagatgaaacttctcgtagtagtgcaaatgaaacttcaggacctggtggacctgccatcatcacagacataacagtgaacaaatcagtggaattttcatatgaggaactggcaaccgccacggataacttcagtttggctaataaaataggtcaaggtggttttgggtcagtctattatgcagaactgaggggagag

SEQ ID NO: 84860 - DNA, 228 bp, Glycine max
  Clone ID: PAT_MRT3847_47643C.1
atacggtcgacctttttttttttcttgcacaatttttacagaccaggagaagcggggccgttccttcgagggggaaagtacagaatggaatcattcacaacgccccctatacaaggaaagtccgcaagcaacacagaaacgattcataaatgactcccacgctgggtaaacacggcacaacgaacaaataagtattacaagaatccgtaaagttgctcacaaggggaa

SEQ ID NO: 84861 - DNA, 506 bp, Glycine max
  Clone ID: PAT_MRT3847_47644C.1
ggttttacatacaatctgaaatttataaacttcgttttttctttcttatattcctttttgttatatcaataatttttttaattatttgcccaaattttttttgtatattgttaggatgagatggtctaggtttagtttcctatcttttagtaatctattaccaaaattttaaatctttttattctggtcttattactgccctaacaaatcgtgttggtgatgtatttatcctgtgttcaatttccttatttttttgttatggaagttttaattatataaattttttttttaattataatatatatttctgttatatattcttgatcgcttctttaaccaaaagtgctcaaattgcttgttccgcttggttacccacagctatggctgctcccactccggtttctacattagtccattcttcgactgtagtcactgcacgtgtctatatcataatcctgttgacttatgatctacttcaggacatcaaatatttatcaatgatgatg

SEQ ID NO: 84862 - DNA, 108 bp, Glycine max
  Clone ID: PAT_MRT3847_47645C.1
acccacgcatccaaccgctcgtaagtaacgatgcaaggggactacacacgggggctagagaagtgatgagggtctttgagtgccgcagtggacgccctcgacgatgca

SEQ ID NO: 84863 - DNA, 448 bp, Glycine max
  Clone ID: PAT_MRT3847_47646C.1
actaccaattcaaaccttgttgtcgccccaagccttttcaatcgagttatgcgtgaccgcaaccggagcccctactcgctgcttccatttcaacaccatgaaaccttgccttctgggcctgtgccactcttcccagcccaatctttcaatctccgccctaaggaaccgcatcaacatccactgctgccgctgcatcctaaattccgaccacacatttcttacctgggattggaaccgatggctccgacatttctgccaaatcgaacacgcctgaaacttcgcctctgttctcaaggttcaactcgatgatgctatcgataatgacgattacgaagaagcggctaatgttgatagacggctctaatggaaacaacgtccacggacactgatgctgaagttacggatcagttgaagagtgctatgtacgatgaacgatatcatgatgcat

SEQ ID NO: 84864 - DNA, 247 bp, Glycine max
  unsure (1)..(247): unsure at all n locations
  Clone ID: PAT_MRT3847_47647C.1
gggggggctggtcanactatgcctcactgcccagacaggggagtgcccccacctcgcatgctgtctgatttcggacatggcttatacagaaaactgtgaatggaccacctatgtctaaacataactgtcacaggaagtgttcaccatagccagcatggatcctgctatagacgtggcacctacctttgacattgctgcactatatgatgaatatatcatcatgacgagactctatccaaatgatgac

SEQ ID NO: 84865 - DNA, 1118 bp, Glycine max
  Clone ID: PAT_MRT3847_47648C.1
ggctcgagggaagagttcaaagcttagtgacctgagctcttattgtgttactttgataagaagttgataagttcttatagttctgtgcaatcactactcataattttaattaaatgtagtcttgtagcagctatacttttgctagacttattaatagcctattttgcttattccttcaataatagtgtgctttcattgagattagtgcttgcatttaactgtcaggctcactctttttaggttggagatgtagagctttttggtatagatcttctactgttttccaaaactttaccttctgattcatgttgctttctacctatgtctccaaattcttagtgatttcaaatttgttttctctaagattttagaagcaggaaaaaccatactttgtcagcaatgttgctgaaattttctgactattctcagttgtaatgtttcattactgatgcaggagggacaaattttgtgagtgctatgtctgcaatattctccttgtttttaattatatctactaccttataattaactatcaggtgcgaacactggatcccaaagctgtcaatgatgaaaattgcactggaaatactagtgatggtggcaacaacacatggtgaagtgcaggctcggagaagaacaagatgaaagtgaggaggaagctaagagagccacggttttgtttccaaacaagaaatgatgtagatgtgcttgatgattgttacaaatgtaagaagtatggttagaaagttgtgaagaatagccttcacccaagcaaaatgaaaagaaagatgactccaatgaagtgccaagtagcaattatacagggattgagacagaaaaggatttttaggttgacacaataagccttagtgaggactcatctatacaataatgtatactagtggaactactggtgaaatgacattatgcaactttggttattcatagtaagtgttgtttttgtaaatagtttctttagtaaaggttaaatgatgacatacttgcaatgaactatcatggatcctttgtaagatattagggaactaagtttgttcccatatgaatttgaccacttacaaattcatataaaattaatattattttatattcgttaaaaa

SEQ ID NO: 84866 - DNA, 172 bp, Glycine max
  Clone ID: PAT_MRT3847_47649C.1
tgtggtttattttttttttgttattttgggggaaggcagagtgatctatgggaattaatggagcgccacaggtactagaggggcaaatggacagattagacttctgctgcgcttgaaaggaagcaaagatatctgatgtgagaggactatttatcagggacaaggccaaagt

SEQ ID NO: 84867 - DNA, 884 bp, Glycine max
  Clone ID: PAT_MRT3847_4764C.1
ctaaagttatggttttgctaacacaactgcacactcactctcaaaaggttttcatccaatttctttccctctcttttcattgttgtgcactttcacttgtggagctgcaccacctcaagtgtttttcgaacacaagtacatttcattttcaaaaggtttaatttcagtctttcgtttccctctctttacattggtgtgcactttcacttgtggagcgaggtgcaccaacagcagtggaaattgccttgttcttgagatgtctggtgttcttctttgggtgagttctggacccaaagagaacatcaactccttggtgagtttttcatgcaggagtggtggtggtggtgaaagaacacaaaagaggttttctggaatcagttttgcaagtggtgcctctgctttttcaagtgcagtggcagctgagactttaagatcctcagaggagagggtctatgaagtggtgctgaagcaagcagctctggtaaaagaaaacaaaaggggtacaaagatagctctagatttggacaaagacgttgaaggtgatttcaccaatgtggatctgttgaatgcagcttatgatcggtgtggtgaagtctgtgctgagtatgccaagacattttacttaggcacacaattgatgactgcagagcgccgaaaagctatttgggcaatttatgtgtggtgcagaagaactgatgagctagtggatggcccaaatgcttcgcacatcacccccggggccttggacaggtgggagcaacgactgagtgatgtttttgaaggtcgaccctatgatatgtatgatgctgccctctcacatactgtctcaaagtacccagttgatatttcagccattcaaggacatgatcgaaagggatgaggat

SEQ ID NO: 84868 - DNA, 131 bp, Glycine max
  Clone ID: PAT_MRT3847_47650C.1
gtcgaatgggacgccgccctgtaagcggcggcatttaagcgccggccgggtgtgggtggttaccccgcaagcgtggacccgctacaccttgcccagccgccctaagcggcccggctccttttcgcctttct

SEQ ID NO: 84869 - DNA, 442 bp, Glycine max
  Clone ID: PAT_MRT3847_47651C.1
aaaaaccaaaggaaaatcgataaaaccttcccctttacaaattttatttttctcaaactacaagaggaataaattttctacaacatccttccagttctggcgttataatctttcccgttttcccgtttttaacaacttaacgatcttgtcagggtaaaaaatggaaaattgctcaaagcccttccagggagtgttcaaaatgcaaggggggtgaataaaaaagggggggtggaaaaaaacctgaaaaaaaagagggtaggggaaaaaattcaataaatcctaaaaaattaaaattcctaactgattaattaccccaaaaataataaaaaaaaagagggcaaaaaaaaaaaaattgttcccctggggatgtttcaacaaaaacgtggttaaacaaattatcctcaccttttgccaaggaaaacagttttgcttcctttttttg

SEQ ID NO: 84870 - DNA, 257 bp, Glycine max
  Clone ID: PAT_MRT3847_47652C.1
gctgttacaaaacctgatatcattgatgaagtaatgtggcaaggagtgcatgaaaggattttcctttatgaagcagatgctgaggaatttattgttaataataccaatgtatacgatatgatctttgttgatgcttatgatggtgaagatatatttccacataagttatgggacccagattcaccattccttaaagccctgagtaatcaacttcatcccaaacatggcactgttgtggtgaacctgcatctgactct

SEQ ID NO: 84871 - DNA, 238 bp, Glycine max
  unsure (1)..(238): unsure at all n locations
  Clone ID: PAT_MRT3847_47653C.1
atccatccaatcctaccattctaaacttctcctnnacttctcctatttatcactcccaatattttttcttnnaaaccaatcttactcctccaaccnatccaaatcctacccattttataataacctcacctctttcccnaataaatcctttctctcaatatccctcttttaatcacaacaattcctcatctttctctccaaatccatctccttccacaaactttctttcttctatacc

SEQ ID NO: 84872 - DNA, 520 bp, Glycine max
  unsure (1)..(520): unsure at all n locations
  Clone ID: PAT_MRT3847_47654C.1
ggagggttatttataaggcacacatctcatcgttttctctgtgcctggccatccggtttcccagatctgctccttcctcaccccacagaagtcagttgaagagcatgggtcgtggagttagcagtggtggtggtcaaagttccttgggttatctttttggcagtggagaggcccctgccgcaaaaccggcaacaaacaatgccccagcccaacctgaagtgcaggctgtaaataatgcgcctccttcaaaagcatctcctcctactaaaacaatagaccctaacaaggctgctggtataaacagtcattctactgatggccagaacaccggcaacttcatcacggaccgaccctcaaccaaggtccatgctgcccctggtggtggttcttctctgangtatctcttttggtggacctggagaggggaaatgataccttgcttgcaaagcttttgctcgatgaacgatttattttggaaattcaggtcgtggaaacataatagaagatatggtgtattgta

SEQ ID NO: 84873 - DNA, 1020 bp, Glycine max
  unsure (1)..(1020): unsure at all n locations
  Clone ID: PAT_MRT3847_47655C.1
cccacgcgtccgtacggctgcgagaagacgacagaaggggattgctaaacaaaagaagcatgtctaatcatcatcacgtagttcagacctcgccaccgaaactattcggtttcccactaacagagcaggaggaattgaattcagatgcagaaagaaaatacgaggttggagaggacagaaaattcagatgccactactgcaaacgagtattcggaaactctcaggccttagggggccaccaaaacgcccacaagaaagagcgtcagagggcgaggcgtttccaaatccacactcatagacgctccattgcagcaccatcttctgcttctgttctcaactcacatgcaataataagatcagtaccttcagttacagttactacgctaccctcctccatttacttacgaggaggccctcctactacttcttctcttctacccatcttccatcctcgtcaacccaataacactaagcacttcccatcacggcccattttgattccttcttccacctaccaccgtactaattgcactccatcctttccttttcagctttatgcctcaccctctgtactgcaatctgctcctaacgtccgtgatttttctgctgagagcagggaagttgatgtccatctcaaattataactcttagattgattattattaatttttttagtgctagtttctagctgcttcagccttctttgctccaaatagatcttatctttttttctcgccccttcagattatgcgagcttgctttaccaattattggctcgaatagttaaacagtactttccagagtaggagctagacactgtagtgtggtaaatcccccagtccttatatttcattttactactatatagccaaaacttgcatgtaaatcagatcagcaaaaaaaaaaaaaaaatgaaacattatcattccctgctnaaaaaaaaaaaaaaaaaaaaaaaaaaaaaaaaaaaaaaaaaaaaaaaaaaaaaaaaaaaaaaaaaaaaaaaaaaaaaaaaaaaaa

SEQ ID NO: 84874 - DNA, 715 bp, Glycine max
  Clone ID: PAT_MRT3847_47656C.1
gcacgagatttataaggcacacattcatcttttctgtgcctggccattccgtttcccagatctgctccttccgttccccctcagaaatcagttgaagagcatgggtcgtggagttagcagtggtggtggtcaaagttcattgggttatctttttggcagtggagaggcccctgccccaaaaccagcaacaaataatgccccagcccaacctgaagtgcaggctgtaaataatgtgcctcctccaaaagcatctcctcctactaaaacaatagaccctaacaaggctgctggtatcaacagtcattctactgatggccagaacaccggcaacttcatcacggaccgaccctcaaccaaggtccatgctgcccctggtggtggttcttccctaggttatctctttggtgaacctggggaggggaaatgataccttgtttgcaaagcttttgctcgatgatgaatgatttattttgaaattcaggtcgtggaaacataatggaagatatggtgtattataggttatggttgctacgataagtgagtcaagagtgctatattttggatgtgctaaacatctattacagaactgtgtttgacagaaacaaatatctctattaagtattaagtgcacatttgcttccaattttgtatttcttgttttcctagttattctattaatttgttatcctgcaaaaaaaaaaaaaaaaaaaaagag

SEQ ID NO: 84875 - DNA, 1014 bp, Glycine max
  unsure (1)..(1014): unsure at all n locations
  Clone ID: PAT_MRT3847_47657C.1
tacggctgcgagaagacgacagaagggggagtgtgagggttatttataaggcacacatctcatcgttttctctgtgcctggccatccggtttcccagatctgctccttcctcaccccacaggctgatactagactgtaactttcagaagtcagttgaagagcatgggtcgtggagttagcagtggtggtggtcaaagttccttgggttatctttttggcagtggagaggcccctgccgcaaaaccggcaacaaacaatgccccagcccaacctgaagtgcaggctgtaaataatgcgcctccttcaaaagcatctcctcctactaaaacaatagaccctaacaaggctgctggtataaacagtcattctactgatggccagaacaccggcaacttcatcacggaccgaccctcaaccaaggtccatgctgcccctggtggtggttcttctctgagttatctctttggtggacctggagaggggaaatgataccttgcttgcaaagcttttgctcgatgaacgatttattttggaaattcaggtcgtggaaacataatagaagatatggtgtattgtaggttatggttgcttggataattgggtcaagagtgctatattttggatgtgctaaacatctattacagaactttgtttgacagaaactaaaatttctattaagtgctcatttgcttaaactttgtaaaaaaaaaaaaaaaaaaaaaaaaaaaaaaaaaaaaaaaaaaaaaaaaaaaaaaaaaaaaaaaaaaaaaaaaaaaaaaaaaaaaaaaaaaaaaaaaaaattnggggggggccccgcgcccccaattcccccttaaggaggtttaataccccgccttccttgcccgngttttaacacggggggaatgggaaaaccctgggggttcccaaattaattggcttggcaaaaaatccccttttccccggtgggggaaaaagaaaaagggcccgcccggatcccctttccaaacattggcccaccttaatggggaaagg

SEQ ID NO: 84876 - DNA, 892 bp, Glycine max
  unsure (1)..(892): unsure at all n locations
  Clone ID: PAT_MRT3847_47658C.1
tctcgagccgaatcggctcgagcggctcgagcgagaagacgacagaagggggatcttctagtcacaaaacaaaagcataaagcttctcactacctaattcctctaagttctatatctgataagcttgtgtactaggccacaaatctcccatggagaaaacggttcacatagcagtagttcctggtcctggctccagccacttagtcccaattcttcaattctcaaagagacttgttcatctccatcaaaactttcatgtcacatgcataattccctcagtagggcctccctcatgtgcctcaaaatccatccttgaaactcttccaccaaatataacctctatttttcttcaaccagtgaaacctgaaaacctaccacaagaggttgctatagaagcccaaattcagttcacagtgaccttctctctgccatctatacatcaaaccctcaaggccttaacttcaaggactcactttgtggccttggtggctgattcttttgcctttgaggcattagattttgctaaagaacccaacatgttgtcatatatttacttccctacatcagcaacaacactctcttggtacttgtatgtgcccaaattggacaaggaaacatcatgtgagtatagagattttcctgagccaattcaaataccaggttgtgtaccaattcacggcagggatctcaataaccaagctcaagatcgatcgagtcaagcttacaaactcttcgtccaacgcgctcagcgactccctttggttgatgggattttcatgaataccttcttggaaatggaaacaagtcctataagaacattgaaaagagagggaaagaggtcccctcttgtgtatgatgtntggacaattgtcccaggtggtgatgatgatgc

SEQ ID NO: 84877 - DNA, 439 bp, Glycine max
  Clone ID: PAT_MRT3847_47659C.1
aaaataacgtgattttcttatattcagaacttcaaagtttgaactctaaagggtttgagagtaaagtacaagggaaaatgggtttagaaacatagaagatgaacgcctctccccgttgcagtataaacaatgaaactttataaaaaaaagtgacagctatagtgaccacaggaaacaagaagcatatgtaaatagaccttacaaagcactccttttaagtgctcaaaacggtgagaggacattgaactcaactcgagtgtaaacatcattaggttctattcctctcagaagtcgtcagcaccattggattgtgcccccaccctttacagtatcagtatgcaaatatatatatataaaaaaaaaaacatattcagactgtgtatgcctgctgaattgtgtctacatcaatccccttcaatttcaaaactgattctacgtg

SEQ ID NO: 84878 - DNA, 441 bp, Glycine max
  unsure (1)..(441): unsure at all n locations
  Clone ID: PAT_MRT3847_4765C.1
gtttagtatttgggtccatgatgtcaaattcaaatattttttttttcaaatatatatagagtggtggcatgttagtttgaacctgtgacctcctgcccccagaaactaaccaaaccactcaccactaacccaagcacagtggcttagttcaaatggtttttaaatgcgagaattgtaaaacaatgactattcttaaatgtcttaatttccttctagtcttcctgctataattgatgttactcgaaagcagtctaatatataggtgacttggccgtanaatagctgaggaaaatttatttgatgttanttgaacttttctttggcttatttggcaatgaatctaactatcaatttgtcattaaagagattcatatattgtgtaagtgaaatagcttttaataggaaataaggttatggagtaagaaaatgtacattgtgcaa

SEQ ID NO: 84879 - DNA, 210 bp, Glycine max
  Clone ID: PAT_MRT3847_47660C.1
aacgattacggaacccacttcgacgcagacggcaacaaggcgttgccctcatccttccaatctttgacagcatcttctatctatatcggagacttgtttggtgcccttatcgcggcgtcaatcaacgatcgatggggtcgcaaaatggtcttctggattgcgtctatctgcatcctgctcggcggttgtgcgcatgttggcctttccacc

SEQ ID NO: 84880 - DNA, 182 bp, Glycine max
  Clone ID: PAT_MRT3847_47661C.1
gatagtttcttcattttggttccgtccgttggtttgctcaatcaatcacttttcaatttcttcacgttcctaacacatagaatatctatcgtatgaaccaggactgtctgaagtacacacgcgataaggtcagtcattaccagcacggcagggacggcattcattatcacgcaaggaagact

SEQ ID NO: 84881 - DNA, 774 bp, Glycine max
  Clone ID: PAT_MRT3847_47662C.1
gcactgcaaaaatctgatagtattaataaaacttcagtactagatgtactgaaatgatgtataattacagaggcatattctgcctaccccatctgcaaaaatctcataagatgagaaccttttcaaccaaaattctaagacatttcttccttaagtctagtggaccactgattaaaatgaagatggaagtctgtctccattccatttaaccaagaccaagtgtgaaagagagcttcatccatgactttttcggagcagaaaatgtggttgttgaataccagagaatttctatgcttccaaatagtcatagatagagctacccaaaggacctgccatcttttatccactgaacttctcccactccataaagagaattgcttaaagtgatctcgaggctcaatggagaagggacccactctattgacccaactcaagtttcccaccataagcacctagtttttatacatgaatacattacatgaccaaccgtttcctcttcctcatcacaaagaggacaaatagaagagggcagagtcacatgtctccttcttaagttaaccttggtaggtattctgttctagaggattctctaagagaaagcacaagctctaggtggaagtttgagattccagatgttcttgaaggcactgtcttcaatagtctgactgtcttcattcttcagaaaattatatgctgactttgtggagtaggatccatcagaattagacccccaaagaagaaggtccctgcttgaaggttggatttgaacctcac

SEQ ID NO: 84882 - DNA, 276 bp, Glycine max
  Clone ID: PAT_MRT3847_47663C.1
acgggagaagacgacagaagggaggtccctatcctgcaagtcccaggttttaatctcattgatatcatatagggtgtgattataggagaagaataggctcttacccccattatgcaacctctaaatccttggaagaacttgtcaggttaaaccatagtttactagaactacaacagaaagatgatccacacataatgaagcacacttcaagaagcatccactcataggattgttaatgaactatacacaactaaaaaactaaaagggctaagtcaa

SEQ ID NO: 84883 - DNA, 1672 bp, Glycine max
  Clone ID: PAT_MRT3847_47664C.1
gacccacgcgtccgcccacgcgtccgacggttgcgagaagaggcagaagggggtggcacgtgccacgtacacgtgaaaaagaaccctggtctttctgcccctctccaatcttccccgccaccgccgaaaacttttcttaatcagtctcacagtgaagttgatcggagccacatacattcacgcactgacgctactgtgtgaacgacgattaagatagtaattgttggatgaacttgaagggattcaatggatacagaattcaaaacaattgaggcaagcataatgtctatgcttggccaactccaatctgaggtcgagatcctacaaagaatggtgtacaagaataagaaccagcaccgacgcagctcctatttccagcgtcttttgaaggttaggagggatttaagacttctgcaatcggcaaacatggaggagcttgtatcatcatgtctccttgttatcaaaggagatagaccaaaacagaagcttcatcttttagggagcttaaaaaggagaaaatgtgatggtgataaacataattttatggagcgtctgttaggagctgcacgcttactagctgagatggttgaacctatactgaaggctgcttctgaggtatctgtgttgtttgctcaatctttttttatgggattttctgtgacaatcatggctttgcttgcacgtcttcgagttctggttcaacaaatactgcttgatgttgtttcattgttcaacatggtttcttccctctctatatcgaagcaatcaataaaaataactcataatggaattgaggtttttagagatttctaccctgttagtgatgattttgttacattagagtgtgtttggaaatcagacaagtttatattacttgagaggaagcataaaacgaatgatgaaagtcatgttgaggactctggtggaaatgtttctgtccaaacatcagatgttaattataatagtattgagtcttttcttggggatgatcagcttttccatgagagagtagaagcagatgttgttgcaaaagaagatcctaatcatatcgatgatatgaatactgatttgttgactggctcatcacaaattgatgacaaggaaactaggtatagtgatcaagacaccacaaaagccttcatcaacgaatcttcacaagaggctggtttgcctgcatcatcaaggtcttctaccaatgataaacttcaatcttgtccgaagaaggtcgcatttgtctcaatcaagaatcttacattaatgcgacacaaatcttagtctgtttggttgctcgttactaacactagatccatgtctgggctgaagccataatttataggttctgcatattatttgatgattgatgcaaaaatttggccaaaacttgaagtcacaaacgtgtgtttgaaacacggtactaatgccaagacatacaacttcatgggaaattgaaggggccaaacaaaggatgacatgggggtttcacttgttagttatttacttgtgtaaatgcaaagggtaattttaaacataacttggtatacttattgttttgatttcttagcaagtctttttagaatactctttggtacgtatgagtcatattttatatattaaaatttaaaatacaaacatttttcctaaagcggccgctatagaggatcctagcttacgt

SEQ ID NO: 84884 - DNA, 451 bp, Glycine max
  Clone ID: PAT_MRT3847_47665C.1
ggggaatagaatatcaatttattttggctaccagacctttaaaacccactgcgctggtttttttaaagtggattaaagcatcccacaattataaatgaaaaataggcctcgggtcctttgggtatataaaaacaaaagcttttttcaaaattttaaacattcttgaatccccacagggggggggtttaaaaccttaacaggtaaaaggcggaatcaatttgcttgagggacagtgcctttgtcaacatttttatgaagttttttgctaaaagttcaccatcccaaagcttttcaacgggtttaaaggccccttaggtcttgtgaaaaaaaaaagggcccttaattggactatcctgcttaatttgaaaaaacttatccatcactttttttggaatagacgcctcaaacacattaaagattcccttgattttggactcattagggctcttag

SEQ ID NO: 84885 - DNA, 578 bp, Glycine max
  Clone ID: PAT_MRT3847_47666C.1
ttcgatcatctttattttttagaatatccccacttaacatggatcagttaacactagcatttccatttttactaacacttcatctgttagtatcaggtgtagtagcaacaacatcgttcacactggttaacaaatgcgactacacagtgtggccaggcattctctcaaacgcagtattgctgcagcggcgcgtatgggtcgcccaccacttgcaagccttcgccttactcgcagattttcaagaacgcttgcccacgcgcctacagctacgcgtacgatgacaagaccagcacgtttacgtgcgcttctgctgcggcttacaccatcactttttgtccttctcctagcagtaaccccaggtattttttgctttttactttaacggtaaaaaagggtagtttcgtctttacagcgaaatatgaacgttgtgggaactgggattcacgcattttctgctctgatttgttttttcattttacgttacaacaacttttcacttcgataacgacgaaataacggcgtttttgtgtacttgtaaaggcaagaacagtaactaaaacgagaagccatttttactt

SEQ ID NO: 84886 - DNA, 430 bp, Glycine max
  Clone ID: PAT_MRT3847_47667C.1
ccggatggtgaattaaaaccggcaattttaatttatatgaataaaagggatgaaaaaaaaatggagaatgttctaaaaattaaaaacccttttttttggcaaaacaaagaaccgagggctaaacttcaacggaccggtgcgatcaagtaacattgccccttgaagagtcctcatcgcttaaaaaatgggtgtaaggagggtggatgaccacagggtaagggggatacatataaaaggcggcaggagggggcaacccgcccaaaaagggctacaatctgcccgtacctatggggggttgatgggtcaatatgggagcagacaattactggtggtgcaaaaggtgttgttgttgctgctgctgctgctgctggaaagggataccgggcattgcatccggacctgcgccttggaagaacccacccccgttgac

SEQ ID NO: 84887 - DNA, 148 bp, Glycine max
  unsure (1)..(148): unsure at all n locations
  Clone ID: PAT_MRT3847_47668C.1
aaaaagatgagtaggtattcagagtgatattgtnttcttcctctcttnctctcaganntattgctgtctccttntgataaaattntccttggtgtnttctgggtcaatctgaaacctttcaaagagacaagatagcagggaaatcana

SEQ ID NO: 84888 - DNA, 1584 bp, Glycine max
  Clone ID: PAT_MRT3847_47669C.1
ttcgttcttctttagtttttcccctctccacacggaacacttaacaatgccccttcccctttccctaccaattcagatctgatttcgatcatctttattttttagaatatccccacttaacatggatcagttaacactagcatttccatttttactaacacttcatctgttagtatcaggtgtagtagcaacaacatcgttcacactggttaacaaatgcgactacacagtgtggccaggcattctctcaaacgcaggaatcgccacgcttccaacaacaggtttcgttcttcaaaccggagagtccaaaaccgtaaccgctccaacctcttggggtggccgtttctggggccgcacactctgcacgcaagactccgccggaaaattctcttgcctcagcggcgattgcggctccggcaagctcgaatgcgccggaaacgccgccacgccgcctgctaccttagccgagttcactctcgacggcgccggaggcctcgatttcttcgacgtgagcctcgtggacggttacaacgtgccgatgctggtggctccccagggtggctccggcgataactgcacgagcactgggtgcgttggggacctgaacggcgcgtgtccttcggagcttagggttacgagcgtggatgggaaacagagcgtggcgtgtaagagcgcgtgcgaggcgttcgggtccccgcagtattgctgcagcggcgcgtatgggtcgcccaccacttgcaagccttcgccttactcgcagattttcaagaacgcttgcccacgcgcctacagctacgcgtacgatgacaagaccagcacgtttacgtgcgcttctgctgcggcttacaccatcactttttgtccttctcctagcagtaaccccagtcagaaatcgtggcaagggcaaaaccctaaatcagatagtagtggctcggcttcggcttctgcttctgggtcgccgcaacttaacaacggcacaatggtatatgtaggtagcatggatgaaagtgaattatggtccgcaggtagtacccatgggccggaatctcaaaccattgcgggctttgttagtatcaccatcgctgtttggctcttgtgccacctctactaactaggcccatgtccatgtttttgtgcctaaaaaatggtgggaccctatccaccacttgtttaatttactacgtccgcgtggcccacacaagttgcaaccatagtcactactcactcacaagcatgcacgtcattttaaaatgcattcattgatggaactccaccaccttacaatacaacacaagtgttttgtttttgtcctggacccctcaaaaagcagaatccgatgttaaaagctatggctattgtggctcattggtgaagactgaagagtgaacatccccccaaattaaacaacatactatatggaggaaaggtggtagggctattaaatgatttctttccttgtaattttcttgtttatatagtatagaattctgtgttatgggcgatgggattcatttattggttcggaataatagacaacataatgaccacaagtactagtaccattttactgccttctattttctc

SEQ ID NO: 84889 - DNA, 476 bp, Glycine max
  Clone ID: PAT_MRT3847_4766C.1
cccttcaaaacaagacaaaaataatttttttaaaaggcgggaaccttttggaaaaaaaaacagcctggccgaaaaaaaaaaaagaacccccccccccccctggggggatgggggccccaaataccccgggtataaaccccccctaaaaatcaaaccccctaatccttttttcggccccacccttttaaaaattaacccccaaaatgggtctggaccccccgggcccctttttaaaaaaaaaaaaaaaccccggcccctttttttttttcccccgggcccccccctggggtccccggcgaagcacacaaaatttcgtgggccggcttggcaaaggccctttacctccttttccaagcaaaaatggccccaatataaaggccccccacccttgggaaaaaaacccagggggggtgtcaaattcccttggcccccgggaaagaaggggtagagcccccccccaaaaaccgcccccgggg

SEQ ID NO: 84890 - DNA, 405 bp, Glycine max
  Clone ID: PAT_MRT3847_47670C.1
cgacatctcctagtatgcggccgcgcaccttttttttttcttctttcttggcacatctcagcctatgatgaagagtatcctcctcatgtactctaatggtaagccggatttccgccttgcttaatgcttttctgcaaatccgacacttggggcgttacatatccaatattcaggctttgatcaaagcgctcaatttggtgagttacatagggatagattgaggctacgcgcgaagctacaacgacattaatgcaagcaccatgtgcggggggacagaaatgcaggttaatgacaggttctctgagaccagcgcgatttgttgacaacgtaccacccacggggaggctgcggcctgaattgctatagatgcatccataacaaatgaacaattggtctggaggcgtc

SEQ ID NO: 84891 - DNA, 282 bp, Glycine max
  Clone ID: PAT_MRT3847_47671C.1
caccaatgatacgtagagagcatgaacgcacactatcaccgctatggtagacaaacatcgtactatattatactcgaaggtcctagctggagacatgaccctcgactcttattaacaacgcatccatcattgacgaaaacgaaagccaatatccgtcaagacatagaacaagcctgcacttcaacatgatccggaacagactacacgcatacgaacgcatgcggatctactgttacctaatgtggatcatatacctgggaacctgtctatactgctgataac

SEQ ID NO: 84892 - DNA, 368 bp, Glycine max
  Clone ID: PAT_MRT3847_47672C.1
cggcattcggctcgagctggacatgctttattgcacactctctatgtccaacctttaagacataatacccacctttttgggggatagtgggcattgtatcttctaattaatcctgatggcacttgccaaggagtgaatgccttgaatatggaggatggaacactacatagtgatctaaccgcttaaacatttttggtcatagggggatatgctaaagcatacttttctgcaacctcaacacatactagtactgtagatgggaatgccatggatgcacgtgctgagatccctattgtggatttgcagtttgcacaaattcaccctacccgaatatatggagcacgttgccttatcacttaaagatctct

SEQ ID NO: 84893 - DNA, 960 bp, Glycine max
  Clone ID: PAT_MRT3847_47673C.1
cccacgcgtccgtacggctgcgagaagccgagagaagggggggactacaatgggaatgttatagaattgtatgtaaaaaataaaaatggagaagaaagagaagcgggcccccacgcgtccgagaaggcctgggcttagttgataagcataactgggtgaggaagaaagaaagagagagaagaagatggcgtcgagcggagcggtaccgttttggagggcagcggggatgacatacatcacatactcaaacatatgcgcgaatctggtcaggaattgcctcaaggaaccctacaaggctgaagccatctctcgtgagaaggtccattttgctctctccaaatgggtcgacgccaagcctgaaaaacctactattcgttcagacaccccagagcagtgatccggaatagttggaagctataaatgcataaatctttgagatctggaagttcattgtcattttgaacctttctgtgatgtttaattcctttgcttctttttttttcattccatgaaatggaacatacactggattttgatttgcatgattaatcttgtaataataaaagtttaaacaaatgattttgaacttattgacaaagtggctgtgtaactttactctgcttccagttccaggtcctgaaatgagaaagctgcccaactatgttaagttgggtcataagtttatgaaataagttaaatgacaacaccccttcatagaatgaattgaagtagaaaaaattgaatatggccatgcattattactcatgaaggcaatgttttaaacatgtttggaatgatatttgaagatgcatcaacacataagcaaaattgaaagatctggctcatggaagccaggatgcctaaatgccccatggtgcattttttttttccaatgatgtaaattcgtaaggaaagtgggacatatatcatatgcaatacacctgtcaaaccgtggttccg

SEQ ID NO: 84894 - DNA, 322 bp, Glycine max
  Clone ID: PAT_MRT3847_47674C.1
actaactatccacgccatggtcattgaaccgttactgggcactgatgacgcttctctggttttctctcccaactctttctccgctgtgcccctgtgggaaaacatcatgtgctagaacaacacacgtttcccccacaacactctgctctactaggacgagattcctatcggcgcggatgcatggaaaatctccatgagcgaacaataccttctcaatgctgttgagaagacttacagcgttacttatggtgccaaagcaacctacagtatctactgttcgactcaccaaggacctgctatggtggcaaaaaaccccgtccat

SEQ ID NO: 84895 - DNA, 355 bp, Glycine max
  Clone ID: PAT_MRT3847_47675C.1
ctggcatcatttaatggcacatgcctgacctattttctggtcaaaactttggtggggtgggggaccatacccttctttggcacaaaaccccatttctgaattttggttgaattcccggctttggttctaaccctggttactttaatgaaacttaattaaacccaccccaaattttacttaacttctttggcccaattttcatttttcattctttaagggtcattcttcaatggcaccaccatgggttattaatggtttccaactgaccaggttttaagaatcttgcccacccattaatggggggccttaaggtagaagttagaaggaaaaagggagtaattcaaaacttttcttt

SEQ ID NO: 84896 - DNA, 312 bp, Glycine max
  Clone ID: PAT_MRT3847_47676C.1
caatacaataaatacttctttttaaacacattcaatcaatcgccttcttccagctaaaaggctaaaattatgcttttctttctcctttatctaccccctaagactttgctaaaacttttccaacttataaagggcttaagagaaaggctcctatgtcacccaataatgggcgcaattttattcgagactgcccccatctcaagcggggttaaataaacaaactctgcctggggaatgggattaatggtgcaaagggggtcccctgctctaaaacaagcagcttcgtaagcttttttttatttaccttcccca

SEQ ID NO: 84897 - DNA, 242 bp, Glycine max
  Clone ID: PAT_MRT3847_47677C.1
gaatttgagggcacattctcattaagcatttttagcaaccattcgaggctcaagagtctgctaattggcaatatgtgagttcgcactgacaatccgccttggatcgcaccattgcagttggagcaactaacaattacctcttgcaagtgaaacttacccacatgagtaattccaactgtcctttcggatcagagtagcttgagagatattgatttatcgggtaacaacctagttggtaaatt

SEQ ID NO: 84898 - DNA, 237 bp, Glycine max
  Clone ID: PAT_MRT3847_47678C.1
cttaaacacatagctaccatatataactataactagcagtcactaaagtaattaattgtgcttaaccaaaattttcccaaaaaaaaattctgggaaaaaaatatggaatccgatccatatcttatccctatctctctcgcgatatatatattactgcggtgattagaggaaaaagatgaaaccaagctggctctaatgcccaccccactatgaccctgattatatatgatgaatact

SEQ ID NO: 84899 - DNA, 299 bp, Glycine max
  Clone ID: PAT_MRT3847_47679C.1
aaaggggccaacaccctgcaattacatttcgtgaaaccctacacagttaaaagggaccttttttaatggattgggcaaaacctaaacccggttttaaaatcgttgaatttttttaacaacaaaaagccttcaaacttaaattattaaattatgggggttccctactttaaataaaaaaacaaagtctccacaccactggcgggaacaatacaacaatggttttgagattgcaaaaattgatttggtttttggaggaataacattaacattagcctaccaaacacgtttgtgaaaacatg

SEQ ID NO: 84900 - DNA, 1166 bp, Glycine max
  Clone ID: PAT_MRT3847_4767C.1
ggttactcttgcttgcctgagttgcaatattgtggagttgtggataatgacactcagccctcctgttgtggggcctgaattgccggctctgataaaagtttgagtgaagttaataagcatgcaactcatgcgagtaaaaaaggtcaaactggtgctggaaatttgaagacagcaaatggctcctgtctcaaacgcaaacataatttgaaagatgatttatatccaaaaaagcagccgggcttgtgggctgttgcagcagggggctctcccggtgcttcccttcggtattgccagccacgtcatcccactgggatcctgatttctcctgcctcttccaagaaaaggaagactattgatcactgtgctgctgtttcaggggtgaaagatcggagaaaaacaatttcccttgccaaagtttcaaattccataaatcaatcatttaagattggtgaacgtattctaagggttgctaatcaacttactggaccaccgtctgtgttgaagtgttctggagacaggtctcaaatggaagatggaagtgctgatggcttttcaggaaatggatctggtttcttctcccctaatcttgagaagactcagaagtcaagcttgactgttccaacagaatattcatctctagatgatttgctacatttacttcagtgggtagcacatgaacccctgggagattatagttccctgaatgttatagtgagcttcttctctgatttaggaattaataatcgtggccaatgattctggaaaagaaaattttcctacaaagaaagttggtgctaaaaggaataaacgacctgtgggtggatcacctgaaacatttgaatttgatgatctgaggggtacacattggactgacatgggcatccagagtggttctgaaaaacagcagtcacagagaagcagcagaagagactatcaacatgcccctgctgagccagaaaaaccttttatagtttatactcgtaggtcctattccaggaaacaatgttctgacagcaatcatgttgcagttcctgaaaagcattctggttgtgcagatgagaattccccagttgagcttgttttaaactttgctgagctggattctgttccctcagaaatgcgcctaaataagatttttaggcgatttggacctctaaatgagtctg

SEQ ID NO: 84901 - DNA, 390 bp, Glycine max
  Clone ID: PAT_MRT3847_47680C.1
ccctgattaagcttcttaattctgcaaggaactaccactcgatcattatcttggaagggatactcaaggcggttattaagcttcaccgatcgtcaccaatggggaaaaggtgtatttaaaagaattaactaccttaataaaaatggatgagacaatttgcgtatctgaagaagatcatcataagagtggaagtagtagcaaaccctcttctccaactcttagaagaaaacgttcatttttcgatttgaatgaagaagctgtggatggtggtggagatgatagcaccagtgatgatgatggcctcatgactagcaatggcatttcatcacaagaaggtaatttgagtagcaacaatagctctagtgaagaagggaaagagcgtgcatctac

SEQ ID NO: 84902 - DNA, 236 bp, Glycine max
  Clone ID: PAT_MRT3847_47681C.1
ccggaattcccggtcgacccacgcgtccgcttcaccttcgcctcgctgtcactaccgtcgtcttctcgtgtttccattggcggcgctccgattcgcgaccccgttctccgaaccaaataggttgttgccacctctcaaatgctcctcttcggagccggaaactgccatgcatgctccctccgaccgaactcacaagttgatctacgggggggggggggggaatttttttttttttg

SEQ ID NO: 84903 - DNA, 271 bp, Glycine max
  unsure (1)..(271): unsure at all n locations
  Clone ID: PAT_MRT3847_47682C.1
gccgtaaaaaccccccgcgcgcgctcctcttttttgccgcctcggctgggggggggttccgtgctgctgtatcgttgcgctttcgcggttcccgtcccggcttcctctttggactggggcaccccgcctcctcccacttagggctggcgggaattggatttctcacttttgttctttatccttgtgctcttcgcgcggggtttcgnctggcagaactttcgcaggaaaagttgcccgccgaggcaatgtgggaaacgattctacaatgccc

SEQ ID NO: 84904 - DNA, 869 bp, Glycine max
  unsure (1)..(869): unsure at all n locations
  Clone ID: PAT_MRT3847_47683C.1
cactagagaatcgcccaatggagtcattatcattgcgaaattattctcttcagatgtaaatcacaatcactgctgtggattgtggtgcagtcagtggcatggagaagaagtaatcgtaacaagaaatggcagatgcctcgatactgtactgcccctaaattttagggaataaaaaagcttttattttcttttattgttttggttcagaaaagcatgaggccattaggggaagaatagagaaaaggctgataggtcactgaagaagcatcttgtaaaatagattattctatgctactcctagtgaaattattctatcctagtaattgaaaattcagcaaagtaacctaaaaagcatgtaggatagcatattataagttgtagatcatgtcntaaatctttcaacaacagttagtaaataggcatcatgatttccttagcagatgtctatcatgtagtcactgccactgttccattatatgtcaccatgtttctagcctacatctctgtgaaatggtggaagctcttcacaccggaacaatgttcaggcataaacaaatttgtggccaatttctcagtcccaattttgtcattccaagtcatttcttccaataacatttacaagatgagcctcaaactcgtatatgccgacgttgttcagaaattgcttgcatttttagtcttcacggcaatcattaggatcaaggacagggggggtttgaagtggatcataactggtctctcactatcaacacttcccaacactttgatcctaggaatcccactcatgaaggctatgtatagggatgaagcttctcttctcctaccccagattatcttccttcagagcatggtgtggtacaatttgttat

SEQ ID NO: 84905 - DNA, 168 bp, Glycine max
  Clone ID: PAT_MRT3847_47684C.1
aaggattcttattattcacaagctatcttggacaggaatgatcaataattccagctcagaattaatataaaagaagagtagaaatagtggctcagtcaacaatgaactgaaactggaaagactctagatcggtaaagtagaacagacaaacaatagccataaaagccc

SEQ ID NO: 84906 - DNA, 223 bp, Glycine max
  Clone ID: PAT_MRT3847_47685C.1
ctgcacccaaatcttctagtacttgagtaataagcatcaggcattggaagaggttttaaatttgcttttttgaggaaaagaactgggggtggattttggcatcgtagcatatcgattaaagaataatcaggacatcagatacattttaatacatagctggggccttatgttgtagatgaagcttgctgtttttagaaagttcctgggtttcacattcatttct

SEQ ID NO: 84907 - DNA, 184 bp, Glycine max
  Clone ID: PAT_MRT3847_47686C.1
cccactcgtacgtccactcgtacgaccacgcgttcggggatctggatccataacatggtgagagagaagaataaaatttttgcttcataatccaaatttgaaagagagagaaaaattaaatggcaaaattacaacactctattttcataatcctataagagccttttattattttaatgtaacc

SEQ ID NO: 84908 - DNA, 369 bp, Glycine max
  Clone ID: PAT_MRT3847_47687C.1
aagcattactttttttagtttgttcaataaaattgggcgggaaaacataattaaatccaattggacctgataaccagaaccggtgaaaaccgtactaatagtagacatgaatattatatactaatacgttgaacatgaccacgtaaaaaggcggatcctacttagagagtatactatcacagcttggccatttgtccattctgcaatcgctcggacggcaggccaggccctgtgttattcgacacactttgctttggttgaacctcagagagcttgcgagaaactgtgatacttatgcggcctaagcttgaaaccattgcgatccacgggcatatcaggccagtcttccaatctaggaatgtgcgacac

SEQ ID NO: 84909 - DNA, 379 bp, Glycine max
  Clone ID: PAT_MRT3847_47688C.1
atttttgtttttctaaagcactcatacacacatcctccgtagccacgacaacaatggcttcaaagaatggagtgaaaggtggagttgaaacactaataacgaaggttagcgagtaggttacgaaccctttgttcgataagcgtacgatgcaatttggtaacggaggcgcgctgcctccgaagagggacccgacacgcttcatgaagtggtcgtagaacgtccaaattcaacgaaagaagtgcaatctctagtaaaggcttaaggatacgccgtctctaaaccagttcaccaaaaccatcgacaaaaatcttgtaacaaaatttttataaaaagattgctttaagtacaagccggatgactaggctgttaataatgagag

SEQ ID NO: 84910 - DNA, 249 bp, Glycine max
  unsure (1)..(249): unsure at all n locations
  Clone ID: PAT_MRT3847_47689C.1
ttcaacccananttttttttttttacacaacacattttgtttcttacattatttaacggggcacataattcacgattttattcagcttctacatacaaacttttgctactaacacattttaatgactgtgcataataataataataataaaggggagccaaagggttcccattggccaaaatcaattttttattaactccaagcgcctgaaaaggttttccagggtggatttattttccttttgggttt

SEQ ID NO: 84911 - DNA, 423 bp, Glycine max
  Clone ID: PAT_MRT3847_4768C.1
ctctaatgacaattacgttctggacaacattatgacccctaggtcaacgcgtaggcaaccaaaacaacggtgttggtttcacctttaattccatcttcctcacctacctctatttcctcaccgctactatttcctaggccttctgccacaattccaactctgacccattcaatgacgacgtatgcgccgatcattgctacgagctgaacaatgagttccccttcaacaacgccaatacagaaattgatacgctgcaaatccttgtcaatacctcgcgattaacgacaaattactcttcatgctatgactcaaaaatctttctagcctgcgagccttgatattcaaaaatcggatactactggatagcttggagtcaacaagttttcttagatgctcacgatttaatattgcttccaaataaaa

SEQ ID NO: 84912 - DNA, 486 bp, Glycine max
  Clone ID: PAT_MRT3847_47690C.1
agacgtggttagggtaaagatggtgtgtgttagcagcagcggaatcagaaatgagagtggaaaggaaggggcaataaacaataaaggaaagaaaacccatcatgatatgattgataataaagcaaagcaagaagcagtggcaccaacttttccccattcaaccaaaacgtgctttttttttttaataataagtttgtttgaaaatgatttcatttcatggcttttaccctgtctttaatcttttggataaaggagcctcaaaaacatacacacactgcacaggtcaaaatgctcctcagtctcactcattcatcaccaccacacagtccatggccgccaacaaaaacaacgtcaaaccgacaacaacctcaataacaacgaccagaccaaaccaaacatttccctcttctcttctcttctctctcaaaccatgttactagtgcctttcatttccctcctcttctcaacgcattatatatttattca

SEQ ID NO: 84913 - DNA, 1237 bp, Glycine max
  Clone ID: PAT_MRT3847_47691C.1
taagcctcggaaattcggcctcgagggaaaaggccggtggaaaggtctgaaaatagcatgtacacgcccatccctcagagtggctctccattcccagccctcagtccaagacccaggcctacacatatggcgtgtggagaagctgaagccggtgcccatagcacgagagaaccatggcatctttttttctggggattcctacctagtgcttcacaatggcccggaagaggcctcccatctgcacctgtggataggccagcagtcatcgcgcgatgagcagggggcctgccgctgtgctagctgtgcacctcaacaccctgctgggggagcggcctgtgcagcaccgtgaggttcaagggaacgagtccgacctcttcatgagctacttcccacaaggcctcaagtatccgggagggtggcgtggagtcggcgttccaaaagacaacctcgggcacacccccagcagccatcaagaaactctcccaggttaaggggaaaaaagaccatccctgccaaccgaagggctctgagctgggacagcttcaacactggggactgcttcatcctggacctgggtcagaacatctttgcctggtgtggtggcaagtccaacatcctggagcgcaacaaggcgagagacctggccctggccatccgggacagcgagcggcaggggaaggcccaggtggagatcatcactgacggagaggagccagccgagatgatccaggttgtgggccccaagcctgctctgaaggagggcaaccctgaggaggacattacagcggaccagaccaacgcccaggctgcagccctgtataaggtctctgatgcccctggacagatgaatctgaccaaggtggctgactccagcccgtttgcctctgaactgctaattccagatgactgctttgttctggacaacgggctatgtggcaaaatctacatctggaaggggagaaaagccaatgagaaggagcggcaggcggccctccaagtggctgatggcttcatctctcgaatgagatattccccaaacactcaggtggagattctgccccagggccgagagagtcccatcttcaagcagttcttcaaggactggaagtgagggtgggtgtccccatccctgctctcctgcccccaccacctgcctgcttgtttcccctctggctgctgagtcagaactgaggggccctctggatgctcaataaaggacacgttctgttcccaaaaa

SEQ ID NO: 84914 - DNA, 642 bp, Glycine max
  Clone ID: PAT_MRT3847_47692C.1
cccacgcgtccgcccacgcgtccgaatacaacgaagggatgagccattcgtgaccgtgaattcgtgctccatattttacccacaactcaaagacctaccacgaaatccagcatcatccatcattacccacccattaaccaatcgaattaagactcaacagaaagcaccacccttttctatgtgggagcagtgaagggcgttcaacgccggcggcggagccataacctggttccccggccacatggccgccgctacacgtgccatccgccaccgcctcaaactcgctgacctcgtcatcgaagttcgcgacgctcgcattcccctctcctccgccaacgccgacctccagccacacctctccgctaaacgacgcgtcgtcgcactcaataaaaaagacctcgccaaccctaacatcatgcataaatggacgcattattttgagacgtgtaatcagaattgcgttgcgatcaacgcgcacagcaagagttccgtgaagaagcttctggaggtggtggagttcaagttgaaggaagtgatttgcaaggagccgacgctgcttgtgatggtggttggtgttcccaacgttggcaagtctgcgctgattaactctattcatcaaattgccaagtctcgctttcctgg

SEQ ID NO: 84915 - DNA, 1693 bp, Glycine max
  Clone ID: PAT_MRT3847_47693C.1
cccacgcgtccgcccacgcgtccgaatacaacgaatggatgagccattcgtgaccgtgaattcgggctccatattttacccacaactcaaagacctaccacgaaatccagcatcatccatcattacccacccattaaccaatcgaattaagactcaacagaaagcaccacccttttctatgtgggagcagtgaagcccgaccacgcctccgggtacggctgcgagaagaccacagaagggggcgaaggtgactgactgagagagaagagaaaaacaatgtcagggctgaaggaattgctgaagaaagggttaggtttaggcgacatggcgttcaacgccggcggcggagccataacctggttccccggccacatggccgccgctacacgtgccatccgccaccgcctcaaactcgctgacctcgtcatcgaagttcgcgacgctcgcattcccctctcctccgccaacgccgacctccagccacacctctccgccaaacgacgcgtcgtcgcactcaataaaaaagacctcgccaaccctaacatcatgcataaatggacgcattattttgagaggtgtaatcagaattgcgttgcgataaacgcgcacagcatgagttccgtgaagaagcttctggaggtggtggagttcaagttgaaggaagtgatttgcaaggagccgacgctgcttgtgatggtggtcggtgttcccaacgttggcaagtctgctttgattaactccattcatcaaattgcaaagtctcggtttcctgtgcaggagaagatgaagcgtgctgctgtgggtccgctacctggtgttactcaagacattgctggattcaagatagcacataaaccaagcatatatgtcctagataccccaggggttctggttccaagtatctcagacatagagacagggttaaaactggctctggcagagtctgtcaaagattcagtagtaggtgaggaacgtattgctcaatacttattggcagttttggatacccgggggactccacttcactggaatcacctaaataacaggagaatagatgggattgaatatgaagctgaggaaaatcatgaatatagtctgaaaaatcttaagccaaagagaagaaatctgccaaatagatctgatttggtctatgttgaggatcttgtaatgcaagttcagcgtgcactctattcaagtctatcagaattcaatgggaacgtagaagatgagagtgacctggagagccttattgacctgcaatttagtgcactacagaaggcattgaagatacctcacaaggcttcagaagcgcggttaatggtatccaagaagttccttactctattcaggaccggtaagcttggacctttcattctagatgatgtcccggatgtcaagcctgtgtcataaggtagattgaatcatggtttttccccctcctttttcttgtgtattagatctcctacctttcctcctttcccatttgtgcaatatgtatttcaatccaaattttgctgtaacttgtaaatatcgatgaatttaagttagaaagagaaatttgaacttcctgaggatgcgggtgatttgcaagcatttcagttctagagtcttttacctaaacatttaagcatatcaacatttagtccaaaaaaaaaaaaaaaaaaaaaaaaaaaaaagcggccgctctagagga

SEQ ID NO: 84916 - DNA, 157 bp, Glycine max
  Clone ID: PAT_MRT3847_47694C.1
atgggacctgtttaactttaattcggggtgggtaaccctccaaaataactgacctcattttcataaaccttctaaccactagtatcatagggcaaaatcctaacgatttccatcacaataaattgcccctgaagtatacaacttttgagaagaccaa

SEQ ID NO: 84917 - DNA, 1834 bp, Glycine max
  Clone ID: PAT_MRT3847_47695C.1
ggctcgaggaattcctcgcatgaagctctaactcaaagttttcagttggctttttccttaaggaacatttctctcaatgaaaatgtaaagctgcaaccatcacgccgcagatctctctttacactggcaacatccatgattatcttcgcatccaaggcctacaacatcctctctctaatttctattgctaaaacgacattgacagatagaacagttgatccattcctgcaactggttaatgatagcaagttacaagcggttactgatacagataagcagccaagtaaagtttatggatcaaaagaggatgatgaagatgctttaaagtcactttcagcaataaagttaactgagagccagtctaaagaatcatttgctaccatgatagtgcagagtctgggaaaatcgtctaatgaatcatccatcttaagagaacggctgctgaatgatttctcacctgatgatgcctgtcctttgggagcccagttatctgccgagacaacaggaaatatgtaccagtctggactaaaagaagataaacttcctgatatggttgatatttcattatttactattgacgatgacattccaccttgtggtttggagagccaagctaattctgattcaatgcaacagccctcacaaaatctaagcctgctgagtgttgatgacattttgggttcagtttcggagacaacacatcaagtaggacggatttctatttcaacaccgtttgacatgccttacaaggaaatggctctccattgtgaggccctcctcgtgggaaagcagcagaagatgtccactttcatgggtacccttccaatgcaaggatattcatttaggattcctgctcctgaatactaccagcaaaaggacgagtcctcaaattccagcgttcaacagactttatcttcgagtggaaatccgtttttggattcaaacttcgactcgaattcacacaacacattgcctgacactgctccaaggctttgtgcaacagcataccagcatcaggctgccttctttcaactgccagcatcacgcccgtatgataatttcttgaaagcagccggatgttgattcatggcagaaaagatggtgattctcatagttgagcttcttgataaaactttcctcacattagttgatatagaagatgctcggaatagttgcactagctgctttcttgaccatgaatttatggttggatcagtgtctttttaggggcaacaattatcgatcagcctgttcactgaattatatttcttcattgatttgcttcctgcaaggaggcgtatcttttattggcatccttgcaaatttttcagagctgtttttatgtgcataggtcatgcaaatgtgtacgtcacattttttcttttttctttccttccttccttcattgttctttaatttcccattccattattggggtgtgagaattttgtaaagacaaattcttttaggcggagattccaatctgcaaatcgatcaaatcaaaccacatggaaggattgctatgaccttgaacttgatcattccatgaatcagttttgctcctgaaaggaagtgttgagaggatgttatggtttagtagagctctcttgctctggtttacgttccctgttagagcatgcagaacttgcatacaccgccgggatagtccaatccattaaaatattgaaattcagcacaagggatccatgttgttgggaacttgaatcatagtaatcatgtaaaagaaatgcaaagcattttcttgtgtttatagctatctttaaaaactgtcgtgttactacaataaaaaaataaataaaaaatattgtgtttt

SEQ ID NO: 84918 - DNA, 578 bp, Glycine max
  Clone ID: PAT_MRT3847_47696C.1
gcacgagctggtgttttactttaaacatgtttaaggaccgccccattaattaatgacacgtattaatttcaaaatccaaatagggatgaataatgatgtatacaagtgctactagctagtaatagctgatgaaatgttactttctagtccattgtgtttcttttgctcattcaccctctctttgcatgttttgcggcgcaattctgccttctcatatacaagaaaattgagtatatatgatccttagtttacatctccttatcacttcagctagattataacatgtccataatttacttctattcactttttttttcgtatagggttaaatatacaaaaaaaccaaagcttgaaatatactctcttttttatgattaatccttacacgcttgacatctgatgatagacattttactttagttcttagataagcatcatggcctggtagactctattgtctcaagctacaagtcgactacaacctctttctatatgattaaataacttaataatttcaggcaaataattgggttgacttagatcacctactacatgttgggcacgtatttattagtata

SEQ ID NO: 84919 - DNA, 239 bp, Glycine max
  Clone ID: PAT_MRT3847_47697C.1
taaattggcaaacatattcacaatcccgccaacatagcaacaacttcacccaggagcacaacaacacgcaggacatgtacctgaattattatcgacaacaactcctcgatggccatttggggtaattactgcattcgcctttttaaaaattcccctttttgggtaaaaaacgacacaccccaaggggccaaacattacaaagaagcagggcgaatacttaattttttcagcccggaaac

SEQ ID NO: 84920 - DNA, 952 bp, Glycine max
  Clone ID: PAT_MRT3847_47698C.1
aagcccttctaaaacgccttactctgtatcttctttcatcatccaaaaaaaaccattcacacaaagaaaacctttgggtttcccaagatgtcatcatcggaactctcttctttctttctcctgcccctatcagccatactcagtttcgatgctttgctcggagttatgtttctagtggccgtgttcggctactggctggttcccggtggtcttgcttgggctttgtccaaattcaagcctgcgattcccgggccttgcggttacccggtggtgggcctggtttgggctttcatagggcctcttactcacagggtccttgcaaagttggctgaaaccttcgatgcaaagcccctgatggcattctcggtagggtttactcgctttatcatctcttctcaccccgacactgccaaagagatcttgaacagttctgcttttgcggatcgtcctgttaaggaatccgcttatgagcttctctttcaccgcgcaatggggttcgcaccctacggtgagtactggaggaatctgaggaggatttcagcgactcacatgttctctccgaagagaattgcggcccaaggagtgttccgggcccgggttggggcccaaatggtgagagaaatcgtgggcctgatggggaagaatgatgtcgtggaggtgagaaaggtgttgcattttggatcgttgaataacgtgatgaagagtgtgtttgggaggagctatgtgtttggtgaggggggtgatgggtgtgagcttgaggagttggtgagtgaggggtatgatttgcttgggctgtttaactggagtgaccactttcctctcttgggttggttggattttcaaggagtgaggaagaggtgcaggagtctggtggatagagtgaatgtttttgtttgggaaaatcattatggagcatagagtgaagagggatgctgaaagtgaggataataag

SEQ ID NO: 84921 - DNA, 503 bp, Glycine max
  Clone ID: PAT_MRT3847_47699C.1
gcgatctatacaagttttaagccacatttgatcatgcccaagtaataggagaaacataatttgtggcctctgttcttgtgggaactcaagatccttcgttttgggatgctgctgttccctcgcctctcccatggccgtggccttcttgttcccttggcgtacgtctcagtgttggcttcctggtgacttctctgcatgctgggtgcctctcgcctgatgctggtacccttgatggcctgggacaggtttggcgggattggcattctgcctctgcctgtctccactgtcgttctcattagtatgacctcgtgttccctgggggggccggaactcgacgcctctcttggtggcaggctcctgcttatgctccactcgcacattcgttatgccaccatacttgtcactggccttctgcacgatctgcctcatgattctcatgatgctgcccccttcttgtgcgttccttctcattacgccctgcataaacattgccttgctgatcc

SEQ ID NO: 84922 - DNA, 507 bp, Glycine max
  unsure (1)..(507): unsure at all n locations
  Clone ID: PAT_MRT3847_4769C.1
aattcggctcgagcttgctattgtttgatgcttcaagcgtaaacttgtgaagcatgatttgatgacgcataagacaatttttaatatttgtatttatttgcatgtaatcaaaataattaggaatcatgatttgcattaagacacaaatgtcttttggcttaacacaactcttcttatattaattggcttcatgaaaaagtaatcattgtctctaaacgacattcattatgcatcttagtcatcgtttgaaactaggtgtttgttggagcatttaatgtaacatttaatgtttgttaactttcggtcactacaagctgataaaacaatctgcttatctttcttggagagaattccaaatctaatcttagaggtcaaatcgtcttttgttccgtgaaacacacactcttagtcttaaatgatttacaaattaacgtttgtctactatggtcttatacaacanatgtagatgcaacacacacacacacttagtcttaaatgctttacaaa

SEQ ID NO: 84923 - DNA, 577 bp, Glycine max
  Clone ID: PAT_MRT3847_476C.1
gggggggggttttttttttttttttttttttttttttttttttttttaatttttttttcttttagttattttcttattttttatttatttttttatttattaaaacctgcaaggccaaatccaaaactaaacaaaaaattttcaaataaaggggggggggggggacttattttttaacattcaaatgaattcactaacaaaggggtgacaaaaggagggacaagccaaaaaaattgaccccccctataattaaatggataaacagaatttgacaaaagaataatccgcaggatccaccggggtggacatcaagtatgacaccagggcggacataaagcatgaagaatttgaagcatacgttaaatctttcaactcaaaacaaaatggaaaacaatgctaaatcgatgtaaaagtagatgtaaatttagggcatccatctaacacaaacccaatacctttttcaaaccccaattccactacatttttaccaaattcaagctgccttccaatcttaggacttattcaaaatataggcaaaacccttatgcttaacgcaaagctgccttaaaaaacccca

SEQ ID NO: 84924 - DNA, 343 bp, Glycine max
  unsure (1)..(343): unsure at all n locations
  Clone ID: PAT_MRT3847_47700C.1
cggacgcctgtgccgcttcgttactcttttggtccttccctgccgacccaataacaaccgggcctcttcaaacctgcgatggctgatcacgtcccaagcttgctgctcactgccaacaacactcccagctacaaatggatttctcctctggggggggtggcgcagacctggagatgttctaaccaaagtatcaatngggaaacactctctggagggaatcttttggccacgggaagagcgcagagcctgaggggactggacacagggatgcgatctagatccttaaccgacgcaggataaagaacatgggcttgggatagtaagcgagaacagactgcaaaat

SEQ ID NO: 84925 - DNA, 329 bp, Glycine max
  unsure (1)..(329): unsure at all n locations
  Clone ID: PAT_MRT3847_47701C.1
gcttgtaaggaaaaaggtggccataagttctgccggtgtttttagtgtactatgaaggactactccgtactcgactttgcagaaaacatgtgaaacttgttcttctaagaaatgagcttggataggaaggaagtggaaaaaattgaccagttgttcttgtggttgccttttctctgtcagtaagagacagcatttgccattgtgtgtttggttgattttaagtattgtcaagaaggggcatctcaatgttttctgcttgtnaaaaaaaaaaaaaaaaaaaaaaaaaaaaaaaaaaaaaaaaaaaaaaaaaaaaaaaaaaaaaaaaaaaa

SEQ ID NO: 84926 - DNA, 255 bp, Glycine max
  Clone ID: PAT_MRT3847_47702C.1
ttttggggagaaaaatggcgaagctgatgtgtatattgtatgtgtcatatccctatgttggtagcaacaggactaattaatgtagcaaatcacttggaagatcatgtatctagtttctcaactggcttatctgagtgtggataaccattatcacgccttatgagtaggacaacgagtactgtttgtgatgcctgtccatggtttaagaaatccgtccttacacaacttgtgtgctttgttattcaattctcatca

SEQ ID NO: 84927 - DNA, 503 bp, Glycine max
  Clone ID: PAT_MRT3847_47703C.1
agcttatacagggtttgtctctctcaaacgacaccgtggacgcgggtttcgttttcggacttggtcacaggcacaggcacaaggcgttcctcttcccgagcaagtcacagtcacagacccagacaactctgtgagtggggattccatacggcagagatttctgaatttctatgcttcccgtggtcacaaggttcttcccagtgcttctcttgtcccagatgatcccactgttctactcaccatcgcagggatgcttcaattcaagcctatcttcctaggcaagattccaagacaagtaccttgtgctgctactgctcaaaggtgcatccgtactaatgatatccacaatgttggcctaactgccagacatcagacattctttgaaatgcttggaaacttcagctttggtcattacttcaaaaaacaagctattctttgggcatgggagctttccaccgcagagtttggtttgccaccagacagactgtggattagtgtttatg

SEQ ID NO: 84928 - DNA, 518 bp, Glycine max
  Clone ID: PAT_MRT3847_47704C.1
agtttccgtcatcactgtatgacgtcctccttctttgggggtgggggggcgggagagtgccaagacagccagccaccaacgaacagcaacaagcgcgtacagacggcgtacagacggctgacatagctaacagagcgtagcagtgcccctagctaatataactaaatggcccctggaaaggaggtacatacctgaaatggcgtgccgttagagttgttaaaaggaagggaacatgatggacaattgaggggagtgatacggtgatatgccgcgaacctacatcgacaagaaatgtcaagaattagattaagtggcgtgggcatggcgtgtgataagtggggggtgtggtgtaggaggtagagggggttttaggttggtggcccggccagggacaaattggccacggatgctacagcaacgataccaggtatatttcaataagacgccggggaggttgtagccagcggggcggggcgtgccgcttaatttaagatatgggcacagtaattaagagtggt

SEQ ID NO: 84929 - DNA, 269 bp, Glycine max
  Clone ID: PAT_MRT3847_47705C.1
tatcaatattcgctaaattaataaaatgattttcatcaaaatcattttattaatttacccaatattgataatcatacataattaacaaaaccacttaaaaaaagtgggggaaaattaataaaatgattttgctcaaagaaacaatgagtgaatatgaaactgacaaataaggaataaaaaaagtaaaaagaggaagtacactgtgaaagcttgcggctattgcactgaggttcctgtgggtccattttgtcaccatgctaagctttgtg

SEQ ID NO: 84930 - DNA, 168 bp, Glycine max
  Clone ID: PAT_MRT3847_47706C.1
accgctgcgacaagaccacacaaacggtattttcaatgctattgaatttctttcatttactcttccctctgcgccttaattaaaaggagcagatctctttttccatctttcttccttctatattatcattccatataatacctcatatctttcaaaacttattgcttt

SEQ ID NO: 84931 - DNA, 287 bp, Glycine max
  Clone ID: PAT_MRT3847_47707C.1
aaaaaaaaaaaaaaaaaaaattgcgtacaaaaaaaaacaaacaaaaaaaaaaaaaaaagggggcgcttcatacacacagaaaaatcccctcgcaaaaaaaaaagggcgggccgtcctctttatacgacccacccttcccttccctgccatgctacggcattaacttttcttttgcgtaacctaaattcaattcccttgcctttattaaccaacatctggaataaaaaagccctgtccctacccaatttaattgcctgacaacccattcccctcttttcagctggaat

SEQ ID NO: 84932 - DNA, 355 bp, Glycine max
  Clone ID: PAT_MRT3847_47708C.1
aacacgcgtacgcctacgcgaaggtttaggcagggtctagagagaggaaaacgttggccggagaacacgaccggaaagcgaatatatgctgattccagaaatgtctagcatcaagtcctcacaccaaagataggataccagcgcccacatactattaacgcacaacccaaagttcaggaccaatgctactggacctctgacctcaaaacggtgcacttgcaggtaccaacatcatggacagcaccaatcgccaaggaagaagaatgtgaacaagctagcaaagcaggcaataatggcactagctgctgtagtgcaaacactggcgacagctcatgatgcatcatccgccaagact

SEQ ID NO: 84933 - DNA, 255 bp, Glycine max
  Clone ID: PAT_MRT3847_47709C.1
gatcaacaactacaacttgagacacatgactcacttaatctgcttaattctgatccttgcagctctcattctatcccctcaaattcttgcaaactatgagaatcccccactgtacaagcctaccactgataaaccaccactttataagcccccagttgacaatcctactgtctacaaaccttcagctgaaaaccccccaatctataatcctccaatctagaacccaccagcttacaatcccccagttgataaacc

SEQ ID NO: 84934 - DNA, 444 bp, Glycine max
  Clone ID: PAT_MRT3847_4770C.1
cggctcgagcccaagtgaagaaaaaagggttgccttggacacttctcaccttgttttctggatttgctatgtgacgtagtttagggacaagggaagggcagaagagattgagggaaagggagactgaaagtgggagaaataaaggaatggaggacgactaaaatgagaagaaagaaacagaaaatttcaaaattatttcaagcatcaattcaagtctaaatccaaaacttactaaatagccatccttgaattgagttatgttaatttgaaagaagctacgtggcatcaagaatgggttcaggtgattggtttaagacaataattagctcaagaaaatcaaaagaaggaagatcaaagaaattaaagactaagatttatacaagaaaaaagtccaatggtttagcaaatggaatgaaaagcgaaaatctagagtcagatggggta

SEQ ID NO: 84935 - DNA, 490 bp, Glycine max
  Clone ID: PAT_MRT3847_47710C.1
gtttgaggtaattttaattgctaattgtgccggtccaacaatgggcgactccaaagccaacagcaaatccgtcgctgcggcacaaacgattccgaactcagtcaaatttatgttcggcggaattgcgggaatgggtgccactctgttcgtgcagccgttggacctggtcaagaatcggatgcaactgtcgggaatgcagggcacccgcgagttttcctcctccttccacgccctgcgcacaatcgtcgcccgcgagggaccgctggcgctttacaacggcctctccgctgggttggctcgtcaggccacgtacaccaccactcggctgggcatttacacgtggttgctcgagcagttcagcaacaacaacagcgcaacagtcaccgtagccacggtgcagcaaacggcgccgacgtcttttgcgcttaaggcacttttggggatgagctgccgaggcatcgcttggtggtcggaatacgatggattggcg

SEQ ID NO: 84936 - DNA, 433 bp, Glycine max
  Clone ID: PAT_MRT3847_47711C.1
caagaatcttgctgaatgctggttttaatgagattgagcctgacctcaatgaagatgctagggatcaatatgccactaatggcgatgacgctgatgattttgtgtatatatggaatatatgatgaccaccacacttaccatgaaggagaacagaaaggaacattttggggctcaatcgcagaagagatggcagcagcagaaccccccactggattccaggggattatttcatggctcttcccaccagccattgctcttggggtgtacttcaatgttccggtaattctaaaagttaattggaattaatgaagaagaactcaatcttcaaatcacttggctactttgtttacatataaagttcttagtttacttggtggaaagaagagccataaattctaacaactttcttgttttcagggggagtacttataca

SEQ ID NO: 84937 - DNA, 397 bp, Glycine max
  Clone ID: PAT_MRT3847_47712C.1
aaagaccatacaaaatatataaaaacatatataacagactcatgaatggaattttcacatgttgacactccataaactaaacattatcacatcatgacactccaaaaactaaacattctcttgtacatcattaaccttacaagatgcaacacttgcgctcaaactggggggagagcagggcctttatcaacatcaaaacgcgttacacaggggtagaatatggaaccagcgtatatacgatattccaattttaagagaacataggaaggctaattcgggatcataataatgcgcaattggctatccttttaaatccacgactagaaatcctccattcttcaagatagataaactccctacctactttgtaaacattgccaaagccctactaatgaaa

SEQ ID NO: 84938 - DNA, 466 bp, Glycine max
  Clone ID: PAT_MRT3847_47713C.1
gttctcctaaccagacaaagaaaaagaagtaatggcgaggggcaaaaggatgtatttaactttctgaatttaccagaatgaagaagactgcctgagaattagttcaacaaatcttaattctcaaattcttcattcgttgaagcatgcacaagcatctgcaggctacaatcaagtcaacaacttttcaagtttcagataattggccaaagtttaatgcaaccatgagccaaatctctggcgttgctcacacagttgcatccttagcaactaaatatgttacaaatgtagcataaacattaatattcaattacattgagaggcttaaggaaagtcaggttcattttccacttggatggagtaaaactttgtaacattgttcttttattgcttcgatgtgcaataaattggagaaagtctgtaaagttttattaaaaaaaaaaaaaaaaaaaaaaaaaaaaaaaaaaaa

SEQ ID NO: 84939 - DNA, 479 bp, Glycine max
  Clone ID: PAT_MRT3847_47714C.1
ctcgagccgattcggctcgaggaaaaggatcagctcagggaggagatgaaagctggaaaagttttccagggaatgcgggaggcacttatcaaatttcctccaacatataaatttgagaggcacaaaccaggtttaggagggtatgattctggagagaaaaagcgaattccggcctggtgtgacagaataatataccgcgatactcggtcagctccagtttctgagtgcaatttagactgccctgttgtgtcatcaattttacagtatgatgcttgcatggatgtgactgatagtgatcacaaacctgtccggtgtaaattcaatgtaaaaatttctcatgttgatagatcaataggaagaaaggagtttgggggtattatgacatcaaatgaaaaaatcagatccagtcttgaagaattaagttaagttccagaagccacagtcagcccaaacagtttaatccttcaaaatctggacac

SEQ ID NO: 84940 - DNA, 140 bp, Glycine max
  Clone ID: PAT_MRT3847_47715C.1
accattcctgaagagtgcgtcgaaaacacatgggaacccatatatggctaccaatatagctcagactccaacgcatttagccaacaagcttactattatcccagagaccttggactccataccaaggacacatgcctggg

SEQ ID NO: 84941 - DNA, 214 bp, Glycine max
  Clone ID: PAT_MRT3847_47716C.1
agtgggaagggtgatcatgaggaatacctgcaccaagcaagtctgctcaggaaacccatggagcgggccaaaccgagtcatgtacttgggcccattctctggcgagcccccgtcctacctaacctgtgagttgccaggcggacttacgggtgggacactgctgggctatgtcgcaacgcaggaaaccttggcaagataccgggaattcggaatt

SEQ ID NO: 84942 - DNA, 524 bp, Glycine max
  Clone ID: PAT_MRT3847_47717C.1
gcaagtacttggagacaaatatatatatatattcaaaaaaataattaaatctaatatttattattttcaatttcgtaaaatatagtgttgaataaataatcaaatattataaattgtataatggttaaaatgatagtgtaataaaaaaaaatgtgtatgaagaatgcgtgaaaaaaaataaatatataataaaatcatgttctatttaaaaagggtaataagggaattgattaaatatttcaagtagtatttcaaaaactattagaaactactaaaaacactaaaaattactaaaaaaaaatttgtttatcaaaagtcaaacaaattcttcagtagtgaaaaaaagttaaaacctaactgaaataacttgtcgaatatagaaaaaaattaagaaataaaagaaaaaatacattaagactagttggaagttaaaaatttaacttattaaattataagtatttaataaaattattgaagtaagagaaaaatgtataatgataaaaaaataataaaatcatgattta

SEQ ID NO: 84943 - DNA, 446 bp, Glycine max
  Clone ID: PAT_MRT3847_47718C.1
tttccacacagctattcctcttaagcttgctactgagattccacactgtctaccttaggtcttccgagttctatcttctctctgcaagatggctaatgaaaacgctcacatcaacatgtgtgatggcttggtcatgtgaaccctgaggaggctaccaccattatcgagctgaagaagcctgtcgcggagaattaagctccagtatatgtcatatgagggcatgcactgacgaactcaaagggaaaccaaaaaatgatgttagcatgataatctgtcaaccctaatgtatcagtgccatgcatcagggtgtagaacaagctaactttgctagggttccgtgctttgagatgagagtcttgatgatcttcaccattctgatgtattgcttgccctgagaggcaatgcatgcttcttatcaactggcgaaaagaaaaatggtcatgggg

SEQ ID NO: 84944 - DNA, 295 bp, Glycine max
  Clone ID: PAT_MRT3847_47719C.1
cacacctacgtaagctggtagtgcggatcgagctttccatggcactcaaactccataggctggcttgcacaccgcctggaagaataactcatagggggactcaagtgagcataaatacttctactacctaacaggaaaatgaaaatgcttcttgtgttggttgctacaattatagtggcatcaaagtaacatgggtgataattccagaatggcccttttcaaaagaaaactgggtgcggccgggataacagaaatgaaggggtgtatggcacctggagggttctctttggaacaa

SEQ ID NO: 84945 - DNA, 435 bp, Glycine max
  Clone ID: PAT_MRT3847_4771C.1
cgctcgcgggtttatctactgagggcgaacctgaggcttactggagatcataccagaccctagatgtccaacaccagatgtctgtctgcatcgcgatagggagtattcaggggtacgaacacacagaccctgtaaagacgttgccgaagtcaacgaccaggccaggaacctgaggacgggactactccacactggtgcacgacgactgctgctgggaagaccttattgagggacctggctggcggagcaagagtccatgggggcgcctgaaagaggctccagggactggaggtgcctgcaataagtatgcattgcagctacgcggatcgcaggatggagacatcacagtgtagccccaagagggcattagcgctggagtcatatgaattctgctgagtactaggtaagagtactccaccattatgttatatatat

SEQ ID NO: 84946 - DNA, 1660 bp, Glycine max
  Clone ID: PAT_MRT3847_47720C.1
cggacgcgtgggcggacgcgtgggttgtgtttgtgagtaatttgcaaacacaccaaaaccatctctctctctctctctctctccaattcagacccctagttctgttggatcttgcatatagtaaccctttattgattcgcaaagatgaaggttacagtggtttctcggagtggaagagaagtggttaaaggtggcattgagctcagtgattctccaagaagtaaccatcaagtcctcgctcgacacttctctctctccctctatctctgcaatgcactctccctatttcttacggaactagcatatagtaaccctttattgattcgcaaagatgaaggtcacagtggtttctcggagtggaagagaagtggttaaaggtggcattgagctcagtgattctgctactatagcagatctgcaggaggcaattcataagcgaaccaagaagtacccatcaaggcagcgcttgacacttccagtccaacctggatcaaaggcatatgccttgttctactgtgagataacattatgccaaacgaattctggaaacattttttgtgcatcgcttcagccatgcaacctcacccctttccaatgtgtttcgtaactgtgcttattactggacctttggctcctatattgcttattatgtgaaccaaccctttatatacccctgtaaatgacctccaaatgaagattgggtttgcaattggaatactttgtcaaatttcaaatttctattgccatattattctgaagaatcttcgtagtcctggtggtgaaggtggataccaaatcccaaggggctttctcttcaatattgttacctgtgcaaattatacaactgagatctatcagtggttgggattcaacattgcaacacaaactgttgcaggctatattttccttgtggttgctacttttatcatgaccaattgggctttagccaagcacaggcgtttaaagaagttatttgatggaaaggaagggagacctaggtatcctcgtcgatgggtaacattgcccccattcctgtagaagccaaagcaactgatgaagtcaccactctgctcacaggattctgagatttaaattgtagcataatggaattttcgtgatctctttttataagatatggatttgtcttgcaatgcttttgactatgaagttgattgctaaatcattgaatcagtgttttgcagaatatttgtaatcatttcaagattgtagttctgaggattcttgtttcttcaaaatcttcaccttgtttctgtttaatttatgctggctatttccttttactgtctccaatgtttcattaatcattttagaaaattaaagttcaattttgtagctcatacactatgcaatgatgaggcttcaagagtcaaaatcactgatcttcctccacatttaggaacaaattttcgatgctcatgtagtacatacctctttggtagtttttatccttatttagtttctcatttccctaatacggtttacagtcttagaaaaaatatctaagagcaaaacatatactccacctgaacttttttgtaaaggaataacttgatcgtgctttttcctaaactgtctggttttagattttgaggatttcaaagttttgtggctaacttgattttcagactccatcatgttg

SEQ ID NO: 84947 - DNA, 368 bp, Glycine max
  Clone ID: PAT_MRT3847_47721C.1
gaagctcacatttcctttgtgtttgtgagtaatttgcaaacacaccaaaaccatctctctctctctctctctctccaattcagatgaaggtcacagtggtttctcggagtggaagagaagtggttaaaggtggcattgagctcagtgattctgctactatagcagatctgcaggaggcaattcataagcgaaccaagaagtacccatcaaggcagcgcttgacacttccagtccaacctggattaaaggaaaggcctgttgtccttaattacaaaaagagtctgaaagactatacaagtggaaattcagaaaccttaactgttgtattcaaggattttgggccacaagtttcttaccggacacttttc

SEQ ID NO: 84948 - DNA, 475 bp, Glycine max
  Clone ID: PAT_MRT3847_47722C.1
ggctcgagggatctcttccatttcttttcggatcctggaatccaataggatcggggatttgaatgctactaaccttgttgacctagaattagcacctgccgacccctttgtattatctcaactactacgtgggcttacaatgcagattagcatgaacaaccacctccgtgcgagttatgcatccaacgtaccttgctctgctgtgaggaagccctcatcttctgggtttgactaatcctctgatgtggcaactgcaacgacgaattccaggtccatcgcttttgcaaagcgaagccaaagcttcatcgatcgtggagctgctgcaacccaccaccatattggtgggatgtctgactcctccaacccttcctgcttggtgtactctacccttccatggtggagttcccctaccggaaaaccggattgtggacgcaatggacatgaactgaacaagctgatgaaatctgctatcttt

SEQ ID NO: 84949 - DNA, 465 bp, Glycine max
  unsure (1)..(465): unsure at all n locations
  Clone ID: PAT_MRT3847_47723C.1
nctacggctgcgagaagacgacagaaggggggctttctcttcaatattgttacctgtgcaaattatacaactgagatctatcagtggttgggattcaacattgcaacacaaactgttgcaggctatattttccttgtggttgctacttttatcatgaccaattgggctttagccaagcacaggcgtttaaagaaggtatgcctccttaccttttatatttcagctcactaatacggtttacagtcttagaaaaaatatctaagagcaaaacatatactccacctgaactttcttgtaaaggaataacttgatcgtgctttttcctaaactgtctggttttagattttgaggatttcaaagttttgtggctaacttgattttcagactccatcatgttgtttcttctccttctatgttaaagttaaacatgtggattcaaaaattctgctccttgtaagatataat

SEQ ID NO: 84950 - DNA, 1195 bp, Glycine max
  Clone ID: PAT_MRT3847_47724C.1
gggcgaggggtgcgcttcaagttgaagttctcaatcttccacgcgtccggaaccggctcgagcggctcgagctcgagccgattcggaaagcgcaagaagaaagcacagcctctactacatcatcacattcacatttcagtaccttttctttctgagtctcagtttcaacaattgaagaagaaaatggttgacaatgaatcgctctcagaattcctcgcatctgcggtcgacgcggctcagaaagctggcgagattattcgaaaaggcttctaccagaccaaaaacgtcgaacacaaaggacaggttgatttggtcacagaaactgataaagcatgtgaagaactcatatttaataatctcaaacagctttatcccactcacaagttcatcggggaagaaaccacggctgcctatggcaccacagaacttacagatgaacccacgtggatagttgatcccctggatggaactactaactttgtgcatgggttcccctttgtttgtgtctccattggtctcacaattggaaaaactcctacgattggtgttgtatacaatccaataattaatgagctttttactggaatccgtggaaaaggtgcctttttgaatgggaatcccataaaagtatcgtctcaaactgaactaatcagctcccttcttgcaactgaggccggaacaaaacgtgaccaagaaacagtagatgcctctaccaataggattaaaagcttgcttttcaaggtgagatctcttcgaatgagtggctcctgcgctctgaatctttgtggaattgcatgtggaaggctggatgtattctttgaacttggctttggtggtccttgggatgtagcaggtggtgctgtcattgttagagaagctggaggtgttgtatttgatccgtccggtgcagattttgacataacatctcagcgagtagcagcttcaaactctttcttaaaagatgcacttgttgatactctgcgccaaatggtttgagaaatttactattaatcaatggcaagaacttatcatataagccatctttgttagttcgtttagcttttgcccaaataatttttaagattctcagtttttggtaaaagttgcctgataaaaatgttttagaatttttaacttcttctgtggattcagagtattcaataataaatcactttaaatcctttcaaaaaaaaaa

SEQ ID NO: 84951 - DNA, 178 bp, Glycine max
  Clone ID: PAT_MRT3847_47725C.1
ttgttggacacaactaacttataaagtgttacgggtccctcttataatgatgagcgccatcttttttgctctttatcttaaatgtaccttcactcatcatattcctacctttcatcctattcttatttcttgctctataattaatgtaacctttatgaaaattccttcacttattatt

SEQ ID NO: 84952 - DNA, 506 bp, Glycine max
  unsure (1)..(506): unsure at all n locations
  Clone ID: PAT_MRT3847_47726C.1
ggtgatcnnggtntntctancatttattgttagaagtgctaacgcatctactatntcnttttannntangtcagctattaaaatttctattatttgttttatntggaacttggactattatttattcgttttacctcgctaatatttagaattaagtataagtttgtgactctgaaagagattctatgtgctaaagacaacttcacgcaaatgatctctcttgttcttatccngtgncccagatgacagactcatgtgtcgttttgttctgttggtttagatattttagcttcnncttgtntgtgatggttttgaactgcactangtgggtcgtgggaacctcagtctaggccgagtggtgcagaattcaattgtcaattgatgtttgtcttcccttgccgctgcttctgttttgtgtcgttggcttaccttcgaagcgggcgtgtggttctattagcttgcccaaaggggttggtgttgtggaaccctggggtcgtttatggggg

SEQ ID NO: 84953 - DNA, 920 bp, Glycine max
  Clone ID: PAT_MRT3847_47727C.1
cggccgctcgagccggcctggccggaaacgtgcgggggcgggaactgcgaggtgggtagtttatctatacttcacattaatttatcttctcccatctaaaatctatatataatatattacatctgaggttcaattttcctaagctcacatttcctttgtgtttgtgagtaatttgcaaacacaccaaaaccatctctctctctctctctctctccaattcagaccccaagttctgttggatcttgcatatagtaaccctttattgattcgcaaagatgaaggtcacagtggtttctcggagtggaagagaagtggttaaaggtggcattgagctcagcgattctgctactatagcagatttgcaggaggcaattcataagcgaaccaagaaatacccatcaaggcagcgcttgacacttccagtccaacctggatcaaaggaaaggcctgttgtccttaattacaaaaagagtctgaaagactatacaattggaaattcagaaaccttaactgttgtattcaaggatttgggcccacaagtttcttaccggacactttttttctgcgagtatttgggacctttgcttctctatccagtcttctattatctccctgtctaccaatattttggctacaaaggtgaacgtgtcatccaccctgtgcagacatatgccttgtactactggtgtttccattatgccaaacgaattctggaaacattttttgtgcatcgcttcagccatgcaacctcacccctttccaatgtgtttcgtaactgtgcttattactggacctttggctcctatattgcttattatgtgaaccaccctttatatacccctgtaaatgacctccaaatgaagattgggtttgcatttggaatactttgtcaatttcaaattctattgccatatattctg

SEQ ID NO: 84954 - DNA, 178 bp, Glycine max
  Clone ID: PAT_MRT3847_47728C.1
taccggaacggaaggcccggaccgacccatccgtccactcatatgccaacccttccgatttatttggtctcgttccaaaccccccaatagggggtgttttactcgcaggcaattcacttcaagatattataatgtcagcagcacaagcgctaaacagataacagtacgtgtaccttgc

SEQ ID NO: 84955 - DNA, 671 bp, Glycine max
  Clone ID: PAT_MRT3847_47729C.1
cccacgcgtccgtgggaagtcatgtgccaatggattctcactaatgatggaacacgacagagaaaggaaaatagcacttgttgcggctggtgcagcagctggtatttcttcaggcttcaatgctccagttgctggttgtttctttgctattgaaactgtgctgaggcctcttcgtgcagagaactcacccccatttacaactgccatgattatattggcttctgttatctcgtcaactgtatctaatgttttacaggggacccaatcagcttttacaatacccgagtatgatttgaaatctgctgctgagctacctttatacctgatattgggaatgctatgtggtgttataagtgtggccctgactcgtttggttgctaggttcaccaaattattcaagattattcaagataagtttggcattactaccgtggtctgccctgctttaggaggttttcgagctgggatcattgctcttaaatatcctgcaatattgtattggcgctccacatatgaggaagatatcctacgtactggaaagagtgctatcatctcctggaatatggcttctggctcaattgatagatgctaaagttatttgaacggctctttgcaagggatctggcttatttggcgctctttatgcaccgagtttaatgatcggtgccgca

SEQ ID NO: 84956 - DNA, 2405 bp, Glycine max
  Clone ID: PAT_MRT3847_4772C.1
cggctcgagcccaagtgaagaaaaaagggttgccttggacacttctcaccttgttttctggatttgctatgtgacgtagtttagggacaagggaagggcagaagagattgagggaaagggagactgaaagtgggagaaataaaggaatggaggacgactaaaatgagaagaaagaaacagaaaatttcaaaattatttcaagcatcaattcaagtctaaatccaaaacttactaaatagccatccttgaatgctcgagccgttctctctgtattcatatttccttcctctttacttctatgctgatattattgtcccccacttcctttttttcatccagaaatcttgttgcccaagtgagggaaaaagggttgccttggacacttctcaccttgttctctgggttatgttaatttgaaagaagctacttggcatcaagaatgggttcaggtgattggtttaagacaataattagctcaagaaaatcaaaagaaggcacatcaaagaaagtaaagactaagatttatacaagaaaaaaggccctacgtccgctgtcgcttgagatatatcaccctccttttattctctctctctctctcctttttcttcctctttacttttacactaaatatatcgctttgcccaccccacacttctttgttgccagttcaggaaaacaaataaagttctcctttgaaacttctctgggctatgttattttgaaagaagttacttcgcatcaataatgggttcaggtgattggtttaagacaataattagcttaagaaaatcaaaagaaggcagatcaaagaaagcaaagggtatcttaactcaagagaaactaaatgcatcaaagtcaaacaattatccaggaaaagaatccagtggtttaacaaatggtattaaaagtgaaaaccttgtgtcagctggggtgtcagttgaaactattgctgcaacaaggatccagactgcattccgagcttataaggctagaaaagctttacgtcgcatgaaaggatttacaaaactgaagatcctaacagaaggtcttttctgttaaaaagcaagccagtacaagctgtaacataccttcattcatggagcaagatacaagctgagattagagctcgtcgaatctgtatggtaaccgaagacaagatcaggaggaagaaactggagtctcaattaaaactggaggcaaagcttcatgatctggaggttgaatggtgtggtggttctgaaaccaaggaggaaatccttggaaggatacatgacagggaagaagcagcagttaagcgtgaaagagccatggcatatgccttttcccatcagtggagggccaactctagtcagaaccaactgcttggtaattatgaacttagcaaagctaattggggttggagctggaaggaatgctggattgctgctcgtccatgggaaagccgtatccctagcttatccgtcaccccggagaaagctcaacataagcagccaagcccaagcaaagttcagaaggataagaacacatcaacaccaaaaactcccgtctcgtttaaacctccttcagccaatgcaaaagggactcctccctcggccaacgcaaaaggcacttcaaaagctaggagattgtcttatccaacaactgagaaaactctggtccaaagagtgcaatgagtcctcagcatggtttgctaagacagcacaatttttaagtataaagcctttttggataattcgaattgaactgagtcaaattgattttcaattggttacagtccataaaaaggcaactaaaaagccaacttatttatttattgattgcttccaatttgtgcatatgagcgtgactgaaattcaagccactgcagagaatgtgttaacagacctgcttgtgggtgtgatttgttgatgcttctgtttattatctttttcaatcttgtacattcaaattcaaggaagagacagattgtagataggacaatatatctattttttcctcttctctgctgtaatagaaaatttccaagatgtgatcaagttgttgacttcgtcatggtttattattaccatattgagatggcttgtgcaactttctatggttttatagaagtttatcattatatgttaccaaataatacatacatgtgtgtgtatttctacattctattccattatatgaatctttagcttgccctaattttctttaagtttgtgtaagtcttaaattttttttttttttaaaaaaaaagatattttcttccaatgctctctctaatggatctgcacttttatctgtttatttgatgaaggtaaatgctgtattttagttatcttgaaccttggttttggttttaagtggtgactctttcatattgtgctagaaattattagatgcatgtttacttt

SEQ ID NO: 84957 - DNA, 460 bp, Glycine max
  Clone ID: PAT_MRT3847_47730C.1
accccccctactaaacaacccccaccccccgacccgaacggggggatacataaaaggcaagagggcgcaaacaccccaggcaacggaagaaaggccaagaacaccaccgaacgaccacaagaaacacaaaccaggcagacacaacaaagaaaacaaggcatcaccccgggaccaaagagcaaccaacactccgttccaaaaccacctaaaaaaaaaccccggcgaaacccccgacggccaaggccaacaaagatgagcccaaacataaacccagcaagcccaccgccaacgagaggcccaacccaaaaaacccaatgaatcttccaaccccagcccaccactgcaggcccaaaagaagcagccggggccacggaagccccaacaaaaggcccacccaccaaaacaaacgctccaacgaagaaaccaaacacaaagggcgccaacacccccaaacaacccc

SEQ ID NO: 84958 - DNA, 287 bp, Glycine max
  unsure (1)..(287): unsure at all n locations
  Clone ID: PAT_MRT3847_47731C.1
gtcgcangcacgcgtacgtaagctcggaattcggctcgagnnngcgangnangcnngatannncgcnnttnnanncgcggtacgctnnnnnnntnngtgctgggatctcngtgagagtctccntggattcgtctcntcctcgcttgtncgagctacatcaccaancnnaaatngctggnggnaaagnngtannngnctccggaaaggnnanganaaaggnggtntncngatcccagcnagcngntttgcagttccctgtngnncgtatncatngacacctaaaatnt

SEQ ID NO: 84959 - DNA, 425 bp, Glycine max
  Clone ID: PAT_MRT3847_47732C.1
acatgacagggagcaaattccttaaaataacacgcacttcacacatcattacgccaattaaaagaggtgtggaaattttcatataggcagatcatactcatcaagagggtcatgcctaatttcctcttactggattatacaaacgaacaagcgcgagaaaacgcaaattccagatcatgcagaggattccgcattgtcagaagctctggcagtagcctgtggaacagtaaaagctggcataagagtatgaccagcaatttcaaaatcttgagagagtcccaagagaatatgccaaactgaagaccgtttggagatgcccacaaggacactcaaatgccatgaaggttgcattgcccactcagaactccacattgcaaaaccatgattaggaccacagacctctattgggaacatcgattcccagg

SEQ ID NO: 84960 - DNA, 142 bp, Glycine max
  Clone ID: PAT_MRT3847_47733C.1
acaaggatctaatgaaatgtttggaggggaactatgtttccacaaggcacccaccaacgaagagtttccccaacaaacatgccgccagatcaccgcactccacaaatatgattgcttgccagccaacatatcgacgaatgcg

SEQ ID NO: 84961 - DNA, 355 bp, Glycine max
  Clone ID: PAT_MRT3847_47734C.1
ggctcgagggatgagtgaggtgaatgaatgagaacaaaagcgtcctcatcgatatcgtgaataactaaagactctggcgctctgaaggttcgctacgtgaccgtatatgggacattattgctcacgtattacgtttgaaggtggcggaagaaagtaagctgggcatttgaaagaaagaagtaatgaaactaatgcttattcgtgcatcaggctacaaaaaatagattgatggaagaagcagctagcctctaaccacctccttttgtggtacgtccgaatagaacaggtgagagttgcagattacggtgggtgaattacctacatcctggcctcaaacgtggaaagatgacccccc

SEQ ID NO: 84962 - DNA, 510 bp, Glycine max
  Clone ID: PAT_MRT3847_47735C.1
gataccattccatctcatcacacgcctttgggacacatatttagctgaaggagatgccttaccagacttcctagtataaatatttgccagcttccttctaacgtggtcagacaagctccagaaacttcatttccaagaattggtaatgttccttcaacaccttccaacagagaactggactccccgggagcttaagatggtgctttcccgagcatttatgtggcacaccatgttcaacaactctcctagccatttagctagctgagcaagcaattgtggttttttgaatttagtcccctttcaatttctccgtttcttttcttgctttctatcacttttgctcttgctcagtgtggtgctttttgttaatttttttaaccaattttacttgtacgttacattgtaatattctgtaaaggagatacaaaaacaattgttagatagagcgagtctatttttgttgtattaacgatatatattccagaaaagcaatcaatatccagtttgggt

SEQ ID NO: 84963 - DNA, 275 bp, Glycine max
  Clone ID: PAT_MRT3847_47736C.1
taagcatcaatggtgtacgtcaaggctcagaaatcgaaagcctgcttcaagagatatcgagtcaagttcaagagaagaagacagggaaaaaccgattaccgtgccaggattcggttgattaatcaggacaagaacgaatataacactccgaaataccgatttgttgttcgctttagcaacaaggacgttgttgcgcaaatgatatctgctagcgttgctggcgatattgttcttgctgcagcgtatgcacatgagctgccgcaatatggtcttga

SEQ ID NO: 84964 - DNA, 649 bp, Glycine max
  Clone ID: PAT_MRT3847_47737C.1
gaaagaaaatagtggattgcatactttctggaaggtctcttcttagttcattcaactctgccttggcactcaattgttcattcaactcttcttagtggattgtatataaatcatagaatacatattatcaatgacatatgaatacaaaacttgtaaccggtccaattaagttggtacctgataaataatatatattgaagtgcgccttaacacagattcctttaaagcatttagaaaaatatgaactggcattggaattgcaggttgaattgagcttgtatccattgttcaccaagcgcgacttcacgtcccattatggttggaggagtaacagcttctgaggcagaagactgattatgtctcatttttgcagcttcggcaccagcaggtcccacaagtccattccaatattaagactagttggagacattgagacagcgggatttccaggcactgaagaatgaggaatggtgctcacagaattcttccgtgcattggctccatcaacaagcatttggtcaaaactccctttcttgtttgtagctgattcctgagtagaagaactagaagatggtttagaaactttagctgtgctttcttcatcagttcccattcagatcagctcagaaaaactgccttgaaatcaaat

SEQ ID NO: 84965 - DNA, 1416 bp, Glycine max
  Clone ID: PAT_MRT3847_47738C.1
gcgtttgtgttttgagcgacctcggctccacggtctaccagagcttctcctctaattcattcttgttggatgatgatatgagcattcctttttctgctgaagacatagacaaggcaatccctgctataaatactgatgacattgatcttccagcatttttgtgtgaatatccctgtgcccagtttcttattttacataagtaattgatctgcactacaattggaagatcgttgcttgaaacttaacttcaacatttgatctctggaattaaatggcaacacaacccagtcggaaatgtttcccttcaagtggatggcattcttagttgtcatcaggtttactggtctgtcaccaaatacatttggtaatctgttgatattaattaccaatcagagaagaaaaaatgattttctttgtttgatttgtaacttctctccgagttacttagttaagccagcaagctctgtaattatctaaagataggactacagtatagtcttgacgtgctgcttctattattgctgcccagcgtctcgcctggttctctgtccgatcttatcttttattctatgtaactgtgccactattttctcggccctggcctatgtactgggacgtcttgttcggtgcccagagtgtgtccaatgaggtagttagtgaaatgagggaaattgtgagcaaggacaatcagtgtttgagctctaattcattcttgttggatgatgatatgagcattcctttttctgctgaagacatagataaggcaatccctgctataaatactgttgatatcgatcttccagcatttttgtgtgaatatccctgtgcccagtttcttattttacatgagaagtaattgatctacactacaattgggagatcgttgcttgaaacttagcttcaatatttgatctctggaattaaatgacagcacaacctagttgcttgaaacttagcttcaatatttgatctctggaattatatggcagcacaacctagtcggaaatgtttccattcaagtggacggcaatcttagttgtcatcaggtttactggtctcagtcaccaaatgcttttggtaatcagtttatattacttaccgatcagagaagaaaaaatgattttcttggcttgatttgtaacttctctgagttacatagttaagcagtatagcttgacgtgctgcttctattattgcagcccatcgtctcacgtatttatcatttagattttatgttgtattctatgtaggtatgagattgtaatcagagccttggccaaagaaattaaaagttttattctttgatgtaaaaatgctgagcaagtcttggagttgcatttttttattcgtttcaaacttcatccgtcagcagtgtgatgctggtgatttttccttcgaaaagttggaagatcggct

SEQ ID NO: 84966 - DNA, 386 bp, Glycine max
  Clone ID: PAT_MRT3847_47739C.1
cggctcgagcggctcgagtacagcggcgagacgactaccgaaggggacacatgttgttctccggccgcgggctattaacacactatgaccgtctgctattgcaatagacccaggactcatatatgtctcaatctcacgttgctgacttcgtagagatgtctgatggtgttggagcttctcacagtccgcgatttattcaggcaggccaaagagaacgctccatgcattgtttttgatgatgaaattgatgctgttggaaggcaaagaggtactggaattggtcgtaggaatgatgaatgagaacagacccttaatcaacttttgacagaaattgatggatcagatggtatatacacgcatcattgtcattgcagctactaacagag

SEQ ID NO: 84967 - DNA, 322 bp, Glycine max
  Clone ID: PAT_MRT3847_4773C.1
tacgtccgtcggctccgatcctgtataccggacgccctccacgcgttcgcacccgaacacccttttatgatctcacataaggaccatgacaaagtactggaaaccagctacttttcagacatgtaagatgaacaatgcctggatacaataaaaccttttgaggggaccttgaacatgaagagattctgacttacaagctagcccttttgcacgccggcgcgaaggaagacagttcataatagcaagatctgcgccatgaaaggattctacataatattgagtctgaggatgaacatcaagggttcctaaatgcctttgtata

SEQ ID NO: 84968 - DNA, 789 bp, Glycine max
  Clone ID: PAT_MRT3847_47740C.1
gaaggttcaggcagacaccaacgttgttaaaacccagattaaaccctccattttatcttcctctcttttctgctccaattcacagagaacaatgcaaatttctcttagcaatttagccttcaagacccctcaactcttcccaatacaccaccccattttccctccaaagccaccactgaaccaccaagtttcaacgcagagccatgtcaacaatgtcctgaaaggttcgtcggggtatttgtccgaaatcagcaaagtgattgatcacgaagaacagtaccgggtagcccggtcgcaggttagccgtaaagttttggacttggaaggttattccatagagggtctttcagttggaggccaagagacatgcatcataatccctgagttcaagtgttcttttgatattgggaggtgccctagtagggctattcaacaaaacttcctttttattactcatgctcatcttgatcacattggagggctgccaatgtatgtagctagccgtggtttattcaatttgaaacctccatctttatttgggtctccttgggtggactgccattttgagtagctagctgatattcacagaacaatggaccaagtagagttgtaggacgtaagtggttgctttggatgggtgagagacgtatgggtattcacagaacaatgggccaagttgaattgaacgctgaagtggtcgctttggatgtgggggagacgtatgagatacggaataacctggttgtccgaccattcagaacacaacatgttatacccagccagggttat

SEQ ID NO: 84969 - DNA, 688 bp, Glycine max
  Clone ID: PAT_MRT3847_47741C.1
ctagcatgtgatcaacatgttcagacggatactctgttggacgatgaatttcaggagacaagaagccctgggatggtatcggaatcttcgaaggcaaaggttgcaaaactggtggatggataccttgctgagattgcacgtgatccaaatttacctctttcaaaatttgttaatcttgctgaattagtatcaagctttccaagagcatttcatgatggcctttatcgtgcgattgacatgtatttaaaggagcaccctggaatcagcaaaagcgaaaagaaaagaatatgcaggttgatgaactgcaggaagttgtcagcagaggcttgcatgcatgctgtgcagaacgagcggcttcccatgcgcgttgttgtgcaggtcctcttctttgaacagctgagagctacaacatcatcaggaggcaacggaacaccggatcattccggctctatcagggcctctcttcccggtggatctcatgggagttcaaggtcggaagaggaatgggaagccgtgggaacgatggaagacataaaatctctgaaaggggagcttattgctctgaaattatcaggaggaacaaggggagccagcagcagaagcaacaacaatgacagtagtaaaggcaattctgagagtgttgctgctagtaaaatgaaaggtctcgtgtcgaagaagataatctcca

SEQ ID NO: 84970 - DNA, 366 bp, Glycine max
  Clone ID: PAT_MRT3847_47742C.1
ggctcgagctctccgacttttttgctatcagcgagtgatagtgagtgcgtggctgtttcggggcaacacgttttagtgtctcccaacagacgggaaatgggccggggcgtctgtgctgctggtggtcagagtcccttgggttttatgttttacatatgcgacccttacgacagttcatatgctgcttgaactccaaatgctcgtgcttctctaccaccgtgcgttactcgttgttcaacatacgtaccaactcgagtatctggtcctggtgcatctgcatacctgcctcctgtagcaacttgatcatcaacttctgctggtacgctcattccagcttgacttactgggagtcttgacaacaattac

SEQ ID NO: 84971 - DNA, 532 bp, Glycine max
  Clone ID: PAT_MRT3847_47743C.1
agctcacatctcatgcaaccggctcgaggagaaatgcaaggccctaacactactaactctctcttcaacaacaatactacctgtagtaatcagccgcagatccacttcgacaccacttccaacgacgatttcctcaagcaaatgctttccaacctcccttcttcttcatggaccctcgaccaaaccacacccgataataacgtcgttttcccctacgacgtcgaacacgccaacttggcctccaagtttcgcaaccaccagatcaccaccgacaacgacaaggcctccgctctcatgctccaccaccacctcctcctctcctcctccgccgctgccgccaactcccaactcctccacatgccctttgactcctccgcgccaaacgacgtcgttgacgccccctccttcaaatctctcactcccaacggtgagcctgcttccgttcaagctctctacaacggcttctctggatctcttcaacccaataatcaaactcaccattttttcacccatcctttttttatttcgcaga

SEQ ID NO: 84972 - DNA, 393 bp, Glycine max
  Clone ID: PAT_MRT3847_47744C.1
ggctcgaggtcctgagtggtctgctacaaatatcttgcttgttatacatatgaatatggactcacaagcacctgatattgcatgcaaagtaatccgaaaaaattgatctattacttgtaatatacgactgcacctaccagaagatttagatagtgacgtgtcaagttaactcgccttgatatactgaactgtgctcacattcgagaccagtgattaatcattcaagtaaattgttcaccaccgaactattttgttgaatcgttaatatcagatggcagatctgtcttgattcactcttatgccctgtgtctttttcgttgcaagccctattctactactccttgatgtcatcatgctcttactcgatagtcgaatcaacacaacaatagtgat

SEQ ID NO: 84973 - DNA, 385 bp, Glycine max
  Clone ID: PAT_MRT3847_47745C.1
tgggaatgatcagactccaggttgccggtcgcccttaatgaactaattcgccggagctgacctagctcagtggccggccttcgtcctttttttttttagggtctacacacttataacagaaaaggtttacaaggaatgacagtgcgaagctggaaatatagcgataagctattaatggctgtggttttagggctaagcaattaacacattgggataattttgaatgttgcacactaataaatcgactaattatacccatgggttcataacaaatttgaggacccgattggatcgctggcaaacgcctacaaaatgaacgcttggattgcataaagggtcccttataaatagcaatggtttatgcatccctatgccaagcctcaca

SEQ ID NO: 84974 - DNA, 284 bp, Glycine max
  Clone ID: PAT_MRT3847_47746C.1
cttctattattgccgatttcactgtcaaaaacatctgcataccaatccattcagctgttacctctttcgtttgtggtgattccacgatggcgcggggagaaaattttaaccccagcctttatgcttgaaccaacacaaatagtgggtagtgatgtataccgtaatctgccactgcctaaacatctactatttccaaaccttttgaactgtccaaaatctataacttattggcaccggaaacattttacttaccatagcgatgtatatagattgacaaattgctt

SEQ ID NO: 84975 - DNA, 720 bp, Glycine max
  Clone ID: PAT_MRT3847_47747C.1
gttgcttcctctttccttttctccgctcttgtgatgacagcgacttaatctgtgagggaccgagattccgccataaatgctttcttctcattctcgctcctcactccatcttctcgttccgttcagcatcgctcatttctctccgacgaggttgttcatatgtgatcaactgttgaaagatgtttgactgtggtcccaagtcagaatacatgggtggccagcgggaaaattttttgaggttggaggccttggattctacactatcttcatcttctgatgccggagttataaaatctggatttaatattgataaattaagccatggtcatggaagcagcacaacttctaggtctttcaaaaggggaatgagaaggggatctgaaggattgaaatcaattgggcgatcgcttgggttgggagtatctagggcagtgttcccggaagatcttaaagtgtcagaaaagaagatatttgatcctcaagacaagtttctgctcttatggaacaaactttttgttatctcatgcattttggccgtgtctatagatccactatttttttatctaccagtcattaatgattcatttcattgtcttggcatagaccgaaagttggcaacaatagttacaaccttaaggacatgggtggagggtttctatcttatacacatggctctccaattccgtactgcttatattgctccatcttctcgtgtctttg

SEQ ID NO: 84976 - DNA, 374 bp, Glycine max
  Clone ID: PAT_MRT3847_47748C.1
ggaattcggcacgaggctggtttcatgatctaaaaggtaataatattccttgacacaagaaagatttataggcaaaaagaagcaggggaataattcccaccaaagcaaaaaggctgatgcaatgtccgagaaccatatttagggttggaaggaggagtgaatgagtgatggagaagcgaagacacctttccaaatttcaaataagccttctttattttaccacttagcaatcttgccatcattctctgacaacttgttgcctcatctcacagtctcacaccattatggaacattctccgtgtcgtctcctcccgtgcatggaatagtaagaacaacaaacaacacttccttttttttaacaagatatggccttt

SEQ ID NO: 84977 - DNA, 495 bp, Glycine max
  Clone ID: PAT_MRT3847_47749C.1
gggtgccatcgccattaatagagggggcatgcttatgagtattttatagcggcgtccttcagtgtataattggagcatgatcaacattcacaggagaacacttaagataaagcagcagcatttttggttttgctatccaatggcacgaaccatgtaacatacatatcctactaataccagcttgggtgaaaatgtggaatttcacccccattccgaataataagaatgagactttggcattgtaactgcaatgaccaggcccatgaaagactattcatcttctttcgcttcttattaagaagaggatgacgaatgtgttaatgacagtcgtgtggagtgggacattcaacagagtagcccaattgtcgatctggcccttgccagggatcgttgcttggattgggccatccaacaagctcaccatggccagactgtctggcttgttctcctgcaaatgaagggtggttgttttctttggatctgatgccaggccca

SEQ ID NO: 84978 - DNA, 1689 bp, Glycine max
  Clone ID: PAT_MRT3847_4774C.1
acctgggatttgcccacgcgggatcatatatatatagtaacccaaactcttttgtctcattagcttttctacctagctacatcgatcaagatggaagctaagactaagccatggttggctctatctctatttctattggctacaaattgcatgcaacaatgtgtccatggagaatcgcaagtgccttgcatgttcgtccttggggactctctatctgacaatggaaataacaacaaccttcaaacaaatgcaagttccaattacagaccatatggcatcgactacccaacaggccccaccggaagatttaccaatggaaaaaatataattgacttcattagtgaatatttgggatttacggaacccattccacccaatgcaaacactagtggctcggacatacttaaaggtgccaactatgcatctggagcagctggtattctctttaagagcggcaagcacctgggtgacaatattcatttgggagaacagattagaaatcacagagcaacgattaccaaaatcgttagacgacttggaggaagtggcagagctagagaataccttaagaagtgcttgtattacgtgaacataggtagcaatgattacataaacaattacttccttccccagttttacccaacaagccgcacctatacccttgagcgatatacggacattcttataaagcagtattctgatgatataaagaaactgcataggagtggggcaagaaaattcgcgatagttgggctgggtcttataggatgcactccaaatgccatatctaggcgtgggacaaatggagaagtgtgtgttgctgagctcaataatgctgcgttcctattcagtaacaaccttaaatctcaagtggaccaattcaaaaacaccttccctgattccaaattcagctttgtaaacagcacagctggagcccttgatgaatcccttggtttcaccgttgcgaatgttccttgttgccctacgaggccagatggacagtgtgttgagaatggaacaccatgccagaatagaaatgcacacgtgttttatgatgaataccatgtctcatcagctgcctgcaatttcattgcaatgggttcagtaagccaattccagaaccttgttgagtcttgatgattattcagttcaaactacatatatatgtatggttgtgtccttaaaaaaaattcttatcatgcataatatacaacttgtattaatctgaatgtgtgccgagttcaatccggcaaaacatgttattaaatagtctcgttgtgccttttctttatacccacctataaaataaatatactacacgaccttaatgtttatcatcaatcatataatgtttttatatttcagagtaaattttattctgttccattgtttgaagatgtgagtattatatatagttatatactactccttttattctcttgtgttgaaatatatagataaggattgctgataacacattctcttgttgtattgaaacttagtgcatttaatttaacatggttcattagttggttttgggccatgctggtgaacaagttgtcgttttttaatattgtactgatgtttactatctccaccttcttttagcgattgtatcatcaacatttaaacgaatcatattactgtaaaaaaaaaagtaactgacaatataagccatcaagttggttg

SEQ ID NO: 84979 - DNA, 1649 bp, Glycine max
  Clone ID: PAT_MRT3847_47750C.1
aaatatttcatacccaaaaaatgcagtttcattagccgatctactcagcacctgccacgtggcactacacatatagttagccacatatctaaaattgctatcccctcctcctcctctcccttcttagtctcactatcaagcaatgcaataacataagtacaaaacaacataacatcctcaagcctttgaacatcgttttgcagccatggaaacaggcatagcatgctacactcgcgggcctttcctgcctagtgtttcttccaagcactctccaccctccatctctccatcttttggcttgaggagtctgaaatcgagctctttatttggagaatctctaagagtggcatccaaatcaacactaaaggtttcaaagacaaagaatacttcactcgtgaccagatgtgaaattggtgacagtctggaagaattcctcacaaaagcaacaccagataaggggttgatcaggttgttggtgtccatgggagaagcattaagaacaatttccttcaaagtgaagacggcttcttgtggtggaacacaatgtgttaatacttttggggacgagcagcttgcagtggatttgctagctaatcagcttctttttgaggccttaaattactctcatttctgcaagtatgcttgctctgaagaaaatcctgagctcctggacatgggaggtccagttgaaggtggatttagtgtcgcatttgatccccttgatggctccagcattgtggacacaaatttcacagtaggcaccatctttggtgtgtggcctggagataagttgactgggatcaccggaagagatcaagttgctgcagccatgggggttttgggtcctagaacaacatatgtgcttgctctaaaagacttccctggcacccatgaatttcttctgcttgatgaaggaaaatggcagcatgtcaaagagaccacagaaattggtgaaggaaaactgttctccccaggaaatttgagagccacatctgacaaccccgattatgctaagttgatcgattactatgtcaatgaaaagtacacattgagatacactggaggaatggtgccagacgtcaaccagattattgtaaaagaaaaaggaatcttcaccaacgtgtcatcaccatcagccaaagccaaactgagactgttgtttgaggtagctcctttggggttcttgattgaaaaagctggaggttacagcagtgatggtcatcagtctgtgctagacaaagtcatcagtaacattgatgacagaactcaagttgcttatgggtccaagaatgagataatccggtttgaagaaaccctgtatggtaaatccaggctcaagggtggtgtagctgttggagcagctgcttaatctgttaaacctgcaattcattgtctatttttatctgcttttagaaaaaaagatatatgctatatcttcagacaagtacctgcaatttagtcacatatttctgttaatcactataataacaaagtaaatttatgttggtatggctattgtctattttatctgcttttagaaaaaaagatatatgctatatcttcagacaagtacctgcaatttagtcacatatttctgttaatccctataataacaaagtaaatttatgttggtatggaaatcttctttc

SEQ ID NO: 84980 - DNA, 792 bp, Glycine max
  unsure (1)..(792): unsure at all n locations
  Clone ID: PAT_MRT3847_47751C.1
ccacgcgtccgtgaaaactcaaaagaaaccacgtcattcattcctctcttacgttctctcagtctcgcgatttctcgtgagtcctctctcagtctagcgattcctttctcgttgtggcactttcaccctcatgttccttgacatctctatcaatttctcttcgatttgatgttgaattcatcactctatccaatgtgattgtagagttcaagttgaagactactatgcaaagatttagagcaggttcaaaatgataaaaactctattacaagttcagaatccacctaatttatatgtgcaactgtgaagttattccttagcagttaaaagatgatagagctcaaaagcttgctctacagccctagcttgaggtgataatgatatggttaggtcatttcacctgaaaaattcaagcttcattgacttgagagaacttgagcacacaagaaagctagctgtggaacttgagcttacaatcttttgctttctagtggaggaactttcagaggaactagtgtgctaatgtgggcaaattttgaagcagctgaagaacttactatcaggaagcaattgtggacattatcaaaaagaatgggtgttggaatgacaaaatttatttgccaggtacccataattttttccacttgtggacttgttgacaccgttcaagaagggtatactggattccacatgggagcattcaacgtagaagtaagtggagtagaaaaatagtcttgtataattntgntaaaggagtgaatctgatagaaatagaatataattgggggtctt

SEQ ID NO: 84981 - DNA, 993 bp, Glycine max
  Clone ID: PAT_MRT3847_47752C.1
cccacgcgtccgcccacgcgtccgtacggctgcgagaagacgacagaagggggcgtagaagagagtgaaagtaaaaggaaagctaaaaagagcagagtagcctccactgcaccaccatcatattttggctttataaaaaagccatagaactcattagaacttccccctttcccctttcttcttcttcttcttctctctaatttcatttccttgattatagctttcaattaatgggcttctacgctgaagatcctctctcaggcttgacaataggccaggccatatatgaggtagctctcatgattgcagttctgagatgggtcttgtgcttgatcttcagagtgatcaacgacagaagaacaacacaatccgacgagaccccaacaccagaaccatgttctcagatgacaagggacaacgacagcattcttttgctgacgactttcggagagattaaggagaggcttccagagacagaggagacgtgtgcggtgtgcctgagccagctgagcgtggaggacgaggttagggagctcatgaactgctaccacgtgttccacagagagtgcatagacagatggttggaacacgaacacgagaatcacagcgccacgtgtcctatctgcagggctcctttgctcagttcttcttgccaccacagctctgccacgtgtctgcctcctcctcagcctagttgggctgtggagagactcctctatctctttggagatgatctgcttccttgttagttacttgttttctttgtagattgtgcagaaaaaaaatagtttaggggattcattatttgttatgtttatcatctgagccttgtaattgttgcttgctgccacaaaataactaaactaagacacaaactagcttcctgtttgtgtgtgtgtatatacatatatttttcacatttgactaatattaatgttgcctcccaaaaggaacaagggcctttttttcaatcaatgtatggttggatgaatt

SEQ ID NO: 84982 - DNA, 1074 bp, Glycine max
  Clone ID: PAT_MRT3847_47753C.1
ctcaaatagcacagccctgagcatctgccggtattaactccctctggtgaaaccaccaagatggctaaatgttaacagcaggtgactacagcaaccatggccggccgctgcagccggaaacaagcctggccgagctgaacttgcccagagtgctctgcgttctctcttccatgttagagaagctggtggctcgtaatgaaaagctcattgatatcctgagccaggagctagatggactgaacagtggctcagtaagacttgggaacagcttgaatacatttcatggcgtaagagcaccaagcataagcatacctaagtacttggagaggatatacaagtacactaattgtagcccttcgtgttttgtggttggctatgtgtatatagacaggttaacacatagacaccctgattctcttgtcacatccttgaatgtgcacagactgctagttaccagtgtcatggtggcttccaagatgctggatgacgaacattacaacaacggccatatatgctccgagtagaggagggtaagcaatgctgaattgacaaagctggagttagagttactctttctgttggatttttgagttatggtaagctcacgggtttttgagagctactgctttcacttagaaaaagagataggttgtcaatggcacgggcatgaagattgaaagggcattaacaccaaaggctatcggtatgacttagaaactgaaatatccattgaagagataaacagcgcctccccacctcaaattgtagaatgacatgatcagtggttggttgtcgtcatttttgggtcccatgccccttcttagtccttcccttgctcttcacggcgtggctattattggatcattcatgggccagtttcgttttttgaatttcatgtccatgtcaaagcttgtaattccttttgcctcctgcaaagaaaagtacgaggctgatatattatatgattcacacgaactcacgaactgtattaatttggctttgatgacaaaatacagttatattagtttttcttcccttatttagtttttttgaaagaaagttcattattcttgg

SEQ ID NO: 84983 - DNA, 294 bp, Glycine max
  Clone ID: PAT_MRT3847_47754C.1
gtgtaaaacaaaaaaacacccacccacaaaagggttcaagattttcaattatatctaaaagttttatctaatttaatcaatcatacaaacccaatctacacaaaatagaatatctttaaacaagcattccgctattacaacattaaatataaaaaataagtattttttttcaaaaacccccaaactcgcatgaaattaccacacaagaccaaaattttacaaaaattttaacctttacacttaccagcgccctaacgcccgcctcatatccctttaattaccttctttataagc

SEQ ID NO: 84984 - DNA, 452 bp, Glycine max
  Clone ID: PAT_MRT3847_47755C.1
ggatacactgatacctctgcttttgctttgttttgctcttcttttgtaatggaaattgatctttctccccagttggccaagaaggtgtatgaaagcaatggtgggtcttaccatgcatggtccccttctgagcttcccatgttgcctgaagggaacattggtgctgccaaactagctcttcaaaaaaatggttttgcccttccttgttactctgactcttccaaggttgcatatgttctccaaggaagtggagttgcaggaattgtgctccctgaatcagaagagaaggtggttgcaattaagaagggtgatgctttggcactcccttttggtgtgataacctggtggtacaacagggaggacactgagttggccgtctgttcttaggtgacactttaaaagcccacaagactggtgaattcactgatttttacctaactggacccaatgga

SEQ ID NO: 84985 - DNA, 405 bp, Glycine max
  Clone ID: PAT_MRT3847_47756C.1
ttttgttatccagatgggccataatatttttttaacatgattctttggttcacatctgtcttcattttttttctttattgtaggcttctccaatccaattggctggaagacaagtatacatagaggagcgtaggccaaacagtgtcggtgcagctcggggaggaagtaatgttttacttctttttatctcttactctttcaaaagttttagcttctcaagttctgtgggttttacctaatggttaataagaaatcttttggaaggtgtttgttgcttgctgcaattgctggtgttggagtgcacctaacaaacaattgtgcaataaaattagggatcagactgatcctgtacatgctagggcatctgttgttgtggcacccttctgtcgtcttctcgcagccgta

SEQ ID NO: 84986 - DNA, 584 bp, Glycine max
  unsure (1)..(584): unsure at all n locations
  Clone ID: PAT_MRT3847_47757C.1
ggctcgagcaagacctttgagcgtgtggagggagtgcttcatgttgtccctggcactggcatgtgggagtgtgttgactttttccctgtatctagcaagggtgaaaatggccttgatacttcaatcaatggggagaatgtgaagcatgtggtaaaggttagcttggatgatgatagacatgattactatgcactcgggacttacgatgagaagaatgttaagttcacacctgatgacttcaacaacgatgttggtattggactcagatatgactatggtatattttatgcatccaagacattttatgatcagagtaaggggaggagagtgttgtggggttggattggnagagtctgatagcgaatacgctgacgtggccaaaggttgggcatcagttcagggtattccaagaacagtggcacttgataagaaaactggtagcaacttaattcaatggcctgtggcaaaggtagagagtttgagattgagaagcgacgagtttcaaaatttgaaggtgaagccagggtcagtggtgccactagaaattggaacagctgcacagttggacattgtagctgagtttg

SEQ ID NO: 84987 - DNA, 670 bp, Glycine max
  unsure (1)..(670): unsure at all n locations
  Clone ID: PAT_MRT3847_47758C.1
cggccgctcgaggcggcgggccgggatcctgcgacggccggccgccgctcgcctccctccccctaccatacacagtcccggctcccgcagactcctcctcctccccgcaagacaagactcaagatggagagcgtcttccttcgtcagcttcacctccagatcgcatccaccgccagccccgtcgtcgtcgtgaacgactccggccagattctctccttcaacgtcgcggcgcatcgctgcggcctggtggaggccggcgtcgacctgtggaacctcatcggcgagggccacgaacgtctcctcggctcctcgctcgcccagtgcatcttcgaagtcaaggcgtcgggctgcaccaggctctcgcccgaggcgaccaagtccgacgcctcgctcgacaagattggcaactcgcctgtcgacctgcgcgacagcaacgacagcctacgcagtgcctcgctggcctgcaatgcatccgcggccaaggagcaaggcggcgacgacgtcaacctcgagaacgtgctcttcgcctgaaggcatcacgctcatcgccttcactcgacaatattgtacagtttcgcgaatcgcgcgctcggcgatcaattttcatggaagaagttggtgactattgtgtaatctataatacagtaacgccgggcggttcgcatcnnaa

SEQ ID NO: 84988 - DNA, 1305 bp, Glycine max
  Clone ID: PAT_MRT3847_47759C.1
ggtgggaaggatgtaatgtaacagcacgtttgctcaaaggagagagcaaattagcattaaaaagaaaaaattaggatgcccccagatgtgcttcattttcgtcctctcctatcacctcttgttcaattttctccttcactcaatctcgggcgctagaaaatcaaccttgtgttaaaaaatattggcaaggaatgaaagggatgaatctcaccaaaaagaaactcatccctatccttgttttgatcctttcagtcatatcaatcctcagacttctgagcctcaatgtcaagactttgcctttttcggctaggatatctgttttgtccccagctcctcaacacaattgttctcaacctttgtccacctgcaacaaaactgcatcacatgcacctgaatcctcagatcagcctataaatactcccaacatcaccaccaccctgactgagaaagaattcaaagttctttctgatctcattgctcttaaatccccatgcaacctcctcatatttggctttcaaccccagtaccttatcctctctaaaatgaatgcagctggtagcaccatctttctcgacgaagcccctgataaaataagcaagtttggctaaatccctcagaacattatcctctcttccatgaagtataacattagcgcaatagcaggttacaaacttctcaagaacgcaaggctgaacccagcgacatgtgtaccaaatcctagattccttcaaaaatcaaaatgcaagcttgcattgaaaaacttgccatcgcaagtgtatgagaagaaatgggatgtcatggtggtagatggtcccaatggggattcaccagagtcaccaggaaggatggggtccatttacactgctagtgtactagctagatctggaaatacttcagatgtagtagtacatgatgtagatcgtatgatagaaaaatggttttcatgggagttcttgtgtgatgggaatttgttgtattctaaagggaagttatggcatttcagaatcaaagttcactcaaattccacaagattctgccctgctgaggaaggtagtactatagggaaatagtattaattttttttgttataaagatgatatacaaacagaaacagaaaccactaatcaattagcatttttcaccctaaacgtgccactggataaactatatttcagtttcaatgccctgactatctagaagaggcgagcctatacaattacagtggctcacatgatacaaagtgtgaggcaaaattcttttcagatgaaaagagatcacttcctccaaggtgactgataagtgttg

SEQ ID NO: 84989 - DNA, 403 bp, Glycine max
  Clone ID: PAT_MRT3847_4775C.1
aaatcaccaaattgtactaaacataaaattcaaacatccttattacagattgggaagctaattaaaatcaacgctaacatgttgactaatcaacttcttttatagaccttagctttcttataataagatgtcacatgaataaaattatgatttcgaaactccaagtccttgttcaataacagaatttaaatattcaatttctgtacttgtgcacaccaagccaacctcaagtcctccttcttcatctccactttcagctagagacatacccttgaaggaatgtaccatttccactttggtaggccttccaaatccaaaatcagtctcataaacaccgaacttgggtgaccctgtaaccatcaagatagtttccaacacaaacatcttcgtaaaagaatccctt

SEQ ID NO: 84990 - DNA, 470 bp, Glycine max
  Clone ID: PAT_MRT3847_47760C.1
aactcaaattctttctacaccataaaatttttttttcacaacaagaaataatcggggggcgtatatatacacgcccgccggcacttatacttctaaaactatctcatgaatttgaaaaacatatttctcatgaatcccttaacgatcaaattcctgctgttaacaaattgtattctactaaaattaataactttgcaaaaattatcaaccttatacaaaaccttgtttgtcgatcttaaacttcttacttattggaaattatatgatcataaacatattcctttatctaatattactgcaagggaaaatcatttacttcaaatacccttaatttcacagtaggaaattctctcttctactccaactcatttcaaaacttcaatgatcagttaatatagcaaaccttaatctacttctatccatgtgctatctatagaaataatcatttatactttcctcaagtcctcatt

SEQ ID NO: 84991 - DNA, 998 bp, Glycine max
  Clone ID: PAT_MRT3847_47761C.1
ccacgcgtccgcggacgcgtgggcggacgcgtgggcaagaagttctgttttttcttcttgttacactccattaacgtaaccatgctctctttcaaacttagtctctaccttcttattgcctctgtctttgtcttccacctgcttcctagtccagtgctctgcaacgacgaggaggatctacttcatgacatcaacgtatacagaaaagttttgaaccttcctgttctggatgaaagtggcaaagcttcttgcttagctgaagagatagcagaaaatctagagcacacgaaatgtgaagactttcgtgactactaccctctgcctagttacacctccaaaattcctaagttccaaaagagcataaacaaatgcaagatcaacatcaacaccacaaaagatggggtcatcatgcctctctgtgtgcccaagttggaccccgatgctttgttttccaattataccaaatctaatcgcttctcaaagtatctgaataattccaagtataagatagcagggcttggttctgaggacgattggatggttcttattatcagcaccaacacttcttctggagatttttcctctgcaacttctctgcttgctggggctttgaagggtcactacctcatgctgccattcttcttgagcacgcttattgttttcttcaactaaattgattgttctcttttcacctatgcttcattcatttggtggaattttcttttcccttttattctttttctttttctttgctatttggaacaattcttttttctgtaattttgtgtatatgggagtgtactttgtcaagttcttgattcacgatttgcatgtgataagatcccgatgcacctacttgtaattgatcgtgtatattgtgatttgattgttaatatgtttgaaaaattcaagtctgtgggtggtatgtatttatttatcctggatttttttaatatataatatcaatttacatatttaattttacacaaaaaaaaaaa

SEQ ID NO: 84992 - DNA, 455 bp, Glycine max
  Clone ID: PAT_MRT3847_47762C.1
atgtgatattgatataaaaaatgactaggaaagggttgtacatcagtgaccacgcatgaaacatgagaaatgaactacagcctattgatgaacccctcacatcaatctcatgatggaacaatgctggagctacaacatggtggcactgatgatgatcgcagactaaaaatcttttaactggagtcaggtggaggcttacgcatatccttgacgattcctcctacaggctggctctctgggaggatgtgctcatccctaatgggacctgttgggatacaagacactcacgtccaatagctgacccacgtaacgaatctctgccatgttcctcctcgagttccacattccagcgatgtctgggctaacatgattgcagcccaagactttgggaacacttggatggtgtgcctgctgaccgcatcgatacagttgctgcacttgctcttctctgggct

SEQ ID NO: 84993 - DNA, 548 bp, Glycine max
  unsure (1)..(548): unsure at all n locations
  Clone ID: PAT_MRT3847_47763C.1
cgttcgttagctcggaattcggctcgaggggatctgaaagattcattcattaactcagctgttcaaatagatgtctctgggaaccgcatggcagtggttattcatgttccttacagattaaggaaaggatgccgaaagatgcatgtccagcttgtgcgagaacttgagaaaaagtttagtgaaaaggatgtaatcctgattgccacccggtggatattgatgccaccaaagaaaggatctgctgttcatcgtccctgcacccgaacacttactgctgtacacgacgcaatgctagaagatatagaattgactgctgagatcgaaggatagcgtgctaggtataaaatcgatggtcacaagattatgaaggtcttgttggacccttatgagcgaaacaacaccgattacatattggaaacttttgctgcaccatacatgaaactttctggcaaagatatggngtttgagtattctaccaccgatgcttacgttctatatgctagctctgcatatagctctgaattatatatggaggatgctggatttgc

SEQ ID NO: 84994 - DNA, 565 bp, Glycine max
  Clone ID: PAT_MRT3847_47764C.1
gttggtttgggtaagttttgtgagcgtgagatcttggttaactagttttcgtggtccccagtgacatttttactaagtttaactccgtaactgatgtcgtgtgggtcaggtaaggtaaggaacgagaatttgttcctctttgaatgggtagggagacctacccttttgattaacaactacaattacatgcatgtctcaccatctgatgaggtggttacatggaatctatatatagacatagattataaaatccgattctcactttgatattaggtgggggccaggcggggaggttggtgttcttggaatgcaaatttagagagaggagttaacttatagaaaaatgaactgtattgattcttatattatcaatatataattatatagtattacctaaattatgtaataactcaataataataataatagttttaaattttatataatttaaaaacatatattgcattaattttttatatgtatttaaacaaagtgtgaagcataaaataattgtttcaacaacaacaaaaaacattacacaattttgagttaatctaaaatttta

SEQ ID NO: 84995 - DNA, 175 bp, Glycine max
  Clone ID: PAT_MRT3847_47765C.1
gcttttcctgcgggacgaaccacgagacaagggggggtttgacagaagaggacgggatgccacagctgcgaaccaacggcattcgtgctgaaggccaagcgaaccgagctcatggatccgaacaacatgctgctcacgaaagcctaaccgctcaaacaccggctgccgacaagct

SEQ ID NO: 84996 - DNA, 322 bp, Glycine max
  unsure (1)..(322): unsure at all n locations
  Clone ID: PAT_MRT3847_47766C.1
gcnngnangnnnncnngagntgncggntacaggtcgcaggnagatgnnnggagaacagtgtnagagngtgtggggagtagcnagnnnnnggatggngnntgaagnatgancncacgnggaggaanngncccgatatgatgngnnggtnnaantnagncagnagtccgnnttaggcttgtacgncnnagtgcggngncggggnagggaagtagggagctgaggnttnagncanggtggcantngtgcnaggnagangncngtggaggcagagtggagcggtggatgagtgatgnganagcggnangaacgggggccgangngg

SEQ ID NO: 84997 - DNA, 601 bp, Glycine max
  Clone ID: PAT_MRT3847_47767C.1
cgatctatggctagtaatgtaccaggtaccgtgcacgcataacacacagcagcagtgaatcgcaaccaagtcattagccgctccttcctccaccaccacctctcctcccgccgcgccaatgttaatcgccattgccgccgttttaagggttatatctttactcgtgagggtgagaccgttaagcctctttttaatgggggtcatcctaaccggagcaaccacctatgcattaaccgctgccgctttggtgatttaagcctgccctcctgttgctcacagcatcatccgtctcgtcacaggcatgctcatccgtacccccgctggggtcgccaccttcatatgcctcttcgtagtcatcagggtcctcagggtctgtttatttggcactgttcgtactggagttttcttcgccaggaggtataaccaagactagttgagttttgcggccgcggataccgaatatagggtaaagcgccaccccgggtttgcccacggccgagctaatagtagcgactacagccacttgtgccgtgctatggtagtaagatagccgtacagcgcctgtcgcctgaccagcggggtaggttattaggtaggcagt

SEQ ID NO: 84998 - DNA, 379 bp, Glycine max
  unsure (1)..(379): unsure at all n locations
  Clone ID: PAT_MRT3847_47768C.1
ggccaagggcaattgacttanacattttattctatggtaaatataaagtcagatctgatatcctcactataccggatgagagaatttgggaaaggccatttgtgatntctcccttgatggacttattgggatcagctattgacagtgacacagttgcttcctggcattcattttcaggccattctcgtggactcactggattatgggaagatttagggagtgaatcacttattggagagtttggaaaggaaggaatgtatagggtaatgcctgttgcaaatggcttacttgactggtcgcggagaacttccgtcatggggatccttaatgtgactgcagatagtgttagtgatgggggaaatttcaagtctgtggagtc

SEQ ID NO: 84999 - DNA, 224 bp, Glycine max
  Clone ID: PAT_MRT3847_47769C.1
gcctggtgtgtgggagtactgacagcgcatgtgcacgctcttattgtagaggagttgcaacctgctgagtaccttcaattgaaggaagcacttgctgatggtagtatctaatggcgactttgtgcttgagtaggactttgaagcactcaatgcagccttctactgcgtcagctcctaacaagtcaactggagatggtgtggagtactcatgcgccacctttctg

SEQ ID NO: 85000 - DNA, 433 bp, Glycine max
  Clone ID: PAT_MRT3847_4776C.1
tccttttttttttcttttgttttcaattttttcaaaagttacatttagcactagttgggatttgaacttacattcatgggtaggttcagttttttcggaccaatcaaccatatctaaaaaacaaaaataagtttcctgtggtcattttcactctgacctcaataatcttaaggaaaaattaagttataacataacaacactgatgtgtaacattttttcagagaattattatttttaagtatttatcaatgttgttacttagtacctgtatcgttacttcttcggaacatatttacaaggtcaatttacacggtgcctctgataattagttgatttctctgctgatcatccttgggggctaaaattattggtttgtaccattatctcactggaagggggaaattttccgtcaaattttagggtgttttatgcg

SEQ ID NO: 85001 - DNA, 406 bp, Glycine max
  Clone ID: PAT_MRT3847_47770C.1
gttctccttgctttggagtacttgcacatgcttggagttgtttaccgtgatttgaaacccgaaaacattcttgttcgggaagatggccacattatgctcacagattttatctgtccctgaggtgtgctgttaacccaatgcttctgaaatcatctgatgttgaccctgcaaaaatctctggtttaagtgcacaagcaagttgcattgagccattctgcattgaaccatcttgtcaagttccatgcttcagcccaagattgctacccaccgctgcaaaagcaaggaaactaaaagttgatcttgcagcccaggtcagatcattgccacagcttgttgccgagcccacagatgcaagatcaaactcatttgttggcacacatgaatactttgctcctgagatcatcaa

SEQ ID NO: 85002 - DNA, 366 bp, Glycine max
  unsure (1)..(366): unsure at all n locations
  Clone ID: PAT_MRT3847_47771C.1
ctaagaagtgctcattactgctcctggtaaagagacatccccacaatgtggttggtgtaatgagtatgattacagccctttgaacccatcatcagcaatgttggggcccactaactgttttgttcctttgtcaaggtccttgatcagaaattcgggggggggaagggcaccatgaccaccactcactcctacaccggcgaccaaaggcttntcgacgcgagccaccaaaaaaaaaagagcgccagggcggnagntnttaacattgtncccacttnaacaggagcagnanaggcagnggcccttggnctnccaacccttangggcnnactnannggnntnggncttcgggngccancaccnaacgnt

SEQ ID NO: 85003 - DNA, 496 bp, Glycine max
  unsure (1)..(496): unsure at all n locations
  Clone ID: PAT_MRT3847_47772C.1
ggaccggnccggaannaattcctgggccgacgagcaatcttctaggcggccgcccgnnnnnnnnnnngggggggntttttaaaagtaatcatccgattacacaaagaaaggctataatcactagaatctctacataattaaacccagaacataataattctagggaatatagctaagccaatagagatcagaatataatagaccctgaacttaaacaaagaaagtacggctatgccttatcaacttcagtcaaagaaaagaaactacggaatcgaaataacccactcagaacgccccagaaaagataacgcggtacgaaagaatcaaataagcccttatggaataaatatgcagctgcaagtgaacccacagggaccggcctaagcaagggttgcacaattactcttttaccagcaaatgcaaaataagcatacggttcggcaataatgataacccccaacatgccaaaactagccagaacccccccagcagtggg

SEQ ID NO: 85004 - DNA, 378 bp, Glycine max
  unsure (1)..(378): unsure at all n locations
  Clone ID: PAT_MRT3847_47773C.1
gctgaatcaaatgcagaataagtgatttatcctgatagtgatgatgaattggatggcgtcatgcggaatagtgaattatttctaaccatagaacataataatctgagattcagccctgcttccacaacacctattactactacacacttagaatcacattgaatccattatctcggactggtcaatagaaaaaggcgccngatttgatcataacttctgatcgctacaatatgaaccccctcaagcaactcacattgaaaaacgctcaatgcatggagtaacaggctatctagccaacgcatcataccacacatgcttgtccctaatctacttctagcttgctcctagcataatcttacctatgtctccagcattcac

SEQ ID NO: 85005 - DNA, 1812 bp, Glycine max
  Clone ID: PAT_MRT3847_47774C.1
cccacgcggagggaagaaaaaagtgacctttaaaacctccgtcgtcgttgctttcttctctctcttcctgtccgtggccgcatgagcttttcgttctgaaatttccttcacatccaacccactttccttttctctctccctctctttttatttatttattcattcattcatttcgctctctctctcccccttctcctttcttcctctgcaaccaaaatctgaatcttagggcaccaacacctttgatccaatgggttcggttgccgcagaagaactgaacttagatttaagatcctccttcgtccccaaaaccatcaccgatttcctccgccacctctccgccaacaacaaccaccctgccaccctccgcgatttcctctcccgcctcgaagacgagctccgcaagatccacgccttcaaacgcgaactccccctctccatgctcctcttaaacgacgcaatttccgttctgaaggttgaatcgcagaaatgctgcagggtggcgcgcgattcgccgccggtgctggaggagttcattccgttgaagaaggagcttggtgatcagagcgaggaggaggaggagaatgatgatgacaaggacgataacgaatgcagggataagaggaattggatgagttccgttcagctctggaataacaacactaccaccactactactaataacaacaacaatgcctctgatcgcaaacaactacttcataaattacaaaccaagaaaagtgaagaagggcagtctgtggctgaggatccttttcagacttgtagtaatagaaatgggggaagaagggcatttatgcctttctctaggtactcttcttcatcatcatctgtgccggtgacaacagtggggctgggggctgcatccaaagaagagaaggaagagagtgttaggaataggctttctcttctgacgccttctgtgaaagcttggtgtggttcaaggggatcaaggagcagttctatcagggctgtttcttcttctcctcccacggcccaggcgggttttgcgtgcgacttcagtaccaaaaccaaagcaaattagagagcgttgctggtcccatgagttgcacagacgattcgttaatgccttgcagaagcttggaggttctcaagcagctacaccaaagcaaattagagagcttatgcaggttgatggcctaactaacgatgaagtgaagagccatttacaaaaataccgacttcatacgcggagagttcctgctgcaagttctaatcagccagttgtggttcttggaggtttgtggatgtctcaagatcagtacaatgactcttcaaaagttagcagttcagggtcaggttctcctcaaagtcctcttcatttggctgcagggtcccggggagggacatctcctactgaaggtgacagcatagaagatgatgaagatgcaagatccgagagttatagttggaaaagtcatatgaacaaaccaggaaaagttgatgtataggatactactctccaccatgaattttgcagataaaagtatacatgggaggagttttaccactacataagaataatactacatgatacataaaaaagagggtcaacgataagaggcagttgtagtttttttttaaggtttagctttgccttatatactgcgtgagttttgatatgagactccgaattaaaatatcattttccttcgctttaagaagctggatatttttttttctctatcataaaattcttttatttcgttttgtcatgggaactctctgatccccccagaagaaattaattactagtccaatatttagatggtc

SEQ ID NO: 85006 - DNA, 1050 bp, Glycine max
  Clone ID: PAT_MRT3847_47775C.1
gactgggggctgctgcatccaaagaagagaaggaagagagtgttatgaatagactttctcttctgacaccttcttctgtgaaagaggggtgtggttcaaggggatcaaggagcagttccaacagggctgtttcttcttcttctcctcccatggttcagccgagtttgcgtgcgacttcacttcagcagactgctaggaaacagaggagatgctggtcccctgagttgcacagacgatttgttaatgccttgcagaagcttggaggttctcaagtagcaacaccaaagcaaattagagagcttatgcaagttgatggcctgactaacgatgaagtgaagagccatttacaaaaatatcgtcttcatacgcggagagttccagctgcaagttctaaccagccagttgtggttcttggaggtttgtggatgtctcaagatcagtacaatgactcttcaaaagttagcagttcagggtcaggttctcctcagagtcctcttcatttggctgcagggtcccggggaggaacatccccaactgaaggtgacagcatggaagatgatgaagatgcaagatccgagagttttagttggaaaagtcatatgcacaaagcaggaaaagttgatgtataggatactactctccaccatgaattttgcagataaaagtatacatgggaggagttttaccactacataataatactacatgatgatgatacataaaaaaagagggtcaacgataagaggctgttggagtttttattgaaggtttagctttgccttctatactgcgtgagttttgatatgagactccgaattaaaattatccttttccacatcataaaattctttcatttctttttgtcatgggaactctctgatgccccctgaagaaattaattagtcccatatttagatgggtctcatctctgcatgtttgggtggacattggctgttctaattgctggtggtggatggattatttcttctcatacttttatttacacgaattttagagatatcttttcgtaattattcctcctttcctcgt

SEQ ID NO: 85007 - DNA, 134 bp, Glycine max
  Clone ID: PAT_MRT3847_47776C.1
tatttatattctatatggatcacggccttatcaataacgcaccaaacctttgaatctgttcttctttgaaaccacattccttcaatgcggcgaccggcttcataaccaaagcccggcccttaaccaattccaaa

SEQ ID NO: 85008 - DNA, 704 bp, Glycine max
  unsure (1)..(704): unsure at all n locations
  Clone ID: PAT_MRT3847_47777C.1
gttaagacattgaattctaccttaattcaaaacaaaaatataattatacggctttataaatgcgtgctttcctttttccacttttaacgtgtgatgggtgagtactacagtgacatacattgaatgaacacaagtataatggaaaagaaggtacataccctggataaaatggggtaggaatcataaaagcatctccaggatcagccaagcagaacatgattagttcatttgcccctgttgcccctccactcatcaatatacggtctgcatcaaatttgaccctacctcctctcacttttgacataaaatttgccattgcatttgtgaactctcgcaacccatgatagtcctgaaagttagcaatatttctgaactgatgcactccttcaggagtgcaaatggaagtcttgggattatttcttatccactcttcaatcagatcaaagcagagctgattttcagcaagacccatctggataacaccttgaggattttttttagggtgaaatgggtttctatcatatgccttcaacccatcaaaatatggagaattctctccatgtttgtcattgttggcaatcttggacagaagctgttggttctgcatgtttaatattagtttctccggaaggtatatatatttatatgatcactctagtttgagttgnnnangctgtggattgngcttgctaggatcctcgtgc

SEQ ID NO: 85009 - DNA, 246 bp, Glycine max
  Clone ID: PAT_MRT3847_47778C.1
gagacaacaaagcagatgcgcctcttcctcctccttcctcagtcactcattctctctatctctctagcgacagatgaatcaaatcgacgacggtcgaaccctctctcctcagccagatcaggtcctagagaacgtctggaaagcgtgctccacttactcgagtcgaggcgcgtacgcaacgccgcctcactagtctcacaagtcctggtactcgcgactaagtcctcacgagcatcgagttcttca

SEQ ID NO: 85010 - DNA, 572 bp, Glycine max
  unsure (1)..(572): unsure at all n locations
  Clone ID: PAT_MRT3847_47779C.1
gggcgcccccnngggcggcgcgggcgngctccagctnggnggcgtgcccgcacagtgatcagctctggaagcggcgaccctcgcagcgncacccgcaacaggggtcccactacatgcggtgacagtggcnacatccaccacaacattgatgttactgatggcactggcgggggggggcgcaacaatgatagctccaactacggggaccatggagacacaccccgcatgatagatggccttacacgcattcgccctgccattggccatcacaaccgcnccgaccagagtggtggcgctaaaactatggcacgagcnatccatcaccaacggtggcggtgctcaaagcaatgacatcggcaacgggcttcgcggttttcaccgcaacagcggcggtccccccagcagagcaaatggacattaccaccaaaatagtggcggnctcaccngcgtccatgggcctgaaaagaccattagcaaccgtaaccgtggcggcgctaaacgccccggcaatggcttccaaatcagccacggcnttccgcccaaaggctatgccaatgccaacacttcttaca

SEQ ID NO: 85011 - DNA, 420 bp, Glycine max
  Clone ID: PAT_MRT3847_4777C.1
aacaggaggaatatattcaagatggcattgactgggctaaagttgaatttgaagacaaccaagactgccttaatctttttgagaagaggccactggggttattatccttgttagatgaagagtccactttcccaaatggcacagatttaacatttgctaacaagcttaaacagcatttgaattctaattcatgtttcaaaggagaaagagaccaagcctttactgtacaccattatgctgggcaggtaacctatgatacaactggatttctggagaaaaacagagacctattgcacttggattccatccaacttctatcctcttgcacgtgtcctcttcctcaaatatttgcatctcatatgctcactcagtctgataagccggcagttggtcccttacacaagtcaggtggggcagatt

SEQ ID NO: 85012 - DNA, 152 bp, Glycine max
  Clone ID: PAT_MRT3847_47780C.1
tgaagttgcttgttttctttgtagctgcagtagttttggtttcatggctatgccatggcgtaggctaccaaagggtctctctccgaatccaaactggctatggtgagcgttcttcggacagtaatatgcgcaagttttaagcttgctgtgga

SEQ ID NO: 85013 - DNA, 359 bp, Glycine max
  Clone ID: PAT_MRT3847_47781C.1
aacctcttgggctgatttatgtgcttgcatggtcgtgagaagatgatagaagggggcaaagttaagaaaatggatagacccaaccacggaagagtgactcgaaaacacgacgtacgacactgcatggtcgaacgtcctcactaaatggccttacgattccgagaagcctcatctcacagagtatgaaaccaaaatgatcggatcgggaaaaataagtggctgtctcatacaacttaagtcgcatgcatactgcgtacgcttatgttacagtacaccccacagcgatattcaaacctaccctatcgcttaatgccccataaggttgcgatcggaaaaatatcggtcccactgaatccaac

SEQ ID NO: 85014 - DNA, 237 bp, Glycine max
  Clone ID: PAT_MRT3847_47782C.1
acactgaataatacttatatataatcattcaaaatacatcgtttccaaaaattccgaagaaaaatttccaggatgttacaccttctccttttttggaaccccaactatcacgactgcaaaactaaactggaagaactatttgtcttggtctgcttcggttgagctgtggtttctcggccaaggacaccataaccacttggaaaaaggtattgatactgttccaagcggacgcctggg

SEQ ID NO: 85015 - DNA, 296 bp, Glycine max
  Clone ID: PAT_MRT3847_47783C.1
caggcaggcaccaaacgaaacagggtaaaaaaaggtaaagaaaaacaaacaaccctgggaggggggagggctggggggctttcgccaggggaagaatcccgcccaaaaaaaagatctcgctccctcaaaaaccaaaaaaaagggggaattaaaaccccctttaacttagggggggactttaaaagggggggaatacgtattgggaaaaaaaaaaaactggggaaaaaaagaagggtagcgaaaaaattggggtcccccggcgggttctaaaaaatggaaagaagccactctttttg

SEQ ID NO: 85016 - DNA, 325 bp, Glycine max
  Clone ID: PAT_MRT3847_47784C.1
caaagggtccgattggattaaagcggcgattaccacaacatgggatgccgacagtgctgatcctatcatagcatcaatacctgcaacatgggaatctcaacttcaccaagatggtcaagaacaaacacatgctctgaacgaattcaccatagtggtaactcatatgatttactactgcaacaaactggatcctactacaccaaagtggagttacaacaaggacaatcacacctgggatgaggcatcttcatacaggataaagatgccatctatctgtgctcacaaaatcttacaattcaccatataattttgccacaaacatcat

SEQ ID NO: 85017 - DNA, 266 bp, Glycine max
  Clone ID: PAT_MRT3847_47785C.1
gaagaggacacctgcttacctcccatactagggcgaactctaagatgcactacaagcccaatctaactaactagattaaagcttcactcatacgagtcctatctttagcaatattctatcaccatagtaaatgatcggcttgctactcaaagcctggttatttatttattctaaaccctgactggatgattcatgctggatcaattctagcacatgctggaaacatttcttccaagtaatcaagctcctgttggcgggttctgaga

SEQ ID NO: 85018 - DNA, 715 bp, Glycine max
  Clone ID: PAT_MRT3847_47786C.1
ccatggagaccctatcacccaactcgaaaacaaccaattatacgcaacttttgcttctttcatgacaccagccatggacaagacttcatcctcgtcggacatcaccaccgtccaccccgacatctttcaatcccacatccttaatcgcctcgacggccccaccctcgcttccgccgcttccgccacctctcacctccgcggcctctgcaccgaacaccacctctggcgtaacatctgcgccgccacgtggccttctctcaacgatcccctcgccgcggccaccatcgccaccttccccgccacccaccgctccatcttctccgactccttcccctccctccaccactcccctcccaatcccatcccaacacaaccaccgacacctccgccgccggagctcatctccgccgtggacatatactacaagggcaaacccgtcttttcccgcgtcatccgaaccgaaacccacaaggggtggttcctctgctcccccctctgggtggacctcctcgaccccaccgaggtggtccccactcccctgaaattcgcccaaaccaacgacgaaatcgaattgctcaaccacctcgtggagaatctcgccctcagctggatcatcatcgacccgacccgaaaacgcgccgcgaacctctccagtcgccgcccgggttcggcgcggcgccactggctcacggcggagctcgaggtgctctacgcc

SEQ ID NO: 85019 - DNA, 485 bp, Glycine max
  Clone ID: PAT_MRT3847_47787C.1
tttttttttttttttttttttttttttttttttttttttttttttttttttttttttttttttttttttttgggcccaaaaggaaaaaaacttttttttggggggtccccaaaaaatgcatttgtgccaaggtttatcatcactgtaataaaaacaaaaattgggggccttgggttaaccccctcaaaaatgaaagggagcaaaagggagaaggttttttcctagaagatggaccctaaacccccgaacttttgaaagaatttggggttgttttttggggggaaatacaaaaaagggggggcccctttaataattcccccccccttgataaaaaaaccccatgtttttgcaaaaaaaggcaaccaccctcccccacttgggggggggggcccaaaagaaaaaaaaaaaccccctttgggcctgataaacccaccccggtttgaagggaaaacgaaggtttaactcttttgtgaccctctagccct

SEQ ID NO: 85020 - DNA, 349 bp, Glycine max
  Clone ID: PAT_MRT3847_47788C.1
aagacgcgtacgactgatgaggctagttatttttcttccttaacgatctctttcggagctggtgcgactggcaacctgtctcacccgaaaatggctggctgaggcggtgaccgtaggtgcagaagcgcctgccagagcatgaacacgcatgaaggggctgcccgacgtacctagactcgagctacaccggctcaaccaccacggggacccagcacatgggagggggaccagttaaagtttaatctacgagtgctgccatgggtgttcccaatgggaacgaggggtgcaaatgttgagctagctggaactgcaacccctgctctagcaagagaggtggcgcagagctaaa

SEQ ID NO: 85021 - DNA, 443 bp, Glycine max
  Clone ID: PAT_MRT3847_47789C.1
aaactaaacctttgccgtcccctgctccattttcttttcctcctcctccatcacattttcgcctcctcatgtcccctccctgctccttttccccttcctccgcctcctcttcctctgacagtccctcagcagaaggccaagcccagcaaaatggccaagttttggccccccgtccattgcccacgtgggaggaaatccgtgccgcggtgcccaaagagtgttttgaaaagtctctccttcgttctctgtactatttggccatcgatttgctcgtcattggcttcctttacgccgttgtgccttttgtagagacaaatttcggactgatcggactggttttctggtactgcttgctcggcatgtttttgtcctctctgttttgcgttggccatgactgcggccacggcactttttccgattggacatgggtcaacgacattttc

SEQ ID NO: 85022 - DNA, 157 bp, Glycine max
  Clone ID: PAT_MRT3847_4778C.1
gggagctctgagattcgaggacggagtcaactccccggtggcacgtgctagtctatgcaagggcgtagtggcagaagccgacaagggcatcctaaaggctctagagagctggaagagagtcgaaagcggtgagggaaatggcggcccaggagccatt

SEQ ID NO: 85023 - DNA, 1158 bp, Glycine max
  Clone ID: PAT_MRT3847_47790C.1
cgcgtgccctcgagccgaatcggctcgagcggcttcgagcttccttactctcttcttcctttctctctctcctcggtgtccttctttcccacttcccctcctccgcatgccccttcttcttcctcccttccccttctctggataaggaaagacggagcaaagcgtaagaaaggcaggatgagtaaaaaacaaagagagcaaaatcactttgtcctggtgcatggtataggccatggtgcctggtgttggtacaagcttaagccactgttggaatccgccggccacaaagtcacagtccttgaccttgcagcttctggcatcgacacacacgacattgaagacatccacacattttctgagtattctaagcctttgttggatctcttggcgtcgcttgctcctaatgaaaaagtggtccttgtcgggcatagctttggagggatcagtatagcccttgcaatggacaaattcccagagaaaatatcacttggaattttcctaacagcttttgttcctgatacccaacacaaaccatcacatgtcttagaagagtacattgatagatacccatataccggatggatggacactgagctctggaatagtggaggcaaaacaacattgctttttggcatcaaattcttgtccactaagttctatcaactctgctccactgaggatctggaattggtgaagactttaagaagaaagggttcactatttgctgaagacctttctaaggcagagaatttttccaaagagaaagatgggtctgttccaagtgcttatattatttccaatgaggacttggtaattccaaaggagtatcagcaatggatgatccaaaatgcagggattgatgtggtgcgagagatcaagggatcagatcacatggttatgcttagcaaaccccacaaactatgtttatctctcctcgagatagctgataagcaagttaagtaaacgttaatcttattattttcaagggattcactttgaccttaagtttagtccgtaaaagtatatatattgtaatccataataaattttcaaaagttgaaaattaatgtcatgtgcgtgtacctacatgtgcacttcgtcgaataaactgttgtctttcaaacttgtgtgctatgactaattctaatttaaggagaa

SEQ ID NO: 85024 - DNA, 293 bp, Glycine max
  unsure (1)..(293): unsure at all n locations
  Clone ID: PAT_MRT3847_47791C.1
tnnnggggttttaatataatnaggggtggggggaaataatttnttaaaataagggaagggggggcgttttctttccaaatttaaaagccccccaaggacatggtttgggggaatttatattatttcttaacgggaaaaatttatatttttccccccaaaaagaatactctttgttcttccaaaaggggtatttttctctaaaaaaaaattaaggccctaaaatttttttcccacaaaccctttaaaaaaattggccccccgcccctttgtgtttgtcttaaaaaccctttttt

SEQ ID NO: 85025 - DNA, 1060 bp, Glycine max
  Clone ID: PAT_MRT3847_47792C.1
ccaaaaatattctcttaacccatgactttgaacctctggtggctgattttgggcttgctagatggcactcagaatggaatatagatactgaagatcgcgttatagatactgaagagcgtcttgtaggaacttcagggtatcttgcaccggagtatcttgacgctggaaaccttacatataaagtagatgtatatgcatttggaattgtattattagagttaataacaggtcgaagaattagcgagttggaacagttcaatggacactcgtatctttctgaatggtttcatcccatacgcatgttagagcccggtcatatcttacaaaacgttcgttctctcaaaccatgctttgattctaaggagtcagtggaatttaatcttcagttgcaagccatggcacgggctgtttcgttgtgtctacgtgtggatcctgatgcaagacccccaatgtcaaagatcctgagagtgttggaagggggtaatccagttcgtcctatgggtttagacatcaattcagttggcaacacaagtggccatttaagtggtttgaagtcgcacactccaccaaaaggtacaataaatcattcccgtagactatcacattgatcattgtttcggctctttgggctagctagaggatctattgttggcaatatagttctgtttgtgagctgcatagtatcagttatccatttgaaacgtggaactctctcgtacgcttatacaaactttcagacaagcacagcacctggtggaaattagtaagaattaagaagtcattatgttagcattctcattaaaaaaaaaaaatggtttgtaatttggagggggggttctgcagccttgtaattcctaactcaccatttttttaatagcaaaaattcatttgacaggggatgcttctctttgctctattttgtctaggatctaaagggaaatccccaaattgattgttcaccgtaattttttttttttttacgtacaccgtattttcttcttgcttgaagaaaatatattaattttgaatacaagggtactcaagtcctttacaattaaaa

SEQ ID NO: 85026 - DNA, 472 bp, Glycine max
  Clone ID: PAT_MRT3847_47793C.1
ctttcatgacttcttcctacattaaatgtacagattctttcttcatagcattcggaaatatggctgatgacaccatcaattttgtggcttttccacacactctggtgcagttttggagagattaaggaaaaagatgtattgaaattttcacaagaggaatttcttacagcttgttcaaccaatgtgcgtgctgtatcaactctgtctggtgatgggtgtccatatttttatgctatggtacatgattgttcattgtctacaataccagtcgattttgtcattggtgttaaactgacaaccataaacaatatgttgtgcatatgggctcaaattctggaatgtaaggatatcatcttttgggcacccattcctaagtattttttacaatagactgtttttaatcaaattgttaccttgagaacaccatagatttttgattcttgcaagtcgaggttttgtaattttttattgc

SEQ ID NO: 85027 - DNA, 442 bp, Glycine max
  Clone ID: PAT_MRT3847_47794C.1
tcttatatataactttacaactacattttcttttcttagactcaaaatcacacacaagggatttaactaaaaataagatcgagtggaacaaatctttacttcttccaccacacctgtctcaccttttatacaatggtctccactcccgtttggaatctacggctattgacatttttaaagttgacgttatacaacttctcgagattctttccgatgaatactgtgtccgtttttagctatccaaatcttattacaaagcgctcacttcttctatgaataatcattttaaactcaatcatgtcattgcaatcattgaacattgtaatgacttctttctactttataccgaaaccataacccttgtacacgtaatagataatttttggttcactgatccctctgtatatccaaatagcacatatttgcttcaaagatgtcacat

SEQ ID NO: 85028 - DNA, 228 bp, Glycine max
  Clone ID: PAT_MRT3847_47795C.1
ggttttgtttcggatgccaaattttgtgacatacgaaaaaagcggctagcgggaccgcctgtatgtctaaagatccgctaccagtctattctcgttacaactgggtgggtgtcatcaacagatcaagacttgcgttgtcgtaccagcaggatcctataatattctagcaaatcggccatggaacctttatcctatgtggaaaagagatcggatcgggccataaaaatg

SEQ ID NO: 85029 - DNA, 170 bp, Glycine max
  Clone ID: PAT_MRT3847_47796C.1
gagagcaaaaggggagaataatgttttgcgttgggcatcgtgtaaagggaaaaattgaaccccttaatatttctaagacatgacctctagtgcccctataaggtgaactattatggtgaacactgctgctgatatgtagagatggtgtaagaccggctaaagacaattgt

SEQ ID NO: 85030 - DNA, 723 bp, Glycine max
  unsure (1)..(723): unsure at all n locations
  Clone ID: PAT_MRT3847_47797C.1
agaacactggtgatgcctccactatggtgcagaattgataggctatggtttccccatcctggtgttttagacgggtctatgactagacaaccttttctctgtcctttggatcatgtctttgaggtaaatgccatgttgaaagaactccctgaggaagagtttggccccggaatagatattagagagtactcaatacttgataatcccatcctcccctcagaggtgaagaagtcatggcttgatgttcagctctgtaaggatggaacccaagattgttttgcatcaaataacaccactgttgggggagtactcaaatttccaaggcatagcaatgaagaaagggtatttaaaattttgatgcatttaatggttatttcagttctagactttaagttcttctaaatcaaccctataaagtacattggtatgtttatccttgtgtgtcagatcttgtttggttatgccaagtctattcattaacttgcataaggtctaaggatcaggagctggttggaaagctcacctagaaaacatggttgattggtggggaaaatttttaagtgcccaagttgtcatgtatgactgcgaacctaaaacctaattctgggtcacataagaanattatgctggaagtaagaaaatcttacttttcggtcaagttatttttagtatctttctgtgccaattacccanatgactttttggatgaatattcctaaacat

SEQ ID NO: 85031 - DNA, 1083 bp, Glycine max
  unsure (1)..(1083): unsure at all n locations
  Clone ID: PAT_MRT3847_47798C.1
cgttctcctaccacggcgagaggctcttggatctggacagcgtgaggagaattataacaaaatcaaattttactttaaaaccatatataaaaatcaagttttgatctcaccactatcacccaaataagaatttaaggtgatgtaaaattgttacaatgattttctatgggtgataaattactataaaaaagcagtggaaaaaactaaaaatttaaacatgtactataagaactagaatttaacataacctaaaaactagtctagtaaccaactactggcgcgtgttgttgcaggtgcacccgaacctggacgagatagagaaggagaaagtgtgcagcgtattggacccgttaaaattgtcctacgaggcgcgtgtgcacgcgtcaaagaacaagcgcttgccgctgcagatcgtgcttcacgcgctgtactacgatcagctacatataaggagcgggacggcggaggaaaaggtggcgctggcggtggcggagaaaaaacagctgcaagctgacgtgtccttggtgagggagaacgaggagttgcggtcggagctgatgaagatgaaaatgttcatttccgatatgcagaaacatgggcacggaacgtcgtcgtctggaagggagaatattgggctcgctaaaaagcccacgttcttctcgtccatgtccaagaaactgagcaagttgaacccgttcaaaaatgggtccaaggacacgtcacacattgatgatgcccctgtggacttgaccaagcccagaaggagaaggttctccatttcctagatcagtgtttcttagtcaattcaaatctccatgctttgtgaaaagggttttgttagttattttttaaatagttacgttttcactcttgatcgttagttttatttatttatttatgaaggtgtcaatttgtaattaaggaaaaagtgagacttgattggatttcttatgctagattttatcgtatctgtatgttataataaaaaaacatggaagatggatttgttcaggatgatttgacttatttgttatttttttttttgagttgtccattcaaaatgatattgnttatattaatatt

SEQ ID NO: 85032 - DNA, 355 bp, Glycine max
  Clone ID: PAT_MRT3847_47799C.1
ccctcgcgtccggtctgttctgtctccccctccccgattcgttttgcccctttagttgccctaatttcaaccatgcctgggcgtagctgcggtggacgatctgcccgagctgctgccgtgcaggacctcgtgctgctccagatcaccatgctcctcctccaggccctgcatcagagcggcggaggacctacgctctggaggcaatggctcaaccataggtcaaggtgtggcttttggcactggacgtgcagtggcacacaaggacgaagatgctgacatgggtactagtaccattcaacatgaagcagtagacacggaggatgctgatgctgaccctgcacccactgcaaatact

SEQ ID NO: 85033 - DNA, 345 bp, Glycine max
  Clone ID: PAT_MRT3847_4779C.1
ggctcgaggcagcacccatatcgtggtggccagcattgctgctgtcaggggggacgagctactgcagaactggaccatccagcttagacgcactggcactctatccgtgagaggcatgatgataccttgagtggatacaggaacgcagtgccgggccttctgacacgggtagaggccaagggggagggaatgctgcagcagcaccaaaggggtggagagaacgacaaaaggcctggcgagagcataaagaatctacctgagcggagagaacggagaacgatacgtgatccacacaggaagccatagggggcacaccattcggagcattggctgtgtgaccaaagc

SEQ ID NO: 85034 - DNA, 546 bp, Glycine max
  Clone ID: PAT_MRT3847_477C.1
gtccgaatccggtcgaccacgcgtccaattatagtgattgtactttttgctttttaaaacaatattcccctttgtttcctttttctgacctgatttatttttgagatgggaggggtgaaaccgtgaaagaaaagatagtactctactatttagcaagaatggtaaaatgtgtgctgagctaaatataaatatattaagtgttccaatcaaaggctgttttagcatgatctgatatatttcttctgatggaattgttcctgactacaggaattagtgtggaattggtcatgcggattccttattctctttcaatagtttttttctattcttaataaattctttgtttatgagtagaagtagatcaattgaaatggaagaagatcaagatcagcagtcaaattgtacaaccgcgccaagcaagtagcggacattggagtctcattgttaatatcgtagactacatttccctcccccaacaatataggctgaaagatctaccattacttgttttctaattgtacacatgattggttttctgtgtgcaca

SEQ ID NO: 85035 - DNA, 501 bp, Glycine max
  Clone ID: PAT_MRT3847_47800C.1
tttttttttttttttttttttttttttttttttttttttttttttttttgcgcccaccggggaccttttttcattccaaaataattttatttcataccccgggggcaagactgaacaacacctaggttttaagcgaaaaattgaaaatatgggcccttgtgaccattccccaaagctgaaaaaaggggattccaatttagcttccatccctttgagcaagctttgccctcaaaatttttaaaaggttgggggggggacaatcggaatattccaaggggggaaggacccctctccgggccaaatttggttgggggggaattccgtcagtttgggaaaccccttcaaagaaaatgcatttaaaggggccttctttctgctacaattggctgaaaaagccacagtcctctaaaaatgggttgcctgaatatttacctttcatatttagctaacgaattatttggtagcaacggggctgaaaattaatgaagcccgaacttacat

SEQ ID NO: 85036 - DNA, 311 bp, Glycine max
  Clone ID: PAT_MRT3847_47801C.1
agggaaggctggggcgggggaggtgttgctgttgaaaaagcagaaccggcacatcttaaaccttgccgcgggagaggataatgtcatactgcacacgactaatcttacgtagcccgaccctccgtgtatgttcttttgctactcgtgtggcgcacgtgccttacttgcggggagccactggcgcacgtgccgctccatcggaccctgctgatgacgcccccggaggccctgaattcctgcgagcctcgaccgccgaacgccggcgagggagcctttacgattgccacgcgagttgtgtcaccgccgactac

SEQ ID NO: 85037 - DNA, 1495 bp, Glycine max
  Clone ID: PAT_MRT3847_47802C.1
atatgcgaaagccgagggagaccaaaaaacaaaccaaaaaccatcatcataacccaaacccaacacaccatagcacagcaccacctcgtatcacataataacaaccttaaacccccaaactttcatgtctcggatcccgtgattcggatccccaacaacaacaacgccaaaaacaaaaaacaacctagtattatttggatccggttcccatgacgcggcgttgctcgcattgcagccacaatgggcacaactcaagaacttgccctaaccgcggggtgaagctcttcggggtccgattaaccgatgggtcgatccggaagagtgctagcatgggcaatctaacccactatgccggttccgggtcgggtccactccataccgggttgaataaccccggttcgcccggggaaacccccgatcatgccgccgcagtcgccgacggttacttgtccgaggacttcgttcccgggtcttcttctagctcccgtgaaagaaagaagggtgttccatggactgaggaggaacatagaatgtttttactcggattgcagaagctgggcaaaggtgattggcgtggaattgcaaggacctatgttatatcaaggacacctactcaagtggctagccatgctcagaaatatttcatcaggcagagcaatgtgtccaggcggaaaagacggtccagcttgtttgatattgttgcagatgaagcagctgacactgcaatggtacagcaagacttcttgtctgctaatcagttacccactgaaacagaaggcaataaccccttgccagctcctcctcccctcgacgaagagtgcgaatccatggattccacaaactcaaatgatggagagcctgccccatcaaagccagaaaacacacagtcatcttatccaatgttatatcctgcatattattctccggtgttcccgtttcctctgccctattggtcaggatacagtccagagtccaccaagaaggaggagacacatgaagtactgaagccaactgcagttcattctaaaagccctatcaatgttgatgaactggttggcatttcaaaattgagtttaggggagtctattggtgactctggtccctcctctctgtctcgaaaacttatcgaagaaggaccctctagacagtcagcttttcatgcaacaccgacatgtggcagttcaaatggcagtgccatccatgcagtttaagcgtgtgcctcatgttccgaggaagggattgttatgtgagcattgttgattgatgggcgcgcatgaatgtggtcttgtgttcatcaatacatctgtttgtggggtaacctaaataattttttttttttggcccattcacagtgattaacctagtttgtttatttgctggtaggcagtagcgtctaggagttactttgggtctaaagtaaaacttttatgtttgttcagtgattttatttgtcagggttatgtaaagttaatgttaattgtgcagtttgacaatc

SEQ ID NO: 85038 - DNA, 1745 bp, Glycine max
  Clone ID: PAT_MRT3847_47803C.1
ggctcgcgatcggcgaaagccaagggtcaccaaaaccatcatcataacccaaacccaacccaacccaacacaacacaacaccacctcctatcacataataacaaccttaaccttaaccttaaaccccccaattttcatgtctcggatcccgtgattcggatccccaacaaaaaaagaaacctcgtatttgttattttcgtcggatccggttgggaacgctcatgacgcggcgttgctcgcattgcagccacaatgggcacaactccagaacctgccctaaccgcggggttaagctcttcggggtccgattaaccgacgggtcgatccggaagagcgccagcatgggcaacctaacccactacgctggttccgggtcggccccgctccatgtcgggttgaataacccgggttcacccggggagacgcccgatcacgccgccgccgccgccgacggctacgcctccgaggacttcgttcccgggtcttcttctagctcccgtgaaagaaagaagggtgttccatggactgaggaggaacatagaatgtttttgctcggattgcagaagctgggcaaaggtgattggcgtggaattgcaaggaactatgttatatcaaggacgcctactcaagtggccagccatgctcagaaatatttcatcaggcaaagcaatgtgtccaggcgaaaaagacggtccagcttgtttgatattgttgcagatgaagcagctgacactgcaatggtacagcaagacttcttgtctgctaatgagttaccaactgaaacagaaggcaataaccccttgcctgctcctcctcccctcgatgaagagtgtgaatcaatggattccacaaactcaaatgatggagagcctgccccatcaaagccagaaaacacacatccatcttatcctatgttatatcctgcgtattattctccagtgttcccgtttcctctgccctattggtcaggatacagtccagagcccaccaagaaggaggaaacacatgaagtgctgaaaccaactgcagtacattctaaaagccctatcaatgttgatgaactggttggcatatcaaaactgagtttaggggagtctattggtgactcgggtccctccaccctgtctcgaaaacttattgaagaaggaccctctagacaatcagcttttcatgcaacaccaacatgtggtgatatgaatggcagtgccatccatgcagtttaagcgtgtgcctcgtgttccgaggaagggattgttatgtgagcattatggatcaacttggggcctgcatgaatgtggtcttgtgttcatcatacatctgtttgtggggtaacctaaataatttttttctttgcccattcacagtgattaacctagtttgtttatttgctggtagcagtagcgtctaggagttactttgggtctctaaactaaaactttatgtttgtccagtgattttatttgtcagggttatgtaaagttaatgttgattgtgcagtttgacaatctacctagtaccaagttgtgcttcatgtttgaagtgctgtggattaaaatgtttgaagtgctttagcccctcaaacccgggtctctcctgaattaacccagtgagacaggaaatcaagagcactgagctgcttgctagggtttgaaatgggttgagtttttttttttctccttcaggtttggttagtttttataaaaaacttaatttgggcttggaaattaattttaaagatgtcaatt

SEQ ID NO: 85039 - DNA, 185 bp, Glycine max
  unsure (1)..(185): unsure at all n locations
  Clone ID: PAT_MRT3847_47804C.1
cttcnctncncntctcttcgatggtacccctccncgcagatccganccgcacccttcactaaacccatnattattgattatngattganaanaacatttgggtttcannnncattccaagttgtngcattnntcaacatgtcntnagctcactgctgaacccctgnnctntctttctttgccccc

SEQ ID NO: 85040 - DNA, 333 bp, Glycine max
  Clone ID: PAT_MRT3847_47805C.1
cctgaacatcctgcatggggggggcggtccttccattgccccaaaggatgggttattttcttgtaaggattgtgttccaagaacctatggggtttaaaatccacaaaatcttttggggtaaaataggggatgggggaaacggcttttccccaaggcaccttccggaagggtaaaaggatggcctttactattagggggggggcttgtgccaaaaattgtattcttaagaaatatgcaaaaggctgtcttttaatggggagaatatttggtggagaatctgtcttttgaggttttaaaatggcctctccctacataaaaggaccggcttttttt

SEQ ID NO: 85041 - DNA, 543 bp, Glycine max
  Clone ID: PAT_MRT3847_47806C.1
ccacgcgtccgcgctctcactttcaaatggttgcagcaactgcaaccctatgaaaccctcttccctccatttccaaaaccctaaccctatcttctgcagccccatggcacactccgcgctccgcgtcctccgcctctcccccttcctccagccattgcgcctccgccacgccccctccgagctccgcttcctctccgcccgcgcgccgcggcgcccggcctcggcgtttcggtccgccaggcgccgcgacgacgagaatgggagcgtcacgacggcggcgtcggcgacgacagataacggttacgtgagcgaggggagggtggtgccgacggagcttcacaaagaggccacagaggcttacatggcgtatgcaatgtccgttctgctcggtcgcgcgttgcccgatgttcgcgacgggttgaagcccgtgcaccgaaggattctagttgctatgcatgagcttggcctctgatcccaaaaaccgttcaagaagtgtgcgtagagttgttgtagaggtattgggaaaattccaccctgatggag

SEQ ID NO: 85042 - DNA, 296 bp, Glycine max
  unsure (1)..(296): unsure at all n locations
  Clone ID: PAT_MRT3847_47807C.1
gcagcgtcaactacaaagcngcagctacttttcatgcaancccacnaaagtttgagcaggagcnacacctntgcagccggaagtctactccagtccattttccnaggcttttgggctggaanctgtnngangtanaaagggtcacatgctccccttcaggctgatcttaangacttgggctcacaaagtggtgttgatgttaccaaaattgcaggattcgnccttgncacttctgccntcgttgtctctgggggcagtgctgnaagtgttccnaagaggctaacttcgacgaaatc

SEQ ID NO: 85043 - DNA, 209 bp, Glycine max
  Clone ID: PAT_MRT3847_47808C.1
caagtccagcgactgcaactaatccttagactgcaagactattaccctacctgaggaagccgttgacaccatagacaacgccaacattcctattaaagacagggataagatccctacctactgctcaaagacttatttttgcagcaaaacaactgatgatggactcacctcttgggatgacgacacttccacggactaaccctttgata

SEQ ID NO: 85044 - DNA, 431 bp, Glycine max
  Clone ID: PAT_MRT3847_47809C.1
agcataccaagttgacaacccattttttttgattaaattgagagaacaaatgtctttgattatacaaaactttgtatcccagaacgggaaacgattgaatagattgacccctaacagcataaaggaaactgagttttagcaaatgacaccctgggacaattggaaaacacgcaaaacctagcaaatgggaaatccctgattatggaatcagtctgatgaaaaagttgacacgtatgttgctgcctttataagtatcagaggatttgattacttaaaggaatttgcgctggatgaaccattttcaaaggggggccggttttttggatcctggggttactgtttgtgaaagaaaacttgtatggcaaactcgccgggggacatattgggtgatggaaacgtaaagccttaaaccaaaagacctccctaaaatg

SEQ ID NO: 85045 - DNA, 162 bp, Glycine max
  unsure (1)..(162): unsure at all n locations
  Clone ID: PAT_MRT3847_4780C.1
ggagaggcncccagnngatnnctctttcagggagaaanagagagtgctgtagagagagagcacaacatattattttcattttcatctttttttgagtatcaagaaatggcaaccacggtgatgaccagtctccccgaattcagtggtcttagaccccaattc

SEQ ID NO: 85046 - DNA, 291 bp, Glycine max
  Clone ID: PAT_MRT3847_47810C.1
ggaccttacacggcgcctttttttttttctttgaaacccctgtgtattgcgcttatacaacaaaattgccagcgaagctataccaccatgataatgaccgagcgtcggctttacgagatatggccctgataaaattcctttccaaggggtttattaacatatcccgggaaagaattcccttccacaatctacccccacaacctgcaaagctccagccaacaagacaatgcctcatcttcacctttagctctttccggacctgggcgacccgggacttcggaccagacctgc

SEQ ID NO: 85047 - DNA, 197 bp, Glycine max
  unsure (1)..(197): unsure at all n locations
  Clone ID: PAT_MRT3847_47811C.1
agantnntntaatngcnaatgcanggangcancaacatagatagatactacatgcgtgcgtagtaggaagggtanctacncggtatcacacaacacaccaacacaccgttttncactctnttctgattcatgagggcgcanagatgggtgttatcgtggggatcatgttgctatgcttctncttcttaagcttttcn

SEQ ID NO: 85048 - DNA, 772 bp, Glycine max
  Clone ID: PAT_MRT3847_47812C.1
ccaccttgcccgaaataaacggtatatatagcagacccgcaaggtaaggaaggtccagttgcacaacaattctttaattacaaccttgccctcgtcaaagaaaaaagaagcaaaaaactctcacacagagaaagagacttaaaaaaaaacgggatttgttttgctgggttgggttgtgtgaattgtgaaatgcgggtgacggagttgcaacgtgccacggcggtgtaagatcttccggcggcaacgagcatttcttcggcgagatgggttcggggcagattggcggcggcggaaacggtggtggttgttctaacggcgggagttgttgtgatatgagtgtgaagtgttcgtgtaggtggagattggagaaccaacaatactacaagcggttattttcttcgggtttcattttcttctttgggtgtttcgttttgttcggatccattgccaccctctacggttggttcgctttttcgcctacagtgcacaccgcactttcctcttctttcgggtgtcgtgaagacaatgagggttcttggtctattggggttttctacggtgactcacctttctctcttaagcccatagaagctgcgaatgtatcaaacgatgagactgctgcttggcctgtcgcgaatcctgtggtgacgtgtgcttcagtttctgatgttggttaccccagtaattttgttgctgacccttttctttttattcagggaaatactttttacctgttctatgagacgaaaaattcaatcactatgcaaggtga

SEQ ID NO: 85049 - DNA, 186 bp, Glycine max
  Clone ID: PAT_MRT3847_47813C.1
ggaacctcaaaatcagtctctattatttttctcattgtcttgtctcatccatataattgtatagagagatgagggcagctgaatgatctgatgctgtgttaaatgggttgggatcttacttcttgagtgtacgaatcacgagccagccccttctggccactgctattagaggcacagtttgtgctg

SEQ ID NO: 85050 - DNA, 285 bp, Glycine max
  Clone ID: PAT_MRT3847_47814C.1
gttattatgagtgatggtaaacaatttctatgcttctgaatctacacctgtttttgagtaactattttcactattatttttcaattgggcctgttaagtaggttttcatgttctggaaatataaccattttttgtatgggttaggttatctcatttagttttactgccacatttttgtatcttccattagggaaagtgcttgaagcatttgtgcttacacacaagcattagcttttgttaattgacccattgacatagattgattagtggattgacgtatgttga

SEQ ID NO: 85051 - DNA, 480 bp, Glycine max
  Clone ID: PAT_MRT3847_47815C.1
ggctcgagcttgacaaaagataaactctaatcctgctctccactatcaggattaattgctatattttcctttccatttatctgttgggtagaatattaggcgtaataacaaagttgtcttagtggtattcttctagtattatattagcaagccttctttttgttgtgggctaatattggactccatacaggttagagaaattgttgccattttggatcttgatgttcttttctatccttgtccaagaaatggcccaaatttccgtcaaaaggttctagagatgggtggcaaactgcagttcccctacatggttgacccaaacacaggcgcttcaatgtatgaatcagatgacataattcggtatttggttgacaaatatggtctgtgtcttcgtatatattctctattctggaatgtgcttatgccatgtagtcttttttcctggtgcatttcaatctataaaatataattacatatatg

SEQ ID NO: 85052 - DNA, 304 bp, Glycine max
  unsure (1)..(304): unsure at all n locations
  Clone ID: PAT_MRT3847_47816C.1
cagaatacaaaaccctaaaactaccaacgtcacccaaccaccacaacctcccttaatagccgccgcaccaccataaccaccaactccccanccgcgaccaacctccgaccactaccgccgcgccgcatcgtctccgacgccaaccagaaccatctcatccacccttcatccggnatcttcattcttaggaactttggcttcgagcatttataaaggtgcagaganagaacattaaagctgctggtgctttgattctgctatggaacattgaggcaaagctcagcatcttaaaccctgtaatgtg

SEQ ID NO: 85053 - DNA, 190 bp, Glycine max
  Clone ID: PAT_MRT3847_47817C.1
agcgggtaacattgcaggacttgttgattgtaaagatgctcctaaaccagataagtagcctgtagaggatttaaagctaattcatgagtggaaatgcagtgtaaggaaggtaataaaaattactctggaaaggctttctctaagatctgacaccgaacttaagctttctgtggcacgaaaaatgaaagat

SEQ ID NO: 85054 - DNA, 185 bp, Glycine max
  Clone ID: PAT_MRT3847_47818C.1
aaaaacaaaacatatcaacccttctacaaattaaaaagaacacaaaaaaataaaaacaacagggcggcctccgataactcagctcgtcaacgcggaaattactcccggaccggtaccttcaggcttaccatttttccgcaaagtcagtcctcttaaagcttggcttcacgatggtcacaacggtt

SEQ ID NO: 85055 - DNA, 522 bp, Glycine max
  Clone ID: PAT_MRT3847_47819C.1
cttctttttttaccattttttttcctatttcttcccttttctcatttagttttatgtccttagatcggaactactatttcacgttctattgtgctatattgatttacgaggatctttaggaccgtttgtttgggaattttaattttaattttattttctctgtttttaaccgtgggattactgatgcaatgatgggtttcccgttggatttgtgatgctcgatagatggatctctaattttcttcagtagtttccgcaaataaaaggcgtttacatttttactttgtttatatttctgtgtgtggaagatgcaactttcctgttttggcttctttttctgattttggtgctactaattccagtaggcaagagattgggttttaagctgttaaaataacagtgaagtttggtacaaaatggcttcagttggtgtggcaccaacatcatcaggcttgagagaatccagtggtgttgatagattgcctgaggagatgaatgatatgagaattagggacgataaag

SEQ ID NO: 85056 - DNA, 142 bp, Glycine max
  Clone ID: PAT_MRT3847_4781C.1
ggaaaagctccctctacacaaactgcgttattaactctgatcagggcatgttaaactggctgatatgaatccccctaaaataaggatgccttcaacactcttaaataaatgctggtgtggctgacattcatatgtttttaag

SEQ ID NO: 85057 - DNA, 343 bp, Glycine max
  Clone ID: PAT_MRT3847_47820C.1
aaggggtaaaacaagttgcttttatggcacaaaagaaagctttgatcccagtagtgaaggatacttccagtccataaagggtgaaactataaacaaaaagattttaaggataaaaaaaccaacttgggggtttatttaaccaaccttaggggcaaaacataaattcctttaagcgaagcgtatagtccttagaacatgggggaaggcttccaaaacattgttatgtccttacagcaatgccaaataaccttgccggccgcaaaaaaaaccctcccgggcccatccggaaattccggggcgggaccctgaaatttcccacctttccctatagggagaccttttt

SEQ ID NO: 85058 - DNA, 665 bp, Glycine max
  Clone ID: PAT_MRT3847_47821C.1
ggggctgtatgtaattgtctttaattctaattctgcctatttgggaatttctcatcttcaaattttttaatgttattttaatttattggttcctcttgtccttcgagggatgatgttgtttgctaagacagcgattgtcgtggttggagatttaggtgatactatgggcagtaatactggccccttgattcaggagaaggcagaaacaattttaatatgtaggaaacatatcccatttaggagaaacttaactcctctaattatgtgtgattattactatcagtctatataaacaagcatatgttgtgttctccgactcacagtttacacacaaatatccctaagtttatcctattttacataaacaaattaatttcctatcctaaactagaatacgactacatgagataaaaaatttcttcataaaccaatgtctatagctgaaatcacgggcaatggcagcaaaagtctataggtctacctgtgtaggggacaaggaaagaacatgagtactgcctcaagggaagaacaacaaacagaactgaacgcagtctcaacaaggacattgtattttagcagatactaggtttctgcaacatgtcaggttaattttgaatttttttaatttcttggtttgtccacccaggtgaaatgcaaaaccccac

SEQ ID NO: 85059 - DNA, 353 bp, Glycine max
  Clone ID: PAT_MRT3847_47822C.1
gggaggagccacacgatttagtgatgttctttggaaactgaaagtgatagtttgccaaaagtccaagtcgcaggaatcacttccatcagcatcattctgatgatgagaacagattcactgataatcacggactgcctgtgagctataccctcaaggggaaatcttggatccgctgaaccaacgaaaggaacaaccataaacaagtcccaagcaatgacattagcaatccacgacatactggacactacgaggctaggtgcgtttgcagctctggactcaggtgtcacaatgcattggcatcatcatcggcactgcagacgactaagacccatgcacatgaacatgagcatcca

SEQ ID NO: 85060 - DNA, 1026 bp, Glycine max
  Clone ID: PAT_MRT3847_47823C.1
acttagcaaagttgaattgattaggaatgaaggaacagattgcagttatgcttgttaaattaagcaatgatggatattaaatctcaccttcaccaaagaggaaagagattgaaatgttgaacatttggcaacacctatataactcaattgccatcagtcccatttggactggggtgatcatgatgttgatatttggatcctatctatccccaaaccgaaagcaaacctccataaagaagcttgttgagaattgagatgtggggttgcgtcccttattgatgctcttgctgcttcggatggtccttttatttgttggtagaagctttttcattcttcatgatcatatggaatgatttagaccggtcctccgcaaccatttccctgagtatatcatcttcaatcttctcagcttgccactgagaagggtcctccacaaaggcctcactgaagatcatgcttgaaacccactctttccaagtggttcttttgtacttatcttcctccaatgaacctgtcaccaagagctgataaacataaacaactttctgctgaccggggcgaaaggcacgggcaatggcttgctttgtttttgaagggttccactctgagtccaacatgatcactcttgaagcagctgttaaactaatgccttcagcacaagcagtgattgaagcaagtagtatctttgctactccaccaggctcctcaaacttgtccatcactctccccctttcaaacagctctagttccccagttagcaccaacacttccctaccttttgtccatccaaagtacttctcaaaatattccacaaataacttaacaggtgcaatgttgtggcaaaatataagaaccttctccttcttgacaaccctgtagataagactcaaaacaaattttactttggaccctattctcagatcaaacttgcatttctctagctccatcaattgcgcttgagtgaaaaatttctcagcacatactgctgatttcaccaaccaaggatgtattgaaccggacgcgtgg

SEQ ID NO: 85061 - DNA, 361 bp, Glycine max
  Clone ID: PAT_MRT3847_47824C.1
gaaggaaaagcctctcacgggctgctaattatctggagaaaatacgttttaatttaggaactagggaaccgtaatttaccaaggctgatgtttcgaccctacattgcgcatgtttagaactgcaaaaccaatttttttgctagaggacgtaatttttaattgataaatgccactgtaagaccaaaattgccaccatcatgttgcacaaaggctaatcctgcattaacttgatcctaacttaactttttaagttaattgacctgcgaagacttgaattattttgtgactctcggcttgctaaatctctctttcttttgctgagctgtttctcaaaccagtgtctgttcttaaaaaggcggat

SEQ ID NO: 85062 - DNA, 506 bp, Glycine max
  unsure (1)..(506): unsure at all n locations
  Clone ID: PAT_MRT3847_47825C.1
tgccaaaatatgctttaactttctgtaaaacatagtaaaatttaagttttaatctttcaataaagaaattttattggttttatacctcatatatttttttaagcagtcttcatcatcactcttgttgatgattgtatactagtatatatacacatttcaatatatcatgttacacgttactgcaaaataataattaatatgatataagcagatatgtgccacatcattaattaataattaaatgatgatatggatcattttaaaaaataaaaataacatttatgaagatcaaaacaaacaatataatttttgaaagattatttttttaaaaccaaattgaaggattaattaaaactaaaattaattatatatatgtatatacatttacaataaataaaaatatatttgaatctatatnttctcttttttcttaacaaaataaatctaatggtaatacttaagtaattattaatagtattaatattaaattagaatacaaaattcgt

SEQ ID NO: 85063 - DNA, 321 bp, Glycine max
  Clone ID: PAT_MRT3847_47826C.1
aacctctttctattgatcacagttatcgttttatgcatggctaaagaaacctcgggtacgtcaaattgacaagagtgtgtcgcccaaataccccagtcattctcctctgacatttctctcgaatgcaaactgatacttagctccaaaagcattaaaacgtgtttaaatttctacaccctatcaaaaagatgcaatcaataacctttcaacaccttgaaggtatagattcctaccatttctccacatacttctccacactatcagcaaatgaaaatgaattataacacatggcgactctttgcaacaatgtttgtgtctata

SEQ ID NO: 85064 - DNA, 573 bp, Glycine max
  Clone ID: PAT_MRT3847_47827C.1
cacgcgtccgtagaaagatgatctcaagatggtggtgtcatatttgaggagcaacaaacaaatatctcgtataggtctttggggacgatctatgggtgctgttactagtcttctttatggagctgaagacccttctattgctggaatggtgttggatagtgccttttcgaacttatatgatctcatgatggagcttgtggatgtttataaaattcggctgcctaaattcactgttaaaatggctgtacagtacatgcggcgggttattgagaagaaggcaaagtttgatattatgaatctgaactgtttgcagggtgataaaaatgtcataaaatttgacggtgatcacaactcgtctcggccacaattcttttatgattcagtttctattttcttctacaatgtccttcaccctcctaatgttcctagagctcataagcttgagaaatattataatttgggggatctaaagcttggttctggtgtggacgagagcctattatatgagattctctctagtctgaggtctgcatcaaccgacgctgcaagttcatcttctgtgctttccagcat

SEQ ID NO: 85065 - DNA, 2010 bp, Glycine max
  Clone ID: PAT_MRT3847_47828C.1
cccgcgtccgatcttcccatttaatccactttctcaaaaccacaaataagaaccaacttcttttcaattcattctcttcatcatttcttcttcttcttcttcagacaatcatttgcttttggatggtaactcgtacccacttttccattccggaattgggcactggtagcttagctcgtgtaaatgtgtgtctggctttggaaatccatgaataaaattatctgagatttgagagctttgagctgcgaagatggtggctaattgactttgaggtcaacttgcaaggtcatgaggtggagttgcagtgagctacatgtaggagcaagatgattgagcaattcatcaatttcgttattaggcctcccagggcggagtataaccctgatcagtacctatgggaaaaggaattcacccttacaggtcgaacataccaaaggcaggatttggagctcaagaacaccagaggctataccttgaagtgtagtcattatcttccttctcctttccctgaagatacttctcttccttgtgttatatattgccatggaaacagtggatgtagggcagatgccaatgaagctgctgtaattcttcttccttcaaatattactgtttttacccttgacttctcggggtcaggcttatctgatggagactatgttagtcttggttggcatgaaaaagatgatctcaagatggtggtgtcatatttgaggagcaacaaacaaatatctcgtataggtctttggggacgatctatgggtgctgttactagtcttctttatggagctgaagacccttctattgctggaatggtgttggatagtgccttttcgaacttatatgatctcatgatggagcttgctgatgtctataaaattcgacttccaaagttcactgttaaaatggctgtacagtacatgcggagggttattgagaagaaggcaaagtttgatattatgaatctgaactgtttgcaggttgcaccgaagacattcattcctgttttatttggacatgcaagcgatgacaaattcattcagcctcaccattctgatctcatctctgaagcctatgcaggtgacaaaaatgtcataaaatttgacggtgatcacaactcgtctcgaccacaattcttttatgattcagtttccattttcttctacaatgtccttcaccctcctaatgttcctagagctcataagcttgagaaatattatgatttgggggatctaaaacttggttctggtgtggacgagagcctattatatgagattctctctagtctgaggtctgcatcaaccgacgctgcaagttcatcttctgtgcttccagcaatttccagcacaaaatcagttagcgaacttctttcagaagttgcaccagtgactgacacagagtccttttttagagaagatactaatggcaatgatgaggctacagatgtgcaggataagaagctaaatggcgagggtgaagattgttgctcgtacacgagctcaaacagagaaagttggggaagatgttcttcgttaggaggcagtgatgaagaatcttgtgcagatgataccctctctcaggtgtttgcaacacctatgcgaagcacgaatgaaaaagaaaaagatgatgacaaaaagcatgaggagaagaagaagaagaagaaggggaagaagccaaagagtgagaggtttgagaagctggaggctctaagcaggcgcctgaggctttgccttctaaagggatcaacccatggaaggcacaagtcaacttagacacacctcttccttctttgtatcatatcacccatccatcgtctaattctaatgttttattttacaacactgtttctaggtagttcttcacattcaactttctttttaggttttgcctaacattggctttgatttccctgctctcattattatttcatacttatgaaggtgactcatcacattgatgtgcaggtatcagatacaatacgtgtatccaatatatagataagattattct

SEQ ID NO: 85066 - DNA, 276 bp, Glycine max
  Clone ID: PAT_MRT3847_47829C.1
tttctctctagatgggcaagctaaaagcgcggaggggcactttgacttgttgcctggggcggcaactagtcaagaagcagttgcccacatatgaaaatctaaatctagtctttatgcctcatctgatacaaaaactaattttagtggaaacgtcccaaagaaaggaaactggatctaccttgtaacaaaattgctagggaatagactacttctgatgatagactggggggcacaaaacaatacgcatctgaacctttttttggaggaattcaaaaa

SEQ ID NO: 85067 - DNA, 423 bp, Glycine max
  Clone ID: PAT_MRT3847_4782C.1
ttcggctcgaggtctgtgcataagcttatctttactcttgggagaaggaagtatttctgattttattttgtgaagggacctactgaaccctatttcgagatacaggggttgaggtcctacatacaatataccatgaaccatacgctgacggcatgccttttgttgaacatctaatgatttctgttgacatacataaaatgatccttttgtacactcacctgagggtggctgataccttgcgtccgttctggattgattcaacatatggtcgtgcctatcttgttcacgctttgccagacatgctaaaaattgtacccgtgtgatcttcgaaaaggaatggaagaccaatgctttttgatgcattggtgagttactgctactgggataacgactattggcgatggggaaaatgatattgggatg

SEQ ID NO: 85068 - DNA, 210 bp, Glycine max
  Clone ID: PAT_MRT3847_47830C.1
aggcgtgcgaagacaacacaacggaacgcatgtaacgggagatatccaagtcatgtggggacattcaagtaaagggtgccgtactttgttacggactgatgatgagctaataccttccccgtacttaaattcaacttcggaacctttcacttaaagagttcctagattgcgtattttacagttattccgacacttttatgaaattaacga

SEQ ID NO: 85069 - DNA, 468 bp, Glycine max
  Clone ID: PAT_MRT3847_47831C.1
ctttcgcgtgcggcaaatattggctattatgtaatatagggttaaatggttcaatggaaatgaacatgtttgtgttgctttttttgctgttgataatacaaatggcagtttatgaaaccatttttcttgagctatttcatgatggatgtgctaaagaggtgattgtaatcataatggacaatctgtgaaggcccagcactttgattcaatgacacaggtttataatgtgcttatgacccacatgacaaaggttttcaaacatcctactttaaccaacactgtgcgatctctatataaataccagaattcatacagagaacagaacattggtccttgaggatgtctgtgatatatgagctagagattgattgcgctggatggcacatcaagctcttctctggatttgttaatcaatagaagcttggtggtgatacaccatatattttaatgtctggaccagatttatgt

SEQ ID NO: 85070 - DNA, 210 bp, Glycine max
  Clone ID: PAT_MRT3847_47832C.1
accaacacgcttggacccaattgaaccgggccagaattaaatggcccgaccatttggcaacgggccttccagggccaaactgaaggtggcacgcccattaagaaccaacggttggcccgccagtggttggcccccccggttggaatggaaatcaagttcggccatggccgtttcaactttttccggggtttcccaaaaaccgtggttggc

SEQ ID NO: 85071 - DNA, 474 bp, Glycine max
  Clone ID: PAT_MRT3847_47833C.1
attttccttcataactctcccaacaaaaaagctaactaatcctcacaccactttcttcttcttcttcttcacttctcacactcattcattcttattattactatccacaccctttcgttcgttttgtttggttctcatgggttgaacttgacccccttgccactgcgacgccgtttccgttaaatggagtgggacagcaattccgatctcagcgatgacgacgccgtttcgtatgtcctaaacgacgacgatgatgacgccgttggacccctccccttccccgtcctccaaacggcaccgtgcggcttcgtcgtcaccgacgcgctcgaccccgaccaccccatcatatacgtcaacgccgtcttcgagatggtcaccggataccgcgccgaggaagtgctcggtcgcaactgccgtttcttgcagtgtcgaggtccatttgctaagagaaggcatccattggtggactcgact

SEQ ID NO: 85072 - DNA, 461 bp, Glycine max
  Clone ID: PAT_MRT3847_47834C.1
taaaaaaaaaatttatattaaattccccaccgaagaaaaaaaagactaaaaggaaacacaatatatgaagaactacatctagaagagaatctctttcgaaaacaagtttttctttttatgtgggtttcgaaaacaagttaaatgaaatgaagtgaagacgtcatgggctattattttcttttaaaattttttcgtaactcaatttgtgttgtatattaagtcgctatacacaagtcagacatactttgattccctagctagcttgcaaatcttggaacctcgtgtctgattgtgcaaccaaaaaatatatacgcttacacgtaaaaaggggaagaattttatcgcgctgctaaaaggggcatgatcaatataagtacggaattagcctcataatggatatgtgtatgtgtgtatatatatatatatatatatatatttatatatacaacttttacatatat

SEQ ID NO: 85073 - DNA, 317 bp, Glycine max
  Clone ID: PAT_MRT3847_47835C.1
ttgacttacgtgttattttgttcacccagcgatcgaagtgtaaacgttaaagctatatgtgttaaaaacaaatttggcccttagattgtgactacaggaggtgcagatgacaatacaactgcaggcgatccattcacgtaatttttccgttctatgctgaatacgaacagaaccttatatttatgctattaacacaaacaactcccaacactaagggtgtgttagcgtggcatatgcattttttgttttcatttcctcgatccattttctgaaaactgatgccattttaaaagatttgaatttctgaaacatggttg

SEQ ID NO: 85074 - DNA, 312 bp, Glycine max
  unsure (1)..(312): unsure at all n locations
  Clone ID: PAT_MRT3847_47836C.1
cgcttctgattattcctcttcccattctattgttcccaaatggacgctnncggaaagacgaagaatttctctctatgaagaaaggtccacatccctaagaagaaaccgttttcaaggtccgtcaaggccggtctccaattccccgtcggaagaattggccgttatttgaagaaaggaacgtacgcccagcgtgtcagtacccgtgctcccgtttacttggccgcagttctcgagtaacctaactgctgacgtgcttgagttggcttggaatgctgcacgtgacaacaacaagaacaggattattccgagaca

SEQ ID NO: 85075 - DNA, 356 bp, Glycine max
  Clone ID: PAT_MRT3847_47837C.1
tgaaagttgaaacagaaaaacaccaatccctcatcgtactgttccgttatcaattctcgtgtttaaggtttggtgcccttggaccctgtatttttcaatgtactttgatcacttttttctttcgaagtttgtctctttttttgcttcttcttctttgggtctttgactgtttgctgggtccgcttcaatttatgtcttcttagatgtttgtgtgtgtgttttttttaccagtttttccatccctttggaataccctttattttggattggtcaacttgctcatttttgtattaataatgaaaattgggttctctattttctttttctttgagaaaaaaatttggatgttagatgaa

SEQ ID NO: 85076 - DNA, 1924 bp, Glycine max
  unsure (1)..(1924): unsure at all n locations
  Clone ID: PAT_MRT3847_47838C.1
tacctctcctgtaagcttcagttcagcagataaggtaatctcaaagctcgtcgtgttttcgcatcaatggccatggccatggctgaggcttcaagaatcacgttacactccactctcctccctttttttacccccaaaacccacgttggtcaccgccacttaagcctctcgtcatcacgcaagcaccaagtccagtgctcggtgtctgcaggcgcggcggctcagacgaacccagtggcttggggctgcgagattgactcgctggagaactcttcggctctgcagagatggctgtcggagtcggggcttccgccgcagaagatgggaatagagagagtggaggtgggagagagagggctggttgctttgaagaacattaggaaaggggagaaactactctttgtgcctccctcacttgtcattactccagattctgagtggagctgccccgaagctggtgaagtattgaaaaggaattcagtgccagattggcctttgcttgcaacttacctcataagtgaagctagcctcatggaatcttcaagatggagcaattatatatcagccttacctcgtcaaccttactcacttctttactggacgcaagcagaactagatcgctacttggaagcttcacaaattagggagagagcgattgaaaggattaataatgttattggaacatacaatgatttgaggctcagaatattttccaaataccctgatttattccctgatgaggtgttcaacatagagtccttcaaatggtcatttggtattcttttctcccgcttggttcggttaccctcaatgggtggaaatgttgccttggttccttgggctgatatgctgaatcatagttgtgatgtggagacatttttggattatgataagacatcaaagggaattgtcttcacgacagatcggccctatcaaccaggtgagcaggtatttatttcatatggaaaaaaatcaaatggggagcttttgttatcttatggatttgttccaaaggaaggcgctaatcctagtgattcagttgagttgtcactgtcactgaagaaatctgatgcgtcctataaggagaagttagagctgttgaagaattatggattatcagcatctcagtgttttcctatacagattactggttggcctttggaattaatggcttatgcttatttagctgttagtccttcaagcatgagaggagattttgaagagatggctgctgcagcatcaaataataccacctccaagaaggatttgagatatcctgaaatagaggagcaagcattgcaattcatactagatagttgtgaatccagcatatcaaaatacaacaagttcttacaggcaagtggatcactggatctggatgtgacttctcctaaacaactcaaccgaaggctctttctgaaacagctagctgtggacttgtgtactagtgagcgaaggatattatttcgtgctcaatacatactgcgaagaaaactgagggacatgagggctggtgaattaagggccctaaaaatattcaacggtttccggaatcttttccaatgaggccattcactggtgcattattttctgccctggtttgcccttggttgttttgaaaaaacctatctcacccttgagcatcatgaactttgttcaatggtaccacctaattgtgggaaacaggtccagtcttcagtttttattgatcaatatagaagaagcaagataagaaatagaaaaggtaaggaatgattgtaatataggcttgctatgtatttattgatccaaataaatttttcttttcctatgttaaattttcgatgaaaaaatcttctttggatcttctaaactcgatcctagttcaaatttttcttttcctaatgttaaaattttcgatgaaannaaatcttctttggatcaa

SEQ ID NO: 85077 - DNA, 517 bp, Glycine max
  unsure (1)..(517): unsure at all n locations
  Clone ID: PAT_MRT3847_47839C.1
gagaaatccttggtgaaggggaaacactgggggagaatttattctctttgttctgtttcagcttgaatcttttctctatttctatcttgggttcctattgctaacactactggtcttggaatcagagaaatacataacataaaattagaccaaagggcttgtgtggtcttgaacttgcaacaaatagttgatattgattttataagacactggacttccaaaggaaattgctaagcagaaagttatccttattataaaagttcaatttttaggatttacaggaaaacactgttataagaaactccagtatgaaagcttctccatcatgataatcccaaaataaagtaaattccaagaaatattgtcctagataaaatggaagatactaatgggaaggtgatgcaaggaggattaataacaaggttgcggatagggaaaangtaagtagttgtcaaaaaaatagtataaatataaaatttattttgataataaaattgtcagaaataatggatgaaat

SEQ ID NO: 85078 - DNA, 470 bp, Glycine max
  unsure (1)..(470): unsure at all n locations
  Clone ID: PAT_MRT3847_4783C.1
aagataaccttatcagatttagcagctgccgaccttgataatgatggctcaatcaggtgtgcctgaagcacacgcagatactactacatcatcaacagccactgtagtattctaatactaaatctctttggtgcagatatgaccgaaaattcataaatgagattttctacagtagagttgattggagcacatgacatggcagcgtatcanagactctaattccgtgccataattgcgccccactgaacaactactactcaggggaattcatttcaataggggaatccctgagtatatcacgttcctagaacatttcctagttgttttagcttcacaaatcacagttaaagaagcaagatggggacagaaatcaaaagaccatcatcatctcagaccaaccttaaatcaagaaattatcatgttttgaagaggataaataatatatttcactcttgtcccaatgctctact

SEQ ID NO: 85079 - DNA, 238 bp, Glycine max
  Clone ID: PAT_MRT3847_47840C.1
ctcgatgcttgaactagctactctacacatttagcacaacaacaactacaaccgattttggaactttatacaccggattctgcatgataagagcttatcaacagtatactcaccttgcgcaatctgcatctgtctactgtctagtgcatcagatatagctgcttaagattctatactccgctacatggcactgtttatctcttctgttcatgccacactatttgccatgaccactttc

SEQ ID NO: 85080 - DNA, 201 bp, Glycine max
  Clone ID: PAT_MRT3847_47841C.1
gaaaaacacacacacaaacaccctttgagttcattaacctcttcagaaaaaacaaccaccaccaccaaaaaaaacatcatcatcaaaaaaacttccgagagtttaatggcaacacgcgtgatcccttcaagaattctcaagaagcttcgttacaacacaacaaccaagccacttaacgctggccaacccttaatcttttca

SEQ ID NO: 85081 - DNA, 302 bp, Glycine max
  unsure (1)..(302): unsure at all n locations
  Clone ID: PAT_MRT3847_47842C.1
btcacgcacgcgtacgtaagcncggaatncggcntcgagancaacannnaaaannnaanananaaaangaaaagagnggcnnggntnanacggnnnagnanccccaganancctngngccancnagcnaacnccngcaannancnaantgccgnnttatngnngcnggngctggnaaaagnnncccctgaaaantagggaganctcancngcaggacnngccgtggatgnntncntgccanaccgncgngccnnggggncaaagcatantnanncnnnttgcgnangncgntggntccnntn

SEQ ID NO: 85082 - DNA, 320 bp, Glycine max
  Clone ID: PAT_MRT3847_47843C.1
ttcttgcctcaatgcaaacaggttgaggctcagaaggaaacaggaagcaaaagatggctggtagatgatgtatagactccatatggttgcacgttggatcatgataaaagtgaatgataaaaacgcactctccaaaaacacaggagggaggtaccattcagggtgttgatctaatggcaaaattgaagacatgagggcaatgtcagagtaggtgcagaaacgaagtgcactgatactattaaaggaatgattaatgagaggtacccacagacagaattcctgagaatacagactatagcatgggactgagctatgaatat

SEQ ID NO: 85083 - DNA, 329 bp, Glycine max
  Clone ID: PAT_MRT3847_47844C.1
tcggaattcggctcgagagggaactaaaaaattcaaaaaaccccaaataacaaacccaccgaagcaccaactaaaaaaaggggaagaaattcaggatacaacaaccggaagttccccagcaaggagaaaacagcgagagaaagccaacacaaacaggaaagaaccttggccaaagaaaaggacagaagacccacaaacaacaagggcggacagagaaaaacaacaggagccggaggacaggacaaagaacacagagggccaccagaggaaccataatcaaaaccgggagaagtacaacaacaggctaaagataaggcaagaccacaaaa

SEQ ID NO: 85084 - DNA, 398 bp, Glycine max
  Clone ID: PAT_MRT3847_47845C.1
ggttaaaaaaaaaacaagctgcaacctcaacgggctggttttccttatgagctttcatcaatttctcatattcattgcattacacccctaaaacattttttcattaatttgttcaaaatctatcaatctcaatctacatctttttttgccaaaatcttcctccttaccatttgaaaaacaaaactttacctggctctatgaggttgggtccattttttttcaaggcctcttcccgaatggtcttatcattttcatcacagccaacttcatggcgtcttttttacattttaagccttttctctcaccacatcctaagtattgaggctttcaccttttcaacacaaacttaaatccctctcctttaccttgcatgggattttcttgcattttaccctttt

SEQ ID NO: 85085 - DNA, 256 bp, Glycine max
  Clone ID: PAT_MRT3847_47846C.1
gtacaataagctaagtcattgagaaaagcattcaacaccccatcaggtggcactacataaatgcccaaagtgttatttgctcctaaagctgcaagttgatcagttacggtattcctttcacgcggtgcatgatagatggtaagctcccaaggcctcctcatctgctccttgatttacattcagcttgacatagggtgtatcaggctaagaagcacggacgcggctcatcaccggcgtgttccgcgtcggactcgca

SEQ ID NO: 85086 - DNA, 139 bp, Glycine max
  Clone ID: PAT_MRT3847_47847C.1
ctctatccgaatttcacaagtcgtagtctaaggtaagtagcctgatgacaacagactgtcactaactgaacttgacgacgctcctgcgggaactgcccaactaccatggtcgttgaacacggattgggcaatcaagtct

SEQ ID NO: 85087 - DNA, 312 bp, Glycine max
  Clone ID: PAT_MRT3847_47848C.1
ctctgtatctgactctttgtttgcagctgatgattccaaaccagcgagcttcttcattactggcaaagtctaagtcatcaagggttaagaaaatactcatatgatcatcgactacataggacatgatgactatgggaagtcaacttccactggtcatttgatctacaatctagaaggtattgacaagcgtgtgattgagaggttccagatagacgcatctgatatagaacatatgtcatacaaaaatgcctgaatgctctacaagctcaattctgagctcgaaagaagaatcaccatatgacatatcattaa

SEQ ID NO: 85088 - DNA, 241 bp, Glycine max
  Clone ID: PAT_MRT3847_47849C.1
atgttcgctctgctatgcagtctccattctgttccacaaacttggtgtgcatcctaaccctcatgatacttatcattaccctgttggaagaaacatcgacctcactccattgatgctatgctgcactgctccagtcccagctgtcatcataggatggaacctaccgcgatccaccaatgacatcatgttcctccacctaagtgcttcactctctcagatgctaaaaccttatcaggctttg

SEQ ID NO: 85089 - DNA, 172 bp, Glycine max
  Clone ID: PAT_MRT3847_4784C.1
cagtagaaatgaaactcttggcagaagtggatcaaccgggaagcgttattgacagctatgtgctcactggatccatgattactgaaagagaatcctctcctgattggaatgcccgcggagtacttgcggtggagggagctcggatctgcgctcatatgggaagtagtgggga

SEQ ID NO: 85090 - DNA, 491 bp, Glycine max
  Clone ID: PAT_MRT3847_47850C.1
caaaatataatattttaattctgttaataattataatattaattattatgggtgtagttaaggttttgtgggtcttataatatttcttttatgttgtaacttgtaaggtggtggcaatttttaggttgaggccttatattatttctttatgagtctgactttaaggtccatggtgtttgacttgagcatgtggcaagtgttaattaactgaccagaaacagataagtcatttccagactttttattttccagaaatgatcttctcatccattttccttggctgctttcctgatggttgatgttgttgttgaagctcactccttgtattcttgagggaaagttgaaaactaacttgtagtataagatgtatcattgaattgaggcacactaacagcccaacctagattacaattaaaatatattacttttataccgattgctctacagagtaagaatgcaaaatgactcaacctcttttgcttctgatatgt

SEQ ID NO: 85091 - DNA, 263 bp, Glycine max
  Clone ID: PAT_MRT3847_47851C.1
aaaaccgacagggtttttgccttttcgccgggagaccctggcaacaaaattcagggggtgatacaatgggcctgaaaaggggggccaaggggggggggaaaaaacggggggcacttccgaaaacagttgactattacggaccgggggaccatggggggaaggttgggggggggatggaacccccggggaagaaacgggcccctttagggggggggccaagtgggaggaagcggaggccgggggtacagcaaagggggcttggg

SEQ ID NO: 85092 - DNA, 2266 bp, Glycine max
  Clone ID: PAT_MRT3847_47852C.1
cgacccacgcgtccgagaaatctacgacggaagcagtcccatcaaacttactatggacgcgcccaccgcataaaatccccaaccaacttaaaattaggtcctagaaaacgcaacacacaagaaaagataccaacgactctaaagatactgtaattcttactcttattcaccgatttcccccaaatcttccatccaagaattttagggttttctcttccagatttcccccaatcttctccgcctctcttccttttcctttacatttctctctgattgaaacgccacacccatttgagaggatcttttttctagagaagccaacccaaagtgtgttttcatggggttgttgtgatcttgagaaatttgagagtggtggtagtttgttaatgttatgaggaagaaaaggaaaggaagcaaaactgatgggtctgcggatctggctgttattttggctcctaatcatggctctgcttcgtcgaatttgaagtcccattactcgctggaagattgttgtaggctgaagaagaggtgttgtaaggaggaggatgctgacactgagccggctacttcctttacgaggaggcttgctggcattgctactgccccaccttgtgggacgtcgtctttgatcacgccggggagagggctcaagaggaagataggttgcattgatgttgctacccagatgggcaggaagaagaagatcgaggatgattatgtttctggggagacaatcgggcaaggcaagttcgggtctgtttggttgtgtaggtcaaaggttagtggagctgaatatgcgtgtaagaccctgaagaaaggggaggagacggttcatcgagaggttgagatcatgcaacacttatccggacattctggggttgttacactgcaagctgtttatgaggaagctgaatgctttcatcttgtgatggaactgtgctctggtggtcggctcatcgatgggatggttaaggatggtctgtattcggaacagcgggttgctaatgtactcaaggaagtgatgttggtcatcaagtattgtcatgacatgggagttgtgcacagagatatcaaacccgagaatattctcctcactgcatccggaaaaataaagcttgcagatttcggcttggccatgagagtttccgaaggtcagaacttgactggtttggcaggaagccctgcctatgttgccccagaagtattgttaggcagatactctgagaaggtggatatatggagtgctggagtgctcctgcatgctctgttggttggcagtcttccatttcaaggagattcattggaagcagtttttgaggctattaagactgtcaaattagatttccaaaatggaatgtggaaatcaatatctaaacctgcacaagaccttattgggagaatgctgacaagggatatttcagcaaggatatcagctgaagaagtacttaggcatccatggatattgttctacacggcaaatacattgaaaatgctgcccatcaaaacaaaattgaagaaccaaattggtgccacatgccaacagcttgttgctgtaagggaaccaaggttaggaggaaataggatagataattactcacttagcgagggttcgtcctctgaaagttgctattcagatgatcaggatgaatgtgtgttgattgatgtgcttgcctctgcaatttcacacgtgaggatatctgaaccaaagaggagcagggtgtgtggtcccacaggcccgatagttcaacaaggttcatctaacatgaagcctaacaacctctgtaaagcattttgacctactgacaggctgacaccacttataccactatcttgacgattcttgctgggattatagaatttactttcctcagcacattacatagtgggcaaaagtgaattttacatgctgactcctatggtaggttggcctgggtgccgcggcttcctctccaagttcctttatagtgtgacatctaattgcaatatttttttgtccctttgcttaataacctaataatgattaactgaaataattgtacagcatttgtaaatagaatggtaatgtatcattttcttgctatctctggtttgtgcaaattgaatattttatgctttcaacattatgtgaaccactgaaccagtgagcatgtatatgttcttgggaagagcatagctcatcccacgaaactgctagtccttcccagtgcaagcaacatgtgtagttattattagttaataatggttgactagggcaatttatattccc

SEQ ID NO: 85093 - DNA, 650 bp, Glycine max
  Clone ID: PAT_MRT3847_47853C.1
tcggcacagtgttagtcctcatcctaaacaatcactgctatgaatgagaactcctgaaatttataatttcattcacattcattattaagtatcgatacaacttatgaatatcattagaaagacacaaaattcagttcacattttcccctttagccaaaaatggaaaagccagaaatcacaattcaaaatcaaaccatctaatttaatctaatgtaaagcggaatcaagagagaggtttgttttcctgagtgagcatgatgatttgaaagactcaatctgtgactggcatttgacatagtctcccttgttctcttccaagcacttttttaaagcctcaacatcacatgttgaaattattttcttcacacagctgctatcatcccctgctttttgatccatgagctccaattgagaatatatagatccgtaacgaaacgcagaagcacgatgtaattggatttcgtggtttagagaaacgaagatatgagttgggtgaattgctatattctatttcactgaaactgagagtcgatattttaactccacaagccctaacaccgcttagtcaatggctggagcttccaagatcaaaggccatggtataatcatactcaattgttggaattacagaagccctaaattttaggaat

SEQ ID NO: 85094 - DNA, 668 bp, Glycine max
  Clone ID: PAT_MRT3847_47854C.1
ttagtcgtacggctgcgagaagacggcagaagggggtcttccgcagcggtgttagggcttgtaaagttacactttgctttcagtttcggtgaaatagaattacatcgtaagcatcgtgcttctgcttttcgttacggatctctatattctcaattggagctcatggatcagaaagcaggagatgatagcagcagcgtgaagaaaataatttcagcatgtgatgtggaggctttaaaaaagtgtttggaagagaataagggagactatgtcaaatgtcattcacagattgaggctttcaaatcatcatgctcactcaagaaaccaaacccctctcttgattccgcttcacgttagattaaattagatggtttgattttgaattgtcatttctggcttttccatctttggcttaaggggacacactatctaatgatattcataagttgtatcaatacttaataatcattgtgaatgaataatatattctcaagttgtggctttctacaattataaatttcaggagttctcattcatagcagtggttatttaggacgagaatcaaccctgtgcagaaggattctgatgctgttgccacacttttgtggcattgaagtttccatctgctttgttcccctgcaaatgaaattataatcttttcaatggccggc

SEQ ID NO: 85095 - DNA, 196 bp, Glycine max
  Clone ID: PAT_MRT3847_47855C.1
gtgatgcttaatcttctgtgatcactttcaagtttgagttagcatgcacagactaactacccgacaaaactgcgtcaactgcctgggatgtgttgaatgtaagattcctttgccaaactaaacataaaattccaactcatggttacaatgaccaagaagaagctaattggattttttttagggtacaatgctaatt

SEQ ID NO: 85096 - DNA, 279 bp, Glycine max
  Clone ID: PAT_MRT3847_47856C.1
ttggaagaagtcttcgagaactgtttatcttaattcttacatggatgatccaagtagttcttgaactgagattcgaccgagattaaatcatctgctgcggcaaccttgcagttcaagatggaaacgccgggttttggttagggccttcttttacttgtgcagtgaacatgttcctttgattttcattgtgcttgcgctcgtacaagtctgcagcatatggtgcactgacgctgcattgccataaatgtagtctgctgttccataatcgtcactatgggg

SEQ ID NO: 85097 - DNA, 1082 bp, Glycine max
  unsure (1)..(1082): unsure at all n locations
  Clone ID: PAT_MRT3847_47857C.1
tcggctcgagctttacgaatagatataaaaagattatttatcttggtccgccgtgcctatttcatctcattatcaaccctagctagaactcaaaggtaaatgcaaatgggctataaaaacctagccaactttttgtaccaccaaagctgacttgacatttaccaaatttggaagatcactgttggaggatcagcacaacccccttcaactcctagtgaaatacaagaagtgatcttcagtcatatatttcagtaattcttgtgaaattaagttcaccggtcttcgcattctaggcatcaagtcaaggttcttgagaagaaaagaagtggaactgaaaactgagtatggaaactgaaaattgcgaaacttttggcacaacctcactagatactactagtgttggtattgttggccactataagttcgaaaatgggtcatctcagtttgctttcatgaaagttgagaatgaaagaggagtttcccttgaccattccctcagcttctctactgaaaattttgtgcagacccttgcattttgcaacagcttgattctcatgtctggttttagtggtgacaaatcctgttaccatgtgttgaatcccttcaccaagcacaatgtcatgatccctcaaactagtatccaagggggtgttgttagagttggattggcctatgatggagaccaattttttgatgttgttcttgttgaagcagggtcctcaaattccaatggactaaaactgcatgttttctcttctgaaactggccaatggaggtgccactaccccatcaatttagctgctgccccttctttgccagaacttgagttccaagaacttggcacacctcctctttacgcgaacggcgcgattcattgggaaataggtggatatttgttggtctatcaagtccaaggcagccattgtgcactatatgagctacccaactactttgagggttggtcttggcaatcaactttgagttatcgccgtagcttgtgcgaatcaggaggagaggtctactactgctacactgatttcgacggctntcacatttggaaactcctcaatgaggaagagcat

SEQ ID NO: 85098 - DNA, 326 bp, Glycine max
  Clone ID: PAT_MRT3847_47858C.1
aagggggcaaaaacacaatgggggggacctttatttttccccaataacaaaaggggggccccttttaaaggccccagaggttaacactcccttgttttttgaaccaaaaaccttcaaaaaaaaccctaatattcgccccaaaattggagccccgaccaaaatagaaaccccaaatttctattggttgaaaatctctttatggtaaaggggtttgaggttaaataaaaaaaaagactgggttttttcgcggggaaaagatttttgaaacaataaaggcccctggagcggccggaaattttttcaataaaccaactttaaatttttat

SEQ ID NO: 85099 - DNA, 207 bp, Glycine max
  Clone ID: PAT_MRT3847_47859C.1
accgactcgtccagacattagatccaactccaaagccccaagtgctttgtttacgaatttccatcttaagctcacagagacgcttagagaatcttagtagcacattatcctttgtcgcaactaacttttgtttcgttcaatcggtcattgagcttccttccaaatccagcagctccaaactacacttcttagaattatgacttaacc

SEQ ID NO: 85100 - DNA, 257 bp, Glycine max
  Clone ID: PAT_MRT3847_4785C.1
aaacacctctaaaatactccctgtattctattgttcacttctcaaaccccacattggtccacttcctaactccttcaaccaacttcctgcttcatctcattacaaccatcctctagtcctgcctttaactattcgaagttcgaaatgggatcattccactattcctcccacacgccatgtcttggttcaatggcttggcctacctgatgactctagctgggaaaattgggaagaaatgtgttctgtctcccaccttg

SEQ ID NO: 85101 - DNA, 139 bp, Glycine max
  unsure (1)..(139): unsure at all n locations
  Clone ID: PAT_MRT3847_47860C.1
cntgacacgaataagatggggtatgtttaccaagatgtcgccattccatggctcgagnnaaagcctaaacccnnaagaatagaaaggtaagaaggtggcgttcgcacaacaatttggcggcattggtgcagcaatggtg

SEQ ID NO: 85102 - DNA, 271 bp, Glycine max
  unsure (1)..(271): unsure at all n locations
  Clone ID: PAT_MRT3847_47861C.1
ctcataatttccttcttgtttggcanttatgnantntctaatntgaaatancgttgtnatttgcgtgnnaaccgatcaaaggcttccgntncctagttnactntaattgaaanggagggnggaatcttttatttgcatttcttgttcatattattttcttttnnactcaaccatcnaatcnaccctatacctcctcatgtccagaataatattatgaaacttaactaactgatctggtgactagactaaagttggggattaaantatagtt

SEQ ID NO: 85103 - DNA, 307 bp, Glycine max
  Clone ID: PAT_MRT3847_47862C.1
gtaccacaagaggggcatttgggctataaaggccaaaaacggtggcgttttacctggccacgaccctaaacccagacctgaaactgctgatgaaaaacggcccaaattttaccctgctgataatatcaagaagcccattgtgaacaagcacaaaccaaaaccaggtaagctgagggatagcattactcccgggacaatgttgattgttcttgccgggggatttaagggaaagagggtcgtctttttaaagcaggatactattggaggggtgttactgactgaaactagcaagaaaggtggtattgct

SEQ ID NO: 85104 - DNA, 260 bp, Glycine max
  Clone ID: PAT_MRT3847_47863C.1
agatacacaagtatcagtatacgagtttaagcacagcaactaggctccaactaacttcttatctctctggggtgctttcaccatttacattggctttcagaagtcaacatcacaattctcgcttcagagttgcaatggctgtttcaacaagtatccctggtgcatagttcagacgctttgtcactgacatgtggctcatccaatgctgctactgccactgtcagcaccagcacccatgtgtcatgcttttgcaaaaccag

SEQ ID NO: 85105 - DNA, 456 bp, Glycine max
  unsure (1)..(456): unsure at all n locations
  Clone ID: PAT_MRT3847_47864C.1
gtgttgtttcccctccatgcgaagttaaatggctacgttaaagctgaaaacaaaaactatctccagtttctgtgggagccgtctcaccttttcttttcttgaaccgaaaccatggttttcattcgtgaaatgttgaacattctagttccccctcttggcctggttttgctgctcctcatgttaccgccctatctgttattcaagattctccgcttcatcgtaagatcaatttttagtgagaacgtagcaggaaaagtgatactaatcactggagcctcctctggcataggcgagcatctagcatatgagtatggtagaagaggagcgcgtctagcacttgttgccagaagagaaaatagactcaaggaggttgctagcattgccaaattgtttggatcccctgaggtcatcatcatccctgcagatgtttcaagttcccaagattgcanacgattc

SEQ ID NO: 85106 - DNA, 362 bp, Glycine max
  Clone ID: PAT_MRT3847_47865C.1
ttggggccttttatcacttatagtcacccggagctcacgggttgcccgcctttaacaccggaaacaaacgcactcgttactcgattctaagaatttctaaatttctccctacttctttgtgcacgatttcttaagggaaagaaaatcactctctgtgctggtcacagacttcgtgaatcatttccttttccactcctagttgatttgctgaacactctcctatttgatataggacttcgtgtcagatctaaactgtgtctggttctctctcagttctctggttaatttcaagttcaagctggtgaaattttggattagtgctcccactctcctatctggtataggacttcgtgggtagactt

SEQ ID NO: 85107 - DNA, 220 bp, Glycine max
  Clone ID: PAT_MRT3847_47866C.1
gcgcccgcaagcaccgatccggtatagcggccgcgccccacgcgtccgaatatataaagtttttaaagaaaacaaataaactttgcatttataaaaaatcgaaaactacctaaaaggtgcctccgttgtaacagttacataaaaatctcctcgtaattgtaatacaatgaccgatctattataaccctgagcttaaaaaaaaaaaagggtttagaactcc

SEQ ID NO: 85108 - DNA, 249 bp, Glycine max
  Clone ID: PAT_MRT3847_47867C.1
cttaaatcggggagaccttaaaaagtcagtatgcacgaagaaacaagggcactaggttgtggggctttcaaatgtaaaattgagtaaatctaagttccggaaaggacggccctgaaagaggttggcagctctgacaattacctgtgcaatggggagcatgcaaatcaagatacaggccaaactaagctcagcaaaggaagtagttcaagcttcttctaaacagagaccaggcaactgggctgggaccct

SEQ ID NO: 85109 - DNA, 504 bp, Glycine max
  Clone ID: PAT_MRT3847_47868C.1
ggataaaaaaaaacttctataacaattaatctataaagtcacaacaataatcactatgaaataataatatctataaccttatttttatttatttatttatttattattattacacatcacagtaaaagtgtttacttggaatacactaagacaaaaataaatagagtactaaatcattttattttatactttcaaatgtttcctaatgctcaaatatattaattcaacaaaataaaaataattattattaaacaataattttacacaatatttaatttattattatacagatgtaacatatacaactaaaaagaaataaactaataatttcacaacactatttaatttatttctaaaaagcaataaacaatagtttcacaacaatatttagtttataatattaaacatatcaatttgcacaaaaaaaatagctttcttacgtatgtatttgatagttacaatatagtattttttttctaacaaaaacttactttattattaatt

SEQ ID NO: 85110 - DNA, 199 bp, Glycine max
  Clone ID: PAT_MRT3847_47869C.1
tcgcatcctcgagactcatggacttgcgcctgaaattgcagaggacctgttccattcgattaggaatgcacctacaattaagatgcttgttgagaggaataggatggacacggactcccagtagaggttgatttttgtcgacagcagattccgccgtcttactcgctattacacgaatactaagattctccctccactc

SEQ ID NO: 85111 - DNA, 272 bp, Glycine max
  Clone ID: PAT_MRT3847_4786C.1
ggcacaagtttgttgagatagctagatgcaataagatgaaaatgaaagtgcttgttttgttgtcgctacagttctggtagcatatgcatgccatggctcagagtagcagaatttccctcgccagatgaacactgggtttggtcagcaatgcaccaatgacgtggcatgtgccagttcgacgcgtggcttttacgcagccagcgtcgttgagtggcggaacgttcatgttgcttgcgtagaattgctctctgaccaggtacaatgagactgat

SEQ ID NO: 85112 - DNA, 687 bp, Glycine max
  Clone ID: PAT_MRT3847_47870C.1
gatcactcctttctgcgcaatgggcgcgtgcgcatcttctccctccgcgaaaacgacagcagcaagtgtgaacaagggtggtggtggcggcggtgcacctgcgtcggaatctttccgccgaccgtcgtcgatcatggtgatggacatgctcggtcgaatcaacgagtacaaacaaccaatccccgccagaaacgtgctctccgagaatcctcatttctacctctgcaactcggaagacagtgcacatcggcacgtgcatgccacgtgtccccgatgaagaagagcttctacctggtcgaatctacttcctcgtccctctctcgcattccgattcccctctgtcactccctctcctctgcgatctcgccgttaaagctggttccgctcttcccaaccctaataataacagttccaatggtcaccgtaaaaaagcctctgttacgcgccgttaaatttgcgccgtcagcgtgaataatgaaatgcagcagcatccaaagtgatttcttccgctcattgtgtttgtttgtaaaattgtaattgtttcgatttggtttggttgcaaacatgtgctgtccaatatccaagatgtgcctgaatcagagttggaacttgcaagttttggaattgggtgaattttttgttgttgaaaattattctaatttctaatatacaattaattagagaaaa

SEQ ID NO: 85113 - DNA, 301 bp, Glycine max
  Clone ID: PAT_MRT3847_47871C.1
tcgccctcgcttgcgtacacatatatggctcgttttttttacattcaatcaacgaaaaatgctggctggggtggacaaaacgggggcaaaaagcccaaaaggtcttcaaagtcctcactcaaattccgtctcatctttcaaattcgttgtgtttgtgaggcacctctattgtgttacgctggtttctgtaccgttaaacatggcctcttccggactttttggcctagttttttgacaaacagaacctccttcttccaaggctgtttgcagtcgtggatgacattttctgtttgtttcaagt

SEQ ID NO: 85114 - DNA, 508 bp, Glycine max
  Clone ID: PAT_MRT3847_47872C.1
ttttaatatgacatattgataactgctaattcatatcaatgctggttgatatgctttcttgtgtataaaagctggaagcctggtcagagatcaaaggactttatagaggagcaacaccatcttttgttgggatggcagttgaaggatcactcttttttggcatttattcccagacaaaagtgtaccttcaggggggagttcaaagtggggaaccacggcctcaagtgataataccatctgcagcttttagtggtgccatcatcagttttgtgttaggtccaacagatctgataaagtgtaggatgcagatacaaggcactgactctttggttcctaaatccagtagatacagtagtccccttgattgtgcccttaaaactgtaaaagctgaaggggtgaggaaattctgcagcaccatgattaatgtgttatagctgatggcattcctttcacctgaaagggatttttcgtggaggttgtgcaacattgcttagagaatcaataggga

SEQ ID NO: 85115 - DNA, 451 bp, Glycine max
  Clone ID: PAT_MRT3847_47873C.1
gggccctccaaaaggccccaatttacccaaccccttttttaaggggcaatgggccaaaaagaggaaagccctgccccaaatcacaaaataatttccccctcccccagggggggggccggaacccccccccccacattttattacaaagatgggggaaaaaaaaaaataaaaaaatcccgggaaacctttggggctttgcatgaaattggcctgcaaaaaatcccggggggcaattgggggggaacaagggattttcaaagggggggggggggaacagggctgacaaaaaaggcccaaaaaattttttaatcggggcacccctggaggggggggagcccgggcatgtggggggaaccctgggggcccgggagccttttggggattccccccatggaaggggaaaacccaaacccggggagggggctaacaatggaaggaaccttgggggagg

SEQ ID NO: 85116 - DNA, 249 bp, Glycine max
  Clone ID: PAT_MRT3847_47874C.1
ggtgtcagctactgtcaagcctgaaacacaaaaggcacctccccctatggaagctccagccgtatctttagatgatctgaatgagaagaccgacacctctgggtcacaggcattgataggtgaaggatcggttggaagggtgtattatgcaagcttaaacaatggagaaacggtggctgtgaaaaagcgtgacgtgtcatctgaacccgcatcaaatattgagttgttgaccgaagtttacatggtctc

SEQ ID NO: 85117 - DNA, 321 bp, Glycine max
  Clone ID: PAT_MRT3847_47875C.1
ttataaaaatccttttatagggactgggtcatttataccaattcaaatccttccatcttttttccaactatcaccagccccattctcacaaagactaaaaaaaatcgagtcagaattgcttttcttcgtcctatttctccctattttgatgggaacaaaaacacaaaccatttcttgtatcttgtacttacaccattgtgtgtgaaagacaaaacaaacggtgcctactattacaaaaatttttttgcatacccatcccaatgaggtgtggaagatgattttgtcctgagtgacactagagggggctgttctcctaattgg

SEQ ID NO: 85118 - DNA, 413 bp, Glycine max
  unsure (1)..(413): unsure at all n locations
  Clone ID: PAT_MRT3847_47876C.1
ggggaaaggaccccccacattatttaaaaagggaacacatgatgaaaaaaactgggagaaagaaagaaattaaattaaaaacaaaaaaacaaaacaaagggggttcaaaaccccccttgacaaaaaagcttttttatttaaaaatttaaaagccccaaacccacgggttttggtttttgccccaaacccccgggtaagccaaaaagccaaaaaggggggaaccccaagagttgaactgaaacactgttattgttttgggggaaacaggacaaatgatcataatttaggggggggagattataaaataaaggttgctccagaaggaaccaaaagctttgattggcgcccctttaaaaatgttttggggggaaaatgaanccaccccaatttcaaaaaaagggccaacccaaaaa

SEQ ID NO: 85119 - DNA, 360 bp, Glycine max
  Clone ID: PAT_MRT3847_47877C.1
gtggaccacttttaggacaaaaagtcttaaaataaaactgaaaaaattgttttatgcatccatactaagcacggagatgtctcccttctataaagctacttagaaaataccttattagtcataccggtgttggtcgtcccaatacagagctggtcaaacaagactgatctccaaatatgaaattcttggttcttcatatacccttgattccagccagacccatcccaaaattgcggtttttcattggaaaacagttatcatattaagggggcggagttacacaaatgtcccggttttttggaaggcaggctttaataaaaagactggccgggtggaaaacaactcccccaaataaacccc

SEQ ID NO: 85120 - DNA, 460 bp, Glycine max
  Clone ID: PAT_MRT3847_47878C.1
aaatcaaaaaatttacatcttcattactgccataaaagcatatgggggggttcatgtttttccatgaacttgatatcatttccttatacatgaacttgttatatatcaaaatttatctatcgttcttgcctgatcccccttatatggctaaaaatccacacaagtgaggacactccggaaagaacgatgtttcaacactcccccataataaataaaacaggtcgctgtcagtctttaggcatatcaggttcaacgccacattcagaaaatcccactgctgcttgcacaggggaaaatgaaaaataatccctctaaccagtaaccattctcccaaattaccatcccaaaactataaactttactgatccaatgatctgacacattatttgggtcccctgcatttatttccggatcatagcccctataaccatcagtatcatactccattgtttttccaaca

SEQ ID NO: 85121 - DNA, 265 bp, Glycine max
  Clone ID: PAT_MRT3847_47879C.1
gcgcccaatctaaatctaaatactttttcaaggtaaaattgccaattaccatccccaaccaattggggctttttggccataatcctcctaggcattaggacaggaggatttgagggggcaagaaccaacaaataggcaattgtaaataaaaaaccactatgtccagacaaatttgggaaacctctctgcttactggtaattggccacttaaacccttgttttcaaaaacagaagaataaactcatgctggcaaaagaagcttttt

SEQ ID NO: 85122 - DNA, 466 bp, Glycine max
  Clone ID: PAT_MRT3847_4787C.1
cttttttttttttttttttttttttttttttttttttttttttttttttttttttttttaaaaaaaaaattttaattaacacgttacaaaacctaaacccatttttgccataaaaggaatttccagtttttaccactttcaatttaaggctcaaattacaaacaagtttttgaagaaaaaaaatagtttgaaaaaaactttttttggttggcaacacaaaaaaatgcaaaaaccccccctttgttgaacaaccggtttcccttgggggattaacatgggcaaaagccgggaaaaaagaaacatttttgctaaaaacccactgggttttaccaggggaaactgaaaaatgcaaaaaaaccccgtttaggttggtccaaaacccccttccaatcaagggaagggaaactcccccatcctcaaacaaaaacttaaaggggatcctggcttccccccaaaaagggggggc

SEQ ID NO: 85123 - DNA, 475 bp, Glycine max
  Clone ID: PAT_MRT3847_47880C.1
gaattttagaagcgtgtgatgaaagatgagggggcttgtgttcttcgttgctactatggtgggagcatggcactgccttgcgtgccatatgtgtactatcagagtgaacagtgtcgtatggcgcccgtactaccaaggtgagatgctcatgttggaggcttgctgtggagacgcactcgatggggggctttgagaccattcctgaagagtgcgtggaatcgacaaaggaatacatacgtggttggcattctggatgaaactcccaagtagttgaccaagaaggttacttttatgccaaagacctggagggccatcccaaggacagatttgtgttcagtatggatggcaccggactctgtaaagttgatactacaaagaacatggatgtgggggggagaaatgtaactctggcttggatgatgaatgggttatgaagggcaatggtgcgttgctgggggacactgttaggaagtac

SEQ ID NO: 85124 - DNA, 219 bp, Glycine max
  Clone ID: PAT_MRT3847_47881C.1
cattttctctacttcatcgcaggtgacgggcttccttgtatcgcaaatccatgctcctcagcgacagattcctgttggggctgtcttcatatgggggcacatcctcacatgcatcctccataatctcggtgcctctcctgtcatcttgcctcttctgtctactccgcatcacgaagcttaacctctgccgactcacagtaatcttcactgaatgcatgc

SEQ ID NO: 85125 - DNA, 420 bp, Glycine max
  Clone ID: PAT_MRT3847_47882C.1
cgtgcggccacgccgtgcggaatatatacgcattctctgctgtgtatttccctacctgtcccttgaagatgcagatcttggacgagaccctgaccggggagaccatgacccttgaggaggaaagctctgacaccatggacagcgcgaagggcaagatccaggacaaggaaggaatccggggggaccagcgacgtatcattttcgacgaaaagcgacttggggacaggcgaacccttgctgactacaacattcagagggagagtgctctagacctgctactgcgagtacgagatggagtgcatatcttgattaaaacactcaccggcgagaccataaccctagaggttgaaagcgccgacaccatgggtaacgtcaagggcaagatccaggacaaggagggtatcccaccggaccagcaac

SEQ ID NO: 85126 - DNA, 462 bp, Glycine max
  Clone ID: PAT_MRT3847_47883C.1
ttcttttttgcttaactacaaggacacactatctttgccaccacggggcgggccccggactcactccatgcctcatacgtggcttgccccttaagcgggaccaatttatctcttgcgcagcctatagacatggttcgatctacgtgcaacctttctgttgtgtaccaaatgctatcgctcccaatcttgctcaaggcaagagagcgcccagcaagaggaccaaaagataatcactcatgagtaactcttgctcttatcacagcaccatgtgcctgctgactaattcacaaggatcctgctggcgctgagatcggacccagaacaaagatgaccactgcacctgatccacttgtagtgctcgcatgcgggaatgtgagcgcttgctaccacactcatgtgctccaatcactgggagatcgcgatcattacggctggtgccctcctgaggaggcgcagaccgtg

SEQ ID NO: 85127 - DNA, 782 bp, Glycine max
  Clone ID: PAT_MRT3847_47884C.1
aggggccttttttttttttttttcaaaagagttaaggtgataaaattttcaattaagacttgactcgataagttcatgcagaaagtgaaaacagatagtaacggaagtaggaacaggaatataaaggcgcacaactaattgtcactcagtagcattacttgttaccctggccgatccacagttcaacatgatgataaaagttgaataggcattacaccacaaccatgtgtatcataaaaaccaacttaaggaagtaaaaacctaatggcctcagaatcctcgttaaaatataggaattacgtgcctagagcaacattggagagttaatattggtaccaagtagccctattcattctgactcaggagaaccaccgggtaccaaaatggcaatgttgtttccattgagtaaaatctgatcaagcttggttatccgtctcccttcagcagtgatttcatattcagtgacatcttcaaggaccatgttgacataaacatcaaagcctctaagagtaccaacaagctccttgtcacccttcattatcacccaaatttttgaacctatacaccggtcaatcaactctgatgggagaagctgtgatggattgttggccatggaaaattaacggccgaatttctcaaaccaagtttggttcagaagaaaccgaattggtatctgaatctgagagaagaagcgaggccggagaaacagtgactgagacagaagcttgacctagtggtgctgaggtttgatttcaatcaatttgagttccccacaattttcc

SEQ ID NO: 85128 - DNA, 1150 bp, Glycine max
  Clone ID: PAT_MRT3847_47885C.1
agaaaactgaaaagtaaagcgggctacagtgttgggaatggcgggcaaaggtggatcaactccggccacatattcgccgtctccgacgaccgataagaagaaaccatcgcttttcaatgaggatttggctcgacctgatggccgcagtttccaccagtgcagacccgcatttttcaggactggtgctgtgaatgctgcatctggatctgcttatgctgaggttggaaataccaaggtcattgtatcagtatttgggccaagagagagcaagaaggcgatgatgtacagtgatatagggcgtttgaattgcaatgtcagctttacaacgtttgcaactccgattcgtgggcagggttcagaccacaaagagtactgttcgatgcttcataaagctttggagggagcaataatactggaaacattccccaagacaactgtggatgtctttgcattggtgctggaatctagtggcagtgatctcccagttgtcatatcatgtgcaagccttgcccttgcagatgcgggaataatgatgtatgatcttgttgcctcagtttctgtgtcatgttttaataagaaccttgtcattgatcctgttttggaggaggaaaatggccaagatggaagcttaatgattacttgcatgccttctcgctatgaaatcacccaactcactgttactggggaatggtccaccccaaagattaacgagggaatgcagctgtgtttggatgcttgtgcaaagcttgcgaagattatgaggtcatgtttaaaagaagctgtttcggattcccaggaatagaatggcagttctaaattaacatagttcgcattatgtgctgttaatttcttcttatattgagataattttgtgttgaaggtagggagagttgctttgcatgccctgaaaattttgtgctcatgatcttgtcaaagacaaagttaattattcttatagcaattgctatatgcatgtcacatagttttgcaagtcaattcaatattatgaattaggaaattgacagcttagtaaaaaaaaaaaaaaaagaaaaaaaaaagaaaaaaaagaaaagaaaagaaaagaaaagagggccgtgccgtcttctagaggagtccagaggcttagcgtagcgcggtgccatgcgacgtc

SEQ ID NO: 85129 - DNA, 196 bp, Glycine max
  Clone ID: PAT_MRT3847_47886C.1
cccgcgtccgggaattgataaggccatgactatttccaatagatatttgatcaggtccttcaaaaggtgttagttgctgaatgtgacatattggtcacatggtgagaagcatcaaaatcaagataccaactctgagaaggtgtggcagcaaaactagtcagaaaaatctgagagttggttggttattttggagctt

SEQ ID NO: 85130 - DNA, 473 bp, Glycine max
  unsure (1)..(473): unsure at all n locations
  Clone ID: PAT_MRT3847_47887C.1
cgttttgtgtnaaatttttttatatttttgttttgatgcttgtgcctcgagatgatcttatggctttggacctatgggctgcacttcagataaggggtaactcggcgagccaaaaagaaaaaaggttggaattcatcaaacttcggccccaaaaaatataggggcttttttttttttaaagggccccccccatcacaagtgttagctttgcctgctctggaaaacaccgcctcgtggggggggaaaacattggcctttgattctagtggggggtgatggaaggacacctgtgactgcctccaactggggaaaacttgagacaaaggagggggacttgggggaaaaaaaaaatttttttttttttttgcccctttttttttaaacctacggtttttttgcaaatttttctggaaggtttttagaaaggggggtgtttttttttttttagaaactcacttctttttctccctttt

SEQ ID NO: 85131 - DNA, 315 bp, Glycine max
  Clone ID: PAT_MRT3847_47888C.1
ttgtcgttcggcccccttcataataaagggtatgcctttttttccgagggcatgattggacagagagtcgggagcgttatttttaaacagcaacgtcttgacggtaatggtcattctacccagagtccattcccttcgcatgaagtccgcgttgtccccctttggtggcaccgaggggcctatggctccgtccacgcatcctacgccagactgtcctcctccgttaaccccgggatctagccctggcatgcgaaagcatcatgctcttctacgtggacacgttaggcctcttctgtagcgatcaaatcccggatt

SEQ ID NO: 85132 - DNA, 511 bp, Glycine max
  Clone ID: PAT_MRT3847_47889C.1
gtggagttgaattctttaccctcaagtaatcagaataataagggtctggttgcaaagtttacaagtaatgctcctgcagctaattctcttgtagcagagtccaagcccagagagatggcgtcacggaacatgttcaaacagccagatactaatggagttgttaatggagagttggctaatgtaaaagtcacaaatacaagtttgaatagacaggtgactggttcttcacctgaaagtacatcaaaccaatcaagcagagcagctccttctgttgtgcatgggcagggtgctagtgacccagttcagttgatgagattgctcgcagaaagggctcataagcaacacttttctttcaatgatttgcttgttgatactcctccagtgacactgtcaggtccatctggacagagagatgactcgggcaatgcttcagcagcagctgccgaggcatggatgtctgctggggcaggagggtttaaaacaggacccaaaaattctagttcccccaaaa

SEQ ID NO: 85133 - DNA, 1239 bp, Glycine max
  Clone ID: PAT_MRT3847_4788C.1
gagttgacataatcgaaccaaaaagcttgcaactcagttcatgctccccgtagaacagacaattgaagtgctgaaccatgatgtcttccaacacagattatagaaagtgatgcattcaactattgcatgttgttatcttaattggccttgctagttgctactacttcactttctataatctgtgttggaagacatcatggttcagcacttcagtcagattctgttttttctggttctttttcacttttgatcattggtttaatggtttatcatcgctgacataattctctcgaccagatattcttatctcaggcgagcatgaactgagttgcaagctttttggtttgattatatcaactcaattaagaattgtgccatgtaacttttgaagtccattaggaaccatggaggggagaatgggactcttgtttcttgttgtattgggtgctgcatgggcttgtgatgctagagaactggctaaccctgatctattaagcaaactaagcagaaaaccagatgcgtgtgcactttgtgaagaatattctactaaggtacttgattatctgaatgaaaacaagacccagcaagagatcattgacatcctgctcaacacttgccaccaaacttcctcttttaagcagaagtgcattactttggtggactattatgctcctcttttcttcttagaaatagttacaatccagcctggagaattctgccacaaggtcaatctctgtcagctcattacatatatttccttgctagttcaagaagataccagtgggttttgcgaagatactgtttcaactctattggctaaattgaaagatggtgacactaagctacagataattgggacatcactgaaggggtgcaattcagtggagaagtatgctaagtgcaagagaatggttttcgagtatggacccttggtttttgacaatgcagagaaattcctggagagcacagatatatgcactgccatatatgccatgcaaatcttcaacagtggctggccagcaaacctttctttcagattcttatggaaacaacgttctaacagatttgtggtgtacttgttgcagaagatttccatatatataacaacacattgagggagagaagagtacaacttcgatgatatcagtggttgcaaaattaaaagtaagatgtgtaaagtgagagagtaacaatgcgtccaccttggatttgaattgaagtgctgcataaacttaattc

SEQ ID NO: 85134 - DNA, 378 bp, Glycine max
  Clone ID: PAT_MRT3847_47890C.1
gactgttggttgacccattctgcgtaatgatctatcggcaaagtctttgacagagggcgattttagagcacgtgttgattcacagcgcactcatcgtattaaaggaatgatcaaaatggtggccacagctggtattcctgaaaatacatgtttagcactagcctgtgctatgaaatagatccttagaggggcagtgccagttctgatattcacaccatttgatttaaagactgtgaattatggaatcctgcttgcacaaaagcaacgactatgccattcaatccaaacccgtgttctgatccaaggagtttggaatttttgacgcgtaccggatttcattgtgaaatcatttgtgtcactggatggcctgccacttca

SEQ ID NO: 85135 - DNA, 626 bp, Glycine max
  Clone ID: PAT_MRT3847_47891C.1
tttttttttttttttttttttttttttttttttatatagaacacacacatacttattcataaaattgtattaattcgctaatacgaaaaaaagacaatgcaacaattttatttttatacatcactcaatgttctgccaactcaatatccatagagaaaacatgcaaactgacttgaaaacattaaaatgcattattcttgatcttctttcatatgatgatacttcacttcaagaagaagcagcagcagcagatacatgcttggctatggtgagttgcagctcctccttcttagcaccaacaaccttatccacgatcttgccatctttcaagaagaggaaggttggcatggcctcaatggaatattcctcagcaacaggcctcacttcatccacatccaccttgaggaagatcacttgaggagtatgcctagcaatctctgccagaactggggcaataaaacggcatggaccacaccaggaagcagtaaaatccaccacaatcaatttttgggagtcttttccattctgcagttgctggttccacgcatcaacggtgtggacgccgacaacctgaccctcttcagccatgtttcttagagagccctcgagccgaattccgagcttac

SEQ ID NO: 85136 - DNA, 382 bp, Glycine max
  Clone ID: PAT_MRT3847_47892C.1
cggccgctcgagccggcaggccgggatccgtaggggaatttataatcaaataatttcaagacgaatttccattgtcaagttctccacgttttgttttgataacaacattctcgctgtggttttccaatgctgcgagcgcagtcgaagatctagctagaggcagagaacgttctcttctccttgatcctctggaaagttcttagccgatggcgatcttctacgctttggtggccagaggcacggtggtgctggcggagttcagcgccgtcaccggcaacaccggcgccgtctcccgccgcattcttgagaagcttccggcggagcccgactccaggatctgcttctctttttttttttaccccccccccccaccccgagccga

SEQ ID NO: 85137 - DNA, 484 bp, Glycine max
  Clone ID: PAT_MRT3847_47893C.1
tacggctgcgagaagacgacagaaggggtagatacaaacataccttgatgtaactaaatgagaaataagtaactaaaattaaacaaacaggaatacctcaaaaacaaacacatatgtccccacatccacattcttcggcaaagcatccaagacatgaaatccactttcttggtcataccggagctcctatcatagaggtcaccagagataagaaagaatcccaggaaactaaatgattgcatctgagggggaaaatattctcaagcctcacccctcggaataagtgattgactcatcactcaccttgctgtcaataatagctgaatcttttgcacctgtgctaaaagcacggacaagcttcactgttaacggtggtgcagctgaaccaagcactgtattcaccttgacctgatttgaaatagaaatttgtcagatattcctaacagtattgaaaacagaaaagtagagtagaaatgcagaagta

SEQ ID NO: 85138 - DNA, 229 bp, Glycine max
  Clone ID: PAT_MRT3847_47894C.1
cggttttggggggggcgggcctgatcgccacgcttggcgaccccagggcgattaaagcgatgcgcgctgctggctgtgcctgcttgcctgtgaggaacgctggggacgctccccatatcgtacgagatggaagagaattttttttgtatgacccccgcatacttcttggggacggtggccatgagagtttggatagcaatttgtctcatataacgctgacttgggagac

SEQ ID NO: 85139 - DNA, 325 bp, Glycine max
  unsure (1)..(325): unsure at all n locations
  Clone ID: PAT_MRT3847_47895C.1
agccatttgttttaccattctcttctctcttgctcttgcaggagagagccatgtccatgcatcgctacctgaggaagattattgggaagctgtttggccaaacactcccattcccactgcactgcaagaacttgtaaagcctctccctaccaatattaaaatcgatgaactgcctaagcaaattaataatgcacaatacccaaaaacattcttgtataaagaataccttcatgcacgcgaaacaattaaagtgcaattcaccaancgtgcctatgcacaaccttatgggggatatacggtagtgacagatattagaggcgcctct

SEQ ID NO: 85140 - DNA, 424 bp, Glycine max
  Clone ID: PAT_MRT3847_47896C.1
agcaaagccaaaggagaagagcattatagagaaaaaaaagaagaaaaaaaagtaagggtgaagactagagatagagagagcaaacgcagacgcaaacgctggttgttttgttgctgctttattattgactgttggagagagagagtcagagataagaccttcaagttgagttgaaatttttattgcaatctgtttttgtcagtctaatcaaatatttttatttatttatgagccttctagagagaaagggagatgaatgttgttacttgctattagtggaggcttctgaagagtagcgtgtgttgtttgttgctgcaatgggaactccaccaacggatgagctcgtgaagaagatccaacagctagaggaaggacacgcgcacctgaagcaagaaatgtccaaactcaaactcttcgatgtgag

SEQ ID NO: 85141 - DNA, 288 bp, Glycine max
  unsure (1)..(288): unsure at all n locations
  Clone ID: PAT_MRT3847_47897C.1
tnnnnnaagggccaagggaatcagtataacttggttcctttttcattctttcaaattttgatgctggcccccttttttccagaataaaaacaaatgtgatctgaatggagaaaatctaacgcaataaaatttacattccatagggggggggggggacctcgggacaaaggttaaaaaatcaattaccgctaaaaaaaaaggggcttggttctgtccaaaacaagcagtcacaaaggtttcatatttaccatagcacttggccttcttgctctctatacctttggcacc

SEQ ID NO: 85142 - DNA, 316 bp, Glycine max
  Clone ID: PAT_MRT3847_47898C.1
cccacgcgtccgcaaatattgatatttttcatgtcttaaatttaagttgttcagggaatatggatgagatgttttcattcttgataaattttggtctgggggcttcttgtttcatttgtttctccatgaatttaatgtttagctggaaatgtgtttaaaacacttgacatttatttattcccaattgaaatttgaaaaaaaaaaaaaaaaaaaaaaaaaaaaaaaaaaaaaaaaaaaaaaaaaaaaaaaaaaaaaaaaaaatgataagggaggagggcacacgaaaagggatatggtttctcaaaccaggcatcaa

SEQ ID NO: 85143 - DNA, 429 bp, Glycine max
  Clone ID: PAT_MRT3847_47899C.1
aaatattttgtgtttgtgtaccaatgaaattggacagtcagaaactcagtatcctgatctatttgagtacaagaatttctctgtatgtgacagtgatgattataacatcagcagcatatttgaagaagcgtgtgattttatagactatgttgaacaaacaggtcaaaaagttttagttcattgctttgaggggagaagcataagtgtcacgttggtcctcgcttacttaatgctcaggaagaatcatactttatcagaagcatggcaagctctgaaacgagttcaccgtcgagcacaacccaatgacggttttgcaaagatcttgttagaattggatcagaaacttcatggaaaggtttcaatggaatggcatcagcgcaaaccagtgatgaaaatctgccccatatgtgggaagaatgctggactaag

SEQ ID NO: 85144 - DNA, 297 bp, Glycine max
  Clone ID: PAT_MRT3847_4789C.1
ggggtggaccacacccgtccgccacacccgtccggaggaggaagttattttgatttttgagagtggaccccaccaaagaaggggatggattttaatcctttaaacggaaaaccaaaattgggggggatttcttttggttccacccaaggcaattaattcaatattagatgtttccatgaataattttggttgggttatcccatgtttggatgtcctttttttttaacgaatatatttttttaaaagatagtttttggaagggaaaattgtcaggcaaatagttggttgttttgttcc

SEQ ID NO: 85145 - DNA, 210 bp, Glycine max
  Clone ID: PAT_MRT3847_478C.1
ggaaaaaacactcccatggaccgtcgtaaatataaaaatgctccatcgttatcgctgtcgcaatttgccgactgggatcacatggggcgggtgcgggagcccccacttcatttctcaaagatccgggaaactactgaactaccacatccttgccttttccacagctactcctttcccatccccaaccaatcttgtattcctcctcccccc

SEQ ID NO: 85146 - DNA, 428 bp, Glycine max
  Clone ID: PAT_MRT3847_47900C.1
ccgaggtcatggccgaccccgaggctcgaggcgtcgtcaaccgtgccatcaagaccttgcgagaggtctccaaggtctacgagggtgacggtaccaacgtgcctcctctcaagatcgccgagggtaaccacctcgtcaccaacttgatcgccgagttcaaaaaggccgacgccaaggagatcccggacaacgagaaccccgcgctcgtctacgccggtgtcctcgctgccggactcgtcaacgcccacaactatgaccagcagacttgggagtccaccttgtgcccttacctctccttggccgttcccggatacgacaacggtcccgtcgtccgagagctcttgcaaaagaaggccgacgaggagggtcaggacgaccgagtgttcgacgacgaggaggagggcgaggacttgtgtaactgtaccttt

SEQ ID NO: 85147 - DNA, 383 bp, Glycine max
  Clone ID: PAT_MRT3847_47901C.1
tttttaaatccacaaattccttttgtgttaaataggtggatgggaaaactgactttccctcagggcacttcccgaagtgttatgagaatagcattctttgcaccagctcctccccctattgaaagaggcattctcttaacacttcgggatgcgcccactgggcttgcctggtgttttcacagcagatgcggagccttggacacctgcttttggacaagtttggtttattgcacttttattctaaatttcattcttgccaacattttttatcttctgtaatttatgaaattctacatcgtgcatcaactattgctattgtggcgtgggttaatcttctttttgttttcttccctagattctatttttcttttcttctgcctttt

SEQ ID NO: 85148 - DNA, 294 bp, Glycine max
  Clone ID: PAT_MRT3847_47902C.1
aggaaaaaacacgctataaaaacaggggttcccagtacctagggagacaaagccccatttaaacccattcccctgggcccctggaaatcaaacaattctaatatgccgccggaaaaaatggggtgctactacaaacctgttaaaacattattggcttggcccacttttaagaaaaaattttgagaaagggatttctccaagggagctcccaggaggaacatattttggaggttatgaaggggcccttaaacccaaagaaaacaaaggtggccggaccgatttttgggggggggc

SEQ ID NO: 85149 - DNA, 319 bp, Glycine max
  unsure (1)..(319): unsure at all n locations
  Clone ID: PAT_MRT3847_47903C.1
ttcccgggttcgactccactgcgtctcgtatcataaacatacaacccattcnnattcatacctcgatcactnnntccttgcctnnattgcacattcgtgtcatcgacgttcattcatnacatttctctcttcccttagctttagtttttactcaatgnngctgctgcggttcagtgctnnngcagtctcttttccattccatccaagtctactctctcttcccaagccaggtaacctccatcattactcccagtagaggagggttgtattcatagtaaggggcttcatttgcaataccagagaaatgtttgtaagcaag

SEQ ID NO: 85150 - DNA, 350 bp, Glycine max
  Clone ID: PAT_MRT3847_47904C.1
acgcccacgcgtgcgaagtcgacccaactatttacaattctcctcctcattgggtcgggttattggaatgagtacaatctaaattccttaacaaggaaccattggagggcaaattttgtgccaacagccgcgtttattacaactccaataacgtatatttaaattgttgcaaataaaaaactttcatttggacctttggttgggttgatcagtccaccttctgtgtgcaccggacggcttgtacctttttaccgcgattcgctcctgttcttaactggccgggtcgtgccttctgtgctgttacttttaaaaaaataaaatgtcttaaacaaaacctacccttctttata

SEQ ID NO: 85151 - DNA, 1030 bp, Glycine max
  Clone ID: PAT_MRT3847_47905C.1
cccacgcgttcgcccacgcgtccgcccacgcgtccgcccacgcgtccggagcaatgctatgctggtgtatccatgtcttccattattgaagaaggttatggtgttggtggtgtggtctctcttttatggtttaaacgcagccttccccattactgtactcaatttattgagatgtgcatcatgctatgtgccgaccatggtccttgtgcctcaggtgctcacaatactattgtgacagcaagggcagggaaagacctagtttccagtcttgtatcaggtatgctaacaattggtcctcgatttgggggtgccattgatgatgctgctcgctacttcaaggatgctcatgacagggcacttactccttatgagtttgttgaaggtatgaaaaagaagggaattcgtgtggcaggaatagggcacaggataaagaatagggacaacaaagataagagagtagagctactacaaaagtttgcacgcacacatttcccttgcgtgaagtacatggaatatgctattcaagttgaagactacaccctctcaaaggcaaataatttaattctaaacgtggatggtgcaattgcatctcttttcttggatctttttgttggcagtggactgttcagcaaacaagagattgatgaaattgtggagattggctatctgaatggcttctttgtgctggcacgctgcattggtctgattgggcacacttttgaccaaaagcgattgaagcaaccactttaccgtcacccatgggaagatgttctctacacaaagtgaggaagttttgtctgactataagaactttgccatgcttcaaattgggaaatcatgcatctgaaataagctggagggattttttagctgttagactagtgttgtacgatccattggtgaaaagtcgtcttccaatcataacatgtattaactttcataatataaaaatacacatgtttttattatttcttattctcattgtaagaggtgagtatattggatttgtatgggagattttctacaatat

SEQ ID NO: 85152 - DNA, 1978 bp, Glycine max
  Clone ID: PAT_MRT3847_47906C.1
cggccgccggaagcggcgggccgaccctcccgtctgcccgcccgactcgccctcgactcacatccttgtccgattccgcgaacgagtcgagtgaatcgggttggtaagatctattctgtttcttcgtcatggcaaccggacaactattctcgcgtactacacaggctttgttttacaactacaagcaacttcccatccagcggatgcttgattttgacttcctttgcggcagggaaacaccatcagttgctggaataattaaccctggttctgagggatttcaaaaacttttttttggtcaggaggaaattgccatcccagtgcatgctaccgttgaagcagcttgtgctgcacatcctactgccgatgtcttcatcaactttgcttcatttagaagtgctgcagcatcatccatggctgctttaaaacagccaacaattagagttgttgctattattgctgaaggagtacccgagtcagacactaagcaattgattgcatatgcccgatcaaacaataaggttgttattggtccagccactgttggaggcattcaagcaggtgcttttaaaattggtgacacagctggaacaattgacaatataattcagtgcaagctctacaggcctggatctgttggatttgtttctaaatctggtgggatgtccaatgaactctacaacactattgcccgtgtaactgatgggatttatgaaggcattgctattggaggagatgttttccctggttccacactttctgaccatgttttacggtttaacaacatgccacaggtcaaaatgatggtagtacttggggaacttggtgggcgtgatgagtattccttagtggaggccttaaaacaaggaaaggtatcaaaaccggttgttgcctgggtcagtggcacatgtgcacgactcttcaaatctgaagtacaatttggtcatgcaggagctaaaagtggcagtcagttggagtctgctcaagcaaagaatcaggcactaagggacgctggagctgttgttcccacatcatatgaaacttttgaagctgcaattaaggaaacatttgataaattggttgaagatgggaagatcacaccaatcaaggaaatcacacctccaccaatccctgaggaccttagtactgcaattaagagtggaaaagtccgtgctccaactcatattatttccaccatttctgatgacagaggagaggagccatgctatgctggtgtacccatgtcttccattattgaaaaaggttatggtgttggtgatgttatctctcttttgtggtttaaacgcagccttccccgttactgtactcaatttattgagatatgtatcatgctatgtgctgaccatggtccttgtgtctctggtgctcacaattctatagtaacagcaagggccgggaaggaccttgtttcctgtcttgtatcaggtttgcttacaattggtcctcgatttgggggtgccattgatgatgctgctcgctatttcaaggatgcctatgacagggggcttacaccttatgaatttgttgaaggtattagaagagattccgaactttttgttggcaggggtatgctattcaacagcagagatttcattgaatactttcctttcacagtgtttgtctggagtatgtgaaaatattcttcactctacaagacgggcttttgtatggcaggaggaaccttgttatgcttcctattagcattttttgggaaattatgcatcaacgctagcatgatttagtttttagctgttagactagtatactacgagtctactggtatctagccatcttcagtttgtaagttgtattaaaaattcattcacgagataactaagttatctctgtttgagaaaatttgtaagttatgagaaattgagttcattttttatgagaacatttcgatgaggaagtgtgcatttgaagaaaattgtttcaataaaattaatttcaaaaa

SEQ ID NO: 85153 - DNA, 2603 bp, Glycine max
  Clone ID: PAT_MRT3847_47907C.1
ctcccaactcgcccttgactcacatccttgtccgattccgcgaacgagtcgagtgaatcgggttggtaagatctattctgtttcttcgtcatggcaaccggacaactattctcgcgtactacacaggctttgttttacaactacaagcaacttcccatccagcggatgcttgattttgacttcctttgcggcagggaaacaccatcagttgctggaataattaaccctggttctgagggatttcaaaaacttttttttggtcaggaggaaattgccatcccagtgcatgctacgtatgtgttgctcattcatttctgtactcaaaatttcctttttctgcttcaatttggaatttggttgcttgaagttgaagccaaggggagatttttctttattttagtggtcttcttactttttcagaatacaaagtaaccaactttagtgcttgacgttcttgtttgtctggggtgatttctgttgacttattttgcagcgttgaagcagcttgtgctgcacatcctactgccgatgtcttcatcaactttgcttcatttagaagtgctgcagcatcatccatggctgctttaaaacagccaacaattagagttgttgctattattgctgaaggagtacccgagtcagacactaagcaattgattgcatatgcccgggcaaacaataaggttgttattggtccagccactgatggaggcattcaagcaggtgcttttaaaattggcgacacagctggaacaattgacaatataattcagtgcaagctctacaggcctggatctgttggatttgtttctaaatctggtgggatgtccaatgaactatacaacactattgcccgcgtaactgatgggatttatgaaggcattgctattggaggagatgttttccctggttccacactttctgaccatgttttacggtttaacaacatgccacaggttaaaatgatggtagtacttggggaacttggtgggcgtgatgagtattccttagtggaggccctaaaacaaggaaaagtatccaaaccggttgttgcctgggtcagtgggacatgtgcacgactcttcaaatctgaagtacaatttggtcatgcaggagccaaaagtggtggtgagttggagtctgctcaagcaaagaatcaggcactaagggatgctggagctgttgttcccacatcatatgaagcttttgaagtttcaattaaggaaacatttgataaattggttgaagatgggaagatcacaccaatcaaggaaatcacacctccaccaatccctgaggaccttagtactgcaattaagagtggaaaagtccgtgctccaactcatattatttccaccatttctgatgacagaggagaggagccatgctatgctggtgtacccatgtcttccattattgaaaaaggttatggtgttggtgatgttatctctcttttgtggtttaaacgaagccttccccgttactgtactcaatttattgagatatgcatcatgctatgtgccgaccatggtccttgtgtctctggtgctcacaatactattgtgacagctagggcttgctaacaattggtcctcaatttgggggtgccatcgatgatgctgctcgtcgatttgggggtgccattgatgatgctgctcgctacttcaaggatgctcatgacagggcgcttagtccttatgagtttgttgaaagtatgaagaagaagggaattcgtgtgccaggaatagggcacaggatcaagaatagggacaacaaagataagagagttgagctgctacagaagtttgcacgcacacattttccttctgtgaaatacatggaatatgctgttcaagttgagacctacacgctcacaaaggcaaataatttagttcttaacgtagatggtgcaattggatctcttttcttggatcttcttgctggtagtggaatgttcaccaaacaagagattgatgaaattgtggagattggctatctgaatggcctctttgtgctggcacgctccattggtctgattgggcacacctttgaccaaaagcgattgaagcaaccactttaccgtcacccatgggaggatgttctctacacaaagtgagaaagttttgtgcgactgtaagaactttggcatgcttcaaattagcaatcttttgggaaatcatgcacatctgaaatatgctggagtggttttgtagctgttagactagtgttgtacgatctattggtgaaaagtcatcttccatttgtaacttgtattaaatttcataaagagagaacttggtcatttttaaaattatatttctcttgatgaatattctgcttgttttaaatttcataagttcgagcgcatttattctgcggtatggtatatgttcatggaaacaacaattttattgccagtgaatgaaatgctttgttatatagcccgctaaaaaaaaaaaaaaaaaaaaaaactgagacagttatctctgtttgagaaaatttgtaagttatgagaaattgagttcattttttatgagaacatttcgatgaggaagtgtgcatttgaagaaaattgtttcaataaaattaatttcaaaaccccc

SEQ ID NO: 85154 - DNA, 449 bp, Glycine max
  Clone ID: PAT_MRT3847_47908C.1
tacggctgcgagaagacgacagaagggtcctgcattaattttcctttaagtttaaaaacattacaataataacacttttatatatttaaaaatataacactaacatttcctcaaatcttatattaatatctcttataagaaaagaaaaaataaaatttataaaagtaatgattacttatggaattacacgaaatttcagaaaatattattggaagttgctcaattaaataattaataaaataaaaatacaaaacatataaaaaggtgtggttattttatgtaaacggtccatgtggatggtgggccattgaaaactataaaacggactccccaaagacttgcctttttattccttaattaagtgtacaccaaaaacaattaaatattaaaaatatgcattattgaatcttcacaagaggaaattgtttttggaacctagacccgaaaag

SEQ ID NO: 85155 - DNA, 133 bp, Glycine max
  Clone ID: PAT_MRT3847_47909C.1
tcgtctgatagcgctctttgcgcgtactccgagagggattcgggttaaaattcctggaccggtgactggcggctgacggcatcgttagtgagtcctgatatgtctgcgggggccccgggaagagttatcttgg

SEQ ID NO: 85156 - DNA, 526 bp, Glycine max
  Clone ID: PAT_MRT3847_4790C.1
tttgtgtaatagttatatttcatggcattttcttcagtaactatcaatcgcgaaatcgttatcgttatccgtcaatctttttcaacacgccaatcttagttacaccagcacagtaaggaaatcataaaatgtattcatacacgaactcaaccaaagaccaaagctctgacttcaatgctctccctgccaggccagccttgctgtgtcctaggatcgacaaacgccgaatgaggcgtcctcgcgccatccttgctatcgtagcactgaagcagaatcctctcgtcatttttcatcccgctcaagtagtgccacttgccctctggcgagtatttgacaccggcagtttcgccagtgcggtgaggatagcgatgttgcacgccagcaagctggtcatctgggactgtgcgagaatcggcgtaggcgagcggtgatgctaccacagggcccgtgagtggacgccagacgttaatgagtcgaacgctgtcttgtagcagtttctctgcttcgtctcccatgtggtagtgca

SEQ ID NO: 85157 - DNA, 292 bp, Glycine max
  Clone ID: PAT_MRT3847_47910C.1
gacaccacctggttccgggtcacactacgtgcgcaggatcaagagccttctcatgcatcagccgattcaagtgtcttccgcctttcgcatgcagcagctgtagggaactcccatcgactctttggcgagataatcacaccaacagcaaaatgctcgttttttgctttgtgggtattgttcttgatcatttgagttgggaccatcgaccatggtgggtagattttcgagattctctgtcggaagaaatgtccacctgacagcgctaagtgccctgcatgacacggaagtgatg

SEQ ID NO: 85158 - DNA, 325 bp, Glycine max
  Clone ID: PAT_MRT3847_47911C.1
tcgcaactttctggaaactcttttcctttcttagagatgctggtaatgggggagtttttgttgtcaatgctgatctactattcacaccttaaagtgtgcttgatccccaaagtataaagcccaacacatgttaagtattccaatacaaatatcgaaatgtgccattaccgtgcagagcatggttcgaaggccatatgaatatcgacccacctgttttaactatcataattaaatgcaaagccagtgtgatattagaaaacactgatgctcaaattttgatggttccagggcgcagattcatagcttatgggctttcctttataaa

SEQ ID NO: 85159 - DNA, 299 bp, Glycine max
  Clone ID: PAT_MRT3847_47912C.1
cggctcgagcggctcgagtacggctgctacaagaccacagaaagggggacacaaaaaattctctctttcatctgagtcgcaactatgacgatcaggtaattctctgtccttatcatcaccatatccatggccaacaccaaacaccttacatttactttcaccatcgttgtcacgctcctcttatcattcgccacatcaaaatccccaacagctttcagtgtccataatgagaagctcatccaccttgacttcttctttcacgacatagtgagcggttcaaagcccaccgcggggagagt

SEQ ID NO: 85160 - DNA, 685 bp, Glycine max
  Clone ID: PAT_MRT3847_47913C.1
ggcaattaaatgaaacagttttttttagggaaaatgaaacagagttgaatagctcaaaatgacattttgcattccaagcagcacagcgctagtatagcaaacattgctaaacgtttatcatgttatcatgaccaaaaatgctacgatattctccacggaggtataagctcatatagctaaccacctcaaaaagccaaaaactcatttcttataatgaatggagtaaactcctactcagtcacggagaatagtcatctttagaaaattggcctttaattaagagcttgtcatactcataccaatatattgtcagcagaaaattgatcatcaaataacctctttcttgccttgattgcctgcttttcccaatttatgcaacctgttatgatagaaagtagaagagtttgaacaaaagcaccactttgtataccaatccaaagtccttgtcctcccagtctcaccaaaaatgccaataaggcagccattggaatcccacaaaggtagaaggcccctagattgacaaaaacccctaaatgttgccatccacaacctctagcaatccctgtgagaacaccttgtatgctgtctagtataatagatatacataccagaggagccatgacagtgacataatcaataacttccttctcattgctgaaaatataaccataaacattgcggcagc

SEQ ID NO: 85161 - DNA, 1847 bp, Glycine max
  unsure (1)..(1847): unsure at all n locations
  Clone ID: PAT_MRT3847_47914C.1
cccgcgtccgggcgagcgaaagggacgagacgagagttccgtcgccggcagcgctgcagctcacggtacagatttggatacaactgtactcgacctaattagttgcctcatggatccttttgatgcagntataatggaacttagggatgatgttcttccagtggctcctgctgcacgtagtaagtgcttcactctttttgaagctcggccgggtgccaagtttattccaaaggccaaatcaaaacagctttctccaaaggaaataccagtttttcaccctgctaatgctatgcattctgagaaatcatccggagaggtaatggaaaaattaatgcttgtttttctatttcattactctgctaaatgttgatggattttgtactttacaggctgcagacattttttcatttctctctctcccgtgctttctagagctggtgctctgggaggagtagcgattcggcggttgaagatgcgaaggaaggcaccacactaagtaaggttgcgtgaatggaaagcattttagagagtgtcatgggggcacaaaaaaagttttatttttgttgatagagggttttactcgattgaaacgtcgctgcttctgctcgctcttaaggacccaactgagcatactgctattgacaacttaatggttcaacagcttgatggaactgttaacgaatgaggttggtgcaagcaaaaggtgcttagctggtggaactgttattccacgttaccacgggtttgaataatcattttgtttgtgaatgcatgttaggatttccttttatttttttccaattatataggtaacccttaaattttcccttcagtttatgcatgtttggatttccttttattttttccaattatataggtaacccttaaattttcccttcagttttttgagtttatatatgtattccctgaatcgatctaacatgaatagctttctaagggtactcttctcgggatgaggcaaaccatttttgagtttatatttgattccctgaatcaaaggtacccatccttcagttttttgagtttatatatgtattcccttttgtgatcacaacaatttggtgctgtcaagtgggttggtgttctttttctcaggggattgcaacagccgtagacgtttcaacacatagattgctaaccaagatagcattgctggaatttctcgcatgagatttgtctgcacaactccaggatccgcagcactaatatgcaacaatacggaaactgaatgtaaaagatgttatcccggacagtgatttcccgatacattagtcagagggactattattttcagagaaaccttcccaactggattccaatcctctatgtattcagaggatgcagttcatgatggaactagagattgaccttctagctttggatcaaccggagaggctgcaaacgtatttttcgggttggaatctcaatgattttctcacccaagctgccactgatagaggtgagttactatattccttgtgatttcccaaattacatcaactctcttcatacatcttaattttagctttcgagagcatcactctttatattgtgctgttgcctttaaatctcactgttatggttgacgggctctcaaccaactgtaatttgtaagtatgttagaccaggtttcttcggtggtgattggaaatagtttgagttggaaaaccagcccttcattcttttaatgagaagggtgcagaggaaaattatctcccggaacaacaagcggatcaaaaccttactaaatttgacatcctgtataccttggttggatctaatgatttattaattgacatctttgatattgaaacaaactgatggag

SEQ ID NO: 85162 - DNA, 378 bp, Glycine max
  Clone ID: PAT_MRT3847_47915C.1
ggccaaatcaatgttaggcggatttattaaatttttaggcagggtttgccaccgtttttaatttaaacggtacagggttgagggattggaggttttgacttcttccttacaaaggaacttgggttggagcgaattgtaggggatcttaaccctctgcatgctacagcctcaactgaggcgggtcaaagcactataaagaatactactggtttcccccctttgcactatggggaagattcatgaatggccaaacaccatcggttaggactgatcctgagcctggcaaacttcgcctttctgactaaccacttcttgcccacaagggttaatggatggatccacttcccacgtagacttcggtaatgcgggaactttagg

SEQ ID NO: 85163 - DNA, 446 bp, Glycine max
  unsure (1)..(446): unsure at all n locations
  Clone ID: PAT_MRT3847_47916C.1
gctttctagagctggtgctctgggaggagtagcgattcggcggttgaagatgcgaaggaaggcaccacactaaggggggttgcgtgaatggaaagcattttagaggttgtttcctttttgtagcattttggtgttttttgtctctttattttgacctatttacaaaattcgttgttttgtgctttgttctgtgttcagagtgtcatgggggcacaaaaaaagttttatttttgttgatagagggttttactcgattgaaacgtcgctgcttctgctcgctcttaaggacccaactgagcatactgctattgacaacttaatggttcaacagcttgatggaactgttaacgaatgaggttggtgcaagcaaaaggtgcttagctggtggaactgttattccacgttaccacgggtttgaataatcatnttgtttgtgaatgcatgtt

SEQ ID NO: 85164 - DNA, 459 bp, Glycine max
  Clone ID: PAT_MRT3847_47917C.1
caatttgctcacttttagttttctctgtctctcattccaaccagctagttggttattctttccaccggtagttgccaaatcttggattggaaacgcctctttcactctgctgcaaaacctgttagtagcacacaatgctgatttttagaaccttttatagtacttagttgcagcttttcaattcttcttcttctcatgagttctactctttcttggaaagtgcttttgaattctgttagatagaagtaaagtgaagttaagtgagtggctaacaaaacaagatgaagccttgcacttcattgttgtttctcgctttgatttccgcgctctcgtttgtggtttctgacatggtgccctcaaacgaagtttgggcgcttaggagcttcaaagaagctgtgtatgaagacccatatcaagttttatccaattgggatacggtggaatcagatccttgtaact

SEQ ID NO: 85165 - DNA, 1449 bp, Glycine max
  Clone ID: PAT_MRT3847_47918C.1
ccgaaaaatcgggtattgggccagaggtccaggcggctgctcctatactctatttttcgcgtcacataaacaaaaaaaataaactggggagaagcatgttgttgatgttgggactatgcttcctattgttctctgcatttccacttgcgttctctgagagatgccacccacaagacaagaaagcgttgctccaactccagaaggacctcggcaacccttatcacatcatatcctggaacgcaaaggaggattgctgcgagtggttctgctgcgttaagtgtgacgagaaaacaaaccgcgtcattagcgttgccttatcatccccttttccagacaccaatctctcggcccaaatacctccctctgtgggtgacctcccttacctcgagtccctcgtcttccacaaattccccaaactcgtgggcccaatccagcccgcaatcgccaaactcaccaaactcaagtaccttgatctctccaacaacaatctctctggcccaatacccgattttttcgcgcaactcaagaacctcgacgatatcgacctttcctttaacaacctctccggccccataccaagctcgcttggtaaactgcctaaactcgcgtatctagatttgagccgcaacaagctcacgggctcaattccggcctcatttggatccttccaaaagcccgggccggctattatgctctctaaaaaccagctttcagggcgccttcctgcttctttggccaacttagactcggacaggatagacttgtcaaggaacaagctcgaaggcgatgcctccatgcttttcgggagcaataaaaggacgtggtctcttgacctttcaaggaacaatttcgcgtttgatctatctcgcgtggagattccccacaagaccctggcaaggttggatctcaaccacaataagatttatgggagccttcctgtggggttgaccaaagtcgaacattttcagctattcgacgtcagctataatcagttatgcggtctcataccgaagggtggagaattgcaaaagatcgataagtctttgtactctcacaacaagtgtttgtgtggctctccactgtcaccttgcaaccataagcagatgactgtctaagtcgatttcatactttgataagtattcgtattttcatgtgtgtttgtgtgactttccaatttcacctttcaaccattataagcatatgcctatcaaagttggtttcatcagattaattattctgatttcaataaaatcgattacttgtttttctgtattacgtttatatggagtatcgtggtaatggattattagccccacttcgagtgtgaattgtaacattcgtgataattaatgttttgtaaggcatgtcatatatgtactcttggtcacttagctaaaatatttagtatgtgtttggatttcagtttataaaaagttttaagttgaactt

SEQ ID NO: 85166 - DNA, 190 bp, Glycine max
  Clone ID: PAT_MRT3847_47919C.1
gacctatatgttttttttttggcgggcgtttgagttgtacgcttgagctggacaagacccaaagaaaaaagggtcacactttaaaaaactaacgtatctcaggacgaaaatgtttgaaaccctttggttgttcacaaaggtttaggggggggttcaacaaaagcctttggtttacatcattataaaatga

SEQ ID NO: 85167 - DNA, 236 bp, Glycine max
  Clone ID: PAT_MRT3847_4791C.1
gaaatttccatacacttgtcaaggttgtggaaatgaaaatgcaacaactatggtcaggttttggttggaagtgagagttggacaactaaatgaaattgctaactttactttatgggatcgtgagtgcaatgcactcattaatgaaagtgcaagtgagattaaacaacagatgattgctcaggaaggtgaatttgatccaaaggacattccgaaggctattgataggatactgggca

SEQ ID NO: 85168 - DNA, 322 bp, Glycine max
  Clone ID: PAT_MRT3847_47920C.1
cccacgcgaccgccatccccaatgttatttgataggtatctgctctcactgtttccataggaaaagagtgtgctgatctgtggccaaggattgcaagtgctgccaatgctatcattcgagtggaaattcttgaaaaatgagatacatgtttaagcttgcaagactgaactttgactcaagttttcatcaatctcgacactgactatcacgtgatacaggcttgtttatcctgtccacacttgatatcactcatatgctttgtgaccagacaagactaaaccttatataacaactttgggattgctgacacaaaaacaaacac

SEQ ID NO: 85169 - DNA, 541 bp, Glycine max
  unsure (1)..(541): unsure at all n locations
  Clone ID: PAT_MRT3847_47921C.1
gatatctgctaaaggcttcgtcagtgaggtgagaatttcagccctatctctccttcggggttcaacctccttaagcggtcagcgggcataattgaaaaaagaaaggcactctatgttctcgttctcggtgctccggtcaaggtaaattctctacttgtcttcaccttcggacatcaagaaagccgaactgactcgctggctttgctttgtaagggcttgacctctgatgtatggaagtacgtggttgaagtgaattcctcggaaatgcagccggagggcaatctctcttttgacccggtctggtatgtcttttgcgccagctttctttcctattggttacggttctcttgtctcggtcatctcattttatggtttcagcatatggctatggttcagatacagactaaagactttctttcgtgctttgatctcagtggaagtagagtattgctcctgaccattcaaagtagtcattcttttaaaacaatgcatggcatgctgntccaactctgcgttcatgtcctcatatntgtgatgctcg

SEQ ID NO: 85170 - DNA, 306 bp, Glycine max
  unsure (1)..(306): unsure at all n locations
  Clone ID: PAT_MRT3847_47922C.1
aaaaaaaaaacgggaggtgccgccccaataatttttttatttaaattttagggggcaaatgtaaatttttccttttttattcagaccacctttttcctcactttgcaatttttaagtggcaggatagggggggaaaacctttgccaaccaacctaatttgaaaaataaggggatggtttctctcctacgacccaagttttaaatgtngtttgggttacgggggacttcttctgtacatgtacaaacttactctggtccccaagggggtaaaaactaaataatcgggattcgtttaaaatatatgaa

SEQ ID NO: 85171 - DNA, 250 bp, Glycine max
  Clone ID: PAT_MRT3847_47923C.1
ctcgagctgctcgagccgattcggctcgagcgaaagctaacgcatcaacttacacacaccatccacttcatctacttcatcatcaacaacaatgcaatcaatcatgaacatgctcggattctctcacaagccaccttcgagaagcctgtaaccaccactgaagtttacaccactgatcgagatacaacttacgtcgagtcttctctcgatgctgatcgaagagatgtcacatactctgagactgtcattg

SEQ ID NO: 85172 - DNA, 281 bp, Glycine max
  unsure (1)..(281): unsure at all n locations
  Clone ID: PAT_MRT3847_47924C.1
cttcaacttcaagcaccatcatcacttctgatgaaaggagaacatgatcatcacttcaacttattaaacccagaaattcnatcatggttattaagttctccaacagtggtagtagaagaagaagcactccacaacagtagtcaaaccataagatccaccttagataatttctccncaataccacagttantattcccnacagcacaanatgncaacaactancactcctcctcattagtccaccatgatcaaaaccctaaccctagtactactacaacaac

SEQ ID NO: 85173 - DNA, 265 bp, Glycine max
  Clone ID: PAT_MRT3847_47925C.1
atccacacctccttgatttgctcatgtaaccacgtggaaggcacgctgttgtggagcaaatgtcggcttaccgtggggtcccctccataatacacccaaggacttacgcgtcatataataatcttcctaaggtccactggagaaatccaccgaggcaccaacagagaggctttacaacatggcttgcaaagtggccgacctgatccctacagcagggaccatttttaaactggttttgctcactcacactgaccataggtgtaag

SEQ ID NO: 85174 - DNA, 461 bp, Glycine max
  Clone ID: PAT_MRT3847_47926C.1
ttcccacgcgtacgtacggctgcgagaagacggcagttggggagacaagacaaagaccatgagatgatagtcgtaggaaccacggtgagaagagaagaagaattattattacacacaaaacaaacgcagttgatgttgctgctctagactgttctgcgactctttacgcaactatattttcgtttttgccgggatagggttttcggttttcttcactgctctctcaccaggggcgagttgtgaatggaagcacaaggcataaagtataaagcataaagcatagttagttgagtcaatggaaggtgttgatcaaagaaatagttctgcatttggtgttccagttccaagaccaccaaaccagaaatctcgtatgccaccatctcaccctagtatcaatgtttcaccttcagcaactccttattcccaataccctcaacgattgcgttctccggggttcttcc

SEQ ID NO: 85175 - DNA, 222 bp, Glycine max
  Clone ID: PAT_MRT3847_47927C.1
ttgtctttaaactgtttttttgtttggttttttttttttttacttcttattgaaaagaaggaaactggtatttctataaaattggcaatttttaaacagaagctctaccagggttacagagctgctaaacaaaaaaagtaatacttatcgccatttacctcaaggggaacttgttgggttacatccactccaatgggggaaggaaccactgggtagaggggg

SEQ ID NO: 85176 - DNA, 511 bp, Glycine max
  unsure (1)..(511): unsure at all n locations
  Clone ID: PAT_MRT3847_47928C.1
aatcccaagagagttacaacattattctttgttgtacttttcatatcatttccttttccttncatactttcttcgatctatcttgactcaatttcatctattgcttgatanacaaaaacaccattcatttcaatcatctttacacatcaatattattttataattttaatcatttctcttaatcaacctctctttttcttaattaccaattcttttcataatgccatcttccatccttttccatttttccaattcctttaactcactttactttcttttttaattaaattcttatattaactttatcaatttattttttatatccctattcttattactttttattattactcttttattatcctttatctctttttctttaaattatttattttcttatctatatcatataatattttacatattcttatttatttcatatattatatcatacacttctttacttaccacatatctacaattattttatcttttcctaatttttattcta

SEQ ID NO: 85177 - DNA, 693 bp, Glycine max
  Clone ID: PAT_MRT3847_47929C.1
gaatcgaaaaaccgagtttgtatactcgataaattaagtgcctgaaatggactcagtgcagcagaagcacgtgatttactacctgctgttgttcttcagttgggttgcgtgctgcgtggtgttcggcgctgagctgcaccgcgcggacatcaaacagacagatgtgcagacgacttcgtctgagaccatcactacggtgacggactactcgctgtcgctgtactatgagcactacaagatcagttcgggtacgcagacgcagacgcgtcgcagtaccactggcacgcgcgtcaccgaaacgcagctctctggcagcagcgtgaacttccggcagtgcacatcgatttctctgtgtaacaagtgctacagcggcggtgcgggcgccatcgccatgtcagtgttcgcgtttttgggtctgacgctggccgcgttcctgcgtgcgatggcgcaaacgggcaaacactcgcagataccgcgtttgggctcgagcgactcgacgtatgcgatggtggagcgcggcacaaactacacactcgccggtttctacgtcctctccatcgtcgcgtgggccggcggctgtatggcggccaccgcacaggagaccggcgtcagcgtcgtcattccgacgggtctcatttacgtggggctgtgtctgctatcggcgttcggcgccatatacgtgctccatcgccc

SEQ ID NO: 85178 - DNA, 245 bp, Glycine max
  Clone ID: PAT_MRT3847_4792C.1
tctcattttcatagactgcgttaataggtagccgtacctaataatcggcaagcaaagtactcattacttcagctcatgaatctcgcaatggcaacagacatattcgcatacggtattacaatggtgggaaaatcactaccctgtgcatgttacaagcttcgtgaataacgctcatctgcgatgcctcgtttagtatctaatcaatctactatcagatctagctcattaaggctgattaagacctc

SEQ ID NO: 85179 - DNA, 134 bp, Glycine max
  unsure (1)..(134): unsure at all n locations
  Clone ID: PAT_MRT3847_47930C.1
ggtatctagcttatcacattgtcttgaaaacctacaaggaagnacctctggatgtactcggcattaatacgaatagcaaagaacaaccagaggaacttcctcgcaggttcgcaagacatgtgataaacagatac

SEQ ID NO: 85180 - DNA, 1815 bp, Glycine max
  Clone ID: PAT_MRT3847_47931C.1
tggcaaagtattgccgtgagcgcatgcatttggccttggctgaggaaatcgaatctgtcaaggaaggtctattagttgaaaataccaagaatgattgtagagatctgtggaaaaacactttcaccaattgttttttgaaggttgatgctgaagttgggggggaagttaatcgtgagcctgttgccccagaaactgttggatccacttctgttgttgctattatctgttcatctcatatcatagtttcaaactgtggtgattcaagagcggttctgtgtcgtggcaaagaacccatggcgctatctgttgatcataaaccaaatcgagatgatgaatatgcaagaattgaggccgctggaggcaaggtgatacaatggaatggtcaccgagtatttggtgttctagcaatgtcaaggtctattggtgataggtatttgaagccatggattattccagaccccgaggtgacgtttcttcctcgtgcgaaagatgatgaatgcctcattctggccagtgatggcctgtgggatgtcatgaccaacgaagaggtgtgtgacattgctcggcggcgcatacttctctggcacaagaaaaatggcttggcattgccctcagaaaggggagagggaattgatcctgctgcacaagcagctgcagagtacctatcgaaccgtgctcttcagaaaggaagcaaagacaacatcactgtaattgtggtggatttgaaagctcaaagaaaatttaagagcaagacttgactgtttcttcaactgcacctgggtgttggaagataatggaaagctgaatatgatccaatatagtttttttgcccataaatttttcatgtgggcatcagaatagcaccctgtacaatacatccacctctccctagaactctccaactgattaagagtctccttgtacactgccacattggggccatgtaaatctttgctgcttttgtcggtaggtataggaggtcagttccatgcctatctgtcaccaccatattgtattcattattatgcctccgagaacaaaggctctgtgaggtatttacttcatattgctttaacatgtgttgtttataaaaaaagtagtagctaattggcattgtggtttacaagtaaagatccaccccttctaataatgtagcaaagcaattcttcatttgaaaaaaagatgagaaatttctcatgctggccggtggagatcattggttaggcatgaattccaaaggggtgtgtgacataatgatggtacgctcaattatggggaaggttacttatggaaaagcactgccatcattttggggagagggaattgatcctgctgctcaagcagctgcagacgacctatcgaaccgtgctcttcagaaaggaagcaaagacaacatcactgtaattgtggtggatttgaaagctcaaaggaaatttaagagcaagacatgactgtttcttcaactgcatctgggtgttggaagatgatggaaaactgaatatgatccagtttagtttttttgcccataaatttttcatatgggcatcagaatagcaccctgtacaatacatccacctctccctagaactctctcaactgattaagagtctccttgtacactgccacattgtggccatgtaaatctttgcctgcttttgtaggggtaggtacaggaggccagttccatgcctatctgtcaccatattgtattcattattatgcctccgagaacaaaggctctgtgaggtatttacttcatattgttttaacctgtgttgtttatatatatatatataaaaaaaaaaaatgtagtag

SEQ ID NO: 85181 - DNA, 657 bp, Glycine max
  Clone ID: PAT_MRT3847_47932C.1
ccacgcgtccgagcaaatctgtaagctctgacggcagcttatagaggtcgttgacggcaaagagagacacaaatgtattctgtttgagtttgaaacattgattcgttgtttcctctgcaaaattaaatcctcattgtgattgttgatgaacaattgaagtgtctctccgatttgaggattccggcgacagcaagcgatgaccaccggcggcgacggtgacacctccaaacaagagctcttccaccttatcaaacgcttcggagcttgcgtcactttcaagatctccaatctgttctctctctctctccacggcctcgtatttctattctctctccatagcttccttgctttaatcgcaattttactccttttttttaatttttttttaatcggcccatcattcggttggatctgatttgatattaaaatcttatctttttgctgattgtcgcttgcccaattcgtaattatctgttgctgtttcctgtttttaatgttttcactctttgtctgaagtttcgatttgagtgctttctttgcccctttatcgttgaatgaatggtttgtgatccggggaattgtgtaatttctcaaattctaactcctgaaaagtttatttttttggtggataacatttcgaactggggtctttttttt

SEQ ID NO: 85182 - DNA, 464 bp, Glycine max
  Clone ID: PAT_MRT3847_47933C.1
ctactactcacctttggcctttggttggatgctcctcaaggtactctagttctgtttatgttctatgaaaacctggctaatagtattgcagaactttctatggcaaggagtggtgtgaacattttaataattaattggcatcctaggttatttgagtaggcagagttttgcatgctgatacgagtacagtgttgatattgggttggtgatttgaaatgagttatgctttctgatagggtggttgactgtaggcatatggattgaaattagcgtccttggatcctttttatcacggttttcatgtaacatgcattatttcataccccatgaatttggcagttgcaagaggtgaaaaacctacttatccatcctcaaaaccgaaaataacagattgggataagcttgaagctcaagttaagaaagaggtttgtcagctctacatatataaaatgtttttgttcttt

SEQ ID NO: 85183 - DNA, 376 bp, Glycine max
  Clone ID: PAT_MRT3847_47934C.1
ggataacaaagggtttaagttgggcacgctagacatcgtcttcaatcacggtctaaagtgacactgtagactctggctcacgccttagacgacgaagctcgctctgtactctcactcacctgaacggatccttcttcttccttatcgcgaaatccgttacttcaaaacctaattgcgtgagtgtggtttctgatttgtgttgaagcgaagatgaggattatgattaagggcggtgtttggaaaaacaccgaagatgaaatcctgaaagcggctgttatgaaatatggtaagaaccagtgggctcgaatctcttcgctccttgttcccaaatccgccaggcattgcaaagctcgctggtatgagtggctcgatccct

SEQ ID NO: 85184 - DNA, 401 bp, Glycine max
  Clone ID: PAT_MRT3847_47935C.1
attgccgttccatgaatggtaatgggtccttaactttaatttaaattccttgggagttccgtatggcattttcatttttggttgatgtaatgtgtgattgggttagcttgtttggaaaaaatgactttgttttttaaaattaatctataaaatattggttgctgattctgaattaaggagaatttgtaacctccgaagagattacactctttggaatttcctatgatttttcatttttgtcgatgtaatgtgtgattggtttagcttggtatgaaaaatatgaaattctttgtttcatttggaacccttgaaagagattatatgaactacttatagaagtagcttataacttcattttaagctcttttcaacatatttcatcatgtgttcaaaatctgaaa

SEQ ID NO: 85185 - DNA, 1146 bp, Glycine max
  Clone ID: PAT_MRT3847_47936C.1
tttttctcaaatcgacaacaaaaccagcccacattgatatgaacatagaaaatgtggtcaaactacaaatattacatattatagatctataatcaacatgagaatgcaaaacgaaaataagttctcaatcaagtattgataagattcatatccagtctcagatctacaaatttaagaaaccaatccaaaaatcaataaaaatatatgaaacaagtcaagatgcatctgaatcaaaaaccgaaaaaacaaagtgaaagaaactccagatttgtgttgctagggtcgaagtcgaagggatcaccacccatgatttccgttcgcgttgctcttctcgccgacacccatggttttcgttcatagatctgtaactgatcttcgcatgcgacgtcgcacatagtaatggaagtgatactcaccctctaacgcacgtgattgtctccatcttcgcgtcgctcttgtggtggtttcggtgactccacgaaggtttggggttagggcggtgcccgaagaggaggggtggcgagggtttgaagggggtgggagccatcagttttccaattaagaagaggggaaggaagagaaaaaggttaaagggtataatgggaaagaaggaaaaaaactaaaaagaagaaaaattgacagtcatataatatatctttaaatctggtaatccaacggacatggataacaaagggtttaagttgggcacgctagacatcgtcttcaatcacggtctaaagtgacactgtagactctggctcacgccttagacgacgaagctcgctctgtactctcactcacctgaacggatccttcttcttccttatcgcgaaatccgttacttcaaaacctaattgcgtgagtgtggtttctgatttgtggtgcgtctctgattctccctaacctaaaccctgatttctctttatttttcttttcccctatttttcacatctaatcatctttgtttgaattgttttgttgctgtctgtagttgaagcgaagatgaggattatgattaagggcggtgtttggaaaaacaccgaagatgaaatcctgaaagcggctgttatgaaatatggtaagaaccagtgggctcgaatctcttcgctccttgttcgcaaatctgccaagcaatgcaaagctcgc

SEQ ID NO: 85186 - DNA, 501 bp, Glycine max
  Clone ID: PAT_MRT3847_47937C.1
tagtcggtcggccgccgcttcttgtttgaatatactgtttttgcaaaccagctctgtactttggttttgtggaatattgtacagtttacaacttctcttcttgttgtttttttttttaaaagaaagggaggcccccatgttttggatttttttggaaaaacaaaaatggctgatttttaagaaaaaatgatcagggcccccgcccaacctatttttacccctcaaataaaaaataccccgcaaaacaacctttctgcaaaaggttttttttgcccggaaaaatttcccccggggccctttttttggaaccctttggaaatttttttgacgaagcgcccccccccctttttttggccctgaaaaaaaccccaaatttaagggttgaattttggaccacctttaaaccaaaggggggcccccaggaaaaaaaaaaagggctgcctccccgcggggagaaataccccaggggggggaaaggaaactttttttttccttgggggg

SEQ ID NO: 85187 - DNA, 385 bp, Glycine max
  Clone ID: PAT_MRT3847_47938C.1
aagtttttgatcgagtggattgttcttgcaaaacatgccaatcttttttatgatccgtgtttcttttcctatatatatatattttaatttgttttgccttggtctcaggtgaaaacatattggttgaattctgatggtgctgatgtggtttaccatatgatagataacttccttctttagcctttttgttaagtttgatttcatctaatcaatgttgtgagcaacaatagtagttgtaatccaatcatatatcccctatattatgtcttgcaacgtaatggatgaagattttttgtacattgtattgtggcatgagaagtcgataactctgtttgagaataccattatgtacatgggaatcataaatgactaatttgtccatctt

SEQ ID NO: 85188 - DNA, 259 bp, Glycine max
  Clone ID: PAT_MRT3847_47939C.1
atttggactttttgattgcccttggaattgtgtccatttgtctctgctttggtcacatacacattaatccttctttgaattgaactttctgagctacacgtaagacatcaggttcaagtctaggtcatggggatcaaacataagtgccacaaccataatgtttgctttattttgtggcagtgtttttgtttgataatcctttgatctgggtttaatttcaattttctcgtttgagtttttgtccaccatgtgatgagta

SEQ ID NO: 85189 - DNA, 421 bp, Glycine max
  Clone ID: PAT_MRT3847_4793C.1
tttgttttataaaacacaaatgaaacacactattattccattttcagtacatatttaatttctttttacttcaaagaaggaaacctacacaaactttatcttttgtaaatggaagagatcaatacacaatgatatagtcaattaagtatgcatgaagaaacaccaacgaaacccacacggttgtcatatgatgaaatgaaacctaagcactgcacaatcatgcatctgcaaccaaccaaaaagccttgtctcaatcttaaatatcgatgagcactcactctgcttcagcttttacttttcctcctctgtcttggagtgataaccaggacgctaatctttcatctggaataatatacccttgttgtccttggactctccttcatgatgagcacctttaccatgctccaatgatgcaacatgt

SEQ ID NO: 85190 - DNA, 249 bp, Glycine max
  unsure (1)..(249): unsure at all n locations
  Clone ID: PAT_MRT3847_47940C.1
ggcnctagaggctcggattctnacctgaaagcntatgngagggnanagcaaatgatgaaggacctcgagtctgagatgatgaanaagggaggagttnataggattgaanaaagcaggntntttgaggtnggtttgggttcttcatnaatttggacaaccacagccttgcaaggancatnancacacaaacttgcnagnagnagnaacaacaagaaattcagncaaaattcatgatgagtttggtgatga

SEQ ID NO: 85191 - DNA, 431 bp, Glycine max
  unsure (1)..(431): unsure at all n locations
  Clone ID: PAT_MRT3847_47941C.1
acataaccacaatacctcaacaccacaatcatggacaagagcgaaggagaagctccacattggcagcagccgccgcaagtcacagcccgagaacgatgctagcctgggaagctcaacctccggccatggtgtcggcaccattgaagagaaccgcgactcaatcgactcggagctcgcctcaatgcccccccacgagcgcgtcgcatacctccaagaattcgagcacagcgacaagcacgacgcgcccaagaaaggcgggctcatcgagaagctgattgcgcgtggcaacaagcgcacggaagagcaactcgcccgtgaggcggcggagcgcgaggagaagaacagggcggcgacacatgcgcaattgggtcccggtgcgggcgcgagtgcgcatagtgccgcggngccgacgacggataagtgtattcgct

SEQ ID NO: 85192 - DNA, 1205 bp, Glycine max
  Clone ID: PAT_MRT3847_47942C.1
gcataggcagaaccaataaggataatccaactcagcttcttcactcccctcaccttatcaagaatccccttatagttaaccaccaccaatcttcaatctcctcctcactgaatctaaaaaccttcccttctcttctcacccccacactcccatctcacacacccctcgcatccaacaatgtctctcaccattccctccaacctctccaagcccgccgccctccgccccaaactaagcccaaagctaaggtccgccgccacaaccaccatcgtctgcagcaccaccaacaacaacaacaacaacaacgtgtcctccgacctgaaggcgttctccgccgcgctggccctctcctccatcctcctctccgcccctctccccgccggcgccgacatctcggggctcaccccatgcaaggagtcgaagcagttcgcgaagcgtgagaagcagtcgataaagaagctggagtcgtcgctgaagctctacgaggcgggcagcgcccccgcactggccattaaggcgagcgtggagaagacgaagaggaggttcgacaactacgcgaagcaggggttgctgtgcggcggcgatgggttgccgcacctgatcgtgagcggagaccagaggcactggggtgagttcatcacacccggaatactattcctgtacatctcgggatggatcggctgggtgggtcggagctacctgattgcgatcagggacgagaagaaacccaccatgaaggagatcatcatcgatgttcctctggcttctcgcttgctcttcaggggtttcagctggcccgttgctgcctacagagaactcatcaacggcgacctcattgccaaggatgtctagataagagagggtggatggctacattggaggaaagcctggagaatttgtatgtggatgggatctttacgcgctctttttgtaattactttttttataaatggtacatgatatgatgtaatctaatgcatgtgaaccacaatcaacctcatcttccaattcaattaatgtaagaagagttcttgctacactctctcaaacacatgctctattgttaattcaaaactataaaattaagaaagaaattcatcaaatactaagttcaacccataaaaaatgtgtttaaaaaacgtgttgctaatgtttttcctcgtatagttacatgcatgtaaatattatgcaagtttatttaagac

SEQ ID NO: 85193 - DNA, 111 bp, Glycine max
  Clone ID: PAT_MRT3847_47943C.1
tagaattagtgattagtatggtgtgttagttcttcaggctcacgtctgccccggctacctcttttgtatatgatgtgtctaggaagtatttaataaatgtttactgctccc

SEQ ID NO: 85194 - DNA, 562 bp, Glycine max
  Clone ID: PAT_MRT3847_47944C.1
gtatgaatagttgcaattaaaattgataacaaatgattctttgtgcaacatggtagaaaacgagaactgtcagaaacacctgctagtttgtcttaagtgcaagaagtgtacacacaagaagtaaaaaagttgtgtgcgtggaaggtgcaattaagtacaaattctcccagtaatgtaaaaaatggaccagaatggattatataacttgaaagaacctctcacatttttatctacataaattaatttgtgccaatagaaaacaaaaaatcaatacctttaggtctcactcatgtcagtctatgaacactccaataaaaaggctggtcacatgttggtcagtctaatttgcatcaaaaggcattgttaatattattaacagaaatggagggacaatcaggcatcagattatgcaaaaccccgtcgcctatgtccagcccctgaaattggccgatagattcacttgacaacatttctgacaaatcatacggaatgtctagatcaaacagaggctcatcggaagtaggcacattagatgagagtgaatgcaactgtggcatttgca

SEQ ID NO: 85195 - DNA, 865 bp, Glycine max
  Clone ID: PAT_MRT3847_47945C.1
tacggctgcgagaagacgacagaagggagaaaaggtatttgtattttttatgcttattttctttctagagagtattaatctgtgttttaaggcaattgtaatattttgctttttattaagtttcttgatagcttttgtacaaaaaacaaagctttttcccatctacttttgcccaactttattactgctgaatattgatttactttctatgcattcagcagtgaaaaaaaaagcgctttaagtttgcacaacaataaatctcttagcaataataaatactctttgattaattgcaattaatttttcatataaaacaaaattccatctcatcaccacttgggattcggtgactcaagctgcatgatgggagtaataagataaagcgtacttcataatgcatgctgaaaaatactcatgatgagaggcgttattattaccatgatgatgaccaccaaaagggaactttctgccaccctgtgcataacaaccatgtccaaagccatggtcttgaaacatgcctcctcctaacttgccaccatgcctgttgttcatgtgcatggctcctcctacgttgccatgatgatgtttttgcatggagaggtcagagtccacagcagcaaaagcaccaagcctgttgttgtggttgttcatgttcatgtgcatgcctgggaattgcttgtggttgtggccatagttgttatcagagctccaagaatcttcgtggagggcatagctctgctgctgaccctgactctccatccacatgctctcatcagcacagtgttgctgctgctgaaaatggttcctccccatcttgtttcttcgaaacttcaagttattttttgttattagtgttgctcgagcc

SEQ ID NO: 85196 - DNA, 562 bp, Glycine max
  Clone ID: PAT_MRT3847_47946C.1
tggtgatagaacagttgtggttggaaacaagagactcatgcatgcttgtaatgttccaatatgttccgaggttgagaagtacatctctgaaaatgaaattctggctacaacttgcattgtagtttcaattgatggaaagattgctggtgcattctctgtaactgatcctgtaaaaccagaggctaaacgtgtcatattttttctgcattctatgggcatttcaagcatgatagtgactggtgataactgtgctactgcaactgctattgcaaatgaaatgggtattgatgaggtctttgctgagacagatcctgagggcaaagctgataaagtgaaagacttgcagatgacaggaatgactgtggcaatggtaggtgatggaatgaacgactcaccagacctgcttgctgctgatgttggcatggcaactggtgctggaactgacatagcgattgcagcagctgtcatagcttctgtcaaaaggcggttcgaagatgtgatcatagacatagacatatccagaacgaccatgtcgcgcatcctgctgaactacatcttggct

SEQ ID NO: 85197 - DNA, 1838 bp, Glycine max
  unsure (1)..(1838): unsure at all n locations
  Clone ID: PAT_MRT3847_47947C.1
ggcgacgcgaatgcattcccgtaaaattaagttggaagtaaaggaaaacaatagggcgggtggtaaacaccactacaaaatctgacgaaaaaacgataacaccagcgataacagaacatagagaggggatggaaacggagcggtgaccggtttaaacccattgcatgatcggaagctcactctcattccccccctaaaccaaaactacgtccttctctcaccaccgtcgatctcaatccgagatgcatttccgcatccccaacgacttcgacctcgaggtggatctctctccgccgcatcatttccaagatccggtcccgttccataccccaatctccgcatctggaaacccgtcgctccggtcaccggagaagcaactgccccgacgcctcttcctgctcgttggtcgacgccattgatgccgagaaggccttgtccccctataagtctcgctcaattgtggaccgttgctcccaaacgagccaggaaagagatacaactgggtctgattgagctcatttccatgacttcaaccctcctgtctcaaaaaattataaaatatacggctctaaatgaagcactgaagaacgaagttgataggctcaagattgcaactggagagatagtaatgcataccgatgcctatggtttgggactgcatccacttacatattctcaagctccattcttctcacatcagtcacaacatgggcagagagaacttcaggccatgaaaatgtggtagttgcattcactctcatctaatgtgcctacttcccatgagcctctgtttgatctagacattccctatgatttgtcagaaatgttgtcaagtgaatccatcggccaatttcagggactggacataggcaacggggtttctcataatctgatgccagattgtccatccatttgtgttaataatatcaacaatgccttttgatgcaaattagactgaccaacatgtcaccagcctttttattggagtgttcatagactgacatgagtgagacctaaaggtattgattttatttttttttctatttaattaagtgcaaatttggattagttcatcttgaaaaaataacttttgcattttttaaaggaaaaaaagtatttatcaccccaaaaataagttgaaacaataaatttcacatcttgtgtggcttggttaggcttaaattaatttatgtagataaaaatgtgagaggttttttcaagttatataatccattctggtccattttttacattactgggagaatttgtacttaattgcaccttccatgcacacaactttttttacttcagtctgtgtgtacacgttttttgcacttaagacagactagcaggtgtttctgacagttctcattttctaccatgttgcgcaaagaaccatttgtcatcaactttaattgcaactattcattcatatggacatggtgtgccatggatggaccatcatatttatatttttgtggaaacataagttagacctgttttgttggtttactctcctgtcaattttaaagaagccatttgaatgagggcctcaaatgtccacagagtttactagtttggtatcgtgttaggcgagaaataaatggcaagcacttctagttatcatggtcccttctatcttctctgttgtctttactgttagtttttcattttaattttccccttctcaggcattttatgtggcaagtttgctgataagattgcagaaagagnttgtatattgttaaaattatctacattttgaaaattagattggtcattgaatcactggaaaatatgtagttcatttgtttgttttagttgaattattgataact

SEQ ID NO: 85198 - DNA, 293 bp, Glycine max
  unsure (1)..(293): unsure at all n locations
  Clone ID: PAT_MRT3847_47948C.1
ggcattaccttaccttttgatgcacttcttattgccaatcaatatgagggggggggggggnccttnactgcgttgggggggtanctttcttatgggtttttctatttatgaagtttataatatggggctcataggaacctantttctctatttatgaggtgtataatatggggctcatatgagcctaggttctccatnagattgggggagaggtgnctcttanaaacctnaaggggtgcgataatacgtgccagcattttaaatacattcatcttttcaaggtgatctaactt

SEQ ID NO: 85199 - DNA, 497 bp, Glycine max
  Clone ID: PAT_MRT3847_47949C.1
taatttctactttttgaatctaataggtatatacatatgaaataaaatttcaaaataagctaaagtatatgaacctaatagacatacataacaatatatatataaacacattaagtaaaacattaataaccaaagtacaaaacatttgccatacagacactattatattaaaagtaggccagtatcaatgagtcgctatggttcacttagtgactcctcgtcatcttcatattcactgtcatcttcaccttcatcttgactgtcatcttcaccttcttcttgattgtcatttatattatacatggcatgttcatgctttcaatcaattctcgtatcaatgcattgttatgctctagaagcctctcagtgtttgcaactctggcttgaagcttatctctttcatttttaacttcttccatctctttggtcaattcatcaaactcttgtttttttacccactcccttgatgaagaagatgaacaattgtagcaaggact

SEQ ID NO: 85200 - DNA, 318 bp, Glycine max
  Clone ID: PAT_MRT3847_4794C.1
gcggactactagaagggggagagagaggggacatttaatattgtcttctctgaaaacaaaatgggtcatatcaacaaatgtgcgagaagatgataagtcactgcgatattaggacactcttgatgcttcttgtgggtgttcaagataaagaggcaaaaacaacctggtattggaaggaacagatttttccatcttatttacaactcctataagagggtatgaatctggtgtgattattaccccgagcacctcttgctgcaactcttggaaggtatctggttcacttctacctacaaagaaatggacccaaaaacgaac

SEQ ID NO: 85201 - DNA, 1285 bp, Glycine max
  unsure (1)..(1285): unsure at all n locations
  Clone ID: PAT_MRT3847_47950C.1
ttttcatgtttgcatttgctttagcgtctgtggtattgataataggctggttaatggatttgtgttttctatgtttcaacacctatatgtctcacctattcccagatctccactcaattggtggtttggttcctcttcttggttacctaaagaattctcatgccaatattcgagcaatggctgctgatgttgtgaccacaatagtccagaataatcctcgaagtcagcaacttgttatggaagcaaatggctttgaacctcttatttctaattttagttcggatcctgacgtgactgttagaactaaagcactgggtgcaatatcttcactaattcggcacaacaaaccaggcattactgcatttcgtttggcaaatgggtatgcagctttgaaagatgctctagcctctgaaaatgtgagatttcaaaggaaagctctcaacttgatccattacctgttgcatgagaataattcagactgcaacatcgtgaacgagcttgggtttcctcgaatgttgatgcaccttgcctcaagtgaagattcagatgtgagagaagctgcccttcgtggccttctccagcttgctcacaatgcgaaagatggcaaggatggcaatgagaaagacagtgcgaaaataaagcaacttcttcaagaacgaaataaacaacatcagtttaatgtcagnctgaggaccttggtgtagtcagggaggagaggcaacttgtggactccctgtggagaacttgcttcaacgagccgtcttctcttcgagagaaaggtcttctagtgcttccgggggaggacgtgccccctccagatgttgctagcaaatattttgagcctcctcttagatcttcgactgcaaatccatcttcaaagaaagacccagaaaagaatgagatccctttgcttttagggtcaggaccttctcctacatacactaacaaccaaggttcaaataaaggagatgctagttcatagacagatgctaatatatcgaaagtttaaatgctttatgttctgttttttataccatgctttctttctatcttatcatacaatagtaatttctttctttcacttataggctatgtttttaaccctttcttctggcctcagattggttttccctagtatttctaggatgatgatctcatggtatgttacactgtgacactataactagccctccattgtagtttgttaatgtatgattgcagcggtgaatgccttcatttttttgtgccttcgaactttgctaaaaaaaaaaatagcccttaattg

SEQ ID NO: 85202 - DNA, 1844 bp, Glycine max
  Clone ID: PAT_MRT3847_47951C.1
cataattccggggtcttttcatgtatgcatttgctttagcgtctgtggtattgataataggctggttaatggatttgtgttttctatgtttcaacacctatatgtctcacctattcccacgcgtccgcccttttcctcgtttccacaaccctcccgaattcttgagacgcttcccgaatcctttcacacacacgttgctgaatctatatatctaaatcccttcacttcccattcctaaatcctcttacaaaaactatacaacgttgcttttgttttgttttgttttgtctctctctaatcattccaatggccaaagaaggacccaactgggacgggttgctcaaatggagcattgctcattccgatgggactcgccccactcgcaatttaagtgaggaggatcggagatggtttatggaagcgatgcagtcacagaccattgatgttgtaaaacgtatgaaagagatcacacttgtgatgcaaactccagaacaagtcttgaaagaccaaggagttacccctgcagacattgaagatatgttggatgagttgcaagagcatgttgagtcaattgacatggccaatgatctccattcaattggtggcttggttcctcttcttggttacctaaagagttctcatgccaatattcgagcaaaggctgctgatgttgtgaccaaattagtccagagtaatcctcgcagtcggcaacttgtcatggatggccaatatgcgttggacctctaatatggcaattagaaagacagcgcgaagtgaaagctacttcttaaagaacgaattcaacaacatcactattacgtcacactgaggaacttggtgttgtaagtgaggaggggcaacttgtggactccctgttgagaacttgcttcaaagagccgtcttctattcgagagataggtcttgaaaggctttcagggctggaccgagtacccgtccagaggttgctaacaaaaattttgaacctcgtgaaagagcttgggtttcctcgactgttgatgcaccttgcctcaagtgaagattcagatgtcagagaagctgcccttcggggccttcttcagcttgctagcaatacgcaagatggcaaggatggcaatgaggaagacagtgagaagatgaagcaacttcttcaagaacgaataaacaatatcagtttaatgtcagctgaggaccttggtgtagtcagggaggagaggcaacttgtggactccctgtggagcacttgcttcaacgagccatcttctcttcgagagaaaggtcttcttgtgcttccaggtgaagatgcaccccctccagatgttgctagcaaattttttgagcctcctcttagatcttcgactgcgaatccatcttccaagaaagactcaaacaatgaaaagaaagagatccctttgcttttagggtcagggccttctcttgcagacactaacaaccaaggttcaaatagagaaaatgctaatagctgaaagcttggatgctttctgctctgttttttttttgccgtgctttctttctatcttatcatacaagtaatttcatataggctctttttttcccctttcttttctcaccttagattggtcttccattgtatttcaagaatgatctcatggtatgtgacactataactagccttccattgcagcggtgaatgccttcaattttttgcacttgatatttttaaatacttgtttagatgttacagtcccactcttacatgtataaaaggatctacttgtccacattatccttcaattttgggtttgggcagtgtgtttctagtgaataaaaagagagaatgatagttatgatagttatgatagaaa

SEQ ID NO: 85203 - DNA, 619 bp, Glycine max
  Clone ID: PAT_MRT3847_47952C.1
gcattatcttatcaacaaaaaaaaaaaaatttcattaagaaagcaggaaaaaaaaaataatgtccgtgatcaatggtaaatatgtttacgtgcatatatacatgctatgagtttttaattatactatgctgcaacagagtgtctcttgatttttaggtaaagtttggttaaaagagaggaggagagggattttaaggagggaaaggaaagggaagagaagagagaaaaaaacaatacttttcttattcagttaagaaaaaaagagagaagagatttgtgaaggggaatctaatttagttgcctaataacattatgcttaaattattttaaattctctattctcacttccaaatctctcaaatgtgagatagagacaaaaatcagatgaggaatttaattagctcctctctattttgctcctcccctcctaaaaatcaaaggtaagttctcatggcctgagttggttggggtgcaaggaacggtagcggaggctacaattgagagggagaatccttcggtgaatgctattattgtgcctctaggatccgtggtcacaacggatctttcaagtgacaggggttgggttcgggtactaataatggacgtgccattgatctct

SEQ ID NO: 85204 - DNA, 744 bp, Glycine max
  unsure (1)..(744): unsure at all n locations
  Clone ID: PAT_MRT3847_47953C.1
caaatctctttgacaaataccagaaacgtagacgcttaaacacaaccctccctcgttcctctcatctcatatcatcaaattcaaaagctcttttccttccttttgtgtcttcatttcatttcaatctcttttttgtttattattctctgaaactcgatcaatcaatccactatggatgaagagtacgatgtaattgtgttgggcacaggtctcaaggaatgcatcctcagtggccttctctcagttgatggcctcaaggtgttgcacatggatagaaatgactactatggaggggcttctacatctctcaatcttacacagctatggaagcgatttaggggagatgacacaccggcagagaacttgggatccagcagagaatacaatgttgatatgatacctaagtttatgatggccaatggagctttggtccgtgttctgattcacacaaatgttacaaagtatttgaactttaaagctgtagatggaagctttgtgtataacaagggaaagatttacaaagttccagcaacagatgttgaagcactgaagtcaccattaatgggactgtttgagaagcgccgtgctcgaaagttcttcatttatgtccaagattatgaaacaaatgatcccaaatctcacgaaggactagatttaaaccaagttacagcaaggcagctgatttcgaatatggattggaagatgatacagntgactttattggtcatgccttggcacttcatc

SEQ ID NO: 85205 - DNA, 388 bp, Glycine max
  Clone ID: PAT_MRT3847_47954C.1
aataaatgggattaattgttttataaaaaaaaaaattgaaaatttttttaaaaaaaaatttaaaaaatttcccgttttcaattaattttttttgaattgaaatgtgaagccctatttaggcaaatttgattgcaagggtaaagggatggggagttaatttggaaggcttgaaaggggggaaaggttttttataaaatgagtgaaggggcaaatgttgttccattgggggggagggccgtttttcccattcgccccagttggggccctttgtttctaataggccccgttttttcccctaaaataaaacgagggagggccttttcaagcccattattggttatgtggcccaccaaaatttttttaccttttttaaacacccacagggccc

SEQ ID NO: 85206 - DNA, 252 bp, Glycine max
  Clone ID: PAT_MRT3847_47955C.1
tttagatcgcgtttgttcgtttttgaaacaccaagcgtacttatacgcgcgtgcgcaggcacaaatgacatatacgggcgcgtataatcattacgttgggctttggtgtccatgcatcagcttggattgatcctggaggtgcggattttcagctctatcgtatggacagacttttcggtcggccctcttaatggctcgcatggccgtacccgtcccccttcttgagtgagctgcattccgtaaaacccaggt

SEQ ID NO: 85207 - DNA, 241 bp, Glycine max
  unsure (1)..(241): unsure at all n locations
  Clone ID: PAT_MRT3847_47956C.1
atggtggaaattgactttcccccagtgcacttcccgaagtgttaaggagaatggcctcgtttgctatagggtnngangaggctgggtggcaagagaatggctgattctcatggaatatggccaaatggctggttgctttcaatgtgggagatatttgtgttgggagatctcgtcttgggaagtttctgaggatgacttctgccctacattaagatgtacagtctctttcttcatagcattt

SEQ ID NO: 85208 - DNA, 490 bp, Glycine max
  unsure (1)..(490): unsure at all n locations
  Clone ID: PAT_MRT3847_47957C.1
ggctcgagatctttgccttagacccatacctgtttccactctctcctattctctatttggaacagttgaattctttctcaactcgcaatggtttttcccttactcaaacttccacctatcatttatccttataattatgactgctatataattcttgatcgaacacaacaaataatggggcgctctattaatttatatcagttcctgatttggctgagctgacctgctaaaggaggagtttgcgtttttttttttttactgacaaagattgagttattgatatggggggtctttgatcatagtctgtgtaaggagacacgtgggtttgctaactcagatggacattctgataaccataaatctgatggtgagaaccacaggtccaccaacatgctctagtgatctgacaagtgcgngggatcatggagtggacaataaaaaacaagatgctcatgctgctgcgnggaatggttctgatgatttctatgat

SEQ ID NO: 85209 - DNA, 240 bp, Glycine max
  Clone ID: PAT_MRT3847_47958C.1
tatattacgacgaaacagtaactcaggatgcattacaaggtaaaaaaattgctgtcattggttatggctcacaaggacatgcacaaaatttaaaggacaatggttatgatgtagtcattggcctgcgtccaggacgatcatttaataaagctaaagaagatggatttgatgtttatacggtaagtgaagcaacacaacaagcagatgtagtgatggtactattgcctgatgaaattcaag

SEQ ID NO: 85210 - DNA, 660 bp, Glycine max
  unsure (1)..(660): unsure at all n locations
  Clone ID: PAT_MRT3847_47959C.1
ttttcttttttttttttttttttttttttttttttttttttttttttttttttttttttttttattttttttattttttttttttttttttttttttgggaaaaaaaatttcccctaccgggaaaaaccccggggcccaaaaaaaacccccccccaaattgggggggggggttttttttttcttaaggaaaggccccaaaaaccaccaaagaaaaaaaaaaaccctttaagggggtttttaaacctccaaaggcccaaaaaaagcccccggttaggaagttgggcaagggcgaaaccttttcccccccggaacccctaaaacccatttacgggggcctggcccaagggaaacccccccaaaacggggggggaaaaacccccaaattcccccccccctttttggggaacccccaaaggaaaaaaagggcccccattaaaaaaaccaaatttaaaaaggggaaaaaaaattgggaaaaagggaacccccggaaccttgaagggaaaaattaaggggtggtcccggaaattttacccaaaaaaactttttaaaaaaaaaattgagaaaaaaaaaataantttttttttccggggaaattaaaatttccctaattaaccaaggggtaaattaaaaaaacccccccctctttaaaaagttttccc

SEQ ID NO: 85211 - DNA, 690 bp, Glycine max
  Clone ID: PAT_MRT3847_4795C.1
agatcatagaatatctgatggaaatcataatgtggaaagagcttctcctgagcgagcgcaagatctggattcttccagcccacctgtggtcgcgacctgttagagagatcttgggagaaagtgtagtacctcttcgaataagtgaaccacccaaaacaaacagtggacaggctgctaatggctcagcactcacacagagaactgcatcttccagtagcttagcatccagcaatggaacccctgcagaagttaagcttgagactattaagagccttattgattttgatgatgatcctgaaccacctgttgcttcagcagctcctcaagcccagcaaactactgtggctcaacatgggatgcctgcaaattccaatgataataattgggcctcttttgatgttgctcccgaggcaaaagcacctcagggtccttcgaatgtaaatccacttgaatccatgctgacacaattgtcagtaccagtatctttaccttctcatgtttcaggagcccaaggacttgtgatgggatcagctcttaccgctactgctgcaggaacaccaattattagcagcttctcaacattcccagccagtggtgcttcagtaacatcttttggattaacaccagcatcaactcacaataatgcaggacagtgggctactttgcagtatcagcaacaacaacctttgt

SEQ ID NO: 85212 - DNA, 523 bp, Glycine max
  unsure (1)..(523): unsure at all n locations
  Clone ID: PAT_MRT3847_47960C.1
ggaatttcgatgctcagtcatctgttttaccattctcttctctcttgctcttgcaagaaanaaccatgtccatacatcactacctaaggaaaatgattgggaagctggttggccaaacactcgcattcccactacactacaagagcttctaaagcctctccctacaagtgttaaaatcgatgaactccctaagcaaattgataatgcacagtacccaaaaacattcttctgtaaagaagaccttggtccaagcaaaacaataaaagtacaattcaccaagcgtccctatacacaaccttatagtatatatacataattaacagatatgaaaaacacctgtgaagaaagatatagttttgaaaaaatgtgcatcaagagagaagcntgtgaaggagaagagagagtttgtgcagaatccttgngaacantaattgngtgtaccatggcaaagctgaaaaaaaacattcaantacggtcaangggctggntcgataagcgggaacagtgcactagggaagagatt

SEQ ID NO: 85213 - DNA, 162 bp, Glycine max
  Clone ID: PAT_MRT3847_47961C.1
gacggcatacctcttaaataagggggcgggcggtccaatggaccggccctaacttcacaacgaggggacgggaaaaaccctggctttacccaactaaataaattaacagcacgggccattttatccagctggcggaaaagcaaaaacgcccgccccgatcaa

SEQ ID NO: 85214 - DNA, 353 bp, Glycine max
  Clone ID: PAT_MRT3847_47962C.1
gtctaataaacggaacatgcacctgattatttacggaaatttgatatatgcacatgagttattgaaggtactatactttacaatgaattactcctattcccatgaacgcagatcatgcatagcgagaacctaccaccattccttgatattgacagacctgacgtacaattcacagcatgaaccatatctacacgatgcttagggatagtagtcaccggctataacttaaaaacatggcatgcgaagagcttggtaacagagactttgtgctttagtttactggatgctgtatcgcaggggctctgatagaagaaggggataaacccggaaggctcacaactcgaatcgatcaa

SEQ ID NO: 85215 - DNA, 701 bp, Glycine max
  unsure (1)..(701): unsure at all n locations
  Clone ID: PAT_MRT3847_47963C.1
gagacatgtgtcaatgatggaagtgatcggagcaactttcaatggtgcagattgttccgactctttttgactgaaactgaagagaaatggtgagatgaagtaagttgtgtacttggaaagatctcattttaactttaggtgagttaggagaagagaaaggaagtggagagtctcttggatttcctgagttgagggagatcattgccgataagaacatggtggtgaacggtggttgggtgccaccataggctctcagcatggagacgtgcactactggatgaatgcgcgaatccggaggaatacacaactcataagccacgtaaccaatcctttgaaggattttgaaaggcccaaagaagtatttggaaagcttttgagaagaacgacaaacaacagtttgttggcgatatggttgaagtttgagccaaacaaaggcactaggctcaaagttgtcccttgaacataatcaagcagtgtgggagggggatgaccatacaaggccgtcaaaggtggcatgtcgatggatgaatggaaggctgtattataccacaacttagcaaggtggagaaacttgaaccagcaacgtgggccgttcacttataaaacatcacaaggtggctccttggacgtgaaaaaagntcttttcagaaggcacttcataaaagagggttgtgggtctggagtgatagttttgggaatgc

SEQ ID NO: 85216 - DNA, 517 bp, Glycine max
  Clone ID: PAT_MRT3847_47964C.1
tttccttttttttttttttttttttttttttttttttttttttttttttttttttttttttttttttttttttaaaaaagggaacaggggcaaaaaatttattaaagccgggaaaaaaacaacaagggggcccgggggggggctaaggggacccccccccaaaacaaaaagggtttttaacaaacaaagctaaggcccctattggaaaagggcaaaacagcaccccttattacataaagagggggccaacccctacctaaattggggaaagaggggaaggccccccccaagggaacccaggggataaggaagctaaaaggcccggctttccccttgggggcccccaagcaaaccaccccatggggccccaaggatcccaacaattcgggaccccggcccaaaaaaaatcccccccatgggggattggaaaaaaagggccttgggagggaaaaaagggggacccctgaaaaaaacggcccccagggggggaacccccccctctttagggtggcttcgg

SEQ ID NO: 85217 - DNA, 298 bp, Glycine max
  Clone ID: PAT_MRT3847_47965C.1
cccacgcgtccgcaaacggataaagagatgagtaaatccgtctcaatgagtcccacaaggcacagacactcaaaaaaatgaaatctgaaatagtatctagcaaagtatcgggtgtggcacactgtcaagctgcttcaccttatccaactaaaccctgtcatctatggtgttgtgaaagtgtgaaagccaggaatcaaccatcttaatgttggcataacccgaacaacatttcctaccacttcctcaacttagtatttatttcataaaaaaaaaaaaaatagaaaacttaaaaaaataa

SEQ ID NO: 85218 - DNA, 462 bp, Glycine max
  Clone ID: PAT_MRT3847_47966C.1
acgggacaagatatttttccctgcaagcaaggaactctttgaggtctttcaaattgattgtaggaacttttgcatttggatttgcatgaattttgctagaagacatggctactgcaaatggtgggactgggactgaggagcacaagaggaaatctaatgatctttttcttaagcaagggggacaccaaatcatgccaagatcacctagattgtgcacccctattcggaaggaatggccggaggagagtttgccaaatgacaatgtgattggcttgaatagctatgttacttccttagctggatctggacctcctagttctagtttttgttccacaattgattctgaacacattgttgaagagttgcctgttaggaattatgagaaccagaatataaacttagttaaccatccacataattcaagacaggcaaagaatcaattgactattgagtctaagtata

SEQ ID NO: 85219 - DNA, 719 bp, Glycine max
  unsure (1)..(719): unsure at all n locations
  Clone ID: PAT_MRT3847_47967C.1
ctcttctcttcaccgtctctccatcctctatccttcacgcctttgtaacacgaagaaaagcacagtaactgagaggacacgatggtgaagaagagcaagaagagtaagagcaagagggtttcgttgaagaagaagtacaaggtcataaggaaggtgagggagcacaacaggaagaaaacgaaggaggcgaagaagcttcgcttgagtgggaagaagaaggttgagaaggaccctggtattcccaacgattggcccttcaaggagcaggaactcaaagcgcttgaagctcgaagggcgaaggctattgaggaattggagcaaaagaaagcggaacgcaaggagagggctcggaaaaggaaattgggcttgctagaggatgaagataactccaaattgagtgacatggatattttaaaagagagtaatgattttgctactgttgggaagactagagatagctcagatagggccttttacaaagatttggttaaggtcattgaagcctctgatgtcttactggaggtgcttgatgcccgggantcccttgggtactcgttgtgttgatatagaaaagatggtgatgaaatcgggaccttgataaacgtctcgtcttgcttttaaataaaattgantcttgttcctaaagaagctntanagaagtggctcaagtaccttagagaaagaatacctactgtggcctttcaagtgcagcacacaac

SEQ ID NO: 85220 - DNA, 544 bp, Glycine max
  Clone ID: PAT_MRT3847_47968C.1
aatcaaatctacacattctataaggaaataataaacaataagttgattttttatctcaaaaaagctaaatcagaaaaagaatttatacagataacaagtctgtattattccgggtctcccttcactgtagcaaacaccaccatccattcaggttaggcctaagtacaatcatttgacggatcaaacatgtttaggcctaacttctattccttcaagaatgaaaccgtgcttccacatatcactagtttccctgacattcatatagatttcatcttcttccaagcctgagttgaagaactctcccatctcaatctctaaccacttatcttttctcacattaggacgttgcagaccccgaaattgataacatcgcaggatggtggtgaaatccactggcatcgatcatctggaacacaagaaaagctgcgtactgagtatttggggacaagacgcgggtctttatctgcccagtgatgttaaaccagcacaccagcgtaaagcctcgcaacttcttggaaccttgactctggcaggcttttccact

SEQ ID NO: 85221 - DNA, 203 bp, Glycine max
  Clone ID: PAT_MRT3847_47969C.1
aaacaaaaaaaaaacaataaaaaaaaaaaaaaaattcttcctctctaaatgatccaatcttacctactcgttcatgcaaccgcataactcttttataatgtaacctaaatttaattcactggccaacattttacaacttcgttaactttaaaaccctgtcattacccaacttaattatctttaacacatcccccttttttcaa

SEQ ID NO: 85222 - DNA, 807 bp, Glycine max
  Clone ID: PAT_MRT3847_4796C.1
gatgctcccttgcttcactctcatcaaacaccacctttactcaactcctcccaattaaagttctttgggacacattcaacaagtttagttcaccaatcaaccttgttcctatattcacattcatatcatattataaattacattgacaagccttctccacttttttttttcacttctaaacattcagaaatgggagttggaggcacactggagtacttgtctgatctaatgggcagtggccaccaccaccacaagaagaagaagaagcagttccaaaccgtggagctaaaggtgagaatggattgtgatggttgtgagcttaaggtcaagaacgctctctcctcactaagtggggtgaaatctgtggagataaaccgaaaacagcagaaagtgacagtaactgggtatgttgaaccaaacaaggtgctgaagaaggcgaaatcaacagggaagaaggctgagatttggccctatgtgccttacaacttggcccctgctcacactggaatcatcacaagatatgaagacccttacatcaccatgttcagtgatgataacccaaatgcatgctctatcatcactgtaaattttcaaattttaatgcagtgttttttttttgttctgctctattttcaagttcttgttgctttcctggagtgttgtcttcttttttggtttttacataaaaagatgagaagagacgttgctgtgatcattgtttttctatttttttgcttcagtgttccagattgtacactgtacttgcctccttgtaggttagcagtaggtagtttcggtgggccttga

SEQ ID NO: 85223 - DNA, 1379 bp, Glycine max
  Clone ID: PAT_MRT3847_47970C.1
gctcgcggcgcgcccgcgtttccgcagaaatctagtgatgaagtccctacacttgccggaaggatgtgttgaacacctatgattgtccggttgtattcctcgcacccttatcgtcgtacacttggactcctgaacatttagtcaggcatccaacagaaatcaagtgatgaagtcccaagacttgccggaaggatgcgtcgcacacatattgtcgtacatttgtactcctgaagacatagtcaggctctccctcgtttccaaggccttttattctgcagctgattacgacactgtgtgggatcgttttataccctctgatttctcctctaccatttctccactttcttcctctaactctaagaaggatctctatttcactctctccgaccgtcccaccatcatcgaccagggtagaaagagctttcaattggaaaagcgaactgcgaagaagtgctacatgctttccgctagggatatttctattacatgggctccaacgcagggagaggcttctcaatattgggagtggaaaagcctaccagagtcaatgtaaacttttatttcactctccctttttttatttttatcgatgaattgattttttcaaaatgttttgcttgtctttaatttgtgccacaaataatcaaataagctatttttgagttgtcttactgtacaagtaggttccaagaagttgcgaggctttacgctgtgtgctggtttaacatcactgggcagataaagacccgcgtcttgtccccaaatactcagtacgcagcttttcttgtgttccagatgatcgatgccagtggatttcaccaccatcctgcgatgttatcagtaagtaatgttggaggcagtagaacttccaaatatgtttgtttggatcccaacttagaagataatgatcttgatgacagatttcggggtctgcaacgtcctaatgtgagaaaagataagtggttagagattgagatgggagagttcttcaactcaggcttggaagaagatgaaatctatatgaatgtcagggaaactagtgatatgtggaagcacggtttcattcttgaaggaatagaagttaggcctaaacatgtttgatccgtcaaatgattgtacttaggcctaacctgaatggatcgatggatggtggtgtttgctacagtggagggagacccggaataatacagacttgttatctgtataaattgtttttctgatttagcttttttgagataaaaaatcaacttattgtttattatttccttattgaatgtgtgttttgattaaaaagcacatgaatcttaaaattgtcattgatactcttatttgagccaatgcacagaaggcaaaactttgtgtatcaatgatttttatcc

SEQ ID NO: 85224 - DNA, 550 bp, Glycine max
  Clone ID: PAT_MRT3847_47971C.1
cctacgcgtccgcggacgcgtgggcagaaatcaagtgatgaagtcccaagacttgccggaaggatgcgtcgcacacatattgtcgtacatttgtactcctgaagacatagtcaggctctccctcgtttccaaggccttttattctgcagctgattacgacactgtgtgggatcgttttataccctctgatttctcctctaccatttctccactttcttcctctaactctaagaaggatctctatttcactctctccgaccgtcccaccatcatcgaccagggtagaaaggtacgtacattatttctccttgcatgtagtgatgttttttatggaatacctgaaatgaaatgtgttgtgtacgttgcgtcactcaaattcctgcagagctttcaattggaaaagcgaactgcgaagaagtgctacatgctttccgctagggatatttctattacatggggtgagaattttatccaaagtttaaatacttttacatattctcatacaatttttattttgtataaaaaagttaatgttgtattgagatctttt

SEQ ID NO: 85225 - DNA, 595 bp, Glycine max
  Clone ID: PAT_MRT3847_47973C.1
gggagactccgcccacagcgtggcagagacacgcgcccggcgagacgagccgtttctaattaatgataggtgtcaagtggaagtgcagtgatgtatgcagctgaggcaccttaacagaccagtagaacttccaaatatgttagtttggatcccaacttagaagataatgatcttgatgacagatttcggggtctgcaacgccctaatgtgagaaaagataagtggttagagattgagatgggagagttcttcaactcaggcttggaagaagatgaaatctatatgaatgtcagggaaactagtgatatgtggaagcacggtttcattcttgaaggaatagaagttaggcctaaacatgtttgatccgtcaaatgattgtacttaggcctaacctgaatggatggtggtgtttgctacagtggagggagacccggaataatacagacttgttatctgtataaattctttttctgatttagcttttttgagataaaaaatcaacttattgtttattatttccttattgaatgtgtgttttgattagtttttgtgtctatatttttagagttttttttataaaaaaaatcatttcttg

SEQ ID NO: 85226 - DNA, 307 bp, Glycine max
  Clone ID: PAT_MRT3847_47974C.1
gggtcccccaccgcctataacggggctgtgtgtgggactgaacaaggggcacgccgccacccaaaaagaattgcctccacgcccctcacatagtgaggggaaaacacgcaagagggggcgctctgtgaggaacctcataagagaggtggccgggtttgcaccctatgaaaagcgtgtaactgagttgctgaaagtggggaaagatatgaggggactgaaggtggcaaagagaaaactctcaacacacaaacgcgcacacaaaaagtgaggaaatgtcccgagtgctctcgaaaataaggggttgggt

SEQ ID NO: 85227 - DNA, 366 bp, Glycine max
  unsure (1)..(366): unsure at all n locations
  Clone ID: PAT_MRT3847_47975C.1
aaaaaaccnncgcgacccacgcatactctcacacgtcctaccctcatcccaccatttttactccttctgaaacagaaatccaacttcgttgtttttcataaaccctcacaaatcaacaacctactcaattagatataaagccaacttcaaaaccagaagtgcacaacaaaccaaataccaaaccaagattcacatgattaattaacactacaacatatattacactccaaaataccaatccattattcattctaataacatcaacattcttccacaaataatatcaaccttcactgacttcaatttacaacattctacatcatcaacacaataactatcacgatattatcttatagtatgacttac

SEQ ID NO: 85228 - DNA, 1340 bp, Glycine max
  unsure (1)..(1340): unsure at all n locations
  Clone ID: PAT_MRT3847_47976C.1
agctcggnnatcgctcgagtggcatttggcaaaactgcgaagaagagcagaagaaataccggagaaaagagagttgcctttcccatgatctcaagtctccaccaccccaacactgaattctgcaatttccctcaaccatttccaattccctcttctgggcaccgttaaatttcccatcttgccaccgatatctcatctgggtcattccatggcgcacgcgaagaccgattccgacgtcacgagcatggacacgtcatcgtcgccaaaacgcgccgtttactacgtgcagagcccctcgcgcgactctcacgacggcgacaagtcgtcgacggcgacgcacgcgacgccggcgtgcaacagccccgtggattcgccctcgcaccattcctacgtgcaccactctagggcttcttcttcgagcagggtctccgccgggtcctacaacaatatcgcctcttactgggggaggaaagggacccgcaaaaacaaattagggtcatggactcatgagtgcaaggtcattgaggaagaggaagggtattatggggaaagagaaggcttttctaggaagactcagatcttcgttgggatcctagcctttgccttcattttcaccctcttttgtttcatcattgctggggctgccaggccttataatgttcggatcagtgttaagagtttcacagtacacaacttcttattcggagaagggtcggatatgacaggagttccaaccaagatgctgacggtaaattgttcggcgagaatgacagtgcataaccctgcaaccttcttcggaattcatgtcagctctaaagcagtgaatcttatgtattctgagatgacagttgcaactggtgagctgaagaagcattatctatcgagaaagagtacccgtacagtgtctgtgaacctgcaaggaagcaaggtttctctatatggtgctgatgcaagcttaactggcttggtggacaatggaaaaataccaatgactcttgtctttgaagttggatcgctagggaatattgttgggaggttggtgaggtccaaacatcgaaggcgtgtctcttgctcagtggctattgattcccacaacatcgaacccatcaaacttaaagagaatgcatgcacatacaattgagaggttttggtcttagcagtaaccagtttcttgtgtgccttttcaattcattctgctggcttttagatttcccgtgatacaggtaaaatggtgaaagaaatactattatagagttaatattgtagaggttttacaagtataatttttggagacatgagaaatgaaaattagttataatgtaatggaatggtataattct

SEQ ID NO: 85229 - DNA, 350 bp, Glycine max
  unsure (1)..(350): unsure at all n locations
  Clone ID: PAT_MRT3847_47977C.1
atcangcangangagnnagctcggaattcngctcgagcaaaaacgtcctnnncntcnanatnctngtngactnactntcggcggcntgaaatctccgacnagatcgncaataggtaggannctcgggtacnncgatgttccagggnnaccgggttcccgnntcccaggnaacgccgggtaacgtnanacntcncncancctngagggccggcaaggtcggnttcgnggccgnagacaacgacgggctcnctccactccttntacgtcaaatccgttcaaggaantgccctantacatctncgtcctccaaatcagcgcngncagtagctccgcngacgccgaggcaccca

SEQ ID NO: 85230 - DNA, 465 bp, Glycine max
  Clone ID: PAT_MRT3847_47978C.1
accagaaatgagcgactataaagtgagaaaagagcctggattaagctgggttgagattgggaagcaggttcatgaatttggctctggtggtcaatatcatccaaacacgggcaatgttaagccggcttgagatagtgattggacaactgaaagagatgggttatgtgccagagcttagcttagccttgtatgacacggaagtggagcacaaagaagaccaattgcttcatcacagtaagaagatggcattggtatttgccataatgaacgaaggaattaaaataatgaagaatattcgtatttgtgtggattgccacaacttcatgaaattagcatcatatctatttcagaaggagattgctgcgagagattcaaactgttttcaccatttcaaatatgcagcatgctcttgtaatgactattggtaacctaacacttgcattctcgcaatggctggtatgacta

SEQ ID NO: 85231 - DNA, 683 bp, Glycine max
  Clone ID: PAT_MRT3847_47979C.1
gggctcatagagaaggaagaataagagcaccatcacattcactgccatcttcactagaaaacaatgtcaagtgtttcttttcttttggccttgttcatggtagtagctttgtctatctttccttccatagtgggtgcaataggtgagcaccggctaaggtgggtgcctgagacaacaacaccatgccaaagctccatagaagagtgcatggcagaaggtgagtttggaatggattcagagtcccaccggcgcattctagcgacctcacaatatataagctacaaggcacttcaacgtaacaccgtgccatgctctaggaggggtgcttcctactacaactgcaagccaggtgcagatgctaatccttacactcgtggctgccccaccatcacccgttgccgtaattcttagaataacaacttagtgcgtgtttgagttaccgttttcaaggctcaaaattacgtttacaaaaggatctcactcgttacttatgcgttagaagtgcattggaatgactgtcacagcaatttgaactgcaacccaaacatgtgctttctttctactctttcatttccttactcctctgccttctagtttgttatgttttactttgaatgttgtttacctttttgtttttgtaattttctgtaaattaatcttaactggtgtggctattgtaaaaa

SEQ ID NO: 85232 - DNA, 1001 bp, Glycine max
  Clone ID: PAT_MRT3847_4797C.1
gagttcctttgtggacacttaagaagtttagttcactaatcaatcttgttccaatattcatattcataacatacagaaatgggagttggaggtacattggagtacttgtctgatctaatgggcagtggccaccaccaccacaagaagaagaagaagcagttccaaaccgtggagctaaaggtgagaatggattgtgatggttgtgagcttaaggtaaaaaacgctctctcttcactaagtggggtgaaatctgtggagataaaccgaaaacagcagaaagttacagtaactgggtatgttgaaccaaacaaggtgctgaagaaggccaaatcaacagggaagaaggctgagatttggccctatgtgccttacaacttggtggttcatccatatgcagttccttcttatgacaagaaggctcctcctggttatgtgaggagagtggaggcccctgctcacactggaaccatcacaagatatgaagacccttacatcaccatgttcagtgatgacaacccaaatgcatgctctatcatgtagacaaaaaaaaaaataatatatgctttttcccatggcactgtaaatttataaattttaatgcatgctctatcatgtagaccttatatgcttctttctggtctattttcaagttgttgttgctttcctagagtgttgtcttcttttttggtttttacataaaaagatgagaagagacgttgctgtgataaaaaaaaaaaaaaaaaaaaaaaaaaaaaaaaaaaaaaaaaaaaaaaaaaaaaaaaaaaaaaaaaaaaaaaaaaaaaaaaaaaaaaaaaaaaaaaaaaaaaaaaaaaaagggggggggcctttttaggggaccaaggtttacttccccgggcttggaagttaaaattttttttttggggcccccaaattcaattcacgggcccgtgttttaaaacctttgggacgggaaaaacctgggcttacccaaattaattgccttggaaaaaaatcccctt

SEQ ID NO: 85233 - DNA, 443 bp, Glycine max
  unsure (1)..(443): unsure at all n locations
  Clone ID: PAT_MRT3847_47980C.1
ggactgtggggcaacaggggttttcaacaaggaaacaagcaatgagtaaagatgtgtgcgtgagagggaggttgcaattggtttcaggagttttattataagtttttacaaggggattatgcttggtttggttcatagtcaagggggtgcacaattgggcaattggtaatttgctttcggctttttggttacaaaatgtttttgtcatattatcaccatggtatgggactaaaaacttaatcagagaatagtttaaggatcatgacctatcaaatatttgtttatgaatttttaaaaaattgagaaaggttaatgttttacttcttcttctacacttttctctttggcgaacaagtcacgatttttgntattcttcttcaatctcttgactgtccagccttacatatactcagcatcttctaaagggtttcggcagtgtgaac

SEQ ID NO: 85234 - DNA, 685 bp, Glycine max
  Clone ID: PAT_MRT3847_47981C.1
aattcaccatcttcctagaaacaatgtcaagtgttacttttctcctggccttgatcatggtagtagctttgtctatgtttccttccatagtaggtgcaataggggagcaccggctaaggtgggtgcttaagacaacaacaccatgccaaggctccatagaagagtgcatggcagatggtgagtttggaatggactcagagtctcaccggcgcattctagcaacctcgcagtatataagctacaaggcgctgcaacgtaacaccgtgccatgctctaggaggggtgcttcctactacaactgcaagccaggtgcagatgctaatccttacactcgtggctgccccaccatcactcgttgccgtaactcttagaacaacaactttgtgcatgtttgagttaccgttttcatggctcaaaatcacgtttacaaaagaatctcactggatacttatgcgttagaagtgcgttgaaatgacggcaacccaaacatgtgctttctttctactctttcattttccttactgctctgccttccagttatcatgatcaggcttgttatgctttattttgaatgctgtttttctctttctttttgtaacattatgtaaattaatcttaactggtgtgcctattgtaaaaaaaaaaactacctccgccctaatatcaaacacggaggtttctctga

SEQ ID NO: 85235 - DNA, 305 bp, Glycine max
  Clone ID: PAT_MRT3847_47982C.1
tgagggctgtaccgagaagactacagaagctggtgctggggatgtattacattgaaacactctactttacttttgggtacatgtatcgtttcgtttagtttcatcccacttaacgtatttggttttttttcaccgttcactaatgtcttgttaatgtgtggaaaggctactagatattatcttattataagtaagtttttgtggttcacattcttaggcatgtacaacgcaatgaatgtaacataacccatgaaatgactaattactgctaacttgctaattttactgatttttttaaattacgc

SEQ ID NO: 85236 - DNA, 298 bp, Glycine max
  unsure (1)..(298): unsure at all n locations
  Clone ID: PAT_MRT3847_47983C.1
aatncaaaagacgtcaaacaccgtttttacttttggaagacaatatttatacaaaaatatggaagcggactctttacaagggggtggggcatacgcatgagacctgataaacgcattacacactcccatagatatattaccttcctgcacttgcatgggaaaattcaagtcctatgacaccaaatgaaatcggaaacccaaagggttcctaggttggtacaccaagactcacattatgattttgggacacagctgttttagaagatgttagtgaacaccttttcgtgaagatacaaat

SEQ ID NO: 85237 - DNA, 558 bp, Glycine max
  Clone ID: PAT_MRT3847_47984C.1
tccggaacaactatctccttcttgtcttactgagattctctctgaatacctaatgccttgctactactactttgcttcttgctgcttctctctcaaatggttcgagctgccacctacacagtggtagagtctgccctgaggacctttacaccctgttgccatgtccaaaagactgctctttcgaaatgatgtacacacttgtgtctcaagtatagcctcgtgacgactcacactgtgagggccgccgaacaatgatgtatatgatatatgctagactcctagaggatccaaggcgtcttcatcgggtacgtatcacaacatacttgactgggaacataactacttcgtctgcaattatggagcacactcgtactctgtaatgattattgtcatcaacgctgcctgattctatatctatggttaacttcccatacatattgtatcgaaatgcgcattgcaccctttactggggagtcacctcctttacataatgttaatatcaagagtatctatgagcgctcttctataaatgtcactcatctatcaagactacctgtc

SEQ ID NO: 85238 - DNA, 381 bp, Glycine max
  Clone ID: PAT_MRT3847_47985C.1
cgtcctttttttttttttttttaataatataatttatctcaccgaacctttttaaaagttacggtaatttatatctacatcaagccagcagcaagcatacagatgtgaacaattatactttatttaaagatttgacgctcactttagtacattggaagagcatcccttgttattagctccggaactacctggtgataaaaggtaaacgggtacgttctcctgtggaccctcttcagagacaatggcctgaatcattaaaatggttagatcctagattcagacaagagcgtgtctgagtactactacttcaggcgcatctaaagcctctatgtaattttcaatgctgcaaaggtgtgttctaccacctgcgataatcgggta

SEQ ID NO: 85239 - DNA, 348 bp, Glycine max
  Clone ID: PAT_MRT3847_47986C.1
aacggttccgcttccaaaagaacacctaacggttccgctgccaaaagaccaccaaaagggtttcacgtcaaaatgataactgtccggtccttttaataatggaaatttacattatcacatccaatgatacatgtcgcaattaagattcacaaacggctgctctacaggatccaagcttacctgcccctccatacgatctcagctcacttccacattctcaccacatctcagctcatcgaccgtctcatcacaatttcattccctggacatccttttactacctcatcataggcaccatcctgcacattcccaattcactcgccgtcctactaatcaccatttccccac

SEQ ID NO: 85240 - DNA, 181 bp, Glycine max
  Clone ID: PAT_MRT3847_47987C.1
tacggctgcgagaagactacagaagggggcgttgaatacaaacataacgacctttttggcggggtgtctgccatattcggagcaggtcatgttcttggtgtctctggtgaggggggaggtgctcaatatatctgggctgaatccactcattccggattttaagctgtccttaatagcattt

SEQ ID NO: 85241 - DNA, 626 bp, Glycine max
  Clone ID: PAT_MRT3847_47988C.1
ccggtccggaactcccgggtcgaccacgcgtccggcaggtttcttaatcttatcgcactggccgggcgggcccttcttctccgctccgaagttagaacgaaacgaaacaacaaaaaacgttaactcttgcaatttcaatcagcgagagcgaaacaaacacaccctatctctctcttacacgcgcgcgcacacgccgtttctaactaaccaagggaggcgccctgcagtgcagacctagagagagaaaaaaaattcccggaaaattgagccgcgagaaaatttcccgacggaggagaaaaaaattgaaagcgcatggcgacgccgctgacggggctgaacggcgtcagcggcggcggcggagtaacggtgctggcgaatcctgtgagcaaggtggattcctccggcaatggcggcgggggattcaaacgaacgctgacggaggcggcaattgtgatgttctgggtcttgcacggggggatgggggaacgagctggacgcgctgggccgatggggggatggcggggcggcaacggtaagctgggtggcggcgtgaggggccggtgttgggagcggctgccgtgggggtgcgggtggggtgtggcggggcggcggtggggggtgggcgg

SEQ ID NO: 85242 - DNA, 439 bp, Glycine max
  Clone ID: PAT_MRT3847_47989C.1
tttttttttttttttttttttttttttatttttattttttttttttttttttttttttcttcttcttttggcagaatgaaaaaggggggacactactaacccaattaaaatcgggggcaagataaataggtgaatcgacacagtttgctacaggaataaactttagccctagaaaagatttaatgtcggggaaaggaatgtcgcttgtgataataacaaaaagatctcttttctgatcttaggccaccaccggggggaacctattttttaaagttcaccttggggctcctatactaaggccaatggccgtaggggcccatgttacgccctctctattcgataaaagttatctaccttaattacagtgggcgacatcccacattggagaggggtgggaaaacgtaacaggacccaacctaattggcttgggatagatggg

SEQ ID NO: 85243 - DNA, 290 bp, Glycine max
  Clone ID: PAT_MRT3847_4798C.1
gccgatatttaaactggacaaagtagttaggtttgattcagtttacatccaggatgtgtggtgctcgcaaggtggtgacgcttccactttcaactttttcccatctaaaaaactaataattccagcaccttctatttatgtctataaaaaagaatcaattattatgcaaaagttaagttcctttaccatttcagcatcaatgactacaacctacatgcttcacattgcaagcatcctttccttaacctccctcatattctctctcctttacttaaccatccttattcccg

SEQ ID NO: 85244 - DNA, 663 bp, Glycine max
  unsure (1)..(663): unsure at all n locations
  Clone ID: PAT_MRT3847_47990C.1
aatatagcagccttggttattttttaaaacngaaaatatnaaaatgaaaataggntacgttaacntttcnttaattatttgttaaaataaaaaaaaaacgtttttttaaaacccaataaacnttttaaatnaattcncncnaaatnttacttcnaaatacnacnnaagaatttagggaaaaaaagaaaaaagaaacttnnccnacncctanttaatttcnagcnagtttaattatgatcnattaaaaatgaacntgcntnttntttactctaataattaattccaactaacnccnacgttattgtttttcntaattaacaaatncntatgtttggggcctggantccnaatttaagaaaagggacccnactcccttgaaaggganttnccaccnnctgccnatgttttangtttacccatgctattgctgtnctccagggatgccaagaacaacatcccaccatccccanggcttaagccctttnaaagacttccnaaaccccccnacccctttccaaaagaaagcctttgcnccaaagcccttcctgttttttaaaaatgtttnggaaaaacttttgccntcccaagggggatttggaaggactccctnaaaaaaaactgttggcnattttttngtttttgccctttttgctccnaacttcc

SEQ ID NO: 85245 - DNA, 415 bp, Glycine max
  Clone ID: PAT_MRT3847_47991C.1
ctagctatctcgatcgaactgtccaaggtcctgtcacgctgtagtttgggaccgcaaacaacaagccgctgggtcaccaccaaagtccgtcgtgagattcaagaaccaacatccgcagctacagctgcacccatacaaaggggtccggccgcatggtcacagtaatagcgttaagtatacggtaacgttacgatcgcaaatgcacactcacattgcgtagaataagttacaccataatgttctcattagagtgatcggggtggttttcatcaatttaacggtcctcgaacattagcaacattgatattaatcgtagcaatgttcaaaatcgtgatacacttagttgtcgtatttacattaattgcatttttggtcttcaattcgtagtagtcaaagtgttgttaaaggttatgga

SEQ ID NO: 85246 - DNA, 257 bp, Glycine max
  Clone ID: PAT_MRT3847_47992C.1
ctccccaggagctgagaagcctgaagagggccaggcacggaggagcaggaacgaggacagtcaaatgtgccaagcttgtctttggttgtaactggtaatgtcccatgtctgttattctagttccccactatcttgcaaggattggcagtaaagtcctagtgatggacaacgcggcagtggggaagtgacagccgtggctagatcatcagatgtgtctgtagaatccggtgtgtccctgtgaacatccgccagcagta

SEQ ID NO: 85247 - DNA, 143 bp, Glycine max
  unsure (1)..(143): unsure at all n locations
  Clone ID: PAT_MRT3847_47993C.1
gnttctgcangcncgcntacgtaaagcttcggaaattcggctcgagtctagatcgccgagcggccgccntntnntnntgctcttcgnncctgnaatnaatnccggancggtacctcncagncgtaaccnnctttncctatagt

SEQ ID NO: 85248 - DNA, 146 bp, Glycine max
  Clone ID: PAT_MRT3847_47994C.1
tgacaaggtttccagtttcactcttcaacgactctctcgggtgtcaacttgtgttttgagactctgaggttgaagctgcatttactttaagggtgtggatgggttgtagttgtggatgtggtgccacacatgttctcgggttcggc

SEQ ID NO: 85249 - DNA, 542 bp, Glycine max
  Clone ID: PAT_MRT3847_47995C.1
gtttttccctaattttgttttttaaggattttgagacgtgacttagggtttcaactttcaactcgccccgccaaatccactccccaaactcaaagcccttctccatcgtcaattccacctgcatgattcggatctcgatccgattttcattttcgattcggctccgataagctccgccaccattgccgccgtcaatggcgtcgaagcctccgccttcgccctcgccctcttcttccagatcagagcctctcgttgatctctcctcaaataaagtggaggattcaagtcccgctggtaaagatgtgttactggttattgattctttgaagaaacaagttgctgcagaacgggttgtttctgtaaagaaaagaatagaggaaaacagacagaagctggttggtgtcactaaccatgtctgcacaatgtcaatggagagaaggaacttcagcattactgatacgaatagaagtctggacctacttacaaagaggcaaaaagatgcaattgatatgcacaacggtgttcatgcgagtaatggtgat

SEQ ID NO: 85250 - DNA, 220 bp, Glycine max
  Clone ID: PAT_MRT3847_47996C.1
ctctatccaaatcatttagctcacatcattgatcttgatcatttgaaaattcctatcgacgatgatccagagcttgtgagagtagagccacttgtaggattgaggatcttgtttatcacacaattcttaagtcaagatgcagttttacaacaggaactgctgcattctgaactcgtggtatagaaaattgcattgaatcctgatgtgtttaaagctgttg

SEQ ID NO: 85251 - DNA, 474 bp, Glycine max
  Clone ID: PAT_MRT3847_47997C.1
acagaaacgcaactatgtttgttcattagtagcggatcacgtaaggaaaaggtctatttctcattaagatatttgaagatcatgacacagggagaatgtgaacctttattatccaaaggacaaattgacctcaaaggggggacacctgtaattgcctgccttaagagaagaacgcattaacgaaggttcctatggaagctggcgctatgtaaacatcaatctttcttacaacagaagaataaaggaggatccagggggtgggtcaatattgtaaacgacgtccccaagagagactatttttctcaagagagcaatggggaatatcatgttgttaccctggtactatgagaccctgtttctgatggaatgatgactaaaatgactgttcatttgtggttgaatgaagattggcattatggggctctggaaacaaatgagaatgcctaaggattccacaggaccgtttacaggcca

SEQ ID NO: 85252 - DNA, 494 bp, Glycine max
  Clone ID: PAT_MRT3847_47998C.1
gccggtgtacgactccacgcagtgcgcccacagcgtccgaccacgcgtccgtgacggttgcgataagacgacagataggcctagcttgagggatcatacacagctcttgaggcatggtaatctgcagtcactgaggaccctcttaagattgtatcaagttggattcgtcccaatgtgtgtgcttacaaaggagtcttctgtgctgcaaaccctcatgatgaaacggttggtgcatcagcaggattcccagttagcgcacgcaggcatagatctcaaccatgcagatctgaaaggaactcttgggaaggagctctctctactcagcgatatgtcccttctgcacctcaacagtaacagattcactggccctgatcctgaacattcagagaccttgtgtttctggaagagttagacctcatcaacaaccatctctaagggactacaccttctgctattttgtacatgccatgcctcatctacttggacctgagatt

SEQ ID NO: 85253 - DNA, 582 bp, Glycine max
  Clone ID: PAT_MRT3847_47999C.1
ccagcgtccgatacctcgggctggtcactaccggtacccaattgtccaaactgattcccaccaaatgcataaatttgaccatttacagaaacacacaatgtatgccaaagtccagcagcaattttttccactctagttcccaataaagaaggaactagagttggtcttagctgatcagcattattcccttgtccgcactagaggaaattcaaatgcaaagtaaagaaatttcagataggacacttaaagctttataaaaaattaagaaataggccacttaaatgctatacaactacaagagtactaaaattataatatgatctcctccctctgggtaatttttgttgactagaagtaagtttattacattaaaaaccaaaaggattgggtgagattaggagaaggaattcaaaattgaggtcatgtcatgtctgacacatattggtcacttcaacacagattggatatggatgtgatgggcggtgacaattataaaaaacaaattaaggatcctctccaacatatttgaaatggacctttttggactaaagaaagctaaaattaatattttgctttctcacc

SEQ ID NO: 85254 - DNA, 1292 bp, Glycine max
  Clone ID: PAT_MRT3847_4799C.1
tacggctgcgagaagacgacagaagggggccacccatttcttgaaccccaccatcccaattggtaaacaacactaaaaaggcatggaaatggtggtggcagtgcctcctcctccaccttcttcttccatggactttaactttgatagcaactgttcctctccttacatcactgcaccttctagcccccaacgctttggcaacttcttcttcagtgctcccactagccccactcgcagacactcctctgcttccactcccaacaccaccgaagacgagtttgaattcgacttcagtggtcaactccagagaccttccctttccgccgaagaactgttccttggcggaaagattagacctctcaaacccctttccccttcgtcgaataaaagaagagagaaaagggttatcgaagaatcatcatcactattatcatcaccacctccacaacgtaagctaggtagggaaagagcttcatcattttccatttcctctgctacccctttaaaaggtcgcagaggaagtggaattcaagtcgtgtcttgtgatgacacgtcatcacaaggggagaagagtaacagcagcaaaacctcggaaagtgtttctaactcctcgtttttgtcgtcgatttcgttcgggaaagggtaccgaaagtggaggctgaaggattttcttttgttccgaagcgccttccgagggaagagcttcggacaaggatccctttcggaagtacgcggttctgtccaaaacgaccgcgcacgaggatgtccggaacgtcagttccggttcggtttcgagacggagagggccggtttcggctcacgagttgcattacaccgtgaaccgggctgcttcagtggagttgaagaagaaaacgttgttgccttataagcagggcttcttgggctgcttggccttcaaccctgccatgcatgggtcttagttcacgttttaatcaaattgtgattttggtgttctccaaaatgttaatattattatgatcctcattcgtgtcgtgaatggtaatttcaaattttctttgtatattcattctcattcacaaagagactaaaattaaattggatgaaaatttgaaagtgaaattattcacacacagatacagtaaacttttgttaggattaattttggtattttatattttgtccattgtatttggttgactcgggaaaattgttttgtaatgtccccttcagccaaatcatgtgttagactacacattaacaagttgtgtgatagttttgcatgttgcaatataattttccacatattgtat

SEQ ID NO: 85255 - DNA, 523 bp, Glycine max
  unsure (1)..(523): unsure at all n locations
  Clone ID: PAT_MRT3847_479C.1
tgttttaatccctctgttgacatcatttgctgtttgccaacttgaagaatttgttagcattgattgtggagggacaagtaattacactgataccagcacggggttggcatggatctcagattctaggatcatgcaacatggcatttcagtggaagtagaaagtccaaatagaagcatggtgcagtatcaaaagcgaagagactttcccatagagagcaagaagtactgttacacactaagcacagaagagagaagaagatatttggtgagagcaacgtttcagtatggaagcttggacagtggagacacttaccctcagtttcagctctacttggatgcaacaaaatgggccacagtgtcaatatatgatgcctcaaggatatatgttaaggaaatgatcatcagagcaccctcaaattctattgatgtttgcatgtgctgtgctacaactggttctccttttatatctaccctttgagtgcggccttgaatcttttcatgatgccacggattntgaggacaa

SEQ ID NO: 85256 - DNA, 299 bp, Glycine max
  Clone ID: PAT_MRT3847_47C.1
tcgcatgctcccggccgtcatggccgcgggattagcgtggtcgcggccgaggtatttaaccggtctagcacagattttgccgtgcgggccggttcagatgacggaagtggcgacgagcaacgttgtgcacgaagtcttagggcgacgagctgaagatgtacatcagctcgattattgactatataatcaatgtccttgccgatgaagatttcgattttggacttgacggtgaaggtgcttttgaagccctcggcgaattactcgtcgattctggttgcgttactgactttctcgaatgt

SEQ ID NO: 85257 - DNA, 608 bp, Glycine max
  Clone ID: PAT_MRT3847_48000C.1
cccgcgtccgattagggaatcccctgggagaggcttaattatagcagagacaaataccgcgagaccagactcaagcagtacaaaaactaccagaacttctctcgctctcgtcacgacctccgcaaggagtgtttcgaagtgcagaagggggagactttctatgacttcttcttcaataccaggcttgtcaaatccactattgtgcactttcagctcaggaatttgttgtgggcaacttcgaagcatgatgtatactttatgcaaaactattcagtgatgcactggtccgcattactacgaaggggtaaagaagtgcttaacgtagccaaaccaattattccaacccttaagcgtcctggatttttagctcaacctgtctccagagtgcaaataagcaccatgactgttaaggaaaatctgatggtggcaggtggtttccagggtgagcttatatgtaagaatttgaaacaacctggagttctattctgtggtaaaataactacagatgataatgccataacccatgctgtggatgtttacagcaatcctgctgggtcattgagggtcatcacagccaataatgatttccaaggtcgggtttttgatgc

SEQ ID NO: 85258 - DNA, 1617 bp, Glycine max
  Clone ID: PAT_MRT3847_48001C.1
ctcacttcgtgcaatgtggtggctgacagttgaatggttcccgtagatgtcgccggcggtgaccagaaaagtggatctgattattaactcagaaaaatggaacatcagaagagcgggagcaagctaaccagaaaccactcctcgcttctccgatcctccgttcacaacctctcttccatcatcacccaacacgaacacgaacaacaactcctcctcgatgttcacgacgatgacgacaagaacaagaagcccaagaaaccccacgtccaggctcaggcccaagcccaccatgcccaggccctggcccacaggtcttccgcctattccgccctggcggtcttcttcctcggcgcgtgctcgctcctgttctacttcttctacctggaggtgtcctcctcggagaatttcctgctggcgctgatcttcgtggccgtggcgctctacttcgtctccaaaaacaagggcctcatccacagatcgttctctctggcgaagcattcgtgggaggagaatgtgaagcgcctagggttttccaaggcggcggcggtggcgaggccggtgcagtggttcatcggagaccccgccgcagcaacaacaaccaggaagaaggcggcggcgaagatagtgagggaaggggtggagttttacagcaatggggatttctacgaaggggagtttcacaagggaagaagcaacgggagtggggtctaccattacttcgtgaatgggaggtacgaaggggattgggtggatggaaggtacgatgggtacggaattgaaagctgggcgagagggagtcgctataggggacaatataggcaagggttgaggcacggttatggggtttataggttctacactggggattcttattcaggagagtggtgtaacggtcagagccatggcgtgggtcttcaaacttgctccgatgctagctgttatattggtcaatttaagtatggcgtcaaacacggtcttggctgttaccattttagaaatggggatagatatgctggagagtattttggggacaagatacatggatttggggtctaccactttaccaatggccactattatgagggagcatggcacgagggtcgtaggcaaggtattggctcatacacttttcgaaatggtgacagaagatgtggtgaatgggatgctggcaccctcaagcaatctctaccaccactatctgatgttgttcttcgagcagttcaggctgctaggaaaacagcagagaatgctataaaccttaaacgagtggatgaccaggttaacaaagcagtaatcgctgcgagcaaggctgccactgctgctagagttgctgctgtgaaagctgttcagaacaggatggatggaaaattttgtgacactgatgtctaagaattagatgttagctttgtttggaattgtaattgtaattttttttttttttttactaattttgagtccttggaagatgtcaccctggtgagcaaaagcttattggaggttgaaaagagagtatgtttgtttcaccacactgtaacttgtatataaaccatgtatatcaatgaaaaatgaatttgctcaaaaaaaaaaaaaaaaaaaaagactcgagttccctctctc

SEQ ID NO: 85259 - DNA, 1740 bp, Glycine max
  Clone ID: PAT_MRT3847_48002C.1
gtgggctcaagctcgtgccttttcgctaaccctttcctctcaaccatggagcacttcaacaacgacgatctcgagtacgttgtcgacgagtactacgacgttcccgattttgcagtcgaagacacctcctccgacattgttcctgaactaacctccgatgttgactccgacttcgaagacgagtttccaacgagtaatgcgaagactgataccactgcttccgaagccagaaacgggaaagatatacaaggaatcccgtgggagaggcttaattatagcagagacaaataccgcgagaccagactcaagcagtacaaaaactaccagaacttctctcgctctcgtcacgaccctccgcaaggagtgtttggaagtgcagaatggggagactttctatgactttttcttcaataccaatcttgggaattttactattgtgcactttcagcttcaaagattggtggaatctgagcagcttggcaggacctaatattatgctgaggaatctgtcgtgggcaactttcgtggcatgatgaatactttctgggacactatttattgatgaactgggccgcattactacgaaggggtaaagaagtgcttaacgtagccaaaccaattattccaacccttaagcgtcctggatttttagctcaacctgtctccagagtgcaaataagcaccatgactgttaaggaaaatctgatggtggcaggtggtttccagggtgagcttatataatttgaaacatcctggagttctattctgtggtaaaataactacagatgataatgccataaccaatgctgtggatgtttacagcaatcctgctgggtcattgagggtcatcacagcaaataatgatttccaagttcgggtttttgatgcagagaattttgcttctcttggttgtttcaagtatgattggtctgttaataacacttctgttagtccggatggaaagttgttagctgttcttggggacagtactgagtgcttgatagctgatgctaacaccggaaagattactgggagcctaaaagggcacttggactactctttttcatcagcttggcacccagatggacaaatattggccactgggaatcaggacaaaacatgcagattgtgggacataagaaatctttcacagtctatggctgtgttaaagggaagaatgggtgcaataagagccctaagattcacatctgatggacgatttttggccatggctgagcctgcagactttgtccatatttttgactcacattctggttatgaacaaggtcaagagatagatctatttggcgagattgctggcatatcctttagcccggacacagaggctctatttgtgggtattgctgaccgaacctatggtagcttgttagagttcaacagaaaacgtcactataattacctagactcgttttgatggagtggagtgcctcaagatgtacagcaactactccatgtgcatatccaccagaggattcctcaaataggtttgaaatatatatggtgaaatgtttttctagggttatttttctgttgaatttagtggagaagcaagttgtaaattttggctataggaagctatttttgagatttctttaattttgattttattagcgttggaatagctgattagtttttcctttgtaagaatttatttgcttgctattgaatattaaaaggtaatgaaatcaagcaatatattgctttaaaattatttttccc

SEQ ID NO: 85260 - DNA, 759 bp, Glycine max
  Clone ID: PAT_MRT3847_48003C.1
tttttgagcaaattcatttttcattgatatacatggtttatatacaagttacagtgtggtgaaacaaacatactctctcttcaacctccaataagcttttgctcaccagggtgacatcttccaaggactcaaaattagtaaaaaaaaaaaaaaaattacaattacaattccaaacaaagctaacatctaattcttagacatcagtgtcacaaaattttccatccatcctgttctgaacagctttcacagcagcaactctagcagcagtggcagccttgctcgcagcgattactgctttgttaacctggtcatctactcgtttaaggtttatagcattctctgctgttttcctagcagcctgaactgctcgaagaacaacatcagatagtggtggtagagattgcttgagggtgccagcatcccattcaccacatcttctgtcaccatttcgaaaagtgtatgagccaataccttgcctacgaccctcgtgccatgctccctcataatagtggccattggtaaagtggtagaccccaaatccatgtatcttgtccccaaaatactctccagcatatctatccccatttctgcagcacaacaattacttcaaaaaaattagacttttcgaaaagccacatccaaaacctcatttattgtctactgtaacctcccacgaaataataaatgctcactaaaatggtaacagccaagaccgtgtttgacgccatacttaaattgaccaatataacagctagcatc

SEQ ID NO: 85261 - DNA, 537 bp, Glycine max
  Clone ID: PAT_MRT3847_48004C.1
gtgcaacaggtgtggcttaaatccaccttacagattttacattcctggaatgctgtgcagaccctacctgttcgagaagaatacgaactgactagagaaatgagacttcccatctccccacccattgttgaacatgcatcctgcagagacacccgggtgtcgcgagctctgctttttcacgaatgcgacctggctacaaaacaaaaccccccaacaggtggccatgtttgtcccgatcaagggttctaatccaacgaggagggtgcggtttcggcggtcccattcccagcctgtgccatatggagcaattttcggtactcccagcaggtgcacgttctggtcttgacggctaaggaagaggacctgcttccgctgcatcttgaatcactccgaggagatcataatgttggcttctgtcgccctgccatggacaccaggatcttttgctcggacggtttctggaggtttcaggtcctgctccgatgctccagctactaggtcccagtgctgatgccccggtcccttgctggtaccctg

SEQ ID NO: 85262 - DNA, 2761 bp, Glycine max
  Clone ID: PAT_MRT3847_48005C.1
caccccttctcactctccccattaaataaacaaagaaagagagaaagaaactcaacctcgttcgtttcgttcctccatgaaataatggcttccgtttctactttctgtttcgttctcttcttcttcttcttcctcacacaatgctggttcttaacttcagcaaagaaaacctacatagttcacatgaaacaccacgaaaagccttcggtttaccccacacacactgactggtacagcgccagtcttcaacaatctctcactctcaccactgccgattcagattccgattccaatccgttactctattcctacaccaccgcctacaacggtttcgccgcgtccctcaacgacgaacaggcggaacagcttctcagatccgaggatgttctcggagtgtacgaggacacggtgtaccagttgcacaccacccgcactcctgagtttctagggttggaaaaggaaacagggctttgggagggtcacaccgcacaggatctcaaccaggcttccaatgacgtcatcattggggtcctcgacaccggagtgtggccggagtcgccgagcttcgacgacgcaggaatgccggagattccggcccggtggcgcggcgagtgcgagacgggtccagatttctcccccaaaatgtgtaacaggaaactcatcggcgctagaagcttctctaaaggtttccatatggcctcagggattggggtgagagagaaggagccagcgtcggcacgtgacagggatggtcacgggacccacacgtcgagcaccgccgcggggtcgcacgtgacgaacgcgagcttattaggttatgcgagcgggaccgcgcgtgggatggctcccaccgcacgtgtggctgcttataaggtttgctggaccgacggctgcttcgcctccgacattctcgccggaatggggcttgggatcgaggacggcgtcgacgtcctctcgctctccctcggtggcggttccgcaccgtacttccgcgacacaatcgccatcggcgcgttcgccgccatggcgaaaggtatcttcgttgcatgctccgccgggaacgttggacgcctgcgagaagacgacagcaggggggcaccgtggataatgacggttggtgcaggaaccctagatcgtgatttccctgcctacgcttctctcggtaacaaaaaaagattctccggtgtttctctctatagtggaaaaggaatggggaacgaaccggttggtttggtttatgacaaaggcttgaaccagtcaggtagcatttgcttgcccggttcgcttgaaccgggtctggttcgtgggaaggtggttgtttgcgaccgtggaatcaacgcgcgggtggagaaaggtaaggtggtgcgtgatgccggtggtgttgggatgattctcgcgaacacagcagcgagtggggaggagttagttgcggatagtcacctgctaccggctgtggcagttggaagaatcgtgggggaccagatcagagcctatgcttcttccgatcctaatccaacggtgcatcttgatttccgtggaacagtattgaacgttaagccttcaccagtagtggcagcttttagttccagagggcccaatatggttaccagacagattctgaaaccggacgttattgggcctggggttaacatcttggccgggtggtccgaagcaattgggccatcagggttatccgatgacactcggaaaactcagttcaacatcatgtcaggtacatctatgtcttgtccacacataagtggattggctgccttgttgaaagctgcacatccgcaatggagttctagtgcgataaaatcagccctaatgacaacggcagatgtacacgacaacaccaagtcccaactccgggatgcggcagggggtgcattttccaacccatgggctcatggtgcgggccacgtgaacccacacaaggcactttcccctgggcttgtctatgatgccacaccaagtgactacattaagttcctatgttccttggagtacacacctgaacgcatacaactcattactaagcgttcaggtgttaattgtactaagaggttctctgaccctggccagttgaactacccttcattctctgttctctttggcggtaagagggtcgtgaggtacacacgagtcctgaccaacgtgggcgaggcaggctccgtctataacgtcaccgtggatgcaccttccacggtgacggtaacggtgaagcccgccgcgctcgtgtttggaaaagtaggggaaaggcaaaggtacacggcaacctttgtgtccaagaatggtgtcggggattccgttaggtatggatttggaagcattatgtggagcaatgcgcaacaccaagttaggagcccagttgctttttcttggactttgttgtgagattattgcttttttttttttaactgcacagccactattccaagcccaaccaaacatgccttttgcctggagctgattgaggcttttgttgatgtcagccaacactattattaacattatttagttggacatttagaaggttgtgtatttttttttttaattgtgagaattgaagaaaaaaagagaggtgagattgagaagaagagcgaggagagatgcttgttttctttgtttattgtgtgtatccagtaaaaacaaatgttacaaaacaagggcgttgatggtatgtataaacgactggctctaattatccttaagaatgagatttcatttttctcctcaaaaaagcggccgctttagagga

SEQ ID NO: 85263 - DNA, 429 bp, Glycine max
  Clone ID: PAT_MRT3847_48006C.1
gactattccttgcggtgggatatgcctataacttcatcattcaattgactcagctctcctttctcaagtagaattgttgattcgtagatcttctctcgcagtcccatccgaagcaagcaatacaccaaaacccaaataaaacagaaaatttatttatttattcgtttttagaaaaaaaaaaaaaaaagtggtgagcgatatggaatttgacgagcacgaggaccaagaggaagaggaggaagaggaaatgggattctcagtggcggctgcgagttacgactcgctgggaaacgcggcggtgaggtctaaaatgagcggcggcgagggagttgcggtcaccgggaattctggtcggaaagggacgctgagatacagagaatgtcagaagaaccacgccgtcagcattggaggccaagcccgtcgacggct

SEQ ID NO: 85264 - DNA, 309 bp, Glycine max
  Clone ID: PAT_MRT3847_48007C.1
gcgtacgagactcattcattgttatataaaccgctttcccttcgtctacgatccactcccttctcttggtggggattttaccctggggtattcccgcttactcttcttttgcttcctttactcctatcttcttaactatctttgcctattcactttctcgtaaccttctctctatttcatgtattcattatcattaattccagcagctctctcagcactattgtacatctcatattaaacctctatacattgttgttggatctataaataatattttaattctctcttttacatcctaatattactatt

SEQ ID NO: 85265 - DNA, 319 bp, Glycine max
  Clone ID: PAT_MRT3847_48008C.1
aggaccccaaaaataataccttttttggaaaacaaaagggggggccttgtagttcctagaacggaagtttttttttttgcaacaaaaaaaacctcctgaacttgcaaatggtccagttgaaattaaaatttggtggcggcagccatgaaatcaaaagggggcttttaacagggggcaaaccattcttcaaagcaatattcccgaatgcggggggggttaacccaccctttggcttagaagtattttggaaagacagttttgggggtttctcggtaaaatcaagggggtgcggcataattttgaatacaccccttttttt

SEQ ID NO: 85266 - DNA, 387 bp, Glycine max
  Clone ID: PAT_MRT3847_48009C.1
gagaaagcacagttttcgtgccctccttcgtttcctgtgggagcaaagtctttaatacacacaatgctggacccaaatcctgaacgtcgtataaccattgagcagataaggaatgatgagtggtttcaaaaggaatatgttccggtcagtctcatcgagtatgaagatgtaaatctggatgatgtaaatgctgcatttgacaatgatgaggatcagaggactaaccagcaatgtgagaatgacgacatgggtcctctaactcttaatgcattcgacatgataattttatctcaaggcttaaaccttgcaaccctatttgatcgtggacaggactctatgaaatacgaaacgcgcttcatcagtcaaaagccaccaaaggtgatttta

SEQ ID NO: 85267 - DNA, 431 bp, Glycine max
  Clone ID: PAT_MRT3847_4800C.1
tcggccacgcgtacgcttttctatcattaccttctctctctatatatactgccctttctttgtgcgtctttggtaatcgtccgttcctctctctttctctgccttgtcttctcctcttttgttccgcttaagggccttctttgatcgatttttttcgctttgattcttatattgctttggatagaaaaaaggtgtgaccttttggctattgtattccttgtcttgtctaatttttcgtggtgatttttgggacaagctaacggcggtgctgaaagtcacagcgctttgcccatgcaagggccttctttgctcgggtttttccctctttggttattatattgctttgtacgggaaaaaggtgtaacctttgtctgattccgacgaggttccacgcataaaaggctaacgacgatgctgaaggtcacaacgct

SEQ ID NO: 85268 - DNA, 479 bp, Glycine max
  Clone ID: PAT_MRT3847_48010C.1
gattgacaacaatgagccctacatgaagatcccttgcaatgactctaaaatcaccagtgctgtttggggacccctgggggagtgcatcatcgctggccatgagagtggagagctcaaccagtatagtgccaagtctggagaggtgttggtgaatgttaaggagcactcccggcagatcaacgacatccagttatccagggacatgaccatgtttgtgaccgcgtacaaggacaacacagccaagctttttgactccacaactcttgaacatcagaagactttccggacagaacgtcctgtcaactgatctgccctctcccccaactatgaccatgtggtcctgggcggtggtcaggaagccatggatgtaaccacaacctgcaccaggattggcaagtttgaggccatgttcttccatttggcctttgaagaagagtttggaagagtcaagggtcactttggacctatcaacagtgttg

SEQ ID NO: 85269 - DNA, 310 bp, Glycine max
  unsure (1)..(310): unsure at all n locations
  Clone ID: PAT_MRT3847_48011C.1
ccacaaactctcttatcaacctgacgctgtcttgcccgaattactgacagagatcatggaggacatgccgtgcgaacgttgtgtttatgctggggaagataaatttaacgagataaatggagtttataacgaanaggtggactggagcaatcagggtgtgacgattcttngttctgcgcccgtgaaaactattactgaagctgtggatcagacaggggagacagccccgttccttgcaccaagagtgccgcaagaatttttaatataggctgctccttccgaatccaatgtacagagagtgggtggtgtg

SEQ ID NO: 85270 - DNA, 165 bp, Glycine max
  unsure (1)..(165): unsure at all n locations
  Clone ID: PAT_MRT3847_48012C.1
agcaangaacgaggaacattcctccggtccttccgtaactgcatgtgcctccgctcttccttctcgactgccgatggtgtctaccattctccgctgctcactgaccactcccattctccggttcgctatcattgtcagtgctcttcttcattttcctactgttaa

SEQ ID NO: 85271 - DNA, 912 bp, Glycine max
  unsure (1)..(912): unsure at all n locations
  Clone ID: PAT_MRT3847_48013C.1
actcgagccgctcgagccgattcggctcgagtggatcccaagttagtaccaagttcaagacaccgctgatagcatcatcaacaccattgagagttagagatcttaaagataaggtggaggcttcacaaaaagaacctctaattgggccatcttccatgacctctagaactcgagatctgaaagagaaaagagaaattactcatagaacaaccaggacctcagaatcttctcaaagatcagtcgagtcaaatgctgccaagtatctaaagggacagtctttgaacagaagctggaatggatctgcggatacatctgtatccgtcaaatctcctacaaacgaggaagaagattcttctttgaagaataaggggaagtccatttcacttgcaatccaagcaaaagtgaatgttcaaagaagggaaggtttgagtttgactgggggcagaagtttgacaggccagaaagagcatcctgatgttaaatccaaccaaccaatgaaggcaagtgttcagaaaaatttacacaagaaatcttctggtgctcttagacagaataatctgaaacagaattattcaattgacaaagacaaattaccatcaaagccattggttaccaattcaaacagtaggaaagttctgactggggattcctcttatggacgccatagaagctctagtaataaatccaatgcaaaacctaaagttggatccagaaagtcagccatggaggtgacagatagtgaaaaggaggtcttgtataccagcacaaacagttttcctagaaagaaaaggtctacagacaaggactggaatgatagggttgtggataatttgttcattgaaaaaatgcagaagcctgcttagtctaacctagtgagttataagcanaatagttggactgaagaagtcaaaa

SEQ ID NO: 85272 - DNA, 506 bp, Glycine max
  Clone ID: PAT_MRT3847_48014C.1
acgagatacagacaaaaagacaaatgctagcaactgcaaaactttctgctatcctctatttcaaatgaattcatggagcaaacaaatggactaggggcaagaagccaacaacaaagaacaatcagctgaatattaggtggctttggttgtttgcacagacaacttctgcaaggttgcatcacgataacactaggtggaaattgcacaccagtatttgctccagctgaagtatcatctggccctgcaaagttgtggtctgctccatacaacattaatatttgcggtagcaagaggctgcatttcagcagaaaaggagaccttctgccaccatatcatcagtatcagtactagagagttaacacctaatttggtgccccctccattcacatcgcaagttaaattagtccaaaagaatttcagaacaattctcctagcaagatgcctctatttatctgcatttagcactcattcagaagaatcagctgtcttgtacagtataacatatg

SEQ ID NO: 85273 - DNA, 378 bp, Glycine max
  Clone ID: PAT_MRT3847_48015C.1
gggcaaaaacggggattacttcctgaatttcggccccgggggcgcccccgggggtccccccgggaattcgggcccggacccggggggggtcccagttttcccaatggggggccgaattaaagctgggcaaaaacaggggaaaaggtgcttccgggggaaaagatgtaccccctcacaaatccccacaaaatacgggccggaaacataaagggaaaacccggggggcccaaaggggggccctaccccaacataaggggggtgggccacaacgcccgttttacgagcgggaaaacctgggggggccccgtgcaaataaaaaaaaccccccccccccggggggggggggtttggaaaatggccccccggggggtttttttt

SEQ ID NO: 85274 - DNA, 234 bp, Glycine max
  Clone ID: PAT_MRT3847_48016C.1
aaaaatggtctggcggcgtgttctgtacatataagaaaaaactgtttggggggctggtctccaaccgactttgattactgcaacaggatatgaaccattgttttcttcacagaccggggcccctttatacccgcggaagaattccactgtgccaggtaccggtgacagcctaagctaactctcggactggagtattctggctagttgcatgcccttgctgagcataaggggggg

SEQ ID NO: 85275 - DNA, 624 bp, Glycine max
  Clone ID: PAT_MRT3847_48017C.1
gtcaaatatctctctaccttttcactgtataagaagaatcacaatgagttcgaatagcaaagaatacaattattaaagaaaagggatttttttattacttttacaccaagcagtgacaacaatcaatcttcaaagttacaagttatactatttgagacgtttaatgtatgcctcaaataaatccctgcatgtccaatggcgctaattccttgacacattaacagccccaacagaacattggtcacaactcacaatggttcaagagctaaagggacacttcatgagaactagccaagtgcacacttgcaaagatttttggtcaaatggttacaacagattgaggaacaccatgtgaggttctcctggtatgtgaaacaatgttgttgctttgaggaaagcagttatctctgttataaaaggctccatttcctgtccaagcatgtagttgatgtcatgcacaatgcatcaagagaaggttactccacaacatggttagctacctagcttagctcagtacacaaacttgaaccaacatttttctttagaaatatgaagattgatcgtgaagcacgttcaaatgtgccaatattctagctgacatggacctaacactaccattacccc

SEQ ID NO: 85276 - DNA, 731 bp, Glycine max
  Clone ID: PAT_MRT3847_48018C.1
tttttttttaaaagggggaaatatctttaggaatttaggataatacggcaacaaactttaattgaatgttacataacttaagtatcaaccttccaatatccctggtcttacccactaccttacatttccacttatttattccaaagtacatgataaatatcatatccaacatcctgtattttcatccccaaaactggaccaatacggagtctcaaggaaattataactccaataatgacccttgtaatttttctacccgaaaatgaaaaaaggaagaaaaacagaacatttactcattatgcaaggactggaatgtgaagctatagtttgaaactatgggcaagccacccagtggttttgtgagcttcctaagctactcatgtaacactacatttgaaagtgaatttcctctttctacttccttcatggtcactattatcttcttccatcaacacaaacaaaacttcaaaattcaaataaacattctaatctttagtgaaacttttctgactgactacctcagggtctgcaaaactcattttaattttgctgagccacaagttgatcaagctgcatttgttcaagccaagctcctaacaccgcatgatcaacagcatccatttgtgtgctcatatttgaaacctcactggaggatccagctgctgcaacgcttgagatagttgtcgtcgtcgtcatcatcgtcggattctccttaatctcagatctggtgc

SEQ ID NO: 85277 - DNA, 109 bp, Glycine max
  Clone ID: PAT_MRT3847_48019C.1
gtatcagcagtctatggcttttgatactagtaacgcttcccaagacttatgctctagacgatggacacaagagctactcccaagaacaacttgtgtccattcgtctttg

SEQ ID NO: 85278 - DNA, 507 bp, Glycine max
  Clone ID: PAT_MRT3847_4801C.1
ttaaagccaaaaataaactgatgaaatgcatacaatgtgatataattacagggtgaagagactagccacggtcagtatcaatgtgagatttggagttttggatattattgtcccccctagagaattagaaaattatgagggaacttttatttattatactttttgtaattttgttcattagaggaaggaacttgttaatgggaaactgttaatatcaaatacagattaagaatctgaatacttgttaaaaatagtttttgacacaaccattctgatgtttagatttttggtcttccattaacctactcttatatttctcattattttcatgttcttgaatgctgggaagtattgttcaatatttaatatgcatcttgggaaaaagttatgaactcgtttgaagagctattacgtcatgttcagaccagttataaacattatcatttgactttatgcatttccattttgcattttgttatgagttttactggaagatgttacattttg

SEQ ID NO: 85279 - DNA, 383 bp, Glycine max
  Clone ID: PAT_MRT3847_48020C.1
ggctcgagcttgtctctaactccaacataatattttccactgtccaagccccaaggtatggtggtgctgtcaggggaagcttagatgcgtgagttccagaatttagtcattgttgatgacccatctctctccatggcagaacctgaatattgtggctctatcagtgatgatgtgttgatcattaaacccctaacctccgctgctgtcacttgttctttcgacctctgcttgtttatgcagccacctgcttggatcattttcccttccattcttgtctccattgattagcccatttgcctcttccatttttttctctagtttgggtcctccccctttcttcaaaatttcaatttaccttttggcttcttgcatcaaaggtcctt

SEQ ID NO: 85280 - DNA, 458 bp, Glycine max
  Clone ID: PAT_MRT3847_48021C.1
aggttatccaactaccagttcacacccaaaagaaccaggttatcttgtacttctggcaataacccatacaattttgttgacaactggaactgcagggaacatatcagaggcataggaactgcatataggtgtcaactaggcacaagagtacgataggattggtacacaaacccccctgctggtttataaaaacgacatctatcttggaaatagaacgcaatcaacgcctctaagtgcaatcatttgatagcatacgggcacacaatcttagggcgcctgaaaatgtaagatttgaatagtgaccggaaccatgtgtcaggaccgcgctttatcacattgtgtgacgtttacgtatgggttatctgaacactgtctttggcttagaaaatgactacgtctcaagggataagaataacaattggatatgtccaacgtataggtttaaaacctgaaatacc

SEQ ID NO: 85281 - DNA, 591 bp, Glycine max
  Clone ID: PAT_MRT3847_48022C.1
atgggacacttgagtatgttggtggtgaattttgttgtatacttagaacatattgagccagaggaaggtcctattaatgaaattgggccaaagattgaaatagatgcattgcctctaaattgcagtgcaaagaaagtggttaaggctattcctacggactctactgaaaatggtattgaagatatggatgttgatgatgctaaaggtgtggataaaggtggttcagatgctaaaattgaagttgttggagttgaaactgtacctgatgtacaagatgttgaaactgaagttgctggatctgcttcacaagttgaacaaccttcaactaatttaggaattactccaactcctaatgttgaaagtgctctagctcaaattccaactaccactcaaagtgttccaactccaagtgttgaaacaatcttcatacttccgtcaatgttaactgcatttagactagctccagttagacctccaacaccaattcggattatattcccagataaagcatcttataacaagaaccaaccgaattacacgagcttcatactcataccaagattgcccagtcatcgagattcaaagaagtga

SEQ ID NO: 85282 - DNA, 368 bp, Glycine max
  unsure (1)..(368): unsure at all n locations
  Clone ID: PAT_MRT3847_48023C.1
tcgtcccacgtcgtctcgtgcatgtgttctccatgtttctcctatctccatctgaagtcgaacccggtattttgtcctctcccntaatggccttctcaagttctntcttcaggcaccctgtttgcccccaagcctaagtttccctntcttcnttctcgtaaccgtggcgttaactttctagcggttccttccactcccaatttcatggccgttgcacctcccctcattgcttaagcctagntttcgtagtgaggagctgacactcatacctcgatggccggtcggtgaagccactcgaggactgttccttcggataatggctgaaaaagtttcgtgaagggcgaagccagaacaaggtttctggattc

SEQ ID NO: 85283 - DNA, 2478 bp, Glycine max
  Clone ID: PAT_MRT3847_48024C.1
ggtgtatgtatctaaggagtataggaggagggatgtgttgcaagggattctcagggatgtggatgctctcaccagagatgaaatggagaaaatacccgaggaagagttggtcaacaagctccgcaatgtgttgagtgagaaacggtatttggtggtgcttgatgacatatggggcatggaggtttgggatggtttaaaatctgcatttcccagagggaagatgggaagtaagatattgctcaccacaaggaatggggatgttgctttacatgctgatgcttgtagcaatcctcatcagttgaggactttgacagaagatgagagtttcagattgctctgcaacaaagcgttccccggagcgaacggcatcccgttagagttggttcagttgaagagtcttgcaaaggagattgtggttaaatgtggaggtttgcctttggctgtggtagtggttggtggtttgctgtctaggaaactcaagtcaagtggggaatggaagcgggtgctgcaaaatatcagctggcacttgctagaagagcaagagaagatagctagaattttggcccttagctacaatgatctgcctcctcatttgaagtcttgctttctatatttgggtcttttcccagagggtgtgaacattcagacgaaaaaattgatcagactatgggtggcggagggatttctactgcaagaaggagaagaaactgcagaaggtgttgctcagaaatacttgaatgaattgattgggtgatgtggcaggtcaatcgactaaagcccggcgccattccatgcattcttgccatgacaggtatgactccttaaaacacaatgctggtcattcacgttccctgctgttcttcaacagagaatataatgatatagtgaggaaactctggcatcctttgaattttcagcaagaaaagaaattgaatttcatctacaggaaatttaagctgctcagggtattagaattagatggtgttcgggtagttagcctgccaagtttgataggggacttgattcaattgaggtatctaggattgaggaaaactaatctagaagaagaacttccaccttccattggaaacttgcaaaacctacagacacttgatttaaggtattgttgttttttgatgaaaataccaaacgtaatttggaagatggtgaacttgagacatctcctcctgtacactccatttgattctccagatagcagccatctacggatggatacattaaccaatctacaaaccctaccgcacattgaggctggaaactggataggagatggtggtttagcgaatatgatcaacctcaggcaattgggaatttgtgaattatcaggacaaatggtgaattctgtactttctactgtacaaggattacacaacctccattcactgtcactatcacttcaatcagaagaggatgaatttccaatctttatgcagctgtctcagtgcactcatcttcagaaactctctttaaatggaaagatcaagaagctacctgatccacatgaattcccaccaaacctcttaaaactaactctgcataactcccacctacagaaggagtctattgccaaactggagagattgccaaaccttaaagtgctcattttgggtaaaggggcatacaattggccggaactgaacttcaatggtgaagggtttccacaactgcatattttgcgacttgttcttttgaaagaattggaggagtggacagttgaggaaaatgcaatgccaaggcttgagaacatggttattgaccgctgtgagaagctgaaaaagattccagaaggactgaaagctatcacttctctgaagaaattaaaaattataggaatgccagtagaatttgaacataaacttcggactaaagatttgttcgacttcacaaatactccagtaattgaatcaactacagacattttggcaattgattagtttctggcacaatgttagtgggtgacacatgccttcagctatggaatggaagcattttcaagtattggcactccaattttcagcatgcctgctttagtttattgttgacaaaatacatactgcttgatgaagtgtcaagcactgataactttttccacttctatgcacccaggatgttactccctttcatcctttgggaatggcttccaataactaattgtgaatgccattagatgtggaacttgtgtgagcagtacatagagcatttctctgagattgaacagctatgccaaattcaacagaaaccttttgctcacaaaaggatatctcaattacaggtaaatggccaatattttttcaatttttttttaaatttatggtttaaattttaaatgtggccaaaaaagggtcccggatattctttgtcctgtgttttgtttctttcattccaacacaactgaacatcactagacacttaccaagttttgtaattatatatctactagattttgctaaaaacccc

SEQ ID NO: 85284 - DNA, 370 bp, Glycine max
  Clone ID: PAT_MRT3847_48025C.1
ttccgtctgccttcttggatgctataatggatgatgttctcaactctgcagatgccattacctgcatcccccagtgtttggatgccttatgcttaaatagtaatggcctacaggctgtgaaagatacaaactctctgaggtgttttgtgaaagtgtttacttctagaacatatttgcgtgctcttgcaggggacacacctgcatctttgtctagtggactggatgaattaatgcgccatgcttcctcattgcgtggccctggagtggaaatgttagttgagattctggaaactatctcaaaaattgtggcgtccaacaaatgttgaaacagtagcatcagatcattgcatgattaacgatgacttcctat

SEQ ID NO: 85285 - DNA, 316 bp, Glycine max
  Clone ID: PAT_MRT3847_48026C.1
gggggttgaacttaaaaaaaatttgtaagctttgggggtgaggacctatttaacagcaccaagggtttaggttatggagtttttggagaggaaaataattggggggggttaaaatttcagtttttattggtaatgcccactgttcacggggagaaaaacccattttctgcgattgaatttttgcttcaatccacaatttccttttccactgagcaaaggaaggctaaagctttatcgggccttttttttggggggccagcaccaccttttttgagggtatgacatacccatgggggagtgagccttttaccccctt

SEQ ID NO: 85286 - DNA, 358 bp, Glycine max
  Clone ID: PAT_MRT3847_48027C.1
cgggccgatttggtttaaaggatcttaagaaagaattacttaatttgatctagcattaccaatgacctaattttattttgccgcctgaaaaataaaggtttatttgagaattttataggccgggaggggccttttggctaattccctaaaaatggaagccattttaaggggatcccttcccacctttccatttggacctggaaatttgggatttggggtttaacttgtttaatttttggatggactcatttggatcccgagccttataaaaggtggcctattgggtcctttcatcccaaaatatcaattaatttggaccaacctggggccataaaaaataaagccttataagattttt

SEQ ID NO: 85287 - DNA, 300 bp, Glycine max
  Clone ID: PAT_MRT3847_48028C.1
ccttctttttctaagactagtagtatggaacacgagcgtgactttttaaaacatgtagttaatacatcctttatgagaaccaatccttggctatgtgaaagaagcttcctcccaatgcacattttatggcagaaattgtgagctcatatagatacgactttccgggttagttatacacattacgtgttggatagtcgtttgagggtaacaaaatagctgtatataatacaaatgcttgggcaaatgaggtttttgaactgcccctagtgacacatgatgagatgtctgtctacttgtact

SEQ ID NO: 85288 - DNA, 1474 bp, Glycine max
  Clone ID: PAT_MRT3847_48029C.1
cccgccgcgcacagtctctcttggaactttgttactctcacacatgtctcgctccgtgcctttggtttcaaccatttttgtcttgcttctgcttcagctccggcttgttcagtctttcttggaactttgttactctcacacatgtctcgctccgtgcctttggtttcaaccatttttgtcttgcttctgcttctggtggccactgagatgatggggccaacaatggtggcagaagcaagaacttgtgagtctcagagccaccgtttcaaggggccatgtttgagtgacaccaactgtggctctgtttgccgaaccgaacgtttcactggaggacactgccgtggcttccgtcgcagatgcttctgcaccaaacattgttaattttaaaaaattaattaagagtgctttgatagaagatgatagatctatcatctttctactcgtgttgttaattaaccactttgtgtttgagaataagggttacccattctactatgggtttctttgtttgcctcttattttatctagttagagatccttttatgaaacgagtgatcagtgtgaaggaattatgttatctgtgttgttaatttaatattattctagtaaattttattcagtcgggaagaagcaagaacttgtgagtctcagagccaccgtttcaaggggccatgtttgagtgacaccaactgtggctctgtttgccgaaccgaacgtttcactggaggacactgccgtggcttccgtcgcagatgcttctgcaccaaacattgttaattttaaaaaattaattaagagtgctttgatagaagatgatagatctatcatctttctactcgtgttgttaattaaccactttgtgtttgagaataagggttacccattctactatgggtttctttgtttgcctcttattttatctagttagagatccttttatgaaacgagtgatcagtgtgaaggaattatgttatctgtgttgttaatttaatattattctagtaaattttattccaaaaaaaaaaaaaaaaaaaaaaaaaaaaaaaaaaaaaaaaaaaaaaaaaaaaaaaaaaaaaaaaaaaaaaaaaaaaaaaaaaaaggggcggccgccctttttttttttttttttttggggtttaaaagacaaactttccaacatgtctttcagttaattaaaacaatttaagctattttcccaaaaaaaaaaacccctcaagggcaataaaaaacacgtatacgttgaaaataaaaagtgggcaaaagggaaactgaaaaggaaagttggacatttttaattttaaccattataatcaaagtcaatataatatacccccgtgataaccctctgagtgcttccccaactgggggagttacaaaaaagtaaaaatacccctttaaaaaaaagggtctttgaggaaagctgagcataccaaaggccttgaatctaaacatcctaaaaagctttaccccccaa

SEQ ID NO: 85289 - DNA, 316 bp, Glycine max
  Clone ID: PAT_MRT3847_4802C.1
ttttccacgcgtgcgcacattaggcataaacccgggtacacaattctgattccacttgcggggagatcccagggagcatagcacagccctcaaatataaagatccgtacggagagacgctacggcggttctccacggcccatgtgggacccacgcatggttagctactagtccctgtcggctatgctctcatcgccactgctggaaagaggtatatacgcatactacagctggtgaaggtggcagcatacgagactatctcgtgggcgaagaggaagctaggattgaccaaccaaggctgtatgcacccggggaga

SEQ ID NO: 85290 - DNA, 117 bp, Glycine max
  unsure (1)..(117): unsure at all n locations
  Clone ID: PAT_MRT3847_48030C.1
atccttcgcatcccatccttcgcctcgttcctcctggccaggntcngctatcgcccaatgctgtaattctctttgtcttcttctaatcccacatttcccgtccaagtaacctaatta

SEQ ID NO: 85291 - DNA, 945 bp, Glycine max
  Clone ID: PAT_MRT3847_48031C.1
cggatgcaacgtccgggcgccggaggtgcaccccgcgagcctgttcatggcggagtggttcgccgcgcggggcggttcgccgggaccggggctgagactctgttctcacgcggggtgcgggaggcccgagacgaggaagcacgagtttcgaaggtgttctgtgtgcggcgtggtgaattattgctcacgcgcgtgccaagcgcttgattggaagttccggcacaaggcggagtgctcccccgtgcaacggtggctcgaggaggacggcgaagatgtcggtaacgacgacggtgacggagaggtggaggttatggtagatagttagacaatttttacaacagtaacggtaacggaagtcgctttggacggaaaaatgaatatttttggcgaagtgaaagaaaaaaaggaattacttgtgatgatttattcgccgtctcaaaaaggtagaaaagagtatatggcttcttttcttttttccttgtataggtcgaaaattctcccgaaaaaaacgagaggagattatttttctttttttattttattttgcaatttcggagtttaaagttaatttagaaattcaatgctaaaactaagaggttactagttactgctataatttttgttattaatttaattgatttgaatttaaaaaaaaaaaaaaaaaaaaaaaaaaaaaaaaaaaaaaaaaaaaaaaaaaaaaaaaaaaaaaaaaaaaaaaaaaaaaaaaaaaaaaaaaaaaaaaaaagggggcccccaaaaaaaaaaaacgggggcccccggaattaaattccggcccggccctaaaaagattcccagctttcctttaggggaggtcatttttacctgggggaaaccagggaaaaacctgtcccctgatgaaaatagaaatcctttccggtttaaacagttattccaacccgaaacctaaaattgaaaacccggggg

SEQ ID NO: 85292 - DNA, 451 bp, Glycine max
  Clone ID: PAT_MRT3847_48032C.1
ggcaaaagggaacttttattggaaaactaatctgattttccatgaaattcttatttggattttacagataggaatggaatactttttgagactttttaatcctacaaaattttacagagctaggggcaaaaagtaaaaccaatttttaaaaatatgcatatttcatgattattaggggtaaagaaagggaaaatcgcctaccgctgtaaagctgcaaacatttgaaatatgcattactcgggatcatgggcaaaactcaaaggggaaaaccacctgggggagcaaggccgaggtacccttttattttcaaccgacaaacctttttttaaaacttcattgggtttgttacctcatcaaagggaactttggggtaacgttcccttttcccttttggtttcttttgaacatcatcaattgttttgcttgggctagtggaagggcatttatcaaa

SEQ ID NO: 85293 - DNA, 284 bp, Glycine max
  Clone ID: PAT_MRT3847_48033C.1
ccacttgaaacagaaacttatcttgcctgaatgcctagaactggctgcccaaattatgtatgtgcccgtgacatgacaatcaggcagaggcataggcacttacacccccttgaagctaacactaactaacacgcttgatctgtgaattgaactttttcctctggaacacagccttctttcaaacggcagcgatttgcctctgactctgaataagattctttttagcaaccactacccagcgattttgttttgcactgactgtaacattggtgctgcagatgacc

SEQ ID NO: 85294 - DNA, 269 bp, Glycine max
  Clone ID: PAT_MRT3847_48034C.1
acttttctttttatcttttatttttttttttttgggcgtaaagcaacgttcatatcacacggggcattttattagtattccatccaacaaaaatcataaaagttaaaattcattaaaaaagcatcaaataagttttaaacagatttatggatgaaagcaacttcacatttaggtcactttcttaatcttgggggcagcaccactttcccacgaaagggcagccttattattcttgggttgcccagctcccgcaccacccatgttagggc

SEQ ID NO: 85295 - DNA, 946 bp, Glycine max
  Clone ID: PAT_MRT3847_48035C.1
ccacgcgtccgcttttggccacactctccacaacacaattatgccaacccaaccagattcaccacccaacaacaacacgttgacccaaatgtttcagaacatcttctcagacaacagtaacatcatgctggcagccatcatttcccttctcttagtaatcctctttgtccttcttcttcacctctacgccaagtggttcctcgctcaagcacaggctcaggccaacgcccgccgccggaggcggcgccgtcgcacgacggtgaccgtctccgacgtcctaggcccggcaaggttccaccacttccacagcttcaccatagaagacagttcacccctctcaacaaaagggttagattcttcaaccattagaacaattccactgttcatctatgaacacaacaacaacaacaacaaaaaggtcgaagaagaagaagaagaacttgaatgtgtgatttgtttgagtgcatttaagaatggtgaagtgggaaggtgtttgccaaagtgtggccatggcttccatgtggagtgcattgacatgtggttgagttcacactccaattgtcctatttgtagaacctcaattgtagcaagtattgtggaaaataattctagtgatgatcatcatggtggagatcatgatttggttgagattgtgactgaaggtggttctgctgctccaagttttgagactagagagggtgaacatgggaatagtaataatggaaatggaggagcaagaacaagtgtttctgttgtgtcagaaaattcttcttctgagttctttggatgctctttggagagaatgcttggcaagggtttcccaatatcaagtaatgttaattaattaatgaaatcacatgcttgagatgtatatgaccatcgaagtatctattttctctatacaattataaccatgaaatgtgcaacaacaactatagttctgtgt

SEQ ID NO: 85296 - DNA, 270 bp, Glycine max
  unsure (1)..(270): unsure at all n locations
  Clone ID: PAT_MRT3847_48036C.1
tttttggagttcaagggttgatgtgtgtatgttgattgtnttccacacaatgngagnnaaggtcaatcccaaaagaagcaaagacactaactttattctagcaaataggtatacttgtcagtgtctcttctgctgaagctcacacactgacacanntttttctgaaatgaattgggtnaatncnaantnnnnnaannnnggggnttaaaaaagcccngtggtagtatntgnctnctncttctnntgcatcattgccttatagttcggcta

SEQ ID NO: 85297 - DNA, 116 bp, Glycine max
  Clone ID: PAT_MRT3847_48037C.1
tctttgtgtctcttatagttgctgttttttgagggtgctgcgtactctcaaagggtggcgatttttaggctcccagaggttttgggtgtgaaaggtgtgttttaatgggccctatt

SEQ ID NO: 85298 - DNA, 293 bp, Glycine max
  Clone ID: PAT_MRT3847_48038C.1
caaggattatcgagcgaagaagtcttttttcattggagctacacccgacacgcgtgcattgaacagtgcggtgcgaccgaatcactcacttgctgcacgatgtcacacaacggcaaactgcgaagtattttgggcgaggcttgacgcaaattgactctatctaacagggagctgcgactttaacgttcccaacgtcgttgagatatgtctggtgttgagaagagagaacgtttgttgaagaaggtgacagagctcacgtactgcgttaatggcgtagaagagcgtgatataga

SEQ ID NO: 85299 - DNA, 649 bp, Glycine max
  unsure (1)..(649): unsure at all n locations
  Clone ID: PAT_MRT3847_48039C.1
atcaaattgggctttagatgcttttgccaatcaacccaacctgtgtgattttccgtcttcagtttcaacctttcagctctgtgcttttttttttntgaaaagtaaaagcaaataaattattggaaacaagtctcacaaaattgacattgaataatctagagaagaagaataactgaggtcatatctctaaacaaaaaaagtgtaatgacagccaattggccagatgttaaaattaggctgaccacatatgcttcctgttgctaatcttgtaagcgtatagcacatttactggataaaagatcaaagcttttccagcaacatgagtcccccgcagcgagaaacacacaaagaaccacttctacagcacagcaggttgtggaaattgtaatactggtaactctgatgttgagcctctcattgccgtgcacaatatgatactgtcgcatgccaaggctgttgaattataccgcaagcactttcaggcaaagcaaggtggaatcattggcattgttactcataccttcatgtatgaacctcttagagatgaagaatgtgatagacaagccgtgaaaagggccttggcttttgttgtagcctgatcgtccaatacgaggcttcgtagaagcaactggaacaagagatggcattc

SEQ ID NO: 85300 - DNA, 451 bp, Glycine max
  Clone ID: PAT_MRT3847_4803C.1
gtggcagtgcctcctcctccaccaccttcttattccatggactttaacttcgatagcaactgttcctccccttacatcactgcaccttccagcccccaacgctttggcaacttcttcttcagtgcccccaccagccccactcgcagacactcctctgcttccactcccaacaccacccaagacgagttcgaattcgacttcagtggtcatctccagaggccttccctttccgccgaggaactattcctgggcggaaagattagacctctcaaacctctttccccttcgtctagtagaagaagagagaaaagggttatccaagaatcaccaccatcacaacaacgtaagttaggcaaggaaagagcttcatcattttccgtttcctctacgaccttctctttgggagacaaaagtaacagcagcaaaacctcggagagtatttctaactcct

SEQ ID NO: 85301 - DNA, 871 bp, Glycine max
  Clone ID: PAT_MRT3847_48040C.1
aaaaagattaacgggaggcttaacccggcgttgaagaggttaggagggaaaggaaggcgctgtggaaacggtccggggagatcgtcggcaagatattgaaggcgacggtggagtaaaagtagttaaaggtcaaggtggcaggcaattagaagtagaatgccaggatgacggagttgaaggagagcgtgggattgatggagcatgagtacaatggtgtgtgggagacagttgggaagatcgaggacaggatttcgaggcaggaggcggtggcgtttagttcgggagtgagggaaatcaatttcatagagagggagtgtgagcagctggtggagaggtttaaacgggagataaaaaacaaggacttcaaaagtttgcctactggctcagttaccaggctctcaaaatctgtcattcagaaagatttggaaactgtgcatagaaaacaagcagaacaaataattcttcctagcattttggatgttgaagatctttggccattctttcatgaagactctattaattttgcccaacgtttaacaagaagtcttaaagactccagggagaagcaaaggaatttagaggctcagataagaaaaaaaatgaagaagtttggcaaggaaaaacacagtattatttattcaccagaagaagaggtggttaagggttttcccgaagttgagttaaagtggatgtttggaaataaggaggttgtgcttcccaaagctgttggtctccatctttaccatggttggaagaaatggcgtgaagaagccaaggcatatttaaaacagaatttaataaaagatgctgagtttggcagacaatttgtgggtgaaagacaggaaaagaattcttttggatcgtgacagag

SEQ ID NO: 85302 - DNA, 239 bp, Glycine max
  Clone ID: PAT_MRT3847_48041C.1
gttttattcctatcatatcttctagattctcaattgctcagaggaatcggtttatggactcaaactgtaattaccacatcgatcttcttcactcttctctcgggtgagtgttattcacgtgcttttcaatcgtctcttctatactatatttcgtctttcaagttgggtccgtgttgttttgcatctgcatcctccctttactatgaacctagttagagacttgttccgtgcacttttca

SEQ ID NO: 85303 - DNA, 603 bp, Glycine max
  Clone ID: PAT_MRT3847_48042C.1
atttaaactttattataacaattgtaaaataaacataaaaaatctctttaactcattattatatcaggtcgttttcctttacattttatttacaaccaactacttctatttattatgtctcttgttcttgatatcacctcactcgtgaataatctggcgtgggggtccactagtctcggcctgtttttcttttttttttcttcttttacttctatttcacactactatataaagggtttgataatatcattgtacttttcaaaaatcacgtttctacaatacagcttttttcctttaagaaatacaatattgaaaaattacattgtagtcattttcacttgtgggatttgagtatttgagcaattaatttgaatacatatttaaatgttaataacatattaagaaaaaatgtagtttttttataatcatttccgaaaaaaatattttttcaaattaaatatttccaactaaacctcgttagatctaataagtggaaattgatctccaaactaaaatctggcacatgacaagtatagatatcctaatacacctttattttttaagtatatttataactgtttgcatggtaggaggaagagggaa

SEQ ID NO: 85304 - DNA, 585 bp, Glycine max
  Clone ID: PAT_MRT3847_48043C.1
attccaagctttaagctacttaaaaagaggaaataataaaatccattcagttaagatgagtaagttcgttgggttgttcctgctggttttggtcagtgtggccgttgctgctgaattcgaccatggtcctgtgtatcctcctgaacacgacaaacagggtccatgtggaaagttcagcacccttagaattttgacgcataagctgcgtcactgtgaaaagcctgcacgaaacctgagggctcctgtttcttcacaatgctgcaatgaccttttaaatgtcagcatcccttgcctctatgctgttttctcctctgatgctttcaagaaagttggtgttgatcccaaaatcgcaatcaccattccccatcgttgccatttcatcaagccatagagcactagttagttaccaatctagcatacatgccaatatatatatgtatatgtatatatttacagtatgcttgtgtattgcatgttgtcgttaataatttgagctctttataaagactcataaataagttacattgtaacaacttctttattatctatcaaataaattttatatctttctgcaaaaaaaaaaaa

SEQ ID NO: 85305 - DNA, 193 bp, Glycine max
  Clone ID: PAT_MRT3847_48044C.1
cattacaactcccagaaacttatatgggtcacataataacgatttgagtgcttatgatcaataatgtctatgtaaaagttattctagatgtagtggaattggtaagatttccctgtaacttcgttgctttgcaaatggtgagaaacccatggatgtcaccccagggcttagcatgcatagggacttgtatctt

SEQ ID NO: 85306 - DNA, 626 bp, Glycine max
  unsure (1)..(626): unsure at all n locations
  Clone ID: PAT_MRT3847_48045C.1
ggctcgagggctttttgtgagtcatcgcctgaaatatcaacttcttctgagactgagagtgacatgtcattttcaaggtacactcccttaatgcctcatagacatctttttggagatatacaaagagagcgcttctttcatagtgaccatatttcctattctgggcatggagattcattcagctcttccaactttgttgacctggattggctgtcttcaggaaattcatgtgaagaagagccatttgagaggtaatgctgcattgcattccagggaagcaattatacagatacctagagagattagttggttgcaagaatattttatagggagagttatggaagcaacaggacagggtagggaagggtaaatgaggaatatatttaagaattacaaatttgggttgtgaatatcagtgtctggggtctgtgatgtacacaacaacatctcttactgtctccaaagcggctttgcttcagttccatcatcatggntatacattgtagggtatctaactaannataattttgtaagggcctctctatactgaatgcangttatcaattaccaactcttcgattgctaggctttcttcagaaaatgttatcaatgcagttattatggga

SEQ ID NO: 85307 - DNA, 456 bp, Glycine max
  Clone ID: PAT_MRT3847_48046C.1
acgaggttaggttaccgattaagcaagtgtatgaaggaaggacacatggaaagtataagaggaagacggagcaccagccagaaccaggattagttagtagttagccttgtaactattcaagtcagttaaaggcagttagttagttagttgtcacctataaatagagatggacagcctggaattactcattcgggagtaatcacggtggttggttagggaggctaggctccaatccctagatgtgcatttgtactacaaaagtaataaaacgagagattaggctggtaccatcacaatctttgttgatgcacacaacatatttacttggctatacttgttaaaaagtaaatcagacaccctaactatttttaaacagtttcaaactatgtttaaaactcaattaaacctacctattaaagctggtgggagatgaatataggcatttctctaagtatc

SEQ ID NO: 85308 - DNA, 536 bp, Glycine max
  Clone ID: PAT_MRT3847_48047C.1
gtgccctttctcatttctcagtcctttcgttctctgttcggtgttttacctcccatgaaacacctcctgcaattcgtgtctaccacttctgtcaatctcaccagtgtttctgaagcatttgaatgctaagacattggtttgtccaactgtgaaagcaatggggtctaaaagacccttttcaaattcatcaaaacccttgtcaccatttgttgaggacacgaagaatgtgaagcttaaagggttggaagcaagccctggttccaagaagcttgttgttgaggagaatgatgttaatagctattcgattgagattcagaggttaagaaatgacccaacaatagtagacacaatgactgttcatgaactccggaaaaccttgaagagatttaaagtccctgccaaaggtcgtaaagatgatcttttgtctgccttgaagagtttcatggacaataacatgtgcgaacaagattctcatttacaagaaaaacaagggcttttaatttcttctgaaaatgcatctgtagaagtgaaggcta

SEQ ID NO: 85309 - DNA, 483 bp, Glycine max
  Clone ID: PAT_MRT3847_48048C.1
gcgcaaagttttatgtataacgggtcttctggcaaaaagaaggtgatttaactcaatagatgtaacctaattaacaacacacattaaatttgtgtaaaaaaaacattgcttgtaataaagaaaaaaaaagaaggcaatttatctatctgatagagacatgtggccttttcaggattactttttggtgttgatctgttcaaaactcatgacacagccttttgatctttacgtataatattagagaaaattacatagatgaacggccccagcaggtaattctgcaaggctgtgcactaaaacgaaaattcatgacggttaaaatgtgacgcattaaaggcagttacactcgcgttctgaaaagaaaaatctaatgaggatggcaatctcattaatttaacagaaagctcaacattgagaacaaaaccagtccatgatatactcagagacaactcaccatcaactttcaagagttaaaagaatttt

SEQ ID NO: 85310 - DNA, 460 bp, Glycine max
  Clone ID: PAT_MRT3847_48049C.1
gggggtttggtttttttttttttttttttttttttttttttttttttttttttttttttttttttttaaaaaaaaaattttaaaaaaaatttcaaaaaaagaggcccagggggtataaaaagggacaatggggacctttggaaaaaacgggtgaaaaagggggggccaaaacaccccagttttttagggtgggtttttggaccaacaggggggttttggggggatttaatagtaaggggggaaaaaacgttcttttggccctaaaggggaggggcccgaaaaacacccccggggggcttttccatatttttggcacccgggttcggggggccctttggggcactgggtatgttttaatttaaaagggccaaaaaagacctataaatttcattctttaaaaccatccacagaaaaggggcttggggatccttggaggaaaaaatttggggtaggctggccc

SEQ ID NO: 85311 - DNA, 154 bp, Glycine max
  Clone ID: PAT_MRT3847_4804C.1
gctcgcccagaactgcttcttcattgccagcgatcgaatggtcagtgtgcagctccaaactatatccacagacttccaacgactctccaagactcacgataagatcttcatcgctctcactgtactctacgccgaagcgcaaacattttttcaa

SEQ ID NO: 85312 - DNA, 497 bp, Glycine max
  Clone ID: PAT_MRT3847_48050C.1
gtatgtttttaactcttttctctctcagctttgttcagttgtagaaaatactataattgaaatgcatatctttcacactttgtcattgtggctcgatgtgctgtcatttctttaggttactcaccgaaattattatccaaatttggaaagtacaacaatgcctgattgaagcatctcttgcattgttaatttgttatcacaatgtatactagtgagttacatactaactattagttaattcataggctgtatttgtcaagagaccaagatggaaaaaagatattattgatgaagaatatactgcagaatgaattctgcaatacccagagcaagtgctcctataaaggttcacacctttgtccacaacaaacagaaaagcaaaggctaattttttctctcccctctcccactatacaaggcattagactatatttgctcccccattgttaattcccattttgccccttgtttctccagctatatgttttccaaaccca

SEQ ID NO: 85313 - DNA, 644 bp, Glycine max
  unsure (1)..(644): unsure at all n locations
  Clone ID: PAT_MRT3847_48051C.1
gatgaataactgatacattaaaaatcctttcattttaaccacgaccagtccaacatattgagattaacatcttctatgcaatcactggactccatatctgtttcatcaaatgttcttaacgctagcacttcatcagttgttttcaatgttagaacaaacttctctttcctctcaatgcaagtgccaaactgagtcaaagttttgttaactcctacccctctttggggaaggttgcctttgttgatgattgatgattttgctccccttcaggctaacacattgtgcaggagaaaagcttggtgtgccaaaagatgacttatgtggaggaatgctttggccaggcaatgagtgtggaactgaaatgctcttgtgagcaattacaccaacttttgggaaagatgagattggattagagtgttttgtcagttcatctacatagagcacatcgtcaatgcgtgctacaatgtttgatgacaaactctctaatattcgtgagtagctctccaaaatggattttccaacatccttgttgcattggattttgctcatatccaaggctgtttgaggaagagcagggaaacgcctgcttaaggagagcagaaggctttctgctctttctgcaagtgnttccattttgtctccct

SEQ ID NO: 85314 - DNA, 110 bp, Glycine max
  Clone ID: PAT_MRT3847_48052C.1
ctcacatggaggcaggaaccacaatttgctacggtccctcctcttatatacttcttggctcaaatttactagagacatggacacttgaaatacacttcatctgctcatcg

SEQ ID NO: 85315 - DNA, 390 bp, Glycine max
  unsure (1)..(390): unsure at all n locations
  Clone ID: PAT_MRT3847_48053C.1
tngtgggggntttttttttttttttttttgaaggaaaatggttggaatttggcatgcaaagcaaaaggagttgggaaagtttcagttcatatctaactggttgtccaagataggtagctaccaatacaaaaggcgatgttgagaagaaatcccacccataactccaagccaaagtagctgagcgtgtccatgagctcaaaagctgttcctggttactggagataaaccaaaaaccacctgtcacgcacactctctgttttcatcctagccttaactatacccttctctccatgaccccatgtgtcaactgggtatggctctctctctggattgcgtgtctttatgatgataccccataaaataacctaacacaaaacgcaaaccaaaaac

SEQ ID NO: 85316 - DNA, 174 bp, Glycine max
  unsure (1)..(174): unsure at all n locations
  Clone ID: PAT_MRT3847_48054C.1
gaagccaacaatggtaccatctgctgcgacctctctttctntttctctcagattcntgngcggtttatcatgggggatagtcagtntncgtnttgtttcaccacattnancncctctgganancttgttnanattgagcangcgtggacngncgntgggtctggtggacgcagt

SEQ ID NO: 85317 - DNA, 200 bp, Glycine max
  unsure (1)..(200): unsure at all n locations
  Clone ID: PAT_MRT3847_48055C.1
ttgtacttacaaactaaactcaacnnttgtgaacataatttattgaaaaagttcaaattgatctacctgcaaggttaatacacacggaggtgggggtgannnntagaggtagggtgcaggaggccaatgtgatggtggtgctgcacatttgcattactatgtaccacgtgcccacanngatgcacgcccctcccctcccc

SEQ ID NO: 85318 - DNA, 1231 bp, Glycine max
  unsure (1)..(1231): unsure at all n locations
  Clone ID: PAT_MRT3847_48056C.1
cttttatttacaccacatagccccaccctcaccctcttacagaatgggaaggactccggtcaggtttgagagggtagcggcggcctttgacgctgacgtggcgcgtgtgaggctctgcaatagcagcgagaatgagcagcactcgccggaggactcggctgatttgtcagatctggtgaaatcgttcatggagagagggggagagggagaagatgcggttggtgttcgttcggatgatggggttgagaattttgattctgagaagagggagattttggagggaatatttgatgatgacgacggggatgccaaagaaaagattagaagagaagttcaacttgcatgggggcttgttgccgaaaaggataactcatcaccccaattcaaacaacagttgatgtctctcctacggtacagaggttttgatgctgggctctgcaaatgcaagtgggaaaaaaatacaagattcccagctggtgactatgagtacatcgacgtaaattttgcaggaaatcgctacattgttgaaatttcccttgtcacagaattcgaaatagctcgttccacagaccaatatgccgcgttacttgatgttttccctctaatatttgttggtaaaatggaagaactcaagcaggttgtgaggctaatgtgcactgctattaagggttctatgaaaagcatgaatatgtatatacctccgtggagaagaattgggtacatgcaagctaagtggtttagttcttacaaaagaataacggacgaggttgcaactaacagggcatcatcagcttttttcactacaaggtccattggatttgatgcaaggccagtgaaatcctacaattgcagggatgattatgggactaaacctgcattcagagtttgccatttgactactgcattttatgtggacagccctgggatgcaattatagtcaaatgctgcggcatgtgcattcatctaattgctttttggtaataatggtgttgataaatgagtgagtggaagtgccttagctcgggcataaaaagcgcttaagcaaagattttggtgcagtgttctggcggaattttgtttttattactagggatagtatcatagcaaggatgattggtaggagataataattagtgaaatcaatgtaaagtagataattggttggttggttgctccaaaatgtaatttctcttccaattatatatattagtgatggttgtgtttataggng

SEQ ID NO: 85319 - DNA, 294 bp, Glycine max
  Clone ID: PAT_MRT3847_48057C.1
aattccgggcgacccacgcgtacggcacgcgtgcgcacagactgtttcggatccgagaatacttcaaaagcgggggccatgttcaattgcactcatgatcatccctaacatgacgagaatatacaccctgatcactagcattgctgaacacatgccttactaggcaaatcaccaaatcacgtatcagaagactttggccagatcacaattcaccatttatcatatatgtcatcatctgaggctccggcatccctctaacactggctcccctgcctcttgacgtgcacctctggc

SEQ ID NO: 85320 - DNA, 323 bp, Glycine max
  Clone ID: PAT_MRT3847_48058C.1
tttggtgactctggagtggtgatctatggaatgatccctcttacgcactcttggtatggaactcgatcacatccttcagggctaacagcagggttccataacagagttatcagggatggctagggaccagttgcacagatctttgctcggaactcgtgcacgattagagtacctgccatggacctttcggacgcggaacaagcagaggatgatgattctagccctgagttgctacttgcgggcattatgggaggcgtgcgaaagcatgaggttcaggtttcaggtcgaaatgcgtctgaatctggtgttccagggggggttga

SEQ ID NO: 85321 - DNA, 214 bp, Glycine max
  Clone ID: PAT_MRT3847_48059C.1
gtctcgcttcggcggtaactgtggttgcagaagcgcctgcatatgcggcaacgggtgcctaggctgcaagatgtacccagacttgaactacaccgactcaaccaccaccgagaccttgttcatgggagtggcaccagtcaaggctcaattcgagaccgctgaaatgggtgtatccactaaaaaccatggctgaccatgtagagctaactgcacc

SEQ ID NO: 85322 - DNA, 879 bp, Glycine max
  Clone ID: PAT_MRT3847_4805C.1
catccacattctcctttgttctaacaaatttactattaagacatttttaaggtaagaatgtatctttttttaaattatgattacttctacaaaaagactttttggcatatttcaaatttaaattctttatccgatagtttctgatatcctaccttgtcggttctcagcatttaatcttactattttctggttggcatgatgcagcgttgatatatgttcatttgacgtatgttcatccgaatcctttattcgaggctgaaaaaaacccaacattaatgtgcagtctgcaggacatactgttcctgtgtttgttaatgggcaattttcaggtttacagagtcgcagttagacatgtagtttcttttgtgtccaactgtgcatctttatatttctatttaccagttagtattcagtacctatgcttaatcattatgttgctagccatagatttatgtttccttttatcactggaagattgttgatcggcattatgaaacatgggaggcagggatcactggtccagttttgctccatggtcttgaccaaggacagaacgatttgacgagaaacaagtgttcatataaggtctgatgcacataattttattaatctaacatatgtattcatacaagtttcaattattgggaccagaaaatcagaaaaccattctcttacagtatattttgtcgattttatattttcactccaacttctattttgtgtatgtattttcctttagattgggagtatattttacccttgctcattcttgatgctggcttacagctttttattgtgagttaatatgctcctttttttgtattaactccatctttaataactcacagtatcatacttttcataaaatcggacgcgtgg

SEQ ID NO: 85323 - DNA, 1546 bp, Glycine max
  Clone ID: PAT_MRT3847_48060C.1
tttccgtttaccaaaagataaagcggcgaggaatgatgattgataagaacgagatgataccttgaaatttgcgacatcgaatttaaccaaaccctaagcatctggtcgtcgttgtcatcatccatccatttccatgccatggaagttactcctctctcttccccttctccaatccatggtctccatctccgtcacaaagaagcgagattcttggcggtggcttctaccctctactttgatggaatcccattcatattgcagttgcgtactcatagaggaacaaccacttataaacacccaattttgaggacttcacacaatgctcctcaatgtagcttgcgagcaatctccaagaagcatgaaaatgtggcgtggttatctgttagtcctaaattgcatgttcagaataaattccccagagatgtagttgtaagatctgaacttactgctgctgggtctgctggagatggctatttcctacctgagctgaaagtggaatctaaagtcaggggagtttgtttttatgttgtcactgccttttgtgccatatttctttttatgatgatgctggttgggcatccatcagtgctcctgtttgatcgctaccgaagaaagttccatcattttattgccaaagtatgggctacgctgactgtagcgccattttacaaaatcaaatttgagggattggagaatctgccacctccagatactcctgctgtgtatgtttcaaatcatcagagttttctagacatatatactcttcttactttaggaagaagctttaagttcataagcaagactgggatattcctctttccaataattgggtgggcgatgtttcttttgggcatcattcctttgaagcgcatggacagccgaagtcagctggactgccttaaacgatgcatggatcttatcaagaaaggagcctctgtttttttctttccagagggaacacgcagtaaagatggaagactaggcacattcaagaagggtgctttcagtgttgctgcaaagacaaatgcaccagtagtaccaattacccttattggaactggtcaaatcatgcctgcaggaaaggagggaatagtgaacataggttctgtgaaagtggttatacataaacctattgttggaaaggatcctgacatgttatgcaaagaggctaggaagacaatagcaagtgtgctgactcaaagctgagaaatatactataaatgagttcttttaatttcaatttcacgagactgaaagccccccctctgccatgaagtgaactgagaagtcatgctttgcttaccatcttgattgatgttggagcacctgagattttgcttgagcgggccggggggaggggggattgtagaataagtgttagaattggttatgcaaagagagtcgcaaaaagtaatgttatccaaaactagtgttgtaatgttattcattcaactagttatggggaatttggcaaacaatttagtatatatttaacaagatgaatcatttcagccagttggttttggaggtaatactgtttttattt

SEQ ID NO: 85324 - DNA, 1265 bp, Glycine max
  Clone ID: PAT_MRT3847_48061C.1
cacaagtacgacacttccatcttcatcgtaaacaaacctcaaagttgcattccaccatgtctaaacaacccattgatccctttcgccacatcaacatagttctcaaccctaacggaaccctaaatcgcttgcgccatattcccagcaccgcaccctcttccgaccccactctcccagttctcaccaaagacatcaccatcaaccaacaaaacaacacatggctccgcttattcctcccccgaatagcactatccccaaaccctaagaagctacctctcatcgttttcttccacggcagcggcttcatcgtaaccagcgccgcctccactatgttccacgacttctgcgccgccatgtccgccgccgtccccgccgtggtggcctctgtcgaataccgcctcgcgccggagcaccgtctcccggcggcgtatgacgacgcggcggaagccttggagtttatccgagacagcagcgaggaagaagaatggttgaccaaacacgccgacatgtctaattgctatctcatggggagcagtgcgggggccacaatcgcctacttcgcgggtctacgcgcgaccgacacggcgagcgatctctcgccgttgaagatcagagggctgatattgcggcaggtgtttttcggtgggacccagaggagcaaatccgaggttaggctggagaacgacgaggttcttccgctgtgtgtgacggatttgttgtgggagctggcgctgccggttggcgttgaccgtgatcacgagtattgcaatccgagggctgagaagtgggttgggaaaatggggaagatgagggagctagggtggagggtgttggtgagtgggaatggaggggaccctgtgattgatcgtgagaaggacttggtgttgttgttggaggagaagggtgtggttgtggtgagtgattttgatgaagaagggtgccatggggtggagtttggtgatgaatccaaagcaaaccaactcattcaggtagtcaaacgttttgtttcatgaatccaaggatagtacaagctcatgatttttctcttttctttttgagatcatcctagtatgaaccttatgttagttcttgtcttgtgcttacctttcctcttcatatatggttgatagagttattatcttagggaaatgctactagtacttttctttccaggcatctaagaaattgcagaaattgtctgaaaagtgagtcatgtaatggaaaagtgatcaaactaataaattaaatttataggaaaaaccccc

SEQ ID NO: 85325 - DNA, 152 bp, Glycine max
  Clone ID: PAT_MRT3847_48062C.1
tgtaatgatttcacctttctcaatatcaccaacatttaccagatacaatttaaagtgtaattttaaaacaggcacacgatgcaacaccagtccgctgataggtgaaaaaacaccaaatgcccccccagtccattctaagtccattacccgtt

SEQ ID NO: 85326 - DNA, 1110 bp, Glycine max
  Clone ID: PAT_MRT3847_48063C.1
tagccgttctggaaccccatggctttctgcccacggcgtcctcggagtgttcgtctgcattttctcatcggcctttggtgttggcctcgtgcggtgcccctgatataggaaagacgtcttctgaattgggaagcaatagccgatcttgaacctgatgagttactgcccacggtttcctgggattgttcatctggaatatcgaatcttaaattggagaatgccaaaagtggaaccccaaaaagacgcggaagaggaacattctcttatgagaaaaaggagctttatagtgaccagttacttgataggtcggtcgttgatgttgagcgggaagagactccccgtagttcagaagataatacagatgtacaaatatcaaaatatgggaccggtcatgttcttgttctggctgacttttcaccaagtactaggacgacagagctagagaagctttttgagaacttccaagatcgtggatttgtgattcgttgggtcaatgatacagttgctcttgcagtattccgaacacctgcagttgcactagaggctctaaacagtgttcgttgttcattcaccacgaggatacttgatgaagatgatacacttcttagttcgattaaagcaagagacttggaaccaccacggctacgaccgaaaacttcagcccaagcagcacagaggttgattgctcatggcatggggttaaaattgtcatctacgggcgttgggtcccgagaatatagaaagcaagaagatgctaggagggaacgtatcgttaccaggcaaaaattgagagatgaggcttggggagaccattaatatcctgttatagtactaacttgtaaccccattttccaaagccccagaaaaataaatatattgtatctttcattatttataacttataacttacttaagggatttattattctctccttttttctaagttcatctccaactttctaataatttttttttatcaaaatactcttgacagaaaaactttctgttgtgtatttaaatggaaatatattttcattgtgtatctagatgaatacaaaacataaatactaatgttcagagaaaagtgagtttttgaagttcttccataca

SEQ ID NO: 85327 - DNA, 387 bp, Glycine max
  Clone ID: PAT_MRT3847_48064C.1
ggggcaaaaaaacagttttcttaaaaaaaaacttattattttttgggtaccacccctccctgaacgggaaacataaacctgggggatcacaaaagtacaaaggcggaacccttacaaaacacaaggtttttttaaaaaaattggtgaaaatatttattttctaccctaacaggggttttttttttaaagcgtgcccccctttgcccggttatttcccatttaaaaaaaacaaccttaccgcgcccccgggtttttaaacgttaaaaaacttcataccaaggtttattaccccccgagggacttaccccctcaaaggtgtattctcatttgccccgctagggtttcccccggggggccctaaaatagccccttcccccccatgggggg

SEQ ID NO: 85328 - DNA, 366 bp, Glycine max
  Clone ID: PAT_MRT3847_48065C.1
tgcaggaagaaatatggaaatgcagaataataaggatttggaccctgcatgcagggcaagggtaagtaaaatacactgcttgagaaggacacttactggaccatggtagattatgtgaatgtgagtcattgtttccaagtgacatctacacgaaggaagccattatgtcataagggctggggtatatatatgtatgtgagacgtgaggatgatatacaagaaaacacaaaagctttttcgtgttagtaaacgatgcgtattcgtgttgtaagttttcatagaggttgttgatttatcctaaattaaaaattagagattttctcagctttaaacttttgtatatcaatagtaatattttcgttcaaa

SEQ ID NO: 85329 - DNA, 617 bp, Glycine max
  unsure (1)..(617): unsure at all n locations
  Clone ID: PAT_MRT3847_48066C.1
ggctcgagctgaagtgagagatagttcaacctgcattgacaatggattatctggctctcatggagctgagatgaagaaaatccataatgcaaatgatgaaggtttgactagcaggtcaccatttggtccatccttggatgtggcaagaggggatgtatccgggaatcctgtggtgaaaattgcacataagtttgataatggtttttcctccattagtatgtgttctcaacctcaaagcatgcttcctccagtgccaaaccaaaatattcaatttccagtgtttcggacttcttcagcaatgggttattaccatcaaaatccagtttcattgccagctgctccacaaatgggttgatgcctttcccacacacaaacccctacttatatgctggcccttttggaatagcttaacgaggatccacgcttctgcttgcagtatggtggcttacagcaaccaacacccctatttaacccagttgcatttccagtttatcagccaatcgccagagctaaaggcttaaatacagaggaatcgactctaatgtccaagnccacatctatgctgccagagcatcttnatagatctttcagtagaaaaggtttctctaaccggagct

SEQ ID NO: 85330 - DNA, 1148 bp, Glycine max
  Clone ID: PAT_MRT3847_48067C.1
ggtgccacagagacggcgcttcagccgacctacaggggaatgagacataacaaggtttcggttagtggtggtttggaaagagaagatgctttcacacagcaacaaattgttaaactgaaaaaaaatgaggagtttggcaatgtatgcagaccaaacaatagtaaaaccaaccaacttcgtgggactctaaatggaaactgatcaattaggcaaaggaaagtaggtgagaacaataaacaactaccaaaacgacaacctcatccattaaaagtaaacttaaaacactctcaaagacaagtgcagaacaaagaccaacacccacaacatccaccacgactttttccaatgcgagtaaatgtgacttttgttagtgctcctacgcatttgttgaacaatgctcatgtaacagctagccctggcagtaaaatatcacctgatgttattacaaggagtaataatgttgataactctccaatatcaccgcattatgtaatcaacaggggaaggaaattcagtgccatagagaaagtggttgagaggagacaaaggagaatgataaaaaatagagaatcagctgcgagttcaagggctcgtaagcaggcctacactttcgaactagaagctgaggttgcaaaacttaaggaattaaacagagaattacaaagaaaacaggaagaaatcatggaaatgcagaaaaataaggatctggaccctgcatgcagaccaagggtaagtaaaatacactgcttgagaaggacacttactggaccatggtagattatgtgaatgtgagtcattgtttccaagtgacatctacacgaaggaagccattatgtcataagggctggggtatatatatgtatgtgagacgtgaggtaattgcagtccaaaactagatagggtggtagctattgttagtgttattatgtataggaactaggagagttgagttgtacattaaacttgtatctttggataacaaattattattatatgcttgaatgttattttcttttgtgttgcaggatgatatacaagaaaacacaaaagctttttcgtgttagtaaacgatgcgtattcgtgttgtaagttttcatagaggttgttgatttatcctaaattaaaaattagagattcttctcagcttt

SEQ ID NO: 85331 - DNA, 319 bp, Glycine max
  Clone ID: PAT_MRT3847_48068C.1
actccttcttacttaatgcgtgaattaccgtttggttctgatggcgtatttacaccggaagcctttgttgaaagaacaaattacgatcttgcgaatgatttaggtaatctagtgaatcgtactatctctatgataaacaaatatttccacggcgaattacctgcataccaaggtccaaaacatgaattggatgaaaaaatggaagcgatggcgcttgaaactgttaaatcattcaatgataatatggaaagtttacaattttctgttgctttatcaacagtatggaatgatgaactactgtaccatctacttaggagca

SEQ ID NO: 85332 - DNA, 597 bp, Glycine max
  Clone ID: PAT_MRT3847_48069C.1
ccggacctacccgcttgaaatgctcaaggtactagtaatcctattgttcaatgtaattgtctggccgagcacattgttgtgactgtgagcagatgaaattcctttggctttttattttatatgtaggatgtgcatctggtaccccccccctccctctcttgtgacaattagtggttattgggcctgtttgttacagtttttatttttcataaaaagtctcctttttgtttttaataatcacttttagaaggttttcatgcatttgtgtgagcttttcaaaataatcataagctgaaaaaaatctaaaatctgattaaaatcagaagctattttgaaatagcttctaataaaaaccaactcttttaaaagtgattttatgattgtaaacaatcataaattagtttatttttttaaatctctaaaatataatcactacattatattattttacattataatctctttctaaaattattaacaaatgtacccattattcgtattctatagctaaaaattattttagaataatatatttaaatcattacattgggaacttcacagcttgcagttttttttctagacttgagatgatgtcga

SEQ ID NO: 85333 - DNA, 688 bp, Glycine max
  Clone ID: PAT_MRT3847_4806C.1
aggaacaaaggttactatttaccctattttaaaataagaaaagtaatgttaatacaagtgacctctcactcaaatttaccatttttactttacaaaactcacatgaaggcaaaagtgcagtggtgcaaggttgtaacaccatgtggtatgcaaaagtgcagttgtgcaagattgtaagaaaagtagagtttttgtacaaggtagttcatactagtatgtgcaaaaactcaacttttggagttactgtggacagatggagaattgatcatcttccgtgtaatgcaagcaagctcacgctcatgatggcatgctaaatccttcacatgactttctcactttccttcgcgtgtagacgcacttatacaggccattattatcaatagagcactctaagcgtggttgttccattctggcactgttgatccccaggactcggttgctccacaatggtgactaggtcaatagcaccaataacttgattatttttgccagcacaagtatactccatttgatgattcatcatccctcctagatcaatctcttctacttggtataattcacatactggactagactcactgaggttagcacagcaacttccagaagaacatcacattttgcttgtgactctgttaacaagactggattcggagatggattattattcgtcaagagcttttgacacatg

SEQ ID NO: 85334 - DNA, 585 bp, Glycine max
  unsure (1)..(585): unsure at all n locations
  Clone ID: PAT_MRT3847_48070C.1
cccacgcgtccgatttgcataaaccccattcattggaagatccaaaagggtcttctccgtcccttatttctccccacataccttgcactgatgtcgcaggagaaatagttgagatcggaccacaagtcaaagatttcaaagttggcgacaaagtccttgctaaactcaaccatcaatatggaggtggactggctgagtttgttgtggctagtgagagcttaacagctgccagaccatctgaggtctcagccgctgaagctgcagcattacctatcgccgggctcacagctagtgatgccctcactcaaattgcaggagttaagcttgatgggactggccagctcaagaacattttagtaactgctgcttcaggtggtgtaggtcactacactgttcaactagcaaaactagggaacacccatgtcacagccacttgtggggctcgcaacattgactttgttaagggcttgcgatgaggttcttgactacaggactccagagggggctgcactcaagagtccatctggtaggaaatatgatgcagtgataaatngtacaactggaatatcttggtcaacttttgat

SEQ ID NO: 85335 - DNA, 1329 bp, Glycine max
  Clone ID: PAT_MRT3847_48071C.1
gttagcaattaacacctaacgagattcggcttttaagataaggcaatgaatctgatgcaggcggttcgctacgacgcctacgggggaggtcctgccggcctcaagcacgttgaagttgccgttcccagtccaaaggcaaatgaggttttaatcaaactggaagcagttagcattaaccctattgattggaagattcagaagggtcttctccgtcctttatttctccccagaacctttccccacataccttgcactgatgtggctggagaaatagttgagatcggaactcaagtcaaagatttcaaagttggcgaccaagtccttgctaaactcactcatcaatatggaggtgggtttgccgagtttgctgtggctagtgagagcttaacagcagccagaccatctgaggtctcagccgctgaagctgcagcattgccaatcgccgggcttacagctcgtgatgccctcactcaaattgcaggagtcaagcttgatgggactggccagctcaagaacattttagtaactgctgcttcaggtggtgtaggtcactatgctgttcaactagcaaaactaggcaacacccatgtcacagccacttgtggggctcgcaacattgactttgttaagggcttaggtgccgatgaggttcttgactacaggactccagagggggctgcactgaagagtccatctggtaggaaatacgatgcagtgataaattgtacaactggaatatcttggtcaacttttgatcctaatttgactgaaaaagcggtggtagttgatttaacacctaatgcaagttcattgtggactgctgccatgaagaaaattactttttccaagaagcagctggtgccattttttgtaaatgtccagcgtgagggcctggaatatctacttcaattagtgaaggacgggaaactgaagtctgttattgactccaagtttcctttgagcaaagctgaagatgcttgggctaagagcattgatggccatgctaccggaaaaatcattgtggagccataggtacagtttgcttggaattgttgtatttctagtttctacatatctggacaaggtttgtgtaaagctcatatgaaaatgaataactagggatatcgtatgccgtaaggattttaagttaatgtgttttcatttgatatttcgtactggtttgtatatgacaagatgctttatcaggcaactttttctcgtgtcctactcggttgttgtgctttcaggaaacgggttaagacgacgaatccacatgtgtataaatgagcaatacgcattccccattaaaaaagggtatattactgaaag

SEQ ID NO: 85336 - DNA, 448 bp, Glycine max
  Clone ID: PAT_MRT3847_48072C.1
ccacgcgtcttgccactcgttcgcccacgcgtccgtgatgaagcaggtgcaggggaatgataaatctggatttgagggagggaataggaccgaacagcagcggtggtggtgcggatggcgacgatggcctgcggatgccggagaatggacactccaatggaaattttcttgttgctcaagatactaacctgaggcgcgatgtgaatggtacgacatactggaacgccccgagcttggggctccagacgtgcatacactgttaaagcttatgaccacacgtgccaagaagactgatactgatgatgacaacgcctacaaggcagagccaaacaaaaaagtgactgtgaaaaatagagattgggatgcagctgcacctacaggaactaaactggactgtaccgatcattacggtgaggatggggagagtaacataggatttgttgcggct

SEQ ID NO: 85337 - DNA, 608 bp, Glycine max
  unsure (1)..(608): unsure at all n locations
  Clone ID: PAT_MRT3847_48073C.1
attgaaaaaagttgccatttcgtgctaagaaagcgccttctgcgtttacacgcatagcttctgaaccttgctgatgagagcgaaaccatataccatccatcttaaaaaaaaaaaaccccttatgtttttaaccaccagccattctctgtctgtctatttcatccacaccgcagcaccacattctattctccaatgtcctaaaaaaggtgattccgccgagactctacgcgaggtaactggcaccagaggcactatctgcggctctgagtctcttgggggggtcatgggagaggggtgcttgaagaagcccttttcagctctggctctatcctcctctgatgagctccccgttgagggcacaggactggtcagatggctgttgcttaaacggcgtgaccgggctgagagcaagggctgggaagtcataaccgcttggggtgaggatctccggcatacctcttgctgtgacgctcgcagagttgctgctgtcgcgcttgtgagcttatcggccttganggccgtgagcaggctgctgtgcttggggcctgtggccctcctcccttgagctcgaaggcttgtcgctgccccgccggggtcttcgcgggggg

SEQ ID NO: 85338 - DNA, 250 bp, Glycine max
  Clone ID: PAT_MRT3847_48074C.1
cgggtctagctctagccgaatctgctcgatacggctgctagatgactacagaagggagactgttcggagcgggtgctaactttaagcaggtgccttattggtgggtatttttaatcaactggtattttgtagtctgttggtaacacctaacatatatgttcaaggggaatataccgaaatgaatttttaaatccacagattttatgttgaaaagatgttctatattgctgtgaactgcatgtgccggtca

SEQ ID NO: 85339 - DNA, 308 bp, Glycine max
  Clone ID: PAT_MRT3847_48075C.1
cgcgccaaaacgagtgggggcgggcgtgggcaggtgtaataacacaggggagtttataaccaactatgcaaccgccatttacatttaatgccacatgtttatttttcattgttccttatttaggctggttagctaagaccctacgccaaactgagattaaaatatctgcctctaccttagtgagggggaatggggaatctctcaatggggccaatgaatctccattggtggagcttacactcctggctctccattaataagataaaggggggtcctaaggctccaaatttggtcccctttattatagg

SEQ ID NO: 85340 - DNA, 382 bp, Glycine max
  Clone ID: PAT_MRT3847_48076C.1
acaaaccacaaatactgacaagcgtttagaacatcaacttttcaggtcaggagcgtaatctcggctacataacgctcactatataaaaggtggttgttgatgggcatgactaaaatttgaaattgcaccggtcgcttttgattttcataatgggggttattgggcattcacacccaaattcgacctttttttttttcccccaaacataactttagccacctgttactatggatgactccacatccacggtattatgacgttatataatctaaccccagtaaagtctctgtttgtttctacacatcaccccccgccaaaaaacaaaggaaacccactagaagatgaaaaactggtattaaagcaaacattttcaaggagaact

SEQ ID NO: 85341 - DNA, 454 bp, Glycine max
  unsure (1)..(454): unsure at all n locations
  Clone ID: PAT_MRT3847_48077C.1
gtaagctttgaatttggctctaggatctcttccccagtttaccatctgtaaccgggccggtgccgggggggnagtttaattcactgttccgttgtttaccgctgggttacccaccaggaagaccaacaatgacattaccaacattgtaagcaacggcggaagagtgcgctgcatgcaggtgtgggcaccagttggcaagaagaagcatgagactctgtcctacctgccagaccttgatgatgcacaattggcaaaggaagtagaatacctgcctaggaagggatggattccgtgcttggaatccgagagggagcacgggctcgtgtaccgtgagcacatcaggttaccaggatactacgacggacgctactggaccatgtggaagctgcttatgataggttgcactgatgcttctcaagtgttgaaggagctctaagatgctaagactgcatac

SEQ ID NO: 85342 - DNA, 466 bp, Glycine max
  unsure (1)..(466): unsure at all n locations
  Clone ID: PAT_MRT3847_48078C.1
gatgggggggggctgcggccccnntccttctttggcgcccccctcgnttcccnncggcccngggttgccccctctctgcacgccccctcttctcccgggcgcttgggcggtttttttacctaaccgcccccccaagtcctcctaaagatcctgatcctgctgctcggggtggtgatgccttcgcctttttcgtttctggggattcctggagccggcgagccgcggctgagctgttctacggcggcaaaatcaacccgctgatcgaggatgattcctcggagtctgctaaaagcccacttctgcctgcctaacgatcgttgctaccccaaggcaacaaggcccttcgcgatgccttctcgacgacacttangactgaagagggagatttgcgctgtccctaccgggccacccgggggagatattggactgcgtgttctagtgcgggcgcgcgctctctctctccttg

SEQ ID NO: 85343 - DNA, 311 bp, Glycine max
  Clone ID: PAT_MRT3847_48079C.1
ctaactaattggggggattttaaaaattctcggtttttcttcccccccagcctaataaaccacggaaggccccaacccagggaggcttaccaaccaacacaggaacttgaaatgattcaaacagggtgactacccagggccggaatcggataacaccccacacacctatgcataccaccacaacaacaaaaggatatcaggattaccaaacaaaaagggactaacaacttccatccaaagtgaaaaaacagggggaagggaaacactgcctacaaactaacaaaaattccccatggagaaacctgcttctc

SEQ ID NO: 85344 - DNA, 271 bp, Glycine max
  unsure (1)..(271): unsure at all n locations
  Clone ID: PAT_MRT3847_4807C.1
tcggaattcngctctagcggctcgagctcttctaaaacttaccaacacaacaaaatcgagtttccaataaagagttttgttgaaatggaaaacgttcctgctgtntntaaggagagagtatcanattgatttgcctgccnnatttctattccacccnacttatgaagagctcataatccattacctctacaagaaggtcatttacaccaanttcttctccaaggcttatttataagttaccttatcatttcctatctctttgattttctca

SEQ ID NO: 85345 - DNA, 195 bp, Glycine max
  Clone ID: PAT_MRT3847_48080C.1
gtggttgcagaagatcaatcccttgcgttcacgggggattatgaaattccattggggtttgtaaacagcccatctgaccctcaatccgctcagaacaggatctaatggactttgagggccatacggatcgtgggcatgggctcttggatatggactgactgactgatcgacggatctcattttgttagcacatta

SEQ ID NO: 85346 - DNA, 240 bp, Glycine max
  Clone ID: PAT_MRT3847_48081C.1
ataattttgtttattgatgaaattcataccgttgtaggtgcaggggctacaagtggtgcaatggatgctgggaacttgttgaagccaatgcttggacgaggtgaacttcgatgtataggagcaactacattgaatgagtatagaaaatatattgaaaaggatcctgcacttgagcgtagatttcaacaagtgttttgcagtcaaccatctgttgaagatacaatatccattcttcgtggg

SEQ ID NO: 85347 - DNA, 495 bp, Glycine max
  unsure (1)..(495): unsure at all n locations
  Clone ID: PAT_MRT3847_48082C.1
ggctcgagcacggttggacatgtgatggtctctcaccctagccaccgtcccgttacatagcccacaatagctgaagtccgtcagaaaacttacaaaagcggtgcgtttcaagggatacaagacatgcagcagccgttgctctaaaccctaaactaaactaaaaccctagccagttgtcggtgatcaccatttgtgtaaaaccgtcatggcgatgaaaactgcagaagaacacgaagtgggtatctcctgcttcatttccgaccttcctggcttccgcggaattttaaagcaaaggtattctgattttatcgtgaatgaagtggacagagatggaacagttgttcaattgtcctcgcttgatgcccctcaagaggagccagagagttttcaggaaaatggaaccaacacatccgacaatgttgtaagttatgcctctcagattgaatctttcaagtctcttgctggngactctgatgctgttcttttggaagaatt

SEQ ID NO: 85348 - DNA, 310 bp, Glycine max
  Clone ID: PAT_MRT3847_48083C.1
cccaacccgaccaaatacccctactggtttcagggtcaataatataaaacttatccggggttttaattaaacgggggctgaacttaaactaattcctgaagccgggggttaaaagcttttacacaagatgtctcaaaattgttacttagcaagaggctcctcactttgtggggattggctttgacttttttgccaagctgatcaattttataatccttaacagttttcaaagttttacacacatttttttttggaaacaaaccatttttttcccttttttaaatttccacaccaaccttaatttttcccc

SEQ ID NO: 85349 - DNA, 926 bp, Glycine max
  Clone ID: PAT_MRT3847_48084C.1
ggaaaacaataataataatgatagtgcaatgcctcatccttgagtttgtggggaattcaggaaattcttcttctcttgtgaaagaagaagctgagcaagagtggaaaagtacttatgatagttccatcactactacttttagttctggtctgcatgaattcacaatgaacatggaaggcacgtgggcctctgagtccctcaggactagtggctcacatgacattgttgaagaaggcttcaccaatcttttgcttaaaacaaactctgacgatccaagtttgtcatcagaggatggtggagagtccaagaatgacgatggtggcgatggcagcaataatgatttttatgaagataataataattattggaatagcattctcaacttagtgaattcttccccttctcatccccctatgttctaatgatgttaattagttggggaatggatcatttcaggttgaatttttacctaattttgttacgtgaaaattttgtgtttatctcttgcttcatatgtgtttacaagatttttatcgggctaagcttattttatgcctaagaagaaagagataaatgaaatttcacgtgacaaggtgaggagaaaattcaaaatacatttaagtgtttaaaagggtatgtgtgaggcacatttaggcagcatattcctcaaaatcaaacccaagtcagaagtggttgattttcttccccatcaccataaaagcgaacatgctcacagaaacatgtggattccatagagtggtttttgttgatgttttaaacagagactcttttattttctattatatttttattcttcgatcccttggatgtgtgttattgtaattctcatgatagcttgttttcgaaaacagcttacttggttggtcgtttccaccatcaaatgttcatatcaatttgtttggatt

SEQ ID NO: 85350 - DNA, 296 bp, Glycine max
  unsure (1)..(296): unsure at all n locations
  Clone ID: PAT_MRT3847_48085C.1
aacanataaaacattttttttcagacagtggggcctgaggattaataccctagagggcaatctgcatccgggggtttgtgccccccaaaatcaataaacttaccttttgcatggccgatttgcaaatctccatcaggcttggggggaaagtggaaaaagacttttccacctgcagcttttaaaaggttgaggggaagagcccttgttttgcaacatgttagaagtctaccataactaaatgggaccctacaccgcaccttgcaattttcttttcgatcagggcatactaaaaatgg

SEQ ID NO: 85351 - DNA, 330 bp, Glycine max
  Clone ID: PAT_MRT3847_48086C.1
ttgtattacaagaaacggaaagacgcctcaataatacttttcttgaatctttcaaacaatgatacctcaaactgaggattggtactcaacggtgtggggcatggcataaaacgtttataaccctaccaactctctttctacacataaccaatgccatcagtttctctcacatgagaccctcatttctgcataggaactctttgaagattcatgcaattaccaaaaactgggaccccaccaagattgtgcctcatgcttactgacgtcccattcctctgaacgcgcttcaacttataacatgcaatgcaggtctcgtgtctaacataactc

SEQ ID NO: 85352 - DNA, 211 bp, Glycine max
  Clone ID: PAT_MRT3847_48087C.1
gacatgagctctatcaactattatataattcggaatgtaattcatgagcacaacacattacatgaaacatgtcttgggtggttatttcttatgagcagtatctccttcatatacaaattacttgacaaaggattataatgttgtatacttaaataattgcaacgagaattatcaagggcatggctatagagagcgtacgtggcactaaaat

SEQ ID NO: 85353 - DNA, 151 bp, Glycine max
  Clone ID: PAT_MRT3847_48088C.1
gggcaacattggaatttcaagaatatctttcggaccccccaatttacctcatttaaaaggaaacctcctccctttacccctaatggaaattctggtttatttttgaatttaaggctccaaaaaatttcaaatcccgacctattccctacca

SEQ ID NO: 85354 - DNA, 435 bp, Glycine max
  Clone ID: PAT_MRT3847_48089C.1
ggctcgagcttaattcttttttgattttgtttggcagccaaggtgcgtctatataaaaataacaagcgcggccgtaacggtcatgtaaacgagaaacaattttttcactgacatatgatgtttcaatgactaaaacttctagagagcaacgaacaacagctatgtcatgaattaccacactgctactcagttcaaaattattggataccaatgatttaaagaacgattataaactttaactttaaaagggactgagaccacaataacgtgtgctcatcatgctctacttaagatgaagaaaccggtttgtaagatgggttgacatgaacatgctgagcaaatgtaaggattatatgggggccagtctggatcaaccaacacctgcaccgtcaagataatgctggtgacggtaaacgatatgggtcatcaattcca

SEQ ID NO: 85355 - DNA, 424 bp, Glycine max
  Clone ID: PAT_MRT3847_4808C.1
gggttggggactttaaaacaacaggctcttttacaactttttttaacaattttcccgggaccgttggaagtttaaaacccaaacacagcaacaaaccttttaagggggtttttttactaactagacccctcaccacctaaaaaaaaaaaacttgggggtgggggcggggcaaaagggccaaggggggtggggttgttcttttaaaccttaaccctgatcacgtttttcctcttttcctcctggattaggggcccaaggaccttgggccccccgttttttatttaaggtgtgaactgggaaaacttggaaaggtgggccggcaagtcaatcctggtaggggggggacaagcgcttttttttttattggcttttttaaccccttaaacttagaaaaggaaagggtccgggtacccggagattttca

SEQ ID NO: 85356 - DNA, 511 bp, Glycine max
  Clone ID: PAT_MRT3847_48090C.1
tttatatccaaaaaaggtgaaaaggaaaagagttgcttaattccacattctgaaatacaccgaaaatacctcccatcattatatcccatgattgtgggatctcacaataatatctgaaatatcttacttaaaggcacacacctcactgcccaaatctctattgtgatacatctctcattctcgaaagaccaacactaaatgagatctgaggatgtcttgtaaagttacatgaacagcctttatgcttactgccccttagcgaaaccactggcttgtcttaaagccaaataatcctatattatttgtccaattcctatacaattgtgaagagataaactaaaaaaacgtggccttccaatcttctgcagccaataaattagctaattaccttcacctgaggactgctagtcccttcaagtgtttaaccattaagaggcagtcaaaacagggtctgcatattcaacaatgcaatacacattgtaactcctgcatttctgcttgaaatctcatc

SEQ ID NO: 85357 - DNA, 1797 bp, Glycine max
  unsure (1)..(1797): unsure at all n locations
  Clone ID: PAT_MRT3847_48091C.1
gaggaagccggagaccttgaaagtagtaggctttgcaaattgcgctgtttcccacctgttgcacttgcttgggatgatacatctggtcttcatgtatatccaaatttgaacagtgagacaattgttgttgattccgccccggctcattggagttccacccagcattctgtcagtaccgttgctccggcgccggtcgtcccgccttctgcttctcggagtagcatttccatttctgtctgcgcggccgctactgggctccccctctgctatggtccgctgtttgttggcttccccattgctggtgtctgctctgctctttcgcggctcgcttgggctccggaccgtgcgctgcgggttccggctgcgctggcggccgtggcctccgccttgacgctgtcgcctcgtcgctttcccctagccattctgcccactttctgctccttgttcctttcgttgttgatgtctcagccacttcctccatttgccagcttccttcagcatctctctaagttgttatgtctttgcaaacggattcatagctattctaattttgatttctcacttggtattctttgtggctgctgttacacatattttcatcaagacaaggtggcaaatgtgggaacggaatgttagctttttttttcttcgttggtttgttaatcgttcgtctagcttcttttctctaaaggtggttagggttctaagagcaaatccagtaattgttacggcagttactgcaatggtcttgggaagcttggttcatccatcctttggtctccttatacttctcttctctcattttctctgttgtcacaacgcattatgcagtttcctgacagcatcttgttgcaaccacgaacagaataatgaaaattttgattgtaactgtgaagactatgtggggtctgaaaggctgaagttcaaatttgatggtagtttcaagcggactttcccttcagaagacaattcctccagcagtccagattcatcaaaaagttttggtgagacacaattagatttatttcaccatcgccatggcttgttgatattgcatcttgttgcaacgatgatgtttgccccatccgttgtagcttggatccagaggttggcgttgggtgagagcctcccgtggctcctggattcagtgctttgcatcggcgtcattcttcatggcatctgcaactcgaagcccgaattcaattccttcttcttgtcctatactgggatccccatccgcaatgttaggctatattttatctatctcatagctggatactggtcctatttttctggtctcactttggctccctacagagcgttttatgttatgggtgctgtggggggcatttccttcgctttaaggatgttgtgtagacggaacggggaaaagaaagaggttacttatagcagccgaaagcattctcacaggcactgaaaatttcgaaaaccactttcttactcatagtagaatgccacgtgtgtgtgtgtgtaagcatgtgccccatttagacacctaggtcattgatgttagatatttaatttcatatagaacgagcaggctttaccggtttgatgtgtttatgctggtattcctgtgaaaactgttgtaacatttagatagttaggattagtgtctttttcatgtgctgaagcgttttttgctgctgttgtataattgttttacgaggatattccgcaatatttttttgtaattttgcctgagtgtgaggaaagtaaattttttcctatggttggaggtaaaaaaacctagcacggactgtcgatttggnnttt

SEQ ID NO: 85358 - DNA, 377 bp, Glycine max
  Clone ID: PAT_MRT3847_48092C.1
aggacgacagaaggggaatccaatagtaggagaactgagaatcacattgagaaagatacagagctgaagcatgggaatttcaaagctggggaagatcatgctgaaaatgtaatggatgggcctggagcggtattggtaaacttgttgacaagtttaaggcatttgccacctgccatgcattcagtcctggttgtaatggctctcacttggttgtcttggtttcccttctttctgtttgatacggattggatggggagagaagtttatcatggtgatccaaaaggggacacttctgaagtagatctttatgatcaaggagttagagaaggtgcatttggtttgctattgaattctgttgtccttggaattagctcttt

SEQ ID NO: 85359 - DNA, 540 bp, Glycine max
  Clone ID: PAT_MRT3847_48093C.1
acgaggcaaaagtctactcagtccatttccaaggcttttggtttggaacctgttggagctaaaaaggtcacatgctcccttcaggctgatcttaaggacttggctcacaagtgtgttgatgctaccaaaattgcaggattcgcccttgccacctctgccctcgttgtctctgtatgctctcttgcttttcctccaatttactgtcattttgttcattgaagaattgactatcttctgtttactaaaatagtatatagtatcatagtgaagttcaaggttaggtttgacctaggagcacccatgtcccttcacctttgttatcaaattttgaattcttatttttattgtaggatttgtttgataaacgatcttctggtatgtaagtagtaccagtcattgacatatgttgcatttggaattatcaaatgagacttatgtcagtaatttaattgtcttatgacattcagcatagcacatgaatgagatgttaatttgtgcaaggaagtcactgccagtgtcaagcatagggctcaacctttg

SEQ ID NO: 85360 - DNA, 636 bp, Glycine max
  Clone ID: PAT_MRT3847_48094C.1
atcttgccggcgctggtccttgcgcagattgagccgcagtacatcatgtcccgagcgacgttcgtccgagagtcgagctccaagatgtactcgagcaccatctttgcctttacgcagatgctcgccgagatgccgtactcgctcgtgtgcgcgactgcgttcttcctcctgctgtactacggtgtcgggttcgacaaggcatcgtctcgcgccggttacttcttcgtcatgtgcctcctgaccgaggtctacgccgtgacgctcggccaggccgtcgcggccctctcgccgtcgatcaccgttgcggcgctgttcaaccccttcctgctcgtcatgttctcggtcttctgcggcgtcgtcgcgcccaaggcgacgctgccgtacttctggcgcagctggatgtaccagctcgacccgttcacgcgtctcatcagcggcgtcgtgtccaccgcgctgtggaaccagccggtcgtgtgccgcgacagcgagtacagcgtcttcccggccccttcgggccagacgtgcggagagtacgcgggcgcgttcgcagaggccgtgggcggatacctgggcaaccccgacggcacgggcgactgaaactctgccaatacagaaatggccaggcggtttacgccc

SEQ ID NO: 85361 - DNA, 360 bp, Glycine max
  Clone ID: PAT_MRT3847_48095C.1
tcagtggcgaaaaaggaaaaagacagatctgatcgggagactgtgaccccatggtttaagtttctttgggaaacttataggacagtgctggaaatattgaggaacaactcaaagctagaagccttatatgctgtaatctttcttcttatgttcttgtacaacttcttgatgctatacatgattcatatgtatttgcttaatgtacagaattatgcttgttcttatcttattctacctattttttattttttttttcaatttcaactgttatatgcttctttgtaacatgataatttaaggatgcatactacttgtaatcttgagcttttaatagactctaatgccatgtgcagatgacaa

SEQ ID NO: 85362 - DNA, 1283 bp, Glycine max
  Clone ID: PAT_MRT3847_48096C.1
ccacgcgtcctccaactcagagtcgggcaactcaactcttcctaattccaactttcccttcgattctctccatcgccaattgcactctctcatcgttgcgatattcaaggtcttcaaatttgaatttcgctctatttttttccatctctcctgattcaacttctagggttttgtttttctgcagtttgtaatgctcttgctgcttcacgaaggtgctttgttcaattgttctcttgtaatttagatttgccctttatgtgccatagtgctgcatccttgtcatgcaccagtctctgctctgtatttttgactcaaaggatgtgtgggaactagggcaatggcaacatctagcaagtttgatccatcttctagtagcccggacaaaccattgtaccctgggcaacgtggatcccacatagctgcttcattagatagatcaggtagctttcgcgaaagcatggaaaatccaattctgtcttctcttccgaacatgttaagaagcagttctctagcaacaaatggagatgtggaaagcttcttcaattatgtgcgttttgatccaaagttgttaacactagagcataagtctaatcgtcaaatggattttaagcgacatgttaatgctgctcttggaatttcacctgatgaatctccatctagttcttcaaaaggcaagctactgccatcgcctgtaccagaagacatgaaacgggtaaaggatgctttgggtgcaaacattgtgaaggcaagggaacgtgtgaaaatgtttagtgaggctttatctgtattccatgaagttttcccagctataacttcaaagaaaagatctcgagctgaaggtttttctaatgaccgttctaatgtcatgttaagtgatcgtccagtcttggggccaagcataggcaaggttggagttcaaggtcatcctgtcacaggtggttttgaacttgagcagcaaaagtctgatgaacgtaccaaaaatgttgttccaaacaagcgcactcgaacttctatggttgatgtaaggatggatgtgcggactaattctctcgtcaggccatcagggacagttgacagagataaggaaaagctacggattgccaacaatggtgtcgttcagagtgaagaacgaaccttacctattggaggtgatggttgggaaaagtcaaaaatgaagaagaagcgttcctgtatcaaactagatgtttctccaagtacaacattgactaaaacctgttacaccttccaagaaactaaacagggaatgcaacaaagacttgcta

SEQ ID NO: 85363 - DNA, 801 bp, Glycine max
  Clone ID: PAT_MRT3847_48097C.1
gtgggggttttttaagaaaaagcatttatgttttattagtagtaatacttcgttttgtgcctcgacaaaatagacctctaagaggtaattgtaattacatatggcaccagaattaccgttagacttccaatgctcaacacaatattcaatatttgaagttacttgaaaagttggtcaaaagagtcaaacattatgattttaaaatcttacaatttcaataacatcctgctcataaacaagtaaactacgtgctccatcaatgcttacaacattgtgacaacaaaccaggaaaaaaaaaaacctccgactgatgattcggcgaatccacggttattgcaatccatatagctgttgagtagagaaccacaaccgaatatcttgcctcacaatgatcctccaatcctcagaaaccaactttcctctaatatgatggaacaaaaaaactcatcaaaggagttcagcaacatttgaaggcagctcctcaattaccacattgtaaaacttctggatgtcaaacagcattttttcatcatcctttgtgacgaagttaatggcaacacctttcctaccaaaccttccactacgtccaatacgatggagatagttctcaggctgcgttgggagatcataatttataactaaagacacttgctggacatcaataccacgggccaaaagatcagtagttatcaaaacacgggatgacccagaacggaattcacgcataataatgtccctggtattctggtccatgtctccatgggttgctgagactgtgtggtctcgacttcgcatcttgct

SEQ ID NO: 85364 - DNA, 341 bp, Glycine max
  Clone ID: PAT_MRT3847_48098C.1
aacaatgaacaacaaaccgcgtaatggctgaaaacagcctggcaaatcagcttaagaattaagatataaccccaattttaaatggactgaatgatatcacacacggtcgctttggggctgtcttccctaagacagcctcacaaacagagggtgaaaaagggagcttttttgtcctaaaacggtctaacaactttcttattaacaacaaaaccctgatccgataatgttctgatagcacccttagcttcttcaacacctttttcaattgggaaacctttcactcaggccagacaaaagttgccacatttggtgaatgagctggcttttacatatccacacaa

SEQ ID NO: 85365 - DNA, 2226 bp, Glycine max
  Clone ID: PAT_MRT3847_48099C.1
caacacaatattcaatatttgaagttacttgaaaagttggtcaaaagagtcaaacattatgattttaaaatcttacaatttcaataacatcctgctcataaacaagtaaactacgtgctccatcaatgcttacaacattgtgacaacaaaccaggaaaaaaaaaacctccgactgatgattcggcgaatccacggttattgcaatccatatagctgttgagtagagaaccacaaccgaatatcttgcctcacaatgatcctccaatccttggaacatcgaataatgtaagttgatagctatttcaaatgaggataaaaaaatcactagaaccacgctaccaatgtccagtttcattttattaaataccattttcaaattgaggaaatgaaacaatcaagaaaaataactttaaaaagcataacatttaacccttgaacctcaaaataagcaccacagcacaccacgccatgccatggatcaactttgaataaatcgaaaaaaagaatcaaattatccctacttatgttagaataagcaaaacgtgtatgaaaaaaaccttgcttgttagaaaggggcaacaactaccaatacatcaattcagaaaataatgtgattccacattgcaagtactcatcacttgggacattcagacgactgatgataatgtaatttaaattactacacctattaagaaggtcaaacaaggtttaagagcagaaatacaacaaaaggggcaaaaaggaacaaaaaacattacataacacttacctcagaaaccaactttcctctaatatgatggaacaaaaaaactcatcaaaggagttcagcaacatttgaaggcagctcctcaataatcacattgtaaaacttctggatgtcaaacagcattttttcatcatcccttgtgacaaagttaatggcaacacctttcctaccaaaccttccactacgtccaatacgatggagatagttctcgggctgcgttgggagatcataatttataactaaagacacttgctggacatcaataccacgggccaaaagatcagtagttattaaaacacgggatgacccagaacggaattcacgcataataatgtccctggtattttggtccatgtctccatgggttgctgagactgtgtggtctcggcttcgcatcttgtcagtcagccaatcaacctttcttctggtgttcacaaaaatgacactctgagtaattgccaatgtctcataaagatcacacagtgtgtcaagcttccattcctctttctcaacattgacatgaaattgcttgataccctccaaggtgagctcatcacgcttcacaaggatcctcacaggtttgttcatgaacttccttgtgatctcaagtgcctcaggaggcattgtagcagagaaaactcccacttgaatcttagatggaagcaactggaatatatcatagatctgatctttaaaaccacgggaaagcatttcatcagcctcatccaatacaaacatcttgatgtagtctggccgaagtgactgtctgcgcagcatatcaaatacacgaccaggagtaccaacaacaacatgaacaccactcgatagaatgcgttggtcttcacgaacactggtacctcccacacatgcgtgcaccttcacaccaagataatctccgagtgcccgcataaccttttcaatttgctgagcaagctccctagttggtgctaaaaccaagggcttggcattcagtcacactatagtcaagttgctgcagaattccagagcagaaagttgctgttttcccagttccagactgggcctgttgtataacatcaagtcccttgcagaaaggaactattcccctttgctgaatagctgatggcttctcaaaaccatatgcataaatgcctctcaggagattctcctgcaagcccatagcatcaaaactgtcataaacctcatcataagatgtgaagaaatcctgtccatcggacgtaagcaactcattcatcttggtatcatattgacgagcatcaaactgtgatccctcgggtgcaattcctgccatgacttagggcgacgaaagaggtcgttgatcggagaggaaaaaaagcaaagagagtggtgagagcagttagggtttcccaaactgctcagatctacgccgcggaaagagagaaaaacaatacgtttctgcgagaaagtgagtgggagctatgagaacaaacgctcgagcc

SEQ ID NO: 85366 - DNA, 110 bp, Glycine max
  Clone ID: PAT_MRT3847_4809C.1
ggaaaactttggacaaaaaatggagtgctacacaaggccaaacatgagtgactcgaacctctcagcagaggtagaagccaccatagaagcaaagaccagagagtactttg

SEQ ID NO: 85367 - DNA, 176 bp, Glycine max
  Clone ID: PAT_MRT3847_480C.1
gaaaaaaaaaaatatctcgatatttgttttttttaaactacaattcaattctgatgttacattagctatatttcataataatttgtacttgtatcaatgattatgaaatatagctaatgtaacatcagaattgaattgtacttgtatcaatgattatgaaatatagctaatgtaac

SEQ ID NO: 85368 - DNA, 268 bp, Glycine max
  Clone ID: PAT_MRT3847_48101C.1
actcaaagatcttctcaattatatgtgccaaaaggaccgcagtattagatgtcaagagaggaatgtgaaaatgttaaactaccgaaacgatctaacccgtattagatattatgcctctatattattcaacaaccttttttaccagaataccatacctcaatttccattgagattgaattgaaaatcattattgaaccaattgggaaccaattttttaccaccgtcaattcaaaccaattaagggaccaccttacaagttgggccttac

SEQ ID NO: 85369 - DNA, 446 bp, Glycine max
  Clone ID: PAT_MRT3847_48102C.1
atcgcatttttatttctgtaatcattctcgctaatgtcaactgcccccgcgccgtcttcggcgccggcgaataacggcaccgcgcctccgacgacaactacggacactccgttcgcaccgacttccgccacaccttccgcgccgacaccctcaacttccgagtgttcttcggcggaaactccgtagtattctccggcggggacacctttcttgccaccttcggaaaactctttcttttccccttcagggacttcctctttttcttcacccggcaattcttttggttttccttcaccgggcacttcaaccacgccatcgacttcttcggcggcggcggcgtcgacatcgacaacggcggcacccaatggcgtgaggactccgaggtcaccgaattggagcttgccctcttctccgggcggatcgagccccaccactccggaggcttc

SEQ ID NO: 85370 - DNA, 712 bp, Glycine max
  unsure (1)..(712): unsure at all n locations
  Clone ID: PAT_MRT3847_48103C.1
ccacgcgtccgagcaaaaaggttgtagctgttggaggaggctatataggaatggaggttgctgctgttgctgttgtgtggaaacttgatgcaacagactgcgtttttcctatatccttttcaatatctagtttttggttcaaaatgcaaagttcttgctctgacctgcattattacctgttgctaacgtgttcatctatgctaacagagaattttcattttggttccctctgcataaagctttgataaatcttgcattaagtgaatcttactgtatatgacgaatagcgaaacaatagtaataattgagacatttaggccttcctagtaacttaattagctgaattgcctatgttacatcagggcctggcatgaccaaatgacttccgttactgtttatgcctgtgcacattgctctacctaggagcctgattactatcatgctttcaggctcattacttctaatttatgtgtcaagtctggataagctactgtgactagtactgatcggaggtactacatatgcctggataccttgacaatccagacatatgttgtcattaaactcatatctttacctttaagattaattatccttttgagatgnnttttgacctactgactcactaataatatgtatcaccataaaaagtacatcatattcgcaggaagatcacctttatgcacagactgtttactccttctcttgcccg

SEQ ID NO: 85371 - DNA, 283 bp, Glycine max
  Clone ID: PAT_MRT3847_48104C.1
ggtttggatttgaagaaaaaaaacaacttcgctgacatatatttgtttggtcagaggagttctccgaatattcctgacttatattgctcattgttttcaagcctttcaaaatagaaatagcgaagagaggataggctcattacataaaaaattggtatattgaccatacttgattgagtgtgggagcccaatgaatcgaaagattcctgtttggttcgggtcgagaaaccagacattttgaaatggatggaaagagagggtactttcattgagtgatctatta

SEQ ID NO: 85372 - DNA, 374 bp, Glycine max
  Clone ID: PAT_MRT3847_48105C.1
agatacccattatctttttttcttacaacataaaaacccaaattgaattgtcgtaattttcaaacaaaacatcaatcaatatttcattcaaatctcaattcaaaataggatttagaattcttaattcctatatttttttctttcttaaaataataattctagcggctgactcacttttttcaaattggttttcattattaaaaaaaggggacgaaaataaaataccagcctgttttataacaattggtattaatcggtggtgttttaaaggcaatctatttaccccgctggataatatttttccttgttcactaataaatggaccaattaaacccatgtttttttaataaattcagccccccccttgggtcggg

SEQ ID NO: 85373 - DNA, 258 bp, Glycine max
  Clone ID: PAT_MRT3847_48106C.1
ttccccccccccccccccccccccccctttgctctcccaatttgattatcattaattgccgtaggtcacgacggacatcatatctttaaagttttgacttactacactgtgttatttaatttacttgggagaatgataacgaattaaccaattaagcttgactgaatacctgaacagactaggcaatgtctttttaaattcaaggattaaacatgaaaaacacccacccgggggctaaacttctagatcattaattta

SEQ ID NO: 85374 - DNA, 420 bp, Glycine max
  Clone ID: PAT_MRT3847_48107C.1
ctcatccgtaagctcggctcgagaagatttaccgctatgcttctcacaattttgataccactatggactatgctaatactggaacagtgcaagcctagaacactctacgggttttcataagactcaaaagctacccctcaagtgtgttcaacttcagtgccactaagttctgatgctgacactgaaaaggtggttcaaaagggtgtgcggaatgataatgaccccaccttggtggttagaggcttcaaggagttgggggtgagtgaggagcttgttgaggtgatggaagggattggtgagttagatactactgagatacagtgtgcggctattcctgctgttatggaagggaagagtgtgctgttgagttcaccatctgaacctgacagaaccttggccttcatgctgccacttattcag

SEQ ID NO: 85375 - DNA, 295 bp, Glycine max
  unsure (1)..(295): unsure at all n locations
  Clone ID: PAT_MRT3847_48108C.1
tggggcctagatatactgtgtatcatttcatagcgagagtcattcatagtgcctggataaattggtaaccatctaacatgttataaacacgccgtcgctgagactggcatgactagagcaactgcaccaacggaaacagctatggcgttatagtagagactgagaatagctacatctagactgatgacatggatgctccaacgactgaccatcatgtgaagtgcaaagctggcactaactgcacttgcacggactgcacttgtggccattaangaatatctatgacaatgtaatt

SEQ ID NO: 85376 - DNA, 290 bp, Glycine max
  Clone ID: PAT_MRT3847_48109C.1
gtttgttagcagcttaaatgtagtaatcttttttagtataaattgacacttagaatacaaaaggagttgtgagagcgaggctacaagaaagaccaccagacgactttcaaggggccaaccatcacaacaataataatagtaataagaaccaattgcgaacgaaaggtacagtcggctataaatggctcgtgccagacggaaaaacaaaacagcaataggcatagattgatgaatgacgaatatagcaatatatagaaccttagagacatacttcacattacgaaactaca

SEQ ID NO: 85377 - DNA, 1068 bp, Glycine max
  Clone ID: PAT_MRT3847_4810C.1
ttctctcgtccgcccacgcgtccgcccacgccactagttatcttgtcctaatagaattagagcaccccttcagaaaaatggctcatcctcccacacaatcgcagtctagagcagccaataagccaaaacgctcaaaccttcttcgttgcattgccattttcatactagccttgatcatccttgtgggcattgctgtgatcataatttggctagttttgaagcccaaaaggttggaatacactgtggagaatgctgcaatccacaacttcaacttaaccgatgcaaatcacctctatgccaactttgacttcaccataagatcctacaatcccaactctagagtctccatatactatgacactgtggaggtgtcagtgcgttatgaggaccaaactctagcaaccaatgcggttcagccatttttccagtcacataagaatgtgaccaggcttcatgtgggcctcacggcccaaaccgtggccctgtatgattctgtgcctaaggaccttaggctcgagagatcctctggggatattgagttggatgtgtggatgagggcaaggataaggttcaaggttggagtgtggaagtcaaagcatcgtgttttgaagattttttgttctcctgtcttggtgcacttttctaaaggaaagagtttcgaaagggccccttgtgatgtagaactctaaacaaggctcactcacgtgttctctctaccccttgttattatttgttcttttttggtttatttttcctgagtttgtcattgttagttgatgctatcattcttttgtcagcgttgttgtaattttattcctggcttgtttattggttttggttttcctatgttgaaaaatagttgtgtcatgtgtggatataatacgaaagaaggaaaattggctgttattcatccaattgaggcaagattgtaacttgtaatcattctgcacgtattgtccttcaaagttatacagtttttaatttattgggctaccgcatatagtgacactttgactggtcagtggtcatatcatgagactcatgaatagattggatttcagatttttc

SEQ ID NO: 85378 - DNA, 479 bp, Glycine max
  Clone ID: PAT_MRT3847_48110C.1
gggcccaaaggggggggggttctcttggcccttaggggccccccccccaatttggggggcccccggggccccgctttttttaatttgccctttcccatttcccccccctggggggtcccccttccccggggggtggcccccccccttgggggcccgggaacccccccggcaggggggccttccgggcccctttgggccctttaattttgcccgggggttcccagggccgggggggttttccccccccaattgggggggttcttggggggaaccccaattttgggttttggccccggggtaataaaccccgctttcccctagggtggggggggggggtttttttccctcccggggggggccccttgtggttgggcccccccgggggaattttcttgggggggaatttccttaaggggttttggccggggggccccaaatacaccggggggggccccccccttttttcccccccttttttt

SEQ ID NO: 85379 - DNA, 163 bp, Glycine max
  Clone ID: PAT_MRT3847_48111C.1
atattgatggggaaacaactgacaaactcgtggatcattcaaactttaaagctcagaaattataacaaatcttgaagttgttgacagaaaccatcaacacacgtcgactctaaactgtcgcttagtaagaagttcctcagtttggcatgattttctctcactt

SEQ ID NO: 85380 - DNA, 212 bp, Glycine max
  unsure (1)..(212): unsure at all n locations
  Clone ID: PAT_MRT3847_48112C.1
agctctcatccggctcgaggcnnnnnccttacatagtgcaacaagccaggaacggcgattgagcttaccccaaaaacaaaccctcagagacgggacttgaaggaagaccgaaccgatgcagatacaaaccacggagctcatgacatcgccacactccaacacacaggccatcgcggaccgagggaccactggagcaaaaacgcccactgcac

SEQ ID NO: 85381 - DNA, 421 bp, Glycine max
  Clone ID: PAT_MRT3847_48113C.1
ccaaacctcctccagaaccaagccaaagggggtccaaaaaggcctaatggcgaaaataataaccaaatttaaaaggaagggttttacctgaaaagggtgaaaccccgtaccggggacccgccctttggctaaaaacaccaaggttattttttttccaaacccttccttaaggggttgggggaatacctttgccccggccccggtggttgccagaaccgggaagggaaaaaaggtggtaccaccgggccaaaaaataatcgaacccccaaccccaccccaaccgaacccggaaacaatccgggggaccttgccaatgaccatggaaaggaaggtaacccatgaaaggaatccattgaaaagggctaccaagaaaatggcttgggggtccccgaaggccccggcaacctgccaaactccccac

SEQ ID NO: 85382 - DNA, 413 bp, Glycine max
  Clone ID: PAT_MRT3847_48114C.1
aacatacaaccatttcaactttttacaaaagtataaattcagtgatgcacaatcttaatcagttaatctgtggtctaacatttatgtcaagtaacattgtgagaaacattgatgttagacatcagaaatgccatgaagttacaagtgaaaagaaaactacacgaactgaataaaatccacactgaagccttaaacttagcatcactcacagcatgctatctgttctagctggaagcctcttgaagaagttgcttggcacagaaggaagcttgctgcgaaactttgggtgccgcagatagtacaagcctgctaccatagccaccacttttggtggtgttgcatagagaaccacagcagaacaaaagctgaacactacaaagaggctggttgctcttgtgtctctccaactcagt

SEQ ID NO: 85383 - DNA, 650 bp, Glycine max
  Clone ID: PAT_MRT3847_48115C.1
caagaatcttcctttttcttaacatcatcaacttctctctcatttccttttttttactataagagtctttgctttttggtctctctctctttttttttaccatttttgacacacgttcatcacaaagataaaaaaagaaaatttgtcacaatcacgatagtcatggtcaacaacgccaaaagccgtcctttttgagttccctgtcttggatcctgcaagaagcaaagacccttttcttgaatctttatttggagctctggtttttgtttgtttgcacttgcagggtggtttagagattttgatgcttaaacgcctacccaagtttttgtttttgtttggagttgatctttgattgattcttgtgttgaggtttggctggacttgatctgattcgtttaaagttggaagctttggattggggcaaggttctgttggggtttgattttgttcttttagtttgatcttgaagttttaatatttggtacaaacccttggttggtctttggggaattaacgtctgtaagcactgtttgtggtgttctgagaaggaattgaagtggatagtgaaaagaaggttcttttttcttggtgggtggttgtaggtgatgaaagggcgtttagccctttggtgaaatgagaagcatatcaag

SEQ ID NO: 85384 - DNA, 296 bp, Glycine max
  Clone ID: PAT_MRT3847_48116C.1
tttttgttttttttttttgcagccgttattaattctggggggtagtaaaaaaatccgtgcgaacccttggatagaacctgaaatttcggacctggtcccgtggggttactaggttgccctataggatatggatttacaggtgggggccttggaggaaatacttatgtcgtggggaaaatgataatccgttttcaattcccatcaaaaaatgtgctccaggcttaaatctgaaaggtcgggtgtcctaatgtgtgagccaatccacattattgtgggtgctctaactatcatctttt

SEQ ID NO: 85385 - DNA, 332 bp, Glycine max
  Clone ID: PAT_MRT3847_48117C.1
accaaaaaaaaccccgggggggtttttttgggatttggaatccccaaaccaaaaacccctttaccggggtttttttaaaaaaaaacctaataaaaaaaaccgggtttttttaggaaaaaggattttttggggggggggggggggacccgggaataaggcctagggggggtgggaaacaaaacctggggcatttttttggaacccctgggccgattccggggccctttttaaagggggggaaaaaacccttccaaattaacccttccccctccttaaggggcggggaagaaggtacctttcccacaaaattggggggcaaaccccctttaaag

SEQ ID NO: 85386 - DNA, 408 bp, Glycine max
  Clone ID: PAT_MRT3847_48118C.1
ggctcgagaattaattgagggcataaattgcttatcatggatgatgatcgaatggggcgaaaggcaaggtcttggctttaggctgaagaaagattgtgaggctaaacggatactaatcccgcatcactaatgaatctcatgaccattggtatggctgccaaacatatgaccgaggtgcaagaggagcatggttgtgtacttaaagaagagatccatgggacggcgggcaaaaactacacgtgcacggcggtcgagggcttcaccaatgaccaccgcataggtcaagttggggccacagtacactcttatgggaccgacacccgtgacagctacgaacacggtgttatggaacataacggtcatggggtggtgaccgttcgaagaaagaggtcaagttagcatcaacac

SEQ ID NO: 85387 - DNA, 1116 bp, Glycine max
  Clone ID: PAT_MRT3847_48119C.1
catcccagtgccagttcttgcagcttccagttcatcccaaaataaacaagatagttagactgacttacaccaatgcgggaaatggcattttggcattgacatcaaatggtgatcatcttctttggaaatggcctcgtgataaccttaacttggatggcaaggcgactgcacaagtttcccctcacatctggcaatcaaggagtggcttgcaattgatgagcaataaactaacaagttcttacagtggagtcccagtttcctgtttttctttatcaaagaatgattcatatctcatgtcaacatctgggggggcaatctccttgtttaacatgttgacttttaagactgtgacgactatcatgactccaccccctatggcaacttgtctctccttctaccctcgtgataataatatacttgccattggtatggataattacagtataattatatacaatgtccgtacaaataagattataagcaagcttgagggccactccaaaagagttactgcccttgccttttcaagtagttttgatcttcttgtttctggtgatataaatgctcagatttttgtatggaacaccaatggatgggaaaaacagaaagatggatacttgcaaatacatggacagaaggtgccagaaatactatctgacactcacattcagtttcacccataccagaggcacttccttgctgtaagaagtaattatcttgcaatgcatgaagcaacagaactaaaatgttgtaaccagtgggttccagaagtttcaatggttatctcccaggcaactttctcatctgatggccaggctgtgtatgccagttttgttgatggaaccgtgggaatatttgataccttgaaacttcaaatgcattgtagggttaatccctcagcttatctttctacaactccaagttcaagcatctatccacttgccattgctgcacatccacagaagccaagccaatttgctgtggggctcacagatggtagggttattgtgtttgagcctcaaaagccaggagaagattggagcaagtttagccttgatgataatgaggtcatcaacacaggattgtgggagtgagtgagcagtctcagaggaggtg

SEQ ID NO: 85388 - DNA, 834 bp, Glycine max
  unsure (1)..(834): unsure at all n locations
  Clone ID: PAT_MRT3847_4811C.1
acctgggaaacccaaagagcccagcatagccagaatatgaaacctcacgtttctggtgaaagctctaatttggccaaggagtctagcagatccgtcggagagaagctccaccaggtttgtaaggctgccatggtggcaatcatcaccgatggatccaaccaacctagcagtagtagtaggcttctcaccaatcaaaggttgagcctccaatcagaagacccaattagaaccttaatgttcttggtctcttggagtcacacatagctaattaaatacactcaaaatcgtgaaggaatagatcgattgaaccaaactcttctaagtttggagaaaattgaataaaactatatgggtgggccaaaattcattcatatatgttgtcacatatctatataatattactatgtcaatatatacatgcagggagtggcgtaaaaaatcttataaggtttcatagcctgatattatatacaccgcacggcagcaacctaaggacaaaaaacactgaatcgggctacatctgtatatatatgtgtgtacacacaaaacaaaaatctgcctatttatgtatgctcgcggctagctgtaaaatgctctgttataaattagattccctttgatttctagtgtacgttcataattaagcttgtgcagtctgaatctgaaacactagctgctggttcatttgattccttctgccattggaattaagggtgaagacagctttggatatattcgtgaattcggccaacttagacttcgttttaaaaaaatatattaaacgattttgagtgttaattaagattagttcggagattcgatctcnnnattttt

SEQ ID NO: 85389 - DNA, 353 bp, Glycine max
  Clone ID: PAT_MRT3847_48120C.1
ctctctcccttgtttgatctcaccgatcaattttctcgtattcactcactcatccaccatcgttgcttcaattactcaataagtacacttctttcctcatttttctatttcactttagctctgttgtacttcttcttttttttttttttttgtcgttgcgcttcttttactttaccaatgtactgttctctgagtatgctaacatggactcatttccccatccaaactcaacctgcttgctttttcaaatattttatattgttcaactggtcaaccattaccataaacattcactgatctctatatctttctcactagttttgatacattgagtttattctcttattgccttt

SEQ ID NO: 85390 - DNA, 657 bp, Glycine max
  Clone ID: PAT_MRT3847_48121C.1
aatcagttaacactaagttacttgtctgtagtttgcagtttccacacctttgctgctaggagcattgacttgatataagaaacaggcaccaaagaaactactgaagatagggtacttagggcattcaatactactataggatactgttggactttaacataaggggcacaaacacatgtcattacatgtaaattttgtgtgagaaaggttattacatgttagcacgtagcaatttaaacaactcatttttgctacaaatcttgattcataccagcagcagcaagaagcaaaaacaaccccctcatttttgccactagaatggcatcaaaacatctccttaagatgagtgcattctgggagtctgaagaatctgatgtgtagtcaaaatatgataggtgccaaagcaacacggcattcctaacccttcaaaatttggccatttaggctactgcccaagagtaactatgcagctgatttatctgattctctgttctgaaactatttgtagatggaaaagtgcagaagatatgaagccctatgacgaacctttgatgcatatgatcggaggtttggggctgaaatcaaggtagaacaatgtcgaagattaagagagaacatctcatagataacaggattgtctttcattaatgagttgga

SEQ ID NO: 85391 - DNA, 3518 bp, Glycine max
  Clone ID: PAT_MRT3847_48122C.1
tgctcacggactacccgggtcgacccacgcgtccgcaaagctggtgcttctttttctctgcagcagcctcttcgatctcgctggagctgaatggctcgaggccacgggcaaatgcagatgcagatgcaacaaacgcagcagcagctgcaggccacggcggcaccattctcgacctccactcctcctcctcctcctccttcctccggcggctccgcgtccgaggcaccgccgaagcaggtggctcaagcaatggacaagctcggacaagccgaacgaatcatcgccgacatccgaatcggcgccgaccgcctcctcgaagcgctcttcgtcgcggcggcgcagcctcaccaaggcaacaagcctctccaagtcttcctcaaagaagacgcatgcatgcgtcagtatcttcaagaccttcggtcgcttggtaaggagctagaagagtctggagttctcagcgaatcagttcgatcgaggaaagacttttggggcttgcatatgccactggtttgtccagatggcgctgtggttgcgtatgcgtggaaacgacaacttgcaggacaagcaggtgcttcggccgttgacaggaccaggttagctctcaaagctttcactgatcagaaaaggcgttttttcccacatcttgatgatggacttgaaactagtgaatcagcatcgaagaaatgttgtgggtctgaagaaattgcagtggatcccaaggaaggaattagttttctaaggacgctgccggatgttctgaagtccttggagaaggatgtaccaaatctgaaaatattaacttttgaacgattggactggttaaaaagagcttccacacttacctcgtcaacaaatgagaattctttggaacataactatcatggttcgaataagctaaggctaggatcagtgggaaccgtccctgcagagaaggttgcagtgatagaattgttattcccgtgtgtcttcagggctgttatatccttacatcctgctggttccatggatccagatgctgaggctttctttgctggggatgagagcggaagttatgtgcatgcaagggggttttcagttcatcatgtgtttagacatattacggagtatgcagcaacagctctgcagtattttcttgggaaccaatctgaaacgtgtctgtattttcttctgcactggatttgcagctaccagacactgttttcaagaccttgcagcaaatgttcccggctacttgcaatggataaacaatcaactttattgttacctccagttcatcgtccttattggcagttttccttttctaaaattttgttaaacatatcctcaaaggaccagaattctgatactactcaggcttatcatattgactgcctctctgaggaaacataattgcatctaccagtgactcaggttggaaggtaaggggttggtgaagcgatttggttatctttggtctatatttttcatctcttagattggaattggatcttcaggaaattgacgagtgccttgcttgttttgtaagcctcatgaaagtggcagccatctgttctaaagatttctcagatattcattgagattggttatttggatattgtttttttttggttttctcttataactaattcggctcgagggccatacaaagagcaagccctgagaccagccaagtgcagatgcagatgcaacaaacgcagcagcagctgcaggccacggtcagctccattctcgacctccactacctcattccagccttactccttcctccggcggctccgcgttccgaggaacccccgaagcacagaagccacgctgtgcttacaaatcgtcaccgaagaatgaagatggtgcgctgctgtcggtgcttcgcctgagtctcattccgtttgcgcccactatcacaggttgtgctgaggcttaactggttcttgaagcatatttcagagttttatcagagaacaaatgggttatattgggactcacggtgttgcagctctgcacagatataaatatagtggagtagatcattcctatgtggccaaatatgtactacaacccttttggagtcgctttgttaattttttccccctatggatgcctccaaacatgataactcttatgggatttatgttcttactagtgtctgcattgattggttatatatactccccacaattggacacagctcctgctagatgggtccatttggttcatggactaaatctagttatatagcaaacatgtgatgctgtagatctgaagcaagctagatgaacaaattgaataagcccattgggggagctatttgatcatgggtgttatgcacttacttgaacaatttaagcattgttattaggtagcacatcgatgtgtggaagaacttctatatggctgtcgcaaatatctggacatcaaatttatattgtttggaaggtaaataatttggttcaaacacttaaacggcatgatatgagtgggccttcagagggtattatgatgatatgaatctgtcactttttcactgctatcgtgggtgctgagtggtgggttcagcaatttggaaagtctttgccattgttaaattggcttccttatcttgggggaatcccaacattcaaagctatattgtgtttaatgatagcttttggtgttacaccaacagtcacatgcaatgttagtaatgtttataaggttgtgaaggcaaagaatggaagcatgccacttgcattggcaatgctttacccatttgttgtacttgtgggaggagtgcttgtgtgggattatttgtcaccatcagacatcatggggaaatatccacatttagttgttataggaacaggacttactttcggatatcttgtggggaggatgattttggcacacttatgtgatgaacctaagggtctgaaaactgggatgtgcatgtccctcatgtttctcccattggccattgccaatgtacttgcatccaggctaaatgatggggttcctttagtagatgagagactagttcttcttggttactgtgcattttcagtgacactatacttgcattttgccacatcagtcattcatgaaattaccaatgccctgggaatatattgtttcaggataactaggaaggaagcttgaatccacccaagatttcctttagcttgcaagtcgagcaaaatattggcaagggtcagtactaattttgctttatttgactaacatggatcttgtaattatatattgattctttatcctttttttttaagttcttaagttttatatgtgaccaggtctgttgaaatttacatcgttgattatgatcacaatataagtcatacaacgttttatcttttaatcactgtaatcttagtgaattttccacatgaaaaaaaaaaaaaaaaaaatatcagcatgtgaatacattatattgacctgtctgcactatttcttattttaaaatgatgctgactacaatgtagtacacaactaccttctccgtataatggttattatataatcactac

SEQ ID NO: 85392 - DNA, 264 bp, Glycine max
  Clone ID: PAT_MRT3847_48123C.1
cccatctcagcccttcaagggggcgccgctgattttttaacttgacatgaccattcagaccgtttttctcatcaagaccctcaccgttcttggcgccgaggtttgctggttctcttgttacatcttttccacttattactacttccacgtcttcatttttcgtttctgttccgtcttttttaacttgtggtagttgtgtaacatttttttcaatctattatggataatctctattccttattatgctcttcatgtttaattttt

SEQ ID NO: 85393 - DNA, 441 bp, Glycine max
  Clone ID: PAT_MRT3847_48124C.1
cccacgcgttcgcccacgcgtccgcccacgcgtccggccacgggcaaatgcagatgcagatgcaacaaacgcagcagcagctgcaggccacggcggcaccattctcgacctccactcctcctcctcctcctccttcctccggcggctccgcgtgcgaggcaccgccgaagcaggtggctcaagcaatggacaagctcggacaagccgaacgaatcatcgccgacatccgaatcggcgccgaccgcctcctcgaagcgctcttcgtcgcggcggcgcagcctcaccaaggcaacaagcctctccaagtcttcctcaaagaagacgcatgcatgcgtcagtatcttcaagaccttctgtcgcttggtaaggagctagaagagtctggagttctcagcgaatcagttcgatcgaggaaagacttttggggctggcatatgccac

SEQ ID NO: 85394 - DNA, 845 bp, Glycine max
  Clone ID: PAT_MRT3847_48125C.1
tgtgcatgcaagggggttttcagttcatcatgtgtttagacatattacggagtatgcagcgacagctctgcagtattttcttgggaaccaatctgaaacgtgtctgtattttcttctgcactggatttgcagctaccagacactgttttcaaaaccttgcagcaaatgttcccggctacttgcaatggataaacaatcaactttattgttacctccagttcatcgtccttattggcagttttccttttctaaaattttgttgaacatatcctcaaaggaccagaattctgatactactcaggcttatcatattgactgcctctctgaggaaacataattgcatctaccagtgactcaggtataacccaagtgcccaattcaatgtggaactaccaggagcaagagtttccatttcattgttgtatgtatgttccccttttcctgtcatgtacaggttggaaggtaaggggttggagaagcaatttggttatctttggtctatattttccatctcttagattggaattggatcttcaggaaattgacgagtgcctggcttgttttgtaagcctcatgaaagtggctgccatctgttctaaagatttctcagatattcattgagaagttctcacgtataattgccactagaccaaaaagtacaagataggaacattatgacctgcgtatgctaaatgaaagtgccagctgactgtaatttttgaaatttatcagcatgtgaatacattataatgaccgtctgcaatatttcttattttaaaatgatgctgactacaatgtagtacacgactaccttctccggataatggttattatataatcactac

SEQ ID NO: 85395 - DNA, 652 bp, Glycine max
  Clone ID: PAT_MRT3847_48126C.1
cccacgcgtccgcttgccctcggcctctaacccttctctgctctctctcttccatcgctcactctgacttcgcctgcgatacccaccaccaccatgcccacaaccttccatctgccgtcaccaaccacaccttccgccaccgttaccccttcctctgtttcacccgcattggaacccttcgctccacctcttctctctttcgcatttttctggtttttttttttttcagattcgagagctcaatcgcaacaactccgtaagattgcgaacgtcgttccgatggtcatcgttgtcgtcgaatccaaagtccaatcgaccacctgcgctgcccttgtgaacgtgtttgcgtggacggtgtgaccaacttcttcaacaccgctcttcatttttctgggtttttagcaaatgctttctctttcattttttcagatcttcaccatgaaaaacattctctccctcctttgtgcttgtcgccaccgacaccgtccctggatctgttggccttgtcaacatcactaaccatttttatttcaattttagttgctctgaaattgtataatttggtttggagggcttgatatttgaaatgaatgagttactttctgtgagaattttgttgattttatattccctgagtatagattttttgggg

SEQ ID NO: 85396 - DNA, 196 bp, Glycine max
  Clone ID: PAT_MRT3847_48127C.1
gttatctaacttatgggaggtatatatcaacattaccccttggacctaactaactcaacccgtcattaagtggccattgatacacatgcagtttatttaaacgatacctttcgcaatattcaaaacgtagctcacattctttaggcggatactcacgaatctccaaccaaggtcagtacttcattttccaaaactc

SEQ ID NO: 85397 - DNA, 181 bp, Glycine max
  unsure (1)..(181): unsure at all n locations
  Clone ID: PAT_MRT3847_48128C.1
gggcacccaattcaagctgaggctctcaaggacggttcatctgatcttctattacctgcaactgatggctaccctgacgatgggattgcgggggacggaagtancttacttccaccaacatggaggactgcatggagaaccggaaatattcctgtcccacgcccgcatgtgccatcataca

SEQ ID NO: 85398 - DNA, 415 bp, Glycine max
  Clone ID: PAT_MRT3847_48129C.1
acattcaattaaatttattggtttgggatgggaaggcattattcttttcttttattaaattattcaaaaaacctaggcgaaaaggtaagggcattaaaaaaagccttggcctttttaaaggtaccattccgaaggaggtttttccttaaggaccaaacccttttgcaattccattaaagcctaatttcttgaggtgcctaactagggtatttaccaaatggagttaaggcctttccagtcaaggtcctttggcaaaccataatccaggttctttcctttacctatctgaagccaccttggccgtaaaagaagatccgccgggattggaccttctttggaacgatgggtggcctctggatttctttgaaaccaagacctttcatcatacccttaacaaataatttctccaaactca

SEQ ID NO: 85399 - DNA, 535 bp, Glycine max
  Clone ID: PAT_MRT3847_4812C.1
ctacttttttaattttttactttttaatttttaaaccccagaaacaaccccaggggccccgggcaaatttaatacccgacatcccttcttggggcaaaaaaaaaaaaaacccaaaaaaaaaacggcaacaaattttctttccttcaaacaccacaaccttttaattggggaacagccctctaccccccaaaatcaaataaaaaaccaatcttaaaaaacagggaaaaaaaaaaactcccaaaaaaaggaaaaaaaaacaaccaaaccggggactacttaaaaaaaaagggcccccccaccccctggctccaccaaaacaaaaattccggagtacttgacacgcggaaccccaaccccgtcccccagaccaactacattggctgcaaccccaccggcaaaaccccccggaaaacctaaaaaaaggccccccccgaaaaatctcaccccggataacccccaaccccatccggggaaaaaacctgcacccccccccaaaggaaaaaaccccaaaaagttcccctaaaaaaaatgcccc

SEQ ID NO: 85400 - DNA, 366 bp, Glycine max
  Clone ID: PAT_MRT3847_48130C.1
gggtgttatttatttatttttttaataattttaaagttgtgttcacaatattattttttttattcatcataaaaagagattttttttggggggaaaaaaaaagcaagcggagaaattgagggtttttttgaaaaaaacattctcaaacaccaaaaaaaaggaaggaagcgtgtgacaaagtagacaaccccatataacacccgagggggcaaaaaagaaacaaccaaagaggttgttgcttaacccagggggaagcccggaaccttaagaggggaatttataaaccaacaaacccaagggggggcccaacagggggggggggaccgcaaccaaaaaaaaagacgcccccatccctaaggacgcctg

SEQ ID NO: 85401 - DNA, 235 bp, Glycine max
  Clone ID: PAT_MRT3847_48131C.1
gaacaaatggtttcagagctagagagttacataagctgtttgcaaatgcaggtgaacgctcttcagtttctgtgccacacacgcgttagttaatttctatgtcttgcatttccacaattaattgagccataaactatgttaaattcaagataaattagttattgaagaaaaaaaaaaaaaaaaaaaaaaaaaatttttttaaaaaaaaaaaaaaaaaaaaaaaaaaaaaaaaaaa

SEQ ID NO: 85402 - DNA, 213 bp, Glycine max
  Clone ID: PAT_MRT3847_48132C.1
aacaaatccaaataaataattcccacccaaaatctaacgcctcataacttatcaaacatcgtaatgcaatacaataatcctgaacaaaatgttatatattatcaatatccatctactcaaccaaatgaaataaaacccttaacgtaaaaacattaaatttgcctcaaaatatcaactaatacacatgtgaaccataaatataaaccctcaaaa

SEQ ID NO: 85403 - DNA, 330 bp, Glycine max
  Clone ID: PAT_MRT3847_48133C.1
ggcagcggaagatgaagggtggaacattatcttggggtcaaaatcatattcaattacacgcagtatttaacaatggcctgcttgattgtaacaaaaagaaaaaacagaggatggaacaatagaatagaagtaacatcgaccacatgataccttcctgtcattccttgttcttcttcatcttacaaaagcaattggactctgtctcaatatattgggttacctgcagggtttatcacaaccctccctcctttaagagatataatgttggctggatcgttaaaaaggatgaaatggtcgccagtttgttcctccaggtgacaatttctttga

SEQ ID NO: 85404 - DNA, 1727 bp, Glycine max
  Clone ID: PAT_MRT3847_48134C.1
ggatgttaaagtcggttcctcggtgaagtcaaggttggtctcttctggtctgttctgttcttctacgcagacacataacataacacaacgcacctcttcttcttcttctttcccttcaaatttcaacttcttcatccattttgtgctccaaacagcacaaacactgcaatcacaccgtcttcgctttctactcatctaaaagaatagaggttcatgggttgctttggcttctgcaaaggagatgatagtgttacagttgctgacagaggacctttcatgcaaagcactcctactgggaaccccagttatcatggaagacacacagcagtaactgctcctcggactataaattttcaacctattgctgtcccttccatcacagtagatgaattgaagtctttgacagataattttggctcaaaatatttcattggtgagggtgcatatgggaaagtatatcaagccacattgaaaaatgggcatgcagtagtaataaaaaagttagattccagtaatcagccagagcaggaatttctttctcaggtctccatcgtatcaaggctaaagcatgaaaacgttgtcgagcttgttaactattgtgttgatggtcctttccgtgcccttgcctatgagtatgctcctaaaggatcccttcatgatattctacatggacgcaaaggtgtcaagggtgcacaacctggtccagttctctcatgggctcagagagttaaaattgctgttggagcagccaggggacttgaatatcttcatgaaaaggcagagattcatatcatccatcgttacattaagtctagtaacatacttctttttgatgatgacgttgcgaagattgctgattttgatttgtcaaatcaagcccctgatgcagcagcacgtcttcattctacccgtgttcttgggacctttggttaccatgctccagaatatgcaatgactggacaactcacttcaaaaagtgatgtttatagctttggagttatactgctggaactcttaacggggcgtaaaccagtggatcatacactgccacgaggacagcaaagccttgtgacttgggcaacaccaaagcttagtgaagataaggtgaagcagtgtgttgatgttagactaaagggagagtacccttcaaaatcagttgcaaagatggctgctgttgctgcattgtgtgtgcaatatgaagctgagtttcgaccaaatatgagcattatagtgaaagctctacagcctctactgaatactcgttctgttcactcaaaggaagcacccaagatgtaataaaaacatgtaaattccaaaatcattcatttcttctttcagactggagtgcgttgaccaattgtccttgtgacacgtgtcagtattacataatctgaagcatatagtattaaagtatattttgcgttattatatttgtatctcaactaagcatgttatagctgatataaaaaaaatagtgatggtaggtggcaagagcctatcatagatggttaagtttatggtttgaatacttattaatttgtatttgtttgtttgtttttcctataagccgtgtacaagtgaatttataatattacttgtcatgtacatcacatgtctagttgctttactatttcaaaaagaggttttttcttttttttctctccctccctgccgtgtacaagtgaatttataaaatattacttctcatgcatgtatagttgcattac

SEQ ID NO: 85405 - DNA, 160 bp, Glycine max
  Clone ID: PAT_MRT3847_48135C.1
ctgcaagccgagcggaggcaccatcccgctgtgcatggtgggggagtatgacctgccggtggacatcatagaccggggcgtgaccaatatgaaaatgatatccccggaacacgggcctgtggacatatggaggacgctccaatccgaccaatacataggt

SEQ ID NO: 85406 - DNA, 864 bp, Glycine max
  Clone ID: PAT_MRT3847_48136C.1
cggacgcgtggggggttagatgtcagagttgcttcccctcccccaaattctataccgaaacaacttttgaccaagaaaattaagtgcttattctcattgtttctttatctctctgtattttcatgtatcaagcttcttacctaggtagttgtttctgattttcaacttaactttttcctactagctgctgttctggtattatgcttatgcttattttttgctcatgtcaatctttttgtgagcataattatgagcattgaaaatgagatgattatgtcatctgaggaaagaaatgtctcttttttcagatgagaatcatttctcagggttgaggatagacagttctaaacttggtgcagatcctggtatgcctgttgaagtttcttcagaggcagaagaaactactaaagtaggaaataatcgtaggcctacatatcgctgtaagaagtgtcgacgacttgttgcattgcaagaacatgtcatagaccatgttcctggtgagggtgagagagcctttgagttccacaaacggagaggtggcaaccctttcaacaaatctgatgaatttgagtgttcatccatatttattgagcctctacggtggatgaaagctggtaagaaaacattcaactacaatattataatgtctctaattttccaacgaactgtgaatttatgcttcactttttgtgcagaatgttcctataattttgtacaagagatcaagaatggtcttctataatattctgaaatttgaagtgtgttaccacttttttattgcctcttttggaacatttactgaattgttttttcttgactgctccctacatttcactttgtctgatgtttaaagtaatgtacaca

SEQ ID NO: 85407 - DNA, 223 bp, Glycine max
  Clone ID: PAT_MRT3847_48137C.1
tcagtggtgctgctacaagaagacaaaagggagttcaggatgtaattacaccatagaagggggttcaactgtgtgattgtttgttgttgtaaatcgtgcttcatcttttgtagttctgtgtatgagtgtgtattttctcatacatgaaaatgtcgtgctgcggtgcttactgtagttgaggaagctcctgcacttactgcatccgttgcaggggctgcaagat

SEQ ID NO: 85408 - DNA, 558 bp, Glycine max
  Clone ID: PAT_MRT3847_48138C.1
ttcagtccttcaactggataattcatagtttgttctccttttcactttcattgctaatccatgcccgtgattagctaaagatcatcaacaaaaacctttagtctgcaaattctcatctcaaaatatatcaatgtcagcacctagtcatgcaattgtaaaggctgtggcaacactagaagtggcgaatttatcaatgaaatgaaagggttcctagaggaatgtgagggagaacttgaggtggtgaaagaggagcagacaaggatcatggagcttgtgaagaaaacaaacgagtactatctagcaggagcatccaaagacaacatggtaaatccttttcaactgtttgttattgtaaaaagttttgttgacatggtagatcaggcttgcatagaactaaaaaagaaggtagaaaagaagaatattgtgggaggagaggctgtgtcaacaacaccacctttgtcaccatcaaagaggacgccactcagattccctaactttgatttgtattttctgtcaaatgtgtcagaatctacatcttctagccaatcagaagatgat

SEQ ID NO: 85409 - DNA, 302 bp, Glycine max
  Clone ID: PAT_MRT3847_48139C.1
gacacatcatccgttctagtctcaagttctgctcttccaactcctagagagcttttctctgcactcatgggcaaggtcaagatcagcatcaacggatttggaagaattgggcgtttggttgccacagtcgctctgcaaagagacgatgttgaactcgttgccggttacgaccctttcattatcaccgattacatgacatacatgtttaaatacgacagtgttcacggacactggtagcatcacgatgtcaccgttaacgaccaaaaaacccttctcctccgtgacaaagcaatcactggttt

SEQ ID NO: 85410 - DNA, 1249 bp, Glycine max
  Clone ID: PAT_MRT3847_4813C.1
cagctattacttcgcatgcacgcgtcagaagctcggaattcggctcgagtagattttccttttcccgaattcacagttccgtgcgacgaaaacaaaaaaatccaaaacattttccatggctcttctaatccactccctggaaatgtccgttactccccaaattaccccaaaccctaaccttaagctgcgcaaattcaacagcttcaaaccccacacaaagggcaaagcgattgggtcaacgcgtggtgtgagaattttctgcaaggtgaaagattgtgcggttttggatgagaacgtgaattcgtacggtcaattttcggttccggtgaagcaagggtcgaagcagagcaaagaggaggaggaagagaagcagaattactatgtgaatgtgggatatgctatccgaactctgagggaggaattccctgatcttttctacaaggaacttagctttgacatctacagggatgatattgtgttcaaggatcctatgaacacattcattggtattgagaattacaaatctatcttctgggcactacgatttcatggcatgatgtttttcaaagctctgtgggtggaaataagtagtgtatggcagcctgttgagaatgtcattatggttcgctggactgttcatgggatcccacgagttttatgggaaagtcgtggtaggtttgatggaacctctgagtataaacttgacaagcaaggcaagatttttgagcatcgggttgacaacattgctatgaattcacctcctcggttcaaagtgttgggtgtggaagaattaattcgatctattggctgcccctcaattgcaagaccaacctattttgaaatatcttcacctccctaagagaacgtagtgttgttcaggttcttcaaaaaagttttggtgtaaattgtgcatattatggtaagcaaaacatgaagctagatatattttatcttgcttgtcacataaagctgtgagaaaatggtattttgccgtggacttggttatatggttatctattggctccagttatagggtcagtgttcgctattgtaaccagttgagttttaaaagccctgtatataatgcaattgctacttatagcttacgtcttacttcatttatagattcatataaggaacttgtgtactggtgccctattcatatgcattttaatccatgtttcacacatctctccctatttgacattcaactaaacatcagaagttagatttgactctttgagcaaaa

SEQ ID NO: 85411 - DNA, 750 bp, Glycine max
  Clone ID: PAT_MRT3847_48140C.1
attaagttctacttttcaccattgtatggaactaatttacatatacttatacttcaacaagtataacaatgaagacaattaattcattgtttggcctcttgttccttctcctaattgcatttaccatgaagcctgccgttgctagtggtgttcatgacacagatgatcgcatgttagaaaatggaggtgactacttcatcttacctagttttgatgaagagggtggtggagttacacttgctagcattggtgtgacacaccctcttgcagttgttcaatcttcctcaaagaaccatcttggcttgccagcatcaattaaaactaaagaaacaatgatcatcttcactgatgaaatggtaagcattaaattcaccaatgttcctgactacaataatgcgtccacttggacgcttgttatggatgaatttgtcaaggtgtggtatgtgggaattggcaatgtagctgattaccctagtcatcgaattaagacgggaaagttccaaattaaggaggataattttgattacaagcttgttttctgtgctgatgccaacaccacatcttgtgaagatgttggggtatatgttgatggtgaacaaaatagacgtctagttctatctgaagtaggaggagttgctgttaagttcatgaatgcagataaatctcgtgtagcatttgattgagtattattttctgtcattatataataattatgcttagatcaataaagtaataaagttgattggtccc

SEQ ID NO: 85412 - DNA, 351 bp, Glycine max
  Clone ID: PAT_MRT3847_48141C.1
caaataccccacacaacaaacccccaacaaacccccaacaaacagacaaaatgagcgactacgcacccaccaaggacggacacgagggaaagacgaaggatggaaagcccgatggccgtgtcagtgagctcaagggcggcgctaagcctgtgaacgacgatggcaaggctgaattcggcggtggacaagaccccaaggaggtcggagcgaagggcggaaagtcgtcttagacttccctttctcagcaggacattattcgatcaatgatacattgcgctaccacgtttaagctcgtcgctcggaagtagttgtgcaaatatcttgcgatcaatcaatcctattatacccgac

SEQ ID NO: 85413 - DNA, 308 bp, Glycine max
  Clone ID: PAT_MRT3847_48142C.1
ggccgctttactgggatttttcaagatgctccgcactgctgactttaatcacacgaatggattctcaaatcagaggtggataaacacggtggactatcaagatagcaggcttttccccgtggaagttcgctagtgcgctcacgtggtcctagcttggtgcatagctgtcattggtgttcctgtctctcttcttgaaactaggtgcattctcacatttgatccagtatgaatctcatgtaggtgttcgtcattaggacaaagctgagctgtgtgaattaacactccgttcagtgtgatagcagagactt

SEQ ID NO: 85414 - DNA, 267 bp, Glycine max
  unsure (1)..(267): unsure at all n locations
  Clone ID: PAT_MRT3847_48143C.1
gnattttgcncactccanggcacaaganacatctnctagggganngangnagattctncccgtnggnngcgaacaagtntccccgagnnacagccgattgggncggcggcgcagagccaagacgacggcaaggactaccaggaccggcgncggcgccgctggttnacccgacggagtttacgtcatggtcgttttacagagcagggatagcagagtttgtggccacttttctgtttctctacatcancgtcttaaccgntatgggag

SEQ ID NO: 85415 - DNA, 474 bp, Glycine max
  Clone ID: PAT_MRT3847_48144C.1
atgagtaggtaccacaaagtggcgtatttaattttgctcatcggcctgcatgattttagaaaacttgagtgctttgttacttacagcgctataatttactaacttagacacattacaataccttgattggttcctacagaataaattcatctctttactcactaatgatgacctacgaatccaaaatatgtgagcatcccaagatgtatactccaacaattttagggcagatatttacagctttctctaattctcattttcagcattaaaagtcttctaagaattcgatatatcttccacgtcccaggtcaagatccttattccatttagcatttttatttgaacagaagagcttgttttggcccttccataacatacaagactgaggctgcaatgtgctttgatgaaagccccgcatcttcaacctgagcttggggtgatccatgctcaatgtacctatccggaagcatcatt

SEQ ID NO: 85416 - DNA, 377 bp, Glycine max
  Clone ID: PAT_MRT3847_48145C.1
acgcatggaccccttctgttaaataagcgcccacgaacccttgagacgatattataacagccgaaccctgttgtagattcttagtaaacaccatacaaaaggacgatcgtttagcccaaattctagggaggacacatgggcggacctcaggaaccacccaacaatttaagtctgggacgcggggtgtacctttgccttctggagcgagacgacctagagcacggtgttttgctgttcaaacaggaaagctggaagaaattgttatctaacagcatcctcctgaaaaaaaccatccggaagcatgaattagggacccgggggtgccaggcgagcgagacctcttacattaatagcgtttcactcgcggaaccctttgg

SEQ ID NO: 85417 - DNA, 138 bp, Glycine max
  Clone ID: PAT_MRT3847_48146C.1
tccacgcgtgcgatgccttccccacttacaaagcgaatcttttgatttccttaggcgcgtcattgtcatggagttagcagtgtgtcaaacacaccagagggtgatagcagggagaaaaagacaggtacaagggttttg

SEQ ID NO: 85418 - DNA, 266 bp, Glycine max
  unsure (1)..(266): unsure at all n locations
  Clone ID: PAT_MRT3847_48147C.1
tacttttcnnncncgantggcnnngaancctcctacaaagttgntcanangggttnntcccaaatctactctngnacacaancttcctcncttnctttgnactcttttttcnattcccnaaccaacaagcaaggtaatnatcatcatcatgnntcnggtcctatatcaccatgtcaaaaccacnatcacggaggctcangcaaggtggccacgnncntggnggngctaggtaacttctgcngnaacggtnatagtgaaggggngtg

SEQ ID NO: 85419 - DNA, 566 bp, Glycine max
  Clone ID: PAT_MRT3847_48148C.1
tgttcatcaatcacattacataataactaatagcttcataagaaataacaaattgctttacaaaattcaatcacttggaatgaaaaggtttgttggcattttcttccgccgtttttctctgtcacttctttttgccgtacgattgttggatcagtgtaagtgttaatctgatcagaaaaggagatttaagtgatcatagtgggaaaaagacgggtcgcattatgccaatgccttgtggctactgtaatgcttgctggcacctaccgttttccactttgtacgcgtcttgtttggtgatgatcgcatcgaaaccggtgataaggtcgttctaaaagcgaccacttggatgggccttgaagtggctgaaatgcgcttgaatctgaacaaaaaggggtggggggatatttgggatttaaccattataaataatcatttttgaatttttaattaagaattggtgtaaataccctctttttcgaaaaaaaaacggggctttgaataaattggggcgccagaaccgccgcctaaggggcgtaaagacggtattgatttaacttttttttaaa

SEQ ID NO: 85420 - DNA, 435 bp, Glycine max
  Clone ID: PAT_MRT3847_48149C.1
cacaaatcagaaccctctgtttgctacttgagcatttgtccaaacgtggcataaatttactacaggtctccagaaactcccccttacactctctactacgctggtaaggcaatcaacagaaagctctgaaccttaaagaccatagacttctgctcatggtagagaagcccgaactacaacggagagagctcctaatttacaacaaacaggggctgatgaggcatagaacacaagcactcaagaacaagtagactgtttattcttagagcactatatggaaatcaggagaatataaagcacactgcagccatcaagggaaacaaggattcaattaacaaaagagaccattgatgacacactcccattggaattttctaattaaagaggtctgaccacctctaacttcatgaacgttgaaagaaaatcatgcatgat

SEQ ID NO: 85421 - DNA, 273 bp, Glycine max
  Clone ID: PAT_MRT3847_4814C.1
gcttagtattgtttagatataggatacatttttctagttcatccacaatgtcattgaaacactgccatagagttccatgatttctgtgttccccaaaaccctaatcgccactcgtttcctttcccgaacccgacctcgaatacatactcccaaactaaccgccattagaaccatgagctcgtccacccagcgcatgttccagctcaagcttgacccaataacgggtaactctgaatgggtcgtcatcgaagacaacgacgacggagacgaaag

SEQ ID NO: 85422 - DNA, 554 bp, Glycine max
  Clone ID: PAT_MRT3847_48150C.1
tgatggtggcgctgggatccaaaacgacgtcggaggaggtgaagcgcatgatggcggagcttgatcggaacggcgacggctacattgacctgaaggagttcggcgagttccattgcggcggcggcgacgggagggagctccgggaggcgttcgagctgtacgatctggacaagaacgggctgatctcggcgaaggagctgcactccgtgatgcggaggttgggggagaagtgctccctcagcgactgccggaggatgatcggaaacgtggatgccgacggtgacggcaacgtcaattttgaagagtttaagaagatgatgactcgctcgtaggtggtggtggtagtagcactctctttcagtaatgttgcggtttcttcgtcacccttggtgatttcttccttcttcatattgagaggcagtggcaatgttttcttcaccagctctactatttcagttacaccttcatctccaaaacgctcatcagattcctctaagatctgtgtaatgaaagtgaacaaactgattacagtttcgtaagggtagtagctattg

SEQ ID NO: 85423 - DNA, 1301 bp, Glycine max
  Clone ID: PAT_MRT3847_48151C.1
cttctgccacactcaacaacaccgcgtttggctcgcactaacacaactgttcctttctaccttccctcaacttgtttcctactgaacccgttaatatcacaacttggtctgtatcctgtttttcatctcctccgattcattcccacttaacgtgttcgcactgaactcgtcggttttttattcttctctcggcgtcgccatggacgaagaagaggtgcgcaagatcttcagcaagttcgacaagaacggcgacggcaagatctcgtgcgcggagctgaaggagatgatggcggcgctgggatccaaaacgacgtcggacgaggtgaagcgcatgatggcggagctggaccggaacggcgacggctacattgacttgaaggagttcggcgagttccactgcggcggcggtggcgacgggagggagctccgggaggcgttcgagctgtacgatctggacaagaacgggctgatctcggcgaaggagctgcactccgtgatgcggaggttgggggagaagtgctccctcagcgactgccggaggatgatcggaaacgtcgatgccgacggcgacggcaacgtcaatttcgaagagttcaagaagatgatgagtcgctcgtaggtgatggtagtagtagcactgactttcagtaactaagtgactcatttatttaagtgaaatgaatgacaccacattttaggataattctgtaaaaacaaatgttgcaatttcattttatttatatgtatgggtgtgttgaatgtactcctcaagtttaaattaagacgtagaattaaggaccagctctactatttcagaaacaccttcatcttcaaaacgctcatcagattcctctaagatctgtgtaatgaaagtgaacaaactgattacagtttcgtaagggtagtagctattgaaatagacaaaatattaataagcatattattagtctccttcattaatgctctctcatatttgaacaaatacataagtgtacaccaaataataattttttatgtaacaagactctgaacctttggcccttactcttgttggatcctattgagattttttagctcgtaagcaaacaaggacctcaaaatttgtgagtgcaccagcactgcccacttagatttccaacacctacaaaacagaatgagagaaaaggcagtaacattacaagagagtgtctcctttgcttcagagagaaaagcttgtcagactaggtcgtggtgaacaacggtgccggagagaaaggctgctgaaggaaatagtgcggccgtgaactcgcggtgaacgacgc

SEQ ID NO: 85424 - DNA, 260 bp, Glycine max
  unsure (1)..(260): unsure at all n locations
  Clone ID: PAT_MRT3847_48152C.1
gtgcntgcgctcgtcgtcgccctntcntggtgtatgcgcntgtcngcnngtgngccnctcnntctcctgcnanctctcactngttcntngctcttncantncccctggnctgnnntgtctgnttntccgtgnnntccgngccattnnatgggtnnccttttnnnngcgngnnncanctcccgtntnggncggggngntncttcntnnacgnacncnncncnnctgtttgtntggtgncgcgacctgnccncangtntatc

SEQ ID NO: 85425 - DNA, 498 bp, Glycine max
  Clone ID: PAT_MRT3847_48153C.1
aattccatcatgtgtttgttttagaacgataatgtacttgcatgaaaagcgaatgatgatgcaggggtaatgatgaccatgatggaaactcgactcaacaagcaaaccaacgacgaacaggtcgagtagttcgtacgatctggaaataaacgattcgatgctcgattggggtatgagcagaaggaacagggactgatttcacccgtccacacagcagccagccacagcggcagtagcggcggcgacaagtacaaaattcagaggttgagtcttctttccgtatggagagagattatctatcttgcttgagtcaagacgacagagcatggggaggatgaactgaactgttgatatcgatcgaattaagagagtaaggaagaaggcaaaggaccgtattaacaagtagcgagtagtaacgaggcgagcgcgataagtaggcgagcgatgacgttgcggatcttgttgtactccgttcactagagttccggatctttgtcg

SEQ ID NO: 85426 - DNA, 520 bp, Glycine max
  Clone ID: PAT_MRT3847_48154C.1
acttatttcatttgagttattagaacttcgattttgttgtttatgaattgtgattttgatttgcatgttttggacatgtagactttcttttatcgtaaggagttctttaaatgtctttaagtaggtcctgagtcggctttatgtagattcattcactgattgatagtccaaaaacttttaagatgtcaaaacaccttgacagtgtgttgaattttgaatgttggagccaaaatgtcttcacaacatggctttgagtatccatctctattaaaggcttagttgttttgtttatctttatgtctgtgttcaggtttttgttttaattatggatggtgtatgaagtgaattcttatcctcaagctaaattgatcaaggatagtgacaaggtttatggcctttttggtcttttgtcttccaatgattcacatttggcttatatcttttgacttgtgtgtgcatgtatgtgactaactgactatgttctttgatgatgagagtagattcaaatgatggtctttag

SEQ ID NO: 85427 - DNA, 569 bp, Glycine max
  Clone ID: PAT_MRT3847_48155C.1
gttacaagaacttagcgtccgagaaaattttgaaataaatttgtagatttagagaagacttatggcaaagaatgagatgaaaattatcggagttgtgattatgactatgattctgtttggtttctcacaagctaattataatccttcatttgagaaaattggactaaatcatgtgtctgatggaatcgtttgtcgacttagatgcgagaataaatgtaaaaaattcctaataattccgcccggactcattttctatctgatatgttatcatacatgttatgcaaattgccatgacatgcccattgatgccgctcatgattgtatcactagttgtggcttgaccaagccggttgacttcaacaatgatgctcctggtcttgcaaccgacggggtgaattcttgtttagtaaagtgttacaagaagtaatattttaatacaaaaatattctagaacatgttgttatgagaaataatgctgatttatcattgcaataaacaaatcttaatcaatgagacatatttagtttttaaaaaaaaaaaaaaaagggcggccgctcagaggatccaag

SEQ ID NO: 85428 - DNA, 437 bp, Glycine max
  Clone ID: PAT_MRT3847_48156C.1
attcgaatcaaaataacgggtctcttctttcaagcacttcattttcttcttttccaccgggtgtatcaaatagttttaccagtcagaatatatctagttcatcatctgctgccacaagcagtggcattagtgccactggaaattctactagcatggcaactatctcacctgccacaattgcatctagtaatagttgtttctctaccccagtggtggcatcctcatcgtcagcaatttccttttttaaatttggatcctctcctgtccaatcagcaggtttacctgtgtcatcttctggttcagaaccaccagaaactaaaagcagacaggatgcaggaatcagtggtcttagcagcactgcatttggtgctagcagtggtatttttggcttcagctcttcagcaatgacaactgtaaatagccagtctcagagttct

SEQ ID NO: 85429 - DNA, 363 bp, Glycine max
  Clone ID: PAT_MRT3847_48157C.1
ggggagaaagggttaccaaaattaacctaaatgaggagcaactacccacggggatgttctaacactgacaaaaactaacaggggctttcactggatcagtttattaatcatgtcatgtgacaattttgtgatcgacaaaaatgtacagataatgctatttctccaattcgtaaatgccaaattgcgtaacagacaaactgaactatcttacggacaactaaggtgagtggtaatttacgaagctcgattgattagaggaaaaaaaaaaaaggaaactatcaacccgttaaagtatcatcaagtgaccaaatgctacaaaacggtgatatacccaacttaatgttgaaaaccttcatttatttt

SEQ ID NO: 85430 - DNA, 501 bp, Glycine max
  Clone ID: PAT_MRT3847_48158C.1
aatacaataaatcaatctaaatattttcttattaagtgcaacaatatgctgttatcttacaatatataattgagtgaaaaatacaaatatacccaaatcaaacaacttttaaacatcaaataatgcaaaacataagagtaaatccacccttctagttcatgtgatccttaattaagaacttccttctagaaatggatagtcagtataacccacaactggatcaggagtgtagaaggtctccctattgtacttgttgagtggtgcatcaacctcaaacctcttaggcaaatctggattagccaaaaacaaacgaccataagcaacaagatttgccttcttctcagccacagccttgttcccttcttttctatcataacccccagcaacaatgaaagtgccattaaaggccttcttcattggtgcaagagtgtgaggggtttccttattctccccagaaatgtcccatcttggctcaaccatgtgacaataaagcacaccatg

SEQ ID NO: 85431 - DNA, 470 bp, Glycine max
  Clone ID: PAT_MRT3847_48159C.1
gaccaacttcatatacacaaacaactaccaccacgacaacaaaagtcacattttcatctccacaacaagaggctaaatttgacgatgatagtgcaataacaaagggcatgactagggaggagttaacggcttataaggaggaaaagaagaacaaggcaattcaggctcagttggcatttgcaaacaagatctgggctgatgaaaataagaataaagaagagaaggagaaggcttatgaagagcttgaggataatatcaagaagtgggcaggaaagaatggccagagaaataatattagagcactgttatgtactgtgcatgaagttatgtggccaggatgtgactggcagccactttcattgtcagatttgatgatgcctaacaagattaaggtgaactatttcaaggctatcactaagttccatcctgataaaaatcaaggtgctgagtatagacagaggtatattgcg

SEQ ID NO: 85432 - DNA, 534 bp, Glycine max
  Clone ID: PAT_MRT3847_4815C.1
agccaagccccccatttttttttttaaaaaaattaaaaaacctttttattcccaaatttcccaggggaaaagccccgggggcccccccggggtagggaaaaaaaaaaaaggggggggggggtacttcagaaaacatattggggtaacccaaccaaactgaaagggccaccccccagggttttttcacatcgggtttaaaaaggggggtttggggtcgggctttaaaaaggtaagaatttcccgggggggcatcccccccccatgggcgggaacaaaaggggctttaaaaaagcccccctcccccccaaaaaaaagggcgggtttttttggggaacccaatgccccgggggaaagggagcccccttggaggggaaaccggccccccgcccccccaaaaggggaggcctggggcccccccccttttctttttatgaaggggccaaaaaagctaggggggggaagggccccccctgaaagggaagaactttgggacctttcccgcccgggggggctaaaattaaccctgggggggaa

SEQ ID NO: 85433 - DNA, 456 bp, Glycine max
  Clone ID: PAT_MRT3847_48160C.1
gaataatatttttttatgattaccttataacaccatcaaacaacatgccatgactttaataaaagggtaacacctcttttaaataataagggctaaccaatctaatactgaccacgtatacatacagttcaatagaactgagatgtaacaatgcctcactatcaataatctgttcaagcctgtaccttgggggccccttcatcacttacaaattccaccgttggggcttgtggggcaccaaatgaatgtgcctagaacataagcttagtgaccacgagggcctgtgccaaacataccggaacattcccatgtctcgaaatggcccaatgctcccacaagaacctacacatggggggccaaactaagatccactgaagtgacatacctgcctaccatggctgggccacggaccttgcaatgaccactctaggcactcaatacaacaaccaaagcttg

SEQ ID NO: 85434 - DNA, 499 bp, Glycine max
  unsure (1)..(499): unsure at all n locations
  Clone ID: PAT_MRT3847_48161C.1
agtttacttcttagagtaaacttgccacaaacatcaagttcttcgaatttttggtatattgtttccattacgtccttgatgcccacctcgggctcagataacccttggtctgaaaaactgagtctcctccagaacatatgaattgaatcaagtgggatgcaaccaccaacatatttggatagctcacaagcacagggaagaccaagcgtggttctcaccacacaacccacacttgagggattctggcagcatagtgaacacgcttccgatattcatttaagttttctcccaatatttattttataaagtttttttcgcactcaaacacnctacaaacatcctntcggcaccaaacacctacaaaaaccacataattaaagtntctacaatattcatttataaatatgtgacaagcaataacatataacctgagaggtctngaacgcttctgaacaatcaacatgtggttcattcgcaccacatgattctgcattttcat

SEQ ID NO: 85435 - DNA, 966 bp, Glycine max
  Clone ID: PAT_MRT3847_48162C.1
tgagtccgcccacgcgtccgtacggctgcgagaagacgacagaaggggatagaaagaaaggacggtggccggtggcggtgagtggtgtgtttgggaaagcgtaagagtaagaatggagggtggagaggaaggattggagatgatggtggactcaaaggacttacagcaacagagcaaagcgttggacaaactcactgatcacgtcgaggatcgccaactcgattccactcgcgtccaagaggccatggcttccatcgctgcttctgccgaagctgatcgcaatgccatgcgcatcagggaaaaagaattggctgctgttaagataaatgcagcagatgttgatataattgcaaatgaactagagttggacaaaaaggttgctgaaagaactttgcgtgagcataaaggtgatgcagttgctgctattcggcacttgcttcactagagaggtgggaatgaacaagagtgaatgctttagaaagttatatttatatgtatcagcgtatattgtttttcatcaaaattgaatctcaaatgtaactctgacctaattcattcagaaatcataactgtgttattgattgacagtttaccacccctccccctaaacttttctcaacttctgtgttaagaaaaggacccgttatctattggtattatctaatcatggagttaagtgcttcatgaggacctccacgtgtcaaaccatacatatgcttgctagttaagcatagatagagtttgccatcttcatgctcagcatgtgcttgtttcaaactcaaatagaaatccttgcttttgacatactcttgtagattgtgctctgtgatgcttgtgcaagtagcatctcctattttgtttttttcatccaaattgataaagctagatttcagatttgttgccagtgtatcttgaaatggacattgatggatagaagtgtccacactcttactaacttttgcttat

SEQ ID NO: 85436 - DNA, 434 bp, Glycine max
  Clone ID: PAT_MRT3847_48163C.1
acgagacacaacataatttccttttccatgcccctttcaccctcttccatggcttcaatcccacaattctatccaaactatacgttcaccactcacgatctttccgagtaccctgtccctcttctcaatggtggcggtaatgcctcggttatggacagcaccaccatatggggtggtggccaagatagcttgagtattcctgtgctggatatgaacaatggtgcacttgatcatattgtgtcgcttgattgtgacaccatggcttgtgctgctaattggatgccttcgttttcggagcagctcggggggctctcggatttggccatttcggactgcaaaattgggttctatggaggagggtttcagagtttcaataacagcagatcgtaccaacctcatgttggggagtttggagatgaatgttgtgggtttgt

SEQ ID NO: 85437 - DNA, 267 bp, Glycine max
  Clone ID: PAT_MRT3847_48164C.1
tcagtgtacaaggcaaacctagagggtaaggttttggcagtacaaaagattctcgaaagatgtcacggacgagctgaaaattctgcagtaggtgaatcatgggaatctggtgaaactaatgggtgtctcatcagacaatgatggaaactgttttgtggtttatgagtacgctgaaaatgggtctcttgatgagtggctattctccaagtcttgttcagacacatcaaactcaagggcatcccttacatggtgtcagaggataagcat

SEQ ID NO: 85438 - DNA, 353 bp, Glycine max
  Clone ID: PAT_MRT3847_48165C.1
ataatttccttttccatgccccttttaccctcttccatggcttcaatcccacaattctatcaaaactacacgttgaccactcacgatctttccgactaccctacccctcttctcaatggcggtggtggcagcaacgacatcgttaatgcgtcggttatggacaccaccaccgtgtggggtggtgggcaagatagcttgattaatattcctgtgctggatatgaacaatggtgcacttgatcatattgtgtcgcttgattgcgacaccatggcttgtgctgctaattggatgccatctttttctgagcagcttggggggttttcggatttggccatttcggactgcaaaatggg

SEQ ID NO: 85439 - DNA, 280 bp, Glycine max
  Clone ID: PAT_MRT3847_48166C.1
ccggattaactcccgtctctactagccgaccgcccttcgttcgtccttttttttttttttttgacaaaaagttttaacagagtcctaagagaaaagagggcgagttaaatttcaaaaacaacatctaattggtacgggcgaggaatagttaaagaccctatgagaaaacctcccggtaaatgactaatattcgctaaattcaattcgctgatcgggaacaaagcgcgaaaggggattctctcaaccttggggcgcttgaaaatgtgggtacggggccatc

SEQ ID NO: 85440 - DNA, 733 bp, Glycine max
  Clone ID: PAT_MRT3847_48167C.1
ggggagcaaaatccaagatttcccctccccccaccccaccaccaacagcaccaaacaacttcattgagggaccggggccaaaaaagggggatttttatgtctaatgcaatagatcgtgttggctgcgattgattcatggtgctccacgtgggacagtgagctgcaatgcaatggggttccacttagcggcccttagccacaacattctgcaatgccattgcggcactatagtgtgcaattaactactctgccagaagcttatggcttcctgggttgccatctaatcactaaaatggggaggtaaagggagtttagaatttaccaaaaatggaaattggagaacacaagcaaacacagggaaaggcaacagagaggaaagatacaaatacacatgaggctatgaaatagcatagaataagagaatgaccaattttatgttataagattagggttgtaaatctgggaaattgggctttggctcatgtgccatcaccgtgctttggggttagggctgctcaatactatcagcctatttaaatctcaatgtaagctcagtccatttaacctgtgagttaaatggggttagatcaagttggacccgtgaaccaatccatttgtagtattggggttattttactttttctttttgttggaagctgatctattacttttttatttcagaagaatcaacggtacaacatctctgaggatacctggcaacaggttctagctt

SEQ ID NO: 85441 - DNA, 225 bp, Glycine max
  Clone ID: PAT_MRT3847_48168C.1
taatgggagatacggagttgcggggcgaatgcaccgacttctgtcatcgtgacaatcgagctcaatggtacacggctatgggataggccatcacctgtaatggcatcatttttagcaagatggccactctcagagtccccagagattttgaagcctggtgatatagctacaatattgaacattcatacagcttgtactgatcatgtccgacactgtcccataccc

SEQ ID NO: 85442 - DNA, 217 bp, Glycine max
  Clone ID: PAT_MRT3847_48169C.1
tcggcgtgtggacctaacctgcgagctcacagcaacatggactggagtacagattatgagtccagtcaagattattgcgggagagcttgacattacatacatcactacacgtgtgaaagagtatatacataatggtggctttcagagagactggccgtacttgctaggattggttgtgatggagcgagtatatcactttatagctcaaggaaggccc

SEQ ID NO: 85443 - DNA, 406 bp, Glycine max
  Clone ID: PAT_MRT3847_4816C.1
ggctcgagcactgactacttgccagaatggctcttcgggtgttggtgatgtgcatctctcgcgtcttcactctcgaccttgcgagataaagccatgccatagacgaacatttttggcatgctgaccggcacaaacaatcgcattccaatcgcacttgcagatcttatcaggctctgagcctgcgcgcgttgatatcactgactaccctatgcaaattgaacaaccacactgctccgataaccttgttctataagaacaccttcatccaggtcgaccgatagcatgtcaactcagcacaccttcctttgatcaaccatgggatgctggtgcatgggctaaggatattcaacacactactatagatggacatacgcctggagagctatgcttaaccaaagaatccatt

SEQ ID NO: 85444 - DNA, 342 bp, Glycine max
  unsure (1)..(342): unsure at all n locations
  Clone ID: PAT_MRT3847_48170C.1
tttaacacaaaactcaaaattaattccttcaatngagtttgctattattgggagttgtcccttgctacttacgtgactgaacttnaacatctaactatggaattaacaatacatttcctataactacttgtcataacttatgtatctccattctgaggagtagattcctcactttggaccctatttatttctgaatgaagagaccatactttgagatatgactttcgtgtgctggtttgactctcccagcaaagtaaagctcttttcccatcaatattctcatgagttttgcaaaagtaaactngctcaacatgtaattacagcacaatgctatgcatgatt

SEQ ID NO: 85445 - DNA, 1041 bp, Glycine max
  Clone ID: PAT_MRT3847_48171C.1
ggaatttcggttggagtcgaactggtgcacaggcaccacgagcgcttctccggcggcggcggtgacgtggatcaggtcgaagcggtgaagggtttcgtaaacagggacggcctgcggcggcagaggatgaatcagaggtggggtgttagtaattacgacagaagaagaaaaggcttggaaacaacgacgacgacggaggtggaaatgccgatgcgcgcggggcgcgacgatgccctcggcgagtacttcaccgaggtcaaggtcgggagccccgggcaacggttctggctcgccgcggacaccggcagcgagttcacgtggttcaactgcgtaatgcggaatgctacaacaacggcaacaaccaagaagaccaggaagaacaaaaccaaaaagaaacatcatcatcacagcaagaggaacaggacgaggacgacgaggagaacaaagaagaagaaggccaagagcaatccctgcaagggggtgttctgtccgcataggtctaagtcctttcaagctgtcacgtgtgcgtcgcagaagtgcaagattgatctcagtcagcttttctcgctcagtctttgtcccaagccttctgatccttgcttgtatgacatcagctatgctgatggatcatctgcaaagggattctttggcactgacactatcacagtagacctcaaaaatggaaaggaaggaaaattgaataatctcacaattgggtgcacaaaatccatggaaaatggggtaaacttcaatgaagacactggaggtatattggggctacgctttgccaaggactcattcattgataaagcagcttatgaatatggtgccaagttctcctattgtttagttcaccatttaagccacagaaacgtttcaggttatctaaccattggtggccaccacaatgccaaattgttgggtgaaatcaaaagaacagaactcattttgttccctccattctatggtgtgaatgtggtaggcatctcaattgggggccaaatgctgaaaatcccacctcaggtttgggatttcaattct

SEQ ID NO: 85446 - DNA, 420 bp, Glycine max
  Clone ID: PAT_MRT3847_48172C.1
gcctaaaaaagacaaaccttaaaaacaaaacaaaacaagcaaaaaggaaaaaaaaaaagggcagggaaaaaaaaaatttttttttaaaaaaaagaaagcggacgcaaaaacaaaagggcaagcggggacaaacacaagaaaaaaaagggctgggggaagaaaaaacaaaaaaacagccatttcgccaaaccggggggaaaaaaagaaaaaaaaacggggaacggaactcaccaaaaaaaagcccggaaacacgcaggggcccaagaacattaacaagccccggaaaagcccatggcagcagcagccccagaaagacaaaagcaagccgcttaaagacaacggacgaccgaaggaaaaaaaaaaaaccccgggcacaaggctcgaactccctccgaccaacaagacccacaaaagccgggg

SEQ ID NO: 85447 - DNA, 428 bp, Glycine max
  Clone ID: PAT_MRT3847_48173C.1
gcacgaggtcacgttctctctaagcctttttctatgtaaagcgaaacaactcaactgccacctccataccaaagcaaaatcgatgctccacaaaacccacagacccacagaattcatggtcacccactacacaaagacaaatctacatatcaacacagtatcactatcttttcataactctgtaacaatttttattattatttgtatatgatactgcttcgtcatggaagaagaatgtgttcatcaacaaaacgtggctggtaataagtccaatttcccgctacagctgctgaagaaaaaggatgagggaccaccaccatcaccaccgccgagcgccgccaaggccaagcgaccaccgacgaaggacagacacaccaaggtggaggggcgggggcggcggatccggatgccggcggcttgcgcggcga

SEQ ID NO: 85448 - DNA, 366 bp, Glycine max
  Clone ID: PAT_MRT3847_48174C.1
ttccttacatcatgtaggagcttttgaaacaaggaagatagaataggttcaggtatccttctatgcatttgctagtgatcctccatccatgtactccaaagctctgctcatctgtccatttagaagcagacattaccaataagtcctataacaaagtgtctagtattgccaaattaaatcttcaaaaacaaaacagataaatagtgtattaccctgcataaaaaaaataccacatttagacagccggataacatgtctcttgtactattattcatgctcagccatgatgatgatgatgatgatgatgatgatgatgatgatgatgatgatgatgatgatgatgatgatgatgatgatgatgatgca

SEQ ID NO: 85449 - DNA, 281 bp, Glycine max
  unsure (1)..(281): unsure at all n locations
  Clone ID: PAT_MRT3847_48175C.1
gnagtaattctggtggggtttatcctgtaccctttcttggttcaagccaaaaataagaattggatttaattgaagaagccactggctgggcagcaatgccatcagaactgactgaccaagaaaatagcggtgttgagcttcttgtgagctcaccattggctagcgtggaagaacaattgtcttaatgcaaagtgattctaaaccaagctagcaggatcttgtcttttagaaattaattttgacaagcatacgacgtgttggncgtcttggacatgccggat

SEQ ID NO: 85450 - DNA, 315 bp, Glycine max
  Clone ID: PAT_MRT3847_48176C.1
aagtaggcgttaactacaattgaaagccaatgaaatgtttaattccgagccactgattaaaaaagcgcattgcactttccggagttacaaacggcagaaagaaaatgcgttaacaaaggggctgcaaatcgcaaaggacacgttcactgcggttcctaacttatccagacgtaaagaccgtatgtaatgcaaagctcaagccatagctgaatacagcgtctctgccggatacaccttgctgatcttattctgaagacaatatgtaattgcgggggaacgttcagttaatgccggttcctagcaatgccgggagct

SEQ ID NO: 85451 - DNA, 333 bp, Glycine max
  unsure (1)..(333): unsure at all n locations
  Clone ID: PAT_MRT3847_48177C.1
cacccacatacgtgtattgtcgtaccttgcaaccaaatgcttacaatagctcaaaatgggcgcacatcctggggttcctgatatacttcaacctttctaactgccgtttaatccacggccagacctgaccacaacctcatgaactgaaacattttattacgccagaggaaaacaaagcaaaagctatttccgtattatcgtccaacgaaatgtgagcaacctaaaccgtgaaaaccactttgcgccaaacctatacaaatctagtgcttttatgctaatcaacaaacaatgctgcatcctanatggcgagagtgcaataaccaaatgcatcac

SEQ ID NO: 85452 - DNA, 266 bp, Glycine max
  Clone ID: PAT_MRT3847_48178C.1
ggtgtgtttatgtgcgccattatgacgcttgtggggaacaaaatcaaaaatacattatgggggaacctagatcttttaaaaaatggcattctaatatcatggataacatcctctaggaagcaaaagtgaggggattacagctgtttttgcctgcacaaaagttcctaaaaatgttaaccgtgagattagaataccatttcctaaaagatcaaattccccaccaaattgtactttgcaaatatacttaacccacaacgcgtcataaa

SEQ ID NO: 85453 - DNA, 1229 bp, Glycine max
  Clone ID: PAT_MRT3847_48179C.1
ccggaattcccgcgtccatcaggtcgtaggggttcgttccattttctcaccacaccatgttaaccgcagtcctcagaagaaccagttccaccctctcaaggcgcggtttccccgccgccttaatctctgcctccaccgccaccgccaccgccaccgccggcaaccacttccggctactctccgctgccgtcaattccagaaccttccactccaaccctggccccttgaatttccgcgcctcttcatgtcaccgcgcggaatacgccgtggacgatttcccttacgaagaagggtccaaaggaaacgccgacgaaggcctcgagatcgcgaagctcggaatttcgcaggatattgtctccgctttggccaagaaaggcatcaccaagctcttccccattcagagggctgtgttggaacctgctatgcaaggtcgtgatatgattggtcgagctagaactggaactgggaagactcttgcttttgggatacccatcatggataagatcattcagtttaatgctaagcatgggcgggggagggatcctttggctttggttttggctccgaccagagagcttgctcgacaggttgaatcggagttctgtgagtcggcacctaatttggatacaatttgtggttatgggggtacacccatctctcggcagatgagggaacttgattatggggttgatattgctgtgggaacacctggtcggattattgaccttctcaacagaggtgctctaaatttgaaggatgttcagtttgttgttcttgatgaagctgatcagatgcttcaggtgggctttcaggaagacgtggagaagatcttggagaggttgcccccaaaacgtcagactcttatgttctctgcaacaatgccatcttggataaagcagatttcgcgcaattacctgaataatcccctgaccattgatcttgttggagattcttatcatttttgggcagatgaaattgcatttcaccccattgcaactgattagtttgttaaatcgagaatacttgctcctttaataacggaatattgaagacctttaacgtgcaatattatgttataaggcaaataaacctcattgggtaataagtttataatatctaaatgtacatatagtttgtgcatgtgtgcgcaagctagcacatggtagttactttttaattggaaacttattggtgctgtaggttggagattctgatcagaaattggcaga

SEQ ID NO: 85454 - DNA, 262 bp, Glycine max
  Clone ID: PAT_MRT3847_4817C.1
attcgttcgagcactttgggcaggattttagtgatcctgagactatatgcaggataacctgatggcgggatgttatggaagtcgattattggaattgcaaaggtctgggtccggatattgggcaggtctcttggttgcctgtaatgggctgaggcatgccgatgaagtggatgagataggtccgtggggggggcattaaaggactgagacgccaaaatggccagcaggacgttttacctacagcagactcacctatgggaga

SEQ ID NO: 85455 - DNA, 340 bp, Glycine max
  Clone ID: PAT_MRT3847_48180C.1
accacgcgtccgtattcgagcggccgcattatatattgttgatttcacttgttattgctttgatcaggacaatgacagttcagttcagcacctaataacagttacatgacttacaagcatacttgacaattgatcagtatcattatcgaccaaatttagtgagcacatcgtgtatatttgcagaatcagcatagcgggataattgcctatagacagagcagtaccacatagtgtcaaaaagtcactatgataggaatttgagactgtgtaaagtatcaactcatacatacctgataggcgacatttaagacactgatattagatttgacaacacaacaaa

SEQ ID NO: 85456 - DNA, 343 bp, Glycine max
  unsure (1)..(343): unsure at all n locations
  Clone ID: PAT_MRT3847_48181C.1
gctcgaggttgntnttggtgttgtgtatggtgccatgctnngaactgtntaccttgctatagtcaacngtgatggaaaaacactttacagaaatcaatatgcttggaacaatgtggcntacgtgattttcctagattctccagccggagttggcttttcatattcaaacactatctttgggggctcataacctggtgacacgagcacagccttggactcttatncttttcttctcccctggctcgagagatttccacagttcaaaacctcggacttgttcatctctggagaaagctatgctggacattctgtccctcagcttgctgtcactcttctcacttct

SEQ ID NO: 85457 - DNA, 339 bp, Glycine max
  unsure (1)..(339): unsure at all n locations
  Clone ID: PAT_MRT3847_48182C.1
gaaagctcttgatatcaataataacatttttcttcattgtcatcctaacanaaaagagtgttctaaaacaacacttccttatctccctacaatacacactcctaatgatataaaacaatattcccgacctactactctttcaacatccaatattctctacccttttacttctcaagtaacaatcatagcacctgcatacccattcttcagtaatcattctcttacacctaatcaaatctaagtacaaccatatctattctaaatactcaatactccatcacaacaatcctacccttaatcattctctcatttacttcctcacaataaaaaaaaaaatat

SEQ ID NO: 85458 - DNA, 224 bp, Glycine max
  Clone ID: PAT_MRT3847_48183C.1
gttctatatgctagtattgcttaatgattagtttaagatactatgatgcgagtacgggtcccattactgttgctgggacttgttttcctgtcttcagtttctgtctcatctggcattgcttattgagataaagagaactccagacacaataagttcctccacagatgttatagcgatatggactcgtacaggatctaatcatgcgacgctcgttgctacctcct

SEQ ID NO: 85459 - DNA, 338 bp, Glycine max
  Clone ID: PAT_MRT3847_48184C.1
ggcaatgccactttctatatcgccaggtgcagctacgattaatgccagggttacaaatatagcgatcccttggcctatcaactgatgttacttccatggcgactttgacatgcttggaaacaccctgtatcctactggcgccacatggacagattttttagtctttgggcgtgccagctataagactcattctcttgtattgatcatcccaagtgaggcttgcggaccaaataatggttttgaaatgtggagttctgagtgggcaaattaaacttcatggcatttgagtttccttattgacaatcccaaacagtctacagtttttgatattctcttgg

SEQ ID NO: 85460 - DNA, 2205 bp, Glycine max
  Clone ID: PAT_MRT3847_48185C.1
ccgttatccaagggtcgacccctgcgtcccgtcggccgcgtgcttgcaccgaagcgcgggtcgttgttacttggttcactcgaatggcgacatccttgtcaaacatgttcttgaagggaatcgcttgtcttgtctgcgttctcaaacgttgttgcttgctgctgctgcatagttgatcgaaagcatgacaacatcattgtccagcatccttttcaagggaattgcagctcgttctttcaccgcccctctaactagttcctgttatcatggaatgagatactttgctactgtatcaattgatcctgacacacatgatgacttcaagccagctaataaacttgagaattccaacatttctttggctgttgttattgaacgatgtgtcaatgattatcaggaacatttttgatgatactgtccttataatttttatagaatccttcagtaactggccaacatttcctcaaattcttcatcaagggagagtttattggtggatcagatattgttctcaatatgcaccagactggtgaattgaaggaaaagcttaaagatattacttccaagcagtgaacacacgcctaaggtgaagaagttttatgagatgttgtttacgagaacttgcgtatcattgattaagagatgtgaatactttgtactttaatttctggattatattcaaataagaagtttcaagattcaggtagatcagataaactaatttttttttttctatttctgtcactcgaagatgtacgtctttaaattcctccccttcgacttccggcaaggtattctgcgagtaggcaacttaatagttgttcttatcagctcttccctgctacttatgattatcaaatgatcctgacacacatgatgacttcaagccagctaataaacttgagaattccaacatttctttggctgatgttattgagcaggatgtcaaggataatcctgttatgatttacatgaaaggtgtgcctgattttccacagtgtggatttagttctcttgcagttagagtgttacaacaatatgatgttcctttaagtgctagaaacattttggaggatcctgaactgaaaaatgctgtaaaagctttcaggtatgttcatttttactggttttattactcttgcttcataagagagtactctatttctcttacagtgagcacaatttttcaaaattcacatttgtggtggtaaatgagcagtttccagtcaaaggatataaataataatatagagttgttgctgataataatcagatatgaaatgaaacataaaatcattattttcacattgtattgtgtaaatccaaaaattgtagttggaatcagattttgaattataaatcttaaaaataattgttctgctgttcaaactttgaaatcaaaattgcttttcaaaactccaattgtgttagaattagaattatgttatgacaccctttaatggctatggaatccaatggacggatgtcccgtgtgaatgagctgaagatcatcaacatagtttaaagatcaaatgtgctttctgttttccttttctttaattgtggatttgttgtagttgatttcagtgtatctggtgaaggtttagtcatttattcgcttgaacactgtcttttagcatctgaacttgtacaatcatgttaaatcctctggaatttagtcagccaaaacctgtccttgcacttaaagcggtatatgggatcatattaattagttctcaaacatggtagtactagaagtgcaggtgctgccaagtttaattattgacagaaaagtcaaatatactttttgtgatgtcctactgttctctcgtgtgttctttctctgcagtaactggccaacatttccacaagttttcattaagggagagtttatcggtggatcagatattgttcttaatatgcatcagacgggtgatttgaaggaaaagcttaaagatattacgtccaagcagtaaaaggacgagtaatgtgatgaaattcaaagagagtgaggtagtttagacaaacttatttgatgtaatctgtttctgtagctgaaagatgtccttatgtaacttctttgaactagattttctggatggtattaagttattcggcaaataaaaaattgtacttttaagttattcctttctataaaataagatgttttttttgtgtgtgcaaaaaaaaaaaaaaaaaaaaaaa

SEQ ID NO: 85461 - DNA, 146 bp, Glycine max
  Clone ID: PAT_MRT3847_48186C.1
tctccgctcaagcgattcctcactccagtggtacacgctccaacgcacaaacactaatccactccttgctcgtcttcgtcccatccactcagcagacgttagctccgcctacgacgtccttggccccaccatctacgtcgtcggcg

SEQ ID NO: 85462 - DNA, 300 bp, Glycine max
  Clone ID: PAT_MRT3847_48187C.1
tcttggaggaagcatggcaacatggaaaggaatcaaaacttaagagttcatcagtgcatgcagaataatctaggaaatcaggatcagagaaagagaaaaaggggaagaagtcatggaaaagttctctgtcttcatggtggaaggcttacaagaaaagcatgcttagtgaaaaaaccttcaactattctaaattaaaggattctggtaataagcattctcattcttctggtccaatgtatagattctccttaagttctgtttgataacactttctctcatcatttggttctttttttagtc

SEQ ID NO: 85463 - DNA, 227 bp, Glycine max
  Clone ID: PAT_MRT3847_48188C.1
gggaatctaaaaaaatgtcgactgtgctgaatctacttttacggttgatagtgatgttcaacaatggcataacaggtattaagacgatgaccactgttcttatgcatatccaaaaaaagttatatttcactagtatattgtgtaaattaataaaccgaaaataggcctgacccttttggtaccctagcgagacttatgtaaaaatataacaccgatttgaatctttc

SEQ ID NO: 85464 - DNA, 454 bp, Glycine max
  Clone ID: PAT_MRT3847_48189C.1
attagcttacaaagcaattttttaccagaaaaaaacttgggaggacctgatgcctgactgtgaccttgaccaacacacccttacttcgagtgctgtcgctatggggctgtgccgacatcctcattccgtccaatcgagatacaagagctaccatgagctgtgaaggctgactggtatacaccatcagcggaattggccctggggcctccagcgggcccaagcttgagttgcttgtatatgatgcccacacacttgcacctttggaccgctttgtgtgcagacgcttggtgtgctacggacaggactccaccttggcagcttcatgatcttacagacatactctgttgatggttccgtggcagaatgacatccacatggacaatggtctctgggcaagaccctctcactggcaacactcccattgcctcctctccttctggcacctgatgtccaa

SEQ ID NO: 85465 - DNA, 383 bp, Glycine max
  Clone ID: PAT_MRT3847_4818C.1
tttttctggattgcaaatgttttggtaaatataattagctgaatgaagaatatcctcctcttaccaactttttataagacaatgtagaacaatgttgcatgttctcctccaagttcctccaatttagttgataaactgattgtgctgatccaaatatgcataaaatagtattgtacaattgcaacttcattaaactttacgcctccacctttactggaggagcaaattatgtttggtttctagagaagatactatgtgtacacccataacccattctctgattaagttgtgcaactttgtaattgatgttcaatccttttgatgttatatgccaacaggggctggtagaaaatttgggagaagtcatgccacgacacctcaaa

SEQ ID NO: 85466 - DNA, 1050 bp, Glycine max
  unsure (1)..(1050): unsure at all n locations
  Clone ID: PAT_MRT3847_48190C.1
ccacgcgtccgcatacattgggtcctataatataaaaaccataacaaattcaaaatttggatccttactcacttgtctcacacacacattgtgtttgcaggtcccggcgcaataaaaaaacatatactgaaattgaaaaataattattaaaaaaaaggctcaaaaagctgcaaggctctgtgctttgtctccttctggcaccttccaagtattttaagttaaagcccctcaaaacaaagccctgctcagtctcactcacattgcactcactccacctactaagcgacgtcgttgggaggcgtaataatgtcgatgacgatggttatggaggaagatgaagaagacgtagaaatagagcacgtgtttattgctcatgaaattgacctcgattacgagttcgacgctgcaaggttcttcgatttcactcgcccggagactccctcggaagctcacgaagcccaactctggtttcaaaatgccgctggttaccctccttcgccttttgtgagaaggctgctagtggcgagagaggatttgttcttggaagatgttagcgattcgcccaagtccgaacacgtggaatgcgcgagtaatgttgtggatgatgaaaaatctagtgttccgttagggattggattttcggacacggcttttgagaattgtggtccaaaaacacttggtgaaaatatctctggcttgttggctggaattcaacaaaatgatggtacaaggtccctacaagtacctacaggacttacctttggcagtaagacaatcagcaacaatttgaattctaaggctaagtctgctgtaccaaagagttcaacactaatgaaacctactgctagtcaattggccaagcaaaatcgcccttctaaaaacatcggttcaagatttcagaagctactaactcggaatgaacataatttatctatctcttctggggtagaaagtcaagctgccaagcggcaaaaattagagggcggtctctttgtgtagggttnctgatgtgaagcagcanaccaattttttccacaaggcaccaatgat

SEQ ID NO: 85467 - DNA, 158 bp, Glycine max
  Clone ID: PAT_MRT3847_48191C.1
acgcgtacgaacaggtccgacgggtctacacatggggagacataccgggggactgggggacgagtatgggcctaggaaacaacttcatgcttcagatgtcatatcaccaaccatggatccggaagtagacaactctacgtaaaccttagggactgatg

SEQ ID NO: 85468 - DNA, 503 bp, Glycine max
  Clone ID: PAT_MRT3847_48192C.1
caatatcgaccgttgccaagtcggattcactcgaaatccccttctccgtttgatgtcgccgccgccgccgccgccatcactaagctccgacagtgttcaattcaattcaatgttggacgagagcaagttcgaggtgcacctcaaactctgggcccttcgaatcccttgccaacattgcaagctcgccacgagaatcctcaacggttacttgctcgacaagccccgagttaaacccatcgccgaggacccaacctgtgacaaaaaccgttaccttatactctctgacaatgttcataatcaagatttatctgatattccaaaacaaaagctagatgagctcaagggcttgtgtgagattgaaattgtgccctattcgttgactttagggtattctcactggagtgcagatcatgtgctgaagcagatactgcctactggagtggaggtgccttcgtcctttgaaacaattggtcaaattgcccatttaaacctacacgatgagt

SEQ ID NO: 85469 - DNA, 162 bp, Glycine max
  unsure (1)..(162): unsure at all n locations
  Clone ID: PAT_MRT3847_48193C.1
tgcgtaaagatggttcttggctagcatggcttgattctaagatagagggctctgttctctatgtgcgtntggagagcacgaacaacttacctaccacccagctagcgcaaatcgatcaccccctcacccatactgccagagacaacgaatcggcaatttttt

SEQ ID NO: 85470 - DNA, 303 bp, Glycine max
  Clone ID: PAT_MRT3847_48194C.1
acaggggacaaagaaaacaattcaattttggggggggtccctttactacattatgccggtcaaaaaaaaaaaaaaattctttagtccccattttaggcaaaaaaccacctaacaacaaaatttgtttagaaaaaactttaataaacccctaccctggcccggttaaatattctttcatcttttaaaaaaaagcggggaaaaaactataaaaaaacccgctaaaaacaaaaggcttgacacaaaaagggggaccgcgcatgaataagttttctttaaaagcccatccctttgactgagggtgaa

SEQ ID NO: 85471 - DNA, 260 bp, Glycine max
  Clone ID: PAT_MRT3847_48195C.1
gagaaagtccttgctgggaaatcgcagattgaggactactttccagaatttgctcgctacactactcctgaggatgctactcccgagcccgggcaggacccacgcgtgacccgggccaagtacttcattcgctatgagtttctgaggatcagcactgccagtggagatgggcgtcactactgctaccctcatttcacctgcgctgtggacactgagaacatccgccgtgtgttcaacgactgccgtgacatcattcagcg

SEQ ID NO: 85472 - DNA, 480 bp, Glycine max
  Clone ID: PAT_MRT3847_48196C.1
tacggctgcgagaagacgacagaaggggaaacaagtacctcccaggactcacagcaaagagccctgaagttgtgatgttccgccttacccaaattcctcaaccaggacaccgattgtcctaattcgggtaattgctagctacttcatggctattgtgttcacattgtggtggtaatagccacaagtttttcacatctcttcacacagagaaccaaaaaggtttcatcttttcaccacccttatcccaaagctttttcatttttggtgggtttttttctcgttcttatttgtagcatattttaaggtttgtttgaaggggttttagcagctattaatatctgtgttgttccatttggaggaccaacagaacatacaaaggttgttctttttgttcttgttaaaaagatgccaactttgattacatctaggtttcttttgcttgtcgtagagtcactccacatgagaagggggtttggccac

SEQ ID NO: 85473 - DNA, 962 bp, Glycine max
  Clone ID: PAT_MRT3847_48197C.1
cggacgcgtccgcccacgcgtccgcccacgcgtccgcccacgcgtccgcccacgcgttcgcgacatttgatcagcagcaaggctatggcccagctactggcggtggcagtgggagtaacccggcacaggagggccacactgcaaactatgcagcacggggagattcagcccaagctccttctgcccaaccgactactgttgtgcagcaaggttatcctaccaatcaacagcccagttcaaacactgtcaattactcacttcaaggaactcctcagccaggttatggggttccccctacatcccaagcagcttatggcaatcaaccacagcctggttatggaacccctcaatctcaaaagccgactggcaatccacctgtttatggagagtcacaatttcctagtgctggaggaggctatgatcagtcagcatatcctgtgcagccccctccttctgggtatgctcaaccagagtcaggttctcagagagcaccagcatctggttatggtggtgcagtgcaaccagggtacggtcatcaaatatatggtgctcctcagggtggccagcctggttatggtcaggcaccgccttcttacagcaacagttcttttggtgctggttatacacacactctggaatatactggtgatggtgatgggaatgctcaggcaccccatagtgccattgctaaagcatcccccttgatattttggccacccttcccctccccttctcatagacgatttttattgtgtttcaccgtttatggtactagtgacaccaatgtagcattgcattgtttagatggaagaaatggtgtattgttttttttttttttactttttgaatatcttgtacggttaaatagaaactcattttggaggcgactgaaaaaactagttgggaagcttatttgaacttgtgacaataatttaaaatgttcattatctttaatttttttc

SEQ ID NO: 85474 - DNA, 682 bp, Glycine max
  unsure (1)..(682): unsure at all n locations
  Clone ID: PAT_MRT3847_48198C.1
ccaaccccgatattgttgagtgcattgtgcatggttgtcggttgataaatataactgtctttctttcaaattatgtgtttcacatattcagagtacgtgtgatgtgatgtgcctntgccatntacaggttcagaatccacacaacattaaatacaatggaacaattgaagatttanaatatacatggagaacttaaagttttcatgggctgttcaaagggaatggtactaattgtgctcaaactgtcccaaattctgttgtgaagttcttcagttatgagcaagcttccaaagacttccaaattgtgtcattacacatcttaatgcctgtggtcaacacatgacaatccttagaaaatttggatctccactgcaatggaatgttgtggtccttgacattggaattggccacaatatgttgtacaaccatggtatcaatttcttgccgatagtgatttctcccacggcgataaggtctccttttattacaaacgtagggataaaatatgggaaattatcatccgccgcaagaaagactgggacgacaatgacactaaataaatttagaacattaaattggtacttgttgataatagtgtttatctttcttgcttttctgaataatttgtctactatgtaaatatattattaatgtttaatctattaaaaaaaaaaaaaaaaag

SEQ ID NO: 85475 - DNA, 596 bp, Glycine max
  Clone ID: PAT_MRT3847_48199C.1
gcgaataaaggttcctcattagtataatagaggtgatgtgctataagcttttttcatgaaactcttgagcttgcccaattttacacagaaatctaagattacagtcatgagatatctaatgttataaagcctattctgcttaccacttacagtattgttattttgagctaattgagattccatatgtaatagtcaatttacaaaataagaactaaaaaaaaaaagctcccatgaatctattgtacagcgagagcctagtttattgctaaagaaaaaacttttgagccaattgagactccatgtgtaataggctaattcaactcctctttgcattgacacatactccattgcaggaaacataagctagatcctaagacactgcaaaaacaaaaatagatcctctattgacgaaagcttaagaacatagcttcaactcatcttcaaactacttggtactccattgcagaaaacacaagttctttgttaagacacaaacaaaacatctcgtaatcctccaaaaggtacagctgtggaagttagctggaagccatcttcaatcaaattggattttactctaagcaccttcccatccaaag

SEQ ID NO: 85476 - DNA, 773 bp, Glycine max
  Clone ID: PAT_MRT3847_4819C.1
gaaagataccagtttttttgttgttttttttcctcaagctcaaccagagtgctctaggaaaggtagcgttttttttgtggttgtttttttctcaattctcaaccatggagaagcagaagacagtgatgggtttgattctgttgctgctgttatttgcttcggatgtgagtgcttggactggtgaaatccatggaagagttgtttgtgatgtttgtggggattcttctctcggacctgaagaccatgttctcgaaggtgctgaggttgctgttctttgcatcaccaaatctggggaggttctaaattatcaggcattcactgatgctaaggggatatacacagtggccgagacaatgccggagagtgatcgttgggatgcatgtcttgcccgaccaatcagtagtttccatgagcaatgcactcaacttggtgaaggcagcattggggttaaattcagttacaatcatccatcaggacattcacacactgtcaggacctttgtttatcgacccaccagtgttccaacttactgcatttgatatatactaatgagtatatgaatctgagagtgtctatgcttgattgaactagtgcaaaactaatgagtatatgagcatattttatttatactatatgtatgtgtagtggtgttccggtatgtatttctatagagcttagtcaaagtaagcatgagacgtttaagtaactgtaaatggcaatattatagagagcaatgcaaaatcattgtcattgagcaatgcattgagcaatgc

SEQ ID NO: 85477 - DNA, 671 bp, Glycine max
  unsure (1)..(671): unsure at all n locations
  Clone ID: PAT_MRT3847_481C.1
catccatctgattttgatgagcaggaacgaaggcagttccttgcagcaggcaattggagcatcggctgaggcggagaccatggacacagacgctgctgctgcgatatggaaagaaattgaggcttcagagagttaccttgtttgttctatgtacgaagaagcggcacaattagcttcctctgttttggaacgcttgcgtcattcccatcatgatatcgatagagatgatatgttggaatcaagtgctatggtgctgcttcaggcattcaaccaacttccctccaagacaccacacattcttaatcaactcacactatacttcgtttcacccaaagctattccttcccgtcttcttcttactggagcttgttttcaaatagcacaaggttctgcactttccgttcaacaatttctccacgagtttctcaatggatggactcttgaacattcacaatattctgctgtcattaccgaggctgcaagtagagaccaaagccgccgcttcattcttcttccaattgttgaatatttgcaagttgttgagctctatgccgtcacgcttcttgcaacacttcaaaaaaatggttgatcttgcaatctcctgggttgagaatgcttcattgcctgaggaanatcgacaggaacttctgagaagattacacntcatgcag

SEQ ID NO: 85478 - DNA, 363 bp, Glycine max
  Clone ID: PAT_MRT3847_48200C.1
gaagaggggggctagtatcatgtgacgaaaaaggggcatatgctgccatggtacttgggaaaaccatctagatggaggctacacatttggaagatacgacccaccagccgcattcgatatcatagagagcaaagcaaatgaggaaataaataatcggcactgagggggatgtgcctatcctgggcatgagcaggagatgcgatccatgctacatactacgggtgcctgagatgcaggcatggaaggcatatgatttgaaagactatgagatgaagagaaattctgtcaggagagagcagagtttgagaagatcaacaaccactatcaggagatatgacgaatgggcctccttacatgggggac

SEQ ID NO: 85479 - DNA, 652 bp, Glycine max
  unsure (1)..(652): unsure at all n locations
  Clone ID: PAT_MRT3847_48201C.1
gtagagggtgtcacatttagtggtatcagagcaggtcgaaccttacggccagtgtgttatgtgcttaccatattctggtgtgcactctatgtggttacttatgagtacttttgttgagcatgcttgaatttttatttgtattttctcctagatgattaaataagacttaataataatgcttgtatgtgccttgcatccttaatgtcttgttataccataaatccactgttgagtcataagttataagactggccatctctataatttgcgaagtgcggttggacattatggcaagccattgggtgatgcaagtagtcttgatattgattgataatgtgttaacgaacctctatcgtcctgtgtgtatgttgttagttagcttatttctcctttgatgcgtggattagtgttgcaagaacgttttggaccatatatatatcttggatgagtgtgtctttcttgatgtgtaaacgcatgactacttaactcccttattttgtgtgtagtcgtgaatgtagttattgaagcttgtgattcctcaatacatccttattaattntttaattcttacttcttagatgtacgttatatacttgttataggaaccttataattctaagatatatagttgtagtatgggtgtctgccttaa

SEQ ID NO: 85480 - DNA, 444 bp, Glycine max
  unsure (1)..(444): unsure at all n locations
  Clone ID: PAT_MRT3847_48202C.1
attcccggngtcgacccatgtcgtccgcttaaatttaaatacttaatagcatggggatacatttgatacaaaacttntaccttaagcacacgcaatggtgccgtggtctgtcttgttaaattcatttcacgaaattatttgttctatggtctgttttgttgtggttntggtctgtttgcctgtggtgtttttttcgttgggctttgtgggggagggggtgggtgtntgtggngtgggtttgttttttttntgggtgggtggttttgtttgttttggttggttttnttttgttttttttttttttttttgttttttttttttttttgttggttttgttttgtttggttgttgttgttttttgttgggnggggggtggttttgttttttttgtttgtttttgtttttttttttttttttttgtttttttttttgtttttttttttt

SEQ ID NO: 85481 - DNA, 176 bp, Glycine max
  Clone ID: PAT_MRT3847_48203C.1
gactttcttttttcacctaattacttatcatacgtaatttgtggtactacgagtacattaagagtaattgcttgctccaaccccttcaatcccctaagctttcaacggccgctctagacgatccaagcttacatacacgtgcatgcgatctcataccgcttccagactctcacctc

SEQ ID NO: 85482 - DNA, 378 bp, Glycine max
  Clone ID: PAT_MRT3847_48204C.1
aaaaaaaaaaaaaaaaacaaaaaaataaaaagcttcaaagattaaatttaataaaaactttaaaaaaacttcatacttcagaatcacaatttcatacaataaattaaattaaataaatttaccgggcccccccttcttatgaatcaaagttaaccctcccgtccccccacctactaagctctctttctttgtccccttatttcaattaacggaccatcgtttaacaccgcgccgattggcaaacccttcagtttccccaccttaatcgcttatgagaccttccctttttctcctctttaattaatacaaaaaatacccccacaaaaagcctttccaataaatttcccaccctaattggacaatttaactccccttttt

SEQ ID NO: 85483 - DNA, 284 bp, Glycine max
  Clone ID: PAT_MRT3847_48205C.1
ttaacccccgtacacctgtgagaatatttcagaaagggggagtatggacgtgtagcaattcgctaatgaagagtactcatttttctttatctgtatgctgacccctaatgcgttacggatctggaaagagtagaaatcattcagggttgtattgttgggtgtgaatgagcaacagcatcatggactcgtttttaattgaaagccttaaaggtcaaagcgatgagacttgttttctccttcctccaggccccaaaagagaagctcgcagaggctctttacgtgtt

SEQ ID NO: 85484 - DNA, 463 bp, Glycine max
  unsure (1)..(463): unsure at all n locations
  Clone ID: PAT_MRT3847_48206C.1
ggccggnataaccccgtcgacccagcgtccgtacttttgcggacagacgacgtaaggggcaaggtcctaattattcaagttccaaacaaagatcttaacacaaaaattgcaaggtccaaatttaaaaaaaataacaacgttcttcattccctaatcttcattcatcatcatgtgtaaaaggtcgatgaacctgaataattaacatccaatgttgccatttaggggagaagaaacatgatatataagtcacaagaggaaagacaaataactatagtaaagatatgacttcaattaggcataaataagacactaatttataatttgaaaaatgaaattggaaatgtagacaaaaggttactcaccaagttncattctccaagatgtgttaaaacataatctgtcctttggcgatctggacaggctttcacaatagctaattactttgaatcgtctctaaaccatt

SEQ ID NO: 85485 - DNA, 275 bp, Glycine max
  unsure (1)..(275): unsure at all n locations
  Clone ID: PAT_MRT3847_48207C.1
tgcttatttaaaattncncaactttnacatacttcaaaaagacaattttaaataagcattatgacaaaagaagattcaaanttgtctttttgaagtatgtnaaagttgtgcaatttctttnttntttcttttgtttctctagtttttcttttctcaaaggactgatttgaaacaatctttatccttatgtnccatttgatacacagaatcgattcatgtttggggatgatgatattcccaggaatataaaatgtattcagttatgttcagaaaaa

SEQ ID NO: 85486 - DNA, 187 bp, Glycine max
  Clone ID: PAT_MRT3847_48208C.1
aggaacatgcgctttaaaaagcccttctctatcgccaacactccaagacaattcgggacagccaaacttatagcaattagtgtagaagatgaatacattggatgcaactagggctgaacttggactacttgtactatatttgggcaaggctgaagcaagggacacaatattcaaggcaatacaaaaa

SEQ ID NO: 85487 - DNA, 308 bp, Glycine max
  Clone ID: PAT_MRT3847_48209C.1
aaccaggaagagccacgcggacgaaaacggccaaagcaaccaaaaactaagagaagaacacaggggccaagaaacccgcacaagggagaaggacaaggcaagcagaaccagaagaaggagctgaagcacaaaccacagccaaacaggagggatacaggcatcaagacagcgctagagcgaataagaaccaagcagagaaaggaacggcacgtaagaagctttttgatgatggtgtggtgaagcgtgaggacttatggatcactaacaaactctggatgtcaaatcatgcaccagaagatgtgccaaaa

SEQ ID NO: 85488 - DNA, 457 bp, Glycine max
  unsure (1)..(457): unsure at all n locations
  Clone ID: PAT_MRT3847_4820C.1
ttttctttttttttttttttttttttttttttttttttttttttttttttttttttttttttnaaacaataaaccaccttaggcccataattaggggcccctttgaggccctaaactttttttaaaacagattccacctaacaaagtttttttttggaaaaaaaaactaagtcctttaataacaattttttggcagtttcttaccctacaaaaaaaacagagtttttttaatagggttaacaatatcctggaaatgctaaacataaatttgattatgacccgcctttcgtttttgggaaagggatgcttccagtttttttttcaactgtatagaagaagccccccctccctaagtttttagggaaaaggggggaataattttatcatttggagccaaaacactggagttttgacccaaaatttgatgctccttgaacgtttaaacaacattaaaaac

SEQ ID NO: 85489 - DNA, 682 bp, Glycine max
  Clone ID: PAT_MRT3847_48210C.1
caaatattcatttatttgttttatgccgcattataaagacatttacagctccaaggttttctacttgcatgttgagtcccttcgacttgagaggaggtatgctctgttcgtttctaaagaagtttagaggatcaaccatgctcttcactcttgccaatctattgaagttgtttttgaaatacttaagaccccaaatgctggcttggctgtagcttgtgttgccattgttattatttactccaatgtcaaggtctctataatttagatatgcagctctaggagactttgaaacaaaaggttccatatatttgtacgctctcctaatccagtttatgtacttttgttttgcctcctccccttcctctcgccaacgcaccaagtaatgaatatggaatatgtttccagatctgtgagggaatggaatttctgattctgaaatctcatacatcttacctccataaggagtgaactgaataacagcaccttgagcctcatcttcataaaacaatggccataacccttttaacccaacatcaggaatcggatccctcacataatcagattttcctttgaagaatggtaaatcacttatacttctgttcagcaaagcttcacggggttgaccatttgtaaattgagacatatagacaactgaatctatccaactcatctcagtacaatc

SEQ ID NO: 85490 - DNA, 1173 bp, Glycine max
  Clone ID: PAT_MRT3847_48211C.1
aaaaaatctcactgctcaacggagtgactggaaattagttcaccatacccatcaatttcttaggaaggaaatgaaaaaggtctccaaccacggataaatctccagggatatctgctagggaaccccataacaacaagaaatgaaggaaatgatcaaatcccatttgctcatggaatgggacttatttctgatgaactatatgcgtcacttcagagaaattgtaaaggagagtatgaaaatagagattccagaaatgtgttgtgtttaagagatctcaaacactatgatgagtgcctttcaggaatcaatactttctatattttggatcgctattgtaaatctgattcgcctaaaaaacatgaagctcagtggaggagatctctgactcagaagtttgaggcctctcttaattctcatctcagagtgccagacataagatgccaaatttttgggtttttccttgccactcaatgggccaatgacgaaagtgttcgcaagtcactgcatattcgagagggaactataggcaaatgggaacgttgttacactacagattttgaggaacagatcttcagtagctttgagtttcatgtaaatctcagtgcaaaaggatatcgttctttaatatacagtggagatcatgatgcagttgttcctttcatgtcaacccaagcatggattagggctctaaactactccattgtggaagattggaggccatggcttctagaagaccaagttgcaggatacacaaggatttactcgaatcaaatgacatttgcaactgtgaagggttcaggacatacagctccagagtacaagcctgaggaaggttttgccatgttcagtagatggatagctaatatgcctttgtaactcagccgctatgttggcagaaatctaggttatcaatgttatgctcatttgtctatgattttttattttttgaattgtcaatgtttaaagatcctgtattttaaagtgagcaaagcagtagtgtcaaataactgtttgtactatctgaaattttttctttaatttcttttaatccgacatcttcggattcatctagagaacggtcttgtaaagtgcaattcctactttatgaggggaatggggaatatttggagacgttgggattttactatggaaaattaaatactaaatatccag

SEQ ID NO: 85491 - DNA, 251 bp, Glycine max
  Clone ID: PAT_MRT3847_48212C.1
catgcttggctggggacgcgagaaccatggaagaagctgctggcatggcggtctcatccgcatcctgtggctggcatggccagttaagctgtgcgcattatggccagaagtgtgatcggtgagcatgaggaagactcgtcacagggcacgtgtcatcaggaagcccatggtacggtcgaaaccgagtcaagtacttgggctcattctctggcgaccccgggtactatgtaaccggtgagttcggatgtgac

SEQ ID NO: 85492 - DNA, 1745 bp, Glycine max
  Clone ID: PAT_MRT3847_48213C.1
ggctggtccaatattccagttgggcacttctaaaactgcacaagaagaagaagcttcaaccccaggaataagcacggtttctaaaatgttttgcaattttcacattattcttctaattgctcttgcacttttggtacaaatatcatctcagcttggctccaaggtagaagtgcttcctggctttgaaggccctcttccttttgaactggaaacagggtacgttggattaggagaaaaagatgatgacatgcaagtgttttactactttgttaagtcagaaaatgatcctcagaaagaccctcttatgctttggctaactggtggtcctggctgctcttcattttcaggtcttgcctttcaaataggtccacttcgattcaagattgaggagtatgatgggagtgtgccaaatttgatcttgaggccacagtcctggacaaaggtttgcaacattatttttgtagatttgccttttggaactggcttctcgtatgcaaaaaatctcactgctcaacggagtgactggaaattagttcaccatacccatcaatttcttaggaagtggctgattgatcacccagaatttctttcaaatgaatttaaatcgggagctgattcttattctggcatacctgcccctgctattgttcaagagatttcaaatggaaatgaaaaaggtctccaaccacggataaatctccagggatatctgctagggaaccccataacaacaagaaatgaaggaaatgatcaaatcccatttgctcatggaatgggacttatttctgatgaactatatgcgtcacttcagagaaattgtaaaggagagtatgaaaatagagattccagaaatgtgttgtgtttaagagatctcaaacactatgatgagtgcctttcaggaatcaatactttctatattttggatcgctattgtaaatctgattcgcctaaaaaacatgaagctcagtggaggagatctctgactcagaagtttgaggcctctcttaattctcatctcagagtgccagacataagatgccaaatttttgggtttttccttgccactcaatgggccaatgacgaaagtgttcgcaagtcactgcatattcgagagggaactataggcaaatgggaacgttgttacactacagattttgaggaacagatcttcagtagctttgagtttcatgtaaatctcagtgcaaaaggatatcgttctttaatatacagtggagatcatgatgcagttgttcctttcatgtcaacccaagcatggattagggctctaaactactccattgtggaagattggaggccatggcttctagaagaccaagttgcaggatacacaaggatttactcgaatcaaatgacatttgcaactgtgaagggttcaggacatacagctccagagtacaagcctgaggaaggttttgccatgttcagtagatggatagctaatatgcctttgtaactcagccgctatgttggcagaaatctaggttatcaatgttatgctcatttgtctatgattttttattttttgaattgtcaatgtttaaagatcctgtattttaaagtgagcaaagcagtagtgtcaaataactgtttgtactatctgaaattttttctttaatttcttttaatccgacatcttcggattcatctaaaaaacggtcttgtaaagtgcaattcctactttatgaggggaatggggaatatttggaaacgttgggattttttac

SEQ ID NO: 85493 - DNA, 420 bp, Glycine max
  Clone ID: PAT_MRT3847_48214C.1
cgcgcccggaaataattcgcgcggggacgacgagtccactacgcggggcgccgccctttttttttttttttagtaaaggctgttcacatttttcacaaaaaaaggagaaggctctcattgttcctaaaagccatatctccccaaaaatgggtgctcgagtgagcacctcttatttacctccacagcgtacacaacttcaagcccaattgcccgacacaaaggatacaacgtcagaaatgcaactcatgcctccaagcgagtggataccatgactataatatggcagaacaatcacgactcctttcttggggctgaaagtggaatcttaaaaaacaaaaaacgctataagtacccaaaaccgcccccagtgtgagcccccagcaatagatgcgatgaaacataacagaaagtcaacaaatt

SEQ ID NO: 85494 - DNA, 223 bp, Glycine max
  Clone ID: PAT_MRT3847_48215C.1
ggaaaaagtatcatcaaggacttcctaatgggacatagtataccatgcctcctgttgattccattcaacattaaaatccagattcaagagggctaacaaatgtacatctgtggacagaaacgcatttgttacataccgcactaaaccttaacgcatactcactatttacttaactttgctaacagggcttcagagtacatgtgcggcctagagcacaatcggt

SEQ ID NO: 85495 - DNA, 327 bp, Glycine max
  Clone ID: PAT_MRT3847_48216C.1
taccgatgggggtttgatgcagggtgtaataccacaggggagagcggcaattagcaatctgaaactgaacctgacaacttacagaccaattgtgaagctgatgacagatctgagtctcgagactacaacgtgcgataggactggtgcacattgagatcaggagccctgatattgataaacgtgtatacagactacttatggacagatcgactgagataaagacttgggacctagggaatcaacgcagatattccactagccagactaaattgctaacgaggaccacacatgggatcctgaataagatggaacacaagctccacggat

SEQ ID NO: 85496 - DNA, 334 bp, Glycine max
  unsure (1)..(334): unsure at all n locations
  Clone ID: PAT_MRT3847_48217C.1
ggttcttgtggcaaaggaaggggactcanacaacttacggtcaagacaagctcgcagcaactacgccttgtgacgaaccacaggtagatcaactgcagcggggtatctatcaagcggatcaggcgcatgttgtggtctgcagaacacttaaccgggtatacgagaataattcgaactcacaaccgaccttcgttttcacaagtgcatttttggacgcccgcttatccttggaccctgttggacacgttttttcaatttaatactggggtaaacattttcaaacggacaagagagcattcaccataactggtggctaaagaaggttcctgattga

SEQ ID NO: 85497 - DNA, 290 bp, Glycine max
  Clone ID: PAT_MRT3847_48218C.1
gaagcgggggaaaacccccttttttaaaaaattttggggacaaaccttttttggggcccccccccttaacaaggggggggggtattacattttttttttggcacatttaacccccaagtttgaagttaaatggcccctttgggcccaaagcttggaaaaaccaaagcctttttgggggtcccatttgacaacttgggagcaaaagacccagaaacccccttttggggtttaaaggggcccttattccacccgggggggggaaaaaaccccaccctccccccttcgggaaa

SEQ ID NO: 85498 - DNA, 512 bp, Glycine max
  Clone ID: PAT_MRT3847_48219C.1
tcctctagagcggccgctttttttttttttttttttttttttttttagaggcgacacattgaacatatttcaatttataaacattcttttggtttggatcaatattatagatctccccagtcaaaaaatgagggactaagctccaatcaagttctccgatgttatgactgggatacaaaattgggggctttctgtatgtcaaaccaccttcatataatgcattagccacgacctgaaaaattgaatgtgcagcagctctaaactaaactgaagccgtcccagattacttcaggtaacaccgcgtcaggtcagcaaaggagttagcctccatcatgggttctccaaattatttgaatttccatttccattttgtacatgttctacagaggttgtcttttcaggtgctttcctcaagaagctttttgcataaattgcaccaaagacaattacagctccaatccattgttgccagctaagaggatgggcaaaccacacacatgacagcaaaatgc

SEQ ID NO: 85499 - DNA, 258 bp, Glycine max
  Clone ID: PAT_MRT3847_4821C.1
tgtcaacggacgtatatataaaccaacacagcaccaaccacttgtctgcaacttcctgagtcacaactaacatgacaactggatcacttgtaaaacctctacacatttgctgatacctctctgctttgcctcatatctcacctatgtgattcagcatgcaaaccagagacctacattatctacactggcaatagcatgaatgatgcggcttctgcgttgactctttaattcagccatgctctcagaagttgcagacag

SEQ ID NO: 85500 - DNA, 422 bp, Glycine max
  Clone ID: PAT_MRT3847_48220C.1
tcgagcatcatcggaggttggtaaatctatgggtggttgtgttatactattgtagtcatgggcttggtaccgcatgccttttattgcaccaagagtcccacgacccgaaacaacgtttccactggctaaaaggttatttacatatagcgaaatgtaaatttttttatttcaatgacttgtattataacattacaatgaatactgattttgtatgttttacatttcagattgagtggtggtagattagaatatagggccacacctcatggtgacttagtcggatataggtctcatatagatcatatggagagccataaggtataatactatcatgatctgcaccttaaatatgtacatacatactaacatgttgccttgttggcatatatttcagttttcttgggtcccatatagaggatttg

SEQ ID NO: 85501 - DNA, 271 bp, Glycine max
  unsure (1)..(271): unsure at all n locations
  Clone ID: PAT_MRT3847_48221C.1
ggtgccttatcgctgtggttttcatcgtcttccttctcttatatttctcttttnttttngncttcgccgnangccgaaacaatggccggaaaaggagngggncctgctancggaatcgatctcggaacnacctatncttgtgtcggtgtgtggcaacatgnccganttgaaatcatcgccaangaccangggaacagaacgacgccgtcttacgtcggtttcactgataccgagcgtctnatgcggtnatgcggntaagaacnaagtcgcc

SEQ ID NO: 85502 - DNA, 181 bp, Glycine max
  Clone ID: PAT_MRT3847_48222C.1
agcatagcaaaatgatcaactacagccagtattgaacgtcccattcctcttatcaaaaatttccaagctaccatcgaacccgtctcacatctaatggttgccgagagactaaaccttcagatcgcacatcacaagcaaagcttattatacagtgttgatgaccgtgaagcaaggtcaattc

SEQ ID NO: 85503 - DNA, 437 bp, Glycine max
  Clone ID: PAT_MRT3847_48223C.1
tagcggccgccctctatttttttttttaagtccgagtctgggtatgactatcatccttaaaaatcagaaagggcaaattatgttggtaagcctgttctcgagttgaacagatcttgagtactgcacatgctataaccggtgccaacatggcaatttgcacaggactaatttaagggatgacataacctgactggttttaacctgagacgcagacccctgatgatcttaaactgatgactacattctgatggatcctgacctatactactgtgagacatgatattttgagatgctccaaggtttgaactgcatcaggaacaagtggaatgatctaagatctcgggctctgcatcggtagttctagatgtgagaccgcattacaagctatgggcactattggccggagaggagcttatagggacaggcataggttcgca

SEQ ID NO: 85504 - DNA, 1398 bp, Glycine max
  Clone ID: PAT_MRT3847_48224C.1
ccggaattcccgggtcgcgtccgcgtccggttccacttcccttctgcagcagagaaaggaagagagggggagctatggagctttctcaacttggtttcctagaagagttggtagctcctagaagagactcatggaatgctttgtccactggattctgtgagctattgtctaatggctgttgttggagttttgacacttttcttgagaacccaacatttggtgcattttcagctccaagatttgacagcccttacagcagtgaagtatcagcagcatacccttttgctgctgatgggttcacaatgccattgtcagagcttgaccctgggagtgatgagccgccaccaccaccaccacttccaccatcattggaggatgcagagattggctttcatgacaacaacaacaagaagaagaacaactttgaagaaaccaaggttgtgtgcaaagttgaggagaaagacagagagattccactcttcaagattggcatgtgtgatgatggagagagaaaacccaagtccaagaagcttgaagggcagccctcaaagaatctcatggcagaaaggaggagaagaaagcgtctcaatgatcgtctttccatgcttaggtcaatagtccccaagatcagcaagatggataggacctctattcttggggataccatagactacatgaaagagcttttggaaaggattggtaagttgcaagaggaagagggtacaagtcagataaatcttttgggcatttcaagggaacaactcaagcctaatgaagcaatatttgatgttgagaggagagaccaggacaccaggatcagcatctgctgtgccacaaagcctggattgctactatcaactgtgaataccttagaagcaataggccttgagattcagcaatgtgttgtaagtagcttcaatgacttttcagtggaagcatcttgttctgaggtagctgaacagagagattgcattcatcctgaagagataaaacaagcattattcagaaatgcaggctttggtgagaaatgtctctaggggaaagatggaacatagctataacaatttgcagatggtgtaaaagaagcaactttccttcattagtttgtaatccaaggaattagggaagtagaggttttaatgagattcagaataagttggctttggttgatgatttctttcttaaagcctctcactgtgttttaacatatattgggggggctatcctttagtgcatgctgcaatttcatcttttgaaaaaagtgtattcttttttaagaagtgatctataatgaaggagaattattgcaaagccctcaatatagtggaatcaaattgattttccatggattcctaagtatgctgctgcatcaaaatttcttttctgggatcttagaac

SEQ ID NO: 85505 - DNA, 1501 bp, Glycine max
  Clone ID: PAT_MRT3847_48225C.1
gaagtccttattcccaattctccttttaattcaaccgcagcaatctccgtctctgccccacggcttacgttgagcgaggtagtggttagcattatatattttgggaacttgcagtatgtctcgtggatctgtgaatcggaaacatgttacacgtaaagatgttaagcgggtgcaggctcttattgagcactgtctgacacaaaatatgaataaggaagaagctgttgagttaataagtcaagtagaaatagagcctaatttcatcaaactagtttggcaaaagcttgaggaagaaaatcaagagttctttaaatgttattatgcaaaaatggcatggaagcagaaaatgatgctactcagcatattttcggaagaacaaggggaaataacgggcttaacttcaagtgcaccactccctacctttgatggttcacacaaccctgcagtttcatcccaagccaactgtaatgttggcttaactacaatcccatcatcattccctacctttgatgggttacatagccctgaagttttatcacaacctaactctatttttgatgggtcacacaacccttcatttttatcacaacccaattctattgcgggcttaactccatttgcatccctccctacctttgatgagttacataaccctgtagatttatcacaacccaactttagctttgatgggtcagataaccttgcagttttatcacagcctaactctaatgtggacttgactgaaattgcctcattacctaactttgatgggtcacataaccttgcagttttaccacaacctaactctaatgtggacttgactgaaattgcaccattccctacctttgatggatcacacaactctgtggttttgtcacaacctaactccaacatggcacatcttcctccattaccttactacactgaagagcaaatccaagcaagtttgatgccaacaaatatggaacaacccatttattcaagttcatatgatgtgtttaacaattgtggatcgtctctccaaacaagtatgcagggtggtgcggttgatgtgtctgcttatgacaaagacaattggattagtggcccttcgagcatgctttctgatcaaagtgaagacatgggtatgatacaaagaattaatcgggagatgattgaatcatggcctgaatattcaggttttcaccccttaaattagggaaatacccttccctttaattttgacacctttgtaggagacagtggtgaatgtagtgaaccaactaattgatgaaagatattatttatttatttttataaaattatagcttaggaaagtattgttctgtttttggtccaaataaattgggaaagtctgaatttatttaaatttttgttctaagagaaaaaaatagaattaatcattttatattgttttgtaatatcaataacggtatgtattcaggttttagtgggtggatttttctttgtttttttttcctaaacatgattttggtaggaa

SEQ ID NO: 85506 - DNA, 503 bp, Glycine max
  unsure (1)..(503): unsure at all n locations
  Clone ID: PAT_MRT3847_48226C.1
ttaggaagcagggaaagaccgagcagcnanggcacgaggaaagaaccagancaagagganagagaacaccaccaaccgccaggncacnaaaacnaaacgacggaagggccnnnncaagaaggccaacgagcncaccgnncnacgcgangccaaggtttttattannanggnctccagcacngggaaacnccacgagnacaacagccccnccaccncaacaaagcanggcngcgaccagnaccagangacncnaggagncgancncnggaacncncagnacgagaanangcaagagaacnngaagaaacncaaagacgngaanaggaancnncgnaaggagaanaggcagaggaagggagaangncngaacgaacngagcanggaagaacncaagcnccnngaggaagaaanggacaaggccgccaagggngnncgngaacgnaagnnaaaggggaaaacaaancagaangacacccaaaggaaaaagcnnaaaaacgagaaag

SEQ ID NO: 85507 - DNA, 425 bp, Glycine max
  Clone ID: PAT_MRT3847_48227C.1
actcggtcttgaattcccggacccacgcatccgtaattttttataaaaaaaaaataaaaaaaaaaaattaaaaaaaaaaaaaaaaaaaaaaaagaaaagaaaaaataaaaaaaaaaaaaaaaaaaaaaaaaaaaaaaaaaaaaaaaaaaaaaaaaaaaaaaaaaaaaaaataaaaggggggccctttttaaagattcaaaatttacaactcagtctatcaaattctaaatatcttttaagaataccaaaattttaataactttgccatccttttaaaaaattttaacttggaaaacacttgtgtaatcaaaattaattgcctttaaataaaaaccttttttcgcaagatgcttatatcttaaaaagtccttatcgtatggcctttataaaaattgactcaatttaaactgtaaaggataccccct

SEQ ID NO: 85508 - DNA, 565 bp, Glycine max
  unsure (1)..(565): unsure at all n locations
  Clone ID: PAT_MRT3847_48228C.1
ggctcgagcacaaaaacaacacaatctcacactgttcccaattttcaacactttcaagttctaccatggcggcaggactctccgccgccataaccatgaaacccctcctccgtttccaccaacctcgcctccccaaaccaatcccaacaacactccctttctctcccttgagaattttccatcacacagcatcaccgataccccaaaatttttcaactttcaccgtttgtgtcctcatgcaggacccaaaacaaggcacccagatggaaattcaggcacaagaaccaccaccctctcctcctcagcaagttttgtcacaaaagttggctgagaaattggccagaaaagagtctgagagcttcacttacctcattgctgctgtcatgtctagcttcggcatcacatccatggcagtgttcgctgtttattatagatttgcatggcaaatggagggtgaagaagtgcctttgtctgaaatttttggcacatttgctctatcagtgggagctgctgtgggtatggagntttgggctagatgggctcacagggctctatggcatgcttc

SEQ ID NO: 85509 - DNA, 767 bp, Glycine max
  Clone ID: PAT_MRT3847_48229C.1
atcaatatccacacttgctcatcgaatgctagactagaatccctgatgatcagtcatctctttggctattctcatctctcttgctactggcgagaatgagacatgtgcatgtcactctacttgacgtacatgattctccagatgtttggcctgacgctcccattcccactgcactgctttaccttctagcagtcactccctacaggtgtgaaagacggcgcactccctattgaagttgatggtacgcagggcccacgaacattcttctgtagagaaaaccttcactcatccacaacgctgtgcgttctaatcacgatgcgtacatattgaatccctcatggggaatgtactcttcattacggcctatgtagcgacaccatctacagaccgtatgtaccttgtgaatagatatcgctatcgtgaatgcatcgcttgccggagaacagaagtcgagagcagaatcgcttgtgaacagcaccagccattctgccatgtgcacactggagaaacaacattcacgaactttcgggtatcacatgccaatacacgtgagccacgcactgtggaaggagtgtactgtctcgcagatacagcagtgatgcgtcatgacatcatgttcacaagtgaggatattactggcataaatgccccgaatcaacagttgtcatgcttgcatcgctggctggtgatgtcaccaaaactcagtgacttgctgtgtgccactcgaatacttccggaatgaaccatctcatgctgcatgaactcat

SEQ ID NO: 85510 - DNA, 496 bp, Glycine max
  Clone ID: PAT_MRT3847_4822C.1
tacggctgcgagaagacgacagaagggatcatgttctcttttattgtttaaaatgtaacaaaaattatgaatgaagtttataaagtaagtagttgaactcaatttttttgtaatttttaataaattttagtataaaaaatgtattaaaaaatatattgcattaaaagttatattgttagtattttatagaataaaattgtcttggtaaaggataccaatggtctagaagaaaaaaaaaatccttagaataagattttctaagcctttctattatgattatttattttttgtctcctttttttttcatattatgtagctacaccaacctattgaaatcaacaaaattattgtaagtaatccatcatttcaatgttttgaaaactgaaccgactgatccgatggaactcaatgagtaaattagtttggtttgttaagagaataaaaaatatattaaaatcaatatgacttgagttgaatcatatcggatgggtctttg

SEQ ID NO: 85511 - DNA, 798 bp, Glycine max
  Clone ID: PAT_MRT3847_48230C.1
caaagtcatcacccccgacaccacctacacaatcaagtccaatagcactaccaccaccaagtccattaacacctgaaccatcaattccaacagcaccaccaacatcttcatcttcaggaacaggccctttcgggtatggtgccccaccttcagagttaaattcaagcaatccagcgtcaggtataatgccaggttttgcttctgatagccctcctgttgtaaataccacttcggtgtcgcgttctgtgggtttgagaccttttgttggcttcactattctgatggtatcatttggcactacgagactcagtatgcacccatagagtacttcaaaaccaagatttccatgaagaacatatagtatgagatgctcagtagtacctctagctatacgttggagttgtaatgttatgtagcattacattagatgcagtgcgtaggtctgtaggtgcagaaagttattagggtaagaaaggaacaaaagtaaggtacgtaagtgattatgagctgccaaaatgatcatagatgtgctaaaattcagttgaggtgaaggtgagggaaataattgctgctttatggtatgtaggttgtacaacagactaagattaatattggtcatgtacataatttttgaaagctagtagttcttttcattgtatggagtttgtagttcatgtaaattggtcatagttgttctggaaattgatcttcttaaatgggggagggtgggtcatcaaagggggccccgtcgcccatttcaaattttataaaaagtgtgatatatgaggccccttatgt

SEQ ID NO: 85512 - DNA, 111 bp, Glycine max
  Clone ID: PAT_MRT3847_48231C.1
gtatgtagagaaattagcaaaagaaccagcgtacagaccagcaattatggtgggagtaggctagtgttaaaacttaccttcaacattcttacttaaaaacagacaggcacg

SEQ ID NO: 85513 - DNA, 299 bp, Glycine max
  unsure (1)..(299): unsure at all n locations
  Clone ID: PAT_MRT3847_48232C.1
cccaatctcaagatcgctgcgacacgacactccaacgttgttgctcagtgaaagaacgcaattttttttttagagaaataggcccaaacaaaaacactactaacccaagntctgaatccaaggaaacccattgaaagtaccacatgatctacttaggcatgagtgctacgtaagacaaagtttgcttaagtaagcttctaaaagtatcgttggaaagtggggtcaaaagatgaacttcaggaactttggtgttggagataaccaccccacttgggatgcnatgcatgggaagacaccac

SEQ ID NO: 85514 - DNA, 276 bp, Glycine max
  Clone ID: PAT_MRT3847_48233C.1
cgggggcacccccattggcgtctcagaaggagaatttggttttgaatcaagagtctagacctgcatttgctgcagaaactcctaagaagttgaaccgagaaatcgcggttgatgctagcctttcaaattggctgggttcatcagaaactacacctgttaccaaaggtttgtacgtgggtaccctggagaggagcagctcacaaagctcaaattcagtggttagccattaaaataggcctattttaggtgcattgacagttgaagagctcaaacatt

SEQ ID NO: 85515 - DNA, 394 bp, Glycine max
  Clone ID: PAT_MRT3847_48234C.1
agataggaaaaatctctggtcgcaaaacgttatctgctgttctgtgcaaggcataggattgacgatacaactggcggaagttggcagaagcaagtgaagagtctacaggttctgagctattacagggtctattcagactgtggctagaagatgatgctggatgatcagcatgtgatgaatgttataaaagggcacagcatgatcctccggagatattcatgggaaatagtttgcttcaggaccatgagaacagtgtccggacagctgcaagtctgagatgctatcatcattttaaagaatcttacagagcaccctcacatgatagaaacgcaaatcattatatagggaatgtaagtatttgaagagacagtaatagcagaccgaaaaagatgag

SEQ ID NO: 85516 - DNA, 256 bp, Glycine max
  Clone ID: PAT_MRT3847_48235C.1
tgtcgttcggcgtctggcaactaatctctactttgggttctacctactacatcatggggggatcttccttttgcttcggccaaaaaggccttggtggaacccagtcaaaagccgggaaaaaaagcattggttgaaatcctttaaaggttcggaggaagcattgttgaccttggacaattatcattgtcagatccgaaaagccgaacccgaagccaaagccaacgagatagccctagctattttggaggaacggctt

SEQ ID NO: 85517 - DNA, 351 bp, Glycine max
  Clone ID: PAT_MRT3847_48236C.1
gggggaagagagaaaaaatcttttgcttggggaataaaatgattttgttttggaaaaaccaaatgaataacccgcttaaaccccttttttttaacaaaaaaatctaaaggctgttttgtttgtcacaaacttcatagggcccccctttccttttcgcccccccataacccccttttaaaaaccaaccttgaaatttttttagccaaaattttcttttttgctttgacctcgggcccaaagcccccccccccaaaaaagggattaaaattttaaaaccctcccaaggccttttttggagaggttccagttgcccggggttttgcaactttttcctctgccttgaaaattttt

SEQ ID NO: 85518 - DNA, 468 bp, Glycine max
  Clone ID: PAT_MRT3847_48237C.1
tttataccatttttttttttttttgctcaaattttcaatttgttgatcgggaaacgaattgctgcttccaagtttaatccctataaggccacatgaaaacaaaaggtattttgacgcctccccccataagtgccgccacaaagagtgacaaacacaatttatccccttttattcttgcaattaaaacaatgacggttacgcccaggctaccccgacccctgggcctaccccgaaatttcctaccccttcccacggccataccaatttttcctatactgagatctaatacacacttggcctaattatgctcataatgcgtccccgtgggaaaaccatatactctcacaaccgccaccaacatacgaaccagaaccacatatagtaaaccctgtgggccctaaggagagacctaaccaaaattgattgcggtgcgcaaactgccccctttcccaatggaaaacctgatac

SEQ ID NO: 85519 - DNA, 1998 bp, Glycine max
  Clone ID: PAT_MRT3847_48238C.1
aagcaactcttgataacactacgaagttttaagcccctaggtgattttcacatgtccagtgttggatttaactatctatagcattttgtctgcggttatgctatacttacagttttatttatttatttatttatttttggtagtaagctgtagtttagggtaaaagaaacattagagaggatggacaatggtaaagtagttggaccaaaaatttccctgttatgaactgagtcaactgactattctcaaagcttaagttattagggaaggcacatgaatagtttggttgcatttatatctataactatagaagtttccaaatgttttggggagaaaagtattataacctggttcacaaagttgtttaacaagataatgaggtctaagaagatgctacatctacagaggaaaagtatgattatatataagaacaagggagatgttactagctaactaaagagggattaagcttgtgagtcatactatgaaaccatacgtgagggtaattgaacaagggggaatagaaagaattgccccagctatagagggattaagcttacgagcaatattatgaaactatagggaagggtaattggacaaagattaagacgagagttcattttttagtgtatgttaggctaaggagaaaacatagttaactatgcattttctttgtttggttaaaagaggaaatgaagagaaaaaagagagaaaaattggctattctggaggtgtttatattgtaacaggtgcacaactccttagcaaagggagctggccaaggaatgtgcttcatctgcggcttctctttgctcatacacctaattgcagtatccggaagtcagagtggactgctgcaccagaggcttcaagaaaatcatcttttctcacaaatttgagcacaacattttcgttcacacagcacggtaacactggtcctccaaaacaggctccaactgtacttaactctggagtttatccagatggtccacctgtgccagttcgtgccggtaaactacttaaatatgtggagacagctgaggttgtgcgaggcccacatgatgctcctggccattggttggtaacagctgctaagcttgtgactgatggtggtaagattggattacaagtgaagtttgcattgttagattattggtgattccaggttactgttcagggtatattggtttgtcatgtgttgcttaaaatggttttcaaaccatagatcacttttatatattctatcgatgtggcgaggatctgatgataatgaatccagtgaacaatttctggaacgtatcagatggaagagattctcaaatgtgtgcacagcagttgttaagcatgaccctaactggttgattaattctggaggtgtttatattgtaacaggtgcacaactccttagcaaagggagctggccaaggaatgtgcttcatctacggcttctctttactcatatacccaattgcagtatccggaagtcagagtggactgctgcaccagaggcttcaagaaaatcttttctcacaaatttgagcacaacattttcgttcactcagcatggcaccaccggtcctccaaaacaggctccaactgcacttaactctggagtttatccagatggtcctcctgtgccagttcgcgccggtaaactacttaaatacgtggagacagctgaggtcgtgcgaggcccacatgatgctcctggccattggttggtaacagctgctaagcttgtgactgatggtggtaagattggattacaagtgaagtttgcattgttagattattggtgattccaggcaactgttcactctattcagggtatattggttgccatgtgttgcttaaaatggttttgaaactatagacacttgtatatattctttctacaggctgtgtacagtacaattacaaaatgagtggctgttgaaatcgggcaatagaaaattaaaatttgactattctgttaattctggatagtggattcattta

SEQ ID NO: 85520 - DNA, 383 bp, Glycine max
  Clone ID: PAT_MRT3847_48239C.1
aagagaaaaaccacactcttaataggaggtgataaaaaggtggcacaacaccggtatacatgatgcacagctaccgagacagactagccgtccatgtgagcatacatataccaactacatgagcgctcacctataaattgagctataaacatatctaacaggaccctacatacctccactcatggcccaaaaaagaaatggaggcaaaaaaaacaacaaaggaatgatctcctagcaggttaaaatcaaagatatccccagatgtcagtaaagaccactagggtgaccattacaaaggcagaaactacaaaaacagaagagcacttggcccgatttgcggaagccttctaaaggtaaggcacctctgtgagcaataaaaagtc

SEQ ID NO: 85521 - DNA, 380 bp, Glycine max
  Clone ID: PAT_MRT3847_4823C.1
ttttatctctataaacatcggtattggctattggccgcgttcacaccatgctgcacctcactgcaaccaagatttaaccttcttctttgcctcttagtatctccacccatcagttccactgacatgcgtacgtttttttccggggaacactacaaatctatgcgctgtccacacatctttggaatcaattctaagctcactcttagaatatttgctgaacagtctcctactcgatatagtgcttcttcttcccctgatgctgctgttgttctctaacgaaccttcaatctgattgtcacaaacgaggaagggaagtcactctatagaacacatgattttacgagtggtttttagaggacaagggctctagtatgttttat

SEQ ID NO: 85522 - DNA, 642 bp, Glycine max
  Clone ID: PAT_MRT3847_48240C.1
cctcggaaattcggcctctgtcctctggaggtgtttatattgtaacaggtgccacaactcccttagcaaagggagcctggccaaaggaatgtgcttcatctgcggcttctctttgcctcacacccctaattgcagtatcccggaagttcagaagtggactcctgcacccgaggcttcaagaaaatcatcttttctcacaaatttgagcacaacattttcgttcacacagcacggtaacactggtccctccaaaacaggctccaactgtacttaaccctggagtttatccagatggtccccctgtgccagttcgtgccggtaaactacttaaatatgtggagccagctgaggttgtgccgaggcccacatgatgctcctggccattggttggtaacagctgctaagcttgtgactgatggtggtaagattggattacaagtgaagtttgcattgttagattattggtgattccaggttactgttcagggtatattggtttgtcatgtgttgcttaaaatggttttgaaaccatagatcacttgtatatattctttctacaggctgtgtacagtacagtacagtatacaaaatgagtggctgttgacatcgggcaatagaaaattaaaatttgactattctgtt

SEQ ID NO: 85523 - DNA, 608 bp, Glycine max
  Clone ID: PAT_MRT3847_48241C.1
cccgcgtccgcgcccttcttgccaaccaaggaaagcgcgaagacgcgtattccgttatgaggaacaaaactgctcctatgtaaaagacataaaactgacaccggtgttgttgctctttggattaacacacatataacaaagagtgttggctgcacttaaactcatatgtacactaccgaatactcctccttcaactggcgcatattattcctcattactttatcggcaaccgataggagaggttaagacttgtgataagattgttaagggttaacaatatgaggcatgaaggtaatgaaaggttggccaaaatatggatctttgatagaaggacgggggaaacagcaaaaccctatgcttggacttctgcaccgatgaactgggaaaggctctatattcacattattgcttatgagcactgatgataggactaggggagctaactaatccgaatttgagcgagacgaactcagaagaatataaagtgccacaatgggagcttacgccactatatcggctgggaatagtgatgactaggtggccatcctctagaaagtgaaggcataaactatgctaatgcgattgctcaatagaatggcagacctgga

SEQ ID NO: 85524 - DNA, 353 bp, Glycine max
  unsure (1)..(353): unsure at all n locations
  Clone ID: PAT_MRT3847_48242C.1
gtcacattggttattggaggggtagacaacataaaagagttacacagctagggtcatttcggtattctaaaaaatggttgtatatcatgttttttaaatcatttttttaatgaagcctaatgaaaagggccgcacggctacttttcaaaattattgatggatattttcggttggtttgggttgattttttaagaataaaaaataaacttaaattaaattaatttatttgtaaatgatttgagttggatcaatagattaaaatatttaattntatctgttcttattttaaaataatattttttatcagttanaatttttattaaatgaattagatacaatagtttttttattag

SEQ ID NO: 85525 - DNA, 132 bp, Glycine max
  Clone ID: PAT_MRT3847_48243C.1
caaaatttggaaatgaaatgttgattcaatttcagaaaaattatccgcgtgtttttttatgtaacatgttgaatcatatttttatccgggaaccttaaaaatatgattcaacatgttacataaaaaaacacg

SEQ ID NO: 85526 - DNA, 261 bp, Glycine max
  unsure (1)..(261): unsure at all n locations
  Clone ID: PAT_MRT3847_48244C.1
tacaaggaagctgtgagaatacctggatttcttattttaagcattgaggctcccatcaattttgccaacatcacatatctcaacgagagaacgttaagatggattgaagaagagtgaactcaaagcgacagctgctgaaaaagtggagcagataacagcttctctagggacatcatcatctgatggcatcccatcatcagaagcctcagacaggatcaaagctggtttcattcacttcangaaggagaaatacgacaagaa

SEQ ID NO: 85527 - DNA, 360 bp, Glycine max
  Clone ID: PAT_MRT3847_48245C.1
ccttggttcggtttttttttatttgggggggggaataaaaatcaaataattttaaattatgactgaccttttttgcattaaacaatcttttttctcaaataaaaattacaatcctttcctttcattgggacaatttcccaatttatttacaaacaagttcttcaatttcaaggggcaaaattttccctcaacaattaaaaaaaccctccctttttaaaattaaaaccacactgcccattcttttagtagctccataaagggcccaacaatttccccccttgccccctttaaaactttaacaccttttaggctttacccaccaattttaatcattccccaatttatttcctttttgatccc

SEQ ID NO: 85528 - DNA, 253 bp, Glycine max
  Clone ID: PAT_MRT3847_48246C.1
tcggaagattccacaacagtgggagggagatccaaaaagagagagtggaaaagatggcgcgggggagggcaaaggtgtggtgggcggtggcggtactattatgcgccgaatccgattcatattgggtcgagtaggcggagaaccctatacaaatggggtatagcgtggaaggaaatgaccttcacttgatacaccaatatccgcaaacgttcaactatgctatgcaccttatcaggatccctaagaaatactc

SEQ ID NO: 85529 - DNA, 455 bp, Glycine max
  Clone ID: PAT_MRT3847_48247C.1
ggtttgagtctcaagagctggaatggcatggtgacgatggttactcaaatacaagaactctctccctccaaaacccgcaggaaatcctcctacggaacttctaaaaggtccattctgaagaaatccttcagccaagagcaagtcaccttcaccgctcctctctccgatgaccccctcgtcgccctcatcggtaaaggcaggaatgctagagggtgttgaatctgcccttggattatcaaaagggtcacttccaaaacctttttataccagacttcaactatggggtgcagtttttccaactaatacacatggagttccatgtatctttgatccctttggaagggctgggatatgtggtgattggctactaggttctaatatagaggcagccgtcttaagtggaattgctctagcgaaccatattgcagactattcccaaagccccggaactgacc

SEQ ID NO: 85530 - DNA, 2128 bp, Glycine max
  Clone ID: PAT_MRT3847_48248C.1
gcatgcgtccggcaaggttgtgtggaaactcgcttcttcttctgctcgataaagacacggtttgattctcaagagctgaaatgtgatggtgacgatggaaactcaaatactttcactatctccctccaaaacccactatttaaacagtaaatattttaaggtgattgcatgtacttaataggcaatccaacacaaaatcacttggtcctggaatctggaaaatcatggttggacttggtgtgagtgtaagtctcaaggttggacatgtgtgtagttgcagcaatggttttggcacggtgactatggaagctcaaaaacaaaaactctctccctccaaaacccgcaggaaatcctcctacggaacttctagaaggtccgttctgaagaaatccttcagccaagagcaagtcaccttcacctctcctctctccgccgaccccctcgtcgccctcatcggcggcggcatctccggcctcatttgcgccctcttcttggagaagcgcggcattcgctccaccgtatttgacaccggtattcacggtctcggaggaagattgggaaccagagtcgtcgatcctcatcctttgaaattcgatcatgcggctcagttctttactgtcagcgattctcgcttcgctgagatcgtcgacgcgtggatggagaagggtttggtgcgcgagtggctgggtaccgttggagaccttaacaatggtggtgaatttgttccctttctaccctctcctgcgagatatgtcgccaccaaaggaatgcgcttccttgctgattctttactgtctcatagtcgcttggttaatgtggtgaggccgtgctggatcagtaaattggagccgttcaatgggatgtggcacttgagtgaaaatggcaagcctcgtggcgagttcgatgccattgttattgcacacaatggaaaatgtgcaaatcgcttgcttatgacatcaggattaccattaattgcaaaacaaatgaagaggttggatttgagttcaatatgggcccttctagcagcatttgaggaccctcttccttttcccgggagcacagaagttcctttcgaaggagcttttgtgagaggagttgattcagtgtcatggatggccaataataccaagaaactagagatttccgagtgtggtggtcctcactgttggacctttctgagcactgctgcttatggaaaacagaataaagttccacaggaaaacatcccatctgctacagcagcaaaggtaaaggcaggaatgctagatggagttgagtctgcccttggattatcaaaagggtcacttccaaaaccgttgtataccaggcttcaactatggggtgcagctcttccaactaatacacctggagttccttgcatttttgacccctttggaagggcagggatatgtggtgattggctgctaggttctaatatagaggcagctgtcttaagtggaattgctctagcgaaccatattgcagactatttccaaagccctggaactgaccctggagagtttgctgttggtttaaataatgagtttcaaccactggaaggccatgatattggacaattccctggtttggggtcagaagaaaagatgagtgaaggccaagcgtacgaacttgccaagtagtccatggtgctcatgaaggtctctcatctggtaacaaaaaagtcatctcatatccatgcaaaggaaatccccccgaaagctttgctggttttcaatggaagatatagcttgaaatttgaacgctcctttgggtgaagaggggccttatctccctcaacagccacatgatgacatgaagcgtctcagaattgtaattcacgcttctcttttgaagaaagagatagtggcattagccacatgatgacattaaaagtctcagaattgtaattcacgcatctcttttcaagaaagagatagacattattattgtcctgaaatgatcgtaaatcatctttctcatataatatccttataaacatttttcctttccaaaaactcagaacaagtagttgagaactaacaaggagaacccaatggcttcctcaatgatctcttccccagctgttaccactgtcacccgtgccggtgccggcatggttgctccattt

SEQ ID NO: 85531 - DNA, 148 bp, Glycine max
  unsure (1)..(148): unsure at all n locations
  Clone ID: PAT_MRT3847_48249C.1
ttcttggatcatcttggttangctgcagatacagaatagacacantaataaataaagatntcatggagactcatttggnctnanngcttggnctgntcttcactctagttgcnggcnctggagcccaagcccaaggcccatccacctc

SEQ ID NO: 85532 - DNA, 584 bp, Glycine max
  Clone ID: PAT_MRT3847_4824C.1
agcgaggcttatttgttcattcattcaatatctggtgcaaagtttcagtatttcccaaaaaaacagttatggatctctccgtttctttctccaaaacccgtcctcctccgttctctccctctttctgccgtccaatcactccgcaactgctgcgattctcccgaaactccggaacctttcgccgccgttgatttcccgccaaaacaagctcgcggtcacagccattcaggtttcggatctatccgagaattacgacgattctgtcctcgaagacgttccgcacctcaccgacttccttcccaatttgccggtgatagacaaatcttttggatttaatactgctgtggaagaagcccacatagccattaacgctgcacatggggaggttgaaaatgttgaaaatggagttggaattgtcaagctgatgctggtgggcagatacaatgctaaacaatattttcttctctttttgtattgcaattctaattttataaataattttattcaatgaaatgataaaaaatgggagctttttactatgaatgaaatattggtatccgatctttaagcaaaaggattaaccc

SEQ ID NO: 85533 - DNA, 664 bp, Glycine max
  Clone ID: PAT_MRT3847_48250C.1
cataaccaaacccttttaatggtaaaaaaattataacaagtgaaattaaagcctccgcacgagaataaaacgaaagaagcaacacacggaatctgggtgaatctgtccttcacaccaaaaacatgcatctttacactacaattcagtactgttcactcaaactttcttctttttttgaaaaaaagagcccatggagtggaatatgtacaaaagactaataaaaaacatgcatctttacactacaactcatatgatcaagtccactcaacgggcaatttttttactagctcaatttcaactgaaacccggagcctgaaagggaaacccttgctgtatcagtggatcccgagcagtgttagtaaaaaataaatttacccaagtgcaaatgacaatgaacaaatatgtaaaatagattcttcggcaacaacttaagacacaaatacctgactctatcctgaatcttgacccttcaggtcttccacaaaatagaaatgtattccaaggacacaaactatttatgtgcaaataaagataacattcatgccgatcattgtcatgtaaaatagaatatggcattagtcattatatccatcaatgagtacatgaattcatgaaacatgcagtttgaccaataagattgaaaaaagacaaattaaaataacgc

SEQ ID NO: 85534 - DNA, 221 bp, Glycine max
  Clone ID: PAT_MRT3847_48251C.1
ttggttttcatattatcacgtaaaagcctttccaaacaaagagggggtttgattataaaacatgagctgtccatacacaccaccaaattctttgtttcgaaattttttcagacgcttcttttgtcaccaaactttgttaactttcttaatccttttatataattaccttcaaaaacattcctctcaaaacataccatttctctccggactctcctattttt

SEQ ID NO: 85535 - DNA, 217 bp, Glycine max
  Clone ID: PAT_MRT3847_48252C.1
gccacaaattcgggggaagggtaggcaaaacccccccgggggcaaggggcacagaccccataagttggctcaacccctcggggttcctaacccccaggggaagggccccgggaacgacccccgtttttttgtggcccctcgcagggttccccgaaggctccaaaacctgggggggggggtattcgaaaaccgcggagagaaaacaggggaacccgga

SEQ ID NO: 85536 - DNA, 775 bp, Glycine max
  Clone ID: PAT_MRT3847_48253C.1
ttggcggggatctggtgacgttgcgtcggggggcatcgttgcttcagcctgggtcttttgaacacgaagttctggggattctgaggtcactcgtcatttgatctccgctaggtccccgggtcgctgatatctgtggactgtcaatgaggagtttgatgattttgaagatgctccacaaattgataattgggacaaagtctcatatatcaatcgacctgttgagatttataaggaagatggtaaatattttagcttaaatgatgcggttaaaagaatattgcccgagtttttcctggaaaattcctttgtaactgatggagatgcaaacattaaccaaagtggagaagagggagaaagttcatctgatccagggtcatgttgcaacacacttgagattgctgaaatcaaacttgtacgcattcaaggaatagaaccaattttagacatacctttctcttgggtggttaacaacttgatgaatcccgagtattttcttcatatgtgtgtttgcttaaaagtttcaaaggccaatgctgtacaatagggataaatttaattatcttggacatacattgtgctagagggatcagttggggcatgtcggtcgttcttctgggtacagcacgaggtcctatccttttgtcctttcatgttccgatcgctttctcccccttccttctgttcttgatgcggtcgcttgtttcctcttccaagtgtaataaatgttgacagatgattattttttaaatccaatcaagggtaccgtttccctgca

SEQ ID NO: 85537 - DNA, 509 bp, Glycine max
  unsure (1)..(509): unsure at all n locations
  Clone ID: PAT_MRT3847_48254C.1
tcgnaggtgggcgttgtaccgctaaacccaactgcattgcatgagcctagagtgcatgccgggtggtctttctaaagctggaatatttgtctaccttttctatatttgtggtcgtatatacctagtatccttaactgtgcctttcttttttttgctgaccaaactgttaccggtactccattcttgtaatgactggctatccccgcttcctttcccctgcttggttaacggatcgaacactataacctgtgtgacgttggagagcgtgactgcgatttaatttagaacaatggtccgaagatgcttgtctaagggatcacttgccctgaacttgcaaaaatggcttcactccacatggcatacatggcctgggactgcgtctatgatgactatgcggagctgactgtgatggagacttcatttggtgcccatcatattgatgacttggaaggcttgattaagacttgaagacactgccgaatgagaatgccaaggtcatagcgcttact

SEQ ID NO: 85538 - DNA, 490 bp, Glycine max
  Clone ID: PAT_MRT3847_48255C.1
aaaaacccttctttgaacggggtttatggccaacgattttcagcccctaacccaaaaatcccgggggaatttttaattcaaccctggtaaaaaaacaaaaggggggccaggactaactttacaaaccaaaaccaactttggcacaaaacaggggggctaaaatgggggggtcccccccgaaagcccaatatttcaatattccccccaacggggggggccgggaaacagcttaaaaggggaaaaaaactttaaaacaagccgcccccagggcccaaaatactaaaagaatcttccccccccaaaaaaagggcccgggccaaaaggggggaatttttggggggaccccggcgggtttttggggggagggggccccagctcaaccggggaaaaaccccccttggggggcgggtggaaaccctgcccaaaagaggggggaaaaggaaccccccccgcctttgaagcaccctgcccaggcacaagaacttttttt

SEQ ID NO: 85539 - DNA, 407 bp, Glycine max
  Clone ID: PAT_MRT3847_48256C.1
ttccacgcgtccgctcactgctgaaattaaatattagcggaatctgagtaatattattaggtataggactttgtacgacgactgatacatattttggactaaacacgataaaaattttgctttgacagaagaggaaaagatgggagggattataagcaaaagacttgctggtgatggtctagcaaagctagctcatgaatttgaaaaacatgttggttacgaaagcctcaaggatcaaattcctgatattgacacatcttgttctgctaattgtacaatagcatgctaaaattatgaaaccttatacaaagttgctgttggtgatcttaaacttccttactgatgggaagatgcatgaaggtaagcatattgctgtatctaatattagtgcaggggagagtcatagt

SEQ ID NO: 85540 - DNA, 177 bp, Glycine max
  Clone ID: PAT_MRT3847_48257C.1
aacttctcttgaagaaagagaagacagagatgattgatcttctaatcagctgaagcgttgatactacgcttatattctgcagcttctgttgccgattctatttctcctcgtgtgcgcccgcctattaaatactcctgcttgaacagacaaataatttgttgatttcgaagatgacca

SEQ ID NO: 85541 - DNA, 547 bp, Glycine max
  unsure (1)..(547): unsure at all n locations
  Clone ID: PAT_MRT3847_48258C.1
ccacgcgtccgttctctccgcgcaccgttttccggcgcagtcgccggcgagtcaccgtcgtttccgccggcaagtctctctcaccgttgccatcctccttcaggttctcccctcgttttacttcacagtaccgtttatttccctttcgtcttctcagatctgtctctttttctgtgcaacgatgaattacgctcattcctgtgtcgcagctgaatttcactctcatgcgtgatttgtttttttttttttgtcttgtttgaatcgcgtgataatgctgattttcccccatggatcttgatctgttacttgttttcctttaatgcgccatttatcatttcgttattgtgttcggtttttcaattttcatgattgaattgtcggagtcgaaggtgatgtttcgtgttgcagaaaatgtgctgagatgtatttatttttttattccattttccactcttcttctggagcttaatcattacnaaaggntgcgtatataatacntttaatatcattttnattggcactcnaaattgncctttgcgcttctaat

SEQ ID NO: 85542 - DNA, 1288 bp, Glycine max
  Clone ID: PAT_MRT3847_48259C.1
attgttcgaataacttccccttagtattagagagagagagagagagagagagagagagagagagagagagagagagagagagagagagagagagagagagagagagagagaaactcttacgtgttactctcacttcacaaaagagtaaagaactaaacatggcagagacccttcgtatggttgttgctgttattgggaatgttgcctcagtgtctctttatgctgcaccaacggttaccttcaaaagggtcataaggaagaaaagcactgaggagttttcatgcatgccttacatcattgcactgctgaactgtcttcttttcacttggtatggattgccagtagtaagcaacaagtgggaaaatttacctcttgtcacagttaatggagttgggattctttttgagttatcctatgttctcatttatatctggttttctacaccaaaaggaaaggtgaaggtggccatgacagcagtaccagttcttatagtgttctgtgtgattgctatcgtatcagcttttgtcttcccggatcatcgccaccgaaagcttctggtgggtagcataggcttgggggtgtcaatagcaatgtatggatctcctttggttgtaatgaagaaagtgatacaaaccaagagtgtggaattcatgccacttcctttatctttctgctcattcttggccagtgtactgtggctgacttacggactcctcattcgagacattttcgttgcgggaccaagtctgattggaacacccttaggcatactccaactcgttctccactgcaaatactggaagaggagagtgatggaagagcctaacaaggtggaattgcaaaaggggaacaacacagagaaacttgacttggaaatgggacatggaaaagaatgtgtgacagttcctagtaactgcaactaatgatccaggacagcctagattgaaagatttcaactggttcttctaggattaaggattccggttttaatgttcgtttcattaccccaaaaaaaaaaagaaaaaaaaaataatggtattaattaacttggtcaattcagctagtgccctggtggatatattccccccccagatttaaatcatagttgcctagtgaatgtcctgttacatgctttcttttcgtggaaattggtttgtgccccttagttatgtttatgaatttaatcgaatatacttcgatttaacaaagccatatcttaatttatagaattttaatgaggagatttatattccaaaaaaaaaaaaaaaaaaaaaaaaaaccaccaaaa

SEQ ID NO: 85543 - DNA, 725 bp, Glycine max
  unsure (1)..(725): unsure at all n locations
  Clone ID: PAT_MRT3847_4825C.1
tgcagatataatggaagtccagcatagcactaacgaaacttttccatcaaaatgaaagcaaagcggagttacccatggaggtagaaagtgggaagtaaattgcatgacattcacttaccaacagcatccagtccggcnnnttttggcgtgaacttcctgatatgggcttcagctgctttctcagctttaagtgtctcacactcaaatgaaactgngattcttttcttcccatcctttggttcaatcataccggtgatagccttgtcccaaccatgagcatgatcaatgctgtggaaccaagcagcatcatgggctttgcactccacaacagtgggttgttctttctttgcattgaaatctggtattgtgagtttgatgaggcgataatcctcacccctactgcattccctttcacatgccaattctttcatcatgaaaaaatatggaaaagagaaacatatataagtaattactaattggatataatagagtataaaaaaagttgtataaaaaagcattgcctaacataggaccatgagcacataaccgacatacagataaatcaacagacttttcacaaaaaaaaataaaaaatcaacaggctaagcactgatgcactaaaggacattgactnnncccacaagttaaattnnnttatgaatttaattataagcnnnataatatgggaacctnnnnnnnanttacttctannnnttatgnnnagc

SEQ ID NO: 85544 - DNA, 688 bp, Glycine max
  unsure (1)..(688): unsure at all n locations
  Clone ID: PAT_MRT3847_48260C.1
cccgcgtccgccaaaggctgttctaccaaattgggtcaatgaattcacaacatgggctcctagcatcacagctattctttatgatggacggctggatgagaggaaagcaatgaaggaagagttgtcaggggaggggaaatttaatgttctattaacgcactatgatcttataatgagagataaagcatttctcaagaaaattcaatggaaatacttgattgtggatgaagggcatcggttgaaaaatcacgagtctgctctggcaagaaccttggacaatggatatcgcatccaacgaagacttctgttgactggtaccccaattcagaacagtttgcaggagttgtggtctttgcttaattttctccttccaaacatttttaactcagttcaaaattttgaggactggtttaacgccccctttgcagaccgagttgatgtctctctcacagatgaggaacaactattgatcatccggcgtctgcatcaagtaataaggcccttcatattaagaaggaaaaaagatgaggtggaaaaattccttcctgggaaatctcaggtcatactcaaatgtgatatgtcagcctggcaganagtatattatcaacaagtaactgatgtaggcagagttggcttggacaatggttctggaaaatcaaaaagtctgcaaaacttaacaatgcaactc

SEQ ID NO: 85545 - DNA, 204 bp, Glycine max
  Clone ID: PAT_MRT3847_48261C.1
cagcaataggatgtacaaaagattctattcttatccaaaaccggaagactcaccctcattattcatacacaatgggaccccgctgttaaaatgtgcctctaagcgtcatttggttggctttactatgatacccttacaagaccatcacttaagctgtgagattggaattatctagttcacatgactcatctatgtacaattgtc

SEQ ID NO: 85546 - DNA, 441 bp, Glycine max
  Clone ID: PAT_MRT3847_48262C.1
ggcaaaaacggggattacttcctgaatttacattaaaggcctctaaataaaaaagggatttggacattgaaaaaacaatcggggcaagacaataaaagacccatttttcaagctttcaccaacaaaaaaacccccccctaaaaacatttaacccttacaacttaattaaacaagtttcccaagggttctccaaggcttgcaatcaaaaaggtgttccaacccttctcacttgggggggaaagccccaaaaatagtaccatgaccaggatctgcaaggggagcaaaaagggtgtcaataggaccagggccagggtaaatgggctggaaccatgcccccatcaaagccaacatggccaaccccccattcttgatcccctttggtcccaaccccttgatcttctcaggagaaccacttccccagccaaggggatcaaaccaaag

SEQ ID NO: 85547 - DNA, 283 bp, Glycine max
  Clone ID: PAT_MRT3847_48263C.1
cgttctttttttttttttttttttttttttttttttttcttttaatgttttttaatgtttgggttcaggaaaaaaaagggggctgtgtaccacattgctttacacaggggttttaaaaagccatgggtttcatcccctttccacggataactggggggatgttgacatcaaaccctttggaaatgggaacataacctaccctaagacctaaattctgctttgtgtttaccagacactttttttaatcccttatgaacctttaaaccctcccaccttttttgtt

SEQ ID NO: 85548 - DNA, 2525 bp, Glycine max
  Clone ID: PAT_MRT3847_48264C.1
ggctcgagctagtgtagtgtgggtacccttaccctgaggtgcaagacaagtaacgtaacggtgcttacaaatattaacagcggaagaagtgaagggcccagacggccaccgtctagggtagggttagggttttaattttcgccacacaacaacaacagacactacctcactgcttccgtttacggatttcaatcgcttcgactcgcagctcccatggcaaaagctacttccggaaccgtcaatcctcacagccgtaccggagttcggattgtcgtcgccggagaccagggcaccggaaaatctagcctcatcatcacggccgccgccgaaaactttccggtgaatgtaccaccggtgttgcctcccacgcggttgcctgaagatctgtatccggatcgcgtgcctatcaccatcatcgacacctcttcccgtgctgaggatagtgataaagttgctgaagaattgcagagggctgacacagttgtccttacctatgcatgtgatcggcctgagacacttgaaaatcttagtatattttggcttccacatcttcgcaaactagaggtgaaagttccagttatagtagttggttgtaagcttgatttgagagatgagaatcagcaggtgagcctagaacaggtgatgtcaccaataatgcaacagttccgagagattgaaacttgcattgagtgttcagcatctaggcatattcaggtccccgaagttttctactatgcacagaaggccgtgcttcatccaacagctccattatttgatcaagagtcacaaactctaaagcctcgatgcgtgcgagccttgaagcggatttttatcctttgtgatcatgacagagatggtgcccttagtgatgctgagctgaatgactttcaggttaaatgtttcaatgctcctttgcaaccatctgaaattgtgggtgtaaagaaggttgttcaagaaaaattgtctgaaggggtgaatgaacgtggacttactttgactggattcatatttcttcatgctcttttactcataaaagggaagtttgagacaacatggactgtgctccgtaagtttggaacgaatgctgatcatcctcatttaagcgatctaattcctcctactggaagaagccgcaagcagtaccacaggcttattaatcgatctcttatggctgtttcagttggagctgcggtggtcgtagttgggctggcagcttatagggtatatgctgcaaggaagaatgcgtctggttaaaagacagattttgtgaatggatcaatgtccattagtttgatctgaatgcagcctgctcctggctagatatgtcaagttcaacattcagctggttgggcacttatgacacttctaaacccagcttttagtgtggagaatctgatatacattggttttccttgtgattcatcatctgctattcgtgtgactaggaggcgacgtttggatcgtaagaagcagcattcagacagaaatgttttgcagtgctttgtttttgggcctaggaaggctggaaaatctgcattattgaattcttttattggaaggccatattctgaaagttacaatccaaccactgaagatcgttatgctgtaaatgtagttgatatttctatggaaaacagaaaatatctagtactgagagagattcctgaagatggagttaggaagctcctatccaataaggagtctttggcctcatgtgacattgcagtttttgttcatgacaggtctgatgaatcctcatggagaacatcgtccgaactcttggttgaaattgctagccatggagaagataccggctttgaggtgccttgcctgatagttgcagctaaagatgatctggattcatttccaatggctatacaagagtcaactagggttagtcaagatatgggagttgaggctcctatacctatcagtgtgaaattaggagatttcaacagtctgttccgtaaaattgtaacggctgctgagcatcctcatttaagcattccagaaactgaagctggaagaagccgcaagcagtaccacaggcttattaatcgatctcttatggctgtttcagttggagctgcggtggtcgtagttgggctggcagcttatagggtatatgctgcaaggaagaatgcgtctggttaaaagacagattttgtgaatggatcaatgtccattagtttgatctgaatgcagcctgctcctggctagatatgtcaagttcaacattcagttggtttttttatgccatctgttgtagagtttgattttttttttttaatagaatcacagtatttaatttttctttgtcaaggttgaattgaattagcataatttttcccctcaaattaccgtttgtttcatctcgtttgtcaggggcttcgtggtataatatacacaataatgagatatactatcaggtccagttaattactggaatctttgaaagaatgatagcatgctctctgtattgaagattgcaataaaatgagaaaaagggatatatattgatgtag

SEQ ID NO: 85549 - DNA, 427 bp, Glycine max
  Clone ID: PAT_MRT3847_48265C.1
cttattctatagggctatattccttcgctgaagggtttaatttgcgccatggcttctctcttcgcgagaaccaagaggttctcatggactactcttgtgcttcttctggagctattcacaatagtccttcacacggcagatgctcaaattggtgtttgttatggtatgatgggcaacaatctaccaccggcaaatgaagtgatagatctttacagatcaaataacataaggagaatgagactatatgatcctaatgaagccgctttacaagcacttagaaattctggcattgaactcattcttggggtgcccaactcagaccttcaaggccttgccaccaacgttgacactgctcgtcaatgggtgcaaagaaatgggttgaacttctggcctagtgtcaaaatcaagtacgtagcagttggcaatg

SEQ ID NO: 85550 - DNA, 924 bp, Glycine max
  Clone ID: PAT_MRT3847_48266C.1
gcacacgtccgctagggctggtttctctagtcgtgttgttgacgaatttgcggctttttttgtctctgattccgagggaaactaactaactttctcagtctcatagccaccaccatgaggaggatttatgatgaattgaaagagatagtgaagattcagaagttccgaagattggtgtcgtacaccggcttctactgcttcgctacgcttataagctacttttacgtcaacaacacgactagggctggtttctctagggccggtcaattctacgcctcctacccgcaatatatggcacttctccctttctcatggacagcttgatgggagtggttaagcttataaactgatgacagtagaaattcttgcaatatatgaagacgtgtaaagccaaatgagaaaacttgaggtttgagaacttggtgagattgaactttctatgtattctaaagccttacttttaaccttttaggaataaggtacaaaatttgtggagcattttgtctgtttttttggtagggtagcaacaaatgctcagctttcttccttctcttctttgatattcaaatcccaatcagtctcaagtgctttttattatgttgttaaacagtacatgctacaatacgtactgacactatcctacttaagatgattgtaaggaatgttggcatttgaactgatattgtaagcatgtgtttggtgctgcggcatgttgaactcaactcgattaatttttcccatatacattgaagcaacttcttcccctggtcaacttttcccttttttcagatgattttaagaaatgttggcatttgaactgatattgtaagcatgtatttggtgctgctgcatgttgaattcaacttgattaattcacaatgagtgatgctatctactatctgtttttgttttggttggatcatt

SEQ ID NO: 85551 - DNA, 805 bp, Glycine max
  Clone ID: PAT_MRT3847_48267C.1
ccacgcgtccaagaagctccagaacattggagaaaactacatccgattttcgcgaagcaacgcaacgacggcgatgggagcgtccacttcggcggagccgagagtgtcggcggagcagaaagaggcggaggccgtcacagcctccaccggagctctccccctgcttcagaaagccttctccaagctcgctaatcccgagaccaacgccgttcccttagaaaatctccagcaatgcttcagtttcggtcgcgaaggtcgaagttattccggaagcaacgtgccagattcgtttccggtgttgttagatcacttagcctcatccctagttgatcaatttttcgtgcctgacaaagagggaataatttgggttgaattcgtgaggggttacaacaagtgctgtgctagggtgtccgcgtcggtttctttgaatatgctcatgagagtgttcgctgctatttcacaaagtgcgaacgtgcctttgcatttggagtttgaatcaggggatgatgattgcaaggtaaacgggcacgttcttcctagcaacgtgtttctgcttctcgccctgtgttgggttatgtcgtggggtggttctagaaagttgaaaggggaagggaatttgagcttacctgatctgaatcatttggtgttgtcggtgatcgcatcgtgtggtgaggttgagggtggtttgaatgtgtgggactgtgatatctcgagcttggaggttcagcttcctgccagggaagttgtgacgtgggttatgagcaccgtgccatgcctcccggatgctttgagcagtatttcatgc

SEQ ID NO: 85552 - DNA, 300 bp, Glycine max
  Clone ID: PAT_MRT3847_48268C.1
ggctcgaggtaacattcctcagacctcggccctggctgtgattcatgtcgacttctatatccatgtgacaaatatgagttactggcaggtgcacagtctttataatgcagatgcgctacctactccttagccctcatgctcaacggcgttttcggcgtagaccgctccggattggtgcacgcgtacaacccgctggtccctgggctgaactagccttaacccgcaacagttgctgccattgcgcttgacatcgttggtcagcataggcttaacgtgttaggcccatgagcatctggagac

SEQ ID NO: 85553 - DNA, 443 bp, Glycine max
  Clone ID: PAT_MRT3847_48269C.1
gctgtccccacaaagattaaagatccccagatgacttaaatgctccaaacgccatatccgatctgaaatccaacaggcaggaggaagaaaccatatcttcaaatggacaaaacaaaccgattagtactcccccctgacctagagaggacaaagtaatcaacacaacttttaatttaacaatactttttaaaggacagaccaatgcagccgggccatctggacatgcgattccacctggatatggagacttgactgctggggagaagaagcttctggggggggtaaaccctaggggtggggcaaatccaacgttgtatgggattctctgacacacgtaaattttttttccctcgcaggctcccaattatgcaaaacaaaagccttggtaaaaactagaagcgtgggccaaaatataaacaatgatgctcctatatttcactttt

SEQ ID NO: 85554 - DNA, 1023 bp, Glycine max
  Clone ID: PAT_MRT3847_4826C.1
ttttgcgtaatggatgtatacttcctctgttattggatttttcactgtactgaatttgtatgtatatcaaataccataattacatgttaccttgcttccttcctaccaaggcctacacatttcttaattttcctattgaatcgtctaatttgtagtaaatacaaaagaataataagcaaaagcggtttagatttgatttcctatatcaaaagtactccttgtgaaactcgaagcgtgtagttgtcttgtggctcagctcaagtgatagcttctttagctctttcgctaatactggcatcccgcaatagaacacccctactgtagaaaacggatgtttagaggcaatcttggtgaaaacttctttccaattaggcctggcaaagtgtgtccttactcgagtgcctgacagaatgtcaacaccatgtttcgcatggttcagtgcttggatcatggttattaaggttgatctcgcatccccctctttatagacacttgtaagatagttatgaagctcgatttgacctttgtggtccatttctgcaacttcgtccattactcctttaaaccattcaaaagatccaggttccctagtgacccagtagaaataagcattcgtagtccttcgtgatctcttgcttcctcctggagttacatttgaagatgtaaagctattggagctctcatctgatctggttgtttgacttgtttctgtgtttgactcctgcaccactagttcatccattgctctggtgttattgagaagatctctgagaatgctgatgaaaggagttgctccaattcctaatcctatgagaagtagtacatcaaaattctggtagtcttgtgctggagctccataagggccatcaacaagcagtctcggctgtcctctttgatccagttgcattagttcaccaaactttgcatgacaattaactgaaggtaatttgtcatcttcttttgtgagaagatgcttaagttcttgggtccagtctccctactgtgcgaatgtgcggacgcggg

SEQ ID NO: 85555 - DNA, 151 bp, Glycine max
  Clone ID: PAT_MRT3847_48270C.1
tggttgttccatatgcctatcacacagtccactcacactctttgtgaaaaacgggagtttcttactctttctgataccttccacttatccgtgatttctacgtcatggctcatcatcactatcaccaggatttaattggtgagtccttgtt

SEQ ID NO: 85556 - DNA, 180 bp, Glycine max
  unsure (1)..(180): unsure at all n locations
  Clone ID: PAT_MRT3847_48271C.1
gactacacagttcgtccatcacttcagtncaanatttctnccctnaggctggtttnaacnantgggctgcttgcgggtaagtggctgaagtcncttttncatccaacnaagggtaacntttcttccaaggaggnacntccacncattggccccannanagnntttgtttcanaaaaggnt

SEQ ID NO: 85557 - DNA, 598 bp, Glycine max
  Clone ID: PAT_MRT3847_48272C.1
tataggggtggcacgtgccacgtacacgtgaaaaagaaccctggtctttctgcccctctccaatctttcccgccaccgccgaaaacttttcttaatcagtctcacagtgaagttgatcggagccacatacattgcagatgttgctgccaaaaaagatccctgtcatatcaatgataagagtactgatttgttgattggctcatcaccaaatgatgataaggagactatatataatgatgaaggagaaaatcaaggcatcacgaaagcctccatcaacaaatctttaccagaggttggtttgcatgcattatcgccgtctactaccaatgataaacttcattcttgtcgaagaaggtggcatttgtctcaatcaagaatcttacactaacgtgacacaaatcttaaattgaagtaaccaaacaaaggatgacatgggggattcacttgctagtttatttactgatgtaaatgcaaagggtaatttcaaacatgactagctattgtagttaaacttttggtggtaactttatccaaggctaggaaatcttgatttaataatggtaataactaataaaattctctagggctcttattgagc

SEQ ID NO: 85558 - DNA, 205 bp, Glycine max
  Clone ID: PAT_MRT3847_48273C.1
aaatctgtctcagcaccctattaaaagctaaaacccaaatttcaaacaattacggaccttttacttacataacaaaattatgcccacctccgattgcaaaacaaaaagccggtgccaggattttttgaaggaaatattacccctcagtttactccacacactggggttaaaaacagacgcttttgggagatccctgaaaaataaa

SEQ ID NO: 85559 - DNA, 1114 bp, Glycine max
  Clone ID: PAT_MRT3847_48274C.1
ggctcgagggagacgcaaaggcagtggctcacgtggatttcgaccggctgccctgaacaaggtccctgaacaaccaagcgaatctccgaaagaggatgactatgattatctcaaggaaggaaggaagcagagtgaagtgtgggaatcagatcatatacgcgcaagggtagttttacgtggatttcgaccaaatgtcattaatgaagtcgatcataatctccgaaagaggatgactatgattatctcaaggaaggaaggaagcagaagaagaaaagatcaaaaaggccctatcaagggtgaagtccatggttcagtatccagaggcacgggctcaataccggcggctgctaaatgttgttgaggacttccgtcaaaccaagggagctaacttggatttgataaattctgaagagacagttgatggtgtggaggatttgattgatattgacatgcttttagacgatgataatttcattcctatagcatttgattgatcctgcaatggctactcccatcttccccactgtaaatacatggcctgtttggctttatttggcattggggagtcctaacatcatcttgatgtagtatatatttctaatcaaaattacttggatccaaggctgcatataaatagattatgatagctagaatgcactctgatttgacagttcagattgtagtctacatgtattttttttttttaataggcagacggttgggggttataacataatgatgtaacttgctaaagtattaaactgcaagttgtacaaaagtcgactgtggcgagagaaactatatactaagtgctaattatgatatcaagcttgttttatcgtttgcatttaaattcctttttttatcagttagttctacttctgcaacttgtctttttagttatagcatccccatttttcttaaaaggatttccactctgcattgtagatgatataggtgtggtttgcttctggttatcttcttcattcttatcacttcatggtttgaaatgtattgagtttttgtttgttatcatcacattttttttttcttgacaaatgttaatcgttagtttttgttaatgagagagatcaaatttgtgatcttttcctcc

SEQ ID NO: 85560 - DNA, 557 bp, Glycine max
  Clone ID: PAT_MRT3847_48275C.1
tgtgagtctctatctacatttactatatttggttctgttttgcatgttataaacttgactattatatctacatcttctctgttatggtaacttttttcatcattcttatttgttatgttattatactaccccttattcttattttgcatgtcagtaagtagtaatttgatagattttgttgttttgattggtgatgttttattaaaaaaaaagccatccaattttcttgttccctttctaaatcccctgtttgatgaaaaaaatccttttttttttcccctcctgtaatagtatttgtattgtgtatgtgatgctttggtttcttggttattgagaatgaataaaaccagatactaagataactaatacttcaatgctatatatccttttagcactcagaacaccattttgtctacctaaattcataaggctgtaactaacatggttccttgtatggatttttgttttttttattcaactatgctaatttctacttttgaatgtcacttgtttgcttattttcacaattgtgttcttgtttatccatgttcagattt

SEQ ID NO: 85561 - DNA, 607 bp, Glycine max
  Clone ID: PAT_MRT3847_48276C.1
tttttatcataattagcacttagtatatagtttctgcgcggcgacagtcgacttttgtacaacttgcagtttaatactttagcaagttacatcattatgttataacccccaaccgtctgcctatcaaaacaaaaaaaaacaatcatctataaacagtcatactaaaataatcataaataaaatcaaaccatgttgcattagactacaatacctgaactgtcaaatcagagtgcattctagctatcataatctatttatatgcagcctttggatccgggtaattttgattagaaatatatactacatcaagatgatgttaggactccccaataccaaataaagccaaaaacaggccatgtatttacagtggggacgatgagagtagccattgcaggatcaatcaaatgctataggaatgaaattatcatcgtctaaaagcatatcaatatcaatcaaatcctccacaccatcaactgtctcttcagaattgatcaaacccttgttagatgccttggtttgacggaagtcctcaacaacatttagcagacgccggtattgagcacgtgcctctggatactgaaccatggacttcacccttgatagggcc

SEQ ID NO: 85562 - DNA, 1281 bp, Glycine max
  Clone ID: PAT_MRT3847_48277C.1
atgagtatgacagcattcaaagcttgcgtcaaatgaaaaaaccatccaactgcttaaacatctcataaacaacatagagcatgtccaaaaaggtaactgtttaaagattaaacctaacttgcaagtatcttcaagataagtaatcaaagaaacaaaaacacaacccctgcatctaggaaagcttattctacattaccgatatcacaaacaagtggacatagctgctgaaacttcatgattgtatacatggacttggtaacgatccaacatgtcccccccactcaccaacccctttgttgctccaggcattcttcagtctcattcagtgtcttcgattatgcctcttctttctccggctcctttcatcatcagaatcagagtctgaagcagaatctgaatcagatgattctgatgaactgtacctcttgcgtcttcctctcttctgcttcttctttctcctccgtctccgttcctcctctgaatcagaagatgaactgtaacctgaactactttcagaagaataatccgaccccgtaacagatgatgacccactgccactatcggtctcaaaaacagaatcctcactatcgctaccagaatcagagtccttccgatgcttccttttggtttttttggaacttgtttttgccttttccaccttagcatcaggaatgttatcatccaaatcataagtcacagacacattcaccctcaatttagggtttttaagttgccgggtccgggatggtctcgaaatgtaaacccgttcattcttgcattcatatgtccaatggccactctggaaacacatagggcactgcgccactccacctgcagcagacattgcaggcttgaggtcattcctttcacccaattaaacagctttgtcggtactcatcaaatacatctgcctctttgcttctcttttctcctgccatctgataggcccttcttccttctgcccataggcattgacatttcgggcagccgcagcagccgccctttcagcctgggcacgaataaggcctttagcagcactcagggctgcagccttgattctttcagctgcagcctgagatttctcttccttcttgcttgacatgttttatatatgtcctcaagtttgccttctgtggcagacgaataaactcaacagcatctaacttcccaaaaaactaattgcacactatgaaaaatcaacacctcaacagttattgaacccgaagttttcttttccccctaattttgaaactcgattcagaattaggacggacgcatggg

SEQ ID NO: 85563 - DNA, 129 bp, Glycine max
  Clone ID: PAT_MRT3847_48278C.1
gcgtgacacactctgtacctgcgcattaaccgcggctggtgtagtggttacacgcagcgtgacagcgacacatggcagagccttatcgctcgcacgtttcactggctacccttcaattctcgccaggtt

SEQ ID NO: 85564 - DNA, 428 bp, Glycine max
  Clone ID: PAT_MRT3847_48279C.1
tttgacgcgtgggctgactcaagggggtgggtttttactttctctttgtagagtaagtctaaactaacactctgaccccgggagcggatttatgacacgccagagtgagttttgctcaccctcacaccgtgggtgatgctcatacacatgaacaaaaaagaccattttgatgcctgcgatgacaatctcgctgtaacggaggatgcccttttaagaaggttccaactttgatactactgatgttggaaagaacaccgccatttggacgggagacggcgatcagttaaaaccatgttggatcacgccatctgaagataacatgcatcataccgaggggtttcgttcccttaatgtaagcaatggggcggagtaccatatatctcatatagcacatgcaatgcgtgatgctcgtaatcatgatgcgacac

SEQ ID NO: 85565 - DNA, 412 bp, Glycine max
  Clone ID: PAT_MRT3847_4827C.1
ctcgtataatctatcagataactatttataagtagggttatatctttataaacatcttatattactttgtggtccatttctgcaacttcatccattactcctttaaaccattcaaaagatccaggttccctagtgacccagtagaaataagcatttgtagtccttcgtgatctcttatttcctcctggagttacatttgaagatgtaaagctattggagctctcgtctgatctggttgtttgacttgtttctgtgtttgactcctgcacctgaccttatgaaaattgaaaacttaagataaaagtggaatcaactttctgaaaagggaagcagagtttggatattagtaccactagttcatccattgctctggtgttattgagaagatctctgagaatgctgatgaaaggag

SEQ ID NO: 85566 - DNA, 132 bp, Glycine max
  Clone ID: PAT_MRT3847_48280C.1
cgacccacgcgtgcggagagactagagcgtagatagcaatcacatcaccctcatgtcaatggcaacgcgaggtcttttaagaacctggagcgccccattcttacggggggcccaacaagcctttaactggac

SEQ ID NO: 85567 - DNA, 339 bp, Glycine max
  Clone ID: PAT_MRT3847_48281C.1
aaaaaattaaatttcaagaatagggggtttccctctagacctaaaacatttttttttttctcattaaattcatgatattctgcacacgctaaattgtatttttactaaagcaaaattggcctataacttttttcacttattttacatttacctaaacaacacaacttctaattcaataatttcaataaaacacaccttcatatcaattaacaatttctttcttcacaccttcatttctaacagttaaagaatgtaacttctaaattatttcaattcattctagccagttcctgccttttttctaatcccatcatttattaataataaaaatctcattac

SEQ ID NO: 85568 - DNA, 332 bp, Glycine max
  unsure (1)..(332): unsure at all n locations
  Clone ID: PAT_MRT3847_48282C.1
nganacacgcnancgtgngctcagaatacgnctcnancanagtnananananaaanccatgcncatngcnncnncgcggttnccaattngcctgtngtgnngcnccagactaacttnccgcacntacngactcgaaagacctctancangcatccncnanctnnggncggaatccnnactancctactactctgngcgcatctcaaacctncgaactnttctacgtngtcgtcgngttcntcncttnctgctggtagcgncttctactactnntacntcagcgttncaactncgccttnncaagnntcncacgganttctcgnnntttgtnn

SEQ ID NO: 85569 - DNA, 235 bp, Glycine max
  unsure (1)..(235): unsure at all n locations
  Clone ID: PAT_MRT3847_48283C.1
cacaatgtaccaaccgccaaattattttggaccaacaacaactacagtatcgtttatgtaacgaacaaaccaagaaaacttgaaaganaaactagtgggaggnacgagaggcagaagagcagagagagaagtgttcatggatctgcgttgtttgaaaaccttgacgagagcgcttctcgcacgtaacctgtgtttatggttctctgtgttttctgtcacttgttcatgtccattt

SEQ ID NO: 85570 - DNA, 330 bp, Glycine max
  Clone ID: PAT_MRT3847_48284C.1
gttgctaagcaaaatatattaattgttcagttgcccattctgatcacattttgacatgctgcatgaaaacaaacaagcttaattgcaaggtcaccaacggatgggagggtgaaccacgttaactggcctataatatcaaatccaaccagaagggtcattcgtaagcaattcaaactcattaaatatcttttgaaactgcacaccaatgtacataccactgtaccatttcaaaacaataacatacacttgcacgtgctttttgattgggggaacgggaaaactgtgccttctcgaaagaattctcccaacctgaagaacagatcacctcat

SEQ ID NO: 85571 - DNA, 417 bp, Glycine max
  Clone ID: PAT_MRT3847_48285C.1
ggcaggggaagatggtctaattttatcttcatgaaaaaaaaaaaaaaaccggggtgcactaattgacaccagcttcatgggcccctttaaatggttaccaaggttttccataaaaagagggaacaaaaacttctgttttaaaataattttttggcaaagaacccttaaaagcgggttatttaccttctgaaaaaagggaggtccaccaaaaaacctcttttaaagaagtcccaaactctccccccgttgaaggaatgctgttgaaccttttttgttcccacctacccctgctgtatagtttaggtggcgcacttttttaattgaaaaaatgccccccaaactcttgttgactatcggatcatgcccgggaataaaactcttcaatgggggttgataaaaataaagatggggttcttt

SEQ ID NO: 85572 - DNA, 305 bp, Glycine max
  Clone ID: PAT_MRT3847_48286C.1
ttttttaatatgctatggtgggttgatttcggattcaggactgtggtcaggatattataaaatatgctgtggaaatggttgctcctgctttttcctttttgttaagtaattggtaatttgctatggcaatcttgtatatgcattgttatgtttttcaattcaccttatcaatcttcggtaattagagggtctgttagggaggaactattcctgatctgaatgagatatcgtgtgcttaggctaaataatgatttattttgtgacttgggatcgatgattgtaaaattttaacaggaaagttttag

SEQ ID NO: 85573 - DNA, 461 bp, Glycine max
  Clone ID: PAT_MRT3847_48287C.1
ggtaaatttatactttttaaacttaattcctttcttttatatcatcatactctcgtgatcaagtttaagttaatttttttataattacagttaaaactatattaaaaaacaaacaaaaaaacagaactaaattaagcacggatgagagaatttaacatttttttgcttttcctgtaaaaaaacattttatgttttataaatttgtatttaaaaaagtatatcaatattttttatgacctaattgaggataatagtaggaactgggtgtacggattaagatttagtggcaaaatatgctccaggcattctccttttatagcttgttgccttgcacccttgccattaaataaagcatagcctgaatgaaagagacctctgaagaaattaaatcgtttacaagactgattctatggaaacctatagattagcttcaggcaacctttctataagcatggaactat

SEQ ID NO: 85574 - DNA, 389 bp, Glycine max
  Clone ID: PAT_MRT3847_48288C.1
caaaaccaacccctttttatttgtatctcttcgacaataacaataacaataacctctgatacactctatcgccctacaatccctctcttgttccatcacttctcagagagtgtaaaagagtgagcttttttttttttttgtagttttttctttttgggatatataagccaaagggggtgtgaaaaacacaatgcaacaaagttcagcttcagggtcattgatgaagcaattgagtgtgaaggaggcttggaaatcaacatcaagtaggtggagtgggaaggacaagtatagtagtgttggaggagggagcattgaagggtatgaagcaagtttgagccaactggaaggttttgctatgtatgggaatgaggacaataatggagtgatga

SEQ ID NO: 85575 - DNA, 471 bp, Glycine max
  Clone ID: PAT_MRT3847_48289C.1
tcccatcctgaggctcatcttcatcagcactatcaacttttcgttttacactagcagaatgaccaacatctttttccttcttgttggctttctcagttttcttacgtgcttgttctcctttcatttctgcttctgtcttagagacagacacacctttctctgcaatggaaattggaagccatcttcatcttcactttccacaacaggggcagtatcacccttagcaacaattggaagctcagaacttttgttgtctttctctttcaactgagctacatgcttctttttctttaatttcttagttggatcatctcactttttgggtttatcatcatccattatttcctcaattacaactccactatttgggattggcgaagacgggtacatgtcagtatcacttatcaacaataaaggcatcagcgtatccatcttcactatcatattcagacgactcctctgagtcaggtc

SEQ ID NO: 85576 - DNA, 873 bp, Glycine max
  Clone ID: PAT_MRT3847_4828C.1
tttttttccaatgtgttattttagtttacttttctttttcttttattcacatgcttcaatcaacaaggcattttgcaaaataagaatgtaagtacatttaaacacaagccactgaaaatttaataaaccaagctagtaaactcatcacacataaattattgtttcagtgacatagactctatgatcttgcatagctcttccagtttcttcatcctcagtctttcactctccgtcagcatctcaactagtgtggctacaagatgagccttctctttgttcttttcgttgaaagcttccaaggctttccttatactcttctccctttttctggaagttaagtcccagtggctttaaatctttgttagccaagtcaatcttcttgcgtaccattgcaacttccttcctcatgggatcatccagaacttcaagctcttcccaaatgtgtgctaagcgcctagtctcttcttcagcacgaccaagttgaagttcaactttctctctcacttccgtctttttcctctcaatctcctcttccttagattgaaatgtggagatggccagttttgaaatctcctcatcctcatactcttctgctgatagcctcccactgcttccaatgctaccaaggttcttcattttctgcatttcctctctgttgctacaaactaggcccatatgcttccacacaaagttgctcctccaattattgtgttgtgtttatttcaacctgaggcttgcatgtgttgctttcacttcaatactctttcttcccatttcaacaactgcttctatattggcttcctcattgatgccttccgtggcctctggtttttagtcctgtgaaacgattagaatagaggaagacctcgagcc

SEQ ID NO: 85577 - DNA, 544 bp, Glycine max
  Clone ID: PAT_MRT3847_48290C.1
aatatattaaatatagcatctatatcttttaagtgcttgggcgttcttcatcaaccacaacaagtgcacaaggtctatgccaaaaacacgattcacacgtacaagaacaccctcaattaattaattaaccctacaaatatatattatagcgtgtatcatatcatatcgagatctaaattcctgttctgtaatggagtttaagaacagaaaggagcacgagcaagagaaagaccgtggatccaatgatggagaggaccaatgctgcagtgacgtggcgacaataggcatcaaagacgttgcacactttcatccattgcacgtgcgagttccccttctgtgctatcactcccactgcacaagctgcaccattggccgagaacaacaaagccatcatcacaagatctagcgctgttagccccaacagtgtcacatcgttttttcttccattgcttcttgccatcaatgtgataaccaatgatgcagctgcgtatgagcatgctatcgcgtttatcaccaagaaaaacacaatggcagagacatattc

SEQ ID NO: 85578 - DNA, 549 bp, Glycine max
  unsure (1)..(549): unsure at all n locations
  Clone ID: PAT_MRT3847_48291C.1
ggctcgagccctagagtcatcatagcgtccagcaaacaggaaaagggtctcgttgttatccaccagcttcatctccctctttaccctctctttatttaaaatctcatatatgtgacccctaatctctccaaagtcatatcctaacctaagagagtttaaaaaggttggaaaaagacatgcatggtagagtattttcaaagctagcttcttccacttcatgccaaattgccaacttaaaagctgcttggttggtttccaagtagaaaacagtaccctatggaactatgagagggacccctttgtccttttgatggaaggaacttaattctctcctattgcatatatgctgcatcatttcctcctcttaacctagcttcgatcactttcagatcacttccaagttcaagcagaaacatcatcgattgaagatgaacggcacagatttgaaggaatggngaactgggttttcaatagggcttcngatctnctttcatcttatggtatgtaattaattaataataaatattccgttaattatgttcaagttaa

SEQ ID NO: 85579 - DNA, 392 bp, Glycine max
  Clone ID: PAT_MRT3847_48292C.1
tgcatatggatatcatttggttcgtggaaccaacactatgtatcacatcgagttcagatgtgccaacacataaaacctctttgctggaaaggttaatgatgcggcacatatgatccattgaccttgatggttttctcactactgaggatgaacatgagcgtaccatgctcaacgttaggctctgggatgaccccttctgatatcatcatgactccactggacatatggtgaccaataccgactccaatgatgacaacaagtactacgtagcttctgctgctaacaacattgctgttgctaaagcattggatgaagcatcgactggcgacatggattaagcttgcttctctagaactgacgctgctctggcatgatcgaagcctgctctatta

SEQ ID NO: 85580 - DNA, 368 bp, Glycine max
  Clone ID: PAT_MRT3847_48293C.1
agtatatagatcatcacttggcttcactaatacatcatagtggtggagccccactacacgcgtgaaaggttcttaggtgatgtcttggaccgcggtggttaggactatctaaggaagaaaacagtggtttataacacgcctcatgctcatgaggtggttatggccaccgattttcaaaatagtactggctcataccagacacgttgcatgcacattccactttcaaaggtacaaggatctgtccgcagctgtaagactggcagctgctttttctttattcgggctgcatgcataaacattatatgatatataacgagttcatcctgaaaggaagaactccatattaacttgagccccttttcaaatat

SEQ ID NO: 85581 - DNA, 546 bp, Glycine max
  Clone ID: PAT_MRT3847_48294C.1
cccacgcgtccgccgacgcgagggggggggacgtagtctggtagtgagctatcagctagtatatcgggaggagactatgaagttgaccgctttctttgttgctaggatagattttgggagcatggccatgccatggcgcaggctaccaaaggttccctctccacaatgaaaactgggtatggtgagcgtacttcggacgtaaaatgcccaagtgttaagcttgctgtggaagcacaccacatccgagccttttaaaacattcctcgaagagtgcgttgaacccaccaacgactacattagtggcgaaacattcagatcagactctaaaacagataaccaacgagctcttcttttttgctagcgaaacgcaaagtccaccacaacgacatttttatttttcggcatagattaacaccggacttctctaatatcccatactaataaaaaacatggatatgggggtgggaggaattttaatgaaaaccttttttggatgaatggggttaacaaggggcgaaccctccgggcatttcccagagacttttt

SEQ ID NO: 85582 - DNA, 441 bp, Glycine max
  Clone ID: PAT_MRT3847_48295C.1
tttttttttttttttttttttttttttttaaattcccaactcgtattcaattcttattggcaaaactatccagttaaaatatttgttgtacacctccaaaccttcttcaaaaaaagaattctggaagcccttccagcacatccaaaattatgcattaatgaagtgctatacccatcgatgattaaattggacgggaattatgatgtaccacaaaatgtgtcaccattaaaatcaaaataacgagtcggagttttaagtaacttgggacagaacttaaaaaaaaaaactgggctaaacgagaggcgcatccttggtacattatggcgcttaacacttagcctgctttcaggcatatgcaaagtattagaatgttggttcagaacatccatccttggagcatgcaaagaccaagcgagtataattattcatgctgtacccaac

SEQ ID NO: 85583 - DNA, 192 bp, Glycine max
  Clone ID: PAT_MRT3847_48296C.1
tcgcccactcttcttcccacgcgtccgtagtctcttagagaggtattcaatattaaaggaatggtttgtctaatgtgtgagcgattagcttaaatatttaaaattatttgtcaaagatacacttatgttacacccaccaactccacttttactttcaagagaatttttacaggcattttatattaatgggta

SEQ ID NO: 85584 - DNA, 329 bp, Glycine max
  Clone ID: PAT_MRT3847_48297C.1
ggtgtgggttttttttttttttttttttttttttttaaaaaaaaaaaaagcttgtaactttttaaaattcaccaaaaaaaaggttgtattattaacaaaaaggtgttatttcatccctttttaaaaccccccctccatggtaaaaatttaatttccctaaaaaaatttttttaaaaattacaacctttgaaaaaaattttttccctttttcaggaaaacattttttggaccccttaaacccctcaataaaaatttttttgcctataatcacaagttaagggggggttttgccttcccaccccaatgatggtgaaattattattctcttt

SEQ ID NO: 85585 - DNA, 599 bp, Glycine max
  Clone ID: PAT_MRT3847_48298C.1
gcacgagggccatcttcccatcgctcttatctgtaagcaatcttcactcatcaacctcttgaagaagaaacgaggaacaacgacacaacatgtgtgtgtatatatacatacatagcctaagaaactaaacatgtatagatgaagatgataagctagctactacggtccgtggagggaagaagggtcatctatttgtatatatactctcttcattgttgtgcacctgcagcagttgaagctgccagcatgatctgagtttaccttctattggtaagaacagatcatgtggctgcttcacctgttgaatggaagcatatagaaaccctaatttgctttctgatcctcctcgagattttcatccggtttcatagaaccctaaaaaaggtttcttcaattcattcttgcatcttgtatttatacgatggatgtggatactatttcattgttgtttttcctctattctacttttcacataaatatatatctatatattcatgttttctggatggctgaatattgtatattcttatgttggctaaatctggagattctatttgaatcagcattcatgtttgcttgattcttgcaaaaagaaagag

SEQ ID NO: 85586 - DNA, 239 bp, Glycine max
  Clone ID: PAT_MRT3847_48299C.1
cggccggggagacccgggcggacccacgcgcccgtgcttattggatcttttggactcgctggtatgccattgcattcctaaaaccctattcttcttcgctcatacatcagcactgccatcagccccaacctccccacaaggtcacagggactaaagaggtgcaccaccatgtcggacgaagaaagggaggagaaggagttggatctctcttctgcagaaggtgtaaccaaatacaaaac

SEQ ID NO: 85587 - DNA, 166 bp, Glycine max
  unsure (1)..(166): unsure at all n locations
  Clone ID: PAT_MRT3847_4829C.1
tngggggtnnnnnnnnnnnnnnnnnnttttgcactaaaacaacttgcctgattatcatatctatccggcaagatgaccacttaacctgctatgaacataagttcaatataccactaaaaccgtaccttctcaacactaccttgcttactagttagccctaaacggg

SEQ ID NO: 85588 - DNA, 657 bp, Glycine max
  Clone ID: PAT_MRT3847_482C.1
ccacgcgtccggtaaaagggtctttaaattttatttatatatagtatcagagtagcctctgaggaagtctgaaccaagagaaagataacacaggccaacttggaataccaaaaccaaaaaaagcctcaaattttgagtgagtgagttctttctttttccttctttctctgttctttcctgcttttgcggcttctcgccgcctttgccgtttggttctgccttttttctgcgccaattagtggcgcgcattaaagcggtgcgtcttttattatatataaaactctccccagttttcaagttccactactcagcagcacagcagcaacaacaacaataacaaatccatttttttgcgaagaaagttgaagaaaaaaatggaaacaatgttgcctccgaaccaagcagaggaagcaatagtcacaacaagccttaacgagacagagagtgaagttggtatgagggaagaagagaaggagttgcaacaacaagatcactccatgttcaacatcaagagcttcctctggcatggaggctctgtttgggacgcatggttcagctgtgcttcaaatcaagtggctcaagtgctgttgacactgccctattctttctctcaatgggcatgctatcaggaatcttgcttcagattttctatgggaa

SEQ ID NO: 85589 - DNA, 290 bp, Glycine max
  Clone ID: PAT_MRT3847_48300C.1
accggaagattaaagcttctctccagtgttcttatcccaagactccctctgtttgaaaggagacgctggctgaacactaaaacactccggtgagttaggaagagctactgccaactaccagatgggactctggagagccaaatgctattgggtgcctagagaaacaacgcaacctgaccgttattgatgggaaacccaggtctatcgagaccatcaacaacttgatcactctgtgacttgaatcgaaacaactaattttgttcataaccgccactggtaaaaaaagtgga

SEQ ID NO: 85590 - DNA, 479 bp, Glycine max
  Clone ID: PAT_MRT3847_48301C.1
atggtgatcacgaataattgactagccttgaactaggggaacatcaaaacctaacgctagttcttttagaactagctcatataaatcgagtagcgttatctattcctcgttcaaatgtcataacagctgttacaatgctcgtgatactaaaagcgctgtgttcatgagcaaggctctcagtgcctccaattactacgacgaggtttattaaatctacaaaggctatggaggaccacattgctgtagccgtgtggaccgtaactgcctatgctagaacatatgaagtgccatggctgagaatcacaccactcacgtttacagagagagcacgagctagcatagaatcggctggccgttaacgcttgaccttttatcagcttagccttacgcctatttcgggacaaaatactgtccttctttgacgccccgccattgctaggtatgctgggactctctttggtacttcctcctgctgttcc

SEQ ID NO: 85591 - DNA, 339 bp, Glycine max
  Clone ID: PAT_MRT3847_48302C.1
ggtgacagtttggggcagcctgagcaggaagaaaagtggtggaaacggacagcttctagacgcttccaatattatggagttggttgaaaaccagcaagtttttaccaccttggtggaccataagtttcacagacaaagatgccaaactctctgtcaaacacctgcaacctgctgctctcactccactaatcctcattctcatcacatctatttcgaggaaaaagtgagcaagagtgagctcaaagaggttctctcagacattctattgggtatggctgctggactgaagcgtgaccctattgtgatacttcgcattgatggggaagatcttctggagtt

SEQ ID NO: 85592 - DNA, 305 bp, Glycine max
  unsure (1)..(305): unsure at all n locations
  Clone ID: PAT_MRT3847_48303C.1
cactagccggcggccgccctggggccatggcnctttcggggccaaacctttaaaacatatctcgcaagggacacgcagaaacgggcnnaggggtgacaagnccaaccccaccacaccggggggccaaaaacaagggaacccaagaagcacccaagagcgggagaagggacgcccccggacaccaccaacccgacagggcggaccaccaccaacagaaaagggcgagccaaggaacaccggacaggcaacaaaaccgaacagaagggcggacacccagaaagaaacaggggagaaaaaaaaacaca

SEQ ID NO: 85593 - DNA, 384 bp, Glycine max
  unsure (1)..(384): unsure at all n locations
  Clone ID: PAT_MRT3847_48304C.1
ctctanccgaatcggctcgagctcgagccgcacgcactgcccctggagtcagacagacagaagagtggctttggtccttcaagagggggaaccagcaccagcccgcangactccggctccatgaagatccccccacaggaactcaagaccgccatcatcaagggcaagcgcgacccctacaacgactccacctactactccaacgccgcagctgccgtcctacacgagaaccgacaggacctcatgctactcaccacctccggcgccgaccgcgacgggtgcttcatcggaatcagctggcggagaacctcctcccgcaaggccaagcctctcgaaccaccaaagcgcgtgaacgagaaagcccccgaaaacgaaggcgacgac

SEQ ID NO: 85594 - DNA, 667 bp, Glycine max
  unsure (1)..(667): unsure at all n locations
  Clone ID: PAT_MRT3847_48305C.1
gcaaaactggtgtttgagtcgtgactttcagagagctgcatggttattcaatcctcatatcgttgaaatgttattcggccttaatcaagaactcggagctgacgttttcagggctgctaatgcccaacgcatgcacatgcattttgtttccaaccctcgagtttatggatttgttacatagaagataacttgttgtgggcaagggccatataacagggttgatttgtgctcaacggcctcgaacttgtgtccaaacagagacctttacgcgttttgggatccactccatccatccgataaagctagtcgaatcatagtccaacagatcctcagaggcaccactgagtacatgcaccccatgaatcttagcaccattatggccatcgattccaggacttgatcaatgcctccttccttccttcgttttttcaatttctctcgcaagtcttcacaagacataattaagttgtagttggtcatattctatctatttgtgccccttaattaagtttatttcatcttctcatgatgatcccctagctagtgcatgtggtttgtgctgcaaagttatcatgtactggtttgcccctccaattgttattgctctcttggaagtaattttggtctgtcaccagcaataaaatgttttctggtccttaaacaangn

SEQ ID NO: 85595 - DNA, 878 bp, Glycine max
  Clone ID: PAT_MRT3847_48306C.1
actgaatctactagcccccacaggttctaatgataacactagcgaaaatccgggggagggagggtaaagaaaaaaacttcatacaaatgcggtgtaaaattggccgctcttccgttatgtcagagagagagactgtcacccagggaacatccgtaggagggagggtatagaaaaaaacttcatacaaatgcggtgtaaaatttcttcctgttccgttatatgagagagagagactatcacccactcacccagagtattcttattggcttattcagaaaatatcggcctgctcttccaccacagtaaaggcatcatcacaattcacaggcctataacttgagctttggttgttttatccaaggatcgaccctagccgataagacttcaagatggtcggctgtttgtagcaatgttgaaacttgaaaatttgttactcgggattcaggaaccagagaaaaaaagcattacatctttgggtgaaaaagtttaaagaatgcaagggcgaggaagaccataaatgggtgaaatggaaggtaataaatagtatggaagagaatggaataccagaggcaaagatcccaccagtcccaaggaagatcaagatgggtgccagcaagttatttcagtgttgagtcgttgcttttgctgtcatgtttaactgcttctttacttatactcccactcttactcccaccattgcctcccccacctttcctcttgctcttgctacccattgccattttacttgtgctaatcatctcggcttttatgccttctaatgtaagagatattactcacacatatatgtaaatacatgtcataccttgtgttgtggctgaccttctgcatcgtggaaaaaaaaaaaaaaaaaggcccta

SEQ ID NO: 85596 - DNA, 190 bp, Glycine max
  Clone ID: PAT_MRT3847_48307C.1
gagtcaaaaaaatattataatctttctaatattcccacgtaatgtgtaacggcacaacaagtttggtggcctacaccgatgccgttgagttcccccatcctttttacgagataacttatagaatgaggtgagggtgataacgcgatttatctccaaaagaggcgaacgcggttgtggtaaaaactccaca

SEQ ID NO: 85597 - DNA, 311 bp, Glycine max
  Clone ID: PAT_MRT3847_48308C.1
aaagataattacccccaataaggataatgcaaaatgctatgggagagaaatggggagaaagagtgggatgggaatgatgggtaagctaaaatacaccactttattcttactacttcgtattgcgaccttgacggtaggtattaatgatcgtgaggctatggcttacactcactctcactggtgggatctcactcagagattcatcttcagctatcatgattaataatagtaattggctgtttatcatggaccaatcttcttctcgtgcagctgaagttgtcgacaatggatcggggtatacgaagatgggg

SEQ ID NO: 85598 - DNA, 457 bp, Glycine max
  unsure (1)..(457): unsure at all n locations
  Clone ID: PAT_MRT3847_48309C.1
gggcgaaaccaaaacatatccatgtatttagaacatcaaataaaacaacaaaaatattttaataggctgaattggttctcttccaacacaaaaaagggctaataatccccaaacaaaaactacgcagaccaacagcgagagggaaactaataacctcccttgggggcattgaccacatcataagaaataggggtgactggctccaacgttgccccctcgaccatgaaaccaggtttggaaccctggagctgtctcttggggctgatcttctcacccttggccttggcctcaggcttgagctgatcattcttggtcttcctaaggcggaactcctcagggcaccttggtgggataacatgcgtccacacgcgacgggaatacctcttgccttatggattcgggnggccgaacctggcttgggtgacttcggaccccaacagcgacggtggggggacat

SEQ ID NO: 85599 - DNA, 269 bp, Glycine max
  Clone ID: PAT_MRT3847_4830C.1
tcgttttgacaaaagtgaagagtttgctttgcgaggaagtaagtaggagatgctctgaactttcaaatttcttcaatccctggaaagagaagaagaagaacgttctaaagccaatccattttcattttgaaagatcgtgatcgcaatggcgctctccgccgtgaggcagcggtgctcggagccgtcggatccgtgaccatcagaaccgtacacaaagctggacaagcccgaaaaagcggaggagaaagacgaaggcttggggtgggttt

SEQ ID NO: 85600 - DNA, 146 bp, Glycine max
  Clone ID: PAT_MRT3847_48310C.1
atactgcaaacactgatgctgtgtttacttagattcgactttgctctcattactataaaataacacctcttggggaattcatgacttgtgaactttttcattcaacctatatatcatattattaactcttccgcacaatcaaacta

SEQ ID NO: 85601 - DNA, 258 bp, Glycine max
  unsure (1)..(258): unsure at all n locations
  Clone ID: PAT_MRT3847_48311C.1
ctgtaagtggcattaaaaatccttactaaggcttgtggatcctagccttggaaaatatggaatgtgntcctgtaaagtaatgtacccagtgtaaaatgttcccgtatccaaagtatggagaggncatatcacagctacctgatatgcaagagtgttcggttgatctaccactgctcagagactnacatggcagngtatcngaatggcatagttgtacggaacgatagctagacnatgnaagtgctcnaancaagtgtt

SEQ ID NO: 85602 - DNA, 206 bp, Glycine max
  unsure (1)..(206): unsure at all n locations
  Clone ID: PAT_MRT3847_48312C.1
gcttgaggagatggcgagcgccgagggcgagaggtgggtgggactggcgacggacttctcgcaggggagccgagangcgctgcagtgggcggcgaccaacctgctccgcgccggcgancacctgctgctgctgcacgtcatcaaggagcccgactacgancagagcgaggccatcctctgggaatccaccggctccccgttgattc

SEQ ID NO: 85603 - DNA, 520 bp, Glycine max
  Clone ID: PAT_MRT3847_48313C.1
gtccgtccgctcggaattcggctcgagattagtttctttgtatctgtctcagttacttccattctccaagcctgcttcatccttgggggggatcatgggtttcaaatcccttcttaacatgaagaagaagaaacttctgaagacgatgcctctttcgttctcattgccccacgcgcctccggaatggctgcattcatcacgcgcctacgggatggaggactctgagtctgccttctaaaagatcgactcatacggccacagactgatactcggtgccgaactcgtctgcatgatgcatagcctgggccagcccccgaccgatgaagagctagagaccctgcttcccgaggtcgcttgcgtctgtgacgcgcccatggacttggaggagttcaccgagatgaataccagggacgtggaccccgacgaggatttggagaatcgtgaggacgctttgtgcatcgttgatcttgacggcaacggttgcatcaccgcggaggagcttaaaatggtgatgggaagc

SEQ ID NO: 85604 - DNA, 391 bp, Glycine max
  Clone ID: PAT_MRT3847_48314C.1
cccacgcgtccgtttcgcgctcgctctgttgtgaatagagattcatcacttccactcggcccattctccgctttcttcaaatcgtaaacttttttgggattgaagaccgaatcgaaattttcagggtacaatggcttccaacatctcgcccgctgcctttgataaagaacaggtaggcattcttttctcttcctccaactttggtaaaactgatctggtggttgatgtggttaatttgataccccaatgtggtttcaagtttaaattttcttttttgggtgttatttgattatttagtttttggatgtggttcaataattcatgtggtcatggagcagatatttggaatggctgaaaaggagatggaatataaggttgaattattcaacaa

SEQ ID NO: 85605 - DNA, 325 bp, Glycine max
  unsure (1)..(325): unsure at all n locations
  Clone ID: PAT_MRT3847_48315C.1
ggcacttataaacagcgttcttttattttctcaagtggatagcactttagcctacaaaattatgcacccaatgtaacctaataagtaatagcanntccnntnncnnncgcaaatgaccgaaggggattaaaaaaaattagagaacatgccttccttctaatatgtatttacacatgataagtcataacttgacaaggagcataattgtgcattataacaatcacaagcactttatcatcatcgttgttgttgcatctccatcatacaataaaagttctctaagcatacaaacccaaccccccattttgtcgttctctcagccgtg

SEQ ID NO: 85606 - DNA, 501 bp, Glycine max
  Clone ID: PAT_MRT3847_48316C.1
cttgttccgtccacgacgttaaacttcttcgcgatagaaaggttataacggtagaaaaagagaggactgacaaaggcaaaaagaaaaaaataatgagcaacaaggatttaatgaatttgtttctcagtatcacagaggaatttcctgaggttgagattcaagtggattcccggtttcgtcatgtaattgagaaattgaactcgtacccaactcaagaagatcgttccatggcaacttgttggaaaatcatcgcatatggtgtcaggggacccagtaaaatcatgtggcattttttcagacgctttctaacatggatttggtgcaaatggattgaggcatatgggattttgaaacgtgtttatattccctagcggctggagactaatatgcggtgcttgctgctgcagcggagcttgccctcactgccattcagacatattattcaatccgcaactagtgttttattttaggttagtatagtttttaaatttatcattttta

SEQ ID NO: 85607 - DNA, 281 bp, Glycine max
  unsure (1)..(281): unsure at all n locations
  Clone ID: PAT_MRT3847_48317C.1
gcttctganacccttattagcgaccaagaagacgccaagccttacgcgaggtgccccaaaaagaaacggccactagccgagcgaaataccaccaggacggaaggaacggacaaaaccagagcaacggagcaaccaaaacagaagcagacaagggaccacccccaagaaaaaccgcaagcagaaagaaaaggcgaggaagggggaccccggggacaaggggagacgaaggccacaaccggagcaacagccacggaaagaaccggaaacgcaagacacacagc

SEQ ID NO: 85608 - DNA, 1317 bp, Glycine max
  Clone ID: PAT_MRT3847_48318C.1
ggtttacattacaagaagcatttggatggtttctctgtcatgtttgtgattattgttctctatgttctgttcataacgattttacagaacttagttagtttaccatactggggacggatgtttgcatttgtgattcttatggttctgctagcaacgccttttggaattgctatcaaggcccattgggaagagtcacggaagttttcgcaatcctacacaattgggaggggttcttctactaataagggtaccacttcctccagtcattctgcatcagtggatcaagtggagtaccatgaattgcctagtgatgaggggcaggaacaagtgacttcagatgacaaattgccccgtgaagaagaaaagaacctcttgcaagctatgtgcacggttgatttttggatgctgtttgtgatcatgatatcagggttgggttctgggcttgcaactataaataatatgagccaaataggacaatcccttggatatagcgccattgagattaataatttggtgtcactgtggagtatgtggaacttccttggtcgttttggaggtggccatgtatcagattatatcatgcacagaaaaggttggcctaggcccctgttgatgacagtgactctggggataatgattcttggccatttaattatagcatctggtttccagggaaatttgtatttgggtcctgtcctggtgggcatctgctatggtgcacattggtccttgatgcccacaatcacttctgagatatttggtgtaaagcatatgggtaccattttcaatactattgctgcagcaagtccacttggatcgtatatactttctgtgagagttgttggatatatttacgacaagcaagccgataaagaagatcattcgtgctttggcatcaactgtttcatgccgtcattttttatcctggcagctgttgcttttcttgcgtttttggttggtttggcattattcttccggacccggaggttctataagcaagttgtgcttagaagattaaaacattatgcaagatgatggagattgcatttgcctgcatttcaacactaggtaaaggctgaggaaaccagtcttgttttctctggtctgtttggcataaatatagttaatgcagttttctatgggttgtctatgaggattatttgaattgtattttatttgttataagagaaatgtacacagaattttaaaaacagatatgtagtccattcatttataatcaccattatgtttgattatgagcaaaaaaaaaaaaaaaaaaaaagggaaaaaaaaaaaaaaaagaaaaaaaaaaaaaaa

SEQ ID NO: 85609 - DNA, 296 bp, Glycine max
  Clone ID: PAT_MRT3847_48319C.1
gggggggtgttttttttttttttttttttttttttttttttttcccttttccttctttggtctttagggggaagagaaccagggctccccccccagagggagaattccccctcgaccgcctaagccgcaaaaattttaaagggcaccccgtcacttgggggggggggcctaacaggttacgcttaacaaattcggttggggccaggggcggaggggcggtctcggtcggagcggcaaggcgcctgccggcttcggtcaggagaaggcaatcagggggggggccaaacccccggggg

SEQ ID NO: 85610 - DNA, 528 bp, Glycine max
  Clone ID: PAT_MRT3847_4831C.1
cgactcagcgtccggctatttttacatgagccatgggtgtttgataattcacgatattgaggtttcttactttcttttcattgcttcataattcataaaaactctttatggtcatgctttgagatattttatttttggatcaaaatcttttctgtaacaatatattttcgaaatatgaagtttgtacctttagcaaaggaaaggaaacaatgaaaagattgtttctatatgtcaccagggtggatctgtttcttaaaaatttgtgcattatgaacagctggaacataacaagttgttgtgtccatctagtgatgaatttcttctctgagataagacatttccatataggtgggcagttagatatcttctctgatattaacattacaaatttttaatttcattgctctttaaatatgctggagaggttttcgccagattcattagtacaagggtacctactatgtaccttttgttgtgtgaagtgtgaactacttatgaatatagttttttccacatgttgatttctat

SEQ ID NO: 85611 - DNA, 429 bp, Glycine max
  Clone ID: PAT_MRT3847_48320C.1
agataattggtgtaaagcatatgggtcccatcttcaatactattgctgcagcaagtcctcttggatcgtatatactttctgtcagagttgttggatatatttacgccaagcaagccgataaagaagataatttgtgctttggcatcgactgtttcatgccctcattttttatcctggcaggtgtagctcttcttgcatttttggttggtttggcattgttcttccggacccgaaggttctataagcaagttgtgcttagaagattaaaacattatgcaagatgatgaagattgtatttgcctgcatttcaactctaggtaaaggctgaggaataaatataattatattaatgcagttttctagaggttgtctatgaagatgatttgaattgtgtattttacatgttataagagaaatgtacacagaatt

SEQ ID NO: 85612 - DNA, 629 bp, Glycine max
  unsure (1)..(629): unsure at all n locations
  Clone ID: PAT_MRT3847_48321C.1
ctttatgctaaatttctctctctttctaagctccacattttcccgttactcccatctagattcttcagttctcccttcaccactccagagatgaagaagtccgtcctcgctgcctccgtcgccgccgccgcttccgccaccgcggcgtccctctcctcttcttcccatcaggatgagaggagaagccgtgagaacacttcgtcgcagaattcatcttccacggagaaattcgctcccagatttgatggattgcgcttcattgaaaccctcgtaactgcacatagatgatgattattcgaggttccccacttctcactcaattggggcctcattctttcttccctcatcccttgcctttatcttttttctttttctgttatgccctttagaagaagaaaaattcatgtatgggaaaattcttaagtcttttacttctgtttttcccccctcttaggagaattagagagaaaaaaattgtaattttacgggattatttcattgccctttctgggaaataaaaaagtgacaaggttttaggtttctgcttatatttcctttccattattcnnnnnnnntaccaatcctcgatttttttaatattaatgtggtgtggctactcgnnntcccca

SEQ ID NO: 85613 - DNA, 123 bp, Glycine max
  Clone ID: PAT_MRT3847_48322C.1
gaagaatgttgtagtatagtatgggcaaatctattgaccccgagctcagaagctgcgaatcacatgatttaatggcacactctaaacgcattggggtattaacgacatgctcaagccgaatat

SEQ ID NO: 85614 - DNA, 121 bp, Glycine max
  Clone ID: PAT_MRT3847_48323C.1
agcctctagggcaaacgccagagagctcactaagctcttgagtcatcctcaatctttgcatcaatcagcattgagatatatactaaaaaggctgctgcatactgtgcagaccccggctaat

SEQ ID NO: 85615 - DNA, 212 bp, Glycine max
  Clone ID: PAT_MRT3847_48324C.1
agtggctggattggttgatgatggagcctaatgggatatcaccggcctggaaagaaaaaaacctttaccaccgaccgggaattttcccgaagaatcgcaagttcccgactattccaggccgaaaggaaaaggttaatccttccaggcctcttaatcaacctaatgggtttttgacacctggagagaccatcattattaaaggaccggttttg

SEQ ID NO: 85616 - DNA, 305 bp, Glycine max
  Clone ID: PAT_MRT3847_48325C.1
gagggttattcattataatcactactaataagccattccaaaggaatctgcggtgatttatagaacctcctttactcattattgtatgtcgcgtcgccttgacgcagtgcctcctctgttgccattgtcactccacaattaatactcgttgtcgctggacattttctacgacgatgcctggtagctgctgattgacaccaatcaatccgtgaattgtctccacgcatctcgcttaacactatcctttcggacgactacttggaccaattgaaggcgtttttagagctctggtttgggttttattc

SEQ ID NO: 85617 - DNA, 395 bp, Glycine max
  Clone ID: PAT_MRT3847_48326C.1
cccacgcgtccgcccactcgtccgcccacgcgtccgaacagggatgcaagtgaaattacagcagagcaagtaagacataccaaacaatcgactgatggggagattccaaagtcagaaaccaaaggtgtgcctgaagataaagccttgcaaacaatacttgacgatgtaacggatggaaatgaagcagttgatcagagccgtcaagaggcgagacagccagaaccaaaatttacagaaaagtttaacgaagaggtgcagacaacaccatatgatactgaggagacttcagaaataaatgccactaatgatactgagaaacaagaaaaggttcaggcatctcacaccaaggagaaacttgggattgaggatgaaggcatattctattaagaagaagc

SEQ ID NO: 85618 - DNA, 269 bp, Glycine max
  Clone ID: PAT_MRT3847_48327C.1
ctctttctccgagaacaaaaaaaaaaaaaaaaaaaatccgggatccgccctcctctgggaaaagtgaaacccagaattacgaccgaaagaaaagagcgttttaaaagtgaaaaaagagggggttgccgtccacgaagctgtccaccaggttttttccgaaaagggaaatgaggttcctaagggaaggccccgatcctccgggaaaaccacccatcttgaaaaagcccaaccttggaaaattggccaccatttcccccacaacgggttta

SEQ ID NO: 85619 - DNA, 108 bp, Glycine max
  unsure (1)..(108): unsure at all n locations
  Clone ID: PAT_MRT3847_48328C.1
gcatgatgtgggagaatgaagattccaacagttgtcagaactgagcttnccaagtgcagcaacttctttctggccttagttccagaggcatggtggatgcccatnctt

SEQ ID NO: 85620 - DNA, 1476 bp, Glycine max
  Clone ID: PAT_MRT3847_48329C.1
gcccccgcgaagatagcctcaactggggtgcgagaagacgacagaagggggtgcaattgaaagagagatttgatagcctcaactcaagtaagggttttctctttgagaaaatcgtatcttacaccttttggtgaccactttgagtgagagaagagaaattaagagagatactcaaattagattcaagagagatggccatcaaccatgaaacttgggctttcattttcggtcttctaggcaacgtgatctcctttatggtgttcctcgctccattaccaactttttaccaaatctacaagaaaaaatctacggatgggtttcaatcactaccttatattgttgcactattcagttcaatgctctggatttattacgcacttgtcaaaaaggatgctagcctccttctcattactattaactcctttggatgtgtgatagagacgatttaccttgcaatcttcctaatttacgccccaagcaaaaccaggctttggaccatcaagcttcttctcatgttgaatgtttttggatttggagcgatgcttctttcaacactataccttacgacgggttccaaacgtctttctgtgataggatggatttgccttgttctcaacataagcgtttttgctgctcctctttgcatcatgaaacgtgtcataaagacgaagagtgtggaattcatgcctttcagtttgtccttctttttgaccataaatgctgtcatgtggttcttctatggccttctcctcaaggactactacatcgcactcccaaatactcttgggtttctattcggcataatccagatggtgctgtatttgatttatagaaacgccaagccacaaggattagaggagccaacgaaggttcaggaactaaatggccatattattgacgttgtgaagccgaatcatgtaacaaaaaatggtcctgtgcctgtgattgagacagctagcaatgtgtgaactagaagcaataatgtaccaagtccaaagagaaagaaggaaaggaaaaaaaaaatgaggtcccaaaatatttaatctaaaagtacaattactttaattactttgccaagtggggcctcattcaacgcaagaacgtacgtacgtgtaatttggtattaatatttaagggttcttcttttgattaacgtatttgcctgaacgggtagctgtaatatgttaggttttcaattgtgttagcatgagagtctctctttggccttttccatcactctctcattgtagtaaaacgtgtaacaacgtatcttctctatcttctttttcagtgtgtaccctcagtcaaactcctcaattcttgtacgcgtaatatatgttcatgtgatggaattaattaattattattttactaattatgcaatttaagagactaaaaaaaaaaataaagataaaaatagaggcacaaaagttttttaaaaaaaaccatgaacacaaaattttcaacaaatttatg

SEQ ID NO: 85621 - DNA, 587 bp, Glycine max
  Clone ID: PAT_MRT3847_4832C.1
ttatgggggatagtgagagtgagtgattggcgaaaccggctcacaattttggcatgaaattttgaaaagcacacagcacacagcacactttcaagtttcacccttaagcgcgccctctcatcaaactccaatttacattcatttcgagattccctcctttctttctctctatattctaattctaattccaatcacacccagattctattccctcccttacaattctagggtttctctctccgctagggttcctaatttctctcccccttcccaccaaaaacatggccaccgagggcctagaagacaccaagcctcccctccaggacgacgaccgtgcgaaatcggagattcccgagaaagacgcttcctcggacgacgccgcggcaaaatcccgggacgcgaatgccggcgacaaagacggagcatctgacaatcaggaagtagaagagaaagacgccgctgaggagaagaaagaagagatcgacgaagacgaagaagaagaggaagacgaagtggaagagaaagagaagggtaagggtaagaagagtaagaaggatccagttacaccggcgccgagtgagaggccc

SEQ ID NO: 85622 - DNA, 620 bp, Glycine max
  Clone ID: PAT_MRT3847_48330C.1
attgaaatccaaattctcggggcagatatctttcgaccttgcttcacaccattcaacgaactgcactcactgtgctctctagaaccctaacttttgtgctaaaaccctaaaccacgtcgaatcgatgattgaaccctacaacaagctggttaaactagcggcgagggctttttacgatgatcttaccagcaaaggagataatcagcccaaaacgggaaggagtgataacaggggaatagctgtggtggttcttgacgcgctcacgagacgacaatgggttagagaagaagacttggcaaaggacctcaaattacatacaaaacaacttcgtcgaactctgaggttttttgaagaagaaaagatcattactcgggatcataggagagagacagccaaaggtgcaaaaatttatagtgctgctgtagctgctacagctgatggtcaacagacagcaaaagagggagaagaaaaggtcaagctgcacacacactcttactgttgtctagattatgcacagatatacgatgtgattaggtacagactacatcgcatgaagcataagctgaaagatgagttggagaacaaaaacacacttcaggaatacatatgtccaaactgtg

SEQ ID NO: 85623 - DNA, 380 bp, Glycine max
  Clone ID: PAT_MRT3847_48331C.1
ctcctcaatcatccatagacatggccaccgacacttctgcagcagcttctattccctcattcactggcctaaaggcaggcgcaagcgaagggagtgccgacgcaagtaacgtctcagctccccaagccacaaggttctgcggaatgaaggcttgcctcaaagacgttggaatcgatgttgtggccactgctgcgagcgcagttctaactagcaacgccatggccatcgacgtgttactggacactgatgacgggactgtggatttctctcccaactctttttccaaggcccctggggaaaacatcgtggtcaagaacaacgcaagtttccaccacaacgttgcgttcgacgaggacgacattcctaacgacatggatgca

SEQ ID NO: 85624 - DNA, 256 bp, Glycine max
  unsure (1)..(256): unsure at all n locations
  Clone ID: PAT_MRT3847_48332C.1
atccattttgaagtcttggatctctatgatggtacattctcttgcatacttttaatctttatgaaattgatcatattcttcatttgtgactttaactttccttttagttctgtgcaatatttataatagtaaatataatccaagattttatcaggttgagttgagaatcaaggaattntgatttgatttgatctgacaacagtataccaagttgggctctgcnaatattctgtaactttcaactgttagaacataa

SEQ ID NO: 85625 - DNA, 2482 bp, Glycine max
  Clone ID: PAT_MRT3847_48333C.1
gaaaggcccatcattcacgacaacgaaagcgtcgctagttcgttccattcccctctccatataaacgcttttgacaaaatcctaacatttgttgtggcagttattgaaatccaaattctcggggcagatatctttcgaccttgcttcacaccattcaacgaactgcactcactgtgctctctagaaccctaacttttgtgctaaaaccctaaaccacgtcgaatcgatgattgaaccctacaacaagctggttaaactagcggcgagggctttttacgatgatcttaccagcaaaggagataatcagcccaaaacgggaaggagtgataacaggggaatagctgtggtggttcttgacgcgctcacagcttttgaagacatgccttggtgttttgctctgttgaaagtagaacgcatggttttgagttttggtagctgagtagcgaatagttgtgggcaaatgctgctgtgactgtggttacaatgattttgtgagactttaagaagctcaattcactgcaattttaaaccatggaacttatacgtgtgcgcagttacaaaggaagggaaacataaagagaattgaagttatttgaatttttaagtgaaatagagagaatgggaaagcagaatagattaaatgaaagaaaatggaaaaaaaatgatacgacaatgggttagggaagaagacttggcaaaggacctcaaattacacacaaaacaacttcgtcgaactctgcggttttttgaagaagaaaagatcattactcgggatcataggagagagacagcgaaaggtgcaaaaatttatggtgctgctgtagctgctacagctgatggtcaacagacagcaaaagagggagaagaaaaggtcaagctgcacacacactcttactgttgtctagattatgcacagatatacgatgtgattaggtacagactacatcgcatgaagcataagctgaaagatgagttggagaacaaaaacacacttcaggaatatatatgttcaaactgtggaaaaagatacaatgctttggatgctctgcggttagtatcgtttgaagatgaggacttccattgtgaaagttgtaatggaagactagaggttgaaagtgataagatagctgctcaagaaaggggagatggagatgataatgcaagaagacgacggcgcgaaaagttaaaggacatgcttcaaaagatggaggtacagctcaagcctttaatggaccaactcagtcgggtaaaagacttgcctgtccctgaatttggcagtcttcaagcatgggaagctagagctagtgctgctgtccgtgcagctaatggagatatcaatgctggtgattctaaaatttcgcagccaggatataatggagtgccttacagtggagacactaaggttgtagttgacttcaatactgaaggcaaaggagagggtgttaagtctgaaactgacagtacatctttaaaggttttgcctccatggatgattacatcaggtatgaatcttacaaaggaacaacgtggagaggtgaagcaagaaacaaagatggatgggacttcaacttccacagcagcacagtacacagatgacaagaagtcaacaattggacatgacaacaatcaaaatatacaggatgagtatattaaggcttattatgctgctttacttaaacaacaacacgaattggaagaagctgcaaaaaaacaattgtcaaatacacttgctgctgctaatccttctagcagtacttccattcgccaggttggcatgaaatcaaaacgtgaggaagacgatgatgatactgaatgggaggaggctccaattgcaggcaatggaaatggaggttacacggttgatttgaatgttgaagctgaggaagttgcagcagaagatgatgacgacgatgacgacgttgactgggaggaaggttgatgaaaaattatctggtcagtagaatgtaatggcctattctgatttgcaaaggccagcgctaattaataatatcgcttcaaattatgtaccacaaaaccagaattaactgctcatatattattgcttgtgcatcttattgtggtgttatgcgtcaacggcttcagataaggtgcgcagttgactttttagttgctaatcatcagtattcgtcgcatattgaatgaacaacagctctactttgaaacttagccgtccaaaaatagtgtctctaactttatttcattgtgatcacatactatttaccaatggatacctagatttgtgagtaatgagccatcccaacgttttacttacctgtggtgtcgctcacaccaatgaagaaaatggtgagccctgaattatatctcctctgctatttccaacaaggctatttccaactcatcctagttgtccatttcccgaaaatgtacaaaaagctgtaatgagagatgggcaatgtgttcgttgcctggcatcttcaattaaagtcaaagtttatatccc

SEQ ID NO: 85626 - DNA, 263 bp, Glycine max
  unsure (1)..(263): unsure at all n locations
  Clone ID: PAT_MRT3847_48334C.1
aaaacaattattctttaangagaaattatacctgtacaacaaaatatacaactaagagtganagacagnaanagnagataaatttnaatttganatgtaataaatgatagggtagangagaganntagacgnanaanataatgttgtatacnaattggaaccgaaaagtggcaagcctactagnatangcnagannctcnagatgggcnataggctttgataccatgtnagattncaacttaanaccaattcaccttgagtgg

SEQ ID NO: 85627 - DNA, 446 bp, Glycine max
  Clone ID: PAT_MRT3847_48335C.1
ttttgaaagcagaccaactccaagtttgactactggtttctaattccgatgctcatttccctttttggtacactcatagcatcggtgatcagagcgggggcagccttgtcggtcgagtatgcatggagagaagagtccttcacagacgtaacatgaaacatgaccgcatatgcccagataaaaaggagaatgacgccctcctttaaccttgaaaagacccacgccaggtgttcatcatgatatcccgtgcttactcctcgtcgcccagctgagattgacgcttctgctggacacgctcctgcctactcttcctggtcggcttggtcttcgcacgcttggcgttcatcttttactggatagccctctcgcggaccttctaacacttggccttgaggatgtgttcaacgagagcacgctcgcgcttgaaggcgagacccttggacagg

SEQ ID NO: 85628 - DNA, 252 bp, Glycine max
  Clone ID: PAT_MRT3847_48336C.1
attcaaatccacattcctcctcctcaaattaacctttgttggtagcctatccagtatcaacctccaatcaaagtgggacactttacttggaagtttgagcttccataattccttaaacacctcgtaattattttcccctgagaagtgcctattgagcactttgtaagagctgcccactgtgtataccccactcaaccccaacaatcgtgctgattagtttgcactaccatgcccttgatgtcctccatgaaa

SEQ ID NO: 85629 - DNA, 630 bp, Glycine max
  Clone ID: PAT_MRT3847_48337C.1
aaaaaattaaaaaaaaaaaaaaaaaaaaaagaaaaaaaaaaaaaaaaaaaaaaaaaaaaaaaaaaaaaaaaaaaaaaaaaaaaaaaaaaaaaaaaaaaaaaaataaaataaaaatagggggggaccgtttttttggttcccggttttttcttccgccctgcttgcgactttttttgtttttttttagtgtttttggggggggttccttgccctttttttttcgcggtgtgttattggttaacccttggctttcccctgctttttgcctttgcacccttttccccttttgccgggttgcgttcttgcccaggggccccttccctttcggccttttcgacctttttgtcctggctgagtggcccttgcgcccccccttgcccccgccccttatggtggggggcttttcggtttcccccccccttgccctttccctttgtccgccccttttcgcgtgctcttttcgctttcttccttcctttcctcgccacgcctgcccgctttttcccttttggcttttatgttgggggccccttttggggttcggttttatggtttgcggggcctttttcccctgagacgttgtttcgggttttgtttctcggtttggcccttttccttgtgggccctttt

SEQ ID NO: 85630 - DNA, 453 bp, Glycine max
  Clone ID: PAT_MRT3847_48338C.1
tcggatttcggctcgagaacggttctagaacccccgcgagtgttgcggtttcggacattccttctccttcaaactcaaccgagggtaatagttataaccgtggcaagagatttttctttggtgttgctgttgcctttgctggccctgctttcttctgcgtggtgcttgtgattttggggtatgtttctttcctcaagtggcgtggcgtgaggaaattacagaagagttttcgaacagtggggtgttgtcctaaggagtttggttacaaggaggttaagttagccaccaaggggtttcacccttcgagggtaattgggaaaggatcgtttgggacagtgtacaaggccttgtttgagtcttcaggaaccattgccgcggttaaaagatcaagacaatattctcatgaaggaagaaccgagtttctggctgagctttctgttatagcaggtttga

SEQ ID NO: 85631 - DNA, 329 bp, Glycine max
  Clone ID: PAT_MRT3847_48339C.1
cttcccaatgtcctccctctatatatatgcataacaggcctgaatttcaacaaaccacatggttactacacataccaatccgcttcagccgccattacgaccgataatgctggcatcacaaaaacactaccacattctgagattaatgactacgactttgagccatgtggttattcaatgaactctgatgaaggaactggtgctactaccattcatattaccccacaagatggattcagtcatgcaaaccttgagactgtagggactgacttcaaacagctgaatcacaacgaaatggttaacaaggtatcggcctgttctctcccaac

SEQ ID NO: 85632 - DNA, 475 bp, Glycine max
  Clone ID: PAT_MRT3847_4833C.1
gacgggacagactgaagactgtcaccgagcaatgcgttcagatggcgggtttactcaacgagctaagaagtcgcgtcaacgaggaggacaatgcgagaatatctgatctgctggaaagggtcgaagaaaacatttccgacatcagacagacgtcagcgccttctattccagacaccgaagcggagggctccaaagggagcagagaatacggcactcaaaacacccccttgcctaagctcaaccaagtcaatacggattcgctggacttgctcaacgaaaacctacaaaagaacgaacaagcgcgtgcaactggctttatcgggcagaattcagttctgcagtggctgcgcacaatatctagtctacagacggaccgatcggaggaggattctctgaaatcagtacctgagcacaggccttcaactgaagctgaaggggtaagcttctttacgttttggatggatggcgataatgt

SEQ ID NO: 85633 - DNA, 708 bp, Glycine max
  Clone ID: PAT_MRT3847_48340C.1
tgagtgatgaaggtggaaattggagcttgggacaacagcaactgttttgtcttggaagagtactacttaagaggaacagaatacttgttctagacgaagctactgcatcgattgactctgcaacagatgccattctacaacaagtgattagacgagaatttgcagaatgcacggttgtaaccgtggctcacagagttccaactgtaatagatagcgacatggtcatggtcctgtcctatgggaaactagtggaatatgatgacccttcaaaacttatggagaccaactcttggttctctagattggtcgctgaatattggtcgagctgcaggaagaactcctccccaaatattaacaggcagcaacattgaacaagaaaagggagtacaaacaaactgaaggaaaactgaataaattgaattttagatgtgcctggatcctcttatttacccaaggggacatataatataatttacaaaatgttgttagacatcatattaagtgtatatgaacactcaattgcaagtctactttgagagaaaattggtgaagcttggaaaattcttccttccaaactatattagaatataacctatatattttccttctgtttattcattagtatctaagtaactccctaaatttatgtcattttttttgtttctctctatcaggcttcatcatatttgagtactttggaccttgttt

SEQ ID NO: 85634 - DNA, 167 bp, Glycine max
  Clone ID: PAT_MRT3847_48341C.1
aaagttcccctcaaaccaagtacggctaaaatcaaatgggcaagaatcttcacaatctgaacccaaaaagaggaatagaaggcaatttccatctaacgaagagatttcaaaagccagcttatgggtataaaccttcctatgaaaatctaaggaatttgtgattcctg

SEQ ID NO: 85635 - DNA, 316 bp, Glycine max
  Clone ID: PAT_MRT3847_48342C.1
ccttaatttatatgggggctaattttaagggtgtttcattaacagcccctcggataaaaaaacactacacaaaacaaccagtgtggagtgggcagcagaaaggtccctcaatgcggaagagaagaccctacttacctataaaaaaacagtacaatatgaaagctggcgtatgctggcacaaaagatccccagacaattaataacgaagcagacttttgtataatgtataagaccataatctgaacaccaacacaggcagagcagggacggctcgccatcactaagagactaagaaaaaagaatgaacgaaagaaaa

SEQ ID NO: 85636 - DNA, 470 bp, Glycine max
  unsure (1)..(470): unsure at all n locations
  Clone ID: PAT_MRT3847_48343C.1
ctcgagccggtcgagccgtttaaacctacgataatctttttctttcgaacagaccctgacagccaaatatgcgggtggggccacatgcacacacatgtgcgttcnatttagcacttcatatatacacgagaatctagtagaacagtatatatatttttactataatcctatcatggcttctaccgcacctcccgctatgcaaaccttctcacttttcgatcatctccccgaagagatgaaaatggagtgcttctctcatcttaaagaaaaagaactgtgcagatccactgccgtgtgccgtcgctggaataatttggccacagacaacgctctctggcctgaatacgtcaaatacttcgatcctactgccgccaaagcaacccaagtacctactccacgtgtgtgccatagcgccgtggtctacaacaataaaatgatcatctttggcggtcacaatcccatgcctggat

SEQ ID NO: 85637 - DNA, 423 bp, Glycine max
  Clone ID: PAT_MRT3847_48344C.1
cgcagggggggggaagttgggtgcactgatgtcacgggacaggggggaacattcgccaacttgcacaaaccgaggcagtgcctgcaccaaagaaactgctaacaacagaagagtgggagaaaaaccccaagatcccaagactaaaaaaaaagacgatgaatagaattggggcgcggggggggaccctgccacacgaaggccgtaggtacagaaacctcgctggcaacaaaggtacgaaacgggagttctcggcaacccgacaccaggacataggcgcatgcaacaaaaacagaacgcgcgggtgagaagaaagccctacaaagggctaaggctgaggaggcaggtgaaaaacacaacgactgaaatccggaaacactggacacaaacccccaactatccatccatcctcaacagacaccgatt

SEQ ID NO: 85638 - DNA, 342 bp, Glycine max
  Clone ID: PAT_MRT3847_48345C.1
ataaagcaaaaacctatggaccagaattgaataccacaggaccacaaacgtaaaaaaggcaatccggcacccacctggatgcattaaaaggaataactatacggaccatgcttataaaaaacagggaaaaggcaacctcctattatgctaacaaaaaaaccggtcctgaatataacacaaagccctgactcaaggtaaatataataacaactaaatcgtacatacatgacatatacccacaacaaatttacgaccattatgactgcttgcatcgctgacaccctgaatcaacggcttaaaaccacggagggatctagcacctagttactcctgactgggtaa

SEQ ID NO: 85639 - DNA, 358 bp, Glycine max
  Clone ID: PAT_MRT3847_48346C.1
ggtcgtcctttttttttttttttgaaaatatttttttggggtttaatcaatggggaatctaattgtcaggccctgaaaattgtaactataagacaattctagacagctaaaaaatgtgtgaatacaaactcatcatctcaaagtgaagacccaaacaaaagaagcccagttgggtgcatgctacaacatgaaaagactcactagtctatttataactaaccttttttattacctcttaaaggaagaaatacctcggccaaaaagagtaagaaatgaccgactccatatattccttcacccaaaaataaacacaggtagccagcacttagtcttcatcagagcccgcaaatgttttttt

SEQ ID NO: 85640 - DNA, 387 bp, Glycine max
  Clone ID: PAT_MRT3847_48347C.1
gagggaaaaccggtagcagcagattcctcttttttttcacatcaactattccttacttatgggggatcctctccgtgaggagagcaacctccacttcttctacataaaatttgtcattatagactaacttttctttataatttacattcttatatgaaaccataaaagttctctggcctcattcttttcctaacataagtatacgtaaactatcaaaagttgcttgctgattacattttccaagaactatattttcatcacattcttcaaattatgctgatctacatcctaatatctcttgacatccaccaagacatttttttgaaaggcttgcaatgtaacttcgtcataaattgatactccacttgctcaacatacatatcatta

SEQ ID NO: 85641 - DNA, 239 bp, Glycine max
  Clone ID: PAT_MRT3847_48348C.1
accacgcctacgctcctactatcgtaagctttatctcatccttattctatcaccaatcccgtaacttttaagcacactctatgcgctgcatcagtctctctcacacatcctacactttactctcactctctgacacctaaaatgcattgaccaatcagatcatacttgtcacatagcaatgacattagaaatactaatcaacaacacaagctcatagtgaaccacttgctacatacaat

SEQ ID NO: 85642 - DNA, 384 bp, Glycine max
  Clone ID: PAT_MRT3847_48349C.1
tcactttctctctgtatttctctttctcattttctactctttccttttcatcgcatcttagttttatttgcacatcttgtagttcccatggatactgctctcatggaagagcacaatattcttaatgatcatgatcataataacaagtctgacgcacatttgacttctgccgctgcttttgtacacggtcgaattcaagaccctcgttatgacgcttgcactatatgccttgaaactttctatgatattcatcctttcacactgactaacttcaatcatgactttcatcttcaacgcattctcgaatgacgtcaaagaaccttccaatgtcccatttattgacagcctatccatctcaaatattccactttccaacaattactt

SEQ ID NO: 85643 - DNA, 301 bp, Glycine max
  Clone ID: PAT_MRT3847_4834C.1
gggttgacccatgcgttcgttttttttgtgatttctctagggcggcccaaaaaaaaaattgggctttaagagattttttttccaaaaggtttttttatgggtggagctaattttggcaaaaatacctagtttaaaagtttcaccatcaagggggcatgttactttaaaaatcctgtggacccattaccccaataatttggcggggggcccaacccagggcccaccccttaacctttatttggctggttttcttgggcccccaacctttattttttttaggaggggctgaagtcgtttaacc

SEQ ID NO: 85644 - DNA, 471 bp, Glycine max
  Clone ID: PAT_MRT3847_48350C.1
ccacgcgtccgatataaacctgtgccaaagccatttccagggtataaacctataccaaagacagctccagttccagtgtacaagcctattccaaagccagtgtctaagcctattgcaaagccagtttcttgtcaagcctatacaaatccagttacagttccagtgtataagcctattccaaagccagtgtacaagcctattcccaaggcagtgtgtaaatctattccaaagccagtttcagagtacaagcctattccaaaggcagtttccgattcagctgataagcctattacaaagccagaggcaaagcctattccaaatccaatgtttaagcctatttcaaagtcaaatccactgtataagcctattcctaagtcaaatgcagagtttgagcctattccaaaaccattggccaagcctattccaaaatccgtttctatgtctgaggcaattccaaagccatttcccatt

SEQ ID NO: 85645 - DNA, 344 bp, Glycine max
  Clone ID: PAT_MRT3847_48351C.1
cacgagcctacattgtttagatcgggggcaaagcatcagcctttgcatatctgaatcaactatcaacacgctaacaacaagactaagaggatagctgccaagtgcgtaacttggccatgagctaatgtacaatgcggtgcctactggcccatacgtcaaggactggcttctcatgaccaggctcatgcagcttcaacatgaacaagatatagggatgaatgtcaaatctagacgattctaaaccaattaacgttatttcaggagcttgtgatatcaaaccatgcttaacaagaacacctctggactagaatgttactgacacaggctaaatataccataggggt

SEQ ID NO: 85646 - DNA, 1061 bp, Glycine max
  unsure (1)..(1061): unsure at all n locations
  Clone ID: PAT_MRT3847_48352C.1
cagctggtgtctttgctgaaactgcatgggcaggggctgcatattatttgctattatttatgcttgctagtcatatagttgggtcgttttggtacttgttagctgttgaacgcaatgacttttgctggcaaaaggcttgtagtggcaatgggtacaataaaaatttcttgtattgtggcaaccaatacatggaaggttatagtgcctggcagaatagaagtaaagatattcttacatcacagtgctctgtagataatgataattcaccttttgactatggaattttcaaacaagccttgtcatctcgtattgtttcatctaagaagttcttctccaagtactgttactgtttatggtgggggctccaaaatttaagtacacttggccaggggcttgaaacaagcacctacactggggaggttgtcttttcaatagcactagccatagctggccttatcctatttgcacttctgattggtaacatgcagacatatcttcagtctcttacaattagacttgaggaaatgagagtcaaaagacgtgattcagaacagtggatgcatcatcgcttgctcccacaagagcttagagagcgtgtgagacgagatctacttggcaacacgttctggtttcccccagggcgccatttaccctccctaaaaggaaccaaaattgggggtttagggccccctttttttttttttcttttcttattgtttctctattttttttttttttttttctttttttttttttttttttttttctggtgggggtttttttttttttttttttaacatgtccaattctttgtttattctgaattacaaacagaaggaccagactatcagattcctttgggaagaagagatgggctaacctttgccacaagacaagtgacatgggacaaccttccaccaccctcaagcaacgcttcaaccatcctaagctccctcgccaccaaaaacctcgncccccccgncgtcgtagcgctctcaggcggccaccccataggcatcagcccccgccaatccttcncccccaggctctaccgctctcaa

SEQ ID NO: 85647 - DNA, 118 bp, Glycine max
  Clone ID: PAT_MRT3847_48353C.1
tttaccaacaagaaaatctatcatcatataagtttttcaggatattatggcaccattcctataacaaattaactatagaaacaaatttactagaatgaatcctcaacaaaattttgaa

SEQ ID NO: 85648 - DNA, 364 bp, Glycine max
  unsure (1)..(364): unsure at all n locations
  Clone ID: PAT_MRT3847_48354C.1
aaacacancaaatccaaaactaaccgcgcgacttttatataaatgcacactttacaataataactttctaacaatattttaatcaacacctattaatttttaaatcacaaacactctatttacccaaacatttacatcatcatccccattttcataaattttaatcctaaattcacacaaaaattattactcccacactttattctatttaaccaaccgcataacattattcttttaaaatacccacacaaactcatgatttttacataaaatcccataccccatcttgacatcatacaaacttgaattataacatttataattatacatttctttcaatatttaaaaaagcttttccttttta

SEQ ID NO: 85649 - DNA, 1431 bp, Glycine max
  Clone ID: PAT_MRT3847_48355C.1
ctcgagccgcgcattacgccatcatccatcacagatccgcaaaatgatgggtttgggatgttgaagcggtggaggattcacaatttgcgatggaaagggaaaattggagagaacacatcaatagcaatgggaattattacgatgacgacggagtagaacgaagccctgcaaagccttcttcgctgtcttcatcgcctcccagacttgcttacatcgatcaccgtgtttccaaattcgataccttggccggtgtcgctatcaagtacggtgttgaggtggcagacataagaaagatgaataaccttgttacagaccatcaaatgtttgcacttaaaacactccacattccgctacctggaaggcaccctccatctccttgtttatcaaatggttccagtactccaggacatggtaactacgatcacagtccacctagtcaggcacgccatgatctgcttgattcatttgaatccctgagaataaagtcatcagagcggaaggtctccccagctatgaactcattacagggctactatggacttaaagggaccccaagtccctcagaagatggtccattcccaagaaacttacctatgtctgaccggcgtctgagtcgtcaccggaaatccaaaagtttggtcaatgtaattttggaagagattatggaaaaatcagatgatgcaccagctgcagaaaccagggaaattaattccaataaatggaatgacaaacttggccagggacatcagaaatccgtagctgactttaccaggataccagagttgcttttgagggaggataatagcagcagtggtgttctttcgtcaagaataggaaagggtttagctttgagacagaaagcagctaaccgaaccgcagcgacaattgattctgaaccaattggtttgaatcctgcggtgttgggcatgggggatacttctcttaatgatggttcatatggggtgaggaaatcatcaagcacttcttgtttacaggatcaagataccagtggctcctcatctatttggccaacctcaatgtggagtttgaaaccagacttacaagcactctcaagtgcagccattggaaaaccaatctttgatggcttgcccaagccaataactggtcggaaaaataaagctgcacttgattaatctatagaaatttatgaacagttttgaccccatttgtcaggttatggaatcattagccgctacaccagtgggtagattggagtaagtaaaacaatgtagaagaagggacataagatatcaaacatcacattttatttctctttgaataggggcattgttttaatgctagaaaatacttccatttatttatttctttaaaaatgttttgctgcctcatgaccatctttagaaaaatacaggcctcaaaaggagcagatttctctaaaaaaaaaaaaaa

SEQ ID NO: 85650 - DNA, 1034 bp, Glycine max
  Clone ID: PAT_MRT3847_48356C.1
ccacgcgtccggctgtgtgcgtgactctgtcactgtgttttgtgtttaagcacattgcattttagtttcagaggagttttttttttttttttttgttcttatgctgttattgttgttcaagtttcggttactactactactaccacatgttcatgccccttcaatttctgttcaactttttgactttttgtttggtttctaaggaaaaagattgcaacttgtttcgtcggctagtttgcttttggttgggtttgttagtccctgctggcacctcggaatagtgggtttttgtttttgtttttgttttttttcttcttttggaggttcaaattcttgttctgattcgtgtgaaggtggaaaatttatgggtggtcaccggaagaggaaaaagatgggattcgttggaaaaaagtaagactattcggtgataacatgtctgcttgcttttttgggacggcttttttgttaagattttgggttgaaaaggttgaggaagatgcttatgcttgcaacttttttttaaacccattttagcaccaagtataaaaagttgttcttggtcttgtttccaagtgttgaggtaggtgataggggttttgagcatgtgagtgattcatgcctctcattttggagcttctgagattggtttctggttgtggcttcgtttgtttgtttgtttgtttgttgtgctttcatgtttaggaaaaggcacatcctttcttctcttgcaagggaattgttggcactccagccactttttcttctcttcttgttcagcttgcaccacaacactgtgcagtgtcaaggaaggttgagtaagcatgtttcttcagagcctccctcaccttctaggccatcgtcagcagcaccatcttcatcaggatacaaggatgaccctaggaagataattttgagcatggttttaggagcagtcactgggctagtttcttctgctctgtttgcacttgtggttcgttgtgttgttcagtatctgaaccgcacaccaatcctcaagggccctgtcatattctccc

SEQ ID NO: 85651 - DNA, 650 bp, Glycine max
  unsure (1)..(650): unsure at all n locations
  Clone ID: PAT_MRT3847_48357C.1
ggaaaaagaagagagagaatcatccttccttttccgagaaagaggaagaaaacgccgagaaaacacagaaaccgatttcgccatcatccatcaaagatccacaaattcattcattcattcagcaatcccaattcattaatctgcaaaatgggttttggatgttgaagcgggggaggattgacaatttgcgatggaaagggaaaattggagagaacacatcaacagcaatagcaatgggaattattacgataggtttgtgtgtgattacgacaacggagaacgaagccctgcaaagccttcttcgcctcccagacttggctacatcgaacaccatgtttccaaattcgataccttggccggtgtcgctatcaagtacggtgttgaggtggcagacataagaaagatgaatagccttgttacagaccatcaaatgtttgcacttaaaactctccacattccgctacctgcaaggcatcctccatctccttatttgtcaaatggttccagtactccaggacatggtaactcggatcacagtccacctaatcaggcacaccatgatctgcttgattcattccaatccctgagaataaagtcatcagagcggaagggtctcccagccatgaactcattacnaggctactatggga

SEQ ID NO: 85652 - DNA, 368 bp, Glycine max
  Clone ID: PAT_MRT3847_48358C.1
gacagcagcttccctcgcacccatgcccaatcacatcgacgagactcacgatttccttctcactgctatccagaaggacgcagagtccgttcacatcacgaggagcgagagatgtggtgacgttcaaggtcagatgcgcgaaatatctcgacacacttctgtgtctttgacccaaagaaagctgatacattgagtcagtctcatccaccaagtttcaatgttcaagacctgtcacggtacacggctatagatcaacaagaaccaattcagtgattcgtcagaacatcgtatcacagtagtcgatacttcatattcatttcagtttcctgtagttttaaatcaatactctgacaaggttcttttcatct

SEQ ID NO: 85653 - DNA, 340 bp, Glycine max
  Clone ID: PAT_MRT3847_48359C.1
gaattcggcacgaggtttgttctttctcttgtttctaagattctgatctaaccatcttgggtgcttgtagtgaagtgtcagctataatacacgatcatgagattttctagggtatatgagtctatatttcacatggctgctactgctcttggaaacttggaacaccaactgtatatgaatgatttggtggattccttgctagaactggttttttcttttggcttttatagtaggagctacagctgcattttgttgtaacggagaacagaaattgctatagggcttttatggctttcacaatttgctgcaattagtcatgggccttttattatgacgacca

SEQ ID NO: 85654 - DNA, 408 bp, Glycine max
  Clone ID: PAT_MRT3847_4835C.1
cttcactaatacatcatggcagacgagacccaaaacaggtatgagagctctgaggttgaggtccaggatcgtggtgcccatgactttcttgctatgaaaaaggatgaagaagacaagcctcatgcttatgaggaggtcattgccgccgaggttgaaaaagtcactgtctgacaccaatgatagatccagcgccggctcttaaaaaagctacaccgatctgacagcccctctagctcttcaagtgaggaggaaggagaacatggatagaaatggaagaagaagacgaaggcatagaaaggtctgaaagagaagatcgtggagaaaatagagggtgaccatcatcatcacaaggatgaggacacatgtgtgcctgatgagaaagttgacgttgttgaagacagccacgct

SEQ ID NO: 85655 - DNA, 507 bp, Glycine max
  Clone ID: PAT_MRT3847_48360C.1
tatctgtcaaatctttgttttattttctcagatctacaatcctagatctaattgttttttgcttagggtttcaaattcaatgctaatcaagtgaattagaggatataaagagctaggtaatagtctaggatctatatatctctattttcgcactgtgaatcttggaggacccagagaatgttcttgaataggttttcatttctagaaatagcaaagacctttgtggattccgagctaggtgttagtggacatagtggagttactggatctggtggatctattgtgttagatcagcattggcagtggatctcgatcggcaagctcaactggccagagtgttgcatcacctccgttgagacaacttgctcttattagagcttccgcgtcgcagacttagaatgagaaaaggattgacgaaatcggttagcttatccttgaagctttgagaagaagcctaaaatccacgaaaatggtgccaaagcgtaagaagagtaaagttgctactcg

SEQ ID NO: 85656 - DNA, 292 bp, Glycine max
  Clone ID: PAT_MRT3847_48361C.1
cactaaacttatctacacttaccttttgttatagcctaagtacatcttcaatgggggtgtttaaggctcacggctaccccaaaatacacttcatatggcgctccaacaagaacatttaatgtgtgtcttataaaaattaatatatgctttctcttctgaattatccgtttattcatcgattttaaacaatatagggatgttcattaaactctaccttattaaaacgatatataatcacaggtctaccccattaatacaatattcgattgttctaactgcttttaccaaacac

SEQ ID NO: 85657 - DNA, 434 bp, Glycine max
  Clone ID: PAT_MRT3847_48362C.1
aaatctttgttatcagcagtcctaaaacttgagttctagtagtctttctcttgaggcggtcttagataacctaatgtgttcattcaactagataattgttttctcactgatatgttatgacaagattgtaataataaaaaattgtgatcaaattgaactaaaaaaatcatgtaataattaagactccagactaatcttaatcaaatataagcaattaaaaaacgctgtatgcccattagatatgtggatgtcatgcgacagaattcttagctaatttgggcttaagaccattatgaatatagacaattgtaaatgtatttatgtattatcaaatacagttttttcttaaataactagcctgtgcgtatacacggatagcggatgttaataacttgcctatgcgtatctactgttgtttcgctgcgctgagttat

SEQ ID NO: 85658 - DNA, 236 bp, Glycine max
  Clone ID: PAT_MRT3847_48363C.1
ttccggattcatgttggcgttatagtggctagcacgtcctaagtgccgttgaggaccagtattcgaaccttagtattgtgatatagtctttatattattttaattaaagctaatggccatgatatgaccacacatcactaaacagttgcagtattggtctatgcagaacacagtccagcctctgctgatgctcctcgaatgttattaccttgaatgttccttcctattaatgatgg

SEQ ID NO: 85659 - DNA, 362 bp, Glycine max
  Clone ID: PAT_MRT3847_48364C.1
tcgctgagctgcagcacttcagggcctgggtgttcttcaagctcaatctcacttcacttatcgccagggtttaatctgaatatctctcgcgcagtcactgagggagttatatttcttccaaaatggcgacgcttatgcttaaaatcaaagatatctaagatgctatggctaacacccaaaaaaacaactctactgctcatcatctgggcttgctgaactctaaactagccaagattgcgggggtactccttacaccttcataaaaaggagctggtggtgctggtgaaagctttgatcttactacatgtggagattcaagaagtggacttgggggcttcccttcagttggcaaatctactcta

SEQ ID NO: 85660 - DNA, 269 bp, Glycine max
  Clone ID: PAT_MRT3847_48365C.1
ttcatcagcgagacgcagcgaaacgggaatgccacgatcagacgcgaggtacatcctcaacagtagggtccgatgcgctgccatcgctattctcacatatttcaatcgctacatgtcgtaactctcataatcatttcaattggcatgaccaaacaatgctatatcaccaatatcactggaaacaggcagggaagaagaatcagccatatgacttcatgtggaacaggacctgggacaacaaccaacgggaacattactactagaactgg

SEQ ID NO: 85661 - DNA, 772 bp, Glycine max
  Clone ID: PAT_MRT3847_48366C.1
cggctgcgagaagacgacagaagggggagacaacacttgataatctgaagcctttatgatgggagcatagaagagagggtttgttggccattgatgactattgagttgagggtctgatagaaggaggtggcaagctgtggcgagtagatggagatgtgtgtcatttgtactaagtctttgttgttgcattaggaaaagggttgaagaaggaaactccaacagtagctgatcaatggagatggaagtagaactttcttcagctcaacccaaaatgggttctcagcttatttcccaaccccaaaggtgtggtaagggtggcctcgttaccatgccttttatcatagcctcgagccgaatcggctcgagggcaactttggggcttctacccaatatgatattgtatttgatgggaaactacaatcttcatttaggcaaagctaccaagatactcctcttatcagttgccaccaccaatttcatgcctcttcccggtgccttcatttctgattcttatctgggtcgctttctcgctgttggtttaggttccttcattactttcctgggaatggcactgttgtggctaacagccatgatcccacaggcacggcctccggcttgcaattctcaaagtgaaagatgtgaatcagcaacacctgggcaaatggcaatgttaatctcttcccttgctctcatgtccattggaaatggtggcctttcatgttccctggcctttggtgctgaccaggtgaatagaaaaggtaaccccaataat

SEQ ID NO: 85662 - DNA, 363 bp, Glycine max
  Clone ID: PAT_MRT3847_48367C.1
ctcttctaaataccctgctgtacccacacatccgaacaaatcaaatccatatccaccttttcttctctattcttctctccatactccctgtccttttttaaaaaactacttaccaattcacactccattaataccaaatttttcaccttcaacatattcaacccattccaaccaaacattattctccaaaaattttctaatatttcatcctataatattttacaactcaccaaatttttcaataacctctttcccacctctttatctttctttcataccctttactcttctcaaatccacattttatacatcataaactctcaaaataaccatcattttcatacatcctttatatttaacatt

SEQ ID NO: 85663 - DNA, 308 bp, Glycine max
  Clone ID: PAT_MRT3847_48368C.1
caaaaaatcttttctattacagcaaacaaaggtgggggggggggggaaggataattcatctacctattactagtctcctcacttcactaaacatacaagattgacaaaagaaaaaccactcaccacatcacacatttgcaagactaggggtcattttctatccctcaaggctttgatttccacccacatacatataccctaattgcctgtaagcaatccaatgaataaagaacaacagattgcttttttatctgtacacacaccctcacacacactggctgtaaccccttgaacacagcacttgactc

SEQ ID NO: 85664 - DNA, 439 bp, Glycine max
  Clone ID: PAT_MRT3847_48369C.1
cggcactacaaattcggttaattcggattccgttcacactagctaatatccaacgaagtacaatctcaaatcccatgcaaacaccctaactctgaccgggcacttaacatcaccaaaaactgacccatggacagcatcgatgattctctgactaacgcctatcaaaaattgagcttgcatgcacatacgggggggaaaccaaacataatgcctgctacattaaaacaacagccaccgatactcgcataaaaaaccttaatcacaaccgggaaatgttcttagcaacatttaatcaaaccctaaacgatgtctagtctgtgaaacaaaagatacgatcccaattgcccgtggaagaagtaacaaagcctgtatccataaaacccgaacaagataccattaatgtaatttcttacatcaatccagcccgggtggaacagat

SEQ ID NO: 85665 - DNA, 4605 bp, Glycine max
  Clone ID: PAT_MRT3847_4836C.1
ataatttctcagcctgcgtttctttttcttccttttacacaacatgaagtagttcaagttcaatattaatccctggatcatcaaataaatcccaattaaatattgaaataagttccagcaattgaagcctcaatttcatctattatttaaggaattgtaataacgctttttttcaattttctttatgaacaaaattgtatttgcatagatatgggatattgggtaatggagaattattacttgttaataaattgatgtcatgggctgaaactatgaggtttaattccgataaaacgaggattgctggtatagaatttgtatataccccttctcattgtcctcgtttaactctcctctattaagcccacaggaggcattttttatagaaatatttgcagcttccgtggaagcatttctccaggagtaattggtacctgagtacttaagagaataaaacaaaaactaaaattaacctctatgaattggtgctacatcttattttcttgccatggcagaacttcgtactatgtttaaatcactattcttagaaatttttgcatctgtagagcttgcttcacgcctactttttgttgtcttaaatgtctgcgtcagtcatgaagctcaattcagtggaagcaagagaccaagaggtgaagataactattcagctgaggatattattgaggacttgcaaacatctgaaaaccagaaagtatcaaaaaataggaaattgaagaagcaaggtcctgtagcagcatttgattcttatgttctggctgctgtttgtgctcttgcctgtgagcttcagttgttccctttgatttcatgtgggaataatcgtttagcttccaataatgtgcaagatatagcaaagcctgctagactaaatggatcctcccatgagttgcagaatgccttagatccaagctatgcgtcatactcacagaattttagcaattttagaggcattattttcattgaagccatcttctgttggcacgccttggagttacagctcaaatgagatagttgcatcagctatggtttgggcgcgtgattgtgagcgattgtgaaggtcaaaatgctggaagtaagacctctattttaatagcagctgctgatcctgcacttttagcttccccatgccaccatagctgtggattagcatcttgttgctggattaccagctctggaaccatatgctcgtttatttcatagatattatgacaattgctactccaagtgctacacaaagatttcttcttggacttctagaagcacccccatcatgggctccagatgcacttgacgctgctgtgcagcttgtggagcttcttcgagctgctgaagattatgcatctggcataaggcttcctagaaattggatgcatttgcatttcttgcgtgcaatagggactgcaatgtccatgagagctggtatagccgctgatgctgcagctgctcttctttttcgtatactttcccagcctgcattgctttttcctcctcttagacaagttgacggagtgtgaagttcaacatgaacctttgggtggtaatatttcttcctataaaaagcagatagaagtctctgcagctgaagcctctattgaagctactgtctgcggcattgcatcaatgacttggtgtccatgagtagctgttttgattgtgagcgtctgcatcatttgccaagatgatattcgtccccatcctacattgtccttaattgtagaaattccgcaaatccaaagggtgcaccagattcaaccttgcgtactgtcgtgaaatgtttctctttccctgcggaaggtccagcaatatcttcctcagaggaagcccatctaaggcatgtattatgaaaatacttatttttacaatggaagctattcttgagagaacagttctacgtttttctattatttcactactatgacacacactaattgcatctcgtgaaacccatcgctgtgcctcaaacaacctggcccagcagggcttgcgtacaattgttgatgcattattcaacgttgtatctgcctcaccaacgaaagcagctacagcacttgtacttcaggcggagcgggaattgcagccctggattgccaaggatgatgattcaagtcagaagatgtggagaatcaatcagcggattgtaaaattgattgtggaacttatgaggaataacgagaaagaatcataaaataggaaattgaagaagcaaggatcctgttgcagcatatgattcttatgttctggctgccgtttgtgcccttgcctgtgagcttcagttgttccctttgatttcacgggggaataatcatttagcttccaataaggtgcaagatatagccaagcctgttagactaaatggatcctcccatgagttgcggaatggcttagattcagcagtacgtcatactcacagaattttagcaattttagaggcactattttcattgaagccatcttctgttggaaccccttggagttacagctcaaatgagatagttgcagctgctatggttgctgcccatgtttctgaactatttagaaggtcaaaagcttgcatgcatgctctgtctgttctgattcgttgcaaatgggacaatgaaattcactccagggcatcatcattgtataatctcatagatattcacagcaaagctgttgcatctatagtgaacaaggcagagccattagaagcaaccttaattcatgcacctattcggaaggattcccttgtttgtgttggtgttaaaaggcagaatcagtgtgaaagtagtagctgttttgatgctgggcggacatctgttgtaccttcagaagattcattcccatcaaaacttgaccataattctaacaaaaccccatgtccaaagggtgcatcagattataccttgggtaaaggtgtcacaggtttctcattggatgcgtctgatctagccaacttcctcacaatggacaggcatataggattgaattgcaatggacaaatttttctaagatccacgctagcagagaaacaagaattatgtttttctgtagtttcactgctatggcacaagctgattgcatctcctgaaacacaaccttgtgcagaaagcacttctgcccaacagggctggagacaggttgttgatgcattatgcaacgttgtatcagcctcaccaacaaaagcagctacagcagttgtacttcaggtccaaaattcgtcttatcatgaatggtttcataaaattacattcggaactaacattgaactcctattctgtttagcaaggatactttccttcttttacccaaaaaaatatatcatttcttaaacagacttccaaaatttatgaattatcatttttaatacctctgagaattggcttttactgtctagaaagttcaatagccgatgctgaaaatctcatctatccaatgtttatctgttgtatatttttttattaaatattattatttcccacatttcacatgtttagtccggctcgaggcttgtttacttgtcaggcggagcgggaattgcagccctggattgccaaggatgatgattcaggtcagaagatgtggagaatcaatcagcggattgtaaaattgattgtggaacttatgaggaatcatgagactgcagaatcattggtaattgtggcaagttcatcagatttactactgcgagccacagatgggatgctggttgatggagaagcttgcactttaccacagctggagctattggaagcaacagctagagcagttcagccagtgctcgagtttggagaatctggattggctgtggcagatggcctttcaaaccttttaaagtgtcgcctctcagctacaattagatgtctttctcatccaagtgcacatgtccgagctctgagtatatcagttcttcgtgacattttgcatactggttcaatcagatgtagtcctaaacctcggagattaaatggcacccacaacccttcttatcaatacttcaatttggatgccgttgactggcaagctgacatagaaaaatgcttgacttgggaagctcacagccgactttcaaacggattgtctattaactttcttgatatcgctgccaaagagttaggctgtactatttccatgtgaaatgaaatcatccatcttagtctgtgacaattttttgctagacttatagaaaaagaaaaagaaaccagaaggttattgatatgcttatggaactaacgggtttgcaaataagcataattctgctagtcctgttaaaaagagctgcaatcataattctagtatgtttatagaaagctcattttgtatcatgcatgtactctagctaaactaagtttcaccttgaacttgcttgtgactctgctctggatagaacagacttgtacagtaacgaaaaacgactgtaaccaggtccttttctccatcattgtctcattttgtgttatgcttatgttgatttagcttgtattggaagtcagttccaattgtttggattaatgtatgttcaggcaggatttccttttttctctcttttaattttgtgagattgttgttggttttcatctttttgctagagatttgtgttttttctttatt

SEQ ID NO: 85666 - DNA, 477 bp, Glycine max
  Clone ID: PAT_MRT3847_48370C.1
gaattcggctcgagctcgagccgaatcggctcgagcggctcgaggggaaaagtggcgagttcaactgcagtgcacctgctggttgtttggtcagtcctgtgccggttggctgcttcatctatgtcttggggtattcctgctcctgtcaccgtggctgctgctgcaaaggggccctttgtgcctcctgaagatttattgagaagtaaaggggaaattggttggaagggatcagctgccactagtgcatttaagccagaccgagcccaggaaggttatggaaatgcctcttggtgcactaactacctctatacctgatgctccaactggaaagcagagtcgagcaccattggatattgacttgaatgtggctgatgaaagaatacttgatgatatttcttctcaaacttatgctcgtcacactgattctgcatctcttgcaactgatgatcatgatcctgtatgcagtaaaatgtcttc

SEQ ID NO: 85667 - DNA, 327 bp, Glycine max
  Clone ID: PAT_MRT3847_48371C.1
ggagaatctaatacgtccatccaagtcttgcaccataacataaacaatccatggctttggaaagagtacttcggaactgaatagagacccaaacctctaactaacacccccccccttcttaactataaaatggggtttccccaaacctacggaggaacctaaactactgctctttggatgaaaggaacctttaattttttttggagaccattctttttttttaaaaagagtgacaaatcacatatgcattatttttctagcttctaaaaccttttttttttgaaacctattggatataccaccatataagacaaaccctcttaacaa

SEQ ID NO: 85668 - DNA, 327 bp, Glycine max
  Clone ID: PAT_MRT3847_48372C.1
aatagaaaagttttattccttggtatgaccagagcgaataaagatcttcacatttattataactacccttgcggggaaacctttgttttaggatgaaaaaaattctgtgtgcgcggggggaaaagtctaacaaaacgtgagggcttgggtggagcccatcccccctttgaacccaaagaaaaaaaccgggacccttaggtttgttggggccaggcccaccaacaaaaacaccatttctgtggttgttttcaccaaaaccaaaccaacccctccaggttttacttccttgacaagagaattgggggggccactcccaccaccattttg

SEQ ID NO: 85669 - DNA, 891 bp, Glycine max
  Clone ID: PAT_MRT3847_48373C.1
cagatgacagaaggcaaactgatatgcctgtaggaggagaagacctggaatggattgaaaaattcacagccactgcaataagcgttgcaaaagcagcctcgagccgaatcggctcgaggtacgtgggaaagagcaacgcgaaggagcgtatgcagaagatgatcaagaccttcaccacaagaaagttcagttacttctggcccaacgtgacatccatatggttcttctggacgaggctagagagcatgctgtactccaagctgcagcacgggaggacggtagagaacgatgacatcatgagccaagtcatgaccgtgctcagcttcgatggcagcgatcgaggctgggcgatcttctgcagaggcgccaccgagatggccagagccaagggtgacagtgctctgatatgcttgcaggactttgataagtggaaggacagaattgaggaagatggtgtggtgcaagcaatgaatgattatctcaacaaaaacaaaccaccacatcactgcaatcgcttgatccttcctggtagcactggtggcataccgcagaaggttgtttgtgctgagtgtggacgccaaatggagaagtacttcatgtatcgctgttgtgtggagtaagagtaagagaaggacttcaacttcttgcagtgtactattgctacacaacattattatcattgcttgattattattattatctttaatgttggtttgagagaggttcatttctcttttataacataagtaatgtctttgtgagatatgtaatgtagcaacatgtgacttgggggataagataatgtttgtgtactagctcttgaggtctcagacccttgctaataaagtgtgttgtagaactttgattgttcccatagtgtttaagtcaaaa

SEQ ID NO: 85670 - DNA, 492 bp, Glycine max
  Clone ID: PAT_MRT3847_48374C.1
ggaattcggcacgagggaaacatggtggtcaagtgatgcggaacttgatcaggatactcataatagcaaactcataagcaagcaacttaggtctttgaacattgctacaccttcactagtattttttttactttatccacacattgtttcatttgccatgagtcacagtaacattagagaaacgactggttttgtctggaatatactaaaatctatgcctctttcaattggaaaagctcaagtcagcaatgatggagacaatacttcaagtgttgctttgaagggttggatacctcagttatctggcttgaaggatgctggcttttgggtgaggaaatgtgtttcttatctgtatgattacaagaatgatggcatgggaaaaaggatggttgacaaagagaataaggttcctataaatgagcaaaacttgtttgttgtgtctaaggaaaaacagaaattctttgcagctcgtggcctggaacaatggtggcc

SEQ ID NO: 85671 - DNA, 160 bp, Glycine max
  Clone ID: PAT_MRT3847_48375C.1
gagaatggaccccaaatactggcacacaccatcagaattcagtaccaagaggtacttagaaactggtgctgagggggaagcagggcctctcgatctaaggggccagcatatccaactcctcccattcgggtctgggaggagaatgagcacctccgccaat

SEQ ID NO: 85672 - DNA, 386 bp, Glycine max
  Clone ID: PAT_MRT3847_48376C.1
ggtgcttaaaaagacagttttactagatgctgtgcttagtggttgacaggaagaagcttacctaatgatcactaatatgtaaactacagcgttctggatactgtggacgctacactaccggtggacgttatttaagttatttaaccctcaaaatccatacacggatcatgcacagacgggcttaaaggcttatttcagacatgcattaaacaagttctgacacaatggagccagaacattacctacatgaagcgcgttaggagatatagacaatgctatatcgcttgggacttaagaatgtgaagagttcaaaggactcattgacacacactactcaaccgatgtgggctaaagagaagaccctccttgaccaagaatgaaagttg

SEQ ID NO: 85673 - DNA, 384 bp, Glycine max
  Clone ID: PAT_MRT3847_48377C.1
ggaaattgaatccaaccagcaacccaaagattaaaaatctatattagatcttttttttttttttgtacataaaattcatttcacaaccaattgcaatcacattcatgttttgcatctttgcgaatctaatgaataagtctcacataattaggatcttcgagtcgaacacttgattcataaaatctacttacttcttctgtcttggctcgagatctaaaccaaacacagaagaatccaattctgattatcattctgcaaaaactgaattggcttgcttttgactttcgtataaatggctaagactatcgaggcactttgttctattatatactgatttgcaggttcaaaaagaatcacttctattttattaaaacaattactcaa

SEQ ID NO: 85674 - DNA, 268 bp, Glycine max
  Clone ID: PAT_MRT3847_48378C.1
tgccatgatgacaagacgtgacatgcactcctcccttacctcggacattgggttcgagatcgaggtacctgcttctatagctgatgttctttacccaggcaatgtgagggaagacgtggcaccagctgcttgatgaaatgctataagggctgacccagtagtagataatcacggctcaaggaggttatctgtgtcactgactccacttcctctgaatgagctcggagaatctatcagacgagctgttgattgatggattaaaccatgg

SEQ ID NO: 85675 - DNA, 462 bp, Glycine max
  unsure (1)..(462): unsure at all n locations
  Clone ID: PAT_MRT3847_48379C.1
gcctacttcttttgagaaatttgccaatggggtcaagcagcaggcaaatatcaagggagtggacaggctaactgctaaggtgggagtggtggagataggaaagggtgtccgtggaactagtccaaccgggaagagaatttccgtgggaaacccgatcagaaatttggttcagggaattgagcttggagctaaggcgctgcgtaagagctgggaagggaatatggaagtcaagaagaaagatacatccaaattaagggccgccaagtgtgatcctaagccagagactcctaggagaagtacttcaagtgaaaagtttccctctaaagaagagagcaagatgcaaccgcagacaaagtcctccaaagaagagcacaagactcaaacatctataaagagagttattgtcagtggaacaatggangaacaagaataaccaagtaagcaaagagtttctgttggaaa

SEQ ID NO: 85676 - DNA, 494 bp, Glycine max
  unsure (1)..(494): unsure at all n locations
  Clone ID: PAT_MRT3847_4837C.1
ctgaaaactattaaggatcaatttgacactatatacaaaaattgactcttcattttccaatataacatttaaaattatgtcatattagttcctatgacgtgacattgcttatttcccaattacgcttgtcacgtatgcgtccaggtggcacttaacgtgccacatcacacatttactaacagtgttaggagactaacggcagggactaacgtggtaaacggaatgtaaagtcgaggatcattttgacattntttaaatcttaaggaccaaattgacagcgcctccaaaagtgagggacaaatttggtactttacttaattttttattttatttcaaacataccctctaaattaattggtttaagtagtggccgcatttaaggatatcacactttcaccaataagtgtaacttgtattgttaatagaccaatgaatacatgagctaganatgtagtgtctcattaatggatttcacaaaatgaaggataaaaaag

SEQ ID NO: 85677 - DNA, 267 bp, Glycine max
  unsure (1)..(267): unsure at all n locations
  Clone ID: PAT_MRT3847_48380C.1
cggcttccanaggatgagaatctatgatcganaccatgnngtcctccaanctctgngagattccaacnttgagtngctgctagancttcctaacatcgacctccaatntgtagcttccagcnangacaacgcnnacagntgggtgcnagacaatgtcaganacttttggnatgtcagattcaggtacatnactgtggganatgaantgaagccttgggactcatttgcncagtttgtagtgcctgctatgcannacatccaaagngc

SEQ ID NO: 85678 - DNA, 1814 bp, Glycine max
  Clone ID: PAT_MRT3847_48381C.1
acggggtcgatttttccttcaacttattcaccactcgttcccgttactccccagcaaccataattacttttttcaggaatagccacccacgcggacttctagcattctacaacagatggccgaaatacaactaactttcgatataaacttccttacagacctagttgcccaaaagctacgccttgctgcaagcatggccacccacgcggctcttgcttctacaaggatcccttcaaacacaaggttcccatccaaggcctctcactctttcccaacccaatgcgccttaaagagacttgaggtgacagaattctctgggcttagatccacttcatgtgtcacatatgctaacagtgctagagaatcttccttttttgatcttgtagcttcccaactcactcccaagcagaccaatggatcatcaactcctgtgaggggagagacagtggccaagttgaaggtggcaatcaatggtttcggacgcattggtagaaacttccttcgctgctggcacggccgaaaagactcaccccttgaagtcgttgttgtcaacgacagtggtggtgtcaagaatgcttcgcacctgctgaaatatgattccatgctgggaacttttaaagcagatgtgaaaatactggacaatgaaaccatcactgttgatggtaagcccatcaaggttgtttcaagcagggaccctcttaagcttccttgggctgaacttggaattgacattgttattgagggaaccggagtgtttgtggatggccctggggctggtaaacacatccaagcaggtgccaagaaagttattatcactgctcctgcaaagggtgctgatattccaacttatgttgttggtgtaaatgaaggggactacactcatcagatctctaacattataagcaacgcttcctgcaccacaaactgtcttgctccctttgtgaagatcctggatgaagagtttggaattgtgaagggaaccatgacaaccacacattcctacacaggagaccagaggcttttggatgcttcacaccgtgacttgagaagagccagggctgcagcactgaacattgtcccaaccagcactggagctgccaaggctgtgtctctagtgttgccacagctgaagggcaagcttaatggaatagcgctccgtgtgcctacacccaatgtttcagttgttgaccttgttgtgaatgttgagaagaagggtcttactgctgaagatgtgaatgcagcattcagaaaggcagctgagggtccactgaaaggtgtgttggacgtgtgtgatgttccacttgtgtctatcgacttccgctgctctgatgtttcctctactattgactcctccttgactatggtcatgggagatgacatggttaaggtggttgcttggtatgacaatgaatggggttacagccaaagggtggtggatttggcacacctagtagcaagcaagtggccaggggcagctaaagcagggagtggagacccattggaggaattctgcgagacaaaccctgctgatgaggaatgcaaagtatatgaatagaggagagcgcctttttctgatttgatgattaccattaccagcagcaaaccatttttactctttgccttgtgttaacgtatcatgtgaaaaagaaggaaattgttcgttcagacggtgtctgaggagagattttcaaagtttaacattatctgcagccaataataaattttggcgtgactgaaattcatgaatatcgcccatatattgattgatatggtatttcttaattcttgtaaaaaattctctctcgtgccaaaaa

SEQ ID NO: 85679 - DNA, 2128 bp, Glycine max
  Clone ID: PAT_MRT3847_48382C.1
caagagggctagtggagccccggtcgtgtggttcagaattttgggcgctatttgctgcgagaagacgacagaagggggaaggcacagggtgagggagaaagagggtggtagtttcctgggagaggactttttgcttcattttctgagaactgcttctaaaacttttacattatatttggcatcaagagagactgcatgaatattttaagcgagaggcttttgagggcgttggtagtaagaatggatatccatatccacatgctcctcacgtccatttcttgcttattctttatcactctgccgcagtccctctctcaaccaccatctgtcttcaattattcggcttgtaaggaatggccatacaactgtggaacactttccggcatcttctatccattctggggagagaaccgaccccctcattgtggtggcggcgaagcattcaggctgagctgccatgatgatattactactattctaattgcctcacataatttgatggtgaagaacatccacgacaccactcgaaccatgagagtagtgccaactgaccttgaccccaacgtttgttctctgcaatctaagaacatatatgatgacattcatgcgaaggccactcacttcctgtatcccaatccttcattgtacagcaacaacatatgcgaagggtttgaggtaatttatgatgtttctgaaaattgcacaaaatgcctgggaagtgaaggagagtgctggaaggaagaaattgatgaacatgatatagtttcatgctatttctgcccagatggatctcattccctacgctgttctcctccaaaaagaaatccgcggaagttgagactcattataggtcttgcaagtgcactaatgggaggattcatgatatgcatcataatttgctgtactaaatctaagtcatccacacaagtaaaattctcgtttacgataaagaatggccaagatatagaatcattcttaaaaaaccatggagctctatcacagaagagatacaaattttcagaagttaagaaaatgaccaactccttcaaagttaaactaggtgaaggtggttttggtgcagtatacaaaggagagctactcagtggtgttcctgtggccgtaaagatattgaatgaatccaaaggaaatggtgaagacttcatcaatgaggttgctagcatcattagaacttctcatgtcaatgttgtcacacttgttggattctgtttggaaggacgcaagaaagctctcatttatgagtttatgcccaatggttcccttgacaagtttgtatacaaaaagggtctcgaaaccacttcatccttgagttgggataatttctggcaaattgccataggtatagcccgaggactagagtacttgcataggggttgcaacactcgaattttacattttgacataaagccacataacattcttttggatgagaatttctgccctaagatatcagattttgggcttgcaaagctttgtcctaggaaagagagcattatttccatgtcagaccctagaggaacaatagggtatgtagctccagaagtatggaatagaaattttggcggagtttcacacaaatctgatgtttacagctacggaatgatgctactagaaatggtgggagggagaaagaatattaatgcggaagcaagtcacacaagtgagatatacttcccagattggatctacaacaggctagagcagggtggagatttgagacctaatggggtgatggcaacggaagaaaatgagatagtaaagagaatgactgtagtgggtttatggtgcgttcaaacctttccaaaggatagacctactatgactagagtagtagatatgctagaaggcaaaatgaattccctggaaatccccccaaaacctgttctttcttctcccactaggtcagtgtcagaatctcccacaagatgaactattttttttttttttgtaatttgggtagataatagatatttcaggttatatactttgtaaaatgaattgtttaacataattagactgtacttttaaaatcaagtggatttcataattctgtcaacataacatgtgactccctcgcattcctagctgaaaagaacgaactcgatggggg

SEQ ID NO: 85680 - DNA, 218 bp, Glycine max
  Clone ID: PAT_MRT3847_48383C.1
ccctctctcttctagtcattctcctttttcttgttattagtcattcaactatttctttcattagctcctgaagtgtaaaatctgttatggctataaaaggctaaacccatgttgttgagagcctagaggtcaactcttgtaatgtaaatctttcctattatctatttaatgtaattttgtttctattaaaaaaaaaaaaaaaaaaaaaaaaaaaaaaa

SEQ ID NO: 85681 - DNA, 260 bp, Glycine max
  unsure (1)..(260): unsure at all n locations
  Clone ID: PAT_MRT3847_48384C.1
ctccatgctcttagccctcctcgtcttcgccgccgtggccaccgncgcgatggcggtcgccgcgtccgacgccgacgatatgctgatccgtcatgtggtgccagatgttggtgaacgtcagaggaggagaacctgctgaacgccgagcaccacttacgcgagcttcaaggccaagttcgctaagacctacgccagcaaggaggagcacgatcttcgcttcggcgacttcaagtccaacctacgtagagccacgctgcacg

SEQ ID NO: 85682 - DNA, 191 bp, Glycine max
  Clone ID: PAT_MRT3847_48385C.1
gaatctataattcttattgattcccatttagggggacatcaagatgatagaatcgcggatttacaatttacttgatagcaaatcccacatactcattgacataaaatgcaccaagggactttcaattaatcatagccacaacttctataaaaagtaaaaaattttgcattaaaactctctaagcatatagc

SEQ ID NO: 85683 - DNA, 816 bp, Glycine max
  Clone ID: PAT_MRT3847_48386C.1
cggccgctcgaggcggccggccgggaacttcctcacggagtctctactgaaccagaaaaggaaagaggcaaaagaacaaaagagatctgaaaaataatttcaagaaacaccctttggcttttccttgcaattttctcccacagtgtggccatttcatttgcctctgaccctgatccagtccaagacttctgcataccaaacccaagatttggtgccatcaaaacagcacataacatgcactacattctcccatgcaagaactcctccgaggtcatcactgaggactttgtcttctcaggactcacaaaagcctcagagaacttctcaaacacaggcctagctgtggtctcagcaaaccctaccaattttccagggctcaacactctaggcttgtctttcgcgcgagctgacatcgaagttggtggcatcaacccaccccatttccacccccgagccacggagctggttcatgtgctgcaaggaaaagtgtactcaggttttgttgattccaacaatagggtgtttgctagagtgcttgaacaaggagaggtcatggtgctccctaaagggctagtgcacttcatgatgaacgttggtgatgaacctgccacattgtttggaagcttcaatagccaaaaccctggtattcagaagataccttctgctgtgtttggctcagggattgatgaggagcttctgcaggaggcttttggattgagttctaagcagattgggatcttgaggaaaaaatttgatcccaagacatcaaggtagataaataattaatataaaggtagtttcctgttggtctattta

SEQ ID NO: 85684 - DNA, 429 bp, Glycine max
  unsure (1)..(429): unsure at all n locations
  Clone ID: PAT_MRT3847_48387C.1
tggcctggaacctttgggctgatttatgtgcttgcatggtcgtgtgaagatgatagacggggagggccagacctgccgccgccgccggaaaatgcgtatatacctcttgctgttataataataacggtcttgaagaaaggcgcgaaaggccttgccgcagtagtgaagaagaaggcctaggagaaggcgatgaacttcccgcctgagaagtgcttgaagtagcctgggactggaggtgtgtcgttgttgaagtgggattcgatgtggcctgcgaagcggttgaagaatgcttaaacttaatgtaagaagtgtacttctaagtagaggtctaaggctttcttcgtatctaattagcctattaaaatttcagataagaactctgttatgaactcacncaagacgtcgtctaagcataggttggaagataag

SEQ ID NO: 85685 - DNA, 297 bp, Glycine max
  Clone ID: PAT_MRT3847_48388C.1
acggctgcgagaagacgacagaagggggtcgttgaaaataaaactctcactttgccacggttacgacctttagcccctgcagccatgtcaacgagcatcgaagaccaagctctgtcgtcaactggcagcgatctgaagtgcgacgggtacggcatctcccttgtcgtttcgtcggttttgttcgttctgtatcttgcggtgcacgccaagaagaacctcaacagcctctgtcgtcgaggctcctatgttgtcgtttcctattttgccctccctttggctcgtcacgcttgttaacct

SEQ ID NO: 85686 - DNA, 115 bp, Glycine max
  Clone ID: PAT_MRT3847_48389C.1
cggctcgaggagcaatgataaatgctgggaatggatatgctagctgatgctgagacatcttcaaaaatggatatcccggtttctgatttcaatcattccaagcatgaatcatgat

SEQ ID NO: 85687 - DNA, 399 bp, Glycine max
  Clone ID: PAT_MRT3847_4838C.1
tagctattaatttcgagggagctcactccctttgtttattcgctcgtcggctgcggccggcagagggtggtccggtctagtgccgagccgggggagaaccaccctttttgacgtttgactcccatgattactcactctgatccatagctctgacaggctcctggccaaaatttttttctatttgatcctggctatccagaacctaatccgggcgcataattaaggatatgagaacgaaccttccagggaggctgcctactgaccacctataattttttagacaagcaaaagctgcatcaaagttacatagtcgttttcctctcccacaaaatcatcatcgtccaatcctagggttagggtttttttttaccgcgacaggatgttcaagaaaatcatgaa

SEQ ID NO: 85688 - DNA, 342 bp, Glycine max
  Clone ID: PAT_MRT3847_48390C.1
ggctcgagctattcttttatcaaaaggactgaacgaaaaaaccttagggctcctgtggtcttcttggccccccaagaatttcctggcatccagaaactaccggcttgcatagcgagcttcactcctggatttccactattacccaaaccctgtttgtcggacagagtgtcagagagagacccttgacaacatggcacaaactaggccaagcagaggagactcggattcctgctccatcagatgcaccaacacgagaccacgatctggggactgtgtgctgatgcactcctctgatacgagccagctcaccgtacgtcgggcgcggggaagagatcgaacatg

SEQ ID NO: 85689 - DNA, 314 bp, Glycine max
  unsure (1)..(314): unsure at all n locations
  Clone ID: PAT_MRT3847_48391C.1
aaaacaaaaaattttatccttattttataatcatcatcccaatcatgacagggtgtaattaagcacctagtttcgaagaaatacaaccgtccaacacacaaattcccatngccagagaagagagacaacagcgtaagagaactaagatcacaaataccagcgttgttctatactacactttataacgtaaaactaaaacttataaacacgccatgtattaattcttagccttccagtaaatgaagtgacggatgggcacaactactatcggccagcatccacaggacatccatgttgtcccactaaccaccaat

SEQ ID NO: 85690 - DNA, 286 bp, Glycine max
  Clone ID: PAT_MRT3847_48392C.1
agggggcaaaggtttaaaaaaagaaaaagcaaaacaacaccataaggtattacgcaataacattcaagaaatcaccaagcctacaattcaacatttaactcacaaaataatataaagcatatcagtaatctcatctacaaaaagacacataactatactcaagatctttctaaagaacataattcataacaccattacctacactaagcacacttaaagaaaaaccgttacgacaataaatataatttatactctcaaaaaacaagaaataaccctctacgaattt

SEQ ID NO: 85691 - DNA, 476 bp, Glycine max
  Clone ID: PAT_MRT3847_48393C.1
gtccatctcctcggactgcggccgccctaataaacacggttataaatataggttgcatcgtcattgccagtttatatattttctataatacaaattagaggctaggattttaatatgcgtttctgcatatctctctatatctatgctagatatagataggatcccacccaattccttgatcgttacgaacttatctagtaagagattgtttatgaattgtgatttattcgattcttttatttcacactaaaatacgattttgaactagataagttcaaatcagagcaagatattggagggtatcctctcaatatctacattgattttgagagatatgcataaacgcatataaaaacccttgcctctaaattgtctttaaaatatttagaaactgcaattgacgagcaacctctatttaaaaaaaagaatattgggcggccgactactagggtgcccgacgcccccgtactaaattc

SEQ ID NO: 85692 - DNA, 514 bp, Glycine max
  Clone ID: PAT_MRT3847_48394C.1
aaacaaaaaaccccctaaaggtttattatagtataaaaaaatttaataggggcgcataacccccccaaataaataattactaacaccttaaaggttaaattccttagggacaggtttacaattattatttttaggggcaggcttggatactatttaaaccaaattgggggaaaaattaataaagcctaagaattttcgggggattcagcagcagttaggacaagctaaggaggaacgttccccacggaatccaaagcttggggaagccccaaggatctaaaagccagaggggcggtttttggccctgaaaaaataatggctcaaaaggggggacccatcttgggagcaccataaatttaagaaatttccatccaagaaacaataaggccgggcaaaacctccttagggggcctaaaaggggcatcctaagccttgttaatggaaggggccttcttcccaggcccattataaataaacccagggttttggagccttttcacccaaggggttcaaa

SEQ ID NO: 85693 - DNA, 460 bp, Glycine max
  Clone ID: PAT_MRT3847_48395C.1
ttgggggggggggggggggggggggggggggggggggggggggggggggggggggggggggggggggggggggaggaacaaagaaagggtggacaccattaacccgtttaaacccaaagaaaactgggggggataatgggcaagtttcctaggttttttaaaaccaaaactgggtgggtttgaattaaggggggtacggtttggtttggttttaataagggtggcccaaggggggggagtaatttaaagggcagcattacccccagcgggtttttaaaagtgtaacccctgtggtaccaaagaaggtgggcccaataggttagcgggtaatagcccgtttttccaatgggctaatgccgggacgaattccacagggtttcccccagcctgttttatgcaattcactaacggccccaatagcagtacccaattaatgccctagcgtagagcccctgccgaa

SEQ ID NO: 85694 - DNA, 267 bp, Glycine max
  Clone ID: PAT_MRT3847_48396C.1
tttctttttttttttttttttttatcactgaacaatttacttcatggggaacggatgccaatatattacagcttattattacaaggttacttgggagaacgttctgttacattacattaacatcctgtttgtcatcactgtacataccttactgacaaaaacataattaactccattatctccggattgtatactttactggcacctatctcactcaactgtaaaataaactacaaaatcatccctttaatctttttacaacccatt

SEQ ID NO: 85695 - DNA, 712 bp, Glycine max
  Clone ID: PAT_MRT3847_48397C.1
catgcttcgattctgaggaatcattggaatttaatcttcagttgcaagccatggcacgagctgcttcgttgtgtcttcgtgtggatcctgatgccagacccccaatgtcaaagatcctgagagtgttggaagggggtgatcccgttcgtcctatgggtttagacatcaattcagttggtaacacaagtggccatttaagaggtttgaagtcacacactccaccaaaaggtacaataagtcattctcgcagattatcacattgatcattaattccttcggctcttgagctagctataggatctattgttggcaatatagttctgttttgagctgcataggatcaattattcatttgaagctgcataggatctattgttggcaatataggaactctcgtacgcttatagaaaccttcagacaagcacagcacttggtggcaagtggtaagaactaagaagttattgtcttagcctagcttctcattaaataaaaaaaagatttgtaatttggcggggtttttggagcctgtagttcctaactcgtcatttgcctaatagcaaaaaattcattcaacaggggatgtttctctttgctctattttctcttggatccgaaggcaactccctaaattggttggtgaccgtattttctttttattagaagaaaatatattaattttgaatccaagggtactcaagtcctttacaattaa

SEQ ID NO: 85696 - DNA, 294 bp, Glycine max
  Clone ID: PAT_MRT3847_48398C.1
gggggttgggacacgagagagagtgggagtcacagagcaaagtaaagcagccgattggactttgagtccgtttgttccttggttttgttatcttcagatatctttcattctttcgtattatctgtcgtttcaccccacacagatatgttggcatccatttagacctcatcactacattatctctatagcatcagaacataggacacaccttcgtttcgtttcgttcccacggccgtctccatgtccgcctcctccgcgattgcttctttcaactcctaactctccacgtgcttg

SEQ ID NO: 85697 - DNA, 432 bp, Glycine max
  Clone ID: PAT_MRT3847_48399C.1
ctcaaaaacctacacttatacaccttgcattctaatattaagagaggaaaccaactcttaaaataaagataacatttttagatcaaagcaaaatcttacagagttgataatatctttgaatttaaacattatcttaaaaatttgaatttaaaaatttaaattattctcccgagtcccaacactttcttccttctacagtagattgtgtgtgcttgtggacaatttgactgagtttgttgtgttggccccatgaactgaatttatgtctgtgaattttcttttctacgtaggtgtcaagtgctacagccacttttgccatgacattttcagcatctatgtcagtggtggaatattaccttctaaaacggtttcctattccttatagtaagtatgaatgtgaatgggaataaaactaacaaaattaatcttata

SEQ ID NO: 85698 - DNA, 343 bp, Glycine max
  Clone ID: PAT_MRT3847_4839C.1
aaaaaaaaaacctgcttttttttttaagggaaacaaaaattcaggcttccttttttttaaattaagccaataatcaagggggggggattttgatttggttccggggggttccccctcccttactacgattaaatccgggttttcagccctaacatttgaacaatcccaaaacagggatttcaacgatttttagccctaaatcaaaattgggtttgctgccccccatgggtgcaagtttttcctcacgttacctttttgggccaacaggtgaactttttacaaattttaaggccaggaatgtttttcaaaccctttttttttgcattttttcgcggacccgggg

SEQ ID NO: 85699 - DNA, 1786 bp, Glycine max
  Clone ID: PAT_MRT3847_483C.1
ccctcgcgtccgcgttgtctgataatcacattacaggaacaattccttcggagattggaaactgctctggtattgaaattcttgagcttggatcaaattctttggcaggtcacattcctgctgatatctctcgcctcacccttttgaaagtttttgatttgagtgggaacaatttaactggggatgtgcctgaagaaatctccaaatgctcgtcactaaccacgttgtttgtggatcacaaccatctttctggggccatacctgggtcgttgtcagatctatcaaacctaacaatgctagatctctctgctaataacttgagtggggtaattccgagtaatctttccatgatatctggtttggtgtacttaaatgtctcaggaaataacctagatggtgagataccaccaacgttgggatccaggttcagcaacccctctgtgttcgcaaataatcaaggtttatgtgggaagccattggataaaaaatgtgaagatataaacggtaaaaacagaaagaggttgattgtgctggttgttgtcattgcttgtggagcttttgctctagttttattttgctgcttctacgttttcagtctgttgagatggcgtaaaagactgaaacaaggagtatcgggtgaaaagaaaaagagtcccgcaagagccagttctggaacaagtggagctcgtagcagcagcactgagagtgggggaccaaaactagtgatgttcaacaccaaaattacacttgctgagaccattgaagcaacaagacaattcgacgaagagaatgtgctgagcagaacaaggcatggattagtgttcaaggcctgctacaacgatggaatggtcctttccattcgcaggctccaagatggatcattggatgagaacatgttcagaaaagaagccgaatcactaggcaaagtcaagcaccggaatttaacagttctcagaggttactatgctggtccacctgacatgagactcctagtccacgattacatgcccaatggaaaccttgcaaccctcctccaagaagcttctcaccaagatggccacgttctaaattggccaatgcgtcacctcattgcactaggcattgcccgtggtttagccttcctacaccaatcctcaatggtccatggcgacgtgaagccacaaaacgtcctattcgatgcagatttcgaagcccatttatcagattttgggttagacaagttaacagtagccactcctggcgaagcctccacttcaacttccgttggcacattgggttacgtttctccagaagcagtcttaaccggggaagcaacaaaggagagtgatgtctacagctttggcattgtgttgctggaactactgacaggaaaacgacctgtgatgttcacccaggacgaagacatagtgaagtgggtaaaaaaacaacttcaaaggggtcaaataacggagctattagaaccaggtttacttgagttggacccagaatcatcagagtgggaagagtttttactgggtgtaaaagttgggttgctttgcacagcacctgaccctcttgatcggccaaccatgtccgacatcgttttcatgcttgaaggctgcagagttggtcctgatatcccatcctccgcagatcccacatctcaaccttctccggcataacccaaaactccaaacttgttgtcatttttttgttgttttggtaaaaaaacaaacccttttttagtttgatttaagaagtgtaacaaacattggtagttcatggttattaacttgtttttttctct

SEQ ID NO: 85700 - DNA, 405 bp, Glycine max
  Clone ID: PAT_MRT3847_48400C.1
gggagcggctagtggatttgtggtgcccgtcataacaaaaaaaaactgctcaaatatttttatgggtactggtaaggagctcctttaagccagatgttatccgctataatttactcatagaagcttttgggcaaaagcttctatacaaggaggctgaatccacatatctgcagcttcttgagggtagatgcattcctaccgaagatacttatgcccttcttataaaggcctactgcatatcttggctgctcgaaaaagctgaaaccatctttgccgaaatgcaaaattatggccttccctaaagtttgtatctgtattaacttgttcgtccacacatgctgcataagaaatataatctaggattgtggatttagacatgactacgtggatatttgaatggggctt

SEQ ID NO: 85701 - DNA, 1161 bp, Glycine max
  unsure (1)..(1161): unsure at all n locations
  Clone ID: PAT_MRT3847_48401C.1
ccacgcgtccgcttttctttctttcttttttcaagaacaataacttgggcgtccttcttttttgacaccttttttctccccttacacatcacctttatcttcaaccaccccccgcctctgtgggcttttattcatgttctatgccattgacatgtctttaaagcacatgctgctccatgaatcacactgaaactccaactgtcattcttctactttgcatttacactctcggataatggccaaggaagcttctctgtgcctcttgtttctcttctcctttctcagtacctcctgttctggatctctggtgggtttttcctaccgtgagagaggagacacttcaacatctgctagaaccatatcattcctccagcaaagcaacgtttcgccaactcagattcgaatttttgtcacagatcataggattttgagcactctcagcaactccaaagtgctaactgatgtctacttgaacaaaagtcaagttgaaaatttcattatttcaaaaccctctgaactaaaagctcatctacttaacattctctcacattcaaacatcaagagcatcattgctagctgtggcagtgagtgcttagcacaaaatgaaatgcctttgttcttacatgctttgaaatcaattggttcagttctcagagagcttcacttaggaagggaggtaaaaatctcagtagcatatccactttcattcttagaaaagttgaatgcatcgcatgaaaacagtattcgtaggattctttcatttataaaggaaacgaaatcctttgtcatggtagaagacagcattggtggagaattaagcatgggggatcactttgttcatgctatcatcaaacgagccactcttgctgagcgacaccaccgccagtaaccaaccctgtgacatcttatccacctccatcaggaaatgttcctcccgtcgtaaacccgcaaccacaaccacctcctgcaaacactaatgctcctgccattcaggggcagagttggtgtgttgcaaaacagggagctcctgatgcttctcttcaatcagcacttgactatgcttgtggaatgggtggtgctgattgttctcaattcagcagggtgggaattgctacagtccagttactttgcagaaccatgccccttgccttnacanntana

SEQ ID NO: 85702 - DNA, 1763 bp, Glycine max
  Clone ID: PAT_MRT3847_48402C.1
cacgcgtccgcttcgacaacataggagccgccatccccctcttctctcagcttctcaaccgttctattctctctatgcttccacaactccattgaacgatgcagaatatgttaagagcaaagcagatcagtagtaccctttcgagcaatgctaggagtattttgcttggcggttcgcgatgtaacgcagcagatggcaattcgtgcacttgccctgaggatgaaacgtgtgtgtcgaagagacagcagaggaaaaacaatgaagatttacttgcgctgaagccgccctccttggtgtccaaagccacctctcaagttgtaggaacactggtttcaggaaacttggctaatgggcctgcttcccacaaggctgggagtgttggtcaatctggccgtgtgcaacaagtccagcctacttcatatgcaccgagcaaatcggactcggctacatctgcttgtgttgttgatggtgttcaagatcatgttgctcactcatcttctcttaatgctgaccagttttatagggccggtattgcagctgttaattttatttctgatgtagttaattataagttgcctttatcagatggcatgggaatactaaactactctaaaaattgtatggttgatcctgccagagccctacccaagatcagatcctccaatgtgcagcaaattagaacggagaactttacctctgttcatcccaaaccacctgttcctgctcatccggggccatcaaaacatacaaataataatcacggtgccaagggaaaagctaacaaatcaaatttagctaaaggctttaagcatgttgctgcttcagggacagagaagtcaggggcagctccaaatattcctgtaaataaccatgatcgcagagccttgccacagagaacaagaacccattcaaaccactttgtgacaaattttggttccaacatgcaaagttcaaatccacagatggcgcggccattcaaagaaagtttcaataaacacacaagggatctgaatatgccagctggaattgctccgacaaagaggcattttactaattcagggcatgttgtggaagtggttaaagatatactgaaacagttaaggtggggtcctgctacggagaaggctctttataacctgaatttttcaattgacgcatatcaagctaatcagatcctaaagcaacttcaagaccattcagttgctctaagcttcttttactggctaaagcgtcaaccaggcttctggcacgatgggcatacttacaccaccatggttggtatcctgggccgtgcaagggagtttggtgctataaacaaattgctagagcagatggtcaaggatggatgccagcctaatgttgttacttacaaccgtctaattcacagctatggccgtgcaaactacctaggggaggcactgaatgtgttccaccaaatgcaggagatgggatgcaagcctgatcgtgttacttactgcacgctcattgatatccatgcaaaagctggatttcttgatgtggctatgtctatgtatgaaagaatgcaagaagttggcctttctcctgacacatttacatacagtgtcatgatcaactgccttggaaaatctggtaatttatctgctgcccataggctattttgtgagatggttgatcaggggttgtgttcccaatattgtcacatacaatatcttgattgcttttgcagctaaagcaaggaactaccagacagcattggaattataccgtgacatgcagaatgc

SEQ ID NO: 85703 - DNA, 1089 bp, Glycine max
  Clone ID: PAT_MRT3847_48403C.1
cccacgcgtccgcttgaacaaaagtcaagttgaaaatttaattacttcaaaaccttctgaactaaaagctcatctacttaacattctccaaaattcaaacatcaagagcatcattgctagctgtggcagtgagggcttagcacaaaatgagatgcctttgttcttacatgctttgatatcaattagttcagttcttagagagcttcacttagggagggaggtaaaagtctcagtagcatttccactttcattcttagaaaagttgaatgcatcacatgaaaacaatattcgtaggattctttcagttataaaggaaatgaaatcctttgtcatggtagaagactacattgatggagaattcagcatcggggatcactttgttcatgctatcatcaaacgagccactcttgctgcttccattcttccttgcaaggatgttcccattgttctggcaataaaaagcacagttatcttcccttcaatggaattagctcaatttagtgagagagtgtccaaatatctagaatccaaaactcatattagaaaaagaatagcagcattatacatagaggtgcacagaacagaagattttgctagcaaaaagctcaaaagaagaagtctagatgacacaaccaacccaacaaacacagttttccccacaaatccagcatcatcgacaccaatcattacaccaccagatacaccaacaatcataacagttcttgccacaaatcctgtcacaatttccccttccaatcttgctgcaatgcctgtgacagttccttctaccacaccagtgcctaatcctataacccccacaaatccagccaattcaccagtacctgtgagcaatccagctacgactcctatagcgacaccaccgccagtaaccaaccctgtgacatcttatccacctccatcaggaaatgttcctcccgtcgtaaacccgcaaccacaaccacctcctgcaaacactaatgctcctgccattcacgggcagagttggtgtgttgcaaaacagggagctcctgatgcttctcttcaatcagcacttgactatgcttgtggaatgggtggtgctgattgttc

SEQ ID NO: 85704 - DNA, 508 bp, Glycine max
  unsure (1)..(508): unsure at all n locations
  Clone ID: PAT_MRT3847_48404C.1
gggtttgtnnnattttattttattttttttttttttttttttttttttttttttttttttttctttgttttttgcgcccggcggcgcccccacaaaccaccaaaaaaaacccgaaaaacacacgagaaaaaccagggaaaatattcacaaaactttttccgcaaaggggaggctgcctcaccctgtaaaagggcacacccggtacaaaaacgccccccaacaaccaaaagagggtcccttttaacgcggcgggccgtcaaaaaaagcccaaaaccccaaaaagaaagataaaaatttcccccgaaaatttacttaccctcctccccccttcgaatgcgccctcccagtgttaagggccgaccccattatccggcctcccttagaaaacagccgcctccttttttggggccccctaatcaaaaaacccgtaaaataacctttaaattttttccaaaatcttgacccaaaaacaaattttttcaaatccaaaccccccctgagacaaaaa

SEQ ID NO: 85705 - DNA, 454 bp, Glycine max
  Clone ID: PAT_MRT3847_48405C.1
atttggcgggtcgactttcttattagccggcggccgacctttatgttgtgtttttttgtggtgtggaaccgatagtatgatttattgaaatctaaaggtaacagggtccctgaattgagcccataaaagcctaagaaggtagcccaaacatggttcgtcacatatgggcactgacattacaggcaaaatggagctgaatgattacgacaaaccgtcgggtattctaacagagcatcttggattaacaggcttataagaaaccttgacgggttgatggaattgttgcaagaaattgatttttcttttactgcttttggataagctaatgccttcaagaaagcacacaatgacactgtctaaccgaactcttgcatgaaggatgtcctcatgggaactttgtatgtggtaatatgaacctgggtgccttggttgattactaaggccccacctggga

SEQ ID NO: 85706 - DNA, 319 bp, Glycine max
  unsure (1)..(319): unsure at all n locations
  Clone ID: PAT_MRT3847_48406C.1
tttggatatagaagagctataatatntcgtaatacattgcacagacccaccatcctaacgtgtcagatgaatcataaggaaaactgaatgatcaccgactaaccctcatatttatttgcctgacctaaaaagacaacaaagagaatgacgctggcgcagtattctaacagaggctagaccggattcaattaccgggaaaacctctttctcagaataaagcgcttaaaaaaaaaatggccaaaggacgcctcagcaaaaaccctcaaacacgaaacttacagaaagagaactctcaaaagaaaaggctcagcactttacg

SEQ ID NO: 85707 - DNA, 315 bp, Glycine max
  Clone ID: PAT_MRT3847_48407C.1
gctacgagtaacacaacgcaacgagaagactacacactggtgcctaccataaactacaagatgcgtgaacatttgctaggggtggtgacgcaatgatctatgactagaatatacttaatcaatacattcatgatgataatgataatgagacccgattttcaatattagcacgagaacctatgattcctggcactgattggcgatttcatactaccatagtattctatttaaaagaaggtcctctgatacttatcagagcccttgctgatcatgctttgttccacattaaccttacacagattgaaaatcttatct

SEQ ID NO: 85708 - DNA, 163 bp, Glycine max
  Clone ID: PAT_MRT3847_48408C.1
gccacacattcgacgacactttcgcttttagactagctacgacccaagcttacgctttaaatcctacttcataccaagcggatactttcccatcttgcatttcctcctcaccttcttcttatacccctcacactctcttcttcctcgtccacccggtcggtct

SEQ ID NO: 85709 - DNA, 353 bp, Glycine max
  Clone ID: PAT_MRT3847_48409C.1
ggagggaaaaaaaccctggtttttccccccgttttgaattctgaaaatttcagacccccctttgggcctttatcgtttcccccctgcccaaaggggggccctttttttcgcaaaagaggggccgaaccccctgttaaaattcccttgaaataacatggcaccccccgaatttgggcatgcccccccccacatttgaattctggccttcccatttttgtcctgggactctgagcttaagcccctttctttcccccccagaaaaaaatcggggcctttttctttgaataatgagcccctcatgggtttcccttacctttcggggactttaacaaacccttggggggggccccccc

SEQ ID NO: 85710 - DNA, 439 bp, Glycine max
  Clone ID: PAT_MRT3847_4840C.1
atccaacaaaaccagagagcatgttgctgttttcaaattaactgaatgagtagacgacacactctatccccgtatctaagaagagctctcttttacggatcaaatttgaagaatgttttgctttcaaactaggtgaaatgtaatggaaaattaaatgattaagaatgtaaaaatgaagttcattatatttttttgagtttttatctaaactctgatttgcacagaatgtgaagtttactagacacacagaaaaattgcctatcccttttatttgattcaagggattggatgtataacaacctttccagtggctcggtttgtttcaaggtaagagaaggcttcagcaagcttatcaaaggagaatggacctttggggtctacaattggcttcaccttcccactttctaagtaagggtttagtttcctcaaaacagctcca

SEQ ID NO: 85711 - DNA, 2978 bp, Glycine max
  Clone ID: PAT_MRT3847_48410C.1
cacatccacgcgtccgaaggctttttccttcctctcttcccttttcttttttgccctgctttgtggggtttccactctcaaatgctcttcacccttctctctctaatctgcttttttattcttcttcttcttcctctctcagatcctaagggctttcatctgctgctgcaactcagattctcttgcttctggacttattatcttctgcgttcatgcctgctcttgtcaattacagtggtgatgatgagctgtaccctgggggttctttttgcccaaatccagtggagttgggtcgcttgtacactactattggctccaatttggatgtgtactaccctcccactaagagaccacgctctatctttgaagccattgagcgtgagcaatattatcaagagcctggtattgaggttcttccagatgaatgcctctttgagatattcagacgccttcctagtggcaaagagcgaagctcatgtgcctgtgtatctaaacgctggcttatgcttatgagcactatctgcaaagatgagattgagagggctacctctgttgatgaaactgtttcttctgatgagaatcaagatattgaagatgatggataccttacaaggtgtctggatgggaagaaagccactgatgtgaggcttgctgcaattgcagttgggactagtagccgtggcggtctagggaagcttttgatcagaggaagcaactctgagcgtggtgtcacaaaccttggcctctctgcagttgctcatggttgcccttctctcagatcactttctttatggaatgtgtctaccattggggatgagggtgtgtctcagatagcaaaaggatgtcatatgttggagaagcttgacttgtgtcattgttcctcaatcagcaacaagggtttgattgcaatagctgaaggttgccccaacttgaccaccttaactattgaatcatgcccaaatattggaaatgaaggtttgcaagctactgcaaggctatgccccaagctgcagtcgatctctctcaaggattgccctcttgttggggatcatggagtgtctagtcttttggcgtcggcttcgaacttgtcgagggttaagcttcagactttgaaaatcacagatttctctctggctgtgatttgccattatggaaaggcgataacaaatctggtcctctctggtctaaaaaatgtcactgaaagagggttctgggtcatgggggctgctcaaggtctgcagaaactggtgtcacttactgttacttcctgcaggggaataactgatacaagcatagaagccattggtaagggttgcatcaacctgaagcagttgtgccttcaccggtgttgctttgtttctgacagtggattggtagcatttgccaaagctgcagtatctcttgagagcttgcagctggaggagtgcaacaggttcactcagtctgggattattgttgcccttgcaaacatcaaaacgaaattgaaatctcttgcccttgtgaagtgcatgggagtcaaagatatcgatatggaagtgtctatgctttctccttgcgagtctcttcaatctttagtcattcaaaagtgccctggttttggtagtgctagcctggccatgattggaaaattgtgtccccaacttcagcatcttaatctgactggactctatggcataactgatgctggccttctcccccttttggagaattgtgaggctggacttgtcaatgtaaacctcactggttgctggaacttgacagataacatagtttcagccttggccaggctacatggtggaaccctcgaagtactaaatcttgatggatgctggaaaattactgatgcaagcttggttgcaattgcaaacaacttcctagtgcttaatgatctagatgtgtcaaagtgtgcaatcaccgatgccggtatagctgttctttcaagggccagtctgcctagcttgcaagtgctttccttgtctggttgttctgatgtatcaaacaagagtgcgcctttcctgaccaaattgggccagaccttgctgggattgaatcttcaaaactgcaattcaattggcagcagcacaatggagttgctagtggagaagttgtggagatgtgatattctggcttaatcatgttagaaactagaaacaaataaaactggctaaatcagggaaggagatagaattgtacaggtcacattcagcatacattttggctgatatttctatcaagggtggattggtggcagtttggtgattggttgttttccagggaactttggcttgttcctttatgacccatttttttcgcaagcatttcgaaatgcttgttccaacttaaaccctttaggccttggcttactggggcctcttctttcatgactagggtcccctgagaatacagttactaagtcttggtttgtgcatgcttatgctaggtcttattttgtactgctggatgttgacaataaataacatgctttagcttctgtcgcacatttgcataatgtttacttagacttaagcttaagttcatgtctttttaagtcttctgtctttttagtttataccaatcgctcttcaccatgacttagagtgtggaagaggctttagcttgttttactccggtcttgtcagggtggttatgttgtgcaattttaaggctaggtaactcatattcaagggctttggtgtggtagcagggcatccatttgttgctattttttttcttcccttttaaatcaagtccttgtttttataggcttgtcttgcttttgaattgtactcagcagaccactttgcttgtcttcaataataaaaaattaagaatgccatttcacttgcgcacttagcagaccactttgctcgtcttcaataataaaaccgcaatttcgcttgaaaaaaaaaaaaaaaaaaaaaaaaaaaaaaaaaaaaaaaaaaaaaaaaaaaaaaaaaaaaaaaaaaaaaaaaacaaag

SEQ ID NO: 85712 - DNA, 691 bp, Glycine max
  Clone ID: PAT_MRT3847_48411C.1
cccgcgtccgcctgaacgaactccacccctgacccgatccattccattccaaagcttcttccttcctctcttctctttttttgccctgctctgtggggtttacactctcaactcaaatgctcttcacccttttctctctgatctgcttttttcttctccctctctcagatcctaaagggattcagctgctgcaactcagattctcttgcttgtgcttgtggacttattatcatctgtgctcatgcctgcccttgtcaattacagtggtgatgatgaactgtaccctgggggttctttttgcccaaatccaatggagttgggtcgcttgtacactactattggctccaatttggatatgtactaccctcctactaagagaccacgctccatctttgaagctattgagcgtgagcagtattatcaagaccctggtattgaggttcttccagatgaatgcctctttgagatattcagacgcctccctagtggcaaagagagaagctcatgtgcctgtgtatctaaacggtggcttatgcttatgagcactatctgtaaagatgagattgaggggactacttctgttgctgaaactgtttcttctgatgagaatcaagatattgatgatgatggctaccttacaaggtgtctagatgggaaagaagccactgatgtgaggcttgctgcaattgca

SEQ ID NO: 85713 - DNA, 584 bp, Glycine max
  Clone ID: PAT_MRT3847_48412C.1
ggcttgttactttatgacccatttttttcgcaagcatgaaatgcttgttccaacttccaacccttttggccccttggcttactggggctacttctttcatggctagggtcccctgagaatacagttactaagtcttggttgatggtatccactgctagatagtgcatgcttgtgctaggtcttattttgtacagctggatgttgacaataaaaagcatgttttagcttctgttgcacatttgctatgatgttgcttagacttaagctttagttcatgtcttttgaagtcttctgtctttttagtttatactaatcaagcatcttcaccatgccttagagtgtggaagaggctttagcttgtcttcctttggtcttgtcagtgtggttatgttgtgcaattttaaggctaggtacctcatattcaagggctttggtgtggtggcagggcgtccatttgttgctatttttttttcttcccttttaaatcaagtccttgtttttgtaggcttgtcttgcttttgaattgtacttagcagaccactttgcttgtcttcaataataaaactgcaatttcgcttgaaact

SEQ ID NO: 85714 - DNA, 759 bp, Glycine max
  unsure (1)..(759): unsure at all n locations
  Clone ID: PAT_MRT3847_48413C.1
cccacgcgtccgcccacgcgtccggtcaactctagataaggtgctcggagacaaacatcaaaattctactactcctggggtcttacaagaaccagctcagacacaatctctctcggatatttctgccaagagtgtaaactactgggtaggaacaacaaccttgatgcctttggttgggagatttgttgctgatgcctacactggtggatttaacatggtcatattttcttccctcgtatacttaatggtaaatccaaatttttttaatcaatgtgcaacatgtttttattataacttagtaatgtgagcttctacacttcatatatcctgtctttttgatcaatttgacactcctttagtcctgaaaataaattggaatttcttttattgacgaattggaacaattggaggggaacagatgaagcaaagaattatcaaatttgtttttaaaaagccaaacgggtagtcattttgacaaaaaaaattgaatttttttaagaagtatgatgcttatactggagatactgataattctgtttacacatcaaatgcaagcgctcatatattaattgtttccatgaaaaataaacctaatttttacttgtcaaaccagggattaagcctcttgattntgtcacaattcatcccaagtctaaagccaagcaacaataatcagcctagggtggggttcgtgaaggggctttcttccttgccatttactgcatctccttgggcactgggggacacaaaccatgcttg

SEQ ID NO: 85715 - DNA, 862 bp, Glycine max
  Clone ID: PAT_MRT3847_48414C.1
taggtacagtagttcatcaaggtcctcacctttagaggaccacacgtccccaccatcagaggactacatgccctcgtcttcaaaggactacacgtcctcgccttcagaagactgcacgtcctcgccttcagagggcaacacgtcctcgccttcagaggactgcacgtcctcgccttcagaggactgcacgtcctcgccttcagagggctacatgtcctcgaattcagaggactgcacatcttcgccttcagaaggctacacgtcctcgccttcagaggactgcaagtcctcacatttagagggctacacaacttctccttcagagggctacacgtcctcgccttcaaagggctacacgtcctcaccttcagaggactacacgtcttcgccttcagagggctacacgtcctcgccttcagagtgctacacgccctcaccttcaaaggaccacacgtcctcaacttcaaaggactacacgtcctcgccttcagaggactgcacgtcctcgccttcatagggctacacgtcctcgccttcagaggaccacacgtcctcatcttcagaggagtacacaccctcgcctttagaggactgcacgtcatcgccttcagagggctacatgtccttgccttcagaggactacacatcctcgccttcagaggactacacgtcctcaccttcagagggctacacgccctcgcctttagaggactacaggtcctcgccttcagaggcggctaacgtgtttcaaaaactaaaaggaaaagaaagttcccgatcaaagatcggaagaaaaaaaaatagaaaagaagttcccggtcaaagatcagaagaaaacaaaggaaaaaagaaaaatcttcga

SEQ ID NO: 85716 - DNA, 181 bp, Glycine max
  Clone ID: PAT_MRT3847_48415C.1
tgaattctaaacattgaaacaccacctatgtgttttcttctatggcaatagtagtaaaccttaaaccctaaccgccagaacaccaccgtctagtttctgttcttcgagtttattttctctgcctctgttatcccttcctttgcatcaaattaaataacattactcataaaaagaaaaaaaa

SEQ ID NO: 85717 - DNA, 1269 bp, Glycine max
  Clone ID: PAT_MRT3847_48416C.1
tagtccatttttattagacacacactccaagctcaaaccatagaaaccagtgaggtcatggcaggagagaaggaggaaccaaattggatgaccccctacaagaatttcctaattcggggggtgttgcaaccaaatgaagatgaagcccaacacctaaaacggaaggctagctactacatcatccttgatggcaagctattcaaaagagggttaaaaacacccttgctgaaatgcctcaatagccaacaagcaaacaatgtcacgtgagagattcatgaaggaatctacgacctccatatcgagggacactcccttgcaaccaaagtggtgcgtgcctactactattggtcgacacttagggctgacaccctcatctaagaggtgcagacaatgccaagagttcacatatattccacgcacccctcctgacaacctttgtagcttgagctacccttggccttttgccatgtgggggatggacatactgggacccttgcattatttcactaagtggatcgaggcaaggccaccacgagaaatctaagtcaacggggtagaaaagttcacctggaaacacctcatatacagatatggtcttccttatgccatcctcaccaagaacagtactcaattcaaagctcaggcttacgaagagatcttgacgaggctagatgtcaagcacccataacctctatcaaacacccccagaccaatggtcagatgaaggcagccaatagggtcatccttaaagccttgcacacaagacttgacaagtccaaggatctatggaaggaagaactctccagcatactaagggcttatcactattcaccccagacaacaatcaacgaaactcctttctgacttacatatagcatagatgccatgatcctcatcaaagttgaggaaccattgacaaggagattgttgttccaagaacaaaaaaatgaagaaaacataagggtggaacaagagataaaggacgaagtccaagagatggccaaaatcaaagaagagactaccaagctctgagcattaaggaaatataatacaaaggttcatcctcgtgcctttcaacttgatgacctagtgctgcgggttcgaggtgaagcaaggaaagattcccgagcgggaaagccaggacccaactgggaaggcctattcagggttgtggcaagcctagacagtggagaatacaggctacaagaactagatggtaaagcaattcgaagaacatagtatgctacccatctgaagttctattttggt

SEQ ID NO: 85718 - DNA, 461 bp, Glycine max
  Clone ID: PAT_MRT3847_48417C.1
gcacgagggtggatcaagcaacttcttccagaacttaagttttgtgaagtttagcagatgcagctctattgtgatgattaggcagcgcttcatattgcctctaatccagtattccatgaaagaaccaagcacatagaagttgcctgctactttgttcgagagaaactaatggctaaggaaattagtacagaaaaaaattggctctaatgatcaactcgcaggtattttgactaagtcattaagggggcctaggattcaatttttgtgttccaagcttagtgctatggtttatatgctccagcttgagggggaatgttggaaaataggttatgatgtacctagagtagtagcttacattttattgtgtcttttgtattcctgttgtacctggtctgctcagagctctgtattttgtacttatctcttcagcttactgagtaagctaagttttctaatataat

SEQ ID NO: 85719 - DNA, 118 bp, Glycine max
  Clone ID: PAT_MRT3847_48418C.1
ttgggcaacccatgactcttatagggcagttatactacttgtatgtgctatattaatcatagtttatagtggtaatttagaacaagaaatcttggttgatatgatattaaccattaat

SEQ ID NO: 85720 - DNA, 309 bp, Glycine max
  unsure (1)..(309): unsure at all n locations
  Clone ID: PAT_MRT3847_48419C.1
gtcgcangcacgcgtacgtaagctcggaattcggctcgagnanntcgatnanaaatnggnngacncnnntagagtctncacnttntnctnncgcnatggagtagttatnctnttcgtnnnngcaataggngatanggatanactngannnncgggnatcaaagtcccgtganntncgganngntgatcancncngttacaccgctctgagaagctcacctctcacntggnccgagtctgnaganantactcntngcggtggncntnnntangattgaccagtctannagggcnannngcntngnnnntt

SEQ ID NO: 85721 - DNA, 473 bp, Glycine max
  Clone ID: PAT_MRT3847_4841C.1
ggctcgagattttccattgtttatttcttttgcaggtctgattggtaaagatctggtgtagaatcccacagctgttggtgtggtttaaggttacaagaagtgtcatgcttttgtcatgatcaaccgtgcagtgcttatatcatgcttcttctactgcttgattgatgtatgctggaatgttattttacgtatactattctttttattgaaggtctaatttactatgttcgggtcttgatatttatttttaaaatttgatggtgtatgaatattatcggttattagttcttccacaatgaaagttcggacggagaaacctttttagtcagtgttccattatatgcatctaactcttattgtactacatatatcactgatgttacatataactttcagtggctatttacgttcatcttctcctcagtgtttcatatctgaactctatcgatgatgtcgtccactctgcttaatta

SEQ ID NO: 85722 - DNA, 654 bp, Glycine max
  unsure (1)..(654): unsure at all n locations
  Clone ID: PAT_MRT3847_48420C.1
ctaatgagggagtgggacttgagttttaaaagtctaaacctaacgtgccatttatctcatgtaaataactattttccacgctatggacgtcaataacccagtttgctggtacgttacgttccatttaatataacctccgtgaaaaaagattattacccacaaagtagaatggtaggctagtgcaatttctgcaggcagttttaggttacttcatcattgtgattttcaaaagcagcttgccgtggcttagtgccctctccactttataatctccctttaacagctagactccatatcaatgtggaaaagagccaactgcttttgtctttccaaagttaccacttactagtacctcctggctccttgcatttgacaattttctccatttgtctcgtatacctcttaattttgaagcatgagctgcttgatgctttaatttgcacattttgacctatgtatgtagtggcaccagaacatgcatgtgtcttggctgctacgccaaggtatatataaatcatcataggccatggggggactataaagataaatgttgcttacccattataacactctcccaggtgtaggctgnaaaagtgacccgtcgcaatttaggngctagtcaccactgggaaagccttcaaatttttgagagca

SEQ ID NO: 85723 - DNA, 693 bp, Glycine max
  Clone ID: PAT_MRT3847_48421C.1
cccgcgtccgaaaaaaacaaaagatataaaaaaatgaaaaacctgctaattgtttatcacattgaaatttgataaacaatgggcttacgtgtgttatgtttcttaagattccttttggagaagatcatggcttaaaattttctatatattttttttccttctaaagaagttacctgtctgctaaataaatgaacatgttagaacgttgttttttcacctaaatgtgttaaagagaagctccgctacttactagtattatttgtcattatgcttaagacaaagtctaatctatagcctttggacttatgctgtttctcatgtcatgtgtataaacaaataaaatttttcttcaggtggggtttgagcaactaaagtttagtggcaagcaagcaagacaacaaaaaaagaaagaacctcttcatactcattgcagttgcagtacgtgcggggtggggagtgctttcaacactttctcttcaaccagcaaaatgagtcatgcacattctcatatgggctcaggtagtagaaccactcgaagagcttttcgagtttgggaaaacacattgtagggaggccaaaaggaaaacatcaagccactatagtttggctgcttggtcttggtgataaatggtttgagctcattctcagctcctggaatccttgccacttccaaatataaaaggatttgcccta

SEQ ID NO: 85724 - DNA, 791 bp, Glycine max
  Clone ID: PAT_MRT3847_48422C.1
ggagagagagagagagagaatggtttccagggttcacaagagaacagcagtgtataggagcatacaacagcttcgttctatcactaactcccatgcgcgccgtaaaacctctgtgatattagatgcatcgaagtacatacgtggtttaaagcagaagttgcaagaattgaaccaattagcagttgctgcaactcaaaaagacattgagtatggtccaatgcctatgcttaaagtggaacaacaagaggaggggtatctgatcaaggtgttgagtcaaaggagttgccaggggttgttggcgtttatattggaagcctttgaaaggcttggtcttgtggtgctccaggctagggcttcttgtgtggagagcttttgtttagaagcatttggaatcaaagagagcaatgaagatacccgtcttgtggatacacaagtagttgagcaagttgtatctaaagctataaatgattggaggaaagttacaaagcaatgttgatccagcaatgaacgtgtcctaataagaacacgttttcttttcattattttttggggggttatcttccagttaatgttattgcttcatccttcaaatgggtcggatcgactgtttgccttcttagcccaatctactgattagatgtgtatgatatataacttgtgggaatggtgaccaagctttggacagcgcattattattttgttttcaattccccttatgttgagtgtgaaacattgaggtgctgtaaatatttcagatcaaagaaaccctcagttcagttcatataatatta

SEQ ID NO: 85725 - DNA, 247 bp, Glycine max
  unsure (1)..(247): unsure at all n locations
  Clone ID: PAT_MRT3847_48423C.1
ttgcttcgcgcccggagaggagggcgcccgacaagagtgagttgcacacatcggggccacgcaccccggcgacaacgccccaccgcctacaaaaacggacngggaggaaacccccaaggaanggcaacaggaccaaccccgcgacacaaaaccaagcgcggggacaacaaccgacgccagagcggacggcacagaacaagagggagaagaaccaccacacggcggaangcaaaaagacgccaccccc

SEQ ID NO: 85726 - DNA, 299 bp, Glycine max
  unsure (1)..(299): unsure at all n locations
  Clone ID: PAT_MRT3847_48424C.1
cacaaaggttttagagcncgacagcagaagggggaaagcacgcgaacggagggcacaggcacaggggcagcaagaggacccagaancagccgagacggacacnaagaaagcccgngagagngagccaaacaacagggangngaagacggagnacaaaagnncgaagcagaaggcgagagaacacgggggggaggacgcacaganccacggcagcacagnggcaaaaaggaagaaacgagaacaagcaagaacagcaacagcaaagcaggagccggagccaaggacgaaggacagcaaag

SEQ ID NO: 85727 - DNA, 254 bp, Glycine max
  Clone ID: PAT_MRT3847_48425C.1
atcaaggtctccctgtttcattcacaatatctacgaaattttgttttctggttctgcaccagttcctcttctgcttaggagattgttttagtatcagtctcatcgaagatgagcaaaaatttgatccatgttcttttcatcttcattattctttttagtagccgttgaacagggcaataaatcagatccagaaagctcgaaaagccatgaaatgcatgcacaagaaatgcccagatgattatgaaattgcaaag

SEQ ID NO: 85728 - DNA, 228 bp, Glycine max
  Clone ID: PAT_MRT3847_48426C.1
ggcatgtgaaccggctgaggggcaggccatatggacgagctgatcgggcggctggcgacgaacgccagcatagatagtgctgtcgctgaaaagacggtcggcattatcctgggcttccttcgcaacgaaggcccttccgagaacgtcgaagccctgatcaatcatattcccggcgcggaagcggcgatcgaggcgtccaaaagcggtggcggactgtcgcggctgatg

SEQ ID NO: 85729 - DNA, 325 bp, Glycine max
  Clone ID: PAT_MRT3847_48427C.1
cggacccttggttccacccgggagggccgaaccggaaattgcgggcgggcccctttaggctaacaagatttccaaaaaaggagggggaaaaaagcggggagaaagaatggggaaaaaaagtttcctggggaaaaatgtttccccctcaaaatacccgaaagaataaaggcgaaaccagagggggcaaaggagggggcgcccaaaaagaaagtgaactcccattaatgccgtggttccaacgggcaaatcttgagggggaaaacctttaaggaaatctcaaaaatgaataaaaacccctcggggaaaggcccccagggaggggccc

SEQ ID NO: 85730 - DNA, 160 bp, Glycine max
  Clone ID: PAT_MRT3847_48428C.1
cttggcttcttcccctggattcactctcaactgagaactgggtccttgaattggagttgaattttggggatttgatatggttgccgctgaaagattgaagctttttctgtgtaagacgaggaaagggcttggaattttgttgagtgcatttggtggtgtg

SEQ ID NO: 85731 - DNA, 389 bp, Glycine max
  Clone ID: PAT_MRT3847_48429C.1
attatttctcttttcctatctttttaccgttttatctttaccctactgtattcctcatctagcggggtcctaataagtgatgaagagcataaccttccttatctttcattttcttaattttctgaaaattattcttctatactatctgcttctatcacaatttccaattcttttctcttatctttttttactaaatttatccactagtcatttttcttcacaatttcccttgcatcttctttattctcctttataatctatacttaatcacattcttttcattttttttcaacatttctaatctttcttattatgtctttactttctacatatttttctaaaaaatttatttatctaacattaaagttttctcttttcttattttttcc

SEQ ID NO: 85732 - DNA, 306 bp, Glycine max
  Clone ID: PAT_MRT3847_4842C.1
agaagacgacggcaggggatggaccactccggtattcctgatgtagcaaggggttggggcctatagataagaacggatgtacaactaactttcgagggcatataggactagcgtcttgactgtgatagcttgaaatgcaatgtgacctataacgtgattcgcgaaaccgaagttcaattgaaagaacaacattcaggccttaatgggctatatcatgctttacttctgcagtggaaaatacgctagtccataaatgattagtgagtttaaaaagagaggaataatttgagaagttgaaatgaacaa

SEQ ID NO: 85733 - DNA, 1830 bp, Glycine max
  Clone ID: PAT_MRT3847_48430C.1
accagcaacggcctcgtcggctgggcccctccgtagttgcaaattccaggtatggacggtgcgccacaatccgccggtggtccggcgctgttccttcccctcagaggttctagaaagatccactccgaaatggacggtgcgccacaatccgccggtgccggaggtccggcgccgttccttctgaagacctacgacatggtggacgatgcctccaccaatgacatcatatcatcgagctctaccaccaacaccttcgtagtgtcgaaccatctcgagaacgctagcctcagtcatgggaattagttaatgaagagtttctgaaagatcagaagcatctactcaagaatatacatcgcaggaaacctatccacagtcatagtcatcctccaggttctcttgtagatccagaaagggcagcatttgaggaagaaatagacaaactttcccgtgagaaaaattctcttgaatccaatattcgtaacttcaaacaacatcagtcaacagcaaagcctaagctagaagattttctgcagcgattagatggtgttgacaagaggcagaaacaattgctgaacttctttgagaaggctcttcagaatcctactttcgttgaacatctttcacgcaaaattgagtccatggatttatctgcatataagaaaaggagattgcctcaggttgatcacgtgcaaccagttgccgaaagtagcttggtggacaatcatagcaattttagaatggaatttggaaatgttttccggcaagatttttcgaataaactcagactggagttgtcacctgctgtttcagatatgaacttggtatcacgtagcacacagagttcaaatgaagatggggaaagctcacagaaaaagctgtctgaagtagaaccaagaggagtgcagacaagaacagctcttacatttgcacctgaaacattagagcttgcagatactggggcttcttttacttttaagatggattcatgtttatcacgaagagcaacaactgctgagagctcaaaactgatctctttggagccaagtagtgaagaaggcgatagtttatcctgccaactaaacttaactctggcatcttgtccattgcaagtgaacagaaattcatactcagccagatcaccccaaattgactgtcaagaaattggaaaattggcagaatcaagattttttgccaatggtaaagaatctgatagtggtgtttcctcaaacctaaatgtagctgctgaggctaccaatttagcttcatcacaggaggctccaagtaacaaccaagttaacccagctcctccagacagggtgaatgatgttttctgggaacagtttcttactgaaaggccaggctgttctgacaatgaagaggcaatatccaactaccgagcaaacccatatgatgaacaagacgaaggacggtcaactcatggaatctctagaaacattaagaacatggatcaactcacactttgagttgggcatgctgtcttagagaacagttaaactatttttatatgaatttttcatgactaatacacaatatgatctgaaacttcacagttgacagttgactacctgatttatcttgtgaaaaatccgaaatgtttaccagctttggggactgatggatacaatgttaattaactgttgtaaattattgtaaatattcaaaatctgattggctttcaaacgtattcctataaacataaaaagtcttgattatggatttttttttcttcatgtttgcgtagagagatgtgcagtaagtatttgctgaatagaccagctttactttccattacacaatggaattccaatt

SEQ ID NO: 85734 - DNA, 649 bp, Glycine max
  Clone ID: PAT_MRT3847_48431C.1
gcaaattccaggttttcttcctttagcctagcttttactcattatctctctttctctctctctcagaggttctagaaagatccactccgaaatggacggtgcgccacaatccgccggtgccggaggtccggcgccgttccttctgaagacctacgacatggtggacgatgcctccaccaacgacatcgtttcgtggagctctaccaacaacagcttcgtcgtgtggaaccctcccgagttcgctcgcctccttctcccgacctatttcaagcacaacaacttctccagcttcatccgtcagctcaatacctacggatttcgaaaaatacatccagagcgatgggaatttgctaatgatgagtttctgaaagatcagaagcatcttcttaagaatatatatcgcaggaaacctatccacagtcatagtcatcctccaggttcacttgtagatccagaaagggcagcatttgaggaagaaatagacaaactttcccgtgagaaaacttcttttgaatccaatatttataacttcaaacaacatcagtcaacagcaaagcctaagctagaagattttctgcagcgattagatggtattgagcacaggcagaagcaattgctgaacttcttgagagggctcttcagaatccta

SEQ ID NO: 85735 - DNA, 139 bp, Glycine max
  Clone ID: PAT_MRT3847_48432C.1
atggtcttactgtgtcgtgacagtgcactgctcatcatcagcattaatattcatgctcaactggcgctcaaggtcaagtcatcacgtgcagagctgcggtggcctgggaaccatgatgcacatacccgtagatacgttc

SEQ ID NO: 85736 - DNA, 263 bp, Glycine max
  unsure (1)..(263): unsure at all n locations
  Clone ID: PAT_MRT3847_48433C.1
gacgacagatggggattcccaaaatgtctcattctccctttcctctgcgaagcctcgatcactctcacgcgctcctagagtcgctcctccaccgtctgtctctcgaacaaccacaacaccatcttcatcgcatggcaaacgcagcatctggtatggcagtccaggatgactgcaagtggaggtttttgggggtgagggcgcgttggacacaccgtttcagantgtgtaaggttgacgancggcagaagcaggtcattgtggag

SEQ ID NO: 85737 - DNA, 325 bp, Glycine max
  Clone ID: PAT_MRT3847_48434C.1
ggctcgagcatagtctttttcttcactgctttcacatacagatactatctggggaaggcctctgggactctataaacatgatgccctgagccaatcttgggttcaacctcatggtcagagctatgaatctttgcttaatgccttaccatgtcaccttttcagatcagggaaagccactgaccatggatagcaaggagcaagtcacaacccacgatgacatcatctatgaaatggcgaaagcgtctgaatatactgccaccttgggcaatcacaccttagaacccgtagacctcaaaacaccacgctatgacatggttactcagga

SEQ ID NO: 85738 - DNA, 316 bp, Glycine max
  unsure (1)..(316): unsure at all n locations
  Clone ID: PAT_MRT3847_48435C.1
atcattacaagaatctcaactacagccgcagctaccatgaaactagatgacagcttcaacaaccctcaatttcnccgccactaccttctattccctttctcccacccgctcaatcaatacattccacaccagctcttcaaatataaactccctacttactcacaagaaaccactgttaaccctctctactacaccctagtttctcaacttgcgtaggacatcaatcttgccctttaatactctatccactctaaaactaactacgatgctctcacgcgtaacatacaaacttcttatacctggtcatacatattta

SEQ ID NO: 85739 - DNA, 436 bp, Glycine max
  unsure (1)..(436): unsure at all n locations
  Clone ID: PAT_MRT3847_48436C.1
tttttggtttttttttttttttttttttttttttttttttaaggccaataccttttttacaaagttttttttaaaactaacctccaaacaaaccccaacaacatgtacaaattaacatttttggacccaaattggttctaatttgtcataaaaacttggattttgggggttaacagtttcttggtccttgaatgggggaatctttttttgattccctaccaaatagtttttgcttccaagctaacattcttttcttcattttccctcgccntttttttggggagagtttcataaggaaaacactataggtggtttgtgctaaacccctagctactattccttttttaaggatcaaatggggggtattctttggggggctcagcttcggaatattttactttaatttccctatttcatttaatctttgggaattttg

SEQ ID NO: 85740 - DNA, 921 bp, Glycine max
  Clone ID: PAT_MRT3847_48437C.1
atggcaatcaatctctatatgtttagttctctcatgaaatacaggattagaagcgatgagactaagaagagtgacattgataggggtttatgccaagcattatggggtgacagcaatgtaagtgatcagttctttgagctacagtgtggtgggaaatggattcaatctggtgcaggggcagaggaaggctggcggaataaaagtatcagttctgaatatatactcgccttaccgtcggagaggaggggttttagtcagagggagtgtggtggaggggtgatgcggaaatttaataagtggattgaagctttagaagtggaagatatcccttgtgtgcgaaggcaatttacgtggtacaggccaaattttgaagcaaaaagcaagctgggcagggtgtttgtctcagattggaagggaagtggagatggaacatgcttcaggaggatgattctcttaggaatggaattctggtttaaaattggatgtgggagtagggtgaatttctggactgatgaatgggataggcggatgtgggtggctgtgagtgaaaatctatacactgttagcagggcttatgcatggctgtatgaggcggtagttggatcttctgaagaggagatgctcaaaagggtgtggaaagttaaattcccaaataaggtaggtcatttcatatggaggctggaatcagcagggcatctattttttagctgtgaaaaggtaagagatatatggctggagtgttactcatggattggggttgcctcagtggttcaggtggtgccaagggaacattttctgcaacattggtactgtgaatgcggcagaattgatgggcagagatggatggtgttgtgggcttctgtaacatggtgtatttggcgtcataggaacaattacatctttaacaacaaggaattttga

SEQ ID NO: 85741 - DNA, 687 bp, Glycine max
  Clone ID: PAT_MRT3847_48438C.1
atgcctcaggggggggtgttgtgtatttggagtgatcagttctttgagctacagtgtggtgggaaatggattcaatctggtgcaggggcagaggaaggctggcggaataaaagccaaattttgaagcaaaaagcaagctgggcagggtgtttgtctcagattggaaggtgtttaccaaaatcccaaggaggcttgggagttagggatttggaattgtttaatatggcactgccagggaagtggagatggaacatgcttcaggaggatgattctcttaggaatggaattctgaagaaatttcttcaggttgaactgaataattatagtattcggccaagtgaacaggataggcggatgtgggtggctgtgagtgaaaatctatacactgttagcagggcttatgcatggctgtatgaggcggtagttggatcttctgaagaggagatgctcaaaagggtgtggaaagttaaattcccaaataaggtaagagatatatggctggagtgttactcatggattggggttgcctcagtggttcaggtggtgccaagggaacattttctgcaacattggtactgtgaatgcggcagaattgatgggcagagatggatggtgttgtgggcttctgtaacatggtgtatttggcgtcataggaacaattacatctttaacaacaaggaattttga

SEQ ID NO: 85742 - DNA, 270 bp, Glycine max
  Clone ID: PAT_MRT3847_48439C.1
ctcgaagttacataccggattacagcatcaaactcttcttcttcgatttccattgggaacgttactttttcttctactttctcttcattttcttcgcgcttcgatcttcagtcccaggacgttaacctctagcccacgagaagtacatcatggacaagatccaaggccgcggcgatgacgatgatgatgatgacgacgacaatcacattctcaggaccatgcggggaagaatcaactacataaggaggaacgatggaaaagacgaagacg

SEQ ID NO: 85743 - DNA, 352 bp, Glycine max
  Clone ID: PAT_MRT3847_4843C.1
agctccgacgcgttcgtacggttgcgatattactaccgactggagatactacggcacacaatcggacttccgtatcaaaactcttggacgtgaaaatttactcaaagctcatcttttaattaacgagcgtctagatttattacggcactcattcggacatccaagtaaaaactctttgacgttagaaattggccataagtaatgttatcaattgagagcgtcttaatatactacgggacacaattagacatctgattcaaaagtaatgagcggaaaacttgcctcagaactttagttttaaatcacaaacgtttaactctattacgggactcaatccgacatcccaataaaa

SEQ ID NO: 85744 - DNA, 404 bp, Glycine max
  Clone ID: PAT_MRT3847_48440C.1
aaaaataacttgtttgggacacaacggctccattaacatatgtaaacggtacatttagcatatggggtgcatatatttgtagtcaatcaaaaagatagggtggtgtgctaacaatgactacatcacattgaacctcgcgttcggatccccgaagcccttaaccaccgcccatggttctgtactatcatcactagagcactgacttgcttaaatttcagaggatcgaaaattcctatcctaaggaaccctccttgtggaaagtccttaatgacttgcaacccattgtgttacatcaaccgtgccagctcctttccacgatccaccaatgggtccacaccattgcctctcaccaataccctgcatcaatgctccctcatgttatccaataatttctcaaccccatt

SEQ ID NO: 85745 - DNA, 830 bp, Glycine max
  unsure (1)..(830): unsure at all n locations
  Clone ID: PAT_MRT3847_48441C.1
ctagccttctgcaagagaaggtatcctctgtttacgaaactgttcgttcttttaaaacctcctcctgatttttaactcttccatttgagcctactcttcttccttgccacaatgaccaaaattcaagccattcaaacctcaatatcaaaactcctaatccaccctttgctgtggagactaacaggctttgtctcaagcatagttggattcagctgttatgccctcagtccctctttccacaacatgttcggacactggaacgcgctgaagatcttcgtgtacactgtcgtaagctcacttttatctatcttcatgttcttcattaaaagatgtagctggggacatgggaggagtttcttgttgaaagcacaagtgggttttgtggtcttaacgctcacctctctgtggtctgttttcgaagaccgtagtgaagaagggaaggtggaaaatgcgcacggcaaaatgatgaacctcacttccagtggcgcatttgcattgatggctatgagcttgtcgcggcaactccaacttggattcgaagttggtgtgtttaacttcttggttggatgtttcttggtcacagtgatgaagatgagcttcaagttagctccagttgccgcattgttctgctatttgctcgtcaacattcgttccatttctgatttcatacttgaaatgcatgcacgtggtgccacacaccacgctggatacagtaatacagaatttgtctacatactttggtgcaagttccgaggatggttntgactactatggatatgatacagaagaaatagaaagaccgctgacagatgccatgtttgaaagtttaa

SEQ ID NO: 85746 - DNA, 554 bp, Glycine max
  Clone ID: PAT_MRT3847_48442C.1
ccacgcgtccgaaactatggagattacgttaagcgacaatgctctaaaaactttcgcgcgttgcatcacttgtctcgcacgcataggaaacgagctcgcaattcaagcctattcctcccagcttcttttccatactattaattcatcacgttctgcttatcaatgcatcgctctcaagcctggcttctttgatgcgtataacgtttccggcaattccgtgcaatgcagtgtgcttctgaaggctgtttgtgctgttctcaggacacctattacgaatattgaccatttgaccgtgagactgcctgatccagatgcttccaaactgcagtggattttggattgctataatggtatgagaaaaacctattggattacttgcaatgtagaacctgacatacaacacttgtcccttgataggcaaaaatttcccagcaactttgttgtgagccctcgagatctgagcaggttacttgctaattttcagtcatctcttcaagagatcactatcattgcaacagaaccttcttctctacctcttgatgcttcaaatgaaa

SEQ ID NO: 85747 - DNA, 345 bp, Glycine max
  Clone ID: PAT_MRT3847_48443C.1
ggacgtggctttcgtggtcgtggaaggggagggtacaatgggccccatgttgacatgcaagatggaggatacaaccaagatgtacctcaaggccgtggtacttgatccttattacttttgttcatttctgtggtagatacatgtgtgcaaggctatcagtgttaggcaatcagcttttgcagttgatattctgggaagtgtttgaactgtttgttttaagtaatggatgttacctcttgatattttggaagtaattaagctggttgtgggtccttactgtctagactctggagcaatttcatatattaccttaactttgtcatctatattaatcatagtacattt

SEQ ID NO: 85748 - DNA, 251 bp, Glycine max
  Clone ID: PAT_MRT3847_48444C.1
accactcgtccacccacacatccattattatttcatatatcacaatcccacctgctgccgtgtttaatattaatgaatgcccactacacacaaaacaccattccttataatactctcttccaacaacccaatcattctcacacccattcatctatcatatcttaatcttttccatcacacaatcaacacctcttacatttattctttaactcatacttcttaccctttttctcttaattaatctaaataat

SEQ ID NO: 85749 - DNA, 683 bp, Glycine max
  Clone ID: PAT_MRT3847_48445C.1
ccacgcgtccgctgtcgcagccacagaaataatacaggatttgtatgaagaattggaggaggagaggaatgcggcctcctcggctgcgaatgagaccatgacaatgatattgaggctgcagagggagaaggcagagcttcagctggaagcacgacagttcaagagatttgtggaagagaggacgtcgcacgatcagcaggagcttctagcattggaggaattgttgtataagagagagcaggcaattcactcgctcacatgtgaggtgcaggcttataagcacaggttgatgagttttggcatcagtgagtccgagggagaaggggatcagtatgaatttcccccttatgagtaccctcctttgagatgtaatgcaatgcatgcttcaacagatgataatgatgagatagacattgacaaatatgcatttggcgaaactcctaaggaccgtttgaagaacctggaaagtaggatatctcaaatggagagaagtcccacttatagtcagatggatggggaattcagtggaaaaaatattctagagaaggtgatagttggacagtctccaagacgggctaaacattccaggaaattttcctgtgactcgtcttcattgtgccctgagtatatgatggattctcctagctttaggaagatagatgaggatctttccaatttgaaga

SEQ ID NO: 85750 - DNA, 369 bp, Glycine max
  Clone ID: PAT_MRT3847_48446C.1
tcatgccattttttttatcggcattgatatatgcaatgacattagacacgttaattataattataacttgtatgagattctttctttcttttttcgtcaaatattgagaggcttattcacgaagcttttatcggagcagacttgtattttaagggagaattatgacaacatagcaatcattgcagtacatggtagcaataatttatcataatgttcgcagtatttaaaataatcaagaccaccaattttagtataactttttttaatctttttattcaacaaaaaaatttcatcagttctgttgcaagtgctacttattagcatcattctatttttttttcctacatattcttttaacattccgatata

SEQ ID NO: 85751 - DNA, 481 bp, Glycine max
  Clone ID: PAT_MRT3847_48447C.1
ctatattggtttcctttctggacatatgtctcttgtactttggagaactcccttacttgttctgttgcattccctggttccttgaaatctgcattcatgaggccttatcttggcctcttttctataaattattgctgaattattatattgattagaaactgtcataaagtctgagttcacactgctatactaccaatagggccatggaggcctcctatgatagggaatatccttctttttgatacatatacacctcacctgtttttgagagacttgaccatatgttatggacccttgatgcatttcctgctcgtggagctgtatctaactgaggcttccttgcctgagctggctattgatatgctgcaaacccctgatgtcgtctatgcacgacgggcttatagtctagcttatcatatcttatcccatgaactcacaattattatttcgtgaccttacgctcattattggttacatttgc

SEQ ID NO: 85752 - DNA, 111 bp, Glycine max
  Clone ID: PAT_MRT3847_48448C.1
tacttcaacacttttatcagttaacaatgccttgactcaaacgttccacaagtacacactgtaggatgacagcaaataaagactctcattttaagattctaacaccaccca

SEQ ID NO: 85753 - DNA, 158 bp, Glycine max
  Clone ID: PAT_MRT3847_48449C.1
ctcactattcggcttccgccctttttttttttttttaaattttctcatcttattagattcttattttccatggattactttcattgccgtcagctcgagtatgtctagagatagttttccatggaaaatctcatcttattagaatcatatctcgagcc

SEQ ID NO: 85754 - DNA, 413 bp, Glycine max
  unsure (1)..(413): unsure at all n locations
  Clone ID: PAT_MRT3847_4844C.1
ttgaaaattnnacaaaggggcacgctggctcactgagtgatggacacgcctaaataacactataaaaccatctgtatcggctcgtgctcatgaagattgaccgagcgcatcaccgtcctcatttcaattcctggctacgaatatttggaaggggcggatgatgcgtcaatcctctgctcccgcttgtgtctcctattttgacatgtgttatgattagtgtacactgccttctggagacatcctacgtgaaaggaaatgaagggaaaaagattaaaaacatgaagatangtaaatatgacaaagagatatctaggatcttttctactntattgaacaatgacaaacgtttgctaacattctgtctgagttttcttcccttcgactaatgccggtttatgggaccctactagcga

SEQ ID NO: 85755 - DNA, 451 bp, Glycine max
  Clone ID: PAT_MRT3847_48450C.1
acgagcgcggaagccttaattatttccatattattcaccataacacggctctttttatagctgacaacaccatttcctttatgacacgggaaaggcttgtcgtatgcacacgcatctgatgagggacaccgcacatttcagtcgcacattgagcaaacaaccaggattcagggcttaagcggccctaggggacttatatagagatgctgatggggaactctctgacagttaaaacattcgcactctaaagcttgaggactgcgaccggcatagtagatgtcccagagcggacgccgagagccttgtcggtgaggtcatgtataagatcgtgggcaatgttgtaatggtttgttccatacctatggaacgcatcatgcgggccgtctggaaacgttcaggcccatgacctcatcactatggccaaggttgacgctgatacaatgcatgcctt

SEQ ID NO: 85756 - DNA, 417 bp, Glycine max
  Clone ID: PAT_MRT3847_48451C.1
atcaaggaaaagaaatggtgtccctggaacctgtttctggtcattaaaagaatccttttccattttttttacataagtggaccgggtgaaacattcacaaatttccacatattagcggttcagcacaagggtccaactttagccacaatgaattggaggggtattccccctttttcaattaactgggggtctttatgaaaagggccctcttaccaaaacttggggggggcccaggtgtatttgctttcattcaagccatcaagttgatgactggtgactttttcaaactcggacttattgggggcctaatgttttcaactggtgaatatcctcgggtggaaaaaccgggggagaccaattcggtcctgtcaacttttcataaaaattttggaccccatttcttctttgatgggaagc

SEQ ID NO: 85757 - DNA, 963 bp, Glycine max
  unsure (1)..(963): unsure at all n locations
  Clone ID: PAT_MRT3847_48452C.1
gtatattgaaaannnaggtctacnnnagtaaaaaatgtataaatattcacaaaaaatataaatgaaatccaaaggagttaaggtaaaacagaacacaaatccatagagttcttaatgaaaatgatgaggtttttgtcttggtgttagaggctccgaagtgtccgaccagaaggagacaaaataaccaatcaattgaatgtgcaaaacatgaaagaattgaaccgaagtcatattcctcaaacaaaaaactaaataaaagaaaagtatacccacccttttcagaagttccccttttaaagaaaaataaagagtagcagcaatttcttctgccatattttactgtaagaccccagtacccagctagccaacctgcataacactattttctttctgctgaggcaattcagacacactaagtcacatggccatatcaatatcataactcttgaaattaaactcttgtcctagtaaaatatttattgtcttccatcataactcttgatcaatgtacaagcatacacaatatcaactctcaaaaagatgtttcattattctcagaaaaaacatcacttgtcactttcctcacagtttagttctgatatcatttgagtgagaaaaatgataaaagttatttcttcaaatgcccatccaaatccaatgagtaacacaatcattaaaatagaagaaaatttaaaataattttgtttactcgtaatttttataatctgcactaataaaaaatagaattgtataatatgcatgtaatcttaaagaaacatgactattaaaagaatatttttcttaaaaaaaacattaaaaatcattataaaaatgtattagtaatattatttaagataattattaagtaccacggtaaaaaaaatgtaaaattaagtatatctttgtgaaattatttttatacaataatttatatttttcgacagccatgaaaaggataggaag

SEQ ID NO: 85758 - DNA, 291 bp, Glycine max
  Clone ID: PAT_MRT3847_48453C.1
acacacaacatcatctcctgagatttttatgatggcagtaatcaatttgcacgtgctgtacttcaccagaaatccttccgaacaaattttcacaactttcttctaatttagcagagaaattaaaagaaaaaaggtgtgaggagatgagtaaatttttttatcataaacacagctttactcgttatattctgggaatgcatgtaaatcagagtatatatacctcaggccagaacttacaaggcttagcaacaaaactactctatttttggaaagagcataatatgacagtta

SEQ ID NO: 85759 - DNA, 140 bp, Glycine max
  Clone ID: PAT_MRT3847_48454C.1
ggctcgaggaactatacttataccacttatggtttaaacacatgacatcctcccatgtggtgggggcaagaatatctattattctactcccaactccacatcaagaactctaaaaacaccctcaccccccactctttctt

SEQ ID NO: 85760 - DNA, 272 bp, Glycine max
  Clone ID: PAT_MRT3847_48455C.1
ccgataaagaatactgtcttttcctcccaaattcattatctcaagactttcaaccattaactgcggaaccacacataccgacttcctgccaatctatattatccattctacttttccaattttacaaaaaaatatttgttttcatatgtcaactaaataaatttcactcttccccaacacacaacccgaagactgcaaaaacacttgcgttccccaaataaatactttttctcaaaattcccctttctccagctagttttttaacgaaaaac

SEQ ID NO: 85761 - DNA, 445 bp, Glycine max
  Clone ID: PAT_MRT3847_48456C.1
cccacccgtgcgtcatgggtgcagaaacttgatggggctgagggtgggctatagggataggagactgcatgacacatatggaggtatggctgaggcgctgtcactctaatgtggagaaagaggcttaaggagacatggatgtggggctggagtatacacctcagccatgccatgaacctgtgtatcataggctgacagcctgctcataggaggcctggttgaaagtgcaccaacatgggactgctttgaaagtgccatggaagatagactagctggaactataatactcgacaagcttgagacctcccgatctacttgaatgactgtgggagatagtctggggggacgtctgcagcctataaagtgggtgaggaagatcaacacccggagggacacgcgctgcagactagatggagtcaagccatacttcgtggagcggactggc

SEQ ID NO: 85762 - DNA, 586 bp, Glycine max
  Clone ID: PAT_MRT3847_48457C.1
aaaaaataaatactccttatttattcaataattaagacactccttatcactgagcataagaaatcactacaatgaaactatgtacacaggattccagcagacactgcctggtatgcgttctcaccaatttactattatatcatagtaattaatctacaaaacccgtaacaggccaattacttgcaatgacaaaatttacagaggttgaggaaagtcgtggacaggggaaagtatttcttttaaatggtcctgttatttgcctcaaacaaagtgcagctgtaagacttcacttgataagtaaacaaaccttctgtctgctcagggacaacttcaccactggtcgagaaaaagccgggaaatggaagagccgtgtcaactaaacggtaccatgacattccttctggaggcaagggtaaaactgcagtttctggatgatcagttgcattgaaagcaataaatagatccccggatatatcagaagatacagagctctctaagaactccgttacttcagccttcaaaatcattgccaggaacttgcaggatgggtcttcccatcttggggggatccccatcacttccatac

SEQ ID NO: 85763 - DNA, 157 bp, Glycine max
  Clone ID: PAT_MRT3847_48458C.1
ttattgcttacaccgagctctggtctacatttccgttgggtatggagaacaccccgttgccaacaaggacggcctaatatatcttgttatgattgcagagggtataaagagatctcagcttctggagatagattatgaattagtcgctggcgtcacg

SEQ ID NO: 85764 - DNA, 520 bp, Glycine max
  Clone ID: PAT_MRT3847_48459C.1
ttagtgtttataagtggattagatgacagagaaaagattctgttggaggagtacacatcagttttagtgaactataaggatgtcaggctgaagctcaatgatgtggaaaagaaaaaccgtgacagcatttttgagttgactcttcagctaagggaaatgaagaacgctctttccacaaaggataaagagatacaggttttacatcagaagctggacaatccagatgcaaatcctgatgaaagtccctacaccatcaccacagaatacaaatatacaccacatgaagcacttcttcgaaaagcaggtcaaggtgctaatgtgttggactccgaaaattcgccttcaaatttagatgcaaatgcagccgcatcccctttggcagaacaagttgaaactgaaagaacaggaaaaaatgccttctcatctgtgagaatgacactagagaagctcatggcacatcaagataagcgccaagacctttctaacttggaacagaagtttcgctcagacatcaacgact

SEQ ID NO: 85765 - DNA, 476 bp, Glycine max
  Clone ID: PAT_MRT3847_4845C.1
gttgtgaatactttcaacatacttgacttaaggatgaacctccaataaaccatataatgcgtattatggcgcgcaccctcctctggcatagaatattagagaatacccaggggcgatctaactgctggcagaggatgctgccacaaggattgttttaacgatgttggccgatgcattctatacattattaaattatgaatatgctgctaccaggtacctgttactaatgatccatagaaaaagtaaggggggaaaaacgcttaatttgtcaaaacggctaggcgcttgtaagggtacattgtgaaatccaaatcacaaactgtatgatcgcaaagacaggcatatatcttgtgcaccctccttattcggacagaccttagaaatgcctgtctccccagagaaggatgcaacgatgttgcctgccttaagggaccataggagcatcctactggcaggagacccactggctatgggct

SEQ ID NO: 85766 - DNA, 439 bp, Glycine max
  Clone ID: PAT_MRT3847_48460C.1
ggctcgagcgttcactctgtgttgggaggtggaaactcagggtgtgattcctgattccccttccttctagctcgttctatgctttaatgcatcagctatatctggtaacctgatattggcctcactgagtcaagatccgatcaaggtgtccttaacatttgctgctaattgcgtcaactgctatacacactgatgcagttattcacgataaccaacagatgaccaatctaaggatgtggcagaagatgttatgacggggggatatgatgtcgatggctaaggaagcgtcacgctacacgcctacgcgcaaatggactagcactgaatgcttaaggactggctatatctggtacacggcggaacaatagatgcagcagccttacaggcttggcacacttgccaagtggcacagctgatggcatgcgactgtcgatagctc

SEQ ID NO: 85767 - DNA, 463 bp, Glycine max
  Clone ID: PAT_MRT3847_48461C.1
attccgttccaggaaggtttcccgtcatcactgtatgacgtcctccttctttgggggggggggggggggctaataaatggatagataacggagatacgataaaggatacgaagacctcgggtggaaagagttacttaccggcaaattactataaatacggcgaggcaagaggggagggaagaagggcaatagaattatcgacacacctacagttgttgtaggggggagttgggtaaacatggcctaaggagtttaggtgcaagacatggcctgcctacgttaggtgtgggcgtagttaaagtatgggccgggccgccgaatagtaatacctacgtcagtaaggcaaaaatttacgtcgtagacgtacgaaattaacgtctggttatccgtagaatacgttacgtggttaagtgaccaacggcgcgtatgttaaagatcgattaaacaatgagagtactggttg

SEQ ID NO: 85768 - DNA, 778 bp, Glycine max
  unsure (1)..(778): unsure at all n locations
  Clone ID: PAT_MRT3847_48462C.1
gatgaagaaaggaaagcacttcactctgataagaaatcctcttgatatattggtaaaatgtctttcattgattgtttatctgtcactaaatcaacaagccagtttggcacgttgtttcacatctgcacatgtggtattggtccaaaaacatacagatctatcatctatctacatcaaaaaaggttggcttgtgaatagcttatgagcatcatgtttaagtaatgtatataaggtgctgcaaatatttcattaatttttgtgatattgggtggttatctatttctctggttactgcctgattattcttgtctacctcacctaattgtgtatgtccagccatcctttgataaggttgtccctccatctttctatgagttgggtttggcagagctggtttgtatatacaacgagcttcgtgaaattggaaaggcaccacctgttattgatgccgcagaacttcaacaagatcctgaggtattatctggggctttttgagtaagcttgattattatcagtgaacaaaccataaatacaaaatcacttttgtttagttgaaataagacgagatagaatgaactgaaagtttgtttggcagtcactatgaaaagggaatggtcattccctccaaaatggagggaatcataattccattatgtccatagttatctgaattacaattntcccttgtatttaatagaaattaaaaaaaatcctctatcacctcatccacaccatcacctttgcaccatcattatcatcaccactactttgctggtgc

SEQ ID NO: 85769 - DNA, 433 bp, Glycine max
  Clone ID: PAT_MRT3847_48463C.1
ataaagcacagaatagccgaagtgaacggcagagaaaagcatgaagcagagaaaggagagggaccagcggagaagaaccaacacggctaccctgagctctggtactcatggcgccaccagatactctctctcagctccctcggctaccgagccgacgctcccgaactccgaggctacggagacaccgaggcaccaccttcaatcagcagctacaaccgcttccacatagagggcgaactcgccgcgctcattgactctctgggcgtccaacaagtgtaccttgcggctcatgactggggagccatcataggtcggaaactatgcatgtcacgccctgacaaagaaaaggcctatgaacgcctcagtgacccaatcaggcccagaaaccacaaagggaagcccgatgatgccaagcggcccaaaaaggagaaga

SEQ ID NO: 85770 - DNA, 252 bp, Glycine max
  Clone ID: PAT_MRT3847_48464C.1
gaggcgagggggatgtggactgaagacacaccagatgcgctacaggcttggccggagagaggattctctacgtcgttgcgtgcgccaactggtagactacgatgaccgtagctggtacgaacactatgcgcagacaccatgggcgagaagtctggcattagcgattccgatgtgagcttccgcggatagtaaacggatgccgacgaggcggatgctgaggatggagggaggaatgttggtgcgacagttctt

SEQ ID NO: 85771 - DNA, 1208 bp, Glycine max
  unsure (1)..(1208): unsure at all n locations
  Clone ID: PAT_MRT3847_48465C.1
tcccgcggtcgcacccacgccgtccgtacggttgcgagaagacgacagaagggggtgtcaaataatcaccgtttctcagatgttttatttgcaacactgaaagcacgagcagttccgttttggtttgttcgtcgccgctgcgagagagtgccctagctacctctcgagcttgccacctacgcgactgaaaagtccatttgtttttttctctcgcttttcgattgtgaaacagcgtcgcaaggagaaagaaatggatgagggaaagcataaatcgaggaaagaaaatcatgaggtgaaagatggggattctaagaggagtcaccgcgatcgtgaccgtgatagaactggagaaaggggtaaggataaaaacgatgggaggcacagggataaggagaagagggatcgtgagtcccgaagacatgagagagagagtactgattctggagacaggtatgatagagacagggagaagctcaaagataaagataaggatgtggaccgagaaagaggtcgagacaagaaaagggaaagggacagggaaagggagaggactgacagagtaagagagaaagaaagagagagggaaagaaaagaggataaggagaggatcagagagagagaaagagaaaggaaggatcatgagagagagaaggaaaaggaaagagaaagggggaggaaagcacgagggagggagaagcgtagggaagttgatagtgattgcagtgatggtgaatctaaggagcgggatagaaagcggcataggaaagaggatggtgattacaagagagagagggaaaggagtgtcagcaagtcaagcagaaaatctgaggaacatgaaggaagcccaagaaaaaagagtggcggagatgattcagataccaaagatgaagagaaaaaacctacccgtgaagaggagatggaggatgaacaaaagaggttggatgaagaaatggaaaagcggaggaggagaattcagaatggaaagatttggtgggaagagagaaggttgaatcagcagtgaggaaattgatggtggagagtgaagaggcagaggaaatgacaacaagagccaaagagattgcagataaagcaagaagagctgtggaaaaaggtggaacatcttacgctgatgcggaggcattgattcangagcttatagctcgcagattggcgagacatgattacattataagagaaaaaagcttggt

SEQ ID NO: 85772 - DNA, 474 bp, Glycine max
  Clone ID: PAT_MRT3847_48466C.1
gaaaaaattcaggattgaagtttttgatatatgggaggacaggttggataggggggttgttgggaaagctttgcgaagaatagagaattgattgggaatatgggagaggaagattggaagataggaaatcacttatggaggatatgagaagggtaatgcccacccatgtgttgagtgcagctggtgttactggaaggcctaatgttgattggtgtgaatcacacaaggttgaaactataaggactaatgtagtgggaactttaactctggctgatgtttgcaaggaacatggcttatatatgatgaattttgcaactggctgcatatttgagtatgataaagagcatcctctaagatcaggcattgtgttcaaggaggaggacaaaccaaatttcattggttccttctattcaaagaccaacgccatggtggaggaccttctaaaaaactatgacaatgtctgcacattgagag

SEQ ID NO: 85773 - DNA, 409 bp, Glycine max
  unsure (1)..(409): unsure at all n locations
  Clone ID: PAT_MRT3847_48467C.1
tcgcaattatagatcattctaggtttaaattttgaactaattattataaaaatcgattatgttcgaatatataacaattcataactagattatagtatacgttatgagtgtattttaattaagttcaaataatattttcatatagcatacatttgagggacgatcctttaatcagttgttcaaattatgcagggaatcattccaatggagccatgtggcgtgggatactgnattctgtcatcggttcaagaacctcttgctgtggatttcactgcttggattgtgtctaggaaagaaagcctttgagaccgaacttttattccaaagctacctgatatgaaggtggcaggtctcaccaaaaaaagaccatccaatatacttgtttttcccttaatggcactacctagca

SEQ ID NO: 85774 - DNA, 353 bp, Glycine max
  Clone ID: PAT_MRT3847_48468C.1
catatgtttaggtgtatgttgataagagcaccaacagtgatgagggtaagggaatgtcatgagacatcattgtactccatctactctgttttgaaatattgtgactgtggtagcatttgccatgtatgttattgtccctcgacatttgagtttaaatgctcatgtttgaggatggaatcttttggcctaccatgtgatcacatagtcacattgttggtagagcttgacttttctgaaattcctaaatgtttagtgttggattggtggaaaaaaaagtgcaaaaaagtctattcgtggaagatatgtagatagttcaactttctgggattcaaatcttttggcaaagcatgcct

SEQ ID NO: 85775 - DNA, 211 bp, Glycine max
  unsure (1)..(211): unsure at all n locations
  Clone ID: PAT_MRT3847_48469C.1
tgggctagggaagcccgccgagtacaagcagttcgagttggcatcgctggaccaaaaccttgnnaagaacgtggctggggacatcattggcaccaacaccgacctcgcggacgtgaaccccaccccactncacccctacaccaacgcgcancggcctgccaggccccgccagagncacctcactcacacgatgncccccatgctcgncacg

SEQ ID NO: 85776 - DNA, 357 bp, Glycine max
  Clone ID: PAT_MRT3847_4846C.1
ggcaaaaaccattgcattcacatgaattacttggatttgtacaactagaaacttattccaaaattagcttataataagtatgcatgatatttacaatgccttggtacagcattcagctgcgtcttttgcaaatttacaaagctccgttagtttaacaatttcgcaacatttgagcaatttacattcagcccaacttccataaggcaatgataaggtttatatttcctataacatagttctggttgaaaatcaagccattagttcaaaaacagttacgcctgtgggtgcatgtgttttataaaaatgcagagttttccccaaactcctcctaataacctgaagctgaactattttatt

SEQ ID NO: 85777 - DNA, 530 bp, Glycine max
  Clone ID: PAT_MRT3847_48470C.1
ttttttttttttttttttatttttttttttttttttttttttgtttttattttttttttttttttttttttttttttgggccaaaaaccaaatatggggggaccttttattattccccaaaaaaaaaagggggaccccttttaaagcccccaaagggtacaatcccctgctttattgaaacaaaaacctcgaaaaaaaaccctaatattacccccaaaattggacccccccccaaaaaaaaaaccccaaatttctaacggggaaaaaactccaaatggaaaaggggtgtgggggcaaaaaaaaaaaaacccatggttttttgcttggaaaaaaattttggaaacaaaaaaggccctgggaacggccggaaattttttcaatatcccaactttaaattttcttacccggaaaaaaccttgaaatgttcaaaagcttcggccctcaaaaaatttatagcccaacaaatcttcacggaggggggattaaaaaacgctgggcccttaaaaaccgggaaaaaaaagaggttcccc

SEQ ID NO: 85778 - DNA, 212 bp, Glycine max
  Clone ID: PAT_MRT3847_48471C.1
aattgaaaattgcaattccaaattagcacttttatttggtaggttgagcactacgaaaaagcccctaacataaaatccccgagaccaagggaaggggctactaaaaacccgcacaaacatgcttgtttccgtgccatattatccgagtaggtgaagataccactgttttatcaaaaaagagattaccgccctttatggaactaatacaagag

SEQ ID NO: 85779 - DNA, 310 bp, Glycine max
  unsure (1)..(310): unsure at all n locations
  Clone ID: PAT_MRT3847_48472C.1
cccacgccccggaccacgcaagcgcaagagggaggcagaaacaggaagcacacaacgaagggggccgggagacccgncgcgacaagngccgcggcgcaacaaagccangcgnccgaggcgaacccncnccgacagaacacaaaacagggaaccaacaccccggaggggaaacgcgcaagnnggaggcnngcngnggaagcacacaacancnnnggcnnngagaccanncccgaagagggcgnngaagcaacaaaggaanacanccanggcgaacaananagancagaccccaaaacagnnaaccaacaag

SEQ ID NO: 85780 - DNA, 723 bp, Glycine max
  Clone ID: PAT_MRT3847_48473C.1
atatctctcgaatcccccaatacctacgtagagagctcttcctcactctcctttgcatggctcgcagcagcacgtcctctcgacgacgagactcacctcaacatcgtggtgattggccatgtcgactctggcaagtcgaccaccactggccatctgatctacaagcttggaggtatcgacaagcgtgtgatcgagaggttcgagaaggaagccgctgagatgaacaagaggtccttcaagtacgcctgggtgcttgacaagctgaaggccgagcgcgagaggggtatcaccattgatattgccctgtggaagtttgagaccaccaagtactactgcaccgtcattgatgcccctggtcaccgtgacttcatcaagaacatgatcaccggtacctcccaggctgactgtgctgtgctcatcatcgactccaccactggtggttttgaggctggtatctcgaaggacggccagacccgtgagcacgccctccttgctttcactcttggagtgaagcagatgatctgctgctgcaacaagatggatgccaccactcccaagtactcgaaggcccgttatgaggaaatcgtcaaggaagtctcttcgtacctgaagaaggtcggctacaacccctgagaaggttcccttcgttccccatctctgggtttgagggtgacaacatgattgagaggtccaccaaccttgactggtacaagggccctaccc

SEQ ID NO: 85781 - DNA, 272 bp, Glycine max
  unsure (1)..(272): unsure at all n locations
  Clone ID: PAT_MRT3847_48474C.1
ccgttcgagctcattaattgcaagaatggcacttcgttngttggtgatgtcactttctgttctacctcatcttggtcttgcgagagaaagccatgccagagacgaagattttcggcatgctgtttggccaaacactcccattccaagttcattgcgagctcttctaaagcctggccctgcaagtgttgaaatcgctgatcatcctatggcaattgaagaccacacagtatccgaaaaccttcttctatacagatgacttcattcaggcaaac

SEQ ID NO: 85782 - DNA, 113 bp, Glycine max
  unsure (1)..(113): unsure at all n locations
  Clone ID: PAT_MRT3847_48475C.1
gagttgtgtcacaccggcgaggggacgagatncatctggattcaaatcgancttacggtcgacaagnngggaacagtggaggaacgtgcgcggactgtgaattctgancatta

SEQ ID NO: 85783 - DNA, 568 bp, Glycine max
  unsure (1)..(568): unsure at all n locations
  Clone ID: PAT_MRT3847_48476C.1
ggctcgagggcttagctaaaatggaagttcaatcagataaaatatggatggacaatggaccctctcgccgggccaaatggtggtattcaacattccacactgtgacagccatgataggtgctggtgttctaagcctgcccaatgccatggcatatctaagatggggtccagggatcttgatgttgttgttatcatggtgcctgaccttaaacacaatgtggcaaatgatccagttacatgagtgtgttcctggaactcgttttgatcgctaccttgatcttggtagacatgcttttggaccaaaacttggaccatggattgtactcccccagcagctaatagttcaggttggatgtgacattgtctacatggttactggggggaagtgcctaaagaagttcatggagatagcatgcactgattgcacacaactaaagcagtcttactggattctgatctttggtgccatccatttctttctgtctcagcttcccaatttcaattctgttgccggngtttctttagctgcagctgtgatgtcattaagctattcaactatagcctggct

SEQ ID NO: 85784 - DNA, 324 bp, Glycine max
  Clone ID: PAT_MRT3847_48477C.1
acgaggcaacttttgttaccttagcgccgccacaccaacatgccagccttcgccatttccaacaacgccgccgccgccacgtggaaaattccccaattcaacacttgtcactttcctcacaccccatccatcgttctccaccattctctcctcaacacccgcgctttcaggatccactgtgtcccccaagaacccctcccctcattgcaacaaaccaaacacgatcaaccctcttccagtggcgtgcggagtacggtgacgctacgggatggtggcggcggcggcggcggcggagacggagacggaggtcaaggaggaggagat

SEQ ID NO: 85785 - DNA, 437 bp, Glycine max
  Clone ID: PAT_MRT3847_48478C.1
aattcggctcgagcctctctgcaccaaagcaactcacagtaatactactctcaagtgcgctctctatctccactaaacaaaacaaaaaactctgaacaaaaacctccacaattcacacactccctgacacactacactaaacacagtaaaacacatcatttttcacctccatcaagtcattctctctctctctttttagagagataatctcgtcatgaaatccaaaactggcggaaacggtctcactctcactctcacaaacgagaccgccgtcgccgcatcggcactcgggaggtccgcggtgccggaggcgggtgcggccggcgaaggacttggccgagagccggcggctggtggccggcatcatggcgcggcggagcctccgatacttcttcctgctgccgctggtgtacatctcggggctgctgatgtgcgtg

SEQ ID NO: 85786 - DNA, 434 bp, Glycine max
  Clone ID: PAT_MRT3847_48479C.1
atttgggtttggttttttttttttttcttttccaaccaaaaaatggtaaccttaaggaatttggaaatggaaagattgtgtcacatcctaactaacaagttaattacagttcattgcacccaataacacacttgtccattttgggacaaactctgcaggcaaagaggaaagcgggcttttaaagctcctactcaaatacacttttaatcatattatcattcatgaaacggtgcaatgtaaagttacaaacttgccagaactttttactgaaggcctgaggggattttttcttttcaattttggtgttatattctttgaaaaacaaaccggggacctttggaacccaatcctaaccctggtttttttcatcaacaaaaggggttctggggttaactttactttgggccccatacttggacctgccatgatcctcc

SEQ ID NO: 85787 - DNA, 426 bp, Glycine max
  Clone ID: PAT_MRT3847_4847C.1
acgagggaattggcggggatttcctacccctcgctcgcatcattgagcttacctagctattacctttgcttgtcttcactcgccatatttttatttttcagatgtcggtgtctattttaatttaatcgcatgcatttattttttatgatggaaatgaagtggctatgcctatgcctaatcattttttttttaatcagcaatttatatatatatatagaagtgcacaatgggtgctcacctcccgaatacaaaggatagatgtccaacttagcatcagcaatggttaccgcatattaatataccataaccaaagtactttacattaacccttcctaaaacatatccccccgccactaaacagcacacaatccaaaaagctattgtatccaatggcattacatgcatcagtgcacaacaacaatagca

SEQ ID NO: 85788 - DNA, 384 bp, Glycine max
  Clone ID: PAT_MRT3847_48480C.1
ccgttctcgagttcggagtatttgaagataacaggggggaactctgtcaaggagcaggaaacctctaattcgattgttcctggcagcaacaattacgtgacctacttgatcaccacaaagactaacatttcggaatttggcgcctgaggcgccgactttgcggtccggcggcggttccccgacttggtgacgctctccgaccggatggcggaggcgtaccgtgggttcttcattcccccgaggccggacaagagcgtggtggagagccaggtgatgcagaagcaggagttcgtggagcagagaagaatggcgctggagaagtacctgcggcggctcgcagcgcattcggtgatcaggaagagcgaccagttcagggtgttttgc

SEQ ID NO: 85789 - DNA, 335 bp, Glycine max
  Clone ID: PAT_MRT3847_48481C.1
attcggctcgaggaaaaacccgggagtaccttctgctcgtgcatctaaatattttttttagagggcgatgccaacgacgcgaaactctcgtctaatctctacactgtgaatgctggcactcacgctgaggcacctgccggggcaggctgaggtactcctacaccatggtagaatacgcactgcgacgggcacagcagcagcgcgccccttgtcactctgatataggcctggaaaatcgataaccctcaccccgctatcatgagggcctcgttccactccatcgactgactcactgagaaggatgccttccccgaactgaaccagaccgaccagca

SEQ ID NO: 85790 - DNA, 354 bp, Glycine max
  Clone ID: PAT_MRT3847_48482C.1
attaaaaaaaaccttttggggtttttatctttttcccaacaggggcgttttttaatttccttttttttggaaattttttggccgaaaaattcttgggtttttttttgtgaaaaattttaacaaaaaaatccggcatatccaccttttttgtcctaccctgttggaaaaaaaccccaaaaatggccggttaaaaagcccccattaaaaaaacttttttctttgggttacaataaaaagggcttttagtttgttccaatcctgaccaaacaaaatttgccagtggtcacactttaatgatggcggtttataaattaatttcggtttcccccaaagggtttttattaacattttttt

SEQ ID NO: 85791 - DNA, 895 bp, Glycine max
  Clone ID: PAT_MRT3847_48483C.1
cggacgcgtggggttatcttgtggcatgccacatctaaagcaactgatgaataaagatgtgatgtaaaaatggaaaatttaaggtatctttgaaagtatttttcatgcatacagttgtactacccactacaaaagtattttattttagcaattaaacatatttatcctagtgacacagcaaacaagaaagtcgaaacttcctggaaatttccttggcaaaatctgattgggaacattttgacactacaaagacatcaataatagatttcatagaaatcaacagccatcagtgatcagagacaatgagacaaatagtaagaaataaaaataagaaggaagttggtatttactactactatttaaaaaatattccaaatacattcactttttatttatttaaattttattttatttttccattcctcttttcattttatcacatcatttttctactagttagcaacctttgaaaatgacactcgtgtcctgtatctgtctgaaagttatgggcaattaatatacatttttatagcttaatatacgtttaaaaactcttataatataactttttggatacaaaagttattttagtttgttgttaaaagtaccttaaaaatgcatactgttaatagtgaaaattagtggtttatggaaaatttgtgaaattatataaacgtgccttatattttattataaaataatatgaatttactgttaattagaacatcggattgtatataaatgtaaactttctacacaaaaattcatttgctaataaatcttaaacttaattttacaagttttataatacttgaaaaataatatattatttatgatataaatgttcaaaacaatgctaaacaaggtcatatcatttactccagaataagtaatg

SEQ ID NO: 85792 - DNA, 486 bp, Glycine max
  Clone ID: PAT_MRT3847_48484C.1
ccacgcgtccggtcttactggacgatcgctatccgttttattagactcaatctctcctacatagaaagaggggatgatacgtggcgtggagtaccagatcgattggtcaacgagaccgacgtaagacagacatagcgacagggataaccctgttgcttccaatcagaccggctttgccatgaacggaccaacccggagctgccctagaaagtaacaggtcattacgggagcagagcatgcacaatcgagcaatcaatctgataaaagggacctcggctcgtctagaaatctataaaaacgaaaagcccggggagaaccacaagcaaaaggagagaagaaaagcagaaaaaggaaggggggaggagactcgcctcaatacttcccactggacgagaggcgcacctaacccagctacgcactcataaatcacggtgtctcagatgactcgcactgatagaccactattgcattggaattaggcgccca

SEQ ID NO: 85793 - DNA, 282 bp, Glycine max
  Clone ID: PAT_MRT3847_48485C.1
tatgagttgtaaatctcttaacagtgtctttgattctcacattaaaaaaaataataatatatatctaattatttgtgtatatttttatccgatatcatccttaactaagtatgcatatttaattttacataaaataattataataaaagttgggataaaaattttaattatataaaaattacaatttatttttatcacttagttgatgaactatttactcaggagcaaatatataagtcggttcctaaaaatggcaatttacaaggtcatatacagttatta

SEQ ID NO: 85794 - DNA, 250 bp, Glycine max
  Clone ID: PAT_MRT3847_48486C.1
ggattggtttggtcgacccacgtttcttttcggccgcgcgaagacgacaggagggcgcggtcattgtaaatcactggcgattcacaacacagcgtaagcattcagcccccctcttattaccaaaccatagggtacccaccgcacacgagaccgtgaaagacgctgatagagaagaagaaggtggcggatgcagctcccaaacaagtggtccgattctcaggagcggcgaagctagtcgcaaccaggcctg

SEQ ID NO: 85795 - DNA, 388 bp, Glycine max
  Clone ID: PAT_MRT3847_48487C.1
ggaccataataacctcaacgccagcaccggcggctggcagttacccgaaactctccaggagtcaacgcagttgaccaatttctcttgtatgggctgcaacctcaccggcccaatacctcaatttctcggctccatgaactcactgtcgtttttgaagctctctaacaactacttaacgggtgacattccccggagtttaaacgactctgcgttgcaggttctgtggctgaacaaccagcagggagagcgtctcagtgggggaattgatgttgtggcttctatggtttctctcacgagtttgtggcttcacggaaacgctttcactgggacgatccccgagaacattggggctttgagctctttgaaggagctcaaccttaatgggaac

SEQ ID NO: 85796 - DNA, 782 bp, Glycine max
  Clone ID: PAT_MRT3847_48488C.1
ccgggaaaatgagggggggtcggatggctacccatgagtttaatttttataggcatgcctgttacaaactcacaactagtattcattcaggaacggatgttgcaaatacaacatgtggaattatttgtttaggaaacatcacaatgatcttgcctcagtcaaattctagcatatttggattttagttggaaaccatgaaaagttatcataggcaaatttttaccaaaccatagcctggatcttttccaactacaatccagaaacacgaatatgcagtagttgtaagcacttcctcttcatccctcagagcccagaggcaaaggtccttcacttaccagtcagttaccacatttgacctcttcttgctgtgctcatggaatggtgggaataaacatttacttagttattcaattgttgtgcatgcacttgattatgaaatgatagtgtgccctttgtacttagcacatgcctcagaccagtgtgcagttgcatttcgcacaccatcattaggatcattcccaagtagatgctttggccttagagccacaaaggatgtgaggtactctcttatctttgcatgggctgttttaaactatgcgcaagctttttatgactgagctaagtgcaagattttaggtagataaaagtgtgtggtggaagtcatctttttcctgtttttttggttgagtgcaaattttccctactccttaagcaaacagtggttccttaaaacatattatctaaaactgcattcttccagctaagaggaaagtgatttatca

SEQ ID NO: 85797 - DNA, 269 bp, Glycine max
  unsure (1)..(269): unsure at all n locations
  Clone ID: PAT_MRT3847_48489C.1
ggaattgggatggaggtttttatgtatgatgagattggatttaatggggaaaagtgaaggtttggagtcatgattaagaaaggagatggaggtgatgtgtataaaggagtcgnaaaggattagaggggtgaagatgttaatgttgataagttttttgctggtttagttggaaataagtgagcactgagtggtggcagtgggaaggttgtggagagtggtgatgatgatgatatatttgtatagtatactgacgatggaggtggtggggt

SEQ ID NO: 85798 - DNA, 206 bp, Glycine max
  Clone ID: PAT_MRT3847_4848C.1
ggagacgcagaaggagtagcggcattaagagtgcggatcgtcgtgaggacactgacagggtggactataatcctcgacgacgttagcagcggcaccatcgacaatgtcacggccaagattcgagacaaggttcgcatacctccggatcagcagcggttgcattttcgccggaaagcagcttgaagatggaaggatcctggccgctt

SEQ ID NO: 85799 - DNA, 277 bp, Glycine max
  unsure (1)..(277): unsure at all n locations
  Clone ID: PAT_MRT3847_48490C.1
cttcaacagtgacaactgtgtaatgccaccacctaattcttatcctttgttacctaatacttntggtggggcaataatttgcggggtgtctttactaatagcatcttttgtagccttggtattttatgctcacgcataaagattcaatctctggtacacttaacgcttgtatataaaatttttatgcaaaccagttttgactcatctgttatctcaatctcgtatttcaaggatattggaggattacatccaacattagatcacgtgtcccataatt

SEQ ID NO: 85800 - DNA, 495 bp, Glycine max
  Clone ID: PAT_MRT3847_48491C.1
atgatgaacttcgacggcttccagaaggcaatcgaggagcgcttagagggaattcccgttgcttccgaggacaaggacgacgccgaggctctcctcagccaggttacgcttattgacccccacgcgcgccagggctctaaagttgtccccgttgctttgaacaaggtgtttcagctcaaggtgaacagcgttgcttttagattgatacctgagttctctcaagtcaaaaatgccctcaaagagagggaaaaatctggcttcgcttccagtggcttttctggtgttccagttttccaggaggacttagaaaatacacttaaatcggcagcccgtgagcagaacaaattaaattccactatgagaaaaggggatatccaggttgccactctagaggatgtaataaaagaaatgaaggaaaattctacatcgaactgggatgatgttatttttatacctcctggttttgatgtttcagacgactcaaatgagcagtag

SEQ ID NO: 85801 - DNA, 585 bp, Glycine max
  Clone ID: PAT_MRT3847_48492C.1
gcaatcgaggagcgcttagagggaattcccgttgcttccgaggagtttctcttggtctcgggctcttcctcttctgcttcagcaaggacgacgccgaggctctcctcagccaggttacgcttattgacccccacgcgcgccagggctctaaagttgtccccgttgctttgaacaaggtgtttcagctcaaggtgaaacagcgttgcttttagattgatacctgagttctctcaagtcaaaaatgccctcaaagtgagtctttttcttataattgagagggaaaaatctggcttcgcttccagtggcttttctggtgttccagttttccagtccagaaatctgatattgaagagccaaagtaagagatttcgtccacttttctccagaaaggaggacttagaaaatacacttaaatcggcagcccgtgagcagaacaaattaaattccactatgagaaaaggggatatccaggttgccactctagaggatgtaataaaagaaatgaaggaaaattctacatcgaactgggatgatgttatttttatacctcctggttttgatgtttcagacgacctcaaatgagca

SEQ ID NO: 85802 - DNA, 1631 bp, Glycine max
  Clone ID: PAT_MRT3847_48493C.1
aggctttgaagtctctatcttcttctctgcactctagaaagaaacatgatgaacttcggcgacttccagaaggtaatctgtctctgcactctacaaagaaaagaaacatgatgaactttgacggcttccagaaggctctggcggagtttcagggccgctgctccacgctgctgggcagcctgacccgtctccagcccaaccgcgcgaggccaccatgggctcggatagcccagccctggggaggcaggcccatggccatgacggtggaggcaatcgaggagcgcttagagggaattcccgtttacgccctcagcaacgcttccgaggagtttctcttggtctcgggctcttcctccgggaaaaaccttggcctcttctgcttcaacaaggacgacgccgaggctctcctcaaccaggttacgcttatcgacccccacgctcgccagggctccaaagttgtccccgttgctttgaacaaggtgtttcagctcaaggtgaacggcgttgcgtttagattgatacctgagttctctcaagtaaagaatgccctgcaagagagggaaaaatctggctttgcttccagtggcttttctggtgttccagttttccagtccagaagtctgatattgaagagccaaaataagagatttcgtccacttttcttcagaaaggaggacttggaaaatacacttaaatcggcagcccgtgagcagaacaaattaaatcccactatgagaaaaggagatatccaggttgccactctagaggatgtaataaaagaaatgaaggaaaattctacatcgaactgggatgatgttatttttatacctcctggatttgatgtttcagacgactccaatgagcagtagggcaggatgatgattaaattcatgacaccttttatgcttgtggtattagcttttaatccatagcacatggcaaacaattatttaggttttgtgcatacgacaaacttctgactgcagactcttctatcctgtcttcaatatgaaacgttattggaaagtttgggttttgcattttctaataaagaaataaatatcaaaaacgttagatcagccacccattcacaaattcataaaccacgattcctttcttcaaagttcaaacctgtgacttcggaatcatggatgccttacgcctgtcactaaccatatgtcagcaaatctcctttttcagttttgcatctttgctttcattcataagatgtgaacataaactgtgctaaacctcctttctctgcttttattgactggtgagtgcacagccatttacaccatgagttctatttatatcatgatgtactttatatcaaatcaaggatgcatatattcttatttgctcactttagagaggttagaaagcttggacatgataagaggcacctatacagtacaacttgaaatgagtatcacacattaaaaattgtgggcatgtaacacaaattaagtatcaagtataccattaaaccaaccaacccccctcctccctcaaaacagagaattggtctcttacagttagcatgagtctttgtacccataataaaaggttatcatgtttctagtttttgtggcattcccatatgtatcggtaaaaaatttaaatataaa

SEQ ID NO: 85803 - DNA, 428 bp, Glycine max
  Clone ID: PAT_MRT3847_48494C.1
ttaatcggtcacaaatagatgaattatattacgacactttctttgcacatatatagctcaccaattgatgtgcattaaagaccaggtcttacgattcatctcataagtcaaaattacatagatcacccactgtgtcacctattcagcgagcaatgcatatatgagaatttgttggtggggggcttcatatgacaccaaccagtagatagaaatgggcgtacaagctgtagatgcaaaaaaacatgtgattgcctttgcaacacgccaattcacttaccatccttcttaagaagaatcaggcaaaattcttttcatgcagataactttgcccctgccctcacgtattccggaccttcatctttcgagtgatgtttccttctttgatcttcaagttatggtttggtcgccaatagcttcagatattgctt

SEQ ID NO: 85804 - DNA, 202 bp, Glycine max
  Clone ID: PAT_MRT3847_48495C.1
ttgcaaacaagatatcctgttgggtctcaaacgcagtaacagcattgctttcagctaaaaggaaacccccaaagatgagacagagatccaagtaatgcgttaaacctaatttgcttacgaagcttttacaaatgcttatcttaacaaatatgacacccagttcatagactgactagtctctccttattgatgctttgataca

SEQ ID NO: 85805 - DNA, 762 bp, Glycine max
  Clone ID: PAT_MRT3847_48496C.1
atcgcgaacatcccaatgaccaaaaatcctccaatatatatatataacttccccgttctctcatactcaacagaaaattgaaaaccaacataacaatgtcgttgattccaagtttcttcggcaccgggcgaagaaccaacgtcttcgaccccttctccctcgacgtgtgggacccattccatggcttccccggcaccaccgccctctccgctccgcgctccgagacggcggccttcgccaacacgcgcatcgactggaaggagacggcggaggcgcacgtgttcaaggcagacctgccggggctgaagaaggaagaggtgaaggtggagatcgaggaggagggaagggtgctgcagataagcggacagagaacaaaggagaaggaggacaagaacgacacgtggcaccgcctcgaacgctccagcggcagctttctccgccgcttccgcctgccggagaacgcgaaactcgatcaggtgaaggccggcatggagaacggagtgctcactgtcactgttcccaaggtggatgtcaagaagcccgatgtcaagcccgttcagatcactgaaggctaagttgtgttctcaatcaatcaaaattcatgtgtctcaataattgagtttgaggtgtgttgtgtgagatattattaccatgtattgttatagtgtggtgttatagtgtggtgaattgttggtcgtgttgtgtaactttttttaataataaagaatattgatatatgaatatttttattttaaatactct

SEQ ID NO: 85806 - DNA, 316 bp, Glycine max
  Clone ID: PAT_MRT3847_48497C.1
agatgtcagaaaaggagacagaggacttcagacctcgacttgcttatagaggggttgggaaaaacatcttcaatcccttgctacccatgtatgtaaaattataaataatggcttgccctcaacgcccaatacgctacatgtagcataaggtctcattcaactccttaaataatttaatatggaaatctttttaaaactaaagccctccattactgatcatgatgccaaagcactctgcgttatcgttccaccaaagcataatgttccgaatttacttatgaaaccttaagaaactcatgatacttcttcactttag

SEQ ID NO: 85807 - DNA, 283 bp, Glycine max
  Clone ID: PAT_MRT3847_48498C.1
acggctgcgagaagacgacagaagggggtgggaaaatgagtttgtgagaaagaaagggaaggatatttagaagggacatttaattcccttcttgttgtatccctaccacggccaattgatctcgcggtgagggacaataataattaaaaatcacacgaagaagcaaaaatcttaagtacattcaacgcataatacacatgcacgtgggttttagccaccaccaaggtgatcattgcagaacaacaacacagagactcaatattatcgtatgccatatgttcac

SEQ ID NO: 85808 - DNA, 210 bp, Glycine max
  Clone ID: PAT_MRT3847_48499C.1
cgcgatacgacgcacctgatgttcgcatgttgtccaaggatcggaatttgtcacaaagatgtttggagactccaatgtggaatcccttctgcatttccgctcacagttatttgcaatagcatttttaatgaaatgctcactagacatagctacgaaaaattactgcgccaggctaaagctcacagtacgttttaacaatccttcaaaaat

SEQ ID NO: 85809 - DNA, 238 bp, Glycine max
  Clone ID: PAT_MRT3847_4849C.1
tcggaagacgacagaaaggggagctttagattcttttcccctagattcagccacagttggataaaaaaaaaaagtttttcgaaaggtcacttccgaggcattctgctcgtaagtccacaggaggtaaggcacctaggtgacagctcgcaaccagggctgaacgtaagtctgcagccaattgtggtgaccttagaacccaaatcgttaacggcctggtaccgttgctcttcgtgaaatt

SEQ ID NO: 85810 - DNA, 486 bp, Glycine max
  Clone ID: PAT_MRT3847_484C.1
cacaggcgcaacttggaataccaaaaccaaaaaaagcctcaaattttgagtgagtgagttctttctttttccttctgtctctggggtttcctgcttttgcggcttggggccgcctttgccgttcggttctgccttttttctgcgccaattaatggcgcgcattaaagcgatccatttttttgcgaagaaagttgaagaaaaaaatggaaacaatgttgcctccgaaccaagcacaggaagcaatagtcacaacaagccttaacgagacagagagcgaagttggtatgagggaagaagagaaggagttgcaacaacaagatcactccatgttcaacatcaagagcttcctctggcatggaggctctgttcgggacgcatggttcagctgtgcttcaaatcaagtggctcaagtgctgttgacactgccctattctttctctcaactgggcatgctatcaggaatcttgcttcagattttctatggaa

SEQ ID NO: 85811 - DNA, 1411 bp, Glycine max
  Clone ID: PAT_MRT3847_48500C.1
cccgagccgcgcaacaacactcactttctcaccatcattgcagatagcacaatttcagacgttgagacagcaacagctggcaaagcagcaaaactcggtgtggaatttacagaagcaatgtggtggggtttactctcagaggcaacaacagaacaaccaaatggatcacaatagagggaggaacaatgatgttaacaacagtgttggtggaagaaatgttaggcctttgggtttgtctgcatctgcatggcctcctctgcagcacgcgaagcagcagaaccagaattatggttctggcatgagggctgtgtttctcggaaacccttctgggagaagagaatgtgctggaaccggtgttttcctccctcggcgagttgataccccagagccacgaaagaagcaagcttgttcaactgtgctggttccgaccagagtggcacaggccctaaatctgaatcttgatgacatgatggctggccagccgcaacacttacaacgatttaatgctagttccaacatggaaaatggtgcagctgtttccaggcagaggagtaattatgtcctttctcaacaacagaagcgcaacctcaaatctcagccagcagtgtaccatgagattaggctgccacaggagtggacatactgataatgatgataaatcttttgcttgttagggtggggaatagtgtttttttaatctttttttggggtgggggtgatttaggaaaaatggtagggggttgaaggaagggggggtagaaatgaaaatgtagtagtagtcttctacaggaggggaataggtttatagaagaagaaataggttttttgttggcaattggggttaaaaaaggaagtttaatgaaaaaggaaaaaactttgttggaaaacataagatggttttattttttttgtgttggcttggttggttacagttgtagaggggttataataatattaggagcctatgaaaaaaaaagaagctagcaatgctgcaacagtgctgaaattgccagtgatatcaagttacttttgttctttttgatgggcttcgaaagtcacaacaagggaaagacaaaagcggtggatgggtcaaatttttacccttttttatttggtgctttagggtaaaaataaacaaagcaatttggaaggggctggaccatatttgcagagggattacggctccttccaattgttgaatcacagtggaatcattttgggggaatacttgtcagaagtaacatctgattccaacctgtccacccgcattactttactacaataaataataatgcaaggaattttcactatctaaaattacaaaagaaaaaaaaaaagggctctgaaaaaatactagtattttttagcctcctccagttttactaatttaagcccctttgttcttgataaa

SEQ ID NO: 85812 - DNA, 183 bp, Glycine max
  unsure (1)..(183): unsure at all n locations
  Clone ID: PAT_MRT3847_48501C.1
cgaaggcatngttgnggttagccccggaccgagaggaggaggccgaccacattagaaagggagagctcgctccccacgccgaccaaccatcgggggagattctcaggaccgggtcagaaaaggagcagcacgccgctaaagctgcgaaggctggcccactgagtgaaaacccatcaagagcac

SEQ ID NO: 85813 - DNA, 459 bp, Glycine max
  Clone ID: PAT_MRT3847_48502C.1
agtggcagggcgtgtatgattcaggaaaaagatgaatggaattttacacaagaggactttcttacagctgggtcgactgaggtgcgtcctgcaacaactctgtcgggtgctgggtgtgcatatatgaatgctatggtacatgagagttcagtgtctacaataccaggcgattttgtcatcggcgttaagttgacaaccataaacaatatgtgtgcatatgggctcaatcctggcatttcaagacctcgtcttatgggcaccattcctcagtctatttcacagcagactgtttggaatcaaatggcaacagtgagaacaccattgaattctgattctagcaagcagagctctatgcaagatcatattgaccttgtcggtggaggaatcttagtggaccaaactggagatggtatcacactcatacacaatgctgcactacacaacttggcgagagctgct

SEQ ID NO: 85814 - DNA, 359 bp, Glycine max
  Clone ID: PAT_MRT3847_48503C.1
ggttacttcaagataacaaattgcttttttatttttcatcttttctctcgttctcttgtttaaggtttctataaatcatcgatgagatacctataataatatacttattacagacagatgctaattaatttagctggctccaaaagatgtttaaatatttttggatggattcgtagatccatgtatccatatcaagctgaaccaaatccaaataattttactggacacttttaaaggttttggtgcgcttataatggctaacaaagttttctttcttgatttctaactaagttacatggattttctttattaaactaaaccgttttacaagttaaacataatgataatgcgttcagtga

SEQ ID NO: 85815 - DNA, 441 bp, Glycine max
  Clone ID: PAT_MRT3847_48504C.1
tcctctcggccgaccacgcgtccggggatccgggtgtttcttgtttggttccctgtgttgatcccttcactaccaaggtggggggacagggtgatgcatgtgttggccagttgtgcttggtggtcaatccagcaccttcaggtttgatggaaccatttctcagcagatgtgtttgaggggccaccaccaggcacatgactggtttgagaagcaaactggtggcacatatggacatttcttgctgctcatggatggattgagtctttggtggattgcaattccagcttgagcaccatttgataccaatgctatcaagggcacatttggagtaaatctcacccatggagattgattcttgcaagatgcacaatgtgccttacaggagcgtgacatctgttgaggccacactgtgggctctcaagaccctcacgactgctgctc

SEQ ID NO: 85816 - DNA, 388 bp, Glycine max
  Clone ID: PAT_MRT3847_48505C.1
ctctgctcctacattactctgtactctcctaacaatatataacgcttccatcgcttcatcccaggcgactcatcaatggctctgagagggaaccctatccccacccaaaccttttccctcccccaaatgcccagcctcatatctccccgcttaccccatggttttcaccctccgctcccgttcccaacatgtccaaaatattaagaacccattcactcctcccacagaagttcatgttgaaataacccactctatacctccccacaaaacagatattttaaaatctttgcaggattcggatgaccctaacactttgactcatcttaaacctgacacaaaatgccctcgaccacaggattttttacccgaccccctctcacatccattt

SEQ ID NO: 85817 - DNA, 170 bp, Glycine max
  Clone ID: PAT_MRT3847_48506C.1
ccccgccacttctcagcggggggggtgtatgatggtaaacgggattccgctcatgtcatatacagaagcaggaagatgtggcccccatataaggaataaggtcaagattcccaataataccgaaagtggctatatcgagcgtacaaaaatatcatcatcttcagaaggag

SEQ ID NO: 85818 - DNA, 420 bp, Glycine max
  Clone ID: PAT_MRT3847_48507C.1
tcggaaccataaacaatatgggtgtatatgggctccatcctggtatttcaggatctcgtcttttgggcaccattcctcagtctatttcacagcaaactgtttggaatcaaatggcaacagtgcgaacaccattggattttgattctagcatgcagagctttcagtcaattttctattgaccttctcggtggaggaattttagtggacaaaactggagattggatcacacttatacacaattctccaattagcaacttgttgcgagttctgcttggtataaaggctgtttaatggatgatattgacatgtctgataatgcagccaccaaaatgagtgattgcgcctcattggtacaagcgtttataacacacagcaatagtacagagcattctgatgcatgtaagtggacaaaatcagaac

SEQ ID NO: 85819 - DNA, 716 bp, Glycine max
  Clone ID: PAT_MRT3847_48508C.1
tccaatcgagcggccaaagcccttcatcagagataacttgacaaataaaatcaccatgtctatcatcccaaacttgttcggtggtagacgaagcaacgtcttcgacccattctctctggacgtatgggaccctttcgaggggtttcctttttccacaggtcacgtgccttcctctggtggggaaagcagtgccatagccaacactcgcgtggactggaaggagactccggcggctcacgtgttcaacgttgatcttcccgggttgaagaaggaggaagtgaaggttgaagttgaagatgggagggtgctgcagattagtggtgagaggaccaaagaacaagaacagaaagatgataggtggcaccgcgttgaaagaagcactgggaagttcatgaggaggttcaggcttcccgagaatgccaaaatggatcaggtcaaggctgctatggagaatggagtgctaactgttactgtgcccaaggaggaagacaagaaacctcaagtcaagtcaattcaaatatctgcctagatctttaattggttgttgctgtctctcattccaaacaagtgtgttctgttctgtctttactgtatgttgttccatgtatgtgtttatgctgtgtgttgtgctttatgtcatttgtgagggtttaatactggggaagttgaaagttttccgttaaatgtatcaataaacttttattgctttatctcgg
